United States Patent Application Publication US 2011/0183924 A1 - sequence listing, part 218

SEQ ID NO: 552555 - DNA, 1366 bp, Homo sapiens
ggggcagactctgcatatcatggggagatagacgctgctgcctttgaattggccttggtcctcacagctccaaaagagaaacaggatctcaattaaccgtctatgatctgagagtccaaagctcggcagattatgaaccagtttggcccctcagaaccgtaagtcaacctactccgatattctcatctgataaaaattcggaaccagtcacagcatgctccttcctactaaggtctccatggaccagagtagctactgcagctggtaaagatatcaggcactcctgtgggcagtgaggtcgtctaagccctgaaaacaaatcaggtatagagcaatgaacgaacattacacggacttaggtaacggatgaacgtggactcctacgtgaggtcagtacggactgcacaggaatgtgtgcagggacgagtgtctggactcgtcagaatttgtcgtgactgactttttactcggatgagtgtcggttgcacgagcaggcacttgttcagtcattgacggcggggacattcagcacaaggtgcttaatcacctcatggtagggttgaatacgtagtgtccagcatagctttgtaagaagctgcctaaggttgtgaacgtggtgggatcgccaggaatttcggctctgtaagaaaatccgaacccttactaaataagcttagcagctctagagtgcttctacaagaaacacgaagacatgggcttttggatcccgtgtatgaaatggacgcaatgaagataaaggatcacgggaacaagggtcccgggacaatgtggaccagcaacttgtccttttggagattaacttttgaacgcttggagggaactccaaggccctttcttgccgatcccttggggattctttttattaattagagacttcgctttataccagagtaacgccggtagttattggggtaatacaaatcaagggtgggcaaggcacattagtcataattgactggacgggaagaagcgaatcatggcgcccaaaagaatatacgaaggcgctccacttaacccccaaagatttacggggtaccccgttttacccggtgcccgagactcccaaagagagggaggcaacagggaagctctccccaaaacagaaaaggaaacttgacaagtgcgaaggaccaaacacacattgaggctgacagctcaccacactggggacaaaacgccaataatcgagcacaatatgagggggaaagcacagcgacatcaacacggacttgggaaaacggggatctactgacacgacaccaccatacccatttccgcggagccatagaacaggtccagtggaccattagaagtaacacagcaacgagggcgtggcgcacagaag

SEQ ID NO: 552556 - DNA, 222 bp, Homo sapiens
gactggtcctcagcattgctcttctgggtttaaccacccggtggagctactggtctctgggctgatactgggtgagtgtctgccaagagctcctgtgatgtgatctgtcttcaggtttctcagccatggattctaccacctgctctggtagaagcagcaggggagtaaagtggacttagtgagggtcgtaggttgcagtactgtttagtgcactgggtgttt

SEQ ID NO: 552557 - DNA, 221 bp, Homo sapiens
tctagacggatcccccctgtcagtcgctctgggacatctggtctcttcgggtcaatatttctttttaagttccaggtatacatgcaggaggtgcagctttataacatagataaaggtgtgtcaggggggttggctgcacctatcaacccattacctaagtattacactcggtgtgcattagctatttgtcctgatactctccccaagagcgcacggacggg

SEQ ID NO: 552558 - DNA, 104 bp, Homo sapiens
tatcttatgactgcagatacatcactgacacagtctgcatatatggtattgaacataactgatcatatgactatctgctatatacacagatactgcgccgtaga

SEQ ID NO: 552559 - DNA, 130 bp, Homo sapiens
aatgagctggtccctatttgctgattgaagaatatgcaatgcgcgattttaggcctgtcgtcgtaggcagatggcagcttgcttataattatgccctcatagggatagtacaaggcaaggggtagcgcta

SEQ ID NO: 552560 - DNA, 239 bp, Homo sapiens
cggcgctgaccactacttagacgacgcgctcgtcgctgcgctggctgggatcgtccgaggccagcttgcgggcgccgaagacggcggcgcggcgcaggaccttgccgacataggtcttgtccggatcgccctcgggctggatctcaacttcctgaccgatggagacattcgggatgtcggcctcgacgatttcggcgcgggcgatgcgctgggtgttgggctcgaggtcgaacatggcg

SEQ ID NO: 552561 - DNA, 924 bp, Homo sapiens
  misc_feature (415)..(415): n is a, c, g, or t
ggagcttgcaggtctggaagttgctctgggtgaggcagtgattgtttagtgaatgtgagggccgaggacattattgcactcttctgtaaactttgtaaacactgtggtaccttaagctgcccatgtattttaaaatttccttttttttttttttttttttgggagacaattgagggctcctctgttggctcccccagaggctggggaagtgcgcgggggctttgtctccccgggctctcaaatgtgaagaccctttgaaccctccggggggtctcagaggtggtatccttcccgatttcagcctttttggagagttgctgtggggccttcccaggtgtgtcttttcccccacaacccaagattaatttttaaatttcttctaaaaaagggtggtttcccatttcatacccggcgntataattttcagaaaatcttatattttttttttggggtaaacacaagcgtgcgcctccctatatgttttcgcccagggggtggggggtagagacacctccgggggggccctcacgagagagtgctcaaacaccacctttaggcctttggagaaatataggggggagaatacaacggcgccaatatttttatacatagtgtttctaaaaagtctgcacataatttttttatcccccccaggtggtgtttggcgccttattcaaacaggtcggtaattctcttccaatatgtgaaagtaccccttaggggtttaaacatattatacactttatccctttaatgagaccctgttaacattgaaccctttttgggaaacccttgggtggataacacatttcggtttaaatattacacaatttctttgggtcaagggtgtgcgacaataattgttgggataaatttcccattttaaaaaaacggtcttccatttttaaaacttatttttttctc

SEQ ID NO: 552562 - DNA, 1329 bp, Homo sapiens
  misc_feature (346)..(346): n is a, c, g, or t
  misc_feature (361)..(361): n is a, c, g, or t
  misc_feature (383)..(383): n is a, c, g, or t
  misc_feature (618)..(618): n is a, c, g, or t
ggggaggatcatctgcttgtgctccctgacagttgggctagcaacactggaggtactactcaactggcccgcgcgccgaggacattgcgtgtactccgaggaagttttcgtgacaaactcatggactagtggagtccaccgacgtaatagggagacgatgcatcactgtccctagccatcgcgtgcatgcacttgcgtcgtggatcacctctcagctgtgctcactcattttgcagtgtggagggccaatgtatgtgggacatgcgcatttccgtctgatgtggacacctttgcagctctcaaatgccgtcgttatgcgagccgtgacggtgttaacttcaaatgncctgagatgacattnatacgctgtgcgttgggccgtntcaggtagcttcactgcacaggttgacttctacttgtgtgtcctatccctacaggagaaatcgtggagcgtcgacagggtcctcttgtgtggaacgtagttgtcgtgggagtacgccttgggagacctgcctggtcgcagtcgattccggaggtggttgttcacattggcggaggcaccttgggacacctaccaagggccccttcctggtggcgcccgagtgcttaatggtttgngcgggttggaaccccgggtgggttccacaactctaataccacgttgctcccctattctccgaggttggggttgatgagcccccccgtgggagggccgaaaccacgccgtggtgctaaactgccaatgcgcccttgttggaggcccaaaatttccggcgatttcccggggttcccgtgaggggctggaaacttcctccatttccaaaagtttgcccggaacctcaccaaaaggagggtttggagtgctctccaggagggccgcccttggagggaaatccgtttccgcaacagttcccacatttggcgcctggcaacaaatccaaaactgggaaaagccacattgggaattagtaagggctccccccgttggaacctcttgggcctttggtaagggcccaatttacggagttcgcccttttttccccagtttccaccaaccgggaggacgccaaccttttgggccctttggacactcacaagtataggcccccgatttatccaggattttggccagtttagtgcctccgggcggttatttcacatgttggccgcccaccccccggttggaactggcaaaggagttccaccgccaacaaagaaccatttatttcccctcatttggagtgccctccccaaattgtccagaaaagaagctcccctgggggccaatataatccccggaaaagggagggcggatatgggcgcaacaaa

SEQ ID NO: 552563 - DNA, 105 bp, Homo sapiens
tatcatcattcatcattttataactttcctatcaaacaagtcctttaattatccattctctcaaaagctttaaaagctagtctgctgctgcctcctactgatcta

SEQ ID NO: 552564 - DNA, 501 bp, Homo sapiens
tcactggttcccagggaagccatgcaagggatcgggttaccgttgtattcggatgaaccataaaatggatcctctgattgacagggcagcacagcggattggactgagcagtcaggagctgtgcaggcttctcccaagtgaactcgacactctgggttgacccctatgaagtgtcctacagaattggaggggatggggccatcggggtgctgtaggaggcctcaccagcgggggggtggcactcaaaacagcaccgacgtgcaaatggtagacagccgaaggagctgtggggaggaacttctcttgggcagaacgagccgttcctaagagtacaatatgatgactgtatcaggttaagagatagtctgtggatggatcatctgatgatggtggataaatttgattgttgctttgggtgggctcctcttggggatggattatggaatgtaaaccatgtcacagctgtgaagatctggcacaagatagaatggtaaaaaaaaa

SEQ ID NO: 552565 - DNA, 795 bp, Homo sapiens
  misc_feature (172)..(172): n is a, c, g, or t
gtaacagattgcatgtatgcagaaaaaagccaacgttgtggatagtcattcaaaaataaccaaatgaattaaaatgttttctgaaaactttaagatggacatttcaaagaaaccatatgttttttcacttattatactcaatagaagcctgcatatttcataagacttttgngctattacattaattgtaatattatctaagtagaaattaaaatattttagttaaataaaaaatctaaagacggtattagatcaggaaaaaaatggggaatgggccaacacatcttaagcacataaaacaatttaataattagctgctatttatgattacagtaatcgatcatctcaaatagtttaatactttaaattatctattttgaggtaaatcaaaataactgccaattccaaattgtttaacagccagaaatggcacagatagcaacttgtgaatctattaataatttttcatctaaatgggtttggccaactgtggcctgaaagctaagaatcatttttacatttttaaatgattaaccggacacaacaatcaaatgcgggaactgttgatcaagggggtacaaagttttagttcttcaggatgattaagctcccagagactttaatgcaaagcctgctaacttgttgttaatagggactgtctgaatacttaaatttactaagaggggggttcaaagtgttctccccaccaagagaaagaagttgaaaaacaatgggtactgcaaggaatggatgttacacagtggggtttttcacacctccggccgactttgtcta

SEQ ID NO: 552566 - DNA, 353 bp, Homo sapiens
ccaatttaaaaaggttttgtaccaaaagattccatgtgtataacgttcttgaagtgacataattatagagatggagaacagattagtggtggctgtgttaaggagggggtgaggatgggagagaattgggcgtggctgtgagaaacatgagggatcctggtgatgatgggaatggtctatatcgcagctatcgatgtcagtatcccagttgtgatattgtgctatagttttgcaagatgttgccactgggggaaattgggtgaagggcacatggaatctctgtattatttcgactgcatgtaagtctacaattatctgagaataaaaatgaaagttggaaaagcacagaaaaa

SEQ ID NO: 552567 - DNA, 169 bp, Homo sapiens
gaacctggcccggatctgacaccccgtatctgcggaggagagtactcagaggctccaatatatatgcatctgcgggttcacggaaaagccagaacctgctgttttcagtggtggtgtgatcgtaaatatagtgtgtacataataaagcacatatattttacttctctag

SEQ ID NO: 552568 - DNA, 236 bp, Homo sapiens
attcccgtttgtgtcaaattaatgccgcaggctccactccttggagctggacgctcttgtgccggccgctatgggacagagtcgttacctgctcggggccgtgaacgctcagccaaaaggccttctcggccacgcgtataagattggtggctcgacagaggtactcgcccccgtcccgctccgacacattggccaggccgaggcccagatcggccctcacactctcactgacaacg

SEQ ID NO: 552569 - DNA, 299 bp, Homo sapiens
gggccatttaacctggatgccccccttttatggggataatgatgcttcccatggttaatgttttggaaaagctttttatttatagccttgtttactcagtcaagttccccatggccgtaatccttttaagggaaaccctaaagttgttgtagtttccccttcagtcagaaactgatgtttcagctaggcccagtgggacatgcctgtaatcccagctacttgggagggtgaggtgggaggatccctttaactccggagttttagagcagtcagggccacccagcgaggccctgtttcca

SEQ ID NO: 552570 - DNA, 526 bp, Homo sapiens
cacgcgtcgaaggaaaaaaatagcttgctgtcctataatatgaacaaaacacaaattaacatctcaatcaactaacctgcctattcaggtttatttattatccaatttcccaactagattataagctccctaaggatggagatcctggggttattctagtgcctggcataatgccaggtacctattaggtatcagtaaatatgtgtcaactgatagtttatcctcctctctgccactcttggaatagaattaggaatctacagtctcttccagcagattttctccttctcacatttcctgctttaaaagcaaatagcggcccgtcgcagtggctcacgcctgtaatcccagcactttgggaggctgaggcaggcagatcacgaggtcaggagatagagaccatcctggctaacacggtgaaaccctgtccctactgaaaaacaaaaatacaaaaaaattagccgggcgtggtggcgcacgcctgtggtcacagctgttcgggaggctgaggcaggagaatggcgtg

SEQ ID NO: 552571 - DNA, 477 bp, Homo sapiens
  misc_feature (142)..(142): n is a, c, g, or t
gtcaaagtaagctgggaatacaaaaatgggcgtgcgtctaaaatcccagctactcaggaggcaggagaatcacttgagcctaggagacagaggttgcagtgagccaagatcgtgccactgcactcccgattacagtcctcanttgccctgggcaatagagcaagccccgtctcaaaaaaaaaaaaaatacaaagtaggccgggagcgcgtgtcacgcctgtaactccagcactttgggaggtcgaggcgggaggatcacgaggtcaggagatcaagaccatcctggctaacacggtgaaaccccgtctctactaaaaatacaaaaaattagctgggtgcggtggtgggcgcctgtagttccagctacttgggaggctgaggcgggagcatggcatgaacccaggagatggagcttgcagtgagccgagattgcgccactgcactccagcctgggtgacagtgcgagactccgtctca

SEQ ID NO: 552572 - DNA, 378 bp, Homo sapiens
agtgattttatctaatacagttccaaggtagaaaaagtggagcaggcagggccttgcacccctctccacccccccatggggggggtggtggtagcggcacatacacaatcatagtaaatggcagaagaaaacccaattaatttcctggttaattgggcccttcccaaaaagtttccccttttggccgggcccgggtgcctcacccttgttattccaacccttttggaaggggaggcggggtggatcacttgcggtcaggagttcgagaccagcctggccaacgtggtgaaatcccgtttctactgaaaatacaaaaattagctgggcatggtggcgtgcctgtattcacagctacttgggagtctgagacaggaaaat

SEQ ID NO: 552573 - DNA, 640 bp, Homo sapiens
  misc_feature (450)..(450): n is a, c, g, or t
  misc_feature (491)..(491): n is a, c, g, or t
gattagctttttgatgtgctgctggattcagtttgccagtattttattaaggattttcacatcaatgttcatcagggatgttggtctagaattctcttttttgttgtgtctctgccaggctttggtatcaggataatgcttgcctcatttgagttagggaggattccctctttttctattgattggaatagtttcagaaggaatggtaccagctcctctttgtacctctggtaggattcgcctgtgaatccatctggtcctggacttttttgtttggcaggctattaattattgcctcaatttcagagcctgttattggtctattcagatattcaacttcttcctggtttagtcttgggagagtgtatgtgtccaggaatgtatccatttcttctagattttctagtttatttgtgtagagatgtttatagtattctctgatggtagttngcatttctgtgggatcagtggtgatatcccccttatcattntttattgcatctatttgattctcccatcttttcttctttggtagtcttggtagaagtctgtcaatttttgtgatcttttcaactaagtctggttcaatgatttttgggtttttgggttctatctcctcactctgctctgacctagtttt

SEQ ID NO: 552574 - DNA, 358 bp, Homo sapiens
  misc_feature (358)..(358): n is a, c, g, or t
ggtgctatcacagacacctgttgcatcttagatgaaagagatcctagttattgtgcaactacctgtggcattgcagatttcctgtgtacttatcaaaccaaagtagacaaggatctacaggctttggaagacatattacattaaggtgaaaacacaacattagaagtcaaacagctgataaaagcaatccaactcacttataatcctgatgaatcattccaaatatgatagacgctgttactttgaagtccaggagtgttcgatatttgcaggaaatatataattcaaataatctgattgttaacctgagagagaaggtagcccagcttgaagcacagtgccaggaaccttgtggacn

SEQ ID NO: 552575 - DNA, 213 bp, Homo sapiens
ctcacagcatacaaccgccagcaacatctcatcctgaagtagcatataaagagcctacacctagaggctgcctcaagcttggccacctggccccagcagatcatgcagctcgccctaccagcgtgcgcttctcactagagagcagatgctcaagtgcggcctccttaggagttcaagcagagcctccagtgtccttcagaccgatgcctgagc

SEQ ID NO: 552576 - DNA, 132 bp, Homo sapiens
ttggtttaaagcacaatttggcctttttttaagtgaggtttaggacaatagccacatgttttttggggttaataattttcccctttgggagacaaaattttgggcgtgggccctatttggggggttctttga

SEQ ID NO: 552577 - DNA, 156 bp, Homo sapiens
tcggagaaggccaacatcaggaggttgaagacctagcccagtttgtagtctatcaggagcctgcccaacagctctgtcgccagttttttctaattggtcagtgcccatgccatgtcaatggccgcttaatattgtgattatgttggcccttatcga

SEQ ID NO: 552578 - DNA, 637 bp, Homo sapiens
agcagctgtactgtctgggatttaggatagccgaggaagcggccggccgtgagcgctggtgcagtgggaggcactagctgagaacaggcagtcaaatcgctggtgtgctccaaagttctacttccacgaggcgctgcgggcctttcggggtagccggtacggggacttcagacagatccgggacatcatgcaggcttatgcttgtactggcccttggggaaggagcacaccgtgtcccgattgctgcgggttatgcagtgtctgtcgcggattgcaagaaaggcggaaaatttagactgttcctttgatatggaggctgagctcacaccactggaatcagctatcaaatgtgctggagatgattacacacggaattttacactgacagaaggcagtggctcgaatccagtagaaaaacttggtcaagggaaagcttgctgttccattattttgtatcaagaaaacaagagaatttgaacaaggcttcacaaaattttgaacaagagacatatgtccaaaggacgcccacgaagctcatgaagctgagcaaatgagtctcctgaactattattgcgagacaaagaagctttgggacccatcctgtttatccagaaacttttcattatgagaccttcca

SEQ ID NO: 552579 - DNA, 1051 bp, Homo sapiens
  misc_feature (484)..(484): n is a, c, g, or t
  misc_feature (551)..(551): n is a, c, g, or t
aacccactccaccttactaccagtacaaccgttagccaagagccactttaccctaatagaagtatatgctgatagaaattgatagctggcgcacatagatatagataccgcaaggtgcacaagatgaaaaattagtaacctagggcagtaagtatagcgaggacgtaaccccataataccgttcatgctatcattggaattaggactatgaaataacgtttgctagatggagagccagaggctaagacccccgtaaaccagacgagctaccataaagatacgagcatagagaagagcacacccgttctatgtatgcaagaaaatgaggtgggcgcaagggattcttcttaagggtacgagtgcaggaccaaaaaccctacccgacgtcgctggtagagtagctggagtatgtcccaaaggataggaagtccttatgttctcagacctttctaagagtgtgtagccccagctggaatcccctctnacacatcacgacctttgtttagaaacttgtacaacgtgtttaggttcccaataagagggagagcgangcatgcttttcggatcacctagggaaaacatatacctttgctaaggagtagggacgtatagagaaaatttgatggcatcccagttaggtaagtggccgtaagaaatgctaaggccaacccaaatttaatgaaaagcgttcaaaggctcaagccacccactaacctaaataaaatccgcaaaacatataaactggaaacttctcgtcatcaaccgcgagatttggaaccgagagtcctaatcacccctactaggaaagtaacctaaatgtttcagttaattaaaggtaaacaattgaaaagaacccatttctttgcctccgtcattaacaggccgtgccgatccagaagtttgagaaacaatttggatactgtacctaattaaaccaggcccccagaataattcttaacgaaattcctaaactcaaaaccaattgggttcaacttttaggtttaaccccgtccatcttaacacagaaggacccatgattgcaagagcgcgg

SEQ ID NO: 552580 - DNA, 442 bp, Homo sapiens
atactggtaattaaaatgctattgtaatccctgtggcaacactaacaaaataactttaaaatatacacttaaaagaaaaagggatttaaatgctacactagaaaatacttaatacaaaagaaggtagtcaaagatgaacagaagaacacaaaggcataaaacatagaaaaccaatttgtgaactgatagatggaaatccaaccacagcaataataacattgaatgggaatagaatgaacatgccaatcaaaaggcagagatcgttagactggatttttttttttaagctttgactatatgctgcctgcgagagacatacatactttagaaacaaagatacaaataggtcaaagcaaaaggatagtagattggctatgcaaacaaccgtaagggagcttgaggagaaatgctaacgtcagactaaataatttttttgtgattt

SEQ ID NO: 552581 - DNA, 424 bp, Homo sapiens
gcccaaaaacgcttttttgggggggtccctttaagggggttttccaggggcttctggcaggttccctttgggggtttgggggccccccccccccgggggggggaaatttttgcccccccagggccaggtttcacccccccaaaccccccaaattgtgagttaggggggggaaattttcaaattcctttcaagggttggggggaaagttttttaaaagggggaggtcctgggggacctcaaggggattcccattagggttgggaaaggggtttccccccattcccaaaaggtttttttttgccccccaaaagggaagggcccttgtttttttttccccccccttttttaaaggggtgggttccaattaaaaaaggggcgggggtttccccccattcccccaaaaaaaaggggggttggtttttca

SEQ ID NO: 552582 - DNA, 90 bp, Homo sapiens
gttatttgtacagcaaaatggcgcttgtacatctatttcccccaatgcaggatgataaatatcacgggagaatagagaatcatcaatcag

SEQ ID NO: 552583 - DNA, 142 bp, Homo sapiens
cgactctaaggatcccactcgccaatcattcgaagtcaggagttggagaccagcctgaccaacgatgtgtgaaagtcccatctctactaaaaatacataaaacagcccattgtggtggcggcacctgtaatctcagctactc

SEQ ID NO: 552584 - DNA, 108 bp, Homo sapiens
agcggaaagtggatgcgctacataatcatcgctatccccagcggcgcgaagtatgtagctgaactctgcagactctgacggaaggcaatatgaaactgatctgcgtgc

SEQ ID NO: 552585 - DNA, 145 bp, Homo sapiens
gctgcctgcgtgacgtcgctctagaggactccccggtggctcggtctagttgtggctcatccacgctgacgctgccacttctcttgtcccttctgtagccgttcttctacttctctttctctagccgctgtgtcatcgggcttag

SEQ ID NO: 552586 - DNA, 758 bp, Homo sapiens
  misc_feature (1)..(1): n is a, c, g, or t
  misc_feature (100)..(100): n is a, c, g, or t
  misc_feature (129)..(129): n is a, c, g, or t
  misc_feature (139)..(139): n is a, c, g, or t
  misc_feature (199)..(199): n is a, c, g, or t
  misc_feature (203)..(203): n is a, c, g, or t
  misc_feature (229)..(229): n is a, c, g, or t
  misc_feature (240)..(240): n is a, c, g, or t
  misc_feature (253)..(254): n is a, c, g, or t
  misc_feature (264)..(264): n is a, c, g, or t
  misc_feature (271)..(271): n is a, c, g, or t
  misc_feature (280)..(280): n is a, c, g, or t
  misc_feature (303)..(303): n is a, c, g, or t
  misc_feature (318)..(318): n is a, c, g, or t
  misc_feature (325)..(325): n is a, c, g, or t
  misc_feature (386)..(388): n is a, c, g, or t
  misc_feature (397)..(397): n is a, c, g, or t
  misc_feature (413)..(413): n is a, c, g, or t
  misc_feature (444)..(444): n is a, c, g, or t
  misc_feature (470)..(470): n is a, c, g, or t
  misc_feature (473)..(473): n is a, c, g, or t
  misc_feature (485)..(485): n is a, c, g, or t
  misc_feature (526)..(526): n is a, c, g, or t
  misc_feature (531)..(531): n is a, c, g, or t
  misc_feature (545)..(546): n is a, c, g, or t
  misc_feature (563)..(563): n is a, c, g, or t
  misc_feature (671)..(671): n is a, c, g, or t
  misc_feature (730)..(730): n is a, c, g, or t
natgtcatcaacaagtaaatgggtaaatgaattgtggtatatccatacaagggaatattcaacatttaaaagaatgaattcatacgagcatcaagatggngacatatgaatctcaaaataattatgcanagtgaaagangccagacaagaaaaaaaagacatactatatgattccattcacataaaactacaaaatgcnaaangaaagccgattggcggttttccgggnaggcgtcatcnggcggcgcattgnnacactttganggatganggatatgtncactctcttaattgtagtatgcntgtcctccacaaggngtgaaancttatcaaatagtacactttaaatatgttcagtttattttatgttaattatatctcaatannncttttcccncccccccacatctctngcctacataagggtgacacagctcttaaaanaaaaaaagattcctgctagattgtgngcngcaaaataaaanggcttcctttaaagtagaatagcctgtgaagagtgggtggnaaggnaatagaagcctaannctagaagatatatttcnaattccatctgtttctattcagcgatatttgcatacctggcttagtttgttctagattgagtgtcttcattttttttgtcttgtatgtttcggaattatagcatagcnaaacagagttgagaagagttcatctacaaaaggtatgttctttagggaaagaaattctnttcttacctctgggccacacatcccatg

SEQ ID NO: 552587 - DNA, 117 bp, Homo sapiens
ccctagtactatctcgtcatcttaaacaagctaacatgactaacaccctttattccattcaccctcctactccctaagaggcctgtccccgttaaccggactttttgccccaatagg

SEQ ID NO: 552588 - DNA, 1032 bp, Homo sapiens
aaggcacaaccacagtttttctttcttaaatttcatcactgttgatgtggttctatttgtgttcaacaacacacaacaaagtgcacactcatcaaacactaaaacacattcatagagttccatatttgccgttctgctgattttaagatatacaataacatcatacatcactttcacaagccacagttcacacatggcagcataacagttgcacaatccatcagacagatgccaaatgacctttcaaagatcaaccaccaatgtgttctgacaactttcgtgactaataccatgcatctgtgatccaatgcacctatgtggttatagcaatcggatgtagaccattcagtcactcactacttgagctaaacttctgcatggttcatcacattttcaacagtagtagtagttcaagtatgcatgttactacgtcctattcttccattcttaacagtatgtgcccatttgcaaaacaaacatgctaatcaatcagtcatagtcctataacaaagattggtaacactcgtgttatagtcatatgactggaatcgttcggtgctaagcccttaacacatgtgtccgtggacgattcatggaccgtcatgaggcaattacagtgcgtagagcccccccagacaatgtaatcataagccggggagcggaatttcccagcacgtaaaccccagaggatgcgaaaatccagcgtgccaggacccggcgattatgggaggccagtggatggccgtgaggccaagggcaagacagtaatacaggggacatagtgacacagtgcaggggaaacacagaaaaccgcaatagtacatcacggaccaaacaaagaaagagtaagagcacacgcaccacgcatctagtggaaagcgaccaaccaaaaggaggagagtgaccgaggacaaaaccagtggtcgggaacaagaattgtacgaagaacaggaggagaacgtgacacgcgcagagaaagagaggagggaaaagagtcggccagcaacaaggcaacagagacgagccggaaac

SEQ ID NO: 552589 - DNA, 429 bp, Homo sapiens
aatgaagacaaaggttggcccgcttccatttcccaaactgtccattactggaacctatgatttaaaaagggttctgggtcaactgggcatcactaaggtttttaacaaagggggtgccctttccggggtctaaaagaaggcacccctcaagctttccaaggccgtgaataaggttgtgttgcccattcacaaaaaagggactgaagctgttggggccatgtttttaaaggccaaacccatgtttatcccccccgaggtgaagttcaacaaaccctttttttttttaaagattgaaaaaaaaaccaagtttcccctttttatgggaaaaggggggaatcccccccaaaaaaaaaggcctttgggtcctcaacccctcccctccatccctggccccccccctggatgacattaaaaaagggttgggctgga

SEQ ID NO: 552590 - DNA, 279 bp, Homo sapiens
gggggaaaaaacccccccggggggaaaaaattttttttttttcccccccccagaatttttttttaaccccccccccccacccccccctttaaaaaaccccagggttttttttttttccccccccttggggggggaaaaaaaaaaaaccccctttttccccctttttttttcccccccccccccccctttttttaaaggggggggtttttttttttttttaaaaaaaacccttttttcccaaaaaaaaaaaaaccccctttttttttcccttttttttta

SEQ ID NO: 552591 - DNA, 619 bp, Homo sapiens
gctcacgcctgttagtgcccccaaaacctggatggctatgtccttcccaaggccaatctgtccttccgtctcctgctgcttctggcctcactgagtctgaagagctgtgaactaccatggccagtcctccctgagtctgaccatcttccatcctgctgctgctgctgctgctgctgcgggtcttccgtggaagtcggaccattcgtgtgtctgctatgcgccgtccgtcaccgagagatgactgccatgcttgtttgcatacgtgcccgggcccatgagactgacttcccgacatgcgtctgccgtgcgctctcgcgccactgggcgtggcacagagcccgcccttgttcgctgtctgatccgattgccgggtgtgacgcgcgcgccgctctgtgctagtagcgtggtttcttacgatccaaacctcgggggcaggtctgccccagatctggctgccatggccctcgcctctggccattcagacgacttgcgtgctaggaagtcttccgagggcgtgggacgggacgtgggagcgccccgagttctgtgtcctgacgtgggtgcgcgcgtggagggggctgctccatatctgacagggttctctggctgcagaatctcc

SEQ ID NO: 552592 - DNA, 206 bp, Homo sapiens
  misc_feature (108)..(108): n is a, c, g, or t
gcacaaggtgggagcactgccccccctccagatcccttccagttaaaacccttcccccttccctccatgtgttttcagtttcccgtttcgtttgttggactgttccantgcccctcctcctccccctatcacccatggatcgtaatgtaaaatttttttcccatgtcaagaaattattaaaaatacaggtcctttgccctttttca

SEQ ID NO: 552593 - DNA, 752 bp, Homo sapiens
gacctcctgtaaagaataaaactgtgggccgggcgcggtggctcacgcctggaatcccagcactttgggaagccgaggtgggcagatcataaggtcaggagattgagaccatcctggctaacacggtgaaaccccgtctctactaaaaatagaaaaaaaaactagttgggcatagtggcatgtgcctgtagtcccagctactcaggaggctgaggcaggagaatcacttgaacccgggaggtggaggttgccgtgagttgagattggaccactgctctccagcctgggcaacagagtaaaacctctgtcccaacaaaaaaacaaaaaaaggaattacaacccttgtgcagggatggtcctcctccgggagacaagcaacgaggggaagaggaggggacgaggggcctcttctctatacgaaacacgagcgccttggggtgagcccagaagttggaaacccaggccggggcaacttcgcgcaagaatcccattctcttacaaaaacattagaaaaaaacacattacgtcgtgggtgccactgtgcctgtgtgtccccactgtgtctgggacaggctgacggtggggacaaattggctataagcctgagaagtaggaaggcctcagttaggcaatgatcattgccatgctatccagccggtgtggccactgaatctgcgggaatggcccagttggcttgtcgccacttcacgtgctgcctggctggcttgacgccagtcacccgagggggtcca

SEQ ID NO: 552594 - DNA, 168 bp, Homo sapiens
atgtatgctggaggtgactctagtaggatccctgctgatctggtcggcgtggactggaggcgacccctctcgcaggtgtctccagcgccatcttcttcgtgccgggcttcctattgttggtgcctggagtctatcacgtgatcttcatctactgcgcgtccgtagcgg

SEQ ID NO: 552595 - DNA, 705 bp, Homo sapiens
  misc_feature (211)..(211): n is a, c, g, or t
  misc_feature (317)..(317): n is a, c, g, or t
  misc_feature (332)..(332): n is a, c, g, or t
ggaatacatatctagaaggtatgtgtacacttacaaagttagtagagaagggaagtagaagcgaagaaactaatattcaatcgtagataaacatagaggtaagagaatctgaggaaagaaaacgtggataaagagtaagacaagtagcacatgaagtacatagtcaggcaataatgtgcagcatatattagtgtattacaggcgcatatgnagttgaaacaaatacctcacacttggaacagaaactggtttacttagatggtgataaagataactaagatatatactttactatgctgttatacaagtcaataccnttaaagaagcatatntctcgacttgcagagttaatgatggactttaacaatgagatgattcctgatcatctagctaaactcaattagaagatgattgctagtggctattatactagtcattgtacaagttgactgttgagggctagaaatagcctgttccgaagagacgtgatgggtgcacgtcaactaggttatataacaggaatggttattattgttgaactaagtgacttacctgtataattatactttcaaatatacatgaagctgacactaggactgcagaagacataggtaaactttatcgagttatggagtagcgttatgtagtataatctcgtgttaatgtggaggaacaagcagactataattgtgaaccttatagatg

SEQ ID NO: 552596 - DNA, 268 bp, Homo sapiens
gcccacacactttttcccaagacagcaatatgtagtttcgatgtctaaagttcaggagctggtggtcccgatgtcatctcaactcaatggtcttactcatggcccataagtatccatggtatcaatgatcgcaaggggtcaataagtcaaggtgtaaataaggtcggcgctaacggccagaccctccagcctgtagtgagcccacccaagcgtggttgaagtacccatttccagcaaccactccctacgcccagtgcctttgcccagt

SEQ ID NO: 552597 - DNA, 181 bp, Homo sapiens
agctcggtacccccagttgtgaggtgtgatctgcggacacaagatggtctcgtgagatcatacttgacactggctactggccaccaaggtgtacactgcagaagtttgtggactacctgttttaaaccatcttcagcaaagcacaccggggctcagccctgccgctggcctacagcacatg

SEQ ID NO: 552598 - DNA, 509 bp, Homo sapiens
  misc_feature (3)..(3): n is a, c, g, or t
  misc_feature (351)..(351): n is a, c, g, or t
  misc_feature (431)..(431): n is a, c, g, or t
ctntcataaggatacctaaactagtagagatcatcacagagctaaaaactacctccctaaaacctttatcttctagttcagggttttttggtggtggtggtttcatttggtttggttttggagacagagtctggctctgtcgcccaggcgggagtgcaggggcatgatctcggctcacggcgacctccacctccggggttcaagcaattctccgggctcagcctctggagtagctgggattacgggagtgcaccaccacccccagctaattttggtattttaagtaaagagggggtttcaccaggcgggccaggctagtctcgaactcctgacctcaggtgatccacccgnctcagcctcccaaagttcggggattataggcgtgagctaccaggccggaccggagttgggttttaagatattaggctggncaggtggatagggctggaagcctcagtggtagggttactaagaaaattttagtttttcaaaagcattataatttccta

SEQ ID NO: 552599 - DNA, 402 bp, Homo sapiens
gtcgacctcatgttcgtttgcagtagcatgaggaaggggcttctgccagttactaagctagggtccttgtctgtcctaggctcagctgcaaatgcctgatgcagccatcttcacatgctgtcaccctccttcacgcacccccccagctcttttaggtagcctccgggtgtagagggacaggctgacagtctctcgaggacttgggtccatcctgctcttgttctgtgagtgcagatctcaccctgctgccggggcagtccacatgtgactatcagtatctagagttgctgttccacagtctgtataatttggaagagagagctagcctaaccctaacaagactcaccctcttaagatggtgccactcttgaggaagtccagcagcttccagtccgtcgacgc

SEQ ID NO: 552600 - DNA, 104 bp, Homo sapiens
ctagtgaggatcacctaaggtcatcagttactgataccagcttgcgttacatggtgaaaccccgtctctactacaatatactaaaattacgctgggcgtggtga

SEQ ID NO: 552601 - DNA, 105 bp, Homo sapiens
taatgccactgcgggggtcgtagatcacattttgagtagcaaaattaaacgtgggatattaaatttaataccatcacacacagcccacattgcaacacggtctca

SEQ ID NO: 552602 - DNA, 786 bp, Homo sapiens
ggcctctctggcggcctgtggacgggaggatagccggcctcattcgtggcagtgggagtatggatctccgaaggaagaggggtccccgaggcgatcgacagacttcgagttctcctgatgttgttcacatagaatggctcaagatccatgggagaacacgtaagtggaaaatctctcaggccttttccaactgaacccgtgaacgaagatatagttgtgtgcgtgcgggagaagatatgggacgacgtgtcgtcagtggccgagtagtttgcagccgagacctttattgtacgcttatgatgatgtgggccatgctaaatacgtatatctgatcacagaacaaggccgatgtctgcattgacccggggcagctgcatggctgcaagggtccgactgatgtggcatagtccaagtcggatgctagcaggtgttctgggtggatcgcgcatatgcactcaaaatgctctttgtaaaggaaagccacaacatgtccaagggacctgaggcgacttggaggctgacgcaaacgtgcagttgtgtctacgactcctcggagaaaatcccacttcaaagacgcagtcagtggctgggaagcacaacagtcaactcgcaccacgctcgtctgccttggtcacccccgctgggaagtcctatgagtgtcgaagctcaacgaaccatttcactggcctctagtgatccgtagaagacggtcaccatgatcctgtctgcggtccacatccaactttttgacattatctcagatttgtcttcagtggaagagcataa

SEQ ID NO: 552603 - DNA, 388 bp, Homo sapiens
gaccgagggacaggagtacattttatagagggctgcaggctccacacaggaaaagagctccatgattgattcagtgatgtctgacacagagcggtgcagtgaggagtgcgggccatgatgctttgcagtgtatcatagagaaaggcctccaggcaggtgttggaatgaagaggccttggggaatagacattggagttcagaggactgagcagggctcagacaaggtatcacctgtagaagatagtgattgccagtggctctgtaaggtgacccaaaggggaatctggaccgcaacatggtggactacaggagtgttggaagtctcctgcttaccattctgtaaaaacagccatctttcaagtatcagcaacgctgcgacatgtcccca

SEQ ID NO: 552604 - DNA, 916 bp, Homo sapiens
ggcagtggctaacacctgtaatcccagaacttgggaggctgaggcaggcatattacctgaggtcaggagttggagaccagcctggccaacatggtgaaaccctgtctctactaaaatacagcaattagccgggtgtggaggtgcacgcctgcaatcccagctactcgggaggctgaggcaggagaatcacttgaacctgggagacagaggttgcagtgagccaagatccagtgctttggcaacagagaaagactcacacaaaaaaaaaaaaaaaaaaaaaaaaaaatttggggggggccgggcccggaaaagttttaaaacctcggtgggggcacccgcgcccccagtagggtatagtggtgaacacggtggcacagaggtgttgcccaaggaagaaccgggcccagcgaaacaagtggctgttgcttcctccccaatataaaaaacgcgcggggcgcaacacggaaggcgttctcggaacaactccaagaagggggctcggaaggtcataacggggtcctacaccaggaggttccaagcagaacgcgatatccaatagcgggcgcggaggggaaaaaaagagagcacaaagagaaaacaaaaaggagggaatcaaaagacaaaatagaccacgaagaaaaggaaacaacaacacaaacaacaaaaaaatcacaagacaccacaccacgacacgacgagacgcggagaaacacaacagaagaacaacaacgaaacagacaagacgagaaacagccagaaacaaaacgaagaaaagaacagcgcgacagcgcgcacgacagagagacggcaaaacagaagacaggaaggagcaaaccaacgcaaacaccacgcgcaacgaacaagagaagaaagaaaagaagaggaacaaaaaggacaaggaatgaagaacacaaac

SEQ ID NO: 552605 - DNA, 251 bp, Homo sapiens
gggaaacattaagcagaccctattttcactggcgcggtaatacctatttatctgatatcctagaggtggttggaatgaagctacgtgccaatttggtgaaattttttccaaattggggttgggacgaacccaatggaaccgcttgggttttctctctattggcacaacccttgttaacgggggaaacccctctaattttaaatttctttactccttttttccaaatttaccaaaacacagaggcctttaca

SEQ ID NO: 552606 - DNA, 1117 bp, Homo sapiens
ttttttttcatcgtccaaaaaagtttattaccatgacttaaaaccatttacttgaataataacaaaaaaaatttttaaccattgaaagaattttccggtggctattacctttaaaaccagatatttgtggaatttgaatgtggacgagcttttatgtgccagttctttcaaaagaacaactccatgtgcatgtggctctccatgttaagtctcggtgactataatgtgcttctgtgtctctgtgggaatgtgaagtctccctatactgtggcaattactaagttatataaacaaatatatctcttctccatctctatatatatgtgtggcacgtgtggtgcaccctgtgccagtgtggagagagagtgtggctctctgtgagagtataagagagagtatgtcgaaatagacaaaactccgcacaacagagagagtgtgtgcgcgttcttgtgtgtctctctgtcttataacacacacgattctccctgtttctcaacccaccaccccatctacgacacgacgaaacaacatattatatattatagatatcatcatctgctgactgggctctcttgtgtattacaaaattttctccctattatacagtgatgacatgatattttatgagaaaaatgatgtgggcagggtactcccccccccaagaggaggtactctctcatcgcgacattactacacaccggtgttaaaactagttgtgtgagaaacacccacagagaccacccgcccctctcttctccccaaagaggggtgccaaccaccatattcgcccccgaggcagtcgcgatgtgcgcggcgctcactctcctgatgaaaacaggacaactcttctccgacaacccctactcgtcacagcgctggttggcctaattaataattccatccgggagagacttaccagctgacaacgacaacctcccactatgcagacaacaccccgcgccggtccttcctgcacctcgccccagaataccagccgtcataagactctggaccgctccccagtgctcaaagtcaacctcgtgttcttcccgcccccccttatccccaccccaccccacgggggatactactgtggcaacgaagcctactgtggcaa

SEQ ID NO: 552607 - DNA, 215 bp, Homo sapiens
agcacaacatcatcaaatgtgtagtgtgtgcagaagacatcacattcactgacgctttctcagtatgtcataacaggggagtgccataaaggatcttctggctgggtgtgagtggctcagacctgtaatcccagaacttcggaacaccaatgctgcattgagctgtgattgcaccactgcactccagcctgaatgacagagcaggaccgtgtctc

SEQ ID NO: 552608 - DNA, 771 bp, Homo sapiens
ttcgttcgagaacaagctgtgagatcggctgctttgccaagctcaccaacacctactgtctggtagtcgatcggaggctcagagaacttctacagtgtgttctgagggcgagctctccgataccatccccgtggtgcacgcgtctatcgcctggctgcctgcatcatcgggcgcatgtgtgtggaggaacaggcacggatctcctggtacccaacaataccacctgaccatggagctgcaagcacattcgcaacagccatcccaccacacagttgcatgataagagcgtggtggacgcgagctgtgctctcagccttgggcaatgtcacccacctgcaatgactacgtggccttgtgtccacccagacttggacagggagacagaagacaattctggcagatgttgctcaaggtggaacgtcttcacacagacatgtgtgccgaccatggtgctacgtaggaagctactgtgtcttcagcaatcagtggagtggctggtgcatcccaagacttcaaattgaagaccaggatgagctgtcctctcttcttcaagtcccccttgtggcgcggactgtgaccctgaggccgtgaggtgattgctgctgggcatggtgcgtgaatgactggtgtgccttctgtggtcttggacacaccagcacagcagctgtcagtggtggatagtgtctcgagctgaatgagcccagctaacccattgccccagctcgggatcctcatgaggctcctggtccttcaggtgcctgggcctgcttg

SEQ ID NO: 552609 - DNA, 130 bp, Homo sapiens
ggtgcttggccaactcttcggcgctgatgtgaatccgcaccggcacacgctgcacgatcttgatccagttcccggtggcgttctccgccggccacagagcacacgcactcccggtgccggcgcctcgtct

SEQ ID NO: 552610 - DNA, 367 bp, Homo sapiens
gtacacttgtgcacacttatgccttgattttcctacctccagtctcctttttctattaatccctcttgtgcgtggctgcctgtagtccactttctcacatagcactatacctcactatgcaactttggaatctctgttggctcacctttgccatttcttaatattgcattctccaaattgcgtaatctctatccagtctcttgaactaggacttggcacatggtagattccgctcagaaagtgctcttcacacttctacctgcttgactaaccccagattatctttcaagactttaatctgatcttgtgtcttagagaagcccccatacctggtagagcatgtaccatcttacatgctttaattact

SEQ ID NO: 552611 - DNA, 518 bp, Homo sapiens
  misc_feature (34)..(34): n is a, c, g, or t
  misc_feature (400)..(400): n is a, c, g, or t
ggcatatacgggtgtttctggcttgaagtctctnatgaggttgtagtcaagatggcagttaggaatgtagtattatctgaagactcaactagggctggagaatccacttcccagattactcactcagagggtgttggcagaaggagtcagtacttccctgctgcttgcaggcctctctgtgggttctttagtatcctcacaacattggcagctggcttcttccagaaccagaggtccaaggaagagcaaggcagagccaaagtgcctttggccttgccttagaattcaggttctgttgtttctgcattgtcctagtgattgcagtcattcctattgaatgtgggaggggatgacacatagtgtgaataccatgccacaaggctcgttggggccatatttnaggctggctaccacagtgagctacactgataaggatctttgagcatcatattaaccatggattttcagatttcaacatctgtcaaacaaaaaagacttaacaaagattcaacaggctt

SEQ ID NO: 552612 - DNA, 587 bp, Homo sapiens
  misc_feature (236)..(236): n is a, c, g, or t
tttgaagacttcctcttggctccaaggagaggggtttcctggtttttacacacagggcccccttggcgcaaaagccttggggaaagaaaaaccaaattggtttttatgtcctcttctccccttcaatctttcagcaaaaaattaactcccttaagcccagacatttgttgagacctgacccctagtcattggttaccagtgtgtcaggcaatttggactttccagtaaagcccctnaaatggcccctgtcaaaagagcagtggttccatttttaaattgtggatcttcaaaaaaattccgcccttttcatttcccttcctgaaagtcaggggccgcttgtgaaaagttgttaaaccacatgctaaatgtgaaatgtcaaccccccctttaaactttccctgttcaaagcatcaaaagaaaacttcattgggttttaaaggggctttttgatttttggtagccccttgaaaaagggagtttgaaagttgttgtaaactgttaacgattgtctgcccctgtcccccccgaaaacccaagattgtttatggaaagaatctttaaaaaagctggaacccgtttggcttgga

SEQ ID NO: 552613 - DNA, 313 bp, Homo sapiens
ttttagagcatccatctacttctccagctctgtgcactcaccagacagagcctcctgctccgccctcttcttctggcgatacctagtgcctgctgactgtgttttgctccatttttgcagcttcttatgcagtgtctcaccctgtacttttgctgctaccatcttctctccaggaggatcgtaagtgttgggacgggcagacccacagagaacacctgcagatgggaggctcctatttggaggagcccctggtagagaggctgggctgaggagaccccagataggactctgggctcatacagatgccactatc

SEQ ID NO: 552614 - DNA, 269 bp, Homo sapiens
  misc_feature (2)..(2): n is a, c, g, or t
  misc_feature (11)..(11): n is a, c, g, or t
  misc_feature (105)..(105): n is a, c, g, or t
gngggcatccngaaggcatcccccacacacagccccctgatgaagctctgagcccacccagcatcctgtcctgagaccctcatctctaaaaagcgaataaaaacnaaaaaaacaccaaaacaaccaggatgtctcccatgcactccacttaagtgtggagacttaggctgatcacatcactgcactccagcctgagtaacagactgagaccctgtctcaaaaaaacaaaatgagacaaaaaacctgctcgtaataaagtgtgaaattgc

SEQ ID NO: 552615 - DNA, 211 bp, Homo sapiens
  misc_feature (98)..(98): n is a, c, g, or t
ctgtgtcgggtggttatatacaagagaattttccattccttaaggctggggaagactttctaaaaatatagtctgagcacagtaattgtctttctttnccttttgttgtttgtttttaagcagtaagatttttttttttttttttttttttttttttttttggaaaaaaatctcgctctgtgctccccgggctgtggatgttcaggggccc

SEQ ID NO: 552616 - DNA, 336 bp, Homo sapiens
tctcaatgtttctgcctgggtgcactggctcgcgcctgtgattccagcactttgggaggccaacctggatggatcatttgagccaacagtttgagaccagcctgaggaacatgacaaaaccctgtctttgcaaaaaaaaaaaagaaaaaagaaaaattagccaggcacggaagcgcattcctgtggtcccagctacttggggggctgaggtgggacaatcgcttgagcgaggttgcgggggtttggagggcgatggaggggtgatcgaggttgcagtgagctgagattgcactactgcactccagcctgggcaatagagccagaccctgtctcaca

SEQ ID NO: 552617 - DNA, 141 bp, Homo sapiens
gctaatctgtactcattgcgacaggaacttcggcagcttcgagcacattttgtataaaacgcgtcgagtattatctttctcagtctatgttgttgtcaactcatcttgagtcacctccattcaccatggaattcatacacc

SEQ ID NO: 552618 - DNA, 208 bp, Homo sapiens
aagacttcaaagttagattctggaaatcaaataccacgagtacttcagagcgattcctaacaatgagctatggcaaagcacctcattacgcatcactgatgaggttagtagaggacaaaatgagttataccatacgatgtactgtatatcacatatgaattgtcacatgtatatacagctgacacatctacgggtggaggagcagctg

SEQ ID NO: 552619 - DNA, 244 bp, Homo sapiens
attggcacacagtggggatggagtctgtcatgtgtccattctctcacgccttgctgtacatgtatcaatccttatcccagaagatcctatttcgactatttagactgctttagattacatacattagaggattaaggaatccatagatgttagtccttggaactgctacttcattttcttagatttgtcctgatcaggcttggggcctatttacagattagttttaaagatttgcattaactta

SEQ ID NO: 552620 - DNA, 134 bp, Homo sapiens
ggaaaacttattgttgtgacccgaaaaagttaattttaaaatgtggggcaggggcagtgacatttttgtagtcccaaaagcccaaaattatgggaaaaaaagttgatttttaaacaggggggggggctttttta

SEQ ID NO: 552621 - DNA, 512 bp, Homo sapiens
  misc_feature (115)..(115): n is a, c, g, or t
  misc_feature (123)..(123): n is a, c, g, or t
  misc_feature (278)..(278): n is a, c, g, or t
caacgcagctcccaatcaataaggaaccaactgcgcgaggaaggtgaccgagcgcccgcgctgcccaatcgctcgctcgcgcactcagacgcgcgccacaacagcgcgccccaanctgcgcanctctgcaaaagtttctgctcgggatctggctctcttccccttggactttagaacgatttagggttgacagaggaaaagcagaggcgcgcaggaggagcagataaacaccaccttctgcagttggagggcagggccagcccccgggccttgcaacnttccttaaggccccggtcccgggccggccccccgggaaggccccgggggggcccggaacccgccactatccagcagcagcctcggccaggaggcgacccgggcgcctgggtgtgtggctgctgttgcgggacgtcttcgcggggcgggaggctcgcgccgcagccagcgccatgcaaaactacaagtacgacaaagcgatcgtcccggagagcaagaacggcggcagcccggcg

SEQ ID NO: 552622 - DNA, 114 bp, Homo sapiens
  misc_feature (45)..(45): n is a, c, g, or t
  misc_feature (77)..(77): n is a, c, g, or t
caccaagcagacagatgacatgatcctgctggacgacaactttgnctccatcgtcacgggggtggaggagggccgcntgatcttcgacaacctaaagaagtcctttgccgaacc

SEQ ID NO: 552623 - DNA, 801 bp, Homo sapiens
caggcattttcggatccgtttttgaccggttccccttcggttgtaccgccgatactctgtatctactcctatggccttgttccccgctgatgtcgtggtgacgggccttgtgccgggactcgtcgcctaatcttggttgcggactcaatatctgatgtaccccgtcgccgtgccctgcatattctccggggttctcgctcttctcgccccggggggggtttttgagaatgatactctcttgccacaagaagcggtgggcccgtgtgtcctccccgagataattgttgttccgccccgccccctttgggtaacgaccatttcacgtcgggaccaatttacacgaggccccacccgagagggtgtgcggcaggttttcccgcgccgtgtattctggaaggtgcccgacgccacgttgcgccccaaactcacgacgtggcacacaactgtttgaaaattgggcccgggagtattaattcgcaagaaatgttttttggtaagaaaaagcgcactgttcgcacgagccccagggtgggttatctttttttgtgcatataacaaggggaaaatgtgcacttgggcagagaacccacatttaaaatatggggaggcacgcgggcacaacacattatatcggtttttccacatgtgaaacacgaaagctgctacaaggccccaaggagttttctaaatccaacattttatatgttggccccgaagcccacgagaatcatactctacttggaaaaaccccttgaaaatttttttgggcccccattaccccctaaaccagggcccaaaaaa

SEQ ID NO: 552624 - DNA, 790 bp, Homo sapiens
gaccgccgagaccgcgtccgcccggagcacagagcctcgcctttgccgatccgccgccgtccaacccgccgccagctcaccatggatgatgatatcgccgcgctcgtcgtctgaaacggctccggcattgttgcaaggccggcttcgcgggcgacgatgcccccggccggttttcccctccatcgtgggggcgccccaggccacccaggctgtgatggtgggcatgggtcagagaggattcctattgttgggcgacggaggtcccagagccacgagagggcttccttcaccctgaagtttaccccatcgagccacggtttcgtttcacccaaacctgcgaccgacctttgcgagaaaacatattctgggccaccacaaccttttctaacaattgagctgcgtgtgggctccccggaggatgccaccccggtggcttgcttgacccggagggcccctcctttgaaggccacaaagggtcaaacccgctggagaacgattgacccagattccatggtcggaagacacctgtcaaagcacctccacaagcccattgtaccgtttggtttatcccaggcgtctgtggcatattccccttgtacggccttctgggcgtggtacccactgggccttctgtggaattgagctcccgcgtggaccggggtatcacccacacatttgtgcccaatctaccaagggattatgccctacccccatttgcatgcctggcgttgggacctggctgggcggggacctgcttgcttaccgtgcatgaagatcctaccgagcgcga

SEQ ID NO: 552625 - DNA, 1950 bp, Homo sapiens
  misc_feature (1677)..(1677): n is a, c, g, or t
cgccaagtttcaaacagcggaacaaactgaaagctccgtgtgccagacccctactctcggcgcagccgaggtagatgcctcgtgttctgttatctgtgtgtagtcttttcttattcttctgtttttgttattcttgcacgagaccatctcctgagtctgtgatagagagagagacagaagagagtgtcagttcacagaggagcaggctgcgatgacacaaccacacacacctgtcaggacataagcgagggagcgcccagatgagggagagcctcttctgagaagacataacagtgagaggaagaacgagctcgctgatgacagaagagacaacccggcgagagggtgcttggtgctagtgtgggcgcccctctctcttgcggcgtgctctctttcttacagacttgcgctacacagcgtgcgatacatatctgtctgcgcgacttagcgatgttacagcgtgactgtctactctctacgtgcgacatactaggaaatgatgagcgcgcacccatgctattttctcctcgcacacagcacagaacaccgctactactctatcactatctcgcgaccgcattatcattttttgttgtctgcaaccacactatgaccaaacctcctctgtcgtttcctacttacctatctgctaccaatcttcgacatactcatctcctaccctaccaccacacactcaaattactctacgtagacctccccactcgctacgcccaaccatctataaacatacacaaacagccttttcttgctatactacagcggagaggggagtaatgtttgtgtttgcgtgggtgagagcaaaaagactccgtggggacgatagagtgtgataccaacacggtgcgtgacgcgggagacgtgtcgcctgcgcctgttgcgattgttgcgtgccaagcacagagaagaggcacttgacttgcgggacagaaccgcgccatatctcttccaatgtgtggttcgcgagtggcggggcccacacgcgtgctagagatgagatatacataaaacgcgacaagatcaatctgacatgtcgaattatttccaaacatgagagcgtggtgtgtgacacaaacaacaatcatgtacggcatgtgggacggctggccataatcgggcgtctctctcttaattcaaatgataatccaacagactcgcacagctggagcaactggaagagatgcttcatttgttgtaaaccccccacaggtggttccattcttctacttctacccgagagctattctagtgggccgcgcacacatctagcggtgattaatagcatatgtacccacttagggagaggaactaaaaccccgggtgttaaccctttggtcacattactctaggggggcaaccactactgtagcggccgagacaacggtttaattacgagatatattttttcaatacgtggtcgaacgtacgactctgttggtgcgaagagagtattaccgcagtgtatgccgcttgtcacagcaaaacggggtgtgacgtgaacaacagaaacatgtgataccagaccaaggtgacgagagagggggcacaccacaacagcaggtgttgttcacaacaactcacttgcatttgtggttgttgtcccacaacccatattagagctagctcagggtggaagaagcggtccacccaggagctgtnaacaatatctctagtggaggagcagcacacaagtagtgtcaccccgacgtcagtgtagtgaagagagacgcgagacctacctccggtcggctaacttcgaggcgtagcggacgcagttctgtagcgatcaaaacaatagtcatctaatgcgcagtctaccatactactagcggatgtgacgatgatccctagtgacgccgtccatggagtaagcgtcacacaccgggcgtcgatgggactgctacaaatataaacaccactacagttgttcgc

SEQ ID NO: 552626 - DNA, 263 bp, Homo sapiens
cctcggtaccttctctatcacatcaccaggctgcacactttccaaattttacactctgtcacctctgaatgcttgctgcttagaaatttcttctgccagataccctaaattatctctctcaaattcaaagttccccagatctccagggcagggggaatatgccaccagtctctttgcatagcaagagttacctttattccagttcccaacaagttcctcatctccatctgaggttacctcagcctggacttcattgttcatat

SEQ ID NO: 552627 - DNA, 1099 bp, Homo sapiens
  misc_feature (772)..(773): n is a, c, g, or t
  misc_feature (789)..(789): n is a, c, g, or t
  misc_feature (873)..(873): n is a, c, g, or t
  misc_feature (1019)..(1019): n is a, c, g, or t
  misc_feature (1030)..(1030): n is a, c, g, or t
  misc_feature (1073)..(1073): n is a, c, g, or t
  misc_feature (1086)..(1086): n is a, c, g, or t
cgcctgctcttccctctccttctgcgttcgctccccgccctcctcccgcgcatcacccctcatccttccccctgcgctctctcccctgtgctccctgtcggggcgtgtcgtgtccttcgttgtcacctcgccctgtccgtccgctcgccccactggcacttgctttatgtcaggcatctcagtcgtgctcgtcccggatcgtccctgaacgatgtccgctttgtgcaactgcatttcgagagagaaggttttgtggtatccttgtctataagctttgatgcatgtttcagtttaacctggcgtactgcaggagtttatgttgcttgtctacaccggttgctgtttattctcacccaaggtgggttcttcactgtattagtgtgtgcagggaggttaggataatgcttaactttctgctaatgttttctttgcaatttatgaatgggtgagcaatcctagtgcatcttgtatgtaggttaccacattgtgcagttattaactagttgctgtttcactatttctgccatggttatttccagtgttcttggtcattagcattaaaaagtagctctgtgcactgtgtggtgaagattcttgactgcttgcagcttgtattcaagaataggctcttgctactgtattccctgacaactcctttgcctcttactcagcattcttagcttgttacttcattaccgatcaatggtagcattgtaccatgtcttgtgacagcactgtttttaagtcacgtaatactatctggatcaacctnnccatcatgtctgtttncctggttattttttggttgttatttgaccagtaaaatttattttgtaataccaaataggatttaagaaaattaacgtatttctntactatggaaaacgcacattgtcatttgtgacatcatctatattaaatatggttttcacattagttatttgtcacttacttggaaaatgatgctgttaggtcctggtattaaaaatctagaaaagacttgttggtttatgtgctgnaatgtctttanttataataatttaactactatttacttcatttcggatcctgtntaacaaagatacntatacatccatct

SEQ ID NO: 552628 - DNA, 597 bp, Homo sapiens
  misc_feature (41)..(41): n is a, c, g, or t
  misc_feature (94)..(94): n is a, c, g, or t
  misc_feature (96)..(96): n is a, c, g, or t
  misc_feature (103)..(103): n is a, c, g, or t
  misc_feature (115)..(115): n is a, c, g, or t
  misc_feature (119)..(119): n is a, c, g, or t
  misc_feature (121)..(121): n is a, c, g, or t
  misc_feature (136)..(136): n is a, c, g, or t
  misc_feature (148)..(148): n is a, c, g, or t
  misc_feature (151)..(151): n is a, c, g, or t
  misc_feature (153)..(153): n is a, c, g, or t
  misc_feature (156)..(156): n is a, c, g, or t
  misc_feature (168)..(168): n is a, c, g, or t
  misc_feature (170)..(171): n is a, c, g, or t
  misc_feature (176)..(176): n is a, c, g, or t
  misc_feature (180)..(181): n is a, c, g, or t
  misc_feature (185)..(185): n is a, c, g, or t
  misc_feature (199)..(200): n is a, c, g, or t
  misc_feature (208)..(208): n is a, c, g, or t
  misc_feature (215)..(215): n is a, c, g, or t
  misc_feature (218)..(218): n is a, c, g, or t
  misc_feature (220)..(220): n is a, c, g, or t
  misc_feature (225)..(225): n is a, c, g, or t
  misc_feature (232)..(232): n is a, c, g, or t
  misc_feature (236)..(236): n is a, c, g, or t
  misc_feature (238)..(238): n is a, c, g, or t
  misc_feature (243)..(243): n is a, c, g, or t
  misc_feature (245)..(246): n is a, c, g, or t
  misc_feature (251)..(252): n is a, c, g, or t
  misc_feature (255)..(255): n is a, c, g, or t
  misc_feature (257)..(257): n is a, c, g, or t
  misc_feature (262)..(262): n is a, c, g, or t
  misc_feature (270)..(271): n is a, c, g, or t
  misc_feature (287)..(287): n is a, c, g, or t
  misc_feature (371)..(371): n is a, c, g, or t
  misc_feature (517)..(517): n is a, c, g, or t
  misc_feature (528)..(528): n is a, c, g, or t
  misc_feature (571)..(571): n is a, c, g, or t
  misc_feature (584)..(584): n is a, c, g, or t
ctcgcattatgaaggccacatctgtgctttgtaagcccacncccaaaaatagttctgttcactttctgcatggtattccagtgtctgccatacntnaaaaatncttgccactgtnttangntcttgactcttcatntgtttcagaatngcncntcnactgtattctgncnnccccncgcnntatngcattttgttgtanncaaatganaatggtngcntncccangcctgtnaccncnccccncnnccccnnatntnttttntcaacctnnccatcatgtctgtttncctggttattttttggttgttatttgaccagtaaaatttattttgtaataccaaataggatttaagaaaattaacgtatttctntactatggaaaacgcacattgtcatttgtgacatcatctatattaaatatggttttcacattagttatttgtcacttacttggaaaatgatgctgttaggtcctggtattaaaaatctagaaaagacttgttggtttatgtgctgnaatgtctttanttataataatttaactactatttacttcatttcggatcctgtntaacaaagatacntatacatccatct

SEQ ID NO: 552629 - DNA, 555 bp, Homo sapiens
  misc_feature (495)..(495): n is a, c, g, or t
cggagacgtggtctcaccaggtgggccagcgtgaactcgaacttctgacttcaaaagatccacccccctcagcctcgcaaagggctggggattacagatctaggaaagaaggacacagagacagggtacagggaagtccggaaagctgtcccggatgccggggaaagcagatactctagaagggaaggctccctggagggaacttagacagcaaggccagatgcacatcccgggaaggacatccagtgtccgagaagaacagatgatcccggtatttcaagacctcgtgtgcacttatttagtgaaccggcccggctcccacagaacacagcaattcctcaggctaagcggccggttcttaaatccatccggctaagtaaaggtggggtagaaagagatacagaggggcggtggaatttcccacataccctccttccaccaagtgggaacatcctgggaaatgggaagagcacaagaggagatccagggcaaggncatggggatattcggaaacttgaatattgggtggggtgcagagataaagaccttttccat

SEQ ID NO: 552630 - DNA, 732 bp, Homo sapiens
  misc_feature (461)..(461): n is a, c, g, or t
  misc_feature (465)..(465): n is a, c, g, or t
gtaatttcagatagtaacaaatccgtagattttgtcatgttgtgaaggagcaccttgttacaagaggtaatttgtggcccatgaggggcctcagagggccccaatcctaaatgttgtacgttcattaggatgaatgcctaggttgctctagggtgtaccgttggagagagagctgactgtgtgtgggccctgtcagagatggcttcgagggggtgagaattggttcctggaccggagacctcttggtggattcttccatcaagtgggcgggatgaattcctgaaggaacatttttccttctgaggaacaggttgggtccttctttgtaagaaaagttttttgtgtcccaggggcccagggtggattgaagacctcctgccgaccttgaagccccattaccttggtcaacatttttggggttccaaaaacccctcggggggagtagaggggagggcaaggangggncttccttctctttcttcttccctttcttgggaggggtccccaaccctgggatgggatggggtggggtttttttttttgaatccccccctgggtaccccccccctgggttccccaacgggattccaagggcaggtgggccctcaacttagggaagggtcgaggttccttttggaggcttgggcccctgggccaggcccggcagcccggagggtggggggggcctcagtggggggttttgccttgccccccgccccattaaaatttaac

SEQ ID NO: 552631 - DNA, 1225 bp, Homo sapiens
ctttgcagataaatatggcacactagccccacgttttctgagacattcctcaattgcttagacatattctgagcctacagcagaggaacctccagtctcagcaccatgaatcaaactgccattctgatttgctgccttatctttctgactctaagtggcattcaaggagtacctctctctagaactgtacgctgtacctgcatcagcattagtaatcaacctgttaatccaaggtctttagaaaaacttgaaattattcctgcaagccaattttgtccacgtgttgagatcattgctacaatgaaaaagaagggtgagaagagatgtctgaatccagaatcgaaggccatcaagaatttactgaaagcagttagcaaggaaaggtctaaaagatctccttaaaaccagaggggagcaaaatcgatgcagtgcttccaaggatggaccacacagaggctgcctctcccatcacttccctacatggagtatatgtcaagccataattgttcttagtttgcagttacactaaaaggtgaccaatcatggtcaccaaatcagctgctactactcctgtaggaaggttaatgttcatcatcctaagctattcagtaataactctaccctggcactataatgtaagctctactgaggtgctatgttcttagtggatgttctgaccctgcttcaaatatttccctcacctttcccatcttccaagggtataaggaatctttctgctttggggtttatcagaattctcagaatctcaaataactaaaaggtatgcaatcaaatctgctttttaaagaatgctctttacttcatggacttccactgccatcctcccaaggggcccaaattctttcagtggctacctacatacaattccaaacacatacaggaaggtagaaatatctgaaaatgtatgtgtaagtattcttatttaatgaaagactgtacaaagtagaagtcttagatgtatatatttcctatattgttttcagtgtacatggaataacatgtaattaagtactatgtatcaatgagtaacaggaaaattttaaaaatacagatagatatatgctctgcatgttacataagataaatgtgctgaatggttttcaaaataaaaatgaggtactctcctggaaatattaagaaagactatctaaatgttgaaagaccaaaaggttaataaagtaattataactaaaaaaaaaaaaaa

SEQ ID NO: 552632 - DNA, 913 bp, Homo sapiens
  misc_feature (890)..(890): n is a, c, g, or t
  misc_feature (892)..(892): n is a, c, g, or t
ctttgcagataaatatggcacactagccccacgttttctgagacattcctcaattgcttagacatattctgagcctacagcagaggaacctccagtctcagcaccatgaatcaaactgccattctgatttgctgccttatctttctgactctaagtggcattcaaggagtacctctctctagaactgtacgctgtacctgcatcagcattagtaatcaacctgttaatccaaggtctttagaaaaacttgaaattattcctgcaagccaattttgtccacgtgttgagatcattgctacaatgaaaaagaagggtgagaagagatgtctgaatccagaatcgaaggccatcaagaatttactgaaagcagttagcaaggaaaggtctaaaagatctccttaaaaccagaggggagcaaaatcgatgcagtgcttccaaggatggaccacacagaggctgcctctcccatcacttccctacatggagtatatgtcaagccataattgttcttagtttgcagttacactaaaaggtgaccaatcatggtcaccaaatcagctgctactactcctgtaggaaggttaatgttcatcatcctaagctattcagtaataactctaccctggcactataatgtaagctctactgaggtgctatgttcttagtggatgttctgaccctgcttcaaatatttccctcacctttcccatcttccaagggtataaggagcctctggttgggggtatccaatctcagactcaatactacaggtgaacaatcgctttaagaagccgtatcatggtcaggcactccaggcaattcatgtacacaacaccacgaggaatgagttgctcttacaggaacgtcttctgggacttgaaaattagatntncgcacacaaaccaccagagag

SEQ ID NO: 552633 - DNA, 268 bp, Homo sapiens
gcctcgttcccctcaaggaaggtctgcgacacctcaagctcgaagtcacgccgcagatcacgccggagggcaacatcatcctcgacgtggacatcaacaaggacacccggggcgagaccacgcctgccggcatcgcgatcaacaccaagcacgtgaagacccaggtactggtcgagaacggcggcacggtggtgatcggcggcatcttcgagcaggtcgaccgggatgaggtgtcgcagacaatcttgagggatcctctaagtcacct

SEQ ID NO: 552634 - DNA, 831 bp, Homo sapiens
ctttgcagataaatatggcacactagccccacgttttctgagacattcctcaattgcttagacatattctgagcctacagcagaggaacctccagtctcagcaccatgaatcaaactgccattctgatttgctgccttatctttctgactctaagtggcattcaaggagtacctctctctagaactgtacgctgtacctgcatcagcattagtaatcaacctgttaatccaaggtctttagaaaaacttgaaattattcctgcaagccaattttgtccacgtgttgagatcattgctacaatgaaaaagaagggtgagaagagatgtctgaatccagaatcgaaggccatcaagaatttactgaaagcagttagcaaggaaaggtctaaaagatctccttaaaaccagaggggagcaaaatcgatgcagtgcttccaaggatggaccacacagaggctgcctctcccatcacttccctacatggagtatatgtcaagccataattgttcttagtttgcagttacactttaatgttcatcatcctaagctattcagtaataactctaccctggcactataatgtaagctctactgaggtgctatgttcttagtggatgttctgaccctgcttcaaatatttccctcacctttcccatcttccaagggtataaggattttctgtgtgggttatctctcgaattcaatatacaggttgcgtcatcgtgtaagatggctattatgatcatgcatccaaggcaatttctgacttactcactagggggttgcgtgtgttctagagcggacttccttgcgcaatttggaatttagagt

SEQ ID NO: 552635 - DNA, 542 bp, Homo sapiens
ctttgcagataaatatggcacactagccccacgttttctgagacattcctcaattgcttagacatattctgagcctacagcagaggaacctccagtctcagcaccatgaatcaaactgccattctgatttgctgccttatctttctgactctaagtggcattcaaggtaaggaacatcaaaggatacttaatttgtaagatgagaaataggaataggtataaattctaaaaatacagaaataatgtatttgtaaaagtttcactgcatgcttataaataagagggaaataaatagagattccctcagatcataaaacttatatgaattgaagtgagagaaacaaatagaataagagaaagagaaggaaaaagggaaggaggacagaagagatggggaagagggaggatagagagagaaaatgtgagggaatgcggacagagatgagatacagatacttccttacctaactaagctcaatgaaccacatgaactgtgcttaagggtttgactttataatcaacaagctgcaattcttttcttc

SEQ ID NO: 552636 - DNA, 1153 bp, Homo sapiens
  misc_feature (36)..(36): n is a, c, g, or t
  misc_feature (808)..(808): n is a, c, g, or t
agcgggcgctctgcattgtggggtggcgcgcggcgngcgggctaccgaggcggggccgggcgggtgagcgttcgcggggacgagggccatgggttactgggaggcggggctatcggccagaggtagtcggacgtactgttcccctaggcgacgtgactgtctaccgtctggggtcgtactgcgggtaactgcagctcgtgctgccgcatcgcatctgggacagtgtgggcgctctataacccttgtacagatacaggtgaatgactcaggggactcgtcactaggagccgacggcaatgcgtggaaggaaggctcgcaaacatatgatgtcgtagcgaagacctggtcatgagttcgaagagcgatgttcgtccctctcagtacgcacatattagacggctcgcacgactcctctgacaaaattgactagaccgtttccaaatccatctcaagccaagggaaggtttgctcgaccatcattactgttggacaattatcgtaaggccctcatggagcgtgggcacggatgtctcgcacaagggtgcaacatgatcgatcgaggtgcagtgggaaggctccacaactcgggtactttcgcgaacctacactggggtacttgcaatcggcatgctatggactgagagggtgtagcgatttgttggctgttttgggagtcaaatattaacatatcatgggttattgattcaccacggtgggcgtgaaattcattttcaagaaaaccagctttcacgcctggaggttgcacccaattgcaaggacacaacagatgctttttcatggaacggancgtagaaatggtgagacacaggagacgtttccaaatacggatagagaggagacgcacatcaccttccactgggaaacgtttgacgttctcctaggctcaacccaaaggaattatgtcccgatgaggaggaaggaacgaaactgtttgtgggaagcctcctgtgaggtcggaaagcgccgggtcgagccactattcaggggttaaaacaggggtttcgggcaacaagggtattcagtcttaaacggcccacgcggcgcaaatgcggtgggccgttggcactctaatcgaatggttaaacgcgcgcttccacaattgttcgttgaaagcaacgcataggagggatag

SEQ ID NO: 552637 - DNA, 253 bp, Homo sapiens
tcaagcgattctcccgcctcagtctcccaagtagctgggattacaggcacctgccaccatgcccatctaatttttagtatttttagtagaaaaggggtttcaccatattggccaggctggtcgggaactcccgacctcagatgattcgcccgcctcggcctcccagagtgctgggattacaggcgtgagccaccgcatccggcctgcagtgttacgatcgcgccactgcactccaggcgcgatccctctactg

SEQ ID NO: 552638 - DNA, 219 bp, Homo sapiens
ccacgcgtccgttttaaaaatacagatagatatatgctcagcacatttatcttatgtaacatgcagagcatatatctatctgcatgttacataagataaatgtgctgaatggttttcaaaataaaaatgaggtactctcctggaaatattaagaaagactatctaaatgttgaaagaccaaaaggttaataaagtaattataactaaaaaaaaaaaaaa

SEQ ID NO: 552639 - DNA, 176 bp, Homo sapiens
gagtagtgatgtgtgctcctttaaaggggtatttcgacttaagtagactgagctaaagaagattgccctcatcagtgtgagtgggcatcatcctacccattgagggcctgaatagaccataaatgcagaggaagggcaaatttgctctctctttctttgagttgggagctgagcca

SEQ ID NO: 552640 - DNA, 996 bp, Homo sapiens
gtgctcatgcctgtaatcccagtgctcaagaggctgaggcaggaggatcacttgaggccaggagtttgagaccagcctgggcaacatagcaagactccatctcttaaaacaaaaaaagtgttaacctctgtggtataacatatcaaacatttattgagtgtccagttatgttataggacttggtatgggctctataacggtgcagtaataacccaagtgccttgtgagagctggatagtctaatataagagataaaatacatacctaagtaacattacaaggcagaaggggatatggtccttagaaagctatgaagtattacaaaggttagaagaggacgattgcgcacccgaggtcaccattagttgttacccaggggaccgaggggtgtgtacttcagacaaaggagctcagaacaaacacgacaaccctttcatttcacacgactgggtactacaggtcaatgtgacacttggccatgcgggaacgggcactctaaggtagaagacaatcagtcatgcggctaacggacattaaaagacttacatggcagagttgaactagcaagacgccatcacacggacattgtgctctgtcccacgtcacatgtgggcgaggacactgggactgtcagggtggcgaaggtgcaaagtcggagaatcatcttggccggtcatgcgcgagtccatggacggcgaccgccggcaggacatggggcccaaagcacaggtggactctacagcataacggaacgcgtctggaggtcggaaactacctacgaaaataacacaggtgcaggcgcacacgccgacgcggcacggcacagctggaggcatttcaagcgccaaacgcccgaccacagtgcgagacatcattaccgcggcactaacacacgtgatcgcgacacgccagcgacaacaagcacacgggccgcggcgaatattaaccaaccgaccgcgcgctatagacctcaccacctgacaggggtgaagaaca

SEQ ID NO: 552641 - DNA, 1188 bp, Homo sapiens
ctttgcagataaatatggcacactagccccacgttttctgagacattcctcaattgcttagacatattctgagcctacagcagaggaacctccagtctcagcaccatgaatcaaactgccattctgatttgctgccttatctttctgactctaagtggcattcaaggagtacctctctctagaactgtacgctgtacctgcatcagcattagtaatcaacctgttaatccaaggtctttagaaaaacttgaaattattcctgcaagccaattttgtccacgtgttgagatcattgctacaatgaaaaagaagggtgagaagagatgtctgaatccagaatcgaaggccatcaagaatttactgaaagcagttagcaaggaaaggtctaaaagatctccttaaaaccagaggggagcaggctgcctctcccatcacttccctacatggagtatatgtcaagccataattgttcttagtttgcagttacactaaaaggtgaccaatcatggtcaccaaatcagctgctactactcctgtaggaaggttaatgttcatcatcctaagctattcagtaataactctaccctggcactataatgtaagctctactgaggtgctatgttcttagtggatgttctgaccctgcttcaaatatttccctcacctttcccatcttccaagggtataaggaatctttctgctttggggtttatcagaattctcagaatctcaaataactaaaaggtatgcaatcaaatctgctttttaaagaatgctctttacttcatggacttccactgccatcctcccaaggggcccaaattctttcagtggctacctacatacaattccaaacacatacaggaaggtagaaatatctgaaaatgtatgtgtaagtattcttatttaatgaaagactgtacaaagtagaagtcttagatgtatatatttcctatattgttttcagtgtacatggaataacatgtaattaagtactatgtatcaatgagtaacaggaaaattttaaaaatacagatagatatatgctctgcatgttacataagataaatgtgctgaatggttttcaaaataaaaatgaggtactctcctggaaatattaagaaagactatctaaatgttgaaagaccaaaaggttaataaagtaattataactaaaaaaaaaaaaaa

SEQ ID NO: 552642 - DNA, 745 bp, Homo sapiens
  misc_feature (94)..(94): n is a, c, g, or t
aagctttctacgacgattggtcatggcatcgccggtgcccagtagtgtagggtgataggtggtcatagctgtttccttgaggaggatctctggntgatgatcgtagatgcgttggagttcgtgaatccaattaataaaagggcccggagggtgaagccgtgagcgttctggaactaaattacgagagtggaagctccatgatggtcaattacttggggagtctaatcaaaaggagttagaatgcgaagtctcgattatctaagatttatagcctatgtcgtatgtatggttagatttggagtaagatggggtaagttccagcttgacatattcgggagaacctcgtgagttagtgagatgttattccaactggggatcaaagcaatgatcaatgagttagtagaaattcttagacaatgccttactgctttcctgaatccatgtggtcggaaattctttactttaagtagatgcgcagagtactgggaagcatggggatacgggggctgtgtaactatggcctttatatggcactattgctcctttggaacaaggggaatatttttgatcacacgaaaccaattggggaagccggtctcgtttcagaaaacctttgaaacacgagtcgatataatggcgcttgaagactctataggggggtgaattgagtgatatgccttggttaatcgttgaggaagagagactttaggtaatatggcattttgatgtacgaaggggagaattg

SEQ ID NO: 552643 - DNA, 897 bp, Homo sapiens
  misc_feature (2)..(2): n is a, c, g, or t
  misc_feature (38)..(38): n is a, c, g, or t
  misc_feature (333)..(333): n is a, c, g, or t
  misc_feature (345)..(345): n is a, c, g, or t
  misc_feature (347)..(347): n is a, c, g, or t
  misc_feature (349)..(349): n is a, c, g, or t
  misc_feature (360)..(360): n is a, c, g, or t
  misc_feature (365)..(365): n is a, c, g, or t
  misc_feature (370)..(372): n is a, c, g, or t
  misc_feature (375)..(375): n is a, c, g, or t
  misc_feature (379)..(380): n is a, c, g, or t
  misc_feature (384)..(385): n is a, c, g, or t
  misc_feature (388)..(388): n is a, c, g, or t
  misc_feature (394)..(394): n is a, c, g, or t
  misc_feature (405)..(407): n is a, c, g, or t
  misc_feature (410)..(411): n is a, c, g, or t
  misc_feature (413)..(413): n is a, c, g, or t
  misc_feature (426)..(427): n is a, c, g, or t
  misc_feature (435)..(435): n is a, c, g, or t
  misc_feature (441)..(441): n is a, c, g, or t
  misc_feature (446)..(446): n is a, c, g, or t
  misc_feature (452)..(452): n is a, c, g, or t
  misc_feature (456)..(456): n is a, c, g, or t
  misc_feature (461)..(461): n is a, c, g, or t
  misc_feature (466)..(466): n is a, c, g, or t
  misc_feature (471)..(471): n is a, c, g, or t
  misc_feature (479)..(480): n is a, c, g, or t
  misc_feature (484)..(485): n is a, c, g, or t
  misc_feature (492)..(493): n is a, c, g, or t
  misc_feature (496)..(496): n is a, c, g, or t
  misc_feature (501)..(501): n is a, c, g, or t
  misc_feature (505)..(505): n is a, c, g, or t
  misc_feature (509)..(509): n is a, c, g, or t
  misc_feature (518)..(518): n is a, c, g, or t
  misc_feature (640)..(640): n is a, c, g, or t
  misc_feature (670)..(670): n is a, c, g, or t
  misc_feature (856)..(856): n is a, c, g, or t
gnccaaggtgattttttggccccccccccccaaacccnatagggggagggtttccgatgggcccctccccccttaacagtttttcccccttcccgtgggaggccccctcttttaaaaaggcctctttttccccccgggggcaccccccccccccctccccgtttttttttttttttattaaagatttttccccttttgccccctttgttttcaaaattaattttttttccccaatttttcccccgtttttccccaaaattttaccgcttccttttccctttcccctttccggtttcccctttttttaaagggccttttggggggccccttttnctttttcccccncntnccaaaaggggnttttnttccnnnccntttnntttnnttncccccnggtttttcccnnnccnncntttttaaaccccnncccctttntttttnttccncccccntttnggccnatttncccanttaccccnntttnngcccccnnccntaacntttnccanttttaaatncattggccccatgcccccccccccgattttttttttttttttcttttttttttttttttttttttttttcccctctcccctttttttttttttttttttttttttttttttttttttttttntttttttttttttttttttttttttttttntttttttttttttttttttcttatgttaggctgatttataagtgctgctttgggcagttacacagtttgtttacaatgaggagttatttgactttgaacatactgtacatggcaattaaaagttgtcatggcaaaaaaaaaccacagttggcctgccacagccaacacaaaaaccaaaaaatggtngatgaaatgaaggaataaagggggggtttattccttattat

SEQ ID NO: 552644 - DNA, 280 bp, Homo sapiens
ccagcctggcaaacacggcaaacatgtactaaaaatacaaaaaattagccaagtgtggtggcaggcacctgtaatcccagcaactcaggaggccgaggcgggagaattgcttgaacctcgggaggcagagtgcttgcagtgagccgagaccgcaccactgctttgtagcctgggcaacagagtgagatgccatttcaataataataataaactatcacatgtaacccccaaatatgtacatcattgtgtatcaataaaaataaataaatgtgaataaaaa

SEQ ID NO: 552645 - DNA, 543 bp, Homo sapiens
  misc_feature (115)..(115): n is a, c, g, or t
  misc_feature (127)..(127): n is a, c, g, or t
  misc_feature (129)..(129): n is a, c, g, or t
  misc_feature (131)..(131): n is a, c, g, or t
  misc_feature (142)..(142): n is a, c, g, or t
  misc_feature (147)..(147): n is a, c, g, or t
  misc_feature (152)..(154): n is a, c, g, or t
  misc_feature (157)..(157): n is a, c, g, or t
  misc_feature (161)..(162): n is a, c, g, or t
  misc_feature (166)..(167): n is a, c, g, or t
  misc_feature (170)..(170): n is a, c, g, or t
  misc_feature (176)..(176): n is a, c, g, or t
  misc_feature (187)..(189): n is a, c, g, or t
  misc_feature (192)..(193): n is a, c, g, or t
  misc_feature (195)..(195): n is a, c, g, or t
  misc_feature (208)..(209): n is a, c, g, or t
  misc_feature (217)..(217): n is a, c, g, or t
  misc_feature (223)..(223): n is a, c, g, or t
  misc_feature (228)..(228): n is a, c, g, or t
  misc_feature (234)..(234): n is a, c, g, or t
  misc_feature (238)..(238): n is a, c, g, or t
  misc_feature (243)..(243): n is a, c, g, or t
  misc_feature (248)..(248): n is a, c, g, or t
  misc_feature (253)..(253): n is a, c, g, or t
  misc_feature (261)..(262): n is a, c, g, or t
  misc_feature (266)..(267): n is a, c, g, or t
  misc_feature (274)..(275): n is a, c, g, or t
  misc_feature (278)..(278): n is a, c, g, or t
  misc_feature (283)..(283): n is a, c, g, or t
  misc_feature (287)..(287): n is a, c, g, or t
  misc_feature (291)..(291): n is a, c, g, or t
  misc_feature (300)..(300): n is a, c, g, or t
  misc_feature (345)..(345): n is a, c, g, or t
  misc_feature (375)..(375): n is a, c, g, or t
aaaaaagctaaccaaaattttacccgaatttttacccaatttttaccctttccatttccctttgcccttccggcttccccactttttggaaaggccatccgttcgggcctttttnctttttcccccncntnccaaaaggggnttttnttccnnnccntttnntttnnttncccccnggtttttcccnnnccnncntttttaaaccccnncccctttntttttnttccncccccntttnggccnatttncccanttaccccnntttnngcccccnnccntaacntttnccanttttaaatncattggccctttttttttttttttttttttttttttttttttttntttttttttttttttttttttttttttttntttttttttttttttttttcttatgttaggctgatttataagtgctgctttgggcagttacacagtttgtttacaatgaggtactctcctggaaatattaagaaagactatctaaatgttgaaagaccaaaaggttaataaagtaattataactaaaaaaaaaaaaaa

SEQ ID NO: 552646 - DNA, 1148 bp, Homo sapiens
  misc_feature (1148)..(1148): n is a, c, g, or t
agcgggggggtggggtctgcgtggggcgtgcgtacaggaggccccgggattctctggactaggacggtctggggtacgacgccagtgtcccctcgagctagtcccattctgggattagacagaggacacgaaccggtgaggccggtcggccttacctggcgccagcgcacttcagggaggcgcaggcctggggacgaccatgctcgaggtaccgtaggaagatgctgtgcgagtgatgggcctacattcgcaggtaatcatactcaatcactcgagcccctctcgagaccagggccttagaattagacaccatctagtactccctaggaataggttcggcctgtctagtatgcgtccatggcatgtatgcaaaggcacactggatgggacgccgcgactggattggaggtcgtggtaatgcacaggagcttctagaggagaacgcgttgcagaaccccgtctcgtgcataccgggaagggaatccaccggggcacggggaagaggaaagggccacgccactacgtttgggtatgtgcctgacttgcgctttacaagttaactttgctcccccgaacccgaataccttcgccaggagtagcgcaccgcgtcccgcatacctactcgcaatgtcttttggaacgaaaactatattattcttatgcccagaagagaattacagtcagggtttttttcaccaaggttcccatttgtagcaggtgaacgccattcgagtacataactgaaatctcttggagttggagaaaatgtctttcaaaggaagtgattcactggcatttgtccggagaaacattatcatgacggcgctataagtgacccgaaagtaaaagacaataagttcgttctcccggctggaaaaagataaaccccagggatgtagacgcagaagaattccgcaaagattaagcgtggaaggtggacggcggaaggaacccccactttttccaaggatggcaaccggaacgaggaacgggttaacagggaaaaatggttccgttctaaaaaggtttagtgccccctgtcgattcggcagttgtgcctttctcacacggtgtgccgcgaacagaagggcctcctttggattagtgttacccgctttttggattactttccctgtatggcgaaccan

SEQ ID NO: 552647 - DNA, 152 bp, Homo sapiens
tggcgtgatttctgtctggttctgaatgctctgatcactctgggggcacaagaaaaaaagaagactattgtgactgatggtttcccagggttcaatagaggatcttcactaaaaaagttcccccatcctggatctgccagcagaaagaaaaa

SEQ ID NO: 552648 - DNA, 396 bp, Homo sapiens
agccattcctttggtcttttccaactccttgggcctccctgttccctaagacaaaaccgttttgaaatccagacaattaataaccctacaatggcttataagtgttcaagggaaaggaagagtcacacatctctcactttaaataaaaaaactacaagtgattgggggtggttccaagatggccaaataggaacagctccagtctacagctcccagcgtgagtgacgcagaagacgggtgatttctgcatttccaactgaggtaaccgggttcatttcactggggcttgtgggacagtgggtgcaggacagtgggtgcagcctactgagtgtgagccaaagcagggcgaggcatcgcctcatctgggaactgcaaggggttcaggaattccctttc

SEQ ID NO: 552649 - DNA, 865 bp, Homo sapiens
aattcgatgcagggcccgggttttagttgcataattactgggccgttgtcgacaattacaagctggaatctcagatctctagaactccaagaagagctgaagtactggagcgtagcttccaggaataaagctgaaagcaaaacgggacctgggaagagctagaggcgctgaaaacagagtggaggacacgctggataccacagagcttgcccagacagagagctcaggtcaaaacgtagagcaggaggtagaacatacctagaagaagaccctggaggaggaggccaagacccacgaggcccagatccaggagatagaggcagaagcactcacaggacgaggaggagcaggcggagcagctggaggcagacgaagacgggtgaaagcaaaccatcgagaaggcaaagcagactctaggagaacgagcggggggagctggccaacgaggctgaacggtgctgatgcagggcaaaggggactcggagcacaagcgcaagaaagtggaggcgcacgctgcaggagctgcaaggtcaagtacaacagagggagagcgcgatgcgcacagagctggacgacaaggtcaccaaagctgcaggtggagctggacacacgtgaccgggggtactacagcccagctccgaccagcaaagtcccagccaagctcaaccaagggacttcttcccgcgcgggagtcccagctgcaggacactcaggaagctgctgacagggaggagaaacaggaagacgctgggcatgatgaaccaagctcagcagtggaggcgaaaaatactacgaaacaaagagagaaggagagccagcacacgagtcaaaggcaagagcgcccgccctctacagagacgctcga

SEQ ID NO: 552650 - DNA, 310 bp, Homo sapiens
agcgagatgtacaatcagctggtgaaggatctgttcaaaaaatagtggatcttttgcaatgtttatatatacttcttcagcgtgattatgttgtatatttccagtatactgtgattgctggaactatagaagatatatggttgttgaaatatttaatgtgagaaaatattattccttggttcatttcccatctaaggtcgataattgtttcatagttgtagtagagttacccatagaattttttcaagaggcaggacctcagatttatggttgattgccccatactgttggtgctgttgtggggtatgtg

SEQ ID NO: 552651 - DNA, 153 bp, Homo sapiens
tgactgtccgctgctggcgccactgaggcggctcccagctgctgttggggactatggctgacacccccagagtatgcctgggtcaaagcaggcgcctgcatcacggaacgagaaggccctggtggacttcgggtacgtggggattgactccat

SEQ ID NO: 552652 - DNA, 429 bp, Homo sapiens
cggtggctcacacctataatctcaccactttgggaggccgaagtgggaagattgcttgagcccataattttgagaccagcctgggcaacacaataagacccatgtctctaccgaaaatgaaaaaaattacctgggcatggcagtgtgcacttgggagctactcaggaggctgaagcgggaggatcacttgagctcaggagttcaaggctgcatcgagctatgatggcaccactgcagtccaaactaggagacagacctagaccctgtttctaaaaataaataaataaataatcttggcatttctcatcctaaaaaaaaaaaaaaaaaaactctagggggggcccggcccccaattcgccctataagagagtcggataacaattaactggtccgtgaatttacaacggtcgtgattggagaaaaaccttg

SEQ ID NO: 552653 - DNA, 503 bp, Homo sapiens
taaggactcagattgtatctttgtacagaagaggattctcctgcctcagcctcccgagtagctggaattataggcgtgcaccaccacgcccggctagtttttgtgtttttggtggggacggggttttgccacattggccaggctggtctcaaactcctgacctcaggtgatccacccgccccggcctcccaaagtggtgagattacaggcgtgagccagtgagccagccttccttttcagtttttaaacataatttttgtttcatccacaacttttcaagtattgccagtagaataggaacatgggttcttagtctttagctatctgttacagcctatgaatgcgttcttaaaatcatgtttttaaatgcatccaatatataggattccaaggggctctaattatatcgaaatcccgttattaaaatgttgggccctcagtttgttatatattaatatgcatgcttctttataaatgcattaaataagagttaatagctaaaa

SEQ ID NO: 552654 - DNA, 511 bp, Homo sapiens
aggcatgtcacactgcggtcttcctgaaagactacttacttcataaaggtattatgtttctttaattaatggccactagaagttaggaagctcctagggaccaggatatgagatcttaaagaggctgtcagaatctcttcatttgcatgacatagaatctgtggtggagatgttttccctgatgtttttggagggttggactgtgttgaaggctgtaccttggtgggggtggtctgcagtcatgcagtccactgatagggtcccccaccccgcaagcttcaataattgagctttctgttaatttcttgaattatcttttcaaaaatggtttggcagcacttgatgacattatgttcaaaattaagtccagtaaaatatataagcatttgtaaactataattatagtttaaataagacttagtttaggaaatccaagttttgacatatataaccaaacggcctaagagttcaaagctattttcttaggtgttacaccttagcatttacataa

SEQ ID NO: 552655 - DNA, 548 bp, Homo sapiens
gtcgtcgatctagaggatcctgtttacttaacccgtgtggccaagagtagctcgtaggaggcctttaaagacggaacatgtaatatacagttctactgtggttctgcccacggtccaagtgggcgaggctaagaagagggccttcctaaggcaaaacataagttgcactgtgtgggtgcagccaaaacaaagaactgtgtgttgagtatcatcaactaagaaccaaaatccagggcactcatatgtgaaggataagaacctcacttccttactcctccaaaaagaagtggggaaagaaccatcaaacctttcctcctgacttaccaaaccaggaaaacagcaggagagggtggctcaggacttagggacagggtatagcttagatggtggaaagcaaaggagagcaggaagttgtaaatcactggctaatgagaaaaggagacagctaactctaggatgaagctgtgactaggctggagttgcttccttgaagatgggactccttgggtatcaagacctatgccacatcacactgggttaagtaagca

SEQ ID NO: 552656 - DNA, 730 bp, Homo sapiens
  misc_feature (259)..(259): n is a, c, g, or t
  misc_feature (503)..(503): n is a, c, g, or t
gggtcttgctgcccaggcagcacctctggtagctgttgtgccgtctgccgattgtcagtctctgtcccttatcattgtaggtgtcagataacaagtgacttcggctggctcatccccaaggtcatgaggatctatgatacccaggtacggaaatggactagagaggcctcgccgcatgctagtcgtctgcagaaaccattgttaaactggctgacttgaatgcttgtccctctcctacattatttgagttggaccctgncttggagtgggaggggtacgttacttattcgaggagaacgacactgtggtgactctcctcatgcatccactcacaatagctgcaaggtctccaaaggaagattgactggactgggtaggcgtctcaatggtaatgtgtagtcaccgtggctgcgtccagagataagcgagcaattattcaggtggtttcccgaggaccctctgatagtactctctagcgatggttctcaggcattcagacccangctggactcaaggaacatcagggccaccgcgactattgataggcacggaccatggctgatgagcattcctgtttgtctttcattgaacgctttgcgttatggggagcaactacattatagatgtcatctgaggtagagaggtagcagctacagacagggaatgatgactgaaaggtactgggtcccaacttctggcggatgaacatggcgtgagtacagtacaaccc

SEQ ID NO: 552657 - DNA, 212 bp, Homo sapiens
agagattgcagcaggaagcgggaccgggcaagtggcagcaccaagcagcccaacgtgttttcacgtctttcatgttgacagccagatacaggagttcaagaagctggggctctccacctaaggccccatccacaggcttagcttatcgacagattgtattgcatattcaagcagcctaggaacctatccacttgtcttcaccctccacctgg

SEQ ID NO: 552658 - DNA, 439 bp, Homo sapiens
  misc_feature (58)..(58): n is a, c, g, or t
  misc_feature (135)..(135): n is a, c, g, or t
  misc_feature (168)..(168): n is a, c, g, or t
  misc_feature (438)..(438): n is a, c, g, or t
acccaaccctgtgccctcccttgctcccgggatttgtggtttatcctcaaaagggaanacccttgaatacgactgctgtttaccaaaattaagaaaacccacccattgaaaaaacctaaggtaccccgggtttancttgtcatctgttcctagaaatggtggcctcanaggctgggtgcggtggctcaagcctgtaatcccagcactttgggaggctgaggcgggcggatcacgaggtcaggagatcgagaccacggtgaaaccccgtctctactaaaaatacaaaatatcagccgggcgcggtggtgggtgcctgtagtcccatctactcgggaggctgaggcatgagaatggcgtgaacccgggaggcggagcttgcagtgagttgcgatcactccactgcactccagcctgggcgagagagcaagactccatatnc

SEQ ID NO: 552659 - DNA, 148 bp, Homo sapiens
agcatgtggtttgtgcaattccagaactctgtggtctgctctgaaggagctgtcactagatgcctggagtgcttgacgcctgcaatcacacaggcactccccctagtaccaaccctatctgcctacgccactgggccccatttcccct

SEQ ID NO: 552660 - DNA, 203 bp, Homo sapiens
  misc_feature (201)..(201): n is a, c, g, or t
cctgcctggggtctcacctgcctcccagctcttgcctgcaggacggacgtgctctgtggcctcgggcaggagccgaccctctcagggccaggccctcgaaggtgggccctttcatagcttcctggcacagatgggctggtgggagcctcagaggagacgtcggtacaggctggagactttgggtgctgggtcgccatgtanaa

SEQ ID NO: 552661 - DNA, 116 bp, Homo sapiens
ttatattgatcatacgttgatattaggacgctgcaatataaaccacggaagcgtgtctgaaaaacgcaaactatcataaatttcatacatagttgtaccgtatctgctcgagagag

SEQ ID NO: 552662 - DNA, 186 bp, Homo sapiens
cttttgggttttccctggggtttccggcctattttggtctttttccgaataaaaagaaatttcaaaccggggggtattactttgtttttgggccttcccaggggctggcccctccccccttcctttttggggcctgaggttccaaggggttttgaagggctgttttaataaatgttttttaaccca

SEQ ID NO: 552663 - DNA, 3578 bp, Homo sapiens
  misc_feature (9)..(9): n is a, c, g, or t
cacgaggcncacctgcagctctgctgagagagtgcaagccgtgggaattcagcagctgaatatcaagacctttgaattcaacaagaagttaagacatttatagttgtctaacaacagactgaagattgtggcttggtattcactggcaggtttcagacatttagatctttcttttaatgactaacaccatgcctatctgtggagaagctggcaacatgtcacacctggaaattgtttttcaacattaatactattatttggcagtaatccagattgcttttgccaccaacctgaagacatatagaggcagaaggacaggaataattctatttgtttcctgttttgaaacttccatctgtaaggctatcaaaaggagatgtgagagagggtattgagtctggcctgacaatgcagttcttaaaccaaaggtccattatgcttctcctctctgagaatcctgacttacctcaacaacggagacatggcacagtagccagcttggagacttctcagccaatgctctgagatcaagtcgaagacccaatatacagggttttgagctcatcttcatcattcatatgaggaaataagtggtaaaatccttggaaatacaatgagactcatcagaaacatttacatattttgtagtattgttatgacagcagagggtgatgctccagagctgccagaagaaagggaactgatgaccaactgctccaacatgtctctaagaaaggttcccgcagacttgaccccagccacaacgacactggatttatcctataacctcctttttcaactccagagttcagattttcattctgtctccaaactgagagttttgattctatgccataacagaattcaacagctggatctcaaaacctttgaattcaacaaggagttaagatatttagatttgtctaataacagactgaagagtgtaacttggtatttactggcaggtctcaggtatttagatctttcttttaatgactttgacaccatgcctatctgtgaggaagctggcaacatgtcacacctggaaatcctaggtttgagtggggcaaaaatacaaaaatcagatttccagaaaattgctcatctgcatctaaatactgtcttcttaggattcagaactcttcctcattatgaagaaggtagcctgcccatcttaaacacaacaaaactgcacattgttttaccaatggacacaaatttctgggttcttttgcgtgatggaatcaagacttcaaaaatattagaaatgacaaatatagatggcaaaagccaatttgtaagttatgaaatgcaacgaaatcttagtttagaacatgctaagacatcggttctattgcttaataaagttgatttactctgggacgaccttttccttatcttacaatttgtttggcatacatcagtggaacactttcagatccgaaatgtgacttttggtggtaaggcttatcttgaccacaattcatttgactactcaaatactgtaatgagaactataaaattggagcatgtacatttcagagtgttttacattcaacaggataaaatctatttgcttttgaccaaaatggacatagaaaacctgacaatatcaaatgcacaaatgccacacatgcttttcccgaattatcctacgaaattccaatatttaaattttgccaataatatcttaacagacgagttgtttaaaagaactatccaactgcctcacttgaaaactctcattttgaatggcaataaactggagacactttctttagtaagttgctttgctaacaacacacccttggaacacttggatctgagtcaaaatctattacaacataaaaatgatgaaaattgctcatggccagaaactgtggtcaatatgaatctgtcatacaataaattgtctgattctgtcttcaggtgcttgcccaaaagtattcaaatacttgacctaaataataaccaaatccaaactgtacctaaagagactattcatctgatggccttacgagaactaaatattgcatttaattttctaactgatctccctggatgcagtcatttcagtagactttcagttctgaacattgaaatgaacttcattctcagcccatctctggattttgttcagagctgccaggaagttaaaactctaaatgcgggaagaaatccattccggtgtacctgtgaattaaaaaatttcattcagcttgaaacatattcagaggtcatgatggttggatggtcagattcatacacctgtgaataccctttaaacctaaggggaattaggttaaaagacgttcatctccacgaattatcttgcaacacagctctgttgattgtcaccattgtggttattatgctagttctggggttggctgtggccttctgctgtctccactttgatctgccctggtatctcaggatgctaggtcaatgcacacaaacatggcacagggttaggaaaacaacccaagaacaactcaagagaaatgtccgattccacgcatttatttcatacagtgaacatgattctctgtgggtgaagaatgaattgatccccaatctagagaaggaagatggttctatcttgatttgcctttatgaaagctactttgaccctggcaaaagcattagtgaaaatattgtaagcttcattgagaaaagctataagtccatctttgttttgtctcccaactttgtccagaatgagtggtgccattatgaattctactttgcccaccacaatctcttccatgaaaattctgatcatataattcttatcttactggaacccattccattctattgcattcccaccaggtatcataaactgaaagctctcctggaaaaaaaagcatacttggaatggcccaaggataggcgtaaatgtgggcttttctgggcaaaccttcgagctgctattaatgttaatgtattagccaccagagaaatgtatgaactgcagacattcacagagttaaatgaagagtctcgaggttctacaatctctctgatgagaacagattgtctataaaatcccacagtccttgggaagttggggaccacatacactgttgggatgtacattgatacaacctttatgatggcaatttgacaatatttattaaaataaaaaatggttattcccttcatatcagtttctagaaggatttctaagaatgtatcctatagaaacaccttcacaagtttataagggcttatggaaaaaggtgttcatcccaggattgtttataatcatgaaaaatgtggccaggtgcagtggctcactcttgtaatcccagcactgtgggaggccaaggggggtgaaccacgaggtcaagagatggagaccatcctggccaacatggtgaaaccctgtctctactaaaaatacaaaaattagctgggcgtgatggtgcacgcctgtagtcccagctacttgggaggctgaggcaggagaatcgcttgaacctgggaggtggcagttgcagtgagctgagatcgagccactgcactccagcctggtgacagagcgaggctccatctcaaaaaaaagaaaagaa

SEQ ID NO: 552664 - DNA, 1383 bp, Homo sapiens
  misc_feature (9)..(9): n is a, c, g, or t
cacgaggcncacctgcagctctgctgagagagtgcaagccgtgggaattcagcagctgaatatcaagacctttgaattcaacaagaagttaagacatttatagttgtctaacaacagactgaagattgtggcttggtattcactggcaggtttcagacatttagatctttcttttaatgactaacaccatgcctatctgtggagaagctggcaacatgtcacacctggaaattgtttttcaacattaatactattatttggcagtaatccagattgcttttgccaccaacctgaagacatatagaggcagaaggacaggaataattctatttgtttcctgttttgaaacttccatctgtaaggctatcaaaaggagatgtgagagagggtattgagtctggcctgacaatgcagttcttaaaccaaaggtccattatgcttctcctctctgagaatcctgacttacctcaacaacggagacatggcacagtagccagcttggagacttctcagccaatgctctgagatcaagtcgaagacccaatatacagggttttgagctcatcttcatcattcatatgaggaaataagtggtaaaatccttggaaatacaatgagactcatcagaaacatttacatattttgtagtattgttatgacagcagagggtgatgctccagagctgccagaagaaagggaactgatgaccaactgctccaacatgtctctaagaaaggttcccgcagacttgaccccagccacaacgacactggatttatcctataacctcctttttcaactccagagttcagattttcattctgtctccaaactgagagttttgattctatgccataacagaattcaacagctggatctcaaaacctttgaattcaacaaggagttaagatatttagatttgtctaataacagactgaagagtgtaacttggtatttactggcaggtctcaggtatttagatctttcttttaatgactttgacaccatgcctatctgtgaggaagctggcaacatgtcacacctggaaatcctaggtttgagtggggcaaaaatacaaaaatcagatttccagaaaattgctcatctgcatctaaatactgtcttcttaggattcagaactcttcctcattatgaagaaggtagcctgcccatcttaaacacaacaaaactgcacattgttttaccaatggacacaaatttctgggttcttttgcgtgatggaatcaagacttcaaaaatattagaaatgacaaatatagatggcaaaagccaatttgtaagttatgaaatgcaacgaaatcttagtttagaacatgctaagacatcggttctattgcttaataaagttgatttactctggga

SEQ ID NO: 552665 - DNA, 1194 bp, Homo sapiens
  misc_feature (9)..(9): n is a, c, g, or t
cacgaggcncacctgcagctctgctgagagagtgcaagccgtgggaattcagcagctgaatatcaagacctttgaattcaacaagaagttaagacatttatagttgtctaacaacagactgaagattgtggcttggtattcactggcaggtttcagacatttagatctttcttttaatgactaacaccatgcctatctgtggagaagctggcaacatgtcacacctggaaattgtttttcaacattaatactattatttggcagtaatccagattgcttttgccaccaacctgaagacatatagaggcagaaggacaggaataattctatttgtttcctgttttgaaacttccatctgtaagggttttgagctcatcttcatcattcatatgaggaaataagtggtaaaatccttggaaatacaatgagactcatcagaaacatttacatattttgtagtattgttatgacagcagagggtgatgctccagagctgccagaagaaagggaactgatgaccaactgctccaacatgtctctaagaaaggttcccgcagacttgaccccagccacaacgacactggatttatcctataacctcctttttcaactccagagttcagattttcattctgtctccaaactgagagttttgattctatgccataacagaattcaacagctggatctcaaaacctttgaattcaacaaggagttaagatatttagatttgtctaataacagactgaagagtgtaacttggtatttactggcaggtctcaggtatttagatctttcttttaatgactttgacaccatgcctatctgtgaggaagctggcaacatgtcacacctggaaatcctaggtttgagtggggcaaaaatacaaaaatcagatttccagaaaattgctcatctgcatctaaatactgtcttcttaggattcagaactcttcctcattatgaagaaggtagcctgcccatcttaaacacaacaaaactgcacattgttttaccaatggacacaaatttctgggttcttttgcgtgatggaatcaagacttcaaaaatattagaaatgacaaatatagatggcaaaagccaatttgtaagttatgaaatgcaacgaaatcttagtttagaacatgctaagacatcggttctattgcttaataaagttgatttactctggga

SEQ ID NO: 552666 - DNA, 3029 bp, Homo sapiens
tgtcaactaatcatccacgcacctgcagctctgctgagagagtgcaagccgtgggggttttgagctcatcttcatcattcatatgaggaaataagtggtaaaatccttggaaatacaatgagactcatcagaaacatttacatattttgtagtattgttatgacagcagagggtgatgctccagagctgccagaagaaagggaactgatgaccaactgctccaacatgtctctaagaaaggttcccgcagacttgaccccagccacaacgacactggatttatcctataacctcctttttcaactccagagttcagattttcattctgtctccaaactgagagttttgattctatgccataacagaattcaacagctggatctcaaaacctttgaattcaacaaggagttaagatatttagatttgtctaataacagactgaagagtgtaacttggtatttactggcaggtctcaggtatttagatctttcttttaatgactttgacaccatgcctatctgtgaggaagctggcaacatgtcacacctggaaatcctaggtttgagtggggcaaaaatacaaaaatcagatttccagtcattatgaagaaggtagcctgcccatcttaaacacaacaaaactgcacattgttttaccaatggacacaaatttctgggttcttttgcgtgatggaatcaagacttcaaaaatattagaaatgacaaatatagatggcaaaagccaatttgtaagttatgaaatgcaacgaaatcttagtttagaacatgctaagacatcggttctattgcttaataaagttgatttactctgggacgaccttttccttatcttacaatttgtttggcatacatcagtggaacactttcagatccgaaatgtgacttttggtggtaaggcttatcttgaccacaattcatttgactactcaaatactgtaatgagaactataaaattggagcatgtacatttcagagtgttttacattcaacaggataaaatctatttgcttttgaccaaaatggacatagaaaacctgacaatatcaaatgcacaaatgccacacatgcttttcccgaattatcctacgaaattccaatatttaaattttgccaataatatcttaacagacgagttgtttaaaagaactatccaactgcctcacttgaaaactctcattttgaatggcaataaactggagacactttctttagtaagttgctttgctaacaacacacccttggaacacttggatctgagtcaaaatctattacaacataaaaatgatgaaaattgctcatggccagaaactgtggtcaatatgaatctgtcatacaataaattgtctgattctgtcttcaggtgcttgcccaaaagtattcaaatacttgacctaaataataaccaaatccaaactgtacctaaagagactattcatctgatggccttacgagaactaaatattgcatttaattttctaactgatctccctggatgcagtcatttcagtagactttcagttctgaacattgaaatgaacttcattctcagcccatctctggattttgttcagagctgccaggaagttaaaactctaaatgcgggaagaaatccattccggtgtacctgtgaattaaaaaatttcattcagcttgaaacatattcagaggtcatgatggttggatggtcagattcatacacctgtgaataccctttaaacctaaggggaattaggttaaaagacgttcatctccacgaattatcttgcaacacagctctgttgattgtcaccattgtggttattatgctagttctggggttggctgtggccttctgctgtctccactttgatctgccctggtatctcaggatgctaggtcaatgcacacaaacatggcacagggttaggaaaacaacccaagaacaactcaagagaaatgtccgattccacgcatttatttcatacagtgaacatgattctctgtgggtgaagaatgaattgatccccaatctagagaaggaagatggttctatcttgatttgcctttatgaaagctactttgaccctggcaaaagcattagtgaaaatattgtaagcttcattgagaaaagctataagtccatctttgttttgtctcccaactttgtccagaatgagtggtgccattatgaattctactttgcccaccacaatctcttccatgaaaattctgatcatataattcttatcttactggaacccattccattctattgcattcccaccaggtatcataaactgaaagctctcctggaaaaaaaagcatacttggaatggcccaaggataggcgtaaatgtgggcttttctgggcaaaccttcgagctgctattaatgttaatgtattagccaccagagaaatgtatgaactgcagacattcacagagttaaatgaagagtctcgaggttctacaatctctctgatgagaacagattgtctataaaatcccacagtccttgggaagttggggaccacatacactgttgggatgtacattgatacaacctttatgatggcaatttgacaatatttattaaaataaaaaatggttattcccttcatatcagtttctagaaggatttctaagaatgtatcctatagaaacaccttcacaagtttataagggcttatggaaaaaggtgttcatcccaggattgtttataatcatgaaaaatgtggccaggtgcagtggctcactcttgtaatcccagcactgtgggaggccaaggggggtgaaccacgaggtcaagagatggagaccatcctggccaacatggtgaaaccctgtctctactaaaaatacaaaaattagctgggcgtgatggtgcacgcctgtagtcccagctacttgggaggctgaggcaggagaatcgcttgaacctgggaggtggcagttgcagtgagctgagatcgagccactgcactccagcctggtgacagagcgaggctccatctcaaaaaaaagaaaagaa

SEQ ID NO: 552667 - DNA, 168 bp, Homo sapiens
gacgcccgtttacacgcaccacccctgggcgggctgtgcggttcaggccctcccccgggaccggcccgtgtcccgccccgtgtcccgcctcgtatttgtgcggcgccagctgtttctgattcctgtgttttagagaggctgggcttgctggcgcagtagctccagagg

SEQ ID NO: 552668 - DNA, 359 bp, Homo sapiens
ctgaaactgagtaagaaaggttctccaagatgtatgattatacgtccttacaccataactcttcattaaacacatctcagttttgacctgactcactggggtgtcaagcggctactcaccctgcctcaactacgtcagctgcacctatggaaagaaagggctcacaggttacagatagagcttgatgagctcatcgctgactgctgagggtgtcagcacgcccaaggtctgtaacacagcacgagtgattaaggaaggggcagtgtagtcaaaccacggatgctcctctttgagagtcttgttcagtctgcgcgaaccttaagcgtgtctgcccttatacttaaacttaatctagggac

SEQ ID NO: 552669 - DNA, 123 bp, Homo sapiens
ttcgagtcccgcatcttccaagctcttcttgagcttgagatgaactccgaccctaaggcttaactcaaggagcttaatattacacgcagctaaggaaattgaaggttgggtgtgtgtcggaaa

SEQ ID NO: 552670 - DNA, 143 bp, Homo sapiens
  misc_feature (15)..(15): n is a, c, g, or t
  misc_feature (31)..(31): n is a, c, g, or t
  misc_feature (37)..(37): n is a, c, g, or t
agcggcgggggcggntgaggcagctgtaggncgagtntaggaggtcggctcagcagcagtttgaggagctgctgccctcaaagccaagtccctccttgtggtccatttctgggcaccatgggctccacagtgtgcacagatga

SEQ ID NO: 552671 - DNA, 311 bp, Homo sapiens
  misc_feature (279)..(279): n is a, c, g, or t
taatgaatctgtgttgtaacttaacaaaagtcaaacttgaatgtcttttcctactccccaaaatgttattgaataagaatgtgtgccataagatattgtgtgaagcataaaatatttctcacctttttcttctttgtaatactgactttaaaatagaaggtctgtagcaaaagtttttccgaccaaatgaaacagaagttattctgtggttatcccactagcatctataggagaatggtgtgaacccgggaggcagagcttgcagtggagccgagacgngcgcactgcacttctagcctgggcgacagagc

SEQ ID NO: 552672 - DNA, 330 bp, Homo sapiens
  misc_feature (287)..(287): n is a, c, g, or t
  misc_feature (310)..(310): n is a, c, g, or t
gtgagagtccgtaagagacagcttccaggatcctgagatccggagcagccggggtcggagcggctcctaagagttactgatctatgaaatggcagagaatggaaaaaattgtgaccagagacgtgtagcaatgaacaaggaacatcataatggaaatttcacagacccctcttcagtggatgaaaagaagaggagggagcgggaaagaaaggcagaatattgtcctgtggagacagccgttcattacctggcagtatttttctctggaaatccttgtaatcttgganggattgggcctcaaaatttttgngcatcgtcaaagcattgtgt

SEQ ID NO: 552673 - DNA, 817 bp, Homo sapiens
tatggaatgaggtcccctgccttcattcctagtgcccaccataggcgaccctctgcccactctgtaaaagaggggcttgccgtctgtggggagggatattaggaatgaggtctccctgactgtgagctagctggtgacccatgaaaagtagtgactttttctcctaggaccacgcatcgaggcaggggactcagttcctagtgtccccactcctatagtgcaagcactctgcccagctctgacaacagagtgcggctctgccgtcgtggcgtgagaggattatatgccgggtgtggatcccatgtccaatcctggattgtagtgtatagtttgtgcattctcaacgcatgttaacttagagtgtttgagtcacttaataacagatattgccttcaaatttaccttcactgcgagtgttaactttcgccatgtactaaaggccgaactcataaattgatgaaatatccctaatgatcgcccaaagttgcattaaatatcccatacagagccatctcgtaacagttggaaacatggtgtaaatttgaaccactgttagccgtgtggggacagtctgtactgtcgcatggtagcgcagatgcgggtaggggcccagcgagaggataccttattactctcatgctagtgtggccctgtgtcccacagttccccatgatttggctacatgactccgcatgccctctggtgctaccctgagcttgggcgctaactatcctaggaacgcgggggagttggccaatggcaccgggctcaactccttgtccgcctttcccatgtaattctttcacacaaccatcac

SEQ ID NO: 552674 - DNA, 434 bp, Homo sapiens
atggaatcctggagaagagttagatatattttcatagtttatgcaatattccttaagagggttaaaaaactagaaaataaacactgtggagtaagttaagtcaattttcttcagcctgagtgaaatagtttgcaagaacctcttgattctatttgccaagattccctactcaacaaatacatgctgcattttaaaaaattaccctggtctgggtgcagtggctcacacctgtaatccctgcactttgggagaagaggcaggaggatcacttgagcccaggagttcaagactagcctgggctgtagtgagaccgtgtctctactaaaaataaaaaaaattagcccgatgtggtgacacatgcctgtggtcccagctacttgggaggctgaggcgggaggatcccttgagccccagaggtcaaggctgcagtgagc

SEQ ID NO: 552675 - DNA, 308 bp, Homo sapiens
  misc_feature (1)..(1): n is a, c, g, or t
  misc_feature (94)..(94): n is a, c, g, or t
  misc_feature (105)..(105): n is a, c, g, or t
  misc_feature (108)..(108): n is a, c, g, or t
  misc_feature (118)..(118): n is a, c, g, or t
  misc_feature (122)..(122): n is a, c, g, or t
  misc_feature (289)..(289): n is a, c, g, or t
  misc_feature (294)..(294): n is a, c, g, or t
  misc_feature (296)..(297): n is a, c, g, or t
  misc_feature (299)..(299): n is a, c, g, or t
  misc_feature (301)..(301): n is a, c, g, or t
  misc_feature (304)..(304): n is a, c, g, or t
ngcttcgagttggcaccaagtttcttgttttgcttttttttttcttttgaacaaattaattacacaccaacaatcttcttttattacaacatgnccccaggtggnggnaaggagtctngggnggacagggagggaggactgaggtggttgtgaggacaagcaccaaaagctttcttcaggtcgcggggggccctgttcggctcccgcagcgcgaaattcctttaaaataaaaaactgtgagcacggctatgtgaagtttcctcctcctgggtggaacagtcaggggaanggagntnnananggnggta

SEQ ID NO: 552676 - DNA, 297 bp, Homo sapiens
cagctactcgggagggtgaggcaggagggttgcttgagcctgggaggcagaggttgcagacagccaagatcacactactgcactccagcctggcaacagggtgagaccttgtctcaagggaaacacaacacaactgcagctattctttctaagggttctggaaatgacagacctggattaacatccagattcagttccctgccattgagaggtccctttgcctgtttgggatatgttgtcagtcattccagctgtcttgagtacttacagagctattgcaccaagaagctcatactc

SEQ ID NO: 552677 - DNA, 201 bp, Homo sapiens
atcaggcgatgactgtgcggatggtgtgcccaaggtaatatggcggcaagttgcaagctggttgaggagcctggagcactccctttccaatagcccttggacttatccacacatgggagcggagagtgcccgtatttgctgggtaggtggagcctacccagggcgtggtgaagggtagcttggccacagtcttcgcctgat

SEQ ID NO: 552678 - DNA, 130 bp, Homo sapiens
  misc_feature (32)..(32): n is a, c, g, or t
tatgtcactgaaacaagtaactgatggttatnagtgattttcagccagcttttcttcatttcgccaactgactctctgaattatggtgaggaacactgcttgggttcctgtcacagttcattataaaggt

SEQ ID NO: 552679 - DNA, 100 bp, Homo sapiens
gccaggccctctgcaccattctctaccatagacctctgtagtctaatccattctacccaatataaaggtatagggcactggagttctgagaccctagggc

SEQ ID NO: 552680 - DNA, 497 bp, Homo sapiens
gaccgcggagacgaaagggggtgatcggtgagggcttcttgctggggggactctctacagagtctggaggcagcacagggcatcccatagtgaggaggctgagtgtgttagctcagttctctcttcctctttttataaaaccaccagtcccattcctgtgataaaccactaattcattaactcattaatccatgaatgggttaatccattcatgacggtggagcctttatgatccaatcaccaattaaagtctctttattttttctttcttctttttctttcttctttttctttccctccttcctttctttccttccttccttttcttttctttctttccttcctgtctttcttttcttctttttcttctttctcttttccttccttcctccctccctctctttctctctttctttcttcctctttctctgttctttctctcttttccttccttccttcccttccttcctctctttctttcttcctttcgtcccccg

SEQ ID NO: 552681 - DNA, 172 bp, Homo sapiens
cttccattcaagacgtaacaggacattcacacaatctgcttagcccgagtgacagcctcagcatacttctgctgctttcaggaccacagtcctaagcccatccagccagcaggtatgccagaagccacagtggctaggcaagtctaggcagggtaccgacgctcgacattcg

SEQ ID NO: 552682 - DNA, 116 bp, Homo sapiens
taataaatggcaagatcaagataaggaaggcatccctacctgatcagcagaggtgggatttattgctagggaaacagctggacaatggacgcaccctgtactagactacaacatcc

SEQ ID NO: 552683 - DNA, 400 bp, Homo sapiens
  misc_feature (1)..(1): n is a, c, g, or t
  misc_feature (11)..(11): n is a, c, g, or t
  misc_feature (34)..(34): n is a, c, g, or t
  misc_feature (80)..(80): n is a, c, g, or t
  misc_feature (85)..(85): n is a, c, g, or t
  misc_feature (88)..(88): n is a, c, g, or t
nacttttggtnaccggcgcccgcgctggccagtnggacagggtttttttttttccaagaaaatatttaccctggagaggngaggnatnacttatcatcccagaaatcccaaggacaaaacttcaagatacaagaaggatcaaattatatcatatatacgattcaatttaaattttcttagccctcttatatcatattatctagattataatagaaaaaaaacaagttggcttcctaggaagctttcataaaaagaaaccaaatccaggtttatgaaattttctagtacaattactttctaggggcgccttttcttaagtcacagtctttataattccatttgcctcttcgtaatttttaaaattggaaagcggggggatgggggtggaagtgtaagtttt

SEQ ID NO: 552684 - DNA, 143 bp, Homo sapiens
tttaaattatactttaagttatgagatacatgtgaaggggtgagatctactaagctagatcacttggctccactgctacagcccctttccaggagagtgaacggttctgtcccaatggtattacaggcaccacttggatatga

SEQ ID NO: 552685 - DNA, 1586 bp, Homo sapiens
ttcgctgattagtatccgtctggatgtttgcatttgatcttgttggctgtcttcgttgcggtgagtgggttcgcaccactgcgggatgttgtgttcctttcgtatcgtggctgctctcggtttgttccctctgtcgcgtgggtgttctctgttctgtgtgctctttttttgtggtacgccactttgttgatacatggttaccactttttccagcttgtgtgggggtggtgagcatccctccctctctgtagagtgcgattcttcattttcgcttagttggcgtccgtgatggctgttccgactcatttgctctgctagtgctgcatgactaatttggtttttccgcgggtagatttcgtttatagccgaggggttccctgctcggtggcccctccccgtctgtgtggtgtggttgcagcacgcccccccccccttaggaggtcgttggggtggttggtagagtcactaagtgtcgccccgcccgtcggtttggttttgtggtttggtgcttttggcagatttgtgggtgctccgctttgtgctgtggtgctgatctccgtttggagcgacctgtttctcccacacgggggtgtatttttagtcatatgtctcgggaaggtgtctctatttgctagagtgggagtggtgtccccctattccccggttagttggggagggggagtctccacctttttttgtttttctttgttgcttcttgtgtgtgtctctgctcgtcccatcatggtgcgggggagtgttggtcatcccacactgtgggtcgcgctcctctctctctgtgggagtgtcctgtcttgttctcgcccctgggtgtgtcccctcccgcccgcacgctggccccgctcatcgcgtggttttgtgtgcccacacgccctctttgtgtgttatcccccacactcgcccacctcccgttcctcgcccactagtgggggttgttgcgcacgccccacgagttttcttgaatagagggtgtgtgtctctctgggggggcacaccatactgcgcccccgccacacagggtgtgtctttctgtgggcgtctatgttaccccccaccaccgccctctggcacgtgggtgcagaccacccccccgcgttttttgtcacatcgcgctctgttcgctcacagaaaccacggggccttctcgggcacaggttgcgcccctcgtgttcgcgtgggcgcttttttttctgtgggtgttagttttggtctcgtgggtgcctcttgcacttttgtggaaaataatataggcgcgcccgagctttgtttggaggccacgagcttttctcccgtagcccccacttggccaccactcaggcgcgcccagtcgcctgggtggcggtgttatacccccgcacttttgttgcgtgttttgtgcccctctcggtggaggaattcgccccctctcctcccgtggggcccccgcgtgttggagggttcttcttcactttgagtgctggtggatttttcctctgggcggtgcccggaaccaccctctttttttccccccttttttcctcgggaggagctcttttttattgtgcattaatatccccgggccctgttta

SEQ ID NO: 552686 - DNA, 509 bp, Homo sapiens
gacagtatactggtacgagaaaactctctgacttacatatgagtgaaggcacatcattggctgtggtatccatcttggctatgaccgatattagggtctttgctgcgcttctcgcgacgtcctttatacttgggcatccaggttcttacagtgaccacaccaagtggcataaaattcaatcagaacatctttattttcattattcactatttcatcaaaattctctgctaccactaccttcacaggcccatcattgctctctgggataggtccagccttcaggtatctcttcagattgccatcaaagtaatcctgcaggcacctctccagagccttcccatcacgcgagaactcctcctgcttgacaaacttctctcctttagcagttctagatagcaacaacaggaatctctccagcagtgctctccaagccacactcagaaagttcatggctaaaggttttgcggctcgataacggacacgttgaagtattgtgcccggatcccgga

SEQ ID NO: 552687 - DNA, 173 bp, Homo sapiens
gagaaaccggaggccaccttggttcatccactgcctgttgccgggaccaggggcgagggcgttagtgcaagggagagtcgagggccgtccatgcacaatcattccgaccagcttaaggggccttagaatttgggggggttgaaagtgatgagggctagcattgcgtagcctag

SEQ ID NO: 552688 - DNA, 160 bp, Homo sapiens
gcttcaatgcaacaatgttttgtcgtatctgctccaggtggaagacacgctttgtttcaatgctaaaggactagaagcaagcactccagttaatgttacagctcaatggtcacaccacaggaaaaacagcattgatacatttagtagagagatataaaag

SEQ ID NO: 552689 - DNA, 116 bp, Homo sapiens
gcggccgcctactactactactactgctcgaattcaagcttctaacgatgtacggggacatggcataataggtgttaaaaaaaaaaataaaggacctctgggctacaaaaaaaaaa

SEQ ID NO: 552690 - DNA, 980 bp, Homo sapiens
gctgttgtcctgtaaggcgagagctgcgaaaggcgagagctgcgaagggccacggtgtcgggcgctgctttctcgtgtttcagtcattataggacaaaagcagccctgctgtaaacgatggtcaacgataccctaaaacccgaagaaccttctgtaagaacgtgtggcaagcattcatgcctcaccaacaggtgatcacagtcataagaagggcagaggatgtctttgtatgccctaagggataggtagggcgctatgatcggaagcagaggtggttgatggggggcagacaaagaccgattgttccggaagaagggctaagagcatcaaatgaagattgtgctaaggctggacattgtgtctgagcctaactgttagatccgaagcaggatgctggccattcatagagatgcaagcgatttcgaactgggagcgagataagtacgagcaaaggggcaagtgatccagttctaaactttggggatatggattctatcacattcctgactgcagagaatggtgaaagcccatagacgagagttacccgtaggtgaccacgtcacctagcagctgattatgtcctcgagtaaagacatggctgcgagacacacgaaagcaccctcggtgttcgcacagtcctgcagcctcactcccacgaatactttccatcaacacggcccacaatttccggaagcgcccacgcgcacccgcccgaggcgtcaccgagtggcgcctccgtcgtcaacaacgccgagtaggacaccaaccgcggagaacacactggcgtggcacacaaagcaaagacacggcgagtgagagaagcaacccaccccaagaaataaagcggcgggcggaggacttccgggacgcatgagtgtagcaccacacaccccggcagaagagcttgcagaaggaaacgctagtcggacacgcactacagggaggcgactaccaacgaacgcttcaaaccaagaaatcac

SEQ ID NO: 552691 - DNA, 358 bp, Homo sapiens
gggtacctatgcctcattgatgtttacctatgagccccccttgcagactcaagcatcccattgtttgcccttttaaatatctctactagccgggtgcgtgtgtcacgcctgtaatcccagcactttgggaggccgaagcgggcggatcatgaggtcaggagatcgagaccatcctggccaacatggtgaaactccctgtctactaaaaatacaaaaaatgagctgggagtggtggcacgtgcctgtaatcccatctcctcaggaggctgaggcagaagaatttcttgaactagggcatcaaaagttgcagtgagccgagatagcaccattgcattccagcctggtgacagagagcgac

SEQ ID NO: 552692 - DNA, 203 bp, Homo sapiens
cttatatatagtggtatactgccccttgatagatgagacaccttgctatgtgtaattgatgaagatggttattgtctacgtgatgtgctccagtgctgggatgtatgttccctgctaagtggattggtacacttgttcaaccttgttccttgctcctgtgcctctaactataatgcatgattgctgagcatgtgagtatggat

SEQ ID NO: 552693 - DNA, 265 bp, Homo sapiens
  misc_feature (111)..(111): n is a, c, g, or t
  misc_feature (172)..(172): n is a, c, g, or t
  misc_feature (229)..(229): n is a, c, g, or t
tgataatttgctagaaggactcacagaactcagaagggcatcctactcacacttacagcttattacagcaaaaggacacagattaaaatcagctcagggaagaggcacgtncggcagagtccaggggggctccacacatggatctcccagttgtcccctcccagtggagttncgggcagcgctgacatctcccagcaatgaggtctgacaatgcacacagatacgtttntcacttgacatttggacaacaaggatgtgtggcgtt

SEQ ID NO: 552694 - DNA, 518 bp, Homo sapiens
cgtggcagagctccccacagcccgagggccaaccctgccctgaggtatctgcccacgaccctgcacatcccattcttctcacagagccacccagcagatattgaggggggacgctgcaaattacaccaacaacaccttgagtggtgtttcagttaaggataatgcagtaattttagagctgtctgatggggttgtggctatgctggcagcctccatgacgttgcctggtctggaggggcttctggaaggaccatgtttgcatgtggccattgaggggcctggcccagccacaggagggcaggggtccagcagtccttttccaggcctgggatggctggagctgccagccactgctgccatcccattaccagagtctagggggactgggtgcggtggctcacgcctgtaatcctaacactttgggaggccgaggcaggcagtcacttgaggtcaggagttcaagaccagcatgactaacatggagaaactccatctctactaaaaatacaaaaaccagc

SEQ ID NO: 552695 - DNA, 407 bp, Homo sapiens
gtgccatcaaccaatgagtagataagaatatgtggtcaaacacacaacacacacacacacacacacacacacacacaccatggaataatactcaaccataaaaaggaatgaaatgtcctttgtagcaacttgggtggaactggaggccattatcctaagtgaagtaactcaagaatggaaaactaaatacagcatgttctcacttataagtgggagctaagctatgggtatgcagaggcacagagtggtattggaggaccctagagactcagaagggtactgggtacaatgtatactatttgggtgacaggtacactaaaagcacaagcttccccactatacagttcatccatgtaaccaaaaaccatttctacccctctaaagctactgaaatagaacgaattaaa

SEQ ID NO: 552696 - DNA, 142 bp, Homo sapiens
atatacatcagctcgccccaccttcgttactgtaaacgattatggatcatgcccacaaggcatccaagctactggctgcatcgaggtgaggggtgaagggtctgtgctagatcaaaaggcacggggtgccgatgaatagcga

SEQ ID NO: 552697 - DNA, 238 bp, Homo sapiens
ctccaggacttaagcttggtcagcagaggcgattgttgaactcaggagtcaagagcagctgggtaatgtcaggtctctgagcccaagctaagccaccatatcctctgtgaccggcacgtacacatccagatggccttaactgatgacattccttcacaaaagaagtgaaaatggcctgttcctgccttaactgatgacattcccttgtgaaattccttctccttgctcatcctgacca

SEQ ID NO: 552698 - DNA, 299 bp, Homo sapiens
tgcccatgctgccaacttatcgcaacctcggaggggactccattgcgatctacacctacgtcaaccggcgcagacctacaggggtaggaggtaactatcaagatgagtgggtgtgtaactcggttggttgcatccttgaggcgataagatcaacaaatggatgaatacggctttagagctatcaatgattttgggtcagtaacgatatccagtacttacaaagttctagttttttctgaacgtgggacctatcaggtgacctcgcaatacacggatcgcggtggcgagggctcagtctc

SEQ ID NO: 552699 - DNA, 125 bp, Homo sapiens
acacaggcagacttgaccttgaccagatagtcttcaagatggccaaactggggcggaggcgcaaaaatgtggagcctgtgaaaagaccgtctaccatggcagaggaaaatccagtcaatggaagg

SEQ ID NO: 552700 - DNA, 1393 bp, Homo sapiens
taagaaatgtaaccccatgggggttttccaggggggagtgccaataggtggaacatctccaaaagggcaagcgtggtcctagcgtggcgtggcttatttaaggtgactattttttatcctcaattctcatctcaagcccacgttatttacgtagaaaaatctctctgtgaaagtagaaaacagggttaacacgctacattttcggtgcgcatattttattttctctgtggttgtgtggtctctctcaggagagtgtgttctttgtgcacacacatattgtgtggtgagaacacgccacacagagtggagctttaacacagctctgtaatagagagaggacgcctctgagaagcgcacacaccagtgtagggcggtgtgagacaaaaatattctctgtgtgtgtgtacccacacaaagagagcatctcttctcttatatatcttatctcacacacagagagaggcactatattctcacactctctgccgcgggacacatatatatatataccatatataagaagaagtgttataacacgcgtataaagtgtggcacacatagatgtgtgtgtatctacacagacgacgcgtgtggacaaaacacaacaaacaagagagaggcggcggcgcgcgcgcctacaagagagatatatcaccctcgcgcgagagggggggcccaccaagagctcctatagagccgcagcgactcacacacacgcacagacgatatatgtcgtagaggcgcaacaacaccagaggaggggaggcactctcatatatagagcgagaaaagcgcgcgatactatcaataataaaaagccctagaaggcaccacgacgagcgcgcaccgcgtgcagagtactttaaaaaacaaaactgcgctgcgcgagagacgcagggggggggaaaaaaacaacagcgagcacaacaaacatagaagagcaaaaacatcaggggggcgacagacacgagagaacacgccccctaaaaaaaccaccgcgagggggggggggaggaagacaccacaatataagtgggggcaacaaccaaaaaatcacaacacccccctcacacaagaagaacgaacaatatgagctaaaaaaaaaaacgcctccaagcaagagcggggggcaaccacacatcatcgatcagcacaaacaaatcatcacaatcacaaggcgggggaaacaaaaaaacaaagagcgggggggggtacaacaacacaccacagtcaagcgccgcgaccacaacaaaatatatgaggacggatgaagagtcgacgcataagaagaaacacgaaacgaagtatgaggggagcagacacaacaaccgagcgaggaaccaaacataaccaacaatatcaaaggaacaccagacacatatattataaacag

SEQ ID NO: 552701 - DNA, 220 bp, Homo sapiens
cgactctgcaggatccttatagagacagagactctggcatacacactcaattactctagtcctgtttcactcctgtgtgttctattcatgtcccaattccctttgagactgcttgggacatgggagggatgcttggaggttgggacatgggagggatgcatgggacatgggagggatgcatgggacatgggagtgatgcttggaggttgggacatgggag

SEQ ID NO: 552702 - DNA, 654 bp, Homo sapiens
gcgggttcgtgaacttcccggaggcgcattgagctgcattaacctgcccagctgtgctgcccggctcccccagacaagaccggtgggctagatccaggtgattctcggggccgatgttctcaggaaaaagcacagagttgatgatgaacgcgtccgtcgcttccagattgctcagtacaaggtgcctggtgatcaagtattgccaaatgacggcgtcgctacagcagcagctttcttgcacacatgagcccggatacaccaatggatggctgcatgccctgctgcccctgctccgaagatccgtggcccaggagggcctggtgctgtggcatgtcatcacggcgtcgacgacggtggcaagtttttccctgacatcgtggatgttctgcgagggcatggccaaacgctcgggaaagacctgtaattgtggatgaactggatgggaccttccagaggaagccatcatggggccatcctcgaagctgagttgcctgtgaggctgagatgcgtggtgaagctgactggcggtgtgcatggatgtgcttccgggaagccgcctataccaggaggctcggcacgagaaggaggtcgaggtgattgggggacgcagacaagtaccactccgtgtgtcggctcatgctactacaacaaagg

SEQ ID NO: 552703 - DNA, 525 bp, Homo sapiens
catgagctcaggatttgagaccagcctggccaacatgttgaaacccatctctactaaaaacacaaaaatttcccgggcgtggtgccagcgcctataatcccaggtactcaggaggctgaggcaggagaatcgcctgaaacctggaagaaggcggttgcagtgagccaagatagcaccactgcactccagcctgggtgaaagagcaaaactccatttcaaaaaaaaaagctgcaagagctcatcacaagcagaccaacaccacagaaaaggtaaagggagtgaggccagcggaagggaagcaacatcaggagcatgagcccaccaaggtggagaagcgtggcagggacagggatggggatggcaggagcaactgcagagctcttctgcagtctttcaaacagaccactcggctgggcgtggtggctcatttctgcaatcccagcactgtgggaggccaaagcgggcagatcacctgaggttgggagtttgaaaccagcctagccaacatggtgaaacccccatccc

SEQ ID NO: 552704 - DNA, 792 bp, Homo sapiens
  misc_feature (69)..(69): n is a, c, g, or t
  misc_feature (82)..(82): n is a, c, g, or t
  misc_feature (97)..(97): n is a, c, g, or t
  misc_feature (116)..(116): n is a, c, g, or t
  misc_feature (147)..(147): n is a, c, g, or t
  misc_feature (152)..(152): n is a, c, g, or t
  misc_feature (165)..(165): n is a, c, g, or t
  misc_feature (175)..(175): n is a, c, g, or t
  misc_feature (197)..(197): n is a, c, g, or t
  misc_feature (768)..(768): n is a, c, g, or t
  misc_feature (783)..(783): n is a, c, g, or t
cgcaagctcctacggacaagagtagggcaccataggggggtcccatgcccgggttgtccatagggatgncttagaatttgcntatttagtcatgacncagaaagtatgtcccaatnaggccctatttcaggcacggtgaactatatnaaagnagaaataaataanccgtgaagtncaatgttccaacacaaggcagntacattttaaatataaaacaaatatttaggagctcagaggaggcagatgtgacagctgcctgaaacatcaggggacacttcttgggtggcatgggaagtgtacaatgacagacatcatttcagggatttaagtcaggatttgcctcagctggtttgtgcaccctctttgcattcacaagcctttctttcgtctcgcctgagcttttagagcaaaatctgatccagagactgtggatgctggaggagcgtcaaggctgggaaagtaacatgcactgtgttcgcaatcaacagaaaagatatttttaaacaaaaacaattttccaagtttccaggaagagaaacaaaaggcttttctaaaatgaaagaaactgttcttctcattctgtgacttttatgtcacttggacaacaaaccagtgcttaggaacggttattttcctgtcgacatcgctgcatggatacttcttagaagaacataacagcattagcactcagtcccaggttctgctcaccctccaatggcagtcgtcttcaaaaacaataaagatatctgtgcttggtctctctgtctngattacactgcaggnacaacctag

SEQ ID NO: 552705 - DNA, 162 bp, Homo sapiens
tgtggtcgtagaggatccctgagacgtggggatagaatggcagaagtacgggttagaattgaagtgagattcttccattctaccctctctctctcttcctctctcgtggcctcacctccccagccagcccaggcgtgcgccagctatctatcttcctactcc

SEQ ID NO: 552706 - DNA, 435 bp, Homo sapiens
  misc_feature (411)..(411): n is a, c, g, or t
  misc_feature (426)..(426): n is a, c, g, or t
gctggaatttaaattcagatctattatactcttaaggactgtggaaggagcaaaatctgatccagagactgtggatgctggaggagcgtcaaggctgggaaagtaacatgcactgtgttcgcaatcaacagaaaagatatttttaaacaaaaacaattttccaagtttccaggaagagaaacaaaaggcttttctaaaatgaaagaaactgttcttctcattctgtgacttttatgtcacttggacaacaaaccagtgcttaggaacggttattttcctgtcgacatcgctgcatggatacttcttagaagaacataacagcattagcactcagtcccaggttctgctcaccctccaatggcagtcgtcttcaaaaacaataaagatatctgtgcttggtctctctgtctngattacactgcaggnacaacctag

SEQ ID NO: 552707 - DNA, 264 bp, Homo sapiens
caatgcctgtggtccagctctcaggaagcggaagtgggagactcgcttgaatctgggaaggcggaggtagcattgggctgagatgactgtctgtactccagcctggctgacagacttatacccccatctcaaaaaaaaaaacacaaaacaatgcaatgtccaggagacaagttgaaatgatgccaccaaaacaaacaaacaaaaacccacaacaaaaacacacaaacccccagcaacaccaaaacacactaaacaacaaacaca

SEQ ID NO: 552708 - DNA, 995 bp, Homo sapiens
agcggtccagcctgggcaacgagcaaacctgcgtctcaaaaaaaaaaaaaaaaacaaaaaaaaaaaaaaacgggggcccaagggccttttttttttcgcgcagagggcccggcccggaggtccctggggggaaagtttccaggtaggggggaaaatactcggtgtgttaggtaagctaagacatcacagccccctaagaattgctcgtcgcgctatcgatggcatttctctaggaagactcctattaagcggaggcgaagagaaccgcccttgtaaatacccccaaatttatggggagcgatgtaacttaatgggcgcagaagtgagcaacagctatacaaaaccagggcaaagaaacgtagaatgcggcgccacataacactactctttcagtgcaaatattaatccccagggtgaattgggccacagacagaaatagactttggggcacttaataccttcagagcgccactatactcccagtggtaaaagggtgaccacgggtgttatttggtattatattctcccacaatcaccacgtggtaggttataaaaacaggaaaggggcaaaatgaagaatgtgatctccaagacagattaatacaaaaagtgtcctggttaacgcgcgaaaccaaagatggtatttttcggggcccccacaatataggaggcacatatatgttgcccacagtggtagtgttaaccacaatatggcgtttggggcgcaaattcgggagtgcacaaaaaacaaccacgagggcgaatctacggacttattccggggcacagcaaacccaaaagtcaaggggagaaaaaaatcccccttcaatgggtcccagacagtgtggtacaaccatctcaaaatttgtggtattagggaattgaccaaaaggcctgcgttatatataatttattgggacgaattactttgccccccttatcttacatacgatctcgattggtcgcatcagagtgtcataagggccacaagcgat

SEQ ID NO: 552709 - DNA, 726 bp, Homo sapiens
  misc_feature (343)..(343): n is a, c, g, or t
tggtccccggggtgctaccctttatggcgggggtcttaggagaaaaaaaagggtaaaaaaaggagaaagcttgaataaaaagagggccaggaccctaggggtgccagagccatagttcacggggccaaacgcccatataccacccaggccgtggacaagaggtaggtggcctcgtggggagaggaactccttagggccgtggggccctcagaactcaagctcgtgcgttgggcgctgcaagagggcgtgggagaggggcagtgttgttcctggctcataagagggagaggcgtgtgagagacgtggtggggagggaaggccagtgggagcgagagtggggcangttcttggccccgtgtgtgtcccgtgatgctgcctcccaagggcacagtcccagtgctccccaggtgccctcaagggagaaagcttagggggaagggccccggaatatagaagagaacacctgaatgagagggggtcggcgcagggggctgctgagggtgtacactggcttccacttccctttctccagcctcctcagtcccagatttggaggaaagctgtcccaggaacctgtggccaagccatcgcgtcaagtggtgatccccaggggagtcacctggtatcgggccgagagtgtgccaaggcacgaatttgtggggtcccaacatgacgagaaattgtctaaccgagaaaaaaggagccataggaagaccgaagattaca

SEQ ID NO: 552710 - DNA, 375 bp, Homo sapiens
agaggaagtatcagaaagaagagtggcagatagacttcctctgcgcatgtacatgtagcctcctctcagaaagactgatttctgtgtgagaagagggtgtgattcaacttttgcccagcaggaagaggtccattagaaaagtatcaaccaagatgcttataggcacgataatcactgattgttaaatctattcatcatgcccatagctaaaaatggtttaacaaataagtatgtacaatacatttccttaaattactcagggacctttaacgttaggacgttttgggtcctgatccaccaagataagaaaggcggtgaatcttatcttgccctagtaggagtgtgtgtgtgtgtgtatgcatgcacatagaccga

SEQ ID NO: 552711 - DNA, 265 bp, Homo sapiens
cagaacgagaccctgtactttgttttaaaggcctaaccaatggacagccctttcaagactgaatggtgaggccaggtacagtggcgcacacctgtaatcccagctactttgaagcctgaggcagtggggcacacctgtaatcccagctactttgaagcctgaggcagaatcaagtgagcccaggagttcagggccagctttgataatggagcgagatgccatttttagttaaaaatatatattaacaataaagtaacaaatttta

SEQ ID NO: 552712 - DNA, 109 bp, Homo sapiens
  misc_feature (1)..(1): n is a, c, g, or t
ngtcggtctgtatgtagccatgataattttaactctatgcagagtatctaatccatccatttgattcagtaactccattaacgttctctgaatctctctgtcagctgaa

SEQ ID NO: 552713 - DNA, 1037 bp, Homo sapiens
ggtttcggcagttatccatcttggtgcatgctgacgaaaaatcaagatgatgctgacagagcataaaaggcttctgaagactgtggacaaaggcttacaagttgctactggatcgaggagcctgaagaaagagggccctggatgtgattcaggcaggataagaatacgtgaaacacgactgtgaaagagcggaacagaaaacaattagagaaggaaggaaagggctacaaattgtacgaggaggatgatcctgagcgtgttcaaagcaagctgtatctgaacagacaagtgaaactcttggcagagactggaaattgacgaggaaagagcgagaagccgaagagatgcgctgaccggacccgaccaagggcagacagagattgaagcgcatgaaacagccagatgggacaacgcgagtggcctgataaacagcttgtgaggaacagtcggaatggtcgtgtggtgcagctggctaaacttcgaagatcaatcaccgaaaggggagcgaaagatgaagacactctcgggaacttcctgatagcaaggagagtgaatatggagcaatgtgaggtgaccgcgtaggtcacagggcacagaaacctttcccctgctatctcccttcctggttcgaaaggactcattcctttcctccaattcaaccccaatagagtatgattgcttacagtgcatgtgcgttccaatacgaattactatcgatagagtacatctttgtaacatgaaaaatgagcgggctgggtgtaagacgaacgttgccataaccagccctaacagagccagttttagacggtgccgcaagggggactatttacaaagcgtaccaacgatgcaccaagtgattgcagactaaactccgtgagtgtgacccccctatgacgtgttaccgagtctgcgataaccaccgaagaccagagcccaaagtcgtgtgctccaccacaaagacggaacacagacatgaacaccagagtgaccaatatgacaccgtatttacaacgcgtctgatgtcacaacctcgtatc

SEQ ID NO: 552714 - DNA, 307 bp, Homo sapiens
aaataaggaagggtcccaggtgtgagagccccgagtagagaacaataatgaacaattatagtaggaacaatagttagagacagctaatcacaaacaacctgcgggcacaatgacctcattccacacgtagcacccttcagcaggaccctataaaactttcctccagcccttgcctctttgcaggtagccccttcactgctgagctgcccactgcatcatattttcacaatttctccaataaatctgcccttctttacctacaactatcttggtaaatggctttaccacctgcaaaactgaccctagg

SEQ ID NO: 552715 - DNA, 907 bp, Homo sapiens
agcggatgtgctgtatctgaaagcataatgagaaaacgaattgtacttgttacgctacatgtctaaaactggatctgttggaggttagtgctgtgtactgttgatagttctgagtgtgcaggcctacggataactttataccaaagttttcacataggcagttaggcttttactgtaactatcaagacaagatgacagacaaactattggcatcgactgaaagccgataacatttggcctcatttggatttctttacccagttcacgagtgtaaacgaagttagactctcatgctttcattgtacctgcaggcctgtgggcattgtacagtagataacttaatttctaaaaagaacagctgccgtatccttcttcctaggtcaggtatatagtctgtcatacatcacgaagaacttcagtgattggcaaccaatacgaactcctggctctatgacactctttgacacttggttctagtatcattgagttaatatcactcagtatatattcttctgtattaagctcactttgggcgctcacttttacagcctgatcatacctttaggtcatcatcatcgttgacatataggtgtctatgggactattgaatgcaaggatccccgtattaacgttggaggccgcacgcaattgttgcgtgatgattgacgctatggaaccgtcaatttcttggctgagacaggggatgcaaattgagaggcaaaggggacatctgtgcaccattgggtcatcgggaaaaggtactacacagcaatggtgccccaaaggaggtaccaagtacacactggggacccaaactggcaagaaacggtaaacgagcagtgaacaatggcccatcggaagaatacgatacacagccagtgacaagcaaacacgaagcataagcata

SEQ ID NO: 552716 - DNA, 696 bp, Homo sapiens
cccaagggtgcgactccgaagccaacacaatactcttaaatgtccggctccgcacagatacgaaactgggctgcagggagaattattaatgaggagtgtggtgggatggcatcagcagttttgacctgtcgtgccgaggtatacttctacacccctaggatctgcacgagtgtctaagtgcctctcgaacatcattgcacaataaagcactcaagcctctcagaaatcactcaaggaagggaggacgaggtatgatggaagcttcttcacagaaaatcttgcagacatcatgttcttggctgtgtttcgctccaccttgatccagctgtctatgaaactctaaggactttcgctaaaatgtcccattttgtcttgtttccattggatgaaatctgtcacaaaggtgcctagagctccacacgactcggggcctgatggcatctgctgcataatggtggctttggatgagctggtccccaagcagtgccagcagctgggccttattccaggggctcctgcataagtgaacacgcacagccaggcgtcagaatgtcagagcatcatgaggcttgagagctgcctggtactgtgtgctccaagcctggcagggaggctgtgtgcagatgctaaatccaggatgaaaggcttggagaacctggagtaaagctcgtgaatggttccaggcccaggaagtta

SEQ ID NO: 552717 - DNA, 237 bp, Homo sapiens
taacctaaaacacccgggggtttaattttaacgggttgcccaaaagcaccactttcccaagaacaccggcgctaacaggggggccgcccaagaaggcagcaggagcacacttcacgagcttccttctccctctggggcgcaacaagagggaggggtgccgtgggaacattccgcaggcgctcgcaagggcggcaagcgcaaggaggctccccaagcaaaactctgtgttcagagtgg

SEQ ID NO: 552718 - DNA, 374 bp, Homo sapiens
ctctagagatcccctgcgggttcttctgacggggtggctgccaggcggaggggcttctcacttctccgacggggtgtgctgccgggcagaggggctctcacttctcagacggggcggccaggcagagacgctcctcacctcccagacggggtcgcggccgggcagaggcgctcctcacatcccagacggggcagcggggcagaggcgctccccacctctcacgacgccgggtggccgggcagacgaccgctcctcaccttcctagacgggatggcggccggggagaggtgctcctcacttcccagatggggcagccgggcagaggggctcctcacatcccagaccgctgggtggtcacggacagacgaccccgc

SEQ ID NO: 552719 - DNA, 169 bp, Homo sapiens
gtagtattatgctgaggatggagggctcaaatggcgggtcttccagagccagctcctgcctcctttccacccggatatctgcgtaactgaccaccgagtgtgtgcacacgcatgaactctgggcttggatgttccacgtgactggtagtgtgactgtagtacgtagtgc

SEQ ID NO: 552720 - DNA, 118 bp, Homo sapiens
  misc_feature (38)..(38): n is a, c, g, or t
gttacaaagttataaaagacaaaacacccactgtaganatgggctcttgatgttactgtacagcgtgtccaaggtaacaagaagaaaaaaatgtgagtggcatcctgggatgagcagg

SEQ ID NO: 552721 - DNA, 1047 bp, Homo sapiens
  misc_feature (7)..(7): n is a, c, g, or t
  misc_feature (64)..(64): n is a, c, g, or t
  misc_feature (66)..(66): n is a, c, g, or t
  misc_feature (71)..(71): n is a, c, g, or t
  misc_feature (73)..(73): n is a, c, g, or t
  misc_feature (80)..(80): n is a, c, g, or t
  misc_feature (95)..(95): n is a, c, g, or t
  misc_feature (110)..(110): n is a, c, g, or t
  misc_feature (136)..(136): n is a, c, g, or t
  misc_feature (431)..(432): n is a, c, g, or t
  misc_feature (439)..(439): n is a, c, g, or t
  misc_feature (1009)..(1009): n is a, c, g, or t
  misc_feature (1012)..(1012): n is a, c, g, or t
  misc_feature (1016)..(1016): n is a, c, g, or t
cccatgncctgcagaaacacctggctgggctgggcctgactgaggccattgacaagaacaaggntnttttntnacgcatntcaggcaagaagganttttacctggcccantttccacgccaccgcctttgagttgnacacagatggcaacccctttgaccaggacatctacgggcgcgagggaggcgcagccccaagctgttctacgccgaccaccccttcatcttcctagtgcgggacacccaaagcggctccctgctattcattgggcgcctggtccggcctaagggtgacaagatgcgagacgagttatagggcctcagggtgcacacaggatggcaggaggcatccaaaggctcctgagacacatgggtgctattggggttgggggggaggtgaggtaccagccttggatactccatggggtggggnnggaaaancagaccggggttcccgtgtgcctgagcggaccttcccagctagaattcactccacttggacatgggccccagataccatgatgctgagcccggaaactccacatcctgtgggacctgggccatagtcattctgcctgccctgaaagtcccagatcaagcctgcctcaatcagtattcatatttatagccaggtaccttctcacctgtgagaccaaattgagctaggggggtcagccagccctcttctgacactaaaacacctcagctgcctccccagctctatcccaacctctcccaactataaaactaggtgctgcagcccctgggaccaggcacccccagaatgacctggccgcagtgaggcggattgagaaggagctcccaggaggggcttctgggaagactctggtcaagaagcatcgtgtctggcgttgtggggatgaactttttgttttgtttcttccttttttagttcttcaaagatagggagggaagggggaacatgagcctttgttgctatcaatccaagaacttatttgtacatttttttttcaataaaacttttcccantgnaaanaaacccaaaaaaaccgagactagttctctcc

SEQ ID NO: 552722 - DNA, 120 bp, Homo sapiens
gccgtcatcattttctcagtgtttcaacagacaccgtgatgttatggcgttcgcgcaattttctgcggcagcgttggtccaaagtcgctgtaatgatcgtgaagtaaagaaagtacaggc

SEQ ID NO: 552723 - DNA, 339 bp, Homo sapiens
  misc_feature (115)..(115): n is a, c, g, or t
  misc_feature (139)..(139): n is a, c, g, or t
  misc_feature (156)..(156): n is a, c, g, or t
  misc_feature (201)..(201): n is a, c, g, or t
  misc_feature (286)..(286): n is a, c, g, or t
  misc_feature (338)..(338): n is a, c, g, or t
cctcagacgtggtaaactgaggccggcgaggagggaggctgagtccggggaccaggcggccccttcactgctctccggcccgtctcccccctgcgcctgttcgtacgggctaggncggcggccgagtccagcgggctcnggggcccaggcctgtcntgcgggcggcgcctcctcctccgcgccgtccccatgctcgccctncgcgtcgctctcgtccgagttgtcctcctccaagtacggtaacctgccaccttgtgctggggccgcgggatgcggggctagtcgnggccacccccggcgcagcttctgctccatccgcaggtaggagaccgcggtcnc

SEQ ID NO: 552724 - DNA, 1329 bp, Homo sapiens
gactagttctatatcgcgagcggccgtcccaaaaaaaaaaaaaaaaaaaaaaaaaaaaaaaaaaaaaaaaaaaaaaaaaaaaaaaaaaaaaaaaaaaaaaaaaaaaaaaaaaaaaaaaaaaaaaaaaaaaaaaaaaaaaaaaaaaaaaaaaaaaaaaaaaaaaaaaaaaaagagcgaggcggcgggcggcgcggcgcgcccgcatcttctctggagcgagaggagaggcgcgacaaagagaagaaggaccaaccgacagggcagaggaggaggaggcggagggcgcagcgcgccaaggcgagggaggacccgaaacaaacaaggaagggagagcggggagaccatgaacaaggcaaggcgggggagggaggagggaggaggagagaagaacgagagaccaaggacgaagcgaaaaagacaacccgcaacaggagcgagggagaggagcgaaggaaagaagaggagggggaaggaaacgaaaacaacaaacaggcagacaagaacgaacacacagacccagaacgcggaaaagaaataacaaagatcaaagacgtgatagtggtaatgtagagcatatcgggcgatgagagctcagacgcttggccactgatttagtttgtataggctagtagctatagaataatagaaaagacagagcgatgtaatagttagataataaaacaaaacaatggtatgtcactttcttataacttcaaagtatagagaagagagacgaaagtcacacacaaggaggaggccggggaggggagagacagggcggcgagcaagccgagagagacgcgcgggccagagggagacggacgacgggagacgggggcgcagggagaggagagggagggcacggacgagcacagcgccgcaggcggggcggagggaggcggcacggggagggcggaacgagggggcgaggaagagagacgcagggcgcagcgaggaacaggacgaagccgacagagacaggaagaaggaacgagacgaagaaagaggacgaaggcacaacgaggagcgacggcgacgggagagagagggcacaagcgagaacgaagagagacgagggagcacaaagacagcgggagcaggagagacggggcggcgagtataatttcaaatatggtatatatatgtgcggaatggagagataaatacaaaaccaactcgagttaccaagatcatacaagataaactctgaatctcaatatcaggatagcgaacgatccgcatctcattatgatatgtagaaggaaaaatcattaaacaaataacatacatagataataatataagatgatgcacaaataagattacata

SEQ ID NO: 552725 - DNA, 192 bp, Homo sapiens
  misc_feature (86)..(86): n is a, c, g, or t
  misc_feature (94)..(94): n is a, c, g, or t
  misc_feature (96)..(96): n is a, c, g, or t
  misc_feature (102)..(102): n is a, c, g, or t
  misc_feature (106)..(107): n is a, c, g, or t
gatgaaatgatctgctgcaggtctcttagccctaggattcatctttcttttcaccgtgggcccttacttgcattttattagcaacncatcactngncatcgnactnnacggcacgtacttcggtgttgctcacttccacattgccattcaataggggctgtattgccatcatggaggcgtcattcactgatt

SEQ ID NO: 552726 - DNA, 231 bp, Homo sapiens
acgggagatgtctgaggcgtgtcttccaggccctcccacagctggtgccctccacagggtagacttgaacactgggcctcaggtgatccttccacctgggcctcccaaagcatggggattacaggcgagagccacgggtgggctaaaatatttatatttacctgacatgattggtggagtgggggggcagggagttctaaaacaacaagtaaaaaatcgtgcgggggctgc

SEQ ID NO: 552727 - DNA, 239 bp, Homo sapiens
tcccgtacgggaagctctaacaggcttcatcagatcttcggggctgaacccatcatacaccatagtgtggttgaagatagggatggagggctaccctacggctcaggtcatctggcgagttatcctacttgtatctggaaatgtggtacatatacacaaacagaatatatcttgactaccccttaagcagtgatatatcctttcatacccttcacccagatatgcactactccagtaat

SEQ ID NO: 552728 - DNA, 141 bp, Homo sapiens
ttcgacccacgcgtccgtgttcctgaaaaagtgatttgtattagttttacatttgttttttggaagattatattttatgatgatacatatacaaatataatcttccaaaaaatatttaaataaaaagtatctttagagtga

SEQ ID NO: 552729 - DNA, 315 bp, Homo sapiens
acaaagagtccaaaagttaccaaaagaactactttccaggatgagctaataagagcaattacagctcgctcagccagacaaaggagttctgaatactcagatgactttgacaggtatgagattgtttctttaggggatttttctgacacttcagcagatgaaaattcaggttaattaaaaaatggatgactttcatatatccagatggatgaagggaagggtccctcaaaactattgtttttggagaaaccaataaatcaaacggtaacacatccacagagtagaccagagtgtgccatacatgatgaagagaga

SEQ ID NO: 552730 - DNA, 157 bp, Homo sapiens
ggcagagggtaggtatcctttctcttcaataattttcttaatggcacctggaaactcatctgctgacctcttggctggacaggaagctgcatctccggttatcttgacatttcttaacccaaacctctcatctaaaataataaaaccatcaattggc

SEQ ID NO: 552731 - DNA, 465 bp, Homo sapiens
  misc_feature (20)..(20): n is a, c, g, or t
  misc_feature (37)..(37): n is a, c, g, or t
  misc_feature (80)..(80): n is a, c, g, or t
  misc_feature (171)..(171): n is a, c, g, or t
  misc_feature (217)..(217): n is a, c, g, or t
  misc_feature (243)..(243): n is a, c, g, or t
  misc_feature (246)..(246): n is a, c, g, or t
  misc_feature (380)..(380): n is a, c, g, or t
  misc_feature (396)..(396): n is a, c, g, or t
  misc_feature (398)..(398): n is a, c, g, or t
  misc_feature (432)..(432): n is a, c, g, or t
  misc_feature (439)..(439): n is a, c, g, or t
  misc_feature (442)..(442): n is a, c, g, or t
aagcggaaccataggcatgntgcggccccagatgagngcggagggcaaagcaggtgccggggcagcgcacaccccacaancaagcgcccctgcccagcctctgtaaacagaccctcacaggtccctcctgggccttcagtcacatccctgagaaacacttggcggcttctncccgagagggccagggtgtccaccgagcctgctgaagccagctgtnccctcccttcttgcagagcaggctcnacnactgctgaagcccagcacctgcagggcccagcctggggaccaccaatgcccggcctcttccagctcagaagcgcacacggcagccacggggcagcggcaaaggcgatggtacagagcaaatgcctccccaggcngtgacaggcacgcacnantctccagggcgccactgcccacgccggcctaganctcctcngtnatgctccccagggtggcggtcgc

SEQ ID NO: 552732 - DNA, 312 bp, Homo sapiens
gttcccgctcggtacctgtgactaataccaagtactcgctggactgttcagcgtgccagacctcattccattccaaaattatgcccggatgctatccgcccagctgctcctagtaccaccattatagtactactcagtaccagcttcttcacaggttccacgagtcatgtcaacacagcgtgttgctaacactattcaacacatcacaatgggtcctcttcctgctagctgcagccgctgcatctactcctgctgtccgcaccgttccacattataaatatgctgcatgagttcgcaatcctcagcaacatc

SEQ ID NO: 552733 - DNA, 825 bp, Homo sapiens
acgacatatgttagtgtcggcccaattcacacttgggacacagtcttttttgaggtgtcgaagcaaacgtttttatattgcgcttaaccccgggcccagcccccattttccccgcctttgtgggaaagaaaagttgtctctttccgcgagaaccatgtttctgggtggagcgtgtgaaaacacattgtaaaaccatttcatggcccgtctaagaaggggacaatagtgccttttgcggtcatcaacctttccagaacattcctttgtgttatgcccccccctcagataacagttgccccgggagaaatcacccccccccacacgggtgctgttccgtccaacaagccccccgaggcaatcttggttggacaacgtattatctcggactcgcccccgtttttctaaggtcaggcgcctctttgtcaactctcgcggtatttctaacctgaaacagcctggtaaccggcttatacgaattttgctccacacaatgttgtgaaactgacgtgtttcttctggaagccaatatcagcgcacctcgtaaaccacagtttacatctgttgaaatcgacaacattgacactctgtcttgatcaagacagacaaatttggatggtttatgcacatcttcaaaggacagttgtccagatattctccccgccccccctttcaacgccagtgcggtcggatgacggtccccggcgtcccaccatatgcgaatatttaagggaagccctcggttttttccaattcacgggggcaaaaaaaataggttgtttatataaaaaggcgtcacaaaacccaatcccccctcgcaaaaaaaca

SEQ ID NO: 552734 - DNA, 917 bp, Homo sapiens
  misc_feature (914)..(914): n is a, c, g, or t
gataaagaagggcattacataatggtaaaggaaacaattcaacaagaagggctaactatccaaatcatatatgcacccaatacaggagtacccagattcataaaacaagttcttagagacctacaaagagacttagactcccacacaataatagtgggagactttaactccccactgtcaatattagatcaatgagacagaaaattaacaaggatattcaggacttgaactcagctctggatcaagtggacctaatagacatctacagaactctccacctcaaatcaacagaatatacattcttctcagtggcatatggcacttaatctaaaatctaccacataagtaaaacatttcctcagcaaatgcaaaagaactgaaatcataacagaccacagaccacagtgcagttacatggaaattgaataagctgcttctgaatgactcctggataaataatgaaattagggcagaaataaagaagttctacaatgaagaagacaataaaggataacgacgaatacaggatggagaacaaagagacaatgtaccaaaatctctgggacacagctaaagcagtgttaagagggacattatagcactaatgccacatcagaaaggctagaaggaattcaatggaacacctacatacaattaaaagactagagaggagggagcaataatcatagtagcgaagacagaataactagatcaaccgaatggagtattgagaccttggaatttcccaatatcaggatccaattgtggtggaaaatatatttggcctcgtgtcttaggaacatatcctgaacagtggggtcaccggcaaaaatcacgagaggtaatcaaaaagaagagtgttacccccagggatccgttccttcgtcctgctggcccgtcgtcactctctacangtg

SEQ ID NO: 552735 - DNA, 781 bp, Homo sapiens
gacaatcttgagtggtacgtcatcgtttccgcagccattcatctgctaatcggggaaaatcgcctcagcagaacaagcaagtaaaacacggatgtcccccacattcacctgatccgtacttagttaattctgggttctaccagtgcctgtgggcacacttttgcacagatcaaattcatgtggaaaaatgttctgtttgtagaactcctaggtattcacttatagtgctcatgtccaggaatggccagtgagttagagccccctgataatctgcttttgttagaacgttatgccaagataataaaaccctgtccccttcttttctagttctaatccaggtttttagaccctccagatttatttacttttgcatgagatttgtttccttcattatttgatatgttgctatacgcttggattagagaaaaccttcgcttgaaatgtacttgtgcacggtattaaagcaccactgtggagctaaacgtttggcactttgtcacgtattgttctactcgtgttgtaacctgaaagtgctcactttttaaaattcgctagcttaaccacctgtgagctgatagcctctgtgaatttttttagagtttctccaacttggtaattctttaaatgtttcccgatagcccttagttttagctgctgtaaaatagctactttgcgttatttgatatagaattgttttttaaaaactccctttatttataccgagacctttataatattttaccaaccttcttatattctggatcaatatttctaattccca

SEQ ID NO: 552736 - DNA, 152 bp, Homo sapiens
gttgtgttacttttagttttatagcaatctgattcaattatacatatgaatatgtatattctttttcatattttttcccatatcggtcatcacagaatattggtagagttctgacatcttaatctgggcccagcctgctggtccggctcact

SEQ ID NO: 552737 - DNA, 172 bp, Homo sapiens
  misc_feature (23)..(23): n is a, c, g, or t
  misc_feature (30)..(30): n is a, c, g, or t
tggggcactagcatttctgatgnccttttncactacgtaggcactgctactcttgaggatacccggacgagccgcagtcagaggtataaggaggagcagtgacgtccagtatctaaactgaacacgggaaccattctgcacaggagacttttccgtaacttaagctgctaca

SEQ ID NO: 552738 - DNA, 207 bp, Homo sapiens
acaagtcactctagaggattcccaccatgcttgtggccccagattacgatgtcatgacttgtaacaaccctttcgatagcaatctgattcaattatacatatgaatatgtatattctttttcatattttttcccatatcggtcatcacagaatattggtagagttctgacatcttaatctgggcccagcctgctggtccggctcact

SEQ ID NO: 552739 - DNA, 162 bp, Homo sapiens
tttcaatctccctccaagctctactctggaggagtctgtcccactctgtaagtggaatccttcctttacaactctacctcctcactcagctcctttccctgatcagagaaagagatcaagggggttggagggagaaagagaccagccttgtcctaagcctca

SEQ ID NO: 552740 - DNA, 230 bp, Homo sapiens
acatcatatatcagaacaagtatcacctatcaacttcaaaaaagtaaaggttacaacgagtggcacacttataaaatacttgcgtggccaaggaaaggtatatagtaaaagttgtacaccatgtgtatgtactcataactttaagtgtgaggccacatgacagacagtacatctgttaaattctataaattgttaaacgcaaaaaagggaaagcttcaacaccccatccc

SEQ ID NO: 552741 - DNA, 479 bp, Homo sapiens
  misc_feature (35)..(35): n is a, c, g, or t
  misc_feature (85)..(85): n is a, c, g, or t
  misc_feature (101)..(101): n is a, c, g, or t
  misc_feature (103)..(103): n is a, c, g, or t
  misc_feature (110)..(110): n is a, c, g, or t
  misc_feature (149)..(149): n is a, c, g, or t
  misc_feature (157)..(157): n is a, c, g, or t
  misc_feature (230)..(230): n is a, c, g, or t
  misc_feature (236)..(236): n is a, c, g, or t
  misc_feature (240)..(240): n is a, c, g, or t
  misc_feature (284)..(284): n is a, c, g, or t
  misc_feature (311)..(311): n is a, c, g, or t
  misc_feature (315)..(315): n is a, c, g, or t
  misc_feature (319)..(319): n is a, c, g, or t
  misc_feature (334)..(334): n is a, c, g, or t
  misc_feature (337)..(337): n is a, c, g, or t
  misc_feature (354)..(354): n is a, c, g, or t
  misc_feature (392)..(392): n is a, c, g, or t
  misc_feature (400)..(400): n is a, c, g, or t
  misc_feature (405)..(405): n is a, c, g, or t
  misc_feature (419)..(419): n is a, c, g, or t
  misc_feature (476)..(476): n is a, c, g, or t
aggaagcaacaaaggtagaaaagaaaccttattcnctatcaaaggccaaaaaagcaagaacaaaaattcattcccctttggaganaaatgtagtccatctnanaaaaaanaagaaaagtcctggctgtcctgcaacagggtccacaggncaaatacntcatcccacaatcttgggccactagtaaacacccattggcatatccaccaacaacaaaaaccaggcgatttanttagcnaccnaaaataatgcacagacctccccaggctgtttcacaaatttgggncggcgtgatgagaataacccgatactnaggnatgnccacggacttcaggnacngcaccatgctctatagnttcgcagcgtactcctccaggggaatgtgctgcttggnattctcanctctnagtgcactgtcatnggccccaaagaaaatggtaactgctactgggatgtccaaactgtgtcctttcctgantaa

SEQ ID NO: 552742 - DNA, 106 bp, Homo sapiens
aaaagagaaaaaaaaagcgaaagcaaaaaaagaaagagggagggaaccaccgcaaaaaagaaagcagcgaaaaaaaaaaaacaccatcaacaggcaagaaaaaaag

SEQ ID NO: 552743 - DNA, 508 bp, Homo sapiens
  misc_feature (215)..(215): n is a, c, g, or t
tggaattgtgtgttatggatggcttcatgcaaataatacaacaaataaatataatatgaagttgtgatgcatgtaaagattttgatataagatataaatgcaacaagagtaaatgcgatgcataaatagatgacttgacacatttaatcatcatataattatgaaaggaaaatatcacatgagatttcacatttgatatcatgataagttagttnccataacatggaaaacctgttttcaaaacttgacaacgtattatatcaaaacatgactgcgaatttagaacatgacaacttacatctcagaatctgtgttaagaatgcagcacatgacaacaatgcaatttccagaacaaatcaaatacaattatcaaaatatgacaccactattcagaacgttttaatgtagttatgtcaacacctgacaatgcagttacatccgaacatgacaatgtgatttcaagaacatgaatatgaagttatcaaaacataacaccacacaattccgg

SEQ ID NO: 552744 - DNA, 250 bp, Homo sapiens
tggcatctcagctggggaataaagaatatgtctcatcattacaaggctcttgggcgagattcctataacagaagacagatcaacaagaaaaaaagcatcaagatttatttaatataagttttatgtaacataggagacttcagaaatgaagacccaaagaaacagataaatctgtgtatttttatggacagtcttgcagaagtacgattggaggacaaaagggtacgctctaatggtaacaaattggtcg

SEQ ID NO: 552745 - DNA, 475 bp, Homo sapiens
  misc_feature (5)..(5): n is a, c, g, or t
  misc_feature (62)..(62): n is a, c, g, or t
  misc_feature (249)..(249): n is a, c, g, or t
  misc_feature (381)..(381): n is a, c, g, or t
cgccnggtctgctatgatctctttcacttcgcctgcctcaatgaacgtgctgcccagctacnccgaaacacgccacctgcgcgctatcagtgcccaggctgcaattgcccattcttcacaccaaccaacctggcttgccccgtggcctccgcactgagagagaagctggccccagtcaactgtggcccgcgcaagactgggcctccctctgatcgatgaggtgttgaggcccagaagcccgagccctcnaacacgtctgacttctctgacttgtctagttttaatgccagcagtacccctgaccagaggaggtagacaggcgcctctgctgccccagccttctacagccagggcccccggcccccagcttccccaaggccnggcccgagcagcacacagtgatccacatgggcaatcctgaggcccttgactcacgcccctaggaagggtgtatgatacgcgggatgatgaccgg

SEQ ID NO: 552746 - DNA, 146 bp, Homo sapiens
tttaggccagtcatgtaaaaatggatctccaggcaagtcttgctcctggatgcctctgcaggccaaattctccagaagttggctctcctaatcagtcctgctcatgtctggctacacaggcccagactcttaccacacagttcaga

SEQ ID NO: 552747 - DNA, 232 bp, Homo sapiens
atatgcgcatctggtgcaggcataggacagcaacgttgtatcaactatgaagagctcgtccgcattgtgctgaatggcgtgaggaccttcccagtctccccagagtcctagcctttcccctggtgttaaaattgtatctagcctaaagtttccctaggctttcttgtctcagcaactttcccatcttgtctctcttggatgatgtttgccgtcagcatctccgctttggaaa

SEQ ID NO: 552748 - DNA, 122 bp, Homo sapiens
gtctgtcgtcctgtcacgctcggtatgttcttgagtgcacgtgtttataaaaaataaaacataaacccaccatcacaaaaaaaaaaattttggcagcgaagagaaataaagaaaaactgaag

SEQ ID NO: 552749 - DNA, 595 bp, Homo sapiens
gcatttatgtggtagcatttgtcagtactctgtgcctttttatggctgaataatattttatcatatggatttaccacattttatcattttatttatccatcatcagttgattgacatttgagttgcttctactttttgagtattatcaataattctgttatgaacattcttgtataattttttggtagacatttatcttcatatttcttggatatatacctaggagcagaattgctgcgtcagatggtaatgctgtttaaccttttcaggaactgtcagactgttctgaagtgggtacattattttacattccaaccagcagtgtatgagaattccagtttctccacatcctcatcaacagttgttattggctgtctttgttattatattcatctgtaatgtgaagagtttatctcattgtggttttgatttacattcccctgatgggtgatgatttttaacatcttttcatatacttattagccattatgtttcttctttggagaatgcttgtcaagacccttacccactttataaacggttatctttttaatatgaactggaatagttctaaaaaatatatcttaaaacaagg

SEQ ID NO: 552750 - DNA, 842 bp, Homo sapiens
aaggcgtgaggtgcgaggcctgtgaggttatgttggaggagggcgctccaacgggtgcttcccctgcgacacagcccccatggatcgcagcttcagtcgtctttccgatcttccgacatgccgcatgcggaccccttagtccggtgcatgctcgtcgcctggcaccagctcgagctgcgatacgcgctgtacgacgttcgtagccccgacgaaacgacggtggagctggtgcttccatgagggtcggacgtcgtcacgcttgaccaatccagatcgatgagaactggtacgagggcttgctgtgactggtccagtcgggcttcttcccgctcagctacgtggaggtgcttgtgcccctgccgcagtgactcacccgtgtccccgccccgcgccctccgtccacactggccggcgttttatgaaagggtgtctcttgaattcaacacggtgtgctccgtgtctgtccggggtggtagtagtgtcactgaccgaggccaacctgggcccagagccctgaggtactccctgagcaggagacccacacattggattgcaagagggactaatctagagagtgggatggaggatagcctgtattacaactagcgaagactacacaatcagatgacgagctacccttacccaactccatggacggccagcatcctccacccgcataaccaattctcgcccagctggacaagggagggcaacaataaagtgctctaaaaacacaatgtcatctgggaagccccactaggcctgaacggacggtaccgacacatagctacatgagtccgcacatacagaaggatcgagcgcccatggatgcagaatgacag

SEQ ID NO: 552751 - DNA, 292 bp, Homo sapiens
aggatcgtgatgtatcgcccaacacgaatgattaggttgggtagttttcctgcttgtgtaatttttgataaataagacgttaatactgttttaatgaaaacagttaaatattgaattatttagtaaaataaccatatatttaatcttaaggtttctactcacctaaatatctgaaattcacaggctataaaatggttgacagggaaataactttacatgatgactcacagttttcataaataatgcaggtaaactatttatataaaataattaggtgttggggataacatca

SEQ ID NO: 552752 - DNA, 854 bp, Homo sapiens
gcttgatttggaacaagagttcctggtgtgatccccatctctccatatcacatgtcaactacttcctagaccagttccagcttctttttccctctgtgatggttgtagtagaacaaattaaaagtcaaaagattcatggttgtcaaatcctggaaacagtctacaaacacagctgtgtgggggttgcctcctgttcgaagtgcactggaaccaatcctggccgtttgtcatggggtcatgtataaacagctctcagcctggatgctccatggacatcctcttggaccaggcatgaaggaattccttaatcaacacatgggtgccatacttctggtaactgtcatgtgcccagccagaagcaggacgacggacggatctgggcatttgtgagtggactgacagtgaaaacaactgagagaaactgcgagtgaccttgcgcctgattgacggaagagaacatgctggcaccatctctgacagagcaggttttccctacgatgtggagaatttctggcactcctacgatagcccagtgacgggtctgctgaacgacacgtcctatatcgtaggcgaactcttgtccagatgtcccgagaactcagacatgagaacctgacctcagacaacacggatccagtgtgaaaaaccaggcgcaggacacctagaacggccttgaagaagggcagcacccggagcatcagagcagcaaggccagcgccagccaggcatgccggccctgcgacaccagggtgcggtgagagcgacatccgcagcactaggggcagagcgtatctcggcacacgcgcggcagaacgacccgggacaaccggggccagctgacaaccagacaggac

SEQ ID NO: 552753 - DNA, 117 bp, Homo sapiens
cagactgtcgacattccagaccatgtcgacattactctgaagggacgacagttatcgtgcagggcccacgacgaccctcggagggacgtcatcacatcagttagactcagcctctgg

SEQ ID NO: 552754 - DNA, 597 bp, Homo sapiens
ggtggaccttcggggtgtacgtgcgtccggggatcttcaggcgcccggggtggggcactcggccggtcgcgttgggcgttcttctgtgactcgatctgcggccagcttgtgcgcgcttcacacctccgtcacgccagtcatggttgacagctcgctgaaggcaacggtaagaatagtcagaggctgatcccgcaagaatatactgcgctcgctcgctgcctatcaaggacggtagtaaggaagagtgagtgagaggattggaggcaaatggtccaggaacgatgatacgcaaagtacgtgactacgtcatggtgcgtaagcataagcacgcggttctgttgagtagccgtcaggagagcaaacagggcaaagggatacggcgcgttcgtgtggtcagagctctttctagaccaaatagataagtgtctggtgtcaagtttgaacacctcatagacatagaactacttgcggtgtgccgggttttgtccatcatcacatgactcgagcggacgatcgcacgacatggatttacggtttccagggggcttagaagattggccaagtcatggacaatggggccattggcccaaggaatag

SEQ ID NO: 552755 - DNA, 227 bp, Homo sapiens
tcacggagcgactcttgatcctgcatggtctcttgggccaggactgttgatgcctttgagtttgtatcaataaacttaaattgtgtgagataatatttaattgctcagtgatgttccataacccggctaggatcagctaggagtgctgggagatagagggcctcccggactcctgctcccttcgtgagctctgactctccgtggaaatctctcccaggccagagcta

SEQ ID NO: 552756 - DNA, 277 bp, Homo sapiens
tacggtccttgccggaatcaccatagctgtctgccacaaagttagaactaatttacattcccaccaagaatgtaaacacgttcctacttctccacagcctcactagcctctattgtttcttgattttttaataatcgccattctgactggcgtgaaatggtatctcattgtatttctctgatgatcagtgatgtcgagctttttttcatatggtccattggctgcttaaatgtctgagacgtgttggtcatatcttcacccactcttgataggtggt

SEQ ID NO: 552757 - DNA, 190 bp, Homo sapiens
ggaaccgaatcttgaaatctcctctcgtccatagcattctgaacatcctgagtcatctgcacgcactccatcagcggcaggcgcacggcgtgcttcccgttcagtgacacgacgcaagctggggtgtacggggtggcctctagcaaggtgatgactgcctccactcccatgcggatggccaacatcctgt

SEQ ID NO: 552758 - DNA, 182 bp, Homo sapiens
  misc_feature (1)..(2): n is a, c, g, or t
nnggcggcgggggaggggttctcccccctgtgttcttcttttctggaggcccggtttggggtcttccattaaaaccccgccccccccccggggaatttttctcttttttttttttagaccccccgggtggttttttgttgaaacccaaaaaaaccccctttttttttgggggggggccccca

SEQ ID NO: 552759 - DNA, 182 bp, Homo sapiens
ttagaggatcttatgtatggggtctgtacgtgagcgcgatggacaaggcggcggcgagcgctctaagatgatcgacaagaactgcgggaggacggagagaaggcggcgcgggacgtgaagttgctgctgttgggtgctggggaagtcagggaaagagcacccatcgtgcaagcacgatgaag

SEQ ID NO: 552760 - DNA, 329 bp, Homo sapiens
ggctggagtgcagtggcacaatcacagctcactgcaagccttgaccgcccctggatcaggtgatccacctcagctactcgggaggctgacgtgagagaatcgcttgaacccgggagttggaggttgcagtgagccgagattgcaccattgcactccagcttgggcaacaagagtgaaactcttgtctcagaaaaaaaaaaaaaagtatgcaactagctgggggctgtgacgcgtacctgtagtcccagctacttaggaggctgaggtgggaggatcactgatgctcaggagttcgtgaccagactaggcaaaatagcaagacaccatct

SEQ ID NO: 552761 - DNA, 637 bp, Homo sapiens
  misc_feature (186)..(186): n is a, c, g, or t
  misc_feature (320)..(320): n is a, c, g, or t
  misc_feature (349)..(350): n is a, c, g, or t
  misc_feature (512)..(512): n is a, c, g, or t
agtctcggaggggggggccgggtacccaaattcggccctataagtgaagtcgtattacaaattcactgggccggtcgttttacacacggtccgtgaactgtgggaaaaaccctgggcggttaacccacaacttaaatcggccctggcaggcacaattaccccctttcggccaggctgggcggtaantaagcgaaagaagggccggcaaccgaatcgggcccttcccaaacaggttggcgcacgcctggaaatgggcgaactgggcaaagttggtatagcggttaaataattttggttaacaaattccggcggttaaaacntttttggttaaacttcaggcttcaatttnntttaaaccacaataagggccgagaaattcgggcacaaaattcccgttaatataagtcacaaacgacatatgaaccgaggaataagcgggttggaaggtggttggttccacaggtttgggacaccaaggaagtcccacctaattacaaggaaacggtgggacntcccaaacggtcacaagagggcgccatccaacccgttaatccaaggttatttaaggggggtccgaaggtggccggtaacagcgacattaaatccgggaaacccttgagggagagccccggtttag

SEQ ID NO: 552762 - DNA, 370 bp, Homo sapiens
aggacgcggtattacaagatagagcctctgtgcgtgacctaaatgctataatggtcatttacagaggaagtcatgatgtggtccacggcctacaatgacactgttgagatattaccctaacaaagtctatatcctttctgagtgtttgtggaactcaccttgagacactctacatcagcggggctcttggtaatacaggtctctgcgttatgcagaaacgggaaacatcatgctcccttttggagctgagatgttaagaacacttaaacccttgccaaacttttttatatatgcttgaaaacgcatgggttttactttgtggtgcgctagagggatacctatcagaggatcaccggggcgggggtttttt

SEQ ID NO: 552763 - DNA, 452 bp, Homo sapiens
tatattatgtagatacagggtttcaccatgtcgcccaggccggtattcgaatgcctgagctcaaggtgatccaccaccttggcttcccaaagtgctaggatggcaggcgtgagcgaccaggcgcggccaaaacagcatatttcaacagcgagcaccgcaggacacaactaggcacagcccaaaaaaccaggatcgggagtgagatggacgcggtttgaatccgtcgttggtctcttagcctggggtgacgtgggcaaactgacttcctttttccgagcctcagtcttctcagtctgtaaaatgggcgctgatggcactcctctcatccgggggctactatagggagtcagtgagtgtgtgactggccgtcagtgaagagcctgacccattgcatggctgttacagatcatggtgttgtggcaggttgtaatgccccccaaaagatgtccagg

SEQ ID NO: 552764 - DNA, 220 bp, Homo sapiens
attagacactaaaaacaattagatgtcagaggcaggtacaatggaacgagaaatcaaaccagttactttatcagtgtattccctcttctttacaactgtaacgcaaaaaaagaaaaggcattctgcttgaagatcagaataaatcagccaatatagttttcttctccatattaagcataaacagctacaagaaccctaagttgttgtctaattgcaatca

SEQ ID NO: 552765 - DNA, 820 bp, Homo sapiens
gcttcagttgagtggtgattgtgccattgcaccccaatcttaggcaagagagtgagacctgtctcaaagagtaaataaacaaataaagtataatattggaatctgtattgtgtacaagaagatttaaccgagttgaagtttataattgataattatgcaagatataggtgttccgcaaccttattttatgctatgatgtaactgttaggtctatgggctttcacactaaggctagtctttaagtttgtcgaagaagtgtgtaacaaatttaaggacaaatagtaacagatattaacaagtattaacaagtgaaattaaagattgtaattctatgaagattagacaattaagaagcaagatataatttgaattcaaagtaatcattcgaatgttgcatatggaagattgggatagcactgcttgggtactaagcgagattattaaaatataattgttacattttggaaaaacttatgtcagggtcagttttctaaagatatttacaacagatagttatactctcaggttacctcagtatccactattattccttttcaaagaataatttcttcattcttatattctgaacttttttctcattctcagagtatatcttaaagtaattggttaacgtattgtggaggatatagtttccatgagcttccatacttgagaattgacattctaaatacatttatgaactttttccctgaaacagtggtagggcaagtttaatggttaaagagtgtttaaaggaaagtctagataagcttggattggatgctggaatgttcaccttgtactttaaaattttagcaac

SEQ ID NO: 552766 - DNA, 325 bp, Homo sapiens
taccggaccctaatatagagtggccatgtgacgtcacgaagagtataagcgatggcgtagagcagatgcagcacgtacgcacacagacatggggaactaggcatgacgtacacaccgagatgcagcaacgacgtacacgggccaggtcgacgtacacacataatataatgtcacacagacgcggcgatggcatacacacagacggtgatgatagtacacacacagacacagtgacaacacacaccatgacaacgacacctaataagataataggcaccaacatacacatagcttgcatagccctattcacataggccactcaata

SEQ ID NO: 552767 - DNA, 170 bp, Homo sapiens
gtggtagcctaaataggctctcattatcagtttgaaaatgacttgttgatttgacttagacatattaagagtacttgttactcatttcttgtgcatagggtcgtgagcagctattcccatagtaaaactcttgcttacattctaaagatctattcagttcctaattgtaa

SEQ ID NO: 552768 - DNA, 242 bp, Homo sapiens
gaccttaatactctccgcagacaagcaccctccacagtcagccgaatgtctcctcagcataaagctttcttaagcctcatatacgaaaaaaactgaaagcaatctatccttgtgtgccactgggtgttctttccactttataccgaaagcaagtagcccatgcttaggaagtgtgtaaggccttttcagtattagacaatcattctacaaggagcttttcctctctctgagatgtcatgcag

SEQ ID NO: 552769 - DNA, 653 bp, Homo sapiens
ggggcaagggcttgctttgtcccccaggctggggggcaggaacttatcacaggctactgggggtgacattttacccgtttgggggaaagggaaaaacattacctttttacctttggaaagttctccccgatttcaaataaagaaagaaacctttttttggggccttttactctcccattataagggaactatcttaaggttttcctctacatatatgggcagccacttagacaagcgtaatttttgcttcaactgttgaacataatttaaaattctcaagaggaaaaagacaatttttttggttgccccgtgtgtttgctctttttggccttttttccggcccgaggttccaagaatccttttggtaccactccctttgtttagagaattggccttaagaaaccctataaaagaaaatctgcccgtgacaaattcccttaggttttccctcatgaaaaagtggaaggattttcttccccaaaaccctttccccccaattcttgagggattggttcaccagggttgggaatccaaggtggatagtttttctttttcagcttttaaaattggtcccactcttggggccgattcctgcagcccgggggactcacctagtttagagacgcccccaccggggggggcccccctttttt

SEQ ID NO: 552770 - DNA, 175 bp, Homo sapiens
ctcggtccattggagcgtagatctgatctgcttcgccgtgagttgtctcgacgtcaccctactacgacttgtggacagaggagccagaactggcttctttgtcttggtgatattacttgccttcactttggggttgtggagcatgatgcagcctagcactgggctctgttctggc

SEQ ID NO: 552771 - DNA, 626 bp, Homo sapiens
ctccttggctgactcaccgccctcgcagcgcacatggacgcccccaggcaggtggtcaactatgggcctggtcccgccaagctgccgcacgtccaggtgctagtctccgagatacaaaaggagactcattagacttagcaaaggagatggcccacttagatggttcgtggccaaactgcagttcacagcgtcactcacgatatgagcgcaagcacttattacacacacgtagcagagaagtctctgtgcgcggaacttggctacgctgattcacagacgaactatacaggtgatcgtttctgcaaggaggtgggtgcggccagttcagtgctgtccccttaaacctcattggcttgaaagcacggccaggtgtgcggactatgtggtgacacggcagcttggtcagctaaggccgcagaagaagccaagaagtatgggactaataaatatcgttcaccctaaacttgggcagttatacaaaaaattccagatccaagcacctggcacctcgaacacagatgcctcctacgtgtattatatgcgcaaatgagacggtgcatggtgtggacgtttgcataaatacccgatgtcaagggagccatactggtttgtgacatgtcctcaaa

SEQ ID NO: 552772 - DNA, 253 bp, Homo sapiens
  misc_feature (66)..(66): n is a, c, g, or t
  misc_feature (166)..(166): n is a, c, g, or t
  misc_feature (193)..(193): n is a, c, g, or t
  misc_feature (204)..(204): n is a, c, g, or t
  misc_feature (247)..(247): n is a, c, g, or t
tacttggggatttgttaaagtgtcatatggtgtccacaaaatactaaaaagatctgttccccgcgnctcactaaaaactcttcttcatgcaatatctatattgtaatatgacaactgctcctaacacccagagaagaactacagcatctactctttagcatctgtngctccgcactctgctttgctattatancactcacgcantctggctccgttcactattactgctgtcactcccgtgtatatnccctct

SEQ ID NO: 552773 - DNA, 637 bp, Homo sapiens
  misc_feature (13)..(13): n is a, c, g, or t
catggtgtcttcnagatcaggtaccgtcatggcacgtagcaaacgtccagatactcagtaggtaccctgaagatatagttcgatagctacagacgggcgatgggttacaggccttgacactcggtctccatcagtgtgcatacctccgactgcacatggactgcattgccatgcacgctttggcagcgtaagcctcccgttctctttccgtgcattgctaagctagtttgccatatcattcagtgaggatcagctctcacacatattacggaatgatgcctaccactgctcgcacatgaatgggttcaggatgtcgaatacataatggcatagacaggagaatctcagtcagtggtaatagttgtgacgtaaatagagcacaggtatgaggcatagattgacatagactggtgatagagatacggcctctgggacatttgtgctgagagttgctcatagagccatgtagcctatcaaggatctagggtgagagcaatgtaggcacttacgagggcttacgctccatggctgttacaggtttgttcattatgcattcgctttaattccagagccttgaatctgtggctgaaatctggtaatgtagtcaaaggtggtagcacataggttggcaggtgag

SEQ ID NO: 552774 - DNA, 795 bp, Homo sapiens
gcgatgtgtgcccgtgtgttttgtcccgccttgtccccaggccccgtggggacgcgttgtagaccctctttccccggcttgttcaaactctcggtgcagaattcagggcggtgtacctatctcagggctcatttgcgaacatggcatgtctggttaaccttcgctgttcggcgacattttgctcttttcgactacccacaccagccccgccgccccctctgcagttgttttggccgcccgtcccctagtgtctggtggcaaatttctggtgtttccccccggcctcgatttggcaaagaacaaaggctaggatccccaaaatccgcttggaaagttctgtccacccaaaagacaacaaggaatctatatgcctctcaacacacgtgggagcgcccacgaagatgctcgcccgccatagggacaagaagcgctccacagcatccccgcgccgatggcggacggacgccccgccaaaagccaccacccgcctctggggggacgtagagagccgggcacacgcgcgcggccccagcgatatggacccccccgggcgcacaaacaatagggaccccactacgttggggaaagaaaaattgggtctagaaagaataagggtggtctgcacagacagacggccatgctgtgtgcccgacacagccgagaaacacaacgggtctggagagagatactcagcgtccacaaggagggagcgtacgctcgccagagaggcaaagggagaccccgcaccgaccgacccctccccggcctcgccaagttttgtccccccacaaaaca

SEQ ID NO: 552775 - DNA, 455 bp, Homo sapiens
aacaatcccggacacacggtgaaacccgtctctaccaaaaatataaaaattagccgggcgtggtggcgggcgcctgtggtcccagctgctcgggaggttgaggcaggagagtggcatggacctgggaggtggaggttgcagagagcggaggtcgggtcaccgcagtccagcctgggcgacagagcaagactccgtctcaaaaaataaataaatacataaatacataaataaataaaataaaaataaaaaaacaatagagagtatgatttaccggcatagaatagtcggcgtctttaacacactcgatatcggtcacatttctgttaaggtcccaggccaactgctgagcctttgctttcatccttaggttcgtgattggtgggtttggatctaaaacggtgacaggttggagttagaagagatacgtaagaatcttaaaacggcattgtccgggg

SEQ ID NO: 552776 - DNA, 117 bp, Homo sapiens
gttccattacgaccgaagttgtcattcccaccgaaacacctccatgacaccaccaaagttccagaaccacttcgacctcttggcgtggatagaagcactagccatctcttgcttaga

SEQ ID NO: 552777 - DNA, 146 bp, Homo sapiens
catggtcttaaccagtgtcagatggaatcagtggataaatccccaggtttgtttgtccttcaaatgggacaatttgaggaatgctttaggcagaggactcagatgacagagcgccaaccacccacaatagaaacctgctcatcaca

SEQ ID NO: 552778 - DNA, 123 bp, Homo sapiens
  misc_feature (61)..(62): n is a, c, g, or t
ggcacgggcttgtcgtgctctctgagagaaagttgaaaagggtaaagtttagatatcggcnntattgtaagcataggagtgttggttttctcttcaacagacatcgcttttgcggttcccggg

SEQ ID NO: 552779 - DNA, 400 bp, Homo sapiens
  misc_feature (25)..(26): n is a, c, g, or t
  misc_feature (43)..(43): n is a, c, g, or t
  misc_feature (56)..(56): n is a, c, g, or t
  misc_feature (84)..(84): n is a, c, g, or t
gagaggagaggattggggggtaggnnaaggtgggattaagganaaaaataaagtgnaaaaagaacctggagtggtgaccttgancagtagacgttccaagcaatgccacttaagcccaataagaaaactttgaagaaactgagagaagtattacatgaattgtataaacatctagacagcagcgcagaaggtattattgatgctcctatggatattccaggtttaaacctgagtcaataagaatactactctctatgtgtactataagattgattgaagtttggtggaattagaattgtttttgggctgctcccccgacaaccctgtacttgcgctcgtgcccgctatccaaaataggacggtgtatggtaacaccctcccttctacccccctcgcccga

SEQ ID NO: 552780 - DNA, 283 bp, Homo sapiens
gattgccatctgaaaatagatatcgtgaagtatcttcaatttctatttgtggtgattttcaagcacaaagaatgaaacttcgttataaagaagatggaaaaactttatacgcaaacacaataaatggatctggacttgcaattgatagaataattgctataattttagaacagtatcaaacagaatctggttatattgaaattccggaagtattaattccatattttggtaaaattaagcagataacaaacaaataacacaataaaagtaagaaaaaaaaaaa

SEQ ID NO: 552781 - DNA, 936 bp, Homo sapiens
  misc_feature (537)..(537): n is a, c, g, or t
gtgcaacttcagtcaaacgttctcacgaaccttcgaacgcatggtaagagacacaactaattgtaagtatcaattatgatatcaatagatcattggaggtctacctagcacaataccctaatactcacatactcctcaacactatgtgactatgctgagcccaacatacctgcacaccaatgtaaagttacctcagagtaatctcatgcgcaacaacacaaaaggaaggtacaaagggactcaccattgacgagatggtagggatacgtgacgactgacaacatgttcgataagaacttcacgagatgggactactatgatagattgagacaacaattaatccttatgctcatgggattgggaacacgactctaagtactggctgaagacacatttgtgattataccttcgcgctaaacacgcaaaattctaactcgcattccacctcgcctcagtgtccgtagtcaaagaaagtaaccaaacttgccatctgctcaactaacattacactgaggaaagtataaaaactcgataatntagtatacatagttcggctcgtgggaacccgacgaaacacaggaggaattggcaacttcatgcccctatatgccaatccgtaaggtcagagcctagcacaaaggcccccatgaggggttatacaccaatatgtcccaatgcaccttacaaaacctgtgactattaaaggctcaccaggttggattcaaatatagcaggccgtcggggtaacctcgaatttactggctcacctccatggaacatcacgaggaagctccaggtccaaggtggggaaattaagaacgtgaggaggggaaccccaagaaaacttagagaattttccgaccgctaccttaatcaaagcgtaggaacttgcacccttttggaaaccagaaaagcttgaagcccaaaaaaaatgga

SEQ ID NO: 552782 - DNA, 206 bp, Homo sapiens
aggtggcaacatcggggcatcccccgtacgtcaggcaccgtgaggtcttcgcagaagcgtggacgccatgagggcgtctgtcgtccttacctcgttcaaaactcattttgaacgcatcccttattgcaaaatctaccttcgtttccacgctagagtatatacccctttggctcttcagacttacgaagtcctacgtccatcaatgt

SEQ ID NO: 552783 - DNA, 109 bp, Homo sapiens
gttgaatgaggaccttcaggaactctgcccctcaccccaacccatcctccccaggaggaatccagggactcagacctgtcccaggcttcaggaggctggttccagagga

SEQ ID NO: 552784 - DNA, 828 bp, Homo sapiens
  misc_feature (54)..(54): n is a, c, g, or t
  misc_feature (100)..(100): n is a, c, g, or t
  misc_feature (104)..(104): n is a, c, g, or t
  misc_feature (136)..(136): n is a, c, g, or t
  misc_feature (191)..(191): n is a, c, g, or t
  misc_feature (237)..(237): n is a, c, g, or t
  misc_feature (239)..(241): n is a, c, g, or t
  misc_feature (275)..(275): n is a, c, g, or t
  misc_feature (282)..(282): n is a, c, g, or t
  misc_feature (309)..(310): n is a, c, g, or t
  misc_feature (317)..(317): n is a, c, g, or t
  misc_feature (348)..(348): n is a, c, g, or t
  misc_feature (365)..(365): n is a, c, g, or t
  misc_feature (393)..(393): n is a, c, g, or t
  misc_feature (396)..(396): n is a, c, g, or t
  misc_feature (403)..(403): n is a, c, g, or t
  misc_feature (432)..(432): n is a, c, g, or t
  misc_feature (509)..(509): n is a, c, g, or t
  misc_feature (513)..(513): n is a, c, g, or t
  misc_feature (625)..(625): n is a, c, g, or t
  misc_feature (648)..(648): n is a, c, g, or t
  misc_feature (673)..(673): n is a, c, g, or t
  misc_feature (694)..(694): n is a, c, g, or t
  misc_feature (700)..(700): n is a, c, g, or t
  misc_feature (702)..(702): n is a, c, g, or t
  misc_feature (756)..(756): n is a, c, g, or t
  misc_feature (802)..(802): n is a, c, g, or t
tagaggagttcacatcattacatcaacagtgtgaatttctaacagaagaaaaantgaatacaatagtttaaaagtagaaagaacatgcttgcaagacaanagangattcactaaggatgcacgattgatctgagangtttttaagcctcgtactcgccctcctcctcctcgaactccccttgttcgtcggncgtggcgtcctggtactgctggtactcggacaccaggtcgttcatntnnntctcaggcctcggtgaaatcaataaagtccatgncctagcncgtgtaacagtgaaggaaggcatatgnnccggaanatggaccgtgaactgctcggagatgcgcttnaacagctcctggatggncgtgctgttgccgatgaaggtggccganatnttcaggncgcggggcgggatgtcgcacacggccgtnttcacgttgttggggatccactccacgaagtagctgctgttcttgttctgcacgttgagtatttgtttgtccacctncttnatggacatgcggccccggaagatggcagccaccgtcagtagcggccgtggcgcgggtcgcaggcggccatcatgttcttggagtcgaacatctgctgggtgaactcgggcancgtgagcacccggtaatgctggntgccccggctggtcaggggcgcgangcggcgcatgaagaagtgcangcgagngnaggacaccatgttcaccgccagcttgcgcaggtctgcgttcagctggcccgggnagcgcggcaggtggtgaccccgctcatggtggccgacacaggtggntgaggtcccgtaggggggggtggtca

SEQ ID NO: 552785 - DNA, 365 bp, Homo sapiens
gggcccccctttggctttggggttaccccccccttgcctttttggttgccccctgttttcccgggggattggcctctgttggcccggggccattttgggggtaaaaaaatggtacccagggattgccccatttttaattttggctttggcggctttattttaaaggtcggttttgacccattttttcccttttttttttgggggttccaaaggccccggttatttgtttcccgggaggtcctccccccccccccccccccctcctggtccccctttttttttcccgtttgggggaaggttttaggtccggccttttttttggggtggggtttttcctctaaaagaaaaaaagtttttttaaatta

SEQ ID NO: 552786 - DNA, 202 bp, Homo sapiens
cacggatttgctggtgcagtacaactaggcttaatagggacatgaggtgtggagaggaggggaagataagaccatagagagagctgaaaaccagatggcttgtgctaagagctgcaaatgcgaagcaaaagatttgggagattgtttttatttgtgcttatttttttcctatcacaaagtaatgaatgatccttgtaaaaaa

SEQ ID NO: 552787 - DNA, 116 bp, Homo sapiens
gtgagccatgatcacaccactgtattccagcctgggcaacagagcaagatcgcaccccctggaaaaaaaaataggtgtcttgataaacatctagggggttaaggtttcatctcgaa

SEQ ID NO: 552788 - DNA, 338 bp, Homo sapiens
  misc_feature (104)..(104): n is a, c, g, or t
gaggtggtgtctcccggatgggttaaagcagatctctagatgtaaagggaatattcactgggagaaaagaatcctcccagccaaagcaaagtacttccacacangcgacaaggagttgaaggcgggctccgcactcgccagtgccttacacactcgctaggcttacttgaattggacaggaggattttatttaatgtctctttatgtaaaaagcagagaggataagtccaagtgttctcccttcctatctgtgggctctatgctagtaacacattttaacctcatctgtcaaagctacagtctaaaaaagaagttttatcaacccttgttcaacactt

SEQ ID NO: 552789 - DNA, 274 bp, Homo sapiens
  misc_feature (54)..(54): n is a, c, g, or t
cggctggagaacgggaacgagacgcttagcgcgcgaccccccaaagacacacgntaccaccaccccgtctctgacatgaggcaccctgaggcgctgggccctgggctctaccctgcgagatcacactgacctggcgcgggatgcgagaccaaactcaggacactgagcttgtggagaccagaccagcaggagatagaaccttccagaagtgggcagctgtggtggtgccttctggagaagagcagagatacacatttaatgtaccagcatgagg

SEQ ID NO: 552790 - DNA, 320 bp, Homo sapiens
  misc_feature (78)..(78): n is a, c, g, or t
  misc_feature (134)..(134): n is a, c, g, or t
tgaaggggaaccttttaaatcccaaaaaaaagggatggtttattaaacccaacccctgagaaaacagccagggtttgnccctccaaataaataaagggcttgccccttacatgaaggtcccctcttccctttcnaaaaaggaaggcaggaaggatggatgttaaaaaagttaagcttcccggttaagtgctgccaaaaagttaaaaaggcatttaatttttttgtgaaaagggaagggatgtccctttataaggggtaagggagggaaaaccagggcaggaggggaaaaggaggagaaacgtttttggggccccccttta

SEQ ID NO: 552791 - DNA, 513 bp, Homo sapiens
catttgctcttcaccatacacaattcatctgcttgtgttctcctttcagataactttgtcatgtttggtgtcatttgacagattatgactttagtgttgtagtgatgaaatcaacagagacatcgattaattgtgtttcaatctacaatatatttactattgttgggtcatggcctgaggagagtatgttaatgtacttctcccccacttcatctcttcaactttgttctcacgttcagctggttttgggggttggttttcactcaagtttgacattgctttgctcagggtataataaggaaaggtaactgttgatctgggagaatggcttttactctgcatctcccgcacactggtgcgtagcctcatatgctaacaaaggcagtttcactgtctttgttgctcagcagtgcatatgttatagctaatttctttatacagtatgttagtttgtgtcattctaatgtctgtatatttgatcatgtaacttaataaacaactttgcctgcttta

SEQ ID NO: 552792 - DNA, 798 bp, Homo sapiens
gcaggacgcgggccaggagctgctgggctggagcggcggcgcggcatgtccgacagcgagaagctcaacctggactcgatcatcgtgcgcctgctggaagtgcagggttcgcggcctggcaagaatgttacatgctgacagagaaatgagatccgcggtctgtgcctgaaatcccgggagatttttctgagccagccattcttctggagctggatggcacccctcaagatctgcggtgacatacacggccagtatagaccttctgcgactatttgagtatggcggtttccctcccgagagcaactacctctttctgggggactatgtggacaggggcaagcagtcttggagaacatctgcctgctgctggcctataagatcaagtaccccgagaacttcttcctgctccgtggggaacacgagtgtgccagcggtcaacagatctatggttgctacgatgagtgcaagagacgctacaaatcaaatgtggaaaaaccttcactgactgttcaactgcctgcccatcgcggcatagtggacgaaaagatcttctgctgcacggaggcctgtccccggtaactgcagtctatggagcagattcggcggatcatgcggccacagtatgtgactggacccagggcctgctgtgtgactgctgtggtctgaccctgagcaaaggacgtgcaggctgggggcgaaaacagacggggcgtctctttttaccttttggagccgaggtggtgggccaagttcctccacaaggcacgacttggaacctcatctggcgaagaaaccagg

SEQ ID NO: 552793 - DNA, 279 bp, Homo sapiens
tggatgcagcgtgaagctacagtgtgggctgaagtggtcaaagcacccgtatgacgtcacaggttgcagctggtccaaaagcaaccaggaccctctattatatctggtgtcacaaagtatattgcaggatcctatgagtgtgaaatacggaacccagtgagtgccaggcgcagtgaaccagtcaacctgaatctcctcccaaagctgactaggccctacatcaacatcaagaagttaaaccccagtagagaataagggatgtgttcgccttcatctgtg

SEQ ID NO: 552794 - DNA, 4008 bp, Homo sapiens
cagctggtacggctctggatttttggataggcggagccgccgccgcgcggccggggcttctcactctgacgggcccgcgcgcacgatggccggcgccgcgccgcgggtccgctacctggcgggcttctgctgccctctcgggggcctggcggcgggcaagccccgcgtgctgtgccatgaggcagaggtcttcctgtccaccgggagcgagctcgtctacgtgtacgaccaggagggcgggctgctgaccgcggcgttccggttccccgaccaggtgtggcacctggagctgctggcgccgcgcaggttgctgtacgcgctgtgcgcccggaggggcctctactgcctgtcgctggaccacccgggcaggagcaggtgagggcgggcccgcggcctccctcccgcacactcctgctgcccccggactgcttcagagcgagcagccccacctcatcgcgcttggggacccgggctgccgccagctctgaagcctcggccgccatccctgcccgattatctggagcccctgcccccagcactctttctgcaagtgtcttgctcacagtccttagtctacgagccaggatgacagggacagcgaggacggtgaccagccttcccccgtgatccctgtggaccccgatgcctgcatccttcccgatgctgcgctgtgcgcgttcaccttgctggacagtgtgctggtcaccctggtgcagggccctgcccgatggaagatgcagctgtttgagcagccctgtcctggggaggacccccggccaggaggccagatcggtgaggtggagctgtcctcctacacgcccccagccggggtcccaggaaagcctgcagccccccacttccttccagtgctgtgctctgtgtcaccatcaggctccagggtcccgcacgacctcctcgggggctccgggggcttcacgctggaggacgccctcttcgggctcctctttggagctgatgccaccctcctgcagtcacctgtggtcctctgtggtctccctgatggccagctctgctgtgtgatcctgaaggccctggtcacctccaggtcagcccctggtgacccaaatgcccttgtcaagatcctccatcacctggaggagcccgtcatcttcataggggccttgaagacagagccacaggctgcagaagctgcagagaattttctgcctgacgaggatgtgcactgtgactgcctggtggcctttggtcaccacggccggatgctggccatcaaggccagctgggatgagtccgggaagctggtgcccgagctgcgggagtactgcctcccaggccctgtgctctgcgctgcctgtggcgggggtggccgcgtgtaccacagcaccccttctgacctctgtgtggtggatctgtctcggggaagcaccccgctgggccctgagcagcccgaagaaggcccgggaggcctgccccccatgctgtgcccagccagcctgaacatctgcagtgtcgtctcgctgtccgcgtctcccaggacgcatgaaggtggcaccaagctcctggccctgtccgccaaaggccgcctgatgacctgcagcctggacctggactctgagatgcctggcccagccaggatgaccacagagagtgcaggtcagaaaataaaggagctgctgtctggaattggcaacatctctgagagagtgtcttttctaaagaaggcggttgaccagcggaacaaggcactgacaagcctcaacgaggccatgaacgtgagctgtgcactgctgtcaagcggcacgggccccagacccatctcctgcaccaccagcaccacctggagccgcctgcagacacaggatgtgctcatggccacctgcgtgctagagaacagcagcagcttcagcctggaccaggggtggaccctgtgcatccaggtgctcaccagctcctgtgctctcgacctggactcggcctgctccgccatcacctacaccatccccgtggaccagctcggccccggtgctcggcgggaggtgacgctacccctgggccctggtgagaacggcgggctcgacctgcccgtgaccgtgtcctgcacgctgttctacagtctcagggaggtggtgggcggggcccttgccccctcagactctgaggacccctttctggatgagtgcccctccgacgtcctgcccgagcaagagggtgtttgcctgcccctgagcaggcacacagtggacatgctgcagtgtctgcgcttccctggcctggccctgccacacacacgggccccctccccactcggccccacccgagaccctgtggccacttttctggaaacttgtcgggagcctggcagccagccagcaggacccgcctccctgcgggccgagtacctgcccccatctgtggcttccatcaaggtgtcggcggagctgctcagagctgccttgaaggacggccactcaggcgtgcccctgtgctgtgccaccctgcagtggctccttgctgagaatgctgctgtggacgtcgtgagggcccgagcactatcttccatccagggagtggcccctgatggcgccaacgttcacctcatcgtccgagaggtggccatgaccgacctgtgcccagcagggcccatccaggccgtggagattcaagtggaaagctcctctctggccgacatttgcagggcgcaccatgccgttgtcgggcgcatgcagacgatggtgacagagcaggccgcccagggctccagcgctcctgatctccgtgtgcagtacctccgccagatccacgccaaccacgagacactgctgcgggaggtgcagaccctgcgcgaccggctctgcacggaggatgaggccagctcctgtgccaccgcccagaggctgctacaggtgtaccggcagctgcgccaccccagcctcatcctgctgtgaccaggcgggcctgcccctgggctctggccacgcttccagcctctgtcacagcccccccaggcctcatgggttagagggaaaccgagctggcctggccagagccgtcagggaaggtaggacctggccacgtaggagcagaacgctcatgaaagtgcttggaggccgtggagcacaaagcagattctgattgggagcaaccgaggcgggctctgaacctggccggtccagcttcgcgtcctctgctggtgtctctccttctctgaccgcggccgcagcccctgcactcgccttcctcactgctgggcagccttcccaccaccgcagcagcccctgaggccaggaggcagtgcagggcattctggacccggagggccagagaaacaggatttctggggtttggacttggggtgagtttgtaactgttgctgccacaccaccaggagcaccggctgcccctctgggtggcactaccaggtgccccacggtacccttgtcacactgttcacacctgcccggctgcccactctgggaccccgaggtaggagggtgctccctgagaccaaagcacaaaacagcatgcagggagctcctgcaagtgcccgtggtctcgtgccacaccaaggaagggccagcgggtggcctgtggccggaatgctcaacaactaggtgcctccggccggggcagtacccagcactgtgcactattttcagggccactcagggtggcgctgtggccgggggggggccctgagccccagcccccagcctcctccctcagcctgggctacggcccacctcctggtgctggtgttttcatctggggagggtgctcgcgccgctcccgctgcaggcactgtccgcgatgagtgcgggtaggagccgtgaggtgcttctctgctgtgacaaacgaccctgtctgtccgtgaaccttcaggcctcggctgttttctctcgccccttcccaccctctctcactgggctccttccagagcctggcgctgcttgggagccctcaccaccggggtggcctccgaggaagacgcgtccctgtgacccagttacccctgaggaggctctgctc

SEQ ID NO: 552795 - DNA, 3812 bp, Homo sapiens
cagctggtacggctctggatttttggataggcggagccgccgccgcgcggccggggcttctcactctgacgggcccgcgcgcacgatggccggcgccgcgccgcgggtccgctacctggcgggcttctgctgccctctcgggggcctggcggcgggcaagccccgcgtgctgtgccatgaggcagaggtcttcctgtccaccgggagcgagctcgtctacgtgtacgaccaggagggcgggctgctgaccgcggcgttccggttccccgaccaggtgtggcacctggagctgctggcgccgcgcaggttgctgtacgcgctgtgcgcccggaggggcctctactgcctgtcgctggaccacccgggcaggagcaggtctacgagccaggatgacagggacagcgaggacggtgaccagccttcccccgtgatccctgtggaccccgatgcctgcatccttcccgatgctgcgctgtgcgcgttcaccttgctggacagtgtgctggtcaccctggtgcagggccctgcccgatggaagatgcagctgtttgagcagccctgtcctggggaggacccccggccaggaggccagatcggtgaggtggagctgtcctcctacacgcccccagccggggtcccaggaaagcctgcagccccccacttccttccagtgctgtgctctgtgtcaccatcaggctccagggtcccgcacgacctcctcgggggctccgggggcttcacgctggaggacgccctcttcgggctcctctttggagctgatgccaccctcctgcagtcacctgtggtcctctgtggtctccctgatggccagctctgctgtgtgatcctgaaggccctggtcacctccaggtcagcccctggtgacccaaatgcccttgtcaagatcctccatcacctggaggagcccgtcatcttcataggggccttgaagacagagccacaggctgcagaagctgcagagaattttctgcctgacgaggatgtgcactgtgactgcctggtggcctttggtcaccacggccggatgctggccatcaaggccagctgggatgagtccgggaagctggtgcccgagctgcgggagtactgcctcccaggccctgtgctctgcgctgcctgtggcgggggtggccgcgtgtaccacagcaccccttctgacctctgtgtggtggatctgtctcggggaagcaccccgctgggccctgagcagcccgaagaaggcccgggaggcctgccccccatgctgtgcccagccagcctgaacatctgcagtgtcgtctcgctgtccgcgtctcccaggacgcatgaaggtggcaccaagctcctggccctgtccgccaaaggccgcctgatgacctgcagcctggacctggactctgagatgcctggcccagccaggatgaccacagagagtgcaggtcagaaaataaaggagctgctgtctggaattggcaacatctctgagagagtgtcttttctaaagaaggcggttgaccagcggaacaaggcactgacaagcctcaacgaggccatgaacgtgagctgtgcactgctgtcaagcggcacgggccccagacccatctcctgcaccaccagcaccacctggagccgcctgcagacacaggatgtgctcatggccacctgcgtgctagagaacagcagcagcttcagcctggaccaggggtggaccctgtgcatccaggtgctcaccagctcctgtgctctcgacctggactcggcctgctccgccatcacctacaccatccccgtggaccagctcggccccggtgctcggcgggaggtgacgctacccctgggccctggtgagaacggcgggctcgacctgcccgtgaccgtgtcctgcacgctgttctacagtctcagggaggtggtgggcggggcccttgccccctcagactctgaggacccctttctggatgagtgcccctccgacgtcctgcccgagcaagagggtgtttgcctgcccctgagcaggcacacagtggacatgctgcagtgtctgcgcttccctggcctggccctgccacacacacgggccccctccccactcggccccacccgagaccctgtggccacttttctggaaacttgtcgggagcctggcagccagccagcaggacccgcctccctgcgggccgagtacctgcccccatctgtggcttccatcaaggtgtcggcggagctgctcagagctgccttgaaggacggccactcaggcgtgcccctgtgctgtgccaccctgcagtggctccttgctgagaatgctgctgtggacgtcgtgagggcccgagcactatcttccatccagggagtggcccctgatggcgccaacgttcacctcatcgtccgagaggtggccatgaccgacctgtgcccagcagggcccatccaggccgtggagattcaagtggaaagctcctctctggccgacatttgcagggcgcaccatgccgttgtcgggcgcatgcagacgatggtgacagagcaggccgcccagggctccagcgctcctgatctccgtgtgcagtacctccgccagatccacgccaaccacgagacactgctgcgggaggtgcagaccctgcgcgaccggctctgcacggaggatgaggccagctcctgtgccaccgcccagaggctgctacaggtgtaccggcagctgcgccaccccagcctcatcctgctgtgaccaggcgggcctgcccctgggctctggccacgcttccagcctctgtcacagcccccccaggcctcatgggttagagggaaaccgagctggcctggccagagccgtcagggaaggtaggacctggccacgtaggagcagaacgctcatgaaagtgcttggaggccgtggagcacaaagcagattctgattgggagcaaccgaggcgggctctgaacctggccggtccagcttcgcgtcctctgctggtgtctctccttctctgaccgcggccgcagcccctgcactcgccttcctcactgctgggcagccttcccaccaccgcagcagcccctgaggccaggaggcagtgcagggcattctggacccggagggccagagaaacaggatttctggggtttggacttggggtgagtttgtaactgttgctgccacaccaccaggagcaccggctgcccctctgggtggcactaccaggtgccccacggtacccttgtcacactgttcacacctgcccggctgcccactctgggaccccgaggtaggagggtgctccctgagaccaaagcacaaaacagcatgcagggagctcctgcaagtgcccgtggtctcgtgccacaccaaggaagggccagcgggtggcctgtggccggaatgctcaacaactaggtgcctccggccggggcagtacccagcactgtgcactattttcagggccactcagggtggcgctgtggccgggggggggccctgagccccagcccccagcctcctccctcagcctgggctacggcccacctcctggtgctggtgttttcatctggggagggtgctcgcgccgctcccgctgcaggcactgtccgcgatgagtgcgggtaggagccgtgaggtgcttctctgctgtgacaaacgaccctgtctgtccgtgaaccttcaggcctcggctgttttctctcgccccttcccaccctctctcactgggctccttccagagcctggcgctgcttgggagccctcaccaccggggtggcctccgaggaagacgcgtccctgtgacccagttacccctgaggaggctctgctc

SEQ ID NO: 552796 - DNA, 159 bp, Homo sapiens
gggtggactcgcgcctacctgggcgatttgaaatgccgacaatgtagtgtctgcatcccgccaggatgaatgccgaggttctagcgccagtggccccgagtagtgcttgcgcattagctcaaaaaagttctgagcaatttttgctccatactccagtga

SEQ ID NO: 552797 - DNA, 126 bp, Homo sapiens
ggggtgtctgtgtcgggtgtcgaggaatttcccagcagtttctccgctggtgaagacccagaggaagggggagtaaacttgggatggggagattccatttccaacagggtccgggtgggtaaggcc

SEQ ID NO: 552798 - DNA, 3911 bp, Homo sapiens
cagctggtacggctctggatttttggataggcggagccgccgccgcgcggccggggcttctcactctgacgggcccgcgcgcacgatggccggcgccgcgccgcgggtccgctacctggcgggcttctgctgccctctcgggggcctggcggcgggcaagccccgcgtgctgtgccatgaggcagaggtcttcctgtccaccgggagcgagctcgtctacgtgtacgaccaggagggcgggctgctgaccgcggcgttccggttccccgaccaggtgtggcacctggagctgctggcgccgcgcaggttgctgtacgcgctgtgcgcccggaggggcctctactgcctgtcgctggaccacccgggcaggagcaggtctacgagccaggatgacagggacagcgaggacggtgaccagccttcccccgtgatccctgtggaccccgatgcctgcatccttcccgatgctgcgctgtgcgcgttcaccttgctggacagtgtgctggtcaccctggtgcagggccctgcccgatggaagatgcagctgtttgagcagccctgtcctggggaggacccccggccaggaggccagatcggtgaggtggagctgtcctcctacacgcccccagccggggtcccaggaaagcctgcagccccccacttccttccagtgctgtgctctgtgtcaccatcaggctccagggtcccgcacgacctcctcgggggctccgggggcttcacgctggaggacgccctcttcgggctcctctttggagctgatgccaccctcctgcagtcacctgtggtcctctgtggtctccctgatggccagctctgctgtgtgatcctgaaggccctggtcacctccaggtcagcccctggtgacccaaatgcccttgtcaagatcctccatcacctggaggagcccgtcatcttcataggggccttgaagacagagccacaggctgcagaagctgcagagaattttctgcctgacgaggatgtgcactgtgactgcctggtggcctttggtcaccacggccggatgctggccatcaaggccagctgggatgagtccgggaagctggtgcccgagctgcgggagtactgcctcccaggccctgtgctctgcgctgcctgtggcgggggtggccgcgtgtaccacagcaccccttctgacctctgtgtggtggatctgtctcggggaagcaccccgctgggccctgagcagcccgaagaaggcccgggaggcctgccccccatgctgtgcccagccagcctgaacatctgcagtgtcgtctcgctgtccgcgtctcccaggacgcatgaaggtggcaccaagctcctggccctgtccgccaaaggccgcctgatgacctgcagcctggacctggactctgagatgcctggcccagccaggatgaccacagagagtgcaggtcagaaaataaaggagctgctgtctggaattggcaacatctctgagagagtgtcttttctaaagaaggcggttgaccagcggaacaaggcactgacaagcctcaacgaggccatgaacgtgagctgtgcactgctgtcaagcggcacgggccccagacccatctcctgcaccaccagcaccacctggagccgcctgcagacacaggatgtgctcatggccacctgcgtgctagagaacagcagcagcttcagcctggaccaggggtggaccctgtgcatccaggtgctcaccagctcctgtgctctcgacctggactcggcctgctccgccatcacctacaccatccccgtggaccagctcggccccggtgctcggcgggaggtgacgctacccctgggccctggtgagaacggcgggctcgacctgcccgtgaccgtgtcctgcacgctgttctacagtctcagggaggtggtgggcggggcccttgccccctcagactctgaggacccctttctggatgagtgcccctccgacgtcctgcccgagcaagagggtgtttgcctgcccctgagcaggcacacagtggacatgctgcagtgtctgcgcttccctggcctggccctgccacacacacgggccccctccccactcggccccacccgagaccctgtggccacttttctggaaacttgtcgggagcctggcagccagccagcaggacccgcctccctgcgggccgagtacctgcccccatctgtggcttccatcaaggtgtcggcggagctgctcagagctgccttgaaggacggccactcaggcgtgcccctgtgctgtgccaccctgcagtggctccttgctgagaatgctgctgtggacgtcgtgagggcccgagcactatcttccatccagggagtggcccctgatggcgccaacgttcacctcatcgtccgagaggtggccatgaccgacctgtgcccagcagggcccatccaggccgtggagattcaagtggaaagctcctctctggccgacatttgcagggcgcaccatgccgttgtcgggcgcatgcagacgatggtgacagagcaggccgcccagggctccagcgctcctgatctccgtgtgcagtacctccgccagatccacgccaaccacgagacactgctgcgggaggtgcagaccctgcgcgaccggctctgcacggaggatgaggccagctcctgtgccaccgcccagaggctgctacaggtgtaccggcagctgcgccaccccagcctcatcctgctgtgaccaggcgggcctgcccctgggctctggccacgcttccagcctctgtcacagcccccccaggcctcatgggttagagggaaaccgagctggcctggccagagccgtcagggaaggtaggacctggccacgtaggagcagaacgctcatgaaagtgcttggaggccgtggagcacaaagcagattctgattgggagcaaccgaggcgggctctgaacctggccggtccagcttcgcgtcctctgctggtgtctctccttctctgaccgcggccgcagcccctgcactcgccttcctcactgctgggcagccttcccaccaccgcagcagcccctgaggccaggaggcagtgcagggcattctggacccggagggccagagaaacaggatttctggggtttggacttggggtgagtttgtaactgttgctgccacaccaccaggagcaccggctgcccctctgggtggcactaccaggtgccccacggtacccttgtcacactgttcacacctgcccggctgcccactctgggaccccgaggtaggagggtgctccctgagaccaaagcacaaaacagcatgcagggagctcctgcaagtgcccgtggtctcgtgccacaccaaggaagggccagcgggtggcctgtggccggaatgctcaacaactaggtgcctccggccggggcagtacccagcactgtgcactattttcagggccactcagggtggcgctgtggccgggggggggccctgagccccagcccccagcctcctccctcagcctgggctacggcccacctcctggtgctggtgttttcatctggggagggtgctcgcgccgctcccgctgcaggcactgtccgcgatgagtgcgggtaggagccgtgaggtgcttctctgctgtgacaaacgaccctgtctgtccgtgaaaaaaaaaaaaaaaaaaaaaaaaaaaaaaaaaaaaaaaaaaaaaaaaaaaaaaaagaaaaaaccgcgcggggcgagacattcatagggcgcgggcgggaaaaagagagggagaagaacaaatagaccaaaacactcaactcaatcccacaagacgaaaccacccaattagctcttcaacaaaccattacaaacatacacacgcacacacaccacataaaataaaaaaataaaataaatactaaaaacacacaaa

SEQ ID NO: 552799 - DNA, 3984 bp, Homo sapiens
cagctggtacggctctggatttttggataggcggagccgccgccgcgcggccggggcttctcactctgacgggcccgcgcgcacgatggccggcgccgcgccgcgggtccgctacctggcgggcttctgctgccctctcgggggcctggcggcgggcaagccccgcgtgctgtgccatgaggcagaggtcttcctgtccaccgggagcgagctcgtctacgtgtacgaccaggagggcgggctgctgaccgcggcgttccggttccccgaccaggtgtggcacctggagctgctggcgccgcgcaggttgctgtacgcgctgtgcgcccggaggggcctctactgcctgtcgctggaccacccgggcaggagcaggtgagggcgggcccgcggcctccctcccgcacactcctgctgcccccggactgcttcagagcgagcagccccacctcatcgcgcttggggacccgggctgccgccagctctgaagcctcggccgccatccctgcccgattatctggagcccctgcccccagcactctttctggtctacgagccaggatgacagggacagcgaggacggtgaccagccttcccccgtgatccctgtggaccccgatgcctgcatccttcccgatgctgcgctgtgcgcgttcaccttgctggacagtgtgctggtcaccctggtgcagggccctgcccgatggaagatgcagctgtttgagcagccctgtcctggggaggacccccggccaggaggccagatcggtgaggtggagctgtcctcctacacgcccccagccggggtcccaggaaagcctgcagccccccacttccttccagtgctgtgctctgtgtcaccatcaggctccagggtcccgcacgacctcctcgggggctccgggggcttcacgctggaggacgccctcttcgggctcctctttggagctgatgccaccctcctgcagtcacctgtggtcctctgtggtctccctgatggccagctctgctgtgtgatcctgaaggccctggtcacctccaggtcagcccctggtgacccaaatgcccttgtcaagatcctccatcacctggaggagcccgtcatcttcataggggccttgaagacagagccacaggctgcagaagctgcagagaattttctgcctgacgaggatgtgcactgtgactgcctggtggcctttggtcaccacggccggatgctggccatcaaggccagctgggatgagtccgggaagctggtgcccgagctgcgggagtactgcctcccaggccctgtgctctgcgctgcctgtggcgggggtggccgcgtgtaccacagcaccccttctgacctctgtgtggtggatctgtctcggggaagcaccccgctgggccctgagcagcccgaagaaggcccgggaggcctgccccccatgctgtgcccagccagcctgaacatctgcagtgtcgtctcgctgtccgcgtctcccaggacgcatgaaggtggcaccaagctcctggccctgtccgccaaaggccgcctgatgacctgcagcctggacctggactctgagatgcctggcccagccaggatgaccacagagagtgcaggtcagaaaataaaggagctgctgtctggaattggcaacatctctgagagagtgtcttttctaaagaaggcggttgaccagcggaacaaggcactgacaagcctcaacgaggccatgaacgtgagctgtgcactgctgtcaagcggcacgggccccagacccatctcctgcaccaccagcaccacctggagccgcctgcagacacaggatgtgctcatggccacctgcgtgctagagaacagcagcagcttcagcctggaccaggggtggaccctgtgcatccaggtgctcaccagctcctgtgctctcgacctggactcggcctgctccgccatcacctacaccatccccgtggaccagctcggccccggtgctcggcgggaggtgacgctacccctgggccctggtgagaacggcgggctcgacctgcccgtgaccgtgtcctgcacgctgttctacagtctcagggaggtggtgggcggggcccttgccccctcagactctgaggacccctttctggatgagtgcccctccgacgtcctgcccgagcaagagggtgtttgcctgcccctgagcaggcacacagtggacatgctgcagtgtctgcgcttccctggcctggccctgccacacacacgggccccctccccactcggccccacccgagaccctgtggccacttttctggaaacttgtcgggagcctggcagccagccagcaggacccgcctccctgcgggccgagtacctgcccccatctgtggcttccatcaaggtgtcggcggagctgctcagagctgccttgaaggacggccactcaggcgtgcccctgtgctgtgccaccctgcagtggctccttgctgagaatgctgctgtggacgtcgtgagggcccgagcactatcttccatccagggagtggcccctgatggcgccaacgttcacctcatcgtccgagaggtggccatgaccgacctgtgcccagcagggcccatccaggccgtggagattcaagtggaaagctcctctctggccgacatttgcagggcgcaccatgccgttgtcgggcgcatgcagacgatggtgacagagcaggccgcccagggctccagcgctcctgatctccgtgtgcagtacctccgccagatccacgccaaccacgagacactgctgcgggaggtgcagaccctgcgcgaccggctctgcacggaggatgaggccagctcctgtgccaccgcccagaggctgctacaggtgtaccggcagctgcgccaccccagcctcatcctgctgtgaccaggcgggcctgcccctgggctctggccacgcttccagcctctgtcacagcccccccaggcctcatgggttagagggaaaccgagctggcctggccagagccgtcagggaaggtaggacctggccacgtaggagcagaacgctcatgaaagtgcttggaggccgtggagcacaaagcagattctgattgggagcaaccgaggcgggctctgaacctggccggtccagcttcgcgtcctctgctggtgtctctccttctctgaccgcggccgcagcccctgcactcgccttcctcactgctgggcagccttcccaccaccgcagcagcccctgaggccaggaggcagtgcagggcattctggacccggagggccagagaaacaggatttctggggtttggacttggggtgagtttgtaactgttgctgccacaccaccaggagcaccggctgcccctctgggtggcactaccaggtgccccacggtacccttgtcacactgttcacacctgcccggctgcccactctgggaccccgaggtaggagggtgctccctgagaccaaagcacaaaacagcatgcagggagctcctgcaagtgcccgtggtctcgtgccacaccaaggaagggccagcgggtggcctgtggccggaatgctcaacaactaggtgcctccggccggggcagtacccagcactgtgcactattttcagggccactcagggtggcgctgtggccgggggggggccctgagccccagcccccagcctcctccctcagcctgggctacggcccacctcctggtgctggtgttttcatctggggagggtgctcgcgccgctcccgctgcaggcactgtccgcgatgagtgcgggtaggagccgtgaggtgcttctctgctgtgacaaacgaccctgtctgtccgtgaaccttcaggcctcggctgttttctctcgccccttcccaccctctctcactgggctccttccagagcctggcgctgcttgggagccctcaccaccggggtggcctccgaggaagacgcgtccctgtgacccagttacccctgaggaggctctgctc

SEQ ID NO: 552800 - DNA, 3683 bp, Homo sapiens
cagctggtacggctctggatttttggataggcggagccgccgccgcgcggccggggcttctcactctgacgggcccgcgcgcacgatggccggcgccgcgccgcgggtccgctacctggcgggcttctgctgccctctcgggggcctggcggcgggcaagccccgcgtgctgtgccatgaggcagaggtcttcctgtccaccgggagcgagctcgtctacgtgtacgaccaggagggcgggctgctgaccgcggcgttccggttccccgaccaggtgtggcacctggagctgctggcgccgcgcaggttgctgtacgcgctgtgcgcccggaggggcctctactgcctgtcgctggaccacccgggcaggagcaggtctacgagccaggatgacagggacagcgaggacggtgaccagccttcccccgtgatccctgtggaccccgatgcctgcatccttcccgatgctgcgctgtgcgcgttcaccttgctggacagtgtgctggtcaccctggtgcagggccctgcccgatggaagatgcagctgtttgagcagccctgtcctggggaggacccccggccaggaggccagatcggtgaggtggagctgtcctcctacacgcccccagccggggtcccaggaaagcctgcagccccccacttccttccagtgctgtgctctgtgtcaccatcaggctccagggtcccgcacgacctcctcgggggctccgggggcttcacgctggaggacgccctcttcgggctcctctttggagctgatgccaccctcctgcagtcacctgtggtcctctgtggtctccctgatggccagctctgctgtgtgatcctgaaggccctggtcacctccaggtcagcccctggtgacccaaatgcccttgtcaagatcctccatcacctggaggagcccgtcatcttcataggggccttgaagacagagccacaggctgcagaagctgcagagaattttctgcctgacgaggatgtgcactgtgactgcctggtggcctttggtcaccacggccggatgctggccatcaaggccagctgggatgagtccgggaagctggtgcccgagctgcgggagtactgcctcccaggccctgtgctctgcgctgcctgtggcgggggtggccgcgtgtaccacagcaccccttctgacctctgtgtggtggatctgtctcggggaagcaccccgctgggccctgagcagcccgaagaaggcccgggaggcctgccccccatgctgtgcccagccagcctgaacatctgcagtgtcgtctcgctgtccgcgtctcccaggacgcatgaaggtggcaccaagctcctggccctgtccgccaaaggccgcctgatgacctgcagcctggacctggactctgagatgcctggcccagccaggatgaccacagagagtgcaggtcagaaaataaaggagctgctgtctggaattggcaacatctctgagagcaccacctggagccgcctgcagacacaggatgtgctcatggccacctgcgtgctagagaacagcagcagcttcagcctggaccaggggtggaccctgtgcatccaggtgctcaccagctcctgtgctctcgacctggactcggcctgctccgccatcacctacaccatccccgtggaccagctcggccccggtgctcggcgggaggtgacgctacccctgggccctggtgagaacggcgggctcgacctgcccgtgaccgtgtcctgcacgctgttctacagtctcagggaggtggtgggcggggcccttgccccctcagactctgaggacccctttctggatgagtgcccctccgacgtcctgcccgagcaagagggtgtttgcctgcccctgagcaggcacacagtggacatgctgcagtgtctgcgcttccctggcctggccctgccacacacacgggccccctccccactcggccccacccgagaccctgtggccacttttctggaaacttgtcgggagcctggcagccagccagcaggacccgcctccctgcgggccgagtacctgcccccatctgtggcttccatcaaggtgtcggcggagctgctcagagctgccttgaaggacggccactcaggcgtgcccctgtgctgtgccaccctgcagtggctccttgctgagaatgctgctgtggacgtcgtgagggcccgagcactatcttccatccagggagtggcccctgatggcgccaacgttcacctcatcgtccgagaggtggccatgaccgacctgtgcccagcagggcccatccaggccgtggagattcaagtggaaagctcctctctggccgacatttgcagggcgcaccatgccgttgtcgggcgcatgcagacgatggtgacagagcaggccgcccagggctccagcgctcctgatctccgtgtgcagtacctccgccagatccacgccaaccacgagacactgctgcgggaggtgcagaccctgcgcgaccggctctgcacggaggatgaggccagctcctgtgccaccgcccagaggctgctacaggtgtaccggcagctgcgccaccccagcctcatcctgctgtgaccaggcgggcctgcccctgggctctggccacgcttccagcctctgtcacagcccccccaggcctcatgggttagagggaaaccgagctggcctggccagagccgtcagggaaggtaggacctggccacgtaggagcagaacgctcatgaaagtgcttggaggccgtggagcacaaagcagattctgattgggagcaaccgaggcgggctctgaacctggccggtccagcttcgcgtcctctgctggtgtctctccttctctgaccgcggccgcagcccctgcactcgccttcctcactgctgggcagccttcccaccaccgcagcagcccctgaggccaggaggcagtgcagggcattctggacccggagggccagagaaacaggatttctggggtttggacttggggtgagtttgtaactgttgctgccacaccaccaggagcaccggctgcccctctgggtggcactaccaggtgccccacggtacccttgtcacactgttcacacctgcccggctgcccactctgggaccccgaggtaggagggtgctccctgagaccaaagcacaaaacagcatgcagggagctcctgcaagtgcccgtggtctcgtgccacaccaaggaagggccagcgggtggcctgtggccggaatgctcaacaactaggtgcctccggccggggcagtacccagcactgtgcactattttcagggccactcagggtggcgctgtggccgggggggggccctgagccccagcccccagcctcctccctcagcctgggctacggcccacctcctggtgctggtgttttcatctggggagggtgctcgcgccgctcccgctgcaggcactgtccgcgatgagtgcgggtaggagccgtgaggtgcttctctgctgtgacaaacgaccctgtctgtccgtgaaccttcaggcctcggctgttttctctcgccccttcccaccctctctcactgggctccttccagagcctggcgctgcttgggagccctcaccaccggggtggcctccgaggaagacgcgtccctgtgacccagttacccctgaggaggctctgctc

SEQ ID NO: 552801 - DNA, 3462 bp, Homo sapiens
caggcccctccacgggcgttctctggtctacgagccaggatgacagggacagcgaggacggtgaccagccttcccccgtgatccctgtggaccccgatgcctgcatccttcccgatgctgcgctgtgcgcgttcaccttgctggacagtgtgctggtcaccctggtgcagggccctgcccgatggaagatgcagctgtttgagcagccctgtcctggggaggacccccggccaggaggccagatcggtgaggtggagctgtcctcctacacgcccccagccggggtcccaggaaagcctgcagccccccacttccttccagtgctgtgctctgtgtcaccatcaggctccagggtcccgcacgacctcctcgggggctccgggggcttcacgctggaggacgccctcttcgggctcctctttggagctgatgccaccctcctgcagtcacctgtggtcctctgtggtctccctgatggccagctctgctgtgtgatcctgaaggccctggtcacctccaggtcagcccctggtgacccaaatgcccttgtcaagatcctccatcacctggaggagcccgtcatcttcataggggccttgaagacagagccacaggctgcagaagctgcagagaattttctgcctgacgaggatgtgcactgtgactgcctggtggcctttggtcaccacggccggatgctggccatcaaggccagctgggatgagtccgggaagctggtgcccgagctgcgggagtactgcctcccaggccctgtgctctgcgctgcctgtggcgggggtggccgcgtgtaccacagcaccccttctgacctctgtgtggtggatctgtctcggggaagcaccccgctgggccctgagcagcccgaagaaggcccgggaggcctgccccccatgctgtgcccagccagcctgaacatctgcagtgtcgtctcgctgtccgcgtctcccaggacgcatgaaggtggcaccaagctcctggccctgtccgccaaaggccgcctgatgacctgcagcctggacctggactctgagatgcctggcccagccaggatgaccacagagagtgcaggtcagaaaataaaggagctgctgtctggaattggcaacatctctgagagagtgtcttttctaaagaaggcggttgaccagcggaacaaggcactgacaagcctcaacgaggccatgaacgtgagctgtgcactgctgtcaagcggcacgggccccagacccatctcctgcaccaccagcaccacctggagccgcctgcagacacaggatgtgctcatggccacctgcgtgctagagaacagcagcagcttcagcctggaccaggggtggaccctgtgcatccaggtgctcaccagctcctgtgctctcgacctggactcggcctgctccgccatcacctacaccatccccgtggaccagctcggccccggtgctcggcgggaggtgacgctacccctgggccctggtgagaacggcgggctcgacctgcccgtgaccgtgtcctgcacgctgttctacagtctcagggaggtggtgggcggggcccttgccccctcagactctgaggacccctttctggatgagtgcccctccgacgtcctgcccgagcaagagggtgtttgcctgcccctgagcaggcacacagtggacatgctgcagtgtctgcgcttccctggcctggccctgccacacacacgggccccctccccactcggccccacccgagaccctgtggccacttttctggaaacttgtcgggagcctggcagccagccagcaggacccgcctccctgcgggccgagtacctgcccccatctgtggcttccatcaaggtgtcggcggagctgctcagagctgccttgaaggacggccactcaggcgtgcccctgtgctgtgccaccctgcagtggctccttgctgagaatgctgctgtggacgtcgtgagggcccgagcactatcttccatccagggagtggcccctgatggcgccaacgttcacctcatcgtccgagaggtggccatgaccgacctgtgcccagcagggcccatccaggccgtggagattcaagtggaaagctcctctctggccgacatttgcagggcgcaccatgccgttgtcgggcgcatgcagacgatggtgacagagcaggccgcccagggctccagcgctcctgatctccgtgtgcagtacctccgccagatccacgccaaccacgagacactgctgcgggaggtgcagaccctgcgcgaccggctctgcacggaggatgaggccagctcctgtgccaccgcccagaggctgctacaggtgtaccggcagctgcgccaccccagcctcatcctgctgtgaccaggcgggcctgcccctgggctctggccacgcttccagcctctgtcacagcccccccaggcctcatgggttagagggaaaccgagctggcctggccagagccgtcagggaaggtaggacctggccacgtaggagcagaacgctcatgaaagtgcttggaggccgtggagcacaaagcagattctgattgggagcaaccgaggcgggctctgaacctggccggtccagcttcgcgtcctctgctggtgtctctccttctctgaccgcggccgcagcccctgcactcgccttcctcactgctgggcagccttcccaccaccgcagcagcccctgaggccaggaggcagtgcagggcattctggacccggagggccagagaaacaggatttctggggtttggacttggggtgagtttgtaactgttgctgccacaccaccaggagcaccggctgcccctctgggtggcactaccaggtgccccacggtacccttgtcacactgttcacacctgcccggctgcccactctgggaccccgaggtaggagggtgctccctgagaccaaagcacaaaacagcatgcagggagctcctgcaagtgcccgtggtctcgtgccacaccaaggaagggccagcgggtggcctgtggccggaatgctcaacaactaggtgcctccggccggggcagtacccagcactgtgcactattttcagggccactcagggtggcgctgtggccgggggggggccctgagccccagcccccagcctcctccctcagcctgggctacggcccacctcctggtgctggtgttttcatctggggagggtgctcgcgccgctcccgctgcaggcactgtccgcgatgagtgcgggtaggagccgtgaggtgcttctctgctgtgacaaacgaccctgtctgtccgtgaaccttcaggcctcggctgttttctctcgccccttcccaccctctctcactgggctccttccagagcctggcgctgcttgggagccctcaccaccggggtggcctccgaggaagacgcgtccctgtgacccagttacccctgaggaggctctgctc

SEQ ID NO: 552802 - DNA, 3403 bp, Homo sapiens
cccacgcgctcgcggacgcgtgggtcgacccacgcgtcgggccacgcgtccgcgaatgctgcgctgtgcgcgttcaccttgctggacagtgtgctggtcaccctggtgcagggccctgcccgatggaagatgcagctgtttgagcagccctgtcctggggaggacccccggccaggaggccagatcggtgaggtggagctgtcctcctacacgcccccagccggggtcccaggaaagcctgcagccccccacttccttccagtgctgtgctctgtgtcaccatcaggctccagggtcccgcacgacctcctcgggggctccgggggcttcacgctggaggacgccctcttcgggctcctctttggagctgatgccaccctcctgcagtcacctgtggtcctctgtggtctccctgatggccagctctgctgtgtgatcctgaaggccctggtcacctccaggtcagcccctggtgacccaaatgcccttgtcaagatcctccatcacctggaggagcccgtcatcttcataggggccttgaagacagagccacaggctgcagaagctgcagagaattttctgcctgacgaggatgtgcactgtgactgcctggtggcctttggtcaccacggccggatgctggccatcaaggccagctgggatgagtccgggaagctggtgcccgagctgcgggagtactgcctcccaggccctgtgctctgcgctgcctgtggcgggggtggccgcgtgtaccacagcaccccttctgacctctgtgtggtggatctgtctcggggaagcaccccgctgggccctgagcagcccgaagaaggcccgggaggcctgccccccatgctgtgcccagccagcctgaacatctgcagtgtcgtctcgctgtccgcgtctcccaggacgcatgaaggtggcaccaagctcctggccctgtccgccaaaggccgcctgatgacctgcagcctggacctggactctgagatgcctggcccagccaggatgaccacagagagtgcaggtcagaaaataaaggagctgctgtctggaattggcaacatctctgagagagtgtcttttctaaagaaggcggttgaccagcggaacaaggcactgacaagcctcaacgaggccatgaacgtgagctgtgcactgctgtcaagcggcacgggccccagacccatctcctgcaccaccagcaccacctggagccgcctgcagacacaggatgtgctcatggccacctgcgtgctagagaacagcagcagcttcagcctggaccaggggtggaccctgtgcatccaggtgctcaccagctcctgtgctctcgacctggactcggcctgctccgccatcacctacaccatccccgtggaccagctcggccccggtgctcggcgggaggtgacgctacccctgggccctggtgagaacggcgggctcgacctgcccgtgaccgtgtcctgcacgctgttctacagtctcagggaggtggtgggcggggcccttgccccctcagactctgaggacccctttctggatgagtgcccctccgacgtcctgcccgagcaagagggtgtttgcctgcccctgagcaggcacacagtggacatgctgcagtgtctgcgcttccctggcctggccctgccacacacacgggccccctccccactcggccccacccgagaccctgtggccacttttctggaaacttgtcgggagcctggcagccagccagcaggacccgcctccctgcgggccgagtacctgcccccatctgtggcttccatcaaggtgtcggcggagctgctcagagctgccttgaaggacggccactcaggcgtgcccctgtgctgtgccaccctgcagtggctccttgctgagaatgctgctgtggacgtcgtgagggcccgagcactatcttccatccagggagtggcccctgatggcgccaacgttcacctcatcgtccgagaggtggccatgaccgacctgtgcccagcagggcccatccaggccgtggagattcaagtggaaagctcctctctggccgacatttgcagggcgcaccatgccgttgtcgggcgcatgcagacgatggtgacagagcaggccgcccagggctccagcgctcctgatctccgtgtgcagtacctccgccagatccacgccaaccacgagacactgctgcgggaggtgcagaccctgcgcgaccggctctgcacggaggatgaggccagctcctgtgccaccgcccagaggctgctacaggtgtaccggcagctgcgccaccccagcctcatcctgctgtgaccaggcgggcctgcccctgggctctggccacgcttccagcctctgtcacagcccccccaggcctcatgggttagagggaaaccgagctggcctggccagagccgtcagggaaggtaggacctggccacgtaggagcagaacgctcatgaaagtgcttggaggccgtggagcacaaagcagattctgattgggagcaaccgaggcgggctctgaacctggccggtccagcttcgcgtcctctgctggtgtctctccttctctgaccgcggccgcagcccctgcactcgccttcctcactgctgggcagccttcccaccaccgcagcagcccctgaggccaggaggcagtgcagggcattctggacccggagggccagagaaacaggatttctggggtttggacttggggtgagtttgtaactgttgctgccacaccaccaggagcaccggctgcccctctgggtggcactaccaggtgccccacggtacccttgtcacactgttcacacctgcccggctgcccactctgggaccccgaggtaggagggtgctccctgagaccaaagcacaaaacagcatgcagggagctcctgcaagtgcccgtggtctcgtgccacaccaaggaagggccagcgggtggcctgtggccggaatgctcaacaactaggtgcctccggccggggcagtacccagcactgtgcactattttcagggccactcagggtggcgctgtggccgggggggggccctgagccccagcccccagcctcctccctcagcctgggctacggcccacctcctggtgctggtgttttcatctggggagggtgctcgcgccgctcccgctgcaggcactgtccgcgatgagtgcgggtaggagccgtgaggtgcttctctgctgtgacaaacgaccctgtctgtccgtgaaccttcaggcctcggctgttttctctcgccccttcccaccctctctcactgggctccttccagagcctggcgctgcttgggagccctcaccaccggggtggcctccgaggaagacgcgtccctgtgacccagttacccctgaggaggctctgctc

SEQ ID NO: 552803 - DNA, 2829 bp, Homo sapiens
  misc_feature (3)..(3): n is a, c, g, or t
  misc_feature (70)..(70): n is a, c, g, or t
gtngggtcccgagagcgaggggcctgtcactccgggtccctgtggtttagggctgtttctgtagcgcctncgacccccctggtcttcactgtgaaggctgcaagggagaaaagaggcccactaggaacattctggggagccaagggtggggtaatgcaccacccggcccctgcgtggcccagatgtgggtggtgcgcttctcatacctggcagattagcctaggtccccggagcaccagcttcatcctctgtcctctttcctcctgtggcccaagaggagaggtcaggtcagatggctggaggcagcttccagcagaggctcggtgtgggtggggccgggagaaacatgcccctggggcggtggctcactctctggtggtggttccacacccaccgtgtgctggtcgtggagccaggctcggtgcctaccaggcctgagtcaagatgtggcacctggtgctgtgggtgtccccccgctcccgggggtcatgtctgtccttcgcagagtgtcttttctaaagaaggcggttgaccagcggaacaaggcactgacaagcctcaacgaggccatgaacgtgagctgtgcactgctgtcaagcggcacgggccccagacccatctcctgcaccaccagcaccacctggagccgcctgcagacacaggatgtgctcatggccacctgcgtgctagagaacagcagcagcttcagcctggaccaggggtggaccctgtgcatccaggtgctcaccagctcctgtgctctcgacctggactcggcctgctccgccatcacctacaccatccccgtggaccagctcggccccggtgctcggcgggaggtgacgctacccctgggccctggtgagaacggcgggctcgacctgcccgtgaccgtgtcctgcacgctgttctacagtctcagggaggtggtgggcggggcccttgccccctcagactctgaggacccctttctggatgagtgcccctccgacgtcctgcccgagcaagagggtgtttgcctgcccctgagcaggcacacagtggacatgctgcagtgtctgcgcttccctggcctggccctgccacacacacgggccccctccccactcggccccacccgagaccctgtggccacttttctggaaacttgtcgggagcctggcagccagccagcaggacccgcctccctgcgggccgagtacctgcccccatctgtggcttccatcaaggtgtcggcggagctgctcagagctgccttgaaggacggccactcaggcgtgcccctgtgctgtgccaccctgcagtggctccttgctgagaatgctgctgtggacgtcgtgagggcccgagcactatcttccatccagggagtggcccctgatggcgccaacgttcacctcatcgtccgagaggtggccatgaccgacctgtgcccagcagggcccatccaggccgtggagattcaagtggaaagctcctctctggccgacatttgcagggcgcaccatgccgttgtcgggcgcatgcagacgatggtgacagagcaggccgcccagggctccagcgctcctgatctccgtgtgcagtacctccgccagatccacgccaaccacgagacactgctgcgggaggtgcagaccctgcgcgaccggctctgcacggaggatgaggccagctcctgtgccaccgcccagaggctgctacaggtgtaccggcagctgcgccaccccagcctcatcctgctgtgaccaggcgggcctgcccctgggctctggccacgcttccagcctctgtcacagcccccccaggcctcatgggttagagggaaaccgagctggcctggccagagccgtcagggaaggtaggacctggccacgtaggagcagaacgctcatgaaagtgcttggaggccgtggagcacaaagcagattctgattgggagcaaccgaggcgggctctgaacctggccggtccagcttcgcgtcctctgctggtgtctctccttctctgaccgcggccgcagcccctgcactcgccttcctcactgctgggcagccttcccaccaccgcagcagcccctgaggccaggaggcagtgcagggcattctggacccggagggccagagaaacaggatttctggggtttggacttggggtgagtttgtaactgttgctgccacaccaccaggagcaccggctgcccctctgggtggcactaccaggtgccccacggtacccttgtcacactgttcacacctgcccggctgcccactctgggaccccgaggtaggagggtgctccctgagaccaaagcacaaaacagcatgcagggagctcctgcaagtgcccgtggtctcgtgccacaccaaggaagggccagcgggtggcctgtggccggaatgctcaacaactaggtgcctccggccggggcagtacccagcactgtgcactattttcagggccactcagggtggcgctgtggccgggggggggccctgagccccagcccccagcctcctccctcagcctgggctacggcccacctcctggtgctggtgttttcatctggggagggtgctcgcgccgctcccgctgcaggcactgtccgcgatgagtgcgggtaggagccgtgaggtgcttctctgctgtgacaaacgaccctgtctgtccgtgaaccttcaggcctcggctgttttctctcgccccttcccaccctctctcactgggctccttccagagcctggcgctgcttgggagccctcaccaccggggtggcctccgaggaagacgcgtccctgtgacccagttacccctgaggaggctctgctc

SEQ ID NO: 552804 - DNA, 159 bp, Homo sapiens
aaatgtaggccccgtgtgacaggctcatgaggcagtgcacgggcgacctcatccagcccaacctgtgacaaggtgtgcgcactgctacaggggctacctgctgacctggacgcgcccgcacgacctccgacgaggagctgggcacacagactgcgcacc

SEQ ID NO: 552805 - DNA, 2292 bp, Homo sapiens
cagctggtacggctctggatttttggataggcggagccgccgccgcgcggccggggcttctcactctgacgggcccgcgcgcacgatggccggcgccgcgccgcgggtccgctacctggcgggcttctgctgccctctcgggggcctggcggcgggcaagccccgcgtgctgtgccatgaggcagaggtcttcctgtccaccgggagcgagctcgtctacgtgtacgaccaggagggcgggctgctgaccgcggcgttccggttccccgaccaggtgtggcacctggagctgctggcgccgcgcaggttgctgtacgcgctgtgcgcccggaggggcctctactgcctgtcgctggaccacccgggcaggagcaggtctacgagccaggatgacagggacagcgaggacggtgaccagccttcccccgtgatccctgtggaccccgatgcctgcatccttcccgatgctgcgctgtgcgcgttcaccttgctggacagtgtgctggtcaccctggtgcagggccctgcccgatggaagatgcagctgtttgagcagccccccctccccactcggccccacccgagaccctgtggccacttttctggaaacttgtcgggagcctggcagccagccagcaggacccgcctccctgcgggccgagtacctgcccccatctgtggcttccatcaaggtgtcggcggagctgctcagagctgccttgaaggacggccactcaggcgtgcccctgtgctgtgccaccctgcagtggctccttgctgagaatgctgctgtggacgtcgtgagggcccgagcactatcttccatccagggagtggcccctgatggcgccaacgttcacctcatcgtccgagaggtggccatgaccgacctgtgcccagcagggcccatccaggccgtggagattcaagtggaaagctcctctctggccgacatttgcagggcgcaccatgccgttgtcgggcgcatgcagacgatggtgacagagcaggccgcccagggctccagcgctcctgatctccgtgtgcagtacctccgccagatccacgccaaccacgagacactgctgcgggaggtgcagaccctgcgcgaccggctctgcacggaggatgaggccagctcctgtgccaccgcccagaggctgctacaggtgtaccggcagctgcgccaccccagcctcatcctgctgtgaccaggcgggcctgcccctgggctctggccacgcttccagcctctgtcacagcccccccaggcctcatgggttagagggaaaccgagctggcctggccagagccgtcagggaaggtaggacctggccacgtaggagcagaacgctcatgaaagtgcttggaggccgtggagcacaaagcagattctgattgggagcaaccgaggcgggctctgaacctggccggtccagcttcgcgtcctctgctggtgtctctccttctctgaccgcggccgcagcccctgcactcgccttcctcactgctgggcagccttcccaccaccgcagcagcccctgaggccaggaggcagtgcagggcattctggacccggagggccagagaaacaggatttctggggtttggacttggggtgagtttgtaactgttgctgccacaccaccaggagcaccggctgcccctctgggtggcactaccaggtgccccacggtacccttgtcacactgttcacacctgcccggctgcccactctgggaccccgaggtaggagggtgctccctgagaccaaagcacaaaacagcatgcagggagctcctgcaagtgcccgtggtctcgtgccacaccaaggaagggccagcgggtggcctgtggccggaatgctcaacaactaggtgcctccggccggggcagtacccagcactgtgcactattttcagggccactcagggtggcgctgtggccgggggggggccctgagccccagcccccagcctcctccctcagcctgggctacggcccacctcctggtgctggtgttttcatctggggagggtgctcgcgccgctcccgctgcaggcactgtccgcgatgagtgcgggtaggagccgtgaggtgcttctctgctgtgacaaacgaccctgtctgtccgtgaaccttcaggcctcggctgttttctctcgccccttcccaccctctctcactgggctccttccagagcctggcgctgcttgggagccctcaccaccggggtggcctccgaggaagacgcgtccctgtgacccagttacccctgaggaggctctgctc

SEQ ID NO: 552806 - DNA, 133 bp, Homo sapiens
ctgagaggtactgagaatttaaatcctccagtatggatgttatatgactgaaatttattatgagtgatagttatggaccaacactcaaggtttgtttatataaacagccaagaaagccaagagaatagagata

SEQ ID NO: 552807 - DNA, 159 bp, Homo sapiens
taaactcctgacttcaagtgatcttcccgcctcagcctcccaatagtgctgggattaccaggcgtgagccaccgcgcccagtcagatgctcaatttaaaaagagaaccacaattcatttaaaaagagaaaaatggtgttctcacacaataaccaagcaa

SEQ ID NO: 552808 - DNA, 3952 bp, Homo sapiens
cagctggtacggctctggatttttggataggcggagccgccgccgcgcggccggggcttctcactctgacgggcccgcgcgcacgatggccggcgccgcgccgcgggtccgctacctggcgggcttctgctgccctctcgggggcctggcggcgggcaagccccgcgtgctgtgccatgaggcagaggtcttcctgtccaccgggagcgagctcgtctacgtgtacgaccaggagggcgggctgctgaccgcggcgttccggttccccgaccaggtgtggcacctggagctgctggcgccgcgcaggttgctgtacgcgctgtgcgcccggaggggcctctactgcctgtcgctggaccacccgggcaggagcaggtctacgagccaggatgacagggacagcgaggacggtgaccagccttcccccgtgatccctgtggaccccgatgcctgcatccttcccgatgctgcgctgtgcgcgttcaccttgctggacagtgtgctggtcaccctggtgcagggccctgcccgatggaagatgcagctgtttgagcagccctgtcctggggaggacccccggccaggaggccagatcggtgaggtggagctgtcctcctacacgcccccagccggggtcccaggaaagcctgcagccccccacttccttccagtgctgtgctctgtgtcaccatcaggctccagggtcccgcacgacctcctcgggggctccgggggcttcacgctggaggacgccctcttcgggctcctctttggagctgatgccaccctcctgcagtcacctgtggtcctctgtggtctccctgatggccagctctgctgtgtgatcctgaaggccctggtcacctccaggtcagcccctggtgacccaaatgcccttgtcaagatcctccatcacctggaggagcccgtcatcttcataggggccttgaagacagagccacaggctgcagaagctgcagagaattttctgcctgacgaggatgtgcactgtgactgcctggtggcctttggtcaccacggccggatgctggccatcaaggccagctgggatgagtccgggaagctggtgcccgagctgcgggagtactgcctcccaggccctgtgctctgcgctgcctgtggcgggggtggccgcgtgtaccacagcaccccttctgacctctgtgtggtggatctgtctcggggaagcaccccgctgggccctgagcagcccgaagaaggcccgggaggcctgccccccatgctgtgcccagccagcctgaacatctgcagtgtcgtctcgctgtccgcgtctcccaggacgcatgaaggtggcaccaagctcctggccctgtccgccaaaggccgcctgatgacctgcagcctggacctggactctgagatgcctggcccagccaggatgaccacagagagtgcaggtcagaaaataaaggagctgctgtctggaattggcaacatctctgagagagtgtcttttctaaagaaggcggttgaccagcggaacaaggcactgacaagcctcaacgaggccatgaacgtgagctgtgcactgctgtcaagcggcacgggccccagacccatctcctgcaccaccagcaccacctggagccgcctgcagacacaggatgtgctcatggccacctgcgtgctagagaacagcagcagcttcagcctggaccaggggtggaccctgtgcatccaggtgctcaccagctcctgtgctctcgacctggactcggcctgctccgccatcacctacaccatccccgtggaccagctcggccccggtgctcggcgggaggtgacgctacccctgggccctggtgagaacggcgggctcgacctgcccgtgaccgtgtcctgcacgctgttctacagtctcagggaggtggtgggcggggcccttgccccctcagactctgaggacccctttctggatgagtgcccctccgacgtcctgcccgagcaagagggtgtttgcctgcccctgagcaggcacacagtggacatgctgcagtgtctgcgcttccctggcctggccctgccacacacacgggccccctccccactcggccccacccgagaccctgtggccacttttctggaaacttgtcgggagcctggcagccagccagcaggacccgcctccctgcgggccgagtacctgcccccatctgtggcttccatcaaggtgtcggcggagctgctcagagctgccttgaaggacggccactcagttatgttttttaaacctatatatggaagcgtaacctaaatacagaagagtcacaaaggagcaaactgtgagcttcacagtgcgggcacccggggagggaggcagctgcgctcaccccaaagccccagcaccgttcatcaggcgtgcccctgtgctgtgccaccctgcagtggctccttgctgagaatgctgctgtggacgtcgtgagggcccgagcactatcttccatccagggagtggcccctgatggcgccaacgttcacctcatcgtccgagaggtggccatgaccgacctgtgcccagcagggcccatccaggccgtggagattcaagtggaaagctcctctctggccgacatttgcagggcgcaccatgccgttgtcgggcgcatgcagacgatggtgacagagcaggccgcccagggctccagcgctcctgatctccgtgtgcagtacctccgccagatccacgccaaccacgagacactgctgcgggaggtgcagaccctgcgcgaccggctctgcacggaggatgaggccagctcctgtgccaccgcccagaggctgctacaggtgtaccggcagctgcgccaccccagcctcatcctgctgtgaccaggcgggcctgcccctgggctctggccacgcttccagcctctgtcacagcccccccaggcctcatgggttagagggaaaccgagctggcctggccagagccgtcagggaaggtaggacctggccacgtaggagcagaacgctcatgaaagtgcttggaggccgtggagcacaaagcagattctgattgggagcaaccgaggcgggctctgaacctggccggtccagcttcgcgtcctctgctggtgtctctccttctctgaccgcggccgcagcccctgcactcgccttcctcactgctgggcagccttcccaccaccgcagcagcccctgaggccaggaggcagtgcagggcattctggacccggagggccagagaaacaggatttctggggtttggacttggggtgagtttgtaactgttgctgccacaccaccaggagcaccggctgcccctctgggtggcactaccaggtgccccacggtacccttgtcacactgttcacacctgcccggctgcccactctgggaccccgaggtaggagggtgctccctgagaccaaagcacaaaacagcatgcagggagctcctgcaagtgcccgtggtctcgtgccacaccaaggaagggccagcgggtggcctgtggccggaatgctcaacaactaggtgcctccggccggggcagtacccagcactgtgcactattttcagggccactcagggtggcgctgtggccgggggggggccctgagccccagcccccagcctcctccctcagcctgggctacggcccacctcctggtgctggtgttttcatctggggagggtgctcgcgccgctcccgctgcaggcactgtccgcgatgagtgcgggtaggagccgtgaggtgcttctctgctgtgacaaacgaccctgtctgtccgtgaaccttcaggcctcggctgttttctctcgccccttcccaccctctctcactgggctccttccagagcctggcgctgcttgggagccctcaccaccggggtggcctccgaggaagacgcgtccctgtgacccagttacccctgaggaggctctgctc

SEQ ID NO: 552809 - DNA, 83 bp, Homo sapiens
aaacccggcctttttttgggggacccccttcccccaaatttttcccccgttttttgggccccctttaaaggttttttggggga

SEQ ID NO: 552810 - DNA, 1003 bp, Homo sapiens
ccccgcccctgtccacaggatcgataacggcgcgatgaaataaccaagatttcactttcaagatggaaagtccgtcagactcagtctgtggttttacctagacactcctcaggcctctgtcgaatccatcatctccctatacaaatagttcccgaaaactaacctatgagatgcaacacttagagcataggattaaggaaaacaagattttcatttaagttcctcttacaagtagtggtgaaaccgtctgtacaatgtatgagacgtgaagaaaatgactcagagcctgttatcagagtaaaccagcatcttccacagaggaggaactgtttggcaatttcgagaaggtattatacatatagacagtgaatttgaagaagatacacacatttgaaaaatactttgaatgaatctcaatgtctgtgaatctcagtcacttgattctggatcatgctgatgctctccaaaatgagtttgtgagtgagaagacttgctaaacaaagattaaaggttgaaaaagccaaatgggtgaagcaggttcatggagaaagaagaccttcttcggaggctaaatactagtcgaaaatgtatagatcaaagagagtgatctgtctcagttacagtgtcaataaagaagtggagaagctgtagccagctcttgctttatgagttgcagtcagctgtgtctgaagagaagcaagaaactaaagccttactcaagttgatagaccactatgggttagatgataaattactacactatagacagaagtgaagaagaatttatagatgtttcaattcctggattttgggtccagagatatctttggagaaatgaccaccttgaatttacgagaatactttagggcccgttggttcattacatttatggcaatggagattgcgccattggaaacccgtggtgagtgcaacaagggccaacatagtggcacacgaagaacacttgtcacccggggtgaccagcaactcccggctcagcccc

SEQ ID NO: 552811 - DNA, 474 bp, Homo sapiens
gagaggaccccccgccgagccaacggccccccccttagctctcggcatttacttggggttcccagagatttcaccctcttcttaagtaatggtcacctttgggtcctgcctcccacaccagacagccccccacccagagcaaggctgccaaggccactggaccctgtccccgccccagccctccccgctgaccatcttccgcttggtgcagaggaaggcgtggcactcgaggctctggttgtgctggctttgggcgatgtatgcaaacaccttgtcgtgcatcttgtctgctgtgcaataggagatcctgtatatggacacgttctcaatgagctggttggtgaggttgtctgtcagaataattccccgtggcgacaccttcagagtcaccttctgcagcttcttcccactggccttagctgaagccacggtcaacccacaagccacggtcaaccacaagccacggtcaaccac

SEQ ID NO: 552812 - DNA, 226 bp, Homo sapiens
gttgactacggcggaagagacaaagaggaagtcagaaagagaaaaaaagagagacaaaaaagaagtcaaagagaaagaaaaagatatggaagtagtaaagaaaatagtgtaccctattcctttaaaagccagggtaaatttaaaacctataattgataattgaaggtcttctgtgtaaccctataacactccaataccaccttgctgtcagagtaaacaaggacat

SEQ ID NO: 552813 - DNA, 151 bp, Homo sapiens
  misc_feature (92)..(92): n is a, c, g, or t
atcttatattgttgaagatgggatcttatcttcttcaaatttaacacacctcaacaaccgagagaagaaataaatttagttattgctcagantaacataccacttccaaaaggcatctgatttttaaaaaattaaagatttctgtaaaacc

SEQ ID NO: 552814 - DNA, 602 bp, Homo sapiens
  misc_feature (19)..(19): n is a, c, g, or t
  misc_feature (41)..(42): n is a, c, g, or t
  misc_feature (50)..(50): n is a, c, g, or t
  misc_feature (66)..(66): n is a, c, g, or t
  misc_feature (92)..(92): n is a, c, g, or t
  misc_feature (102)..(102): n is a, c, g, or t
  misc_feature (155)..(155): n is a, c, g, or t
  misc_feature (179)..(179): n is a, c, g, or t
  misc_feature (185)..(185): n is a, c, g, or t
  misc_feature (187)..(188): n is a, c, g, or t
  misc_feature (191)..(191): n is a, c, g, or t
  misc_feature (195)..(195): n is a, c, g, or t
  misc_feature (197)..(197): n is a, c, g, or t
  misc_feature (199)..(199): n is a, c, g, or t
  misc_feature (201)..(201): n is a, c, g, or t
  misc_feature (214)..(214): n is a, c, g, or t
  misc_feature (240)..(240): n is a, c, g, or t
  misc_feature (258)..(258): n is a, c, g, or t
  misc_feature (275)..(275): n is a, c, g, or t
  misc_feature (297)..(297): n is a, c, g, or t
  misc_feature (317)..(317): n is a, c, g, or t
  misc_feature (329)..(329): n is a, c, g, or t
  misc_feature (335)..(335): n is a, c, g, or t
  misc_feature (350)..(350): n is a, c, g, or t
  misc_feature (352)..(352): n is a, c, g, or t
  misc_feature (355)..(355): n is a, c, g, or t
  misc_feature (363)..(363): n is a, c, g, or t
  misc_feature (371)..(371): n is a, c, g, or t
  misc_feature (373)..(373): n is a, c, g, or t
  misc_feature (396)..(396): n is a, c, g, or t
  misc_feature (408)..(408): n is a, c, g, or t
  misc_feature (414)..(414): n is a, c, g, or t
  misc_feature (431)..(431): n is a, c, g, or t
  misc_feature (433)..(433): n is a, c, g, or t
  misc_feature (437)..(437): n is a, c, g, or t
  misc_feature (450)..(450): n is a, c, g, or t
  misc_feature (452)..(452): n is a, c, g, or t
  misc_feature (466)..(466): n is a, c, g, or t
  misc_feature (468)..(468): n is a, c, g, or t
  misc_feature (484)..(484): n is a, c, g, or t
  misc_feature (498)..(498): n is a, c, g, or t
  misc_feature (506)..(506): n is a, c, g, or t
  misc_feature (527)..(527): n is a, c, g, or t
  misc_feature (593)..(593): n is a, c, g, or t
tgctgagtttaagttaaanacccatatgaatttattaaatnnaaaatgtnttaaagggcggcggtntaggagggggagtgtggtagggggangagggaaaanatgatgaacggccgtgggcatcccgtaggggcccggccccacccccgcccaanccaccccctcggcaacgctgcatnagcttnannatnattncnantngtgctgggctggnagggcgaaaaggctggaaaaaaaaanggaaaaagggaaaaaaancgcctccaaaaaaaaancctggcctgccccggcccctangtaaaaagctgggccctganctgaggcgggcntcccancgccccggcctgatntnttnagggaaanggcgaaangnaggggaggcgagggggccgggangcaggggtagtngtcgcnaagagccggaacaggtnangacnaattttgaataancntttttttttttctntnctggttttggaggggnttcctggggctcgntggcaganctggccccctgggtgggcttngtgggcagggacgtggaggcctcctccctggtggcggtggtcgtggtgggtgcaggtgtgggcgtnagggcccct

SEQ ID NO: 552815 - DNA, 1174 bp, Homo sapiens
ggtcctgccaatggcagctgtgctcagggggcagcaggcaggcggagggcgctcagacaggcttctcctcgcgtcgctcttgcatcctccatgggtcctgacgtctcttcgctcggggaggcctggctcgacacgaggtcctgtcgtcctgacgaccgtatgcgcagccttcgtctggggctcgctgagtcgcgcggtcacagcctgggcatctccgagagtggctatgcggcagcacgtgagggcaagggtagccccgtgaacggccccgggagggcacgagaggaagacaatcggggactggcagaatgagcgccgaacgggagagagcaagcacgtgagagaagatataggaacgaaagcagtagcacatgtcaaggacacaccgggaaagacagggaacgagcacagacaagcagggagcaaatgaacacacccatagggcatcggggtagcctacacattcacggagggcatgcgcatgagtgacacaggcgtggagcagtcacgctgcagcaagagaaaccttgggtcgcgtccgcacgataacgcctcgtttgacaatcacaatgggcctacagtacccccaagtacgaacacacatcgagcaagcggacaccggcccaatagccgttgggcctaaggcttacacgtaaccgacagtgcggaggagaatccccggagggccaacaaaagggctggagctacggcaggtgaagaagcacacatagctatgggatagacgacaggggcgaaacggagtcggcccaccatttcaggaggaatactcagacatggtgactcactttacaacaacgacaaatgtcacgaaaagggccacgcaagttggacacggacattgggctagcccaggaacgaggcagttggcgacgcgcagtagggaaaggtgcacccccgaacaggtgattgcacgcgggatcacacactatttgcacaaaaagaaccggagaaacacgggcggatcacccgagaaagaaaggagtatacaaagggaggggcagcaagcctttaacaaggcgacctgtgggaagaagggggatactgaacaacaagaaggctatacacacacgaggttaagccggcagtggaactatgaagagcgcgagacacgacacacgcacggtaacatacgcagctgcgcgcaaaccggcag

SEQ ID NO: 552816 - DNA, 161 bp, Homo sapiens
gaagacgctcgtaccaggaccaggaccaaaattgatctaatggtctacgggtcgtgtgtttaaggtaggcttgctgatttcagagtatgaagtgcattaggaaaatcaagctgattactgaggatgtcagggtaaacctccctcctacctccatggcatgg

SEQ ID NO: 552817 - DNA, 589 bp, Homo sapiens
  misc_feature (140)..(140): n is a, c, g, or t
tcaaccggggcctccggtttgaaacttcgtgaggattccagtacaggcatgtttgtagtcaagcattattctggtccagattctgtccattatgcggcctgtcctgcatgaagctccctgtgagagaatcatcgtgtcanatcgatctttcatgcggtgattatttctcttacacaccatgaatgttcagcacatcagacgtgagaaaactcatgtccattccatgcctgaaaaattattgtgttgggtctaaaatacaatgactgcatagggcttctgtctcatgcgcttgctcttggtgggtccagatcatgagcttcttccagtaagtcaggattgatctcataggcacgatcttcttagagaagaaatcatccgtgctataatcagggctgtggaaagtcatgctgcaattgtctgaccagtgtagttttctggaacccctgaaggcctcgcagaaggtacaggtgtttcctaaatctgtgtcgccgagaaggtgtcccacacaggggcgaccgggccgtctgctccagcagcagctgctcctgggtccgcagctcagccgcccaaaagattgaatcaatctgtc

SEQ ID NO: 552818 - DNA, 447 bp, Homo sapiens
  misc_feature (1)..(1): n is a, c, g, or t
  misc_feature (389)..(389): n is a, c, g, or t
nggaagggaagtggtgaaggtgtaagggctcctcagctccctccgtgaactccgagttcagtcaccccttcccgcgaaagaattcaaagaggaaggccagggtatatgtcatgcactgtgctacttgttatatgaacctgcccaggttatatgtcccgttctgaaaggccggcacattcatgggtgctcagcgttatgtgcaccttgttgtacacgttaacccattcagaatggtggtccagtttctcagcttgcagggcctctcttgtcatgaacccaaaggccctgttaatgtctttgaaatgaacgtgcttgaagatggcatcacggccttacagctcattccaccccacagccctcaggtttgacaacatcgtggtctctctccncacgcgctcagtcgtgtgtgctatcgcccgcgtgccgttattcctacagcccgggatg

SEQ ID NO: 552819 - DNA, 857 bp, Homo sapiens
ggcgggcgcggtggctcacgcttgtaatcccagcactttgggaggccgaggcgggcggatcacgaggtcatgagatcgagaccatcctggctaacacggtgaaaccccgtctctactaaaaatacaaaaaaattagccgggcgtgatggcgggcgcctgtagtcccagctactcaggaggctgaggcaggagaatggcgtgaacccgggaggcggaggttgcagtgagccgagatcgcaccatgtgcactccagtctgggcaacagagtgagattccgtctcaaaaaaaaaaaggaaagggaaaaaaaatttagtttatacctctttcctgtgtttcaaccgccttgaaattttctggaacattccaaattcagtggaataatccaaaacaaattttatacggttaacaatatttaccttccttatagtaatagtatactttaaaaaggccctcagggtatatatcttctaaacagtacaattcagtgcagttactttaaccaagtatgtctctagtggagaacaattaggcctatttcactggtgtgtaagcctcagtgctaaatgggtggccaataaatattcgctagaattacctgaatgtgtaaaaccattcgttttgtgtgtacaatggcaaaaattcaaaggggcctgttttatgtaatctgtgagattattattaattcggatcgagaaagagagcgcgggggactagactagtttcattttaaaacttcattattggtgtttcgaaatcttccttttaagtatttcaacatgggtgcccaaggtttttggttgacaaggcaatttgtttgaatgtgttcccctatagaattgtgattggaggatgtaat

SEQ ID NO: 552820 - DNA, 873 bp, Homo sapiens
gggcggcggtagatggaggagggaggccgggacaaggtcgtccggtgcagccccagcagtctccagtcggcgggcccccggcggtcacggtacgagaagccgagcggtataggagcggcgggatgccggggacaaggacaaagaacaggagctgtctgaagaggataaacagcttcaagatgaactggagatgctcgtggaacgactaggggagaaggatatcatcgcctgatatcgagccatgcgactggtaggaacttgtcgaacggcgagcattcgattgcttcgtagcaatcttcgcatggacgttcaggtggcccaaggcctctcagaagtttctgcgtccacgctatgggcgaaactgaaggtaaagtctagtgaggaacatggggccctggggagaataagcgtttggctgctgacatcatctccgtcttgggccatgaccatgagtggggagcgtgagtgcctcaagtatcggctagtgggctcccaggcaggaattgggatcatggggtcatgagtatgtaagagcatctggcagggagaagtggctaaggagtggcaggagctggatgacggatagaatcgtccagcggcgagccatctgcatcagtcctggtcgaagggagatctgtcgcctatacacttgcgccacaaatgcacagcatgacggctggcgacctggcccatgcgacatggcgccccggtgggacattgcctgcgggacaggccagttgactgcagcactggccttatgtggcaagggtcggccgcaccaggttttcacacggtggaggtcaactattgcggtttccttacaccgctgagaaactccttggcaatatgcgatagcacgacccgcacctgtgg

SEQ ID NO: 552821 - DNA, 967 bp, Homo sapiens
gaagtcatcaccaattgtatggagcttcatacgtatgatcccattaactcgatgctgagtatttacatggataattctagatatatcgatgcgcacgtgtgcaactatgctggcaacatggaggcgaacagaaaagaaatgaagcttgactcggcttctggcttctctactacatcaaatatcttgtatactggggcatatatgcgatcaaatagttcgtacagagcagcttagcggttgaagttgatgaagataagaaactatgtcactcgatatgaaaatgttccggtaatgttgactgcctcaggtcttggcttatctattctggagaatatatgcagtagatcctctcccatataaagcagcaactacgattttcaactctactgcatgtctatgaagtggatatttgaaactagtgttcacggtgacattggtgaccaacctaaagttcgtgtcatgacgacggtaaggtctctagatctgagctttagaaatttacgtaaggctacactgagttaatctagaaatttagcaaaacctgtgtagccgtattcccaggcagtgcagaatatagtaattaagtgtcagtaagtgatatggaaggctagggtacaggcaccggagacaacctgatgtcaccttgctagtaccttctgtattctctaacattcagtctaagaatcttaagcaccttggtgttattgaatcaggtggaggaggccagtaagaaacctcctgaggtgatttggcgaccaagtggtgcattgtcaccatgcattctgctgaatcatccaacaaactggtccttacctgaacaggccacgtatggatgtccctggctggtggtcaacaggccccttccacttaaatgggtcggcgatcggcaaagggaaccacaaggcaactggcggcaataattgtgtgcattaggccgcaccaggcattaaccttcacaaaatacagg

SEQ ID NO: 552822 - DNA, 166 bp, Homo sapiens
cacataaggaaatgacgaagagagtcagctactacgggcagtcttagccaacgagactggactggctcgcattgcatgagaccggctgaacggcgatgggcactgcggctgaccacctcgctcttcagtacgactcgccctgaccggctacccacgacatacgctc

SEQ ID NO: 552823 - DNA, 143 bp, Homo sapiens
  misc_feature (56)..(56): n is a, c, g, or t
  misc_feature (114)..(114): n is a, c, g, or t
  misc_feature (137)..(137): n is a, c, g, or t
gggccagcaagcccccacctgacttgaccttaggcccatagagagggctgtgcgtnctgccccagccaggatctggtcgctgccccaggggactgatgggcagagtgcctgtgntggactgtgaccatccctgatgncctgac

SEQ ID NO: 552824 - DNA, 435 bp, Homo sapiens
  misc_feature (248)..(248): n is a, c, g, or t
  misc_feature (288)..(288): n is a, c, g, or t
  misc_feature (327)..(327): n is a, c, g, or t
  misc_feature (384)..(384): n is a, c, g, or t
  misc_feature (417)..(417): n is a, c, g, or t
  misc_feature (426)..(426): n is a, c, g, or t
cagaaagtggctgctggcagattgcggcaatcctcaacatcggtcaacgtgcgaagatccgctgtttgttaccaacgttgatgacacccgtctggatgatatcgcggcgtggacttaccgcgcaccggttgaagatcaggcgcgtttaggttttgccatcgcccatgcgctggataactctgcaccagcggttgacggtatcgaacctgagctgcaaagcaaaatcgacgtcatcgtgcaggcactgncaggtgcgaagaaaccgttgattatctccgggacgaacgncggtagcttagaggtgattcaggcggcggctaacgtcgnggaaagccctgaaaggtcgcgggcgctgacgtcggtatcaccatgattggcccgttnccgtcaacagcatggggcttgggcatttattgnggttggcgnttcgcttga

SEQ ID NO: 552825 - DNA, 290 bp, Homo sapiens
tactacatactacctaccacgttcaggctgaggggtagcagcgttgtcatccccctcagtcttctgacctacacctatacaggaccttgttggtgcatcagcgctagcattatggattgcacggtggagaccacatgctgagtgtttgcagatcagaggagtgctcatctgtctctggttactgcagtagcctgtaactggatatcttggggcgtggggtgaccacgggaacaaggaaccgtggagaagcatcagttcttccacaatggctgggtgccgataaatagcga

SEQ ID NO: 552826 - DNA, 243 bp, Homo sapiens
ggcgacgcagggagcaacagaggctcaggtgtccctggtatgctcaggctcagctctgacataccatcagagctatggcaggttgagaagggctctaaggaacaactgtggcaggttccagcatcgtgcgaaagactttggagtcaggcacacatgagtttgcaccacaacaatgccatttattagccacattagtttacaaagtatctgctctaagcctcagtttcctcattccaaatgggg

SEQ ID NO: 552827 - DNA, 398 bp, Homo sapiens
atggacaggccagcagattggtcatattcactgtagaatactgttgatagtgctaacgtgcatgcatgaggaacagtgtcgtagtcagcaccttcatggctcatcggctccgaagttaagaaaaggcctgtggaagcaactggatagatgcctcaccatataggtgtacaagattagatgtctgtgatatactgaatcacctcacagcgctctagccttcgtcaggaataccagtgctaagatctccagtgctgcgtcctccgcaagaatgctacgctcatgtcggcgcaggcggtctggtattctgtgtagtcggtacgggaaccccagaacagcaggtggacgcggacgagactttacaataagtagtcggcctggggcttcgggcacgcaacggg

SEQ ID NO: 552828 - DNA, 105 bp, Homo sapiens
gactgtgatcctcgtgactggggtcctattgaggccagtggctgaattatgggcttggaacatataggatccgctattattcacagtgatgtcgggactaaagag

SEQ ID NO: 552829 - DNA, 128 bp, Homo sapiens
agagatggaacagaaatctcggtctttgtgtatcagtggcaccgtcgatctgtagggatcatctcatccctcaggtgactttatcatgtgaactctttatctgtcaaccctcccccatggggaagaga

SEQ ID NO: 552830 - DNA, 860 bp, Homo sapiens
tctcgagtaagagggaagtgcattctcgattccgtagacggtgctccgccggtgctgcgcgaaatgtaacttccggctgttgcatggctatgtggtccatggaggaccctcgccttcgtactaggtaactatgggctgacctctttcctcatcatcaaggatcagcgatcgatggtgcgcgtgcttatgggagcattgaggcctctcaagtctcatataactggaccagtgataggctgtaggcacatattacatatgagaatcatcatattggatcaactgggcttgtataagatgatggtggataatggatggggatgtgactgttactaatgagtggggtcaccatcttaagcatgatggatgttgatcatcagattgccaagcgtgatggtggcacattgtccaagtctcaacgtgatgatgatcccttggtgatggaatcacgaggagtggttgtacctggcgtggtgccttgttctgatgaagcggagccagttgctagatcgtggcattcatcgcaatcagaatagtcgatggctatgagcaggctgctcgtgtgctattgaagcactgggagcttgtatcatgcgagtagtcgttccgtgtgtgtctttcggcgtcaaccgtattcccgttatttcagagggttccaagccacgtcctggtctccatggggtcacctgttgtcaccgtcggattggttgggctgttggtattgcgttctctctgtgatgattggggtgggagacgtgtgcttggtgtgttttgtggaggggttgccggtcgtgtggcctttatggttcggcttgtttcggcaggtttgctccctttccacatgttcctgtactgttctcttg

SEQ ID NO: 552831 - DNA, 1107 bp, Homo sapiens
  misc_feature (672)..(672): n is a, c, g, or t
ggtgaagaaaaggccacctccaaagaagaaatgggcatgagttcagctcacacatcaacaagctgagggtgaaagcgtcagaggcagatcaaggtcctgggagaaaccgggtaccaggcatgtgaaaccagaggatatcacgaaggctctgaattaatgtggcgaaatgaacgattgtacgatagttgggtaaccaagagagtgggaaaggctgcactcaagtcaggtaggaggagagaaagaaagagaaaagctcggtgcatcaggtgtaagcgttatcagataaagctctagtctagaacagaaggtagaggctcctctttggaggtcatcccgtgctgtcatcccaggaactggaagtttgcagtctggcatgcgatcacgtcaaggcgtcaccatgacaattatctcatggcactcccggtgtgtccaaagtgacgtatcatccgtgacgctcagactcttctcgctagagattagccctggggccagtttctccaccgggtgaaccctgtccctagcttaagcaatccccttgggactaaaatatatccaggtaaatgtgtctttgcatggttcagcacggcatagaggagggatgtgatccaagccattggttatgtgcaccacaaggggaattaagatcacttacccacagatcttcacgtgagnacggtaccacaagtgtggaaattgcgtagggcacgtgtttcccctcttggggccgcgtacccccttcaacatagggtagatcccgggggccaatattaccaagggttggcattgaaaggtcccaaaacatatgtgtggcccccttggggacaccaagatattcgcttcatccagataaaatttggctctttacaccattaaattacgcataccaaattaggatagaaaaaagctagggagagtatttttccaaacgtgggggaggattggagaggcagaagaatagaggaattaaaattatagggaaagttacggcaaaacacaaacacgttggcggacagggataaattttatacaaagaagcagtacagggtttgcaacatattgttatcccattaaataaggttaatttatgtttcttttaagagtggaaaa

SEQ ID NO: 552832 - DNA, 532 bp, Homo sapiens
ggggaaaaccattttcccccgggaaacggttttgcccttttttccccccggctgaaaattcccccccccaaaagggaaaaaaagggggggccccccccgggggggggccctttaaaaaaaaggggtccccccgggccccagaaattgggcccggggttttaaaaaggggttttttttttaaaaggggggggggtttcccccaaaaaatttttttggggggggcctttaaccaaattttttaagggaacccgggaatttaaggggggtttttttcctttttttcccccccctttgggcaccgggggccccccccctttttgggccctttgttttgtttttgaaaacagggggacccccccggggggggggttttccccccggggatctttaaagaaaaaccaaaatttttttgggaaaaaaaaaaaattttttttgaaaaggtttaggggaattttttcccgaagggggggtttttaaaaggggttttccccctttttttaaaaccccccccccatttaaaggggccaaccca

SEQ ID NO: 552833 - DNA, 1437 bp, Homo sapiens
  misc_feature (543)..(543): n is a, c, g, or t
gcctggaggggtgggtaccgggaccgcactcagcctggggttgggaggcggcctcctataggaagcgacctgggacctacgatttttagactgactgtgggttcactggaataacacaaggaagaaacaaatgagcattgcaggcatcgggactgtcacatttgacaagatcaaagctgcaggaacaatggcacagtgacggtccagagagatggcacagggatctgtggcttggattgctgatgctgtggcgagaagaccaagcgtgccttatgaggatgtcgcaaataccactgaatgagcttcctgaacctgagcaagacacatggtggcaccacagaatctgtcaaagaacaagaaatgcagtgaccagacttagccttacagtacctccatgagaatgttccccccattgggaaacttgacgcttggttcctttccttgtggatggatttctcaaagtacacagataaagcatggttcgtacagtctccaaattcaaaactttgagtaataaaatcagactcaaaattgtacaccatntagtttgtggtagcaaagtgcatgggaaattgattgggaaatgcgaattttcagaatggtgaatattcggtcttaacctaaaatttcatgggacgtatttgacctgctggtaaattgcttacttgattggtggtgtaggttaactccataatgtgtgcggaccatggttggtgtgagaggacaaggcggacgggagcattcacgcaggaggggacgagtagatcctgtctctttcgtctaactctccctcgttcttcggctaccgaaaggaacgcaccagaaaacaaacaaaagacaagtaagagatcggcacactaactgacaacgcggagagcgggcaaagacgcaggcaaggggagaggtgagagacagagagggccacagcgaggcacggagaggcggggcgcgcaggacgcacgaaaccgaggtgcgagcgagcagccacgaaggaacgaggggcggagacaagcgagagagagagaaaccggacgaggaccaggaagagagacggaaagccgagagacgcgcacacagcgacaccgaccgcgaagcggcgacagcgaagcgagcaacggagagagaaccgcgggagacgagagggggagaagagaaagaaaaaaaaaaaagagacaaggcgaaggagcgagaggagaagggggcgagagaagaagacaagagagaggagcacgaaccgaagaaaggagaagaaagaaggagaaaaaacaggaacgaaaaggaagaaaagcgagcaagaaacaaccagcaagaacgacaaacagcagaagggacagaacgaggacggaaacgagaggggacgagagagagcgagaggaacaaaagaagagagcggaaggaagaaggcaagcagaagaaagaaacagagagacagagcaa

SEQ ID NO: 552834 - DNA, 172 bp, Homo sapiens
agggcactccacaatccattccccttcacgccatcgaagaagaagaagttgttgtgaggagggtcccgctgagacaggcccttcacaatttcctgtgccaaatatccctccaaccacctgcacacactcggggccactctcgcgagaacgcagtacctgcacacaagtcctc

SEQ ID NO: 552835 - DNA, 154 bp, Homo sapiens
atcgaagagcctaaaggaacgcaccccgttcgagtacgatatgtaggtatcactgacatttcttacccgaagatcatcaccgacgcacaggaaaatgctgcacgtcgccgtgaacagattcagcaggaagaagctcagcgtgaaatctctaagg

SEQ ID NO: 552836 - DNA, 434 bp, Homo sapiens
  misc_feature (71)..(71): n is a, c, g, or t
ccacaagatctccacagcaaaagtgggaaatcaacccagtgaagggagcaacctggtgcggcctacgtccnatctaccgctacttccgaagcacggtcgcaagccagggaccccccaggcccccacggccgcccaaggagcaggcccccagacaagggtgcccggcctgccctgccccctctctgagagcctggccagctcttcgcccctcacctttttggaaactctggagtattttatggttccacctccccacctccctcccccgtcagtgggatgattggggagggtttgttcaggggagggggggacccccctcccctgccttgcccggtgccaacttcctttgccccaaggctggtcccagggccccctcctttctgttgtgcccctctccccaatttcattaaagatttcatgaaacattacccctg

SEQ ID NO: 552837 - DNA, 112 bp, Homo sapiens
aacagtcattttatttaacagttgttagatatggggagtagtgtgattgaggtggagtagattaggcgtaggtagtagtagaggttaatgagggtgatggtggcatatgatg

SEQ ID NO: 552838 - DNA, 207 bp, Homo sapiens
ggctgcacgtaaacttcagagaaaaatcttaaaagcagaccatcctttttggatggtctattctaaggtagaatggttcaatggtaactgactaaaattggatgttaaagatatttagggtttttttggttttctcttaatttttaatttggttttcaggtttcctggtatattttggctgtactggggccggttttagatgggttt

SEQ ID NO: 552839 - DNA, 172 bp, Homo sapiens
tcagctcggaccggctctgctgggctcctggcagcacgtgtgcagactagagacgattgcagcgagaacattgggagatctggtgcggaaggtattggagacaataatccttccagatattccggaacgtcttgccgaagcatcaggtgtgtgtctaaccggcccatgtaca

SEQ ID NO: 552840 - DNA, 364 bp, Homo sapiens
  misc_feature (282)..(282): n is a, c, g, or t
aagagacagggttttgctctgtcactcccaagctggagtgcagtgacacgatcatagttccctacagcctcaaattcctgggctcaagccatcttcccacctcagcctcccaagtagctaggaccacatgtgtacgccaccacatccagctaattttttaaaaactttttgcagagatggggtctcgccatgttggtcaggctggtctcaaactcctgggtctcaagcagtcctctcacctctgcttcccaaagtgttggggattacagggcgcgacaactngtggctcagccatttttgtttattttcaatcttctatcttgggatttaaagttttctatgtacagctttcttttccgggggt

SEQ ID NO: 552841 - DNA, 137 bp, Homo sapiens
ggatccgagctgaatacaccaaatcttattaaaagcgaaatatcagccttctctctctctttggctatttgaaaggtagtcttcaattgggcaggcaactggcttctctctccaaatagtaacaggttggggtatag

SEQ ID NO: 552842 - DNA, 882 bp, Homo sapiens
  misc_feature (1)..(1): n is a, c, g, or t
nggcgcgcctcgtcctgccaccccgctgtgttgtgcctcgagggcactttccgtgtcttttatatgtgggcggcgtcacaaaccagcggggttggtcggcgcaaccttggggcacgcccctccgtgggtccgctccgaagatacgcaggtggtgctaccacccgccgcgccagttctgtcaagcgcgtgcaccaccccgcgcgctcttccttcgggtggtctggagagcccgcccttttccccctggggagcgccgtataccaagacagatcgcttggggcctcaactacgcccccccccgtggcgcccaaccatcggtgggtgacacccacccctgtggcaattgacgatacagccttggcactaatttcccaccccccggcgcttctgtggtcgggggcatccccgcgggacattccccccgggtcatttggcgtgggtgcgattggcgccctgggagagtcccttcctgcttgcacccccggggtggcgcggcgtggagtgtctctcccggggcctgccaaaatttgtatccgcgcccgcacggtcgtcctgccccctcccctgtgggccaagccggccggcggcttctcgcactctctctcgcgatccagaaataacggcgacatgagtgtgttctaacacactgacataacctccccgggtgttttattaaagagcccgtcctcccccgacaggagctatcaaaatcaaaccagagggactattaacaaattctgcgcacaatgtctttttttttctgtaaacctaggggcaggacgaactatttgttgtcttcgtgactctcaacaccacacgcatctaggaacttctttcttcccccaggcattaatttagaaaataaaaaaccccaacaaaaca

SEQ ID NO: 552843 - DNA, 169 bp, Homo sapiens
caaatatagatatttaacgaaagctgcctaatactggcgggagacggcttaggcagaagcactagttactttgccaggggcccttcaaaagtcgctggcgctcagaatgctcttagtcgtgcttgttatgtgagcctttcgaagagactaattttctctcggaccattt

SEQ ID NO: 552844 - DNA, 242 bp, Homo sapiens
  misc_feature (105)..(105): n is a, c, g, or t
  misc_feature (114)..(114): n is a, c, g, or t
ggaatttcccccaaaagcctgacttcccacctcagcctcctgagtagctgtgactacaaatgcgcaccaccacaccaagtaaatttttgtatgtttttgtaaacngtcttgccntgttgcccatgctggtctcaaactcctgggctcaataacctgcctgcctcagcttcccaaaatgctaggattacaggcatgagccatcgcgcctggcccttcccatgtgttcaatgtgcctctttgtg

SEQ ID NO: 552845 - DNA, 748 bp, Homo sapiens
aatggacaccctctttagtaagtggtgctgggaaaactggataaccacatgcagaataatgaaactagacccctatctctcaccattacaaaaatcaactcaaaatgaattacagacctaaacaaaagactaaaattataaaactgctagaagaaacacataagggaaactctgctggacattagtctaggcaaagattttcatagctaagacctcaaaagtacaggcaacaaaaatagacaaatggactatattaaactaaaaaccttttacacagcaaaggaaacaatcaacagagtgaagagacaaactattgaacagggagaaaatatttacaaactattcatccaacaagcaattaatatccagagtatacaacagcaaaaaaaacaaaaaacccctaatatctccctttaaaaggtgccgcaacaagccttgcaatagattttccccctacgaggtcagatgcacacgggtttttgaacacgccgtgacggtcccttagtcttccaagaagactgcaactccaaccctccacaatgaaggctgtccactctaactccccgtagaatcttctccccacaatgctatatctgacacacgccactaaggccactacgatattagcccaaatactcaccaatcaaccacacaaacaatttgctgcccccgcgccccagaaacgcgctcacaaccaccctgcgccacccacgcccacgcccatcggacactgtcacagagccccaca

SEQ ID NO: 552846 - DNA, 718 bp, Homo sapiens
  misc_feature (431)..(431): n is a, c, g, or t
  misc_feature (594)..(594): n is a, c, g, or t
  misc_feature (642)..(642): n is a, c, g, or t
ggtgattgctggattgactcgttgtgctgtacaccatatgtcctatgcagccgagtctggtacccttgagtaccgcacgctgggatgagcccttcgcagttcctgaagggcctggcttcccggagccccctggtgctgtgtggagacctccatgtggcacctgaggattgaccttcgccacccccagggggaccaacaaggatgctggcttcacgccacacaggcgcccaggcttcggggaattactgcaggctgtgccacctggctgacagctttaggcacctctagcccccacacacccctatgcctgacaccttttggacttatatgatgaatgctcgatcccagaatgttggttggccccttgagttactttttgttgtcccactctcgtgttacctgcattgtgtgacagccagagtccgtttccnaggccctcggcagtgatcactgtcctatcaccctatacctagcactgtgacaccacccctaaatcactttgagcctggaataagcccctcaactaccattcctctttaacactcttcagagaatctgcattctattctcatgtataaactaggatctccaccnggctcctgtgatagagttcttttagcccagattttttatttgaggttntgtttttaaaaaaatgacaagactactaatgactttgtttgaattatccacatgaaatccagagccatagtttcca

SEQ ID NO: 552847 - DNA, 952 bp, Homo sapiens
cccagctccgggggtcccgcagtcgctggcccgggacgcgccggccgggctccttggaaggctccctaggcaatggccgggtctctgctccacccggctctcaggagcgctgctctctccatctgatcgccctccatcctccccattccctccggttccgggctctcccttcgctccaagcctcaggccaccggcttggatggacgctccgaggctacccgtgcgtccagggggtcttgcttccgaagtggtcctgctctttgtctacgcagatgattgccttgctcacggtgtggcaaagattgcaaatcttactgctggtgatggaaccacgccctactgttgctcctactacgcttatatcggagaatatcctctcgggcactgccatcgcgggcatgtcttgggaactagtactctctactcactgcgcggtcatctgctgggactcgccactatgcactctgcactgctgcatgaagaaccacacgggcgaccccgcgctgggcactcctcaggacgacctcacatcaacaccgctctcctcctatcctgcaggcaccaccaccctaccggtcacgcaccactcacactggaatactgtgcagcactcgcctccctccatactcccccacccccacagcgctccacgcacagccgtcctccaccgccctgccctactcctggcacaccgcccccgccacctaacctccatgctcccacgacccacgaaccactgctgcccaactggcgccgactctctgccccaggccacccaaccaactgccctctactccagaaacaccgcgccacgaccagcacacccgcctccacccgcccacacaaccacccacggcgcgccccacaaccgccgcccacgcctgcgccccacccccgcccaccgacacaccacccacccccccaccccgccccccacgccgcaccccccccg

SEQ ID NO: 552848 - DNA, 126 bp, Homo sapiens
tagattctgaggatccctatgagcgtgaagagaggaatgagataaaagcccagacttcaggaaatgaaatagagagaaaaagaagaaatggagaagaagagggaaatggattaacttaggagctca

SEQ ID NO: 552849 - DNA, 225 bp, Homo sapiens
gcagataattgtcctgcaagaagctcctggactgatcaggcggaggccctgcaggtctaagaccagggaatcacgccagacgtcttgagtagggcatccaggtggagaaggaggagatcatcaagactttatccaaggaggaagagaccaagaaataaaacctcccactttgtctgtacatactggcctctgtgattacatagatcagccattaaaataaaacaa

SEQ ID NO: 552850 - DNA, 978 bp, Homo sapiens
  misc_feature (34)..(34): n is a, c, g, or t
  misc_feature (77)..(77): n is a, c, g, or t
  misc_feature (82)..(82): n is a, c, g, or t
  misc_feature (90)..(90): n is a, c, g, or t
  misc_feature (104)..(104): n is a, c, g, or t
  misc_feature (106)..(106): n is a, c, g, or t
  misc_feature (120)..(120): n is a, c, g, or t
  misc_feature (171)..(171): n is a, c, g, or t
  misc_feature (173)..(173): n is a, c, g, or t
  misc_feature (182)..(182): n is a, c, g, or t
  misc_feature (185)..(185): n is a, c, g, or t
  misc_feature (224)..(224): n is a, c, g, or t
  misc_feature (237)..(237): n is a, c, g, or t
  misc_feature (270)..(270): n is a, c, g, or t
  misc_feature (305)..(305): n is a, c, g, or t
  misc_feature (356)..(356): n is a, c, g, or t
  misc_feature (420)..(420): n is a, c, g, or t
  misc_feature (442)..(442): n is a, c, g, or t
  misc_feature (450)..(450): n is a, c, g, or t
  misc_feature (462)..(462): n is a, c, g, or t
  misc_feature (494)..(494): n is a, c, g, or t
  misc_feature (507)..(507): n is a, c, g, or t
  misc_feature (631)..(631): n is a, c, g, or t
  misc_feature (633)..(633): n is a, c, g, or t
  misc_feature (857)..(857): n is a, c, g, or t
  misc_feature (868)..(868): n is a, c, g, or t
  misc_feature (881)..(881): n is a, c, g, or t
  misc_feature (898)..(898): n is a, c, g, or t
  misc_feature (902)..(902): n is a, c, g, or t
  misc_feature (904)..(904): n is a, c, g, or t
  misc_feature (957)..(957): n is a, c, g, or t
tgtttattttatttttatttcttttatggtaatntttttttattagatatatttttagctattttatttattttatngtggntattttgntttaatttatttancnttttttaaaagttnttatttatctctgagtaattatctcacagttaaatatataatatctgaatngnatgaaaatntantttttaattatttttaattttttgaaaataattactatnaatgttgctaatntccatttcttaataactgaacttgattacctanaagtttgttaagaaagggtcatttgtaattttttnttcttaatatattcatttacaaaagcagttagaaattgatataacatgttnaaagccattagatatagctaaggctcgtttagctctatctgtaatcaaatccagattcatggantattatgaagtcataaaaaagnatgagttngtgtcctttgcngggacatggatgaagctggaagctcatcattntcagctaactaanataggaacagataaatcaaacaccacatgttcttactctataagtgggagttgaacaatgagaacacatggatcacagggaggggaacatcacacactgggccctgttagggagttggggggcnanatgagggagagtattaggtcaaatacctaatgcatgtggttcttaaaacctaggtgatggtttgataggtgcagcaaactaccatggcacatgtatacctatgtaacaaacccgcatgttctacacatgtataccagaacttaaagtaaaataaatttaaaaaaatgaacttttgcactgttacattgtaatatggagcttgaatcacaagttatttaaacccnaaaaacaacangaacctccaacanctcaaaggtgctggtantttnanatgtgtttggatagaagtatcttttaaatctctctcttaatgaatgggtattnatctatgatttgtggggctgc

SEQ ID NO: 552851 - DNA, 1155 bp, Homo sapiens
tcgcctcgtgtctcgatagatgtctgtgagcttgttacagatgttgtttgccgctgtcgtgtgttgagcgctggctggtacagatgagtctctggaattgtctgttggattgccgcttagagtaatctttgttttatgagtctcctggtgtaagacctcctgaacggtcttctgatctaggtgtacccccctgaggttttgcgtggacgttatctcttgtcatttattcctgggtgacgtttcattccgaggttgccgtctttttaggcgactgaggtttgtagagaaatttggttcactcgcttttttcaacaagttatgttgccgttcccgtgtgacttctgtgttggaaacaattgttttgtgttcttgacatttgttttaataggtgttatagttgtagtccgacgccaaatgagatagagcatggcctttttctctgctattccatcatcaatgttattattgactcgtgcgctactggtgcctaattacttggcattgttttttggtttgaagcctgttgtaaagcctgtcagaatctactcagtagacccgcgggttgtagcacgatgctcgtccgtatgatgttccactatctccgtgattccagacgactaccaaatgtcccgttaacagagttctacctgaaattgaggttgagggctctcactagtgtgtagtgagttatctcgtcgtacgatttggtcacctcttcttatgtaccagcggagtgtcggtatactacctgacaagaagcatccttggaaaccatacaggaattgtttctattgtcatttgaggaaatgttttcctcttctaactcccagtaggaggtttagaacagaagtttatattcatggtagctacaattaactgttagcatacctgatatgtccgtatcttcgttataggttagtctcggatccgactaagtgtgcttaatgcctcgaggcacaagtagtgaactatgtgttgatatgttatgaagaaaagaattgttgtaagtcttttgattctactctatatgctggactgcattcacatcatggcagtgaaaataagtcagcttctttacagatggtatagttgatagatacatggattgtgctttgtgccatatttgtgccattcttttaacgaaccatcggggac

SEQ ID NO: 552852 - DNA, 298 bp, Homo sapiens
tgacggtgacgttgccttggtctggtggtggtggggttgtgtgtggcagtcgtgggtccgtggctggtggtgcctgtggtggttgtccgtgtgagtggtggtagtgtgtgctcttggtagtcctgtggcgtggttgtgccatgtgctctgctgtcaccgtgctgtagtcaccgtgaacggatggcagcaaacgtagctgaatctttgtgtgaggacatgtcattcccgtctccccgtggggctgccaggtaggccccagaatggtccccggagaaaatgcacagtgcagcctcatggc

SEQ ID NO: 552853 - DNA, 551 bp, Homo sapiens
  misc_feature (7)..(7): n is a, c, g, or t
acccagnaacagctatgaccctcccacctaaaaactaaagcagctattcacaattcacttgtgtactcttctctggccccttttaatcccccaccccacaaggctatctatcactaaacttaatttggggatttctgtgaccttttaagtttttatcacacatgtaactatcatatacattctttgatctcattcacttttgagctcaatgaaaacagcatcatgccattgagtagactcaagagacttgctttgcccctatttcctgtgattcacctttattgccaagtgtagctgtagttcactcaattttactgcatcatgatatcttataaaaccactttcccatggacagaactttagttattcctgttactagcctgattatattgccatgaccaaaatgtaagacatggctgaacatgcctggagttctggccttgttcacatctgtgaagtgtaactgttctccagcactgatatgtagcatgtgactacttacagatctgacattgtgggccacgttcttgcaaatgtcatagctgttcctg

SEQ ID NO: 552854 - DNA, 150 bp, Homo sapiens
aaaccaaccaaccaaccaaacaaacaaacaaaatcaaagcctgtctgctgtctgccagtaactggcagccattctaccacttcagttcctaagatccaatgagcatgactttagagtgcagacccctctctgctggagttcagtcgacgc

SEQ ID NO: 552855 - DNA, 367 bp, Homo sapiens
cccttcccagggtaaaagcaattcgcgtgcctcaacctttcgagtagctggaattacaggcatgcaccactatgccccgctaatttttgaatttttagtaaacccggggtttcaccatgttggccaggctggttttgacctcctgacctcaggcaaccggcctgccttggcctcccaaagtactgggattacaggcatgagccactgggcccggctgccaatttactttttatatgacacttaaaaactggtagactaaactggggggggtggtgtgtacctctaaccccagatccttgggaggctgtgggggaaggatcacttgagcccaggagtttgaggaccaacctggccagtatgtcaagac

SEQ ID NO: 552856 - DNA, 1123 bp, Homo sapiens
ggatgctgtcccgatcccggtgctggtgtctcgggacgtcagccgcgtcgctctcagccttccagaaggggaacgtgccctctatgtggagacagtgcccgtgccatggtgtgtcatcccgtatagtgccagggggagcactaggtatacccatagatcgagctagtgaaggttgtcaattaacaacgagtgtcttcagatgattcgctttttcaagaactactaggctgtatgccaggatggacttggttacatgtctaatagcccaggagttgtgctggaactctgtcactagaggtgcagagtgtcatggttgggagaatacgctgaagtgggatgactagattgtagaacgcatgaagatggtttggatgtaggattgaaagactgagtgttggaaacgtcgtgtgaagggttccactaacgaggacaagatgagtcgatagacacgggaaagcaccattacggtaccatgcatgggcgggaaacacgccgacagggacggctacatcacatcgtttaacagcactacgagagacacaaacgctggcttgctgggctgccttgacattaaacgggcccaacggcccggcctgggaacgacgtcccttagctttgcgttgcagagaaccccacacaagaacgccaaggaaaccgcatactacggcaacgcagagcacagtgcacgtcacgccccagtgcgaaacaaggcaccaatctaccacgacagtccaagacattgacccaagcggtgcgcccaccatgcaggcggccacgtcaacgaaggccagcaccctcaatcaagagacatacaaaccttggtggtaccttgccaaaggttagccatatgcccgacaggcgtgtggccacccgcgagcccaccgtacccttgcacgcggacagacgtaagccatgtgacacgaagtggtcatgcaggtttcacgagaaaaagaattaagggacacgaaaacaatgtaggcacagggaagtgaccggacaagcaggacagtttgtctacagtgcggtactggaaaaggaaggacccaggaactgctgtatgttggaaaatgggttggtcgagaaatttggtaagctgcagacttgtagagactggagtgtagac

SEQ ID NO: 552857 - DNA, 261 bp, Homo sapiens
gtggtgtaccgtactgggttgggtttgtaccactgagctatgacaagttcttccagaatctaactttagagctctaaatattcacggctgaccacaaagatacatttctgagcaaaactgagtcgcgctatctgcaacctacgagggtcattagaggttctatgtacagtgttacctgcactggaaaattcaatagactgaagacttaatacccttaagaactgccctctcacgtgtaacaccacagtagcggggtaccga

SEQ ID NO: 552858 - DNA, 111 bp, Homo sapiens
cgtgaagcatgatagtggtattgctcagcttctggggaggctcaggaaacttacaatcattgcacaatgacaaagggaaacacctggggcatctctagagtctgagctgca

SEQ ID NO: 552859 - DNA, 578 bp, Homo sapiens
gagagagagagagagagagagagagagagagagagagagagagagagagagagagagagagagagagagagagagagagagagagagagagagagagagagagagagagagagagagagagagactctgtgtttttttatctttttttctttttcttaccccttttcttttttctccctccattaaatcattttctatttattactgcttgttttaccctattgattgtgcttagaacttcaacgtcttttgtccctttcttgtatcccacgtcccaatcgtttctcttctgtcttcggctttcctttaccccttctcgtgctttctgcctacaccttttatcttgcttttgtactcttgtctctggggtagctttttacttgccctacctcgttctattttctcgtggtctgtttttagctcccttcttggctttcctctagggtctatggtgttttctgttcctcttgctacatgttccttgcttctcctttctgcttaatgttttttctctttcgctttctgtttcccgttcgccttgtccctcttcttccttttggcttttgcctgcttttttt

SEQ ID NO: 552860 - DNA, 199 bp, Homo sapiens
ttgagctgctgaggtgggcagatcgcctgagatcaggagttccagactagcctgggcaacatggggaaactccgtctctactaaaaatacaaaatattatgctggtgcatggtggcacaaacctgctaatcccagactactctgcgagacgtgaggcacagagaatcagcttgagacccagagaggcggagtgctgcag

SEQ ID NO: 552861 - DNA, 969 bp, Homo sapiens
cccctagagaagctgggaatgaccgacatgttcagcaccgggtcatcgaagacttcacgagtctgctcagaccatgagcctctccacgtcgcgcaggcgctgcagaaagtgaagatcgaggtgaacgagagtgtcgcggtggcctcctcatccacagctgtcatagtctcagcccgcatggcccccgaggagatcatcgatggacagacccttcctctttgtggtccggcacagccccacaggaacagtccttttcatgggccaaggtgatggaatcccgttgaccctggggaaagacagccttcatctgggacaaaacgtggagatgcatcgggcaaagacgaacactccgaataaaagaatttcagtgttcaatgactctttctgaaggcagagaagacatttggcctttgcgttaaacagatggtaacaccaggatctagtctccaagaccttggctctccttggaggacctttaggtcaaactccctagtctccaccgtgagaccctgggagagaagtttgaagcacaattcccttaaggtctccagaacagaaggtgacgcctgctgggagcatctggggcactggttccaccgtctctctgccactcgggtctgcagactggttccaaggtgagggcccttggcaggacgggaactacggggcttacaggagcttctgtgtgcctggtagaacctataactggtcacgtcacatagcaatcatctgactgctggactatgatgggggtgtagaaggcaaaggcagtggagaaaccccgtcatctaagaaccatgtggatggcaccatccagaaaggtgtgaagtcgaaaggatgccgcttatgtgcaacctgccggcaacgctacaaacagggatcgattagcaggaatcgacgagacaccccttacaggaacgcaaacataaacacaccatcggagggaatatcttccataacaaagacagc

SEQ ID NO: 552862 - DNA, 159 bp, Homo sapiens
gcatattccaagggggtaatctagaaatatatatgggaaatagtccagattatgacattcagcatgtagaagaatatgaaaagtcctataacaaataaatcagttttccaaatatatttgatttgatttcctgactttttatatttttttcttttttgc

SEQ ID NO: 552863 - DNA, 105 bp, Homo sapiens
agagagaactgtttgagcccaggagtataggttacagtgagctttaactcactggattgcaccactgcactccagtctgggtgacagagcaagactctgtaactt

SEQ ID NO: 552864 - DNA, 701 bp, Homo sapiens
  misc_feature (148)..(148): n is a, c, g, or t
  misc_feature (480)..(480): n is a, c, g, or t
  misc_feature (579)..(579): n is a, c, g, or t
  misc_feature (583)..(583): n is a, c, g, or t
  misc_feature (608)..(608): n is a, c, g, or t
  misc_feature (635)..(635): n is a, c, g, or t
  misc_feature (691)..(691): n is a, c, g, or t
  misc_feature (701)..(701): n is a, c, g, or t
ggggctcaggcgatcctccgacctcagcctcccgagtagctgggactacccgtgcatgacaccctatctggcccttgttttttgttgttgttgttgttctttcttttttcacgtggtttcgcacttgtcacccaggctggagtgcggnggtgtgttgtcggctcactgcaacctgtctctcgggttggagtgattctcgtgtctcagtcttccgggtggctgggattgcgggcgtgtgccacacgcctggctgatttttgtatttttagtagggacggggcttcgctatgttggtcaggctggtctcgatttctgacctcgggtgatctgccacctcggctcccaaggtgctgatattgcaggcgtgagccaccacgcccggccgcatccggctttaagatttgtttttcacttgccgtgggaggatgtacttatctcagatgctagagccgggagaccctccccccacacccccatctnctgcaggagctctgatcgcagattggagtgctgaactctgcatctatggacggtgcttctgtaaccggccgcaactctggagtggcatagtaaagtggnaaangctttgcctttctggttaaagaccncaagaccttcagtgagacctttcctgnacccccactgatatctttatggaatgtttgtcgtgagtaacacaattaatgccgtnaatagtgtan

SEQ ID NO: 552865 - DNA, 284 bp, Homo sapiens
tgccctcgggcccccctggaaaataatggcctaaagggggtgtgggtgtcctcctaaaatccattccctcctgatggggggggggaatttgtgaagcccccctttaggaaaggttttgggggttggggtggtgttgccaaagaaagggggtttgaaccagaaaggcctagggggaagcgggttaaattgcagccttcccctttgggggatttttggggtgtcccttgccttccttttgcctcctccccccccccccttaaattaacggtttgttggaccctcca

SEQ ID NO: 552866 - DNA, 118 bp, Homo sapiens
tcacccacccacaagccgtgtaattcgtgaagttgctacgcggccgcgcctccttcacaagaggatgggctcttcccagctgaacccccagtgtgttgactcagaccccgtctgaact

SEQ ID NO: 552867 - DNA, 119 bp, Homo sapiens
tttcctgccaagccactcaggtgcttgcagggaccagtgataatggcgatgaaaattgatgattggtagtgaggtaaaaggagccttgggattaataaacatgcactgagaagcagagg

SEQ ID NO: 552868 - DNA, 220 bp, Homo sapiens
ttcagacggatgtgatttttgtactgactggtactgggactcagaaagttgtttactgaaactagaagcaagagtgttagagtgaactccaagtttctcttcaaagaatcagtatgtcagtgtgttcagctctcttattcttctgattctccagttttaaagtttaacttcctggttctctttgcccccttgcctctagtttcagtaaacaacgtttcct

SEQ ID NO: 552869 - DNA, 1250 bp, Homo sapiens
ccaccgtcgccggcggcctagttaccatcacaccccggtgaggagccgcagacgtgccgacagccggccccagagtcaccaatcaccgcaaccagtgagcagcgaggccgagacccagcagccgacaggtaggaaacgcaggatagggacagaagaaaggaagaaaggaaaggaactgggatacacacggaaacacacaacgaggaacagactcgaagggagaacaacgtccacgacgacgacgagagcgagaccgtaaacacccacacagacagcaacagcacacagcacaagacaccagcacacacaaccacacaacaacacaacacacaacagacacagacacacacggaacaacaagacaggagaaaagcagagacaacacgcacaccagcacacacaaaacccaccgccagccacgccgagccgccagagccgaccaccgaccgacgcgcacccccccaccgacacaagacagaggaggcgacaaaccaccccacgagcaaagcccaacgacgccgcgccagaagagggagaaacgcacgaagcggggagcacgcgaccacacagcaagaccgagcagagccagagcagaggaggcgagcgggacgaccccggcggcccaaccacgcacacagaccaccccaacaactcggcgaaggcgggccaacccacgcaccccacaagagtacagagccagcccgaacgggcaacacaccaccccgaagacacgaggcagcacgaggaaccaagggacaccgagcagacaaagccgacccgcccacgcgcagcgcggcccaccacacgcggaccgagcacacagcgcgcaccgcaggcagccgcgcgcccagacaccccacacccaacaaacccccaaaacagcaaagacccacgacacccagagccagacaccccggaccgaacacgccgccccggacgggcccgccccacaacaccacgccgcggaccacacccgacccaaccaaccacaaaaggagggcacacccccgccccccaagcgcgcgccacgcctcaccacgcgcgccgcgaggaccggcggcagacggcggcaggccaacgggccccgcggcccgccccccgccacgcccgcccacggggcagcgcggcgcgccccccgacacagcgaggccacacccgccggggcaacagccccgaggaggggagcgccaccgacaaccacgacccgaccaagccaccccacgcccgcggccaccgccaagacaccgcgg

SEQ ID NO: 552870 - DNA, 849 bp, Homo sapiens
taagggtttccctttgtttttttttcggggggggagaaactccccctcttttttttcccctttttcttttttaaaaaaaagggggttccccccctcggaaccccggacgtaaagagggcgcaacgtggtgtggaagcgggctgacgttgttgtgggcggcccagaggaaaatgtgcccagttgtgcttagagggccatctttgtgtcttccacaacacaataacctgtgtggtgttcaacccctgtgcagcgggggggtagagggtgggcccccagtggggcctcgacggctcctcaactatctgtgaaaacctcgatgggcgctagagatgttcccagaagagatagagccgccgctcgatattttttacacccgaagaagaggtcgccgtggggagaatatattctggggaatatataaaactcttctctaaaagagcctcttttggggacccccgagggatattcccgcacagatgttttcagaatatctctcccgagaagagagcctacttctcgcctaaggcaatctcccgaggagcccaacaacagataaatttcctccctcaactccgcgccctttcatcagacacacgtctcttgatgtgttccacgcgcggtggggtactctcccccacaggggtgcgtgtgtgcctcccaaaaactgtgtggcacaagagacattatccctcccaaacactttttgttctcccagcgtggggcagaaagtcgctctgtgccgccacactctttctacgcacagacgtgtgtttttctcgcgccggtgtgtctttagtgagacagacgacaatcaagtccaacttggctgcccaccgctgcaaacgcgga

SEQ ID NO: 552871 - DNA, 105 bp, Homo sapiens
gtcgacttacctacttttataaaataatgctgtgtggttgtgatgtgtatgtgtatttctattttagggtggggtgttggaaagggaggggtgttttgttctaaa

SEQ ID NO: 552872 - DNA, 285 bp, Homo sapiens
gggcagcaggagagaccaagaatgatgggcacataccgtggagatcccaactggtttatgaagaaagcgcaggcgcataagagggaatacacagagagccagctgcaggagagagaaagcatgtcatatggacctatcagatgggacagcaacagaggggcctcccagtgccggcatgacaggctacggacgacctcggcagatcatcagttagagcggagagggctagccctgagcccggccctcccccagctccttggctgcagccatcccgcttagcctgcc

SEQ ID NO: 552873 - DNA, 265 bp, Homo sapiens
ctgtgaccggtcgttcttttacagcgttctgactctggacacccctgcgcggagggcagggcgtagtgctgaatacctcgacactgaaaggactctcctcaatctacccagcttctgctaccggcagaggatcctagagggtctgtccgaataacgccgcttacctttgacgttctgcttgaagctgtctctcttttgactccttagacgcctgggcgagcttttcccgggcagcagctgcgaggcgatcttccagcttttgctt

SEQ ID NO: 552874 - DNA, 140 bp, Homo sapiens
gggtcggtaccgtcgcgtgttcaagctgcccaggtttcctttttctctacagctaaaccatcactggcctacagataagcaatattaaaacaactgtagctcaccagcagacacgcgaccagcttgagaccagcttgaga

SEQ ID NO: 552875 - DNA, 387 bp, Homo sapiens
  misc_feature (350)..(350): n is a, c, g, or t
ctcggtacctttatagccaatcccaggaggctgaggtgggaggatcacttgagcccaggaggtagaggctgcagtgagccatgaatgtgccactgcactccagcctaggaaacaaagcaagactctgtctctaaaaaaaaaaaaaaaaaaaaacaatggaaggcaaacagcaattccctgaggacacttcacacagtgtcctgtagctaagtgtctaggaaaaaacaaaaactccaaaccctttcaatggattgaggacaaggttcgcagaaagggcatttcgtgttgacagtgtgaaccagccgaaagcgtggccagaacccttccttgttatgccttcgtgcccttgntccgggtgggtttgaggggggttctgacccaggaggc

SEQ ID NO: 552876 - DNA, 126 bp, Homo sapiens
acgactggtgaccatgacattggtggtcctgatcaagaattagggtgtaggacgtgggccctgtttggctttttatagagaccaaactctatctgaaatcccaacaaaaaaatttaactccatatg

SEQ ID NO: 552877 - DNA, 213 bp, Homo sapiens
cctcgattcggtacctctggtggactcctccactacatattatacgccatccccaaatccacgtcactgccatatccatcagatcctcctcgtaaagttacttcctggtcctggtccgctatgaccaccccaccccagccccctcgcacgcttccagcgttgcgtaatattttcatgttaaagaatgaacacctctgagcgcgaggcgagggt

SEQ ID NO: 552878 - DNA, 152 bp, Homo sapiens
attttaaacactgagtctgcaattcagttttctctttcatgaagttgtgataaccagtgaaatgaattattatgcttaaagctactgtcatctagattatgatagtcactgttgtctagggtccaatctcattattaaatatcccttctgtt

SEQ ID NO: 552879 - DNA, 326 bp, Homo sapiens
  misc_feature (223)..(223): n is a, c, g, or t
  misc_feature (253)..(253): n is a, c, g, or t
  misc_feature (289)..(289): n is a, c, g, or t
aaagacagagtttcactctgtcacccaggctggagtgcagtggcacaatcttggctcactgcaacctctgcctctggagttcaagtgattcttatgcctcagcctcccacatagctgggattacaggtgcatgccaccatgcccggctaatttttgtatttttagtagagatggggttttgtcatgttgcccaagctagtctcaaactcctgagctcaagtantccgccactttagcctcccaaagtgctganattataggcgtgaggcaccacacccagtccaaagangaaatcttaacagaaattttaaaatatattgaactaa

SEQ ID NO: 552880 - DNA, 1210 bp, Homo sapiens
  misc_feature (766)..(766): n is a, c, g, or t
gaactcattggagtacaccgatagcgaattttgactacaagagtctgaaaggtactttattactgcacggtggtctgtgaagaccatcacagtgtccagatacgagggtagcggagctggacttgctgttaacagacagtctggtgaaggataagtgtccttactattatcacgtatcactggagacagtactagtgggtcctgctcttcttggtcatactcacacatcgaacgccatgagcagtgacattggatgaggtggctgtacacgggataagaacttcgtggttctcaactgtctagttgaatgacggaactggaatttaggacctagttgaccgtcgttcaggaggttgaggcagaacgaaagggacggttccctctgaggcacatcgcagtgaagtagcgcatgcgcaagggagtcactacagtatctggcttccaatcctcaaaaccagatcgctaatcgtaacagagggacccgaagcactgatggacttgacggactggacttggtatacgcctcatgcatcagacgaggccacggggagtgtagctcatcatttggctctcctgggtcactcgtggcgtgttgaaagcatgaccaatctgttgccccacagtagttcgctctcactctgtcccatatcctaaaggatagcgatcatttcgatggaaaccccaggtatagagggtcagtgtgacctggggatgcgcagagcaagtggcattcggactatcctgcgtggaagtatactgataggtnacgagaactccagacgcgcccataggtctaggcttcgaagagcaagctagtgtattccaagcggctcattgcgccaattcgcgtaattaggaaagtttcggtgagaaagggaacccaccgggtgatacgttgggtctccgaagagtaccaggctagcactggggactggccaggagcgtcaaactttgtgttgaagccttggctgtcccctagtagggcctgccacttcaaggtgtaaagctcgtacgtagggttatccccccttgcctacaagttgttcgtgaaccggaggcgacctcaatgatgcgtgaaaaccctagaggtggggtacaaattagtagttgcctgggctttaacgtcacagtctgagggtagaaagcatgcgataatcaagcgtgtccaaacctttgccggctgaacaaggaagaagccaacaatttactg

SEQ ID NO: 552881 - DNA, 978 bp, Homo sapiens
cccagacataggatgggtcagtagggcatggctctatatacctatatctcaaaacatgccagtggcaacctgtgctcgactctgaagacaatggacccacgatataggtgtgacactgttcacataactagtgcagcacaatgccgaggagtgatcagtcgcgacatattcacatttgacaccacgtatcttatggtgtagctacacaaatatcctacagcggcatttcactttctgcagcgcatagtactacctagacgcttctcatacactagctccaacggtacacgtagtcatactatatgtagtattcagctaccataccaaaacggttgtataccccatagcgtatatacaattgcacaccctacaccctccatttctatacagctatgttcctactccagacagatactagcgcctactcgtattctcacgccctaagcatacccactccttcgtgacaccaaccttcgcacgcggaatcacctttagggccttgcacgcgctctagtacattcatcccacgcaaatccaacactaacctaggctacctcttacaccaacctccggcttacaccccccgcctccacagccttcccctttttggcgctctcacgcacgcataagccaccagccagatcccctctaccagcccccctacccccaaactctggcgtctagttccacgcccaacctgtcaacgggcacacggaacgccaacaaggccttaagcacttggtgaccaccacacccagcccccactctcgttcgcaaggagcccttctcacgcccacccctagatgtcccctttattacaaatccccccaatccccttggctcacccacgcacacccagggacggctcccaatgcgagccactgcatttgggttcacgccgcaatcaccaggccattggcttcaccccacatcgggaacctcctttgcacgaggcctgccaccaacctccttgcaccc

SEQ ID NO: 552882 - DNA, 416 bp, Homo sapiens
agtttttaatgtatttatcaaaatatgttctgtgaaattttttctttttatttaattgttatgtctttattggtacatatttgcatatatttatggagtatacatgttattttcttataagcctagagtgtataatgatcatgtcggggtatttaggactcatcactttaagtattgtcatttctatgtgttgggaacatttcaagtcctctcttccagctattttgatataatacattgttgttaatgatagtcatcctactctgctattgaacatagaacttttcccttctatctaactataggtttgtactcattaaccaacctttcctcatctcccaccctcctccccacactcatcgcccttaccacgctactcctacctatctccccttttatactaataatcttataaa

SEQ ID NO: 552883 - DNA, 497 bp, Homo sapiens
tgctctatttcagttgaaaggctttattagcctatcctcaaggtcacttattctttcctctatcgtatcaagtctgttgataaacccacagaaaattttttcatatatgatattgtgtttttcatttctagcatttttttctgactcttacagattccatcactctactaaaattccacatcacgatttatgtatattgtccaccttttccattaaaccttttaatacagtaatcatagttatttcaaggtccctgtctgaagtttgcatgtcagattttgttgactattttacatcttgaacagtcacctttttttttatcttacgtgagtgtgtctatgtcataatttttttaattgaacccaaactttatgtataaaagaaactcaggtaaataatatttctacctggaaatgggtaactacttctttcaagctgttagcatggggggactgaataaatctactcagtagttgaattgtgtctgtattttactg

SEQ ID NO: 552884 - DNA, 131 bp, Homo sapiens
  misc_feature (8)..(9): n is a, c, g, or t
cattggcnntacagcggcgcagacggctgccactgcgcctgttgatcctgcagctgccggtgcagcgctgcccacagatccggctgttgccaaatttctgcggcggtgtgccaggcgttgcgctgcttcag

SEQ ID NO: 552885 - DNA, 495 bp, Homo sapiens
  misc_feature (105)..(105): n is a, c, g, or t
  misc_feature (467)..(467): n is a, c, g, or t
  misc_feature (481)..(481): n is a, c, g, or t
ccgtcattaacccaccatctatggaaatagtaacacaaccgggaatccagcggagtcctcacagccaattacatgacaagatattgtcacatcatcgtggccctntcgccacaggaggcgctagggcaacaggtatttgtgcatatcccattcatttattcattcagccactaaaggcacagaccatgcacaggcagtcactctgccagaggaaatggctgtgagaatgaattaaaaacagcctttgggaggcagagacgggcagatcacgaagtcaagagatcgagaccatcctggctaacatggtgaaaccccgtctctactaaaaatacaaaaaaattagccgggcatggtggcgggcgcctgtagtcccagctactcgggaggctgcggcaggagaatggcatgagtgaacccgggaggtggacttgcagcaagctgagattgcgccactgcaatccagcctnggtgacagaagcgnctccgtctcaaaaa

SEQ ID NO: 552886 - DNA, 108 bp, Homo sapiens
tctgcgggttaaaggagggcaatttctacatcaaataatacgaaggtcatacgctactaagaagaattttatggacgacaagggacgcgcggcggcggtgatataggg

SEQ ID NO: 552887 - DNA, 556 bp, Homo sapiens
  misc_feature (349)..(349): n is a, c, g, or t
  misc_feature (376)..(376): n is a, c, g, or t
  misc_feature (446)..(446): n is a, c, g, or t
  misc_feature (453)..(453): n is a, c, g, or t
  misc_feature (476)..(476): n is a, c, g, or t
  misc_feature (481)..(481): n is a, c, g, or t
  misc_feature (525)..(525): n is a, c, g, or t
  misc_feature (536)..(536): n is a, c, g, or t
ccccaatatatccggcctatcccaaatgatctgtcttgaagtttcctgattctttcctctgcctgagtctgctgttaaatccctctagtgattccgaccccttctccccccattcagttactacatttttcagctccacagtgtgtttggtttttagaaataattttctctttgtttatattctcacttgtttatatattgtttatctaattttgcttagttgtccacactctcctttagctcattgagcattttttagatagttgttcttaaggttttatagagtaagtcagcagcctctgtttctttaggttggtttgtggagatttctttctttcaatcgtcccgngtttccctatttctttatgtgccttgngatcttttgtgaaattcaagcatttgcaaaaccaagctacctgcccttgcagactggctccatgcatggnaagggcntcactggataacgcaccataaangcttnggggccctctcaaactttttcttggggagccatcttccctgggnccggggcatangcataagtttaagttcctcc

SEQ ID NO: 552888 - DNA, 106 bp, Homo sapiens
ccacagctcgaagagggggcggaggctagtgcagcctcagaagaagaggcaggtccccaggctatcagagctctatccactccctcgcgtggccggagagtggctc

SEQ ID NO: 552889 - DNA, 885 bp, Homo sapiens
gagacgccgtacgtgccagatggtgttacctggagcttaaaaagctgcagcaaagttgtaaacctttctgtaggaggaataactgttggcgtcaaaaagacaatgtgtttcaacaaattggccaagaatcaaacattaaggaagggccgaagtccagggacctgtattgtacacattaggccagcccaaaaacccacattttaaagggctaaagacacacaacagccaaaaacccaagttaccccaaataactcgtataagcgcacagaataacacacatttaatgcaacattggaaggcgcaacacaaaggttacaccccaggacgtataccacataaaaagcgcgtttagtggggtaacactgtggtcaacaacacacacggcgcaaccttttggccaccaagtatagtcgccaacataagaaggccatcttacccacaccttgttgaaactcccttccttgcacatgcacagtcgtacaccctggaatttcccctatcagcgacaggctgttcatcattggacataagtggacaacacaccaccaaggttgtaacatgcgggtcgggcactgggacccacggcctttacacacaagcaaattctcactgtggtgcctccctggggtttgtgttcaaagcgttatttaaccatgtgggatgtgaagttggcccaatttcgtcaaaaatttccgttaccaagacaagaaggacagcctacactgtcaaccagtttggaccagcggttcattcatcattctcccaaacaatacccagaacgcgagacgcgatgaatcaaaaccatacacataaaataaactatactgatctctggcactactcatcgtccactacgcacccatccgctagtccactcgccactca

SEQ ID NO: 552890 - DNA, 302 bp, Homo sapiens
cggtcctggagctggtttctcaggtagtatgaaagaacataagaaaaaatgccctcacctaactagcaagtaatattaagaataagcttgaccgggcacggtggctcacgcctgtaatcctagcactttgggaggccaaggtgggtggatcacctgaggtcaagagtttgagatcagcctgatgaccatggagaaaccctgtctttactaaaaatatagaaattagtcaggcatggtggcagacacctgtaatcccagctactcaggaggctgaggcaggagaatcatgtgaacccgggaga

SEQ ID NO: 552891 - DNA, 454 bp, Homo sapiens
  misc_feature (249)..(249): n is a, c, g, or t
gagacgccgtacgtgccagatggtgttacctggagcttaaaaagctgcagcaagtgttaaacttctgacaatggccaagaacaaattaagagggccgaagtccaggaatgtatttcacatagccagccaaaaaaactttaagggctaaaaacaaaggcaaaaccaggttaccacttaattcttaagaaggataaaacattatgaatgaggaaaaaggttaaacagagtaaataaaggctttgtgtaaantgtacaaaagggaacttgtgcacaatttcggcaaaaagcattttcacctgtgaaccttctgcagaaagaactgattcctcagcagcgtcatgaaagcaaaccagttaatgttgatggaagctacaagattaagtggctctgtgtgtaatatactggtgatgcatctaattctccacaaagaccaataaatttgaatgttttattc

SEQ ID NO: 552892 - DNA, 924 bp, Homo sapiens
gcgtcttgcattactattgtgcggctgcaggaggtgtcgagcggcgttatttttttttgcggtttgcctttttttttctttattttttatttgggaaccgcggttgttaaaaaccctgagggaacctggaggggggcctccgcactctcttaccattcttttccatccgagttttgtgactccgagtatggacaaagtgtgtgctgtattgggaggctcccgagtgcatttgtgcagatgctgtggcccagtcaatggcccggaaaggcataccgacgtggcggctcattgccagaaacctggaaggggccaaagccgtcgccggttgacctcggcggagatcattgggcattaagctgtgatgtggctaaggaacatgatgttcagaatacatttgaagagatggaagaaacatttaggtcgagtaaatttctgggcaaatgcagctggtattaccaggggatggtcttttacgtaagaacaaaacttgaagatatggtatctacagtttcatactagcctctggggtcccatgctagacctgtaaacgctgccatgcaggactagtgatctcgaacaacgaggggagggctcatatggtaacatgtaggaagcatgtgttggctctaaagggcaattctggccagttccggttataccaggtgccctgtaaaggaggattagtgggatttaccaggggtgctcttgctaaagcaggttagcgagaaccgaacattagagttgacgtgtatttgccccagggattttgtgacccccgagattttgacgcaacgacgtgtacaagacgaactttttgcgcgaaaaaattttcctcttgggaacgttcggggaaaacttattgcaggtggccatgtcggtgtgtggctctcgctttagaaattccgcgtttattcacagggctgt

SEQ ID NO: 552893 - DNA, 196 bp, Homo sapiens
cacacgccgatggtatcttacccactgagcaaggccaggatcgaacccgcaacctcatggatcctagtggtttcgttaaccactgagccaggacagaaactcctgattacttttaaaaatagttttactgagatataattcacatataacacaattcaccttttcaaattaacccatcggcgggggtaccgagctc

SEQ ID NO: 552894 - DNA, 897 bp, Homo sapiens
  misc_feature (51)..(51): n is a, c, g, or t
  misc_feature (72)..(73): n is a, c, g, or t
  misc_feature (76)..(77): n is a, c, g, or t
  misc_feature (82)..(82): n is a, c, g, or t
  misc_feature (86)..(86): n is a, c, g, or t
  misc_feature (97)..(97): n is a, c, g, or t
  misc_feature (99)..(100): n is a, c, g, or t
  misc_feature (105)..(105): n is a, c, g, or t
  misc_feature (109)..(109): n is a, c, g, or t
  misc_feature (112)..(112): n is a, c, g, or t
  misc_feature (130)..(130): n is a, c, g, or t
  misc_feature (132)..(132): n is a, c, g, or t
  misc_feature (142)..(144): n is a, c, g, or t
  misc_feature (153)..(153): n is a, c, g, or t
  misc_feature (159)..(159): n is a, c, g, or t
  misc_feature (170)..(170): n is a, c, g, or t
  misc_feature (178)..(178): n is a, c, g, or t
  misc_feature (182)..(182): n is a, c, g, or t
  misc_feature (184)..(184): n is a, c, g, or t
  misc_feature (187)..(187): n is a, c, g, or t
  misc_feature (227)..(227): n is a, c, g, or t
  misc_feature (252)..(252): n is a, c, g, or t
  misc_feature (271)..(271): n is a, c, g, or t
  misc_feature (285)..(285): n is a, c, g, or t
  misc_feature (287)..(287): n is a, c, g, or t
  misc_feature (291)..(291): n is a, c, g, or t
  misc_feature (311)..(311): n is a, c, g, or t
  misc_feature (848)..(848): n is a, c, g, or t
gacatttctaacaaacgccaggtagacggatgttaaaaatgaattccaccngcgacgaaaggtaaacaatanncannacccntcangaaacctcccntnngcaanggantgntctccccttctcctcatnanttggcgccannntttcaccangcaacntggttcctcangcctctangccntntantcgccttttccacttgtacatccccccaccccctccacanttcttctgtgaattcatgaccaggnacttctctggctgattgtntccgtgtgtctgangnaggngcacgccggaacctgggaanctactgggcacctctaatgcagatgagaaaaacttgagaatgtgaaagtagatcagtccccgctcccacccgaagctgcagagacgcgggacattaaccagtcagcacgcgggtggtgaagtaactcaggccactctcctccccactgcccagggcgggtgcacgcccctaggacctcctcccaggccccacacccacgcaaggcgacaggaagctccccacgcctgccccatgacgcaacgatgaccgcttatacaagtatgtcagcggagggggaaggggagtgcctggaattctccgaggttggaaacgcaaaaccaatctcttgaaaaaccttgaaagggccagcacagcccacagtacaaaatgaagtccgaccctgaggagatctttaaaaacaaacaaacaaacaaaacaaaaaacacaacacccaagcctcccttctcccagtccagaaggagagcgaaaggttcacgtcccagtccactaagacagcacctgtgggcgcaggtctctgcggaaggcgcccgcgccccnggctcagactcctcggtgccgtccctgcacactgaaggcgatggctccc

SEQ ID NO: 552895 - DNA, 278 bp, Homo sapiens
ggtaagaagaattattaatacttagtgatgtgacagtttttcttaaataactttaaacattatttctccaacagttttcaggtagcagtgtctaaagaacataatttttaagatgaatatacaaagtcaccttggtcaccaaaatgctactttgccaacatggcctaacgtctgtcttagttcgttttcccttcatctttgcttgcaaaccaaggcctaaccataaaacaaggtaggaaaacacctagaaggtgaggcagggttattgtctcatgagc

SEQ ID NO: 552896 - DNA, 290 bp, Homo sapiens
aggctaccacgttgccagtgcactcagccagcctgcgcacatcgagagacccatttctatctaggtagacaggaatattatactctccaatacgccccctgaaacaacatgtgtgttacgtaaagctaatttgattaagacttaaggcgaacacccatatgagaaagttgtaattcgtctttcagacggggagagtcggcaggatcttgttagggttctagggccttcacttggctatttccaggacgttctcactcatactgtccgagtgagattaggcaatcaagctt

SEQ ID NO: 552897 - DNA, 166 bp, Homo sapiens
gagatcccatcgtgtctcagtggttaacaaatccgactaggaaccatgaggttgcaggtttgatccctggctttgttcagtgggttaaggatctggcattggcgtgagctgtggtgtaggtcgcagatgcggttcagatcctgcgttgctgtggctctggcgtagg

SEQ ID NO: 552898 - DNA, 228 bp, Homo sapiens
tcttagaggatcccggtgtatccctttgtctactaaaaatacaaaaagtagccgggtgtggtggtgggcgcctgtagtcccagctactcaggaggctgaggcaggagaattgtttgaacctgggaggcggaggttgcagtggaccgagattgtgccagtgcactccagcctggccaacagaacaagactccgtcttaaaaaaaagaaaaggagagacaaagggaaaca

SEQ ID NO: 552899 - DNA, 816 bp, Homo sapiens
cggcgcggtgcttccagcgaggtctctcctgccactccagccccgcgcccctcgccgcggcctcgggcgtctgcgcctgcagctgcctgccccctgcctctttggagtctctcgcggcctcaaagcgcggcctgcgtcgcttccggcatgttccctgacctgcgtggctgatgtgcttgcctgctgtgtgggctgccctgtgctagctgctgctgccgtcttactgctgtcctctggcggccctgtgcctggcccggtggcatgcaccactgctgtggtccctgcgcttgggatccatgcggcctgctgagtgaacctgggtggcctgggctggtgagcgctggatggcgatgccgcgtctgctgagcgttgtcggcgccgggccctggagacagctcagacagataacaatacacagtcccactttagtaaacctgtgatgcgtgaaacatttaacaaccaaaaggaaaacgttggtgaattctcctgctagactgtagtgcgttgacccactacatctagactattgactggcttttggtgcactgtgacgggaacccctggctagtaacaacctagtcacctccatcttttgacagatcaccatatatgcagaagttacgatgcaaatcactgatgaggagcaatgacaatgctcgatctggcatatggactaacagacagatcacggttgggcttgccaaatctgatagacaaaaatctatggacaatatgactgtaacgagtgcctgaaaacagtggcttgattgccagaccaatccattgatgtgggccaagagctcctgaactagaacg

SEQ ID NO: 552900 - DNA, 310 bp, Homo sapiens
gtaatctcgagagttgtgcagtgtcttaacaattccactcatttgggccaatgcttccttaaaaccctgataggctgggtgcggtggctcacgcctgtactcccagcactttgggaggccaaggcgggcggatcacctgaggtcaggagttcaagaccagcctggtcaacagggtgaaatcccagctctactgaaaataaaaattaccgcggcatgatggtgggtgcctataatcccagctacttgggaggctgaggtgggagaatcacttgaacccgggaggcagaggttgtagtgagcagagatcgca

SEQ ID NO: 552901 - DNA, 273 bp, Homo sapiens
  misc_feature (240)..(240): n is a, c, g, or t
aatcaccattcagagtgtggtgaggatcaataagataaactcatgtccttggcacataatcagatggtaactgctcagattagtttgaaattggagatctggtaacctaaggatgctttctaacctcgtccactcccatttcacaattcccaatggtcctcagtgactcaaatgtatttgttcccacaaatccatcaccttcttcctttagggtgcctccctaccaaaaaagacctggtnaaaagacatcagccatagccccttgaatgtagc

SEQ ID NO: 552902 - DNA, 119 bp, Homo sapiens
ctgagtgtgaccctgaccatgaagccagatttctcacagctccagcggaaacatatatggctacgaaacaccgggtgaccagcttcatatcaactgggacaacaacatggacaggctgg

SEQ ID NO: 552903 - DNA, 448 bp, Homo sapiens
tcccccccccccgaaaaaattttttgaagccccaaaccccaggaccccaaaatgggcccctctttggaaaaaggggtttccccaaaataattagttaggtgcgggcccccctggagtaagggggcccccaaaccaaaatggccggttttaaagaaaggcaaaaaatggggggtgggggctcccccctccattcccccccttttggaaggccaaggggggtgggtcccctagggccaggagttttaacccaacctggccaccatggttaaacccggtttttccttaaaaaccaaaaaaccacctggggaagggggggggcccccgtttttccagcatcccagttgactttgacaaaaaaatccctttaaccccggaggcaagggtttccgttaattgaaatttggccccggcccccccccctggggtacaaaaaaaaaaaccggtttct

SEQ ID NO: 552904 - DNA, 289 bp, Homo sapiens
  misc_feature (53)..(53): n is a, c, g, or t
ccacatggccccatcccagttggggaagccaggtgagttttgacccttgggcntgggcttttgcccctcccaacccagccgttgtttccctcgacagcgcccctgctgttttccccactgcatgtcaccaccacccgaaaatgccacggtggtcacgtgtgcactcgccctgttacatgtgcctttgcggggcaagggccttccctggtttttgtacactgcgtgtacccaagatgcctcacaccatccctgccacatacaggtgctcaataaacacttgtagagcaga

SEQ ID NO: 552905 - DNA, 900 bp, Homo sapiens
  misc_feature (41)..(41): n is a, c, g, or t
  misc_feature (47)..(47): n is a, c, g, or t
  misc_feature (106)..(106): n is a, c, g, or t
  misc_feature (124)..(124): n is a, c, g, or t
  misc_feature (199)..(199): n is a, c, g, or t
  misc_feature (214)..(214): n is a, c, g, or t
gctctcgccaggtgtcctcgtgaagtgacatcgtctttaanccctgngtggaatccctgagcaccgccgtgatgcccaggaagacagggcgacctgaatccaatanttccttaagatcatccanctattgatgattatccgaaatgtttcatgtgtgggagcagacaatgtgcggctcaagcagatgcagcagatccgnatgtcccttcgcggnaaggctgtggtgctgatgggcaagaacaccatgatgcgcaggccaatccgagggccacccttgaaaaaaacccagctctggagaaactgtgcctcatatccggggaaatgtggctttgtgtcaccaaggaggacctcactgagatcaggacatgttgcctggcaataatggtgccagtgctgcccgtggcttgtgcatttgccccaatggtgaagtcacttgtgccagccagaacatgtctcggccgaaaagaccttcctttccaggcttaggtatcaccactaaaatctccaggacaccattgaaacctgagtgatgtgcaagttgatcaaagatgagaaaaatgtgggagcagcgaagcaacgttgttgaacatgttaaatttccccttctcctttgggctgcatccagcaggtgtcgacatggcagcatttacacctgagtgctgattcacgaggaaccctgattctggtcctggaggggccgcatgttgcaggcttgctgcagttgctccactgtgctgtcccatcttactagggaaacggctggcgttgggcggggacccccgtgaagagcgctgggcccgctggggccggtggcacccgtgttttcccaggggcggcggcgggtgtgtctcccctctcgtcacctcctgtccctcgtatattttctcactctgggggttc

SEQ ID NO: 552906 - DNA, 911 bp, Homo sapiens
gggttgatagcaatttagtggcctataataaacaagacatgtatttatctagtaaagagaatatcacatcaaacacaaagcatttagttcacttagattggatgtctagagaagacggttctcatatcctgactgtaggaattggatcaaaactttttatgtatggacccctggctggcaaggtacaagaccaaactggtaaggaaaccctggcatttcctctctgggagagtaccaaagttgtgcccctttctaaatttgtactattacgaagtttggacctagtttcttctgtagatggctccccaccttttcctgtttctttatcgtgggtccgggatggcatccttgtggtaggaatggactgtgaaatgcatgtgtattgccaatggcaaccatcttctaaacaagaacctgttataacagattcgtacagtgggagcactccatctataacaagtttaataaaacagagtaactccagttctgggttacatcctccaaagaaaactctgactcgatccatgaccagtcttgcacagaaaatctgtggaaagaaaactgcattcgatccttcagtggatatggaagattcaggtctttttgaagcagctcatgtactttccccgactctacctcagtatcatcccttgcagcttttggaactcatggatcttggtaaagttcggagagccaaggccatcttgtcccatcttgttaagtgcattgctggggaagttgtggctctgaatgaagctgcaatctaatcatgaacgccgccttaggtctctcacaatcagtgctagtggaagcactaccagagacccccaggcattcaacaaggctgaaaatacagattacacagaaatagattctgttcctccacttcctttatatgccttacttgcagc

SEQ ID NO: 552907 - DNA, 530 bp, Homo sapiens
tttaatatgtctgttagtagtatggaatatattccagagggagagattttggttagaacttatggacgatatattgcgaatcacgagtgcagtaagtttggacacgattaaatcctatgaagctcctgcaaacatcaattcttgatatctagatgctgtgaaggaatttcttgttgcaggagttgaagaacttaaactttataagtatgagtataatagtggacgaagaattagaatcctacaagggacactttggtcctaatcgctgagtgagatttagtcctgattgagaacgctatgccagtggttcagaagatggaacattaagactatggcaaactgtggtaggaaaaacgtatggactttggaaatgtgtgcttcctgaagaagatagtggtgagctggcaaagcaagagattggttttccagagacaacagaagaggagctagaagaaattgcttcagagaattcagattgcatctttccttcagctcctgatgttaaggcctgagcgtcaatcatatgttgc

SEQ ID NO: 552908 - DNA, 638 bp, Homo sapiens
  misc_feature (16)..(16): n is a, c, g, or t
aatgccaatccatggnttcccaaatcgcccgcacatccaaactggccggaactaccgccaaaaataagtcaagtacaacttagagtcacgtctatctaccggaagcttctcggaaatgtttaccgtatcccctaggggatttaacggactaactctataaggacaaggtagactcggaggaggaacctctctcttctagtaacccccgcctactccaaagcaacccccttgcccctactacttcgaaatttttccccaacaaattaaagaaaacgaagaataaaataagggtgaaataaactcctttcctcgaatgagataaaaaaccggggcctctacgatccccaacgatagactgtaagctttcttccccctcgcggaactaaaaacctcctactctcatccctaaccctccctacgcgaaacgggaccgatctaaactctaacgcgcgagattcgtatttacaccctctccctacccctcgccccgagaaatagaagaaggtagaaaacgttaataattgaaccaattaactatcttaggcgactaagaaaggcggtacgaaaataaaggacaaccgaacgagggagactccgaactcttttcaaccgcccgagcctcccgtgctcgctcctag

SEQ ID NO: 552909 - DNA, 149 bp, Homo sapiens
tttttttgtttttggggtttttttggggggggggctttttcatgttacaaccaaatttggatttattttttatttgtttccctttcaaggtggatcatggggaaagtggacagaatttttttgttaataattgggttaggtgtttgcta

SEQ ID NO: 552910 - DNA, 641 bp, Homo sapiens
tggtaaaaatggggtctctcactgggttgcccaggttgctctgaaactccgggcctcaagtgctggaattccaggggtgaaccaccacgcccggttgagatgtccctttacctgtggaacttgatcaacacaaaatcctgaggcctggtgtgggtgtgtccctcgggggcagattctcaacgggggacacttctgcccccagggacacttttcaacatcctgagacaattctccgggtgtcatcacatgtgtgcacgcactgtagttttgtaacctagaacacgctatgtgggcacctcggggataagacgcccaggggacgctggctacaattcctggcacgggaagattggaccctgcccagggtcctaggggcaggcctccaggcagggtaggagggcaagcgtgcatgcggggctgacttgtgggcctgctacggggaacaccccttgacagcaccagggtgcagcagggaatggtggctcgtggggggatggcgagatttctgtggccattggaggccagggtgaacccaactgtgggtggtgtgcccatgtccctgaaagagatggtctccaagctgaagaagccccgggggaatcatcctcctggataagggctggcaagctgtggatgttcag

SEQ ID NO: 552911 - DNA, 142 bp, Homo sapiens
tccggccggttgaggcagatcccatgtctacaaatttcaataaaaaagccgggcgtggtcccagctactcgtgaggctgaggtagaaggatggcttaagcccaggaggttgaggctgcaatgagccgtgtttgtaccactgc

SEQ ID NO: 552912 - DNA, 225 bp, Homo sapiens
ttcctgtggatgggcccctaaacccaaatctgactggtgtccttttaagaagaggaagagacacccagagatgtgcacacttcagagacaagacacatgaggacacagagacaaggcggctacctgcaagccagggagaggggcctcggggaagccaaccctgcctacgccttgatcttggacttccagcctccagaactgtaagacaataaatgcctgttgttt

SEQ ID NO: 552913 - DNA, 272 bp, Homo sapiens
agagatgtgcgcacgcaagttggaactctcttagcgaaagaaggagcgtccctgcttggttctctgggcttcaatacattgattggtcgggaaaaaccaaggacctgcgctacgtctccccataccttggaaatgcgctgctactcgatgaccatggtccgtacgtccatcccggacaagaacatctctgggttgagattccactcttcgggtctccttatccgccagacgatgacggactagaggtagcctcgcgccttattcgcgcacga

SEQ ID NO: 552914 - DNA, 383 bp, Homo sapiens
  misc_feature (59)..(59): n is a, c, g, or t
ttgtaaaaatggtccatcattctctaagccaaaaatgcgggaaataacaattattttcnagaaatttcatatatattgaatattacaaaatcatgtaactcgaaatgtttaaatggtcacactgggccaggccaccgcgtgtcacgcctgtgatcccagcactttgggagaccaaggctggtggattacaagatcaggagtttgagaccatcctggccaatatgatgaaaccctatctctactaaaaatagaaaaattagctaggtgtggtggcgcatgcctgtagtcccagctgcttaggaggctgaggcaggagaatcgctggaacccgtgaagcggaggttgcagcgagccgagattgcaccactgcgctccagcctggg

SEQ ID NO: 552915 - DNA, 147 bp, Homo sapiens
ctctagaggatcctttgctggtcgcggtgcggtccaggttgtgtccaggttgtgctggctcaccatgacctgcttacaccttgctctgctgcagtttatactcaccaagaccctggacccagacacatactgagaccagcacaagcg

SEQ ID NO: 552916 - DNA, 267 bp, Homo sapiens
ggtgcagtttgtcttcctcccctagattactggtctggccctgtgactgctttaatgaatagaaggtgcagaagtcatactgggccagttccaggtataagctttagagaagacctgggagataatgcatatgcacattggagagccctgagccaacatctaagaagtcagctacagttctggatagaccatgtggagcagccacatggagagagagaggcctggacatcccagcatcatggctgatcccagcatcatggctgagcc

SEQ ID NO: 552917 - DNA, 159 bp, Homo sapiens
gtaacaaacattccatcgcaccatactctccgtccagatgaatagaaacttataaatccacgccctccccaattatatgttttttatatattttatttatcagggttagataggaaagatacccaagtctgataggggatatataggggggaacaggac

SEQ ID NO: 552918 - DNA, 231 bp, Homo sapiens
cgaggaagcgccacaggaacatgtctgtacatctgaccccctgtttcaggaatcgtccagatcggtgtacatcgtcacagtggggcgagtgccggtctctgagcaagacagtgcgcttcagggtgctcaaggtcaccatggttgccggtaccaggagggagttccagaagttctgaggctggacatcggcccgctccccacaatggaaataaagttattttctcattccca

SEQ ID NO: 552919 - DNA, 777 bp, Homo sapiens
ccacgcgtccgcaagatcatcgaggacctgagggctcagaatcttcgcaaatactgtggtacaactgcccgtcatcgttctgcagattgacaatgcccgttcttgctgcatgatggactttagcagtcaagtatgatgacgatgagcgtggcaccatgctgaaccaagtcttgtggagaacgacatctcatgtggcgtccgcaaatggttcatttgatgacaccaactatcactacagacgtgcgagcttggagacagaggactcagatggctctcaaggagggagcgtgcctcttcattgaagaagaaccagcgaatgaggaacgtataaagggcctagcaaatgctccacgatttgctccagctctgaggtttgagccgctggatgcgtgacgaatgccccgcaaagtctcaggacctcgccagatgatcatggcataacatccggtgtcaccaagtgatgactgagctggactcgtgaagaacccgagaggagctagacaagtactggttctcagctagattgaggacgagcaccatagtggtcaccataaagttctggttgaggttggagcttgctgatgacgacgctctacagatactgagaatgatacagtcgcagtctctttggatgattcagacccgtgcgatatctcatgaaggaagattcttgaatggctcagtattggcatgaaaccaggtcctgagagtggaggttggaatggaccgtatatactattaacgaatggagcatctcaaagggatcctgctgcaccg

SEQ ID NO: 552920 - DNA, 283 bp, Homo sapiens
cccctccccaagacacttttccctagggcatcctatgtgccctcctattccacatataaacaaaataggagttttccctgtgccttccccttaaatggcatatgtatctttcactcttttttttcaccctagtggatctttaataccttaaaagctcaaccctgggcttggtgcggtggctcatacgtgtaatccccagcctttgggaggccaaggtgggaggatcacttgagctcaggagttccagaccattccaaagcaaaaacaaaaggattttgagatc

SEQ ID NO: 552921 - DNA, 1582 bp, Homo sapiens
  misc_feature (391)..(391): n is a, c, g, or t
  misc_feature (1582)..(1582): n is a, c, g, or t
ggctccgcggctgctattatccttgctcataccgcgctatggactccctcaccaggtactcagctgactgcactactgcacgtgtgccgaagcagagctaatcaagagatctctggaggcttagacgcacctcaagctttggtagacctggagggtgcatcagcaacttacgtcttctgtgatatgctacaaggactaccacatcctcatacctgggaacgacacattgatgattggctcgtgcctcctgagatcgcacaagtgtcgaagacagcagctgatattgtattggcgatacattgagctagcttagcccgtgagtaaatctatatgaactttgatagccgggcatatatgttgttaactcaaatgatagtgcgtcaaacaagcntcgattaacattggatataccccacttgaagtcgaacaaaggcattaaatatgacgtcataccacggcgcatatgcaacgtttagaaagggggagatcgcgcctaattgcaagatgcaaaaatagtttagtggaactaagagacgaacctacttcgtggcccattaaacagtatacgtataacacgaaggaggcctaaattaaaatacctggcatgcaaatatggcgattcaactttccgtggtgctagaggtacggtaggcaactaaacagtattgcagggccaccgctcagtttgtcgcgtttcaatacagaagccccaaattatggcggtacaagagtacgccgaaagcattcgcagcgctttgcgaatacggcgtgtaccagaggccggggaagagaacataaaaacctctagttgggcctttcccatattaccctcacggagctcgctaacggtagtggacattattggatccaggtgagcgcataaacaaatgttgaaggctacacactaatccgtaggaacgctttagaagtcgaaccgcacagcggtcctaacacgaagttaaaaccgcataaaatcgggtcgcataccgtggccaaccaagaatgcgggccaagttccattccactaccccgtcactttcgtatcaagggggggaacgccttttattccggaagacgactatgcattaaagcggtaaccaccccgaatctttccacattgtgacgagcctctgtggttgtatgcgcgacatgggaacccttttctgggaacgggcgacaaggccccaccgtacgacgataatacaaaaggccggtacagggcaccctttgtaaaaccggcggccgcccacacagaggatattacctttttaagagccagcctttaatacgatgcggggagggaacaggaaaaacaccgtgtccttctccctttggggttgcgcacattatatagtggataaaaaattcccaacgcacgggtatttaaccagtcccccctttgggacgattcccaagcgaccacttgacatctcccgaacagcaattaccgataccacgcattataaaactattgttatagccgcataggaggaatcccgtctcccaagagccaagtataagagcataagagtgttccgcacccaaagggacgccgcgtttaacatatagacaattcgcagcn

SEQ ID NO: 552922 - DNA, 136 bp, Homo sapiens
gacagcacagggaggcagaggggattaggggtcgcgggcggattagtcggccagacaagcggggcagtgagcagctaaaaagtcctctgctaggcttcacgtctcctctctgtgctgtccacctcctctgtgctgt

SEQ ID NO: 552923 - DNA, 142 bp, Homo sapiens
ctgatgtgattctgaatgaaattagaatcgattacagagtaattgaagaactgatgttgcacagtggctgttaaagcctgagacgtgtgcgtacgtgtaaataaagaattagaacttatgaacctttgcatgaatgatgata

SEQ ID NO: 552924 - DNA, 157 bp, Homo sapiens
  misc_feature (81)..(81): n is a, c, g, or t
  misc_feature (95)..(95): n is a, c, g, or t
  misc_feature (101)..(101): n is a, c, g, or t
ggctcctgaaggccaagggagtcaaggtggtggcctgtctgagtgttaatgatgcctttgtgactggcgagtggggccgancacaaaggcgaagnaaggtncggctcctggctgatcccactgggcctttgggaaggagacagacttattactagat

SEQ ID NO: 552925 - DNA, 114 bp, Homo sapiens
gatcctgaacagcagcaggccggcggcgctgaccagcacgcgatggggccgtgggcctgttcgatctggtcgaacgccgtttcgacggcgttttcgtcgctgacgtcgaaggca

SEQ ID NO: 552926 - DNA, 372 bp, Homo sapiens
tgttatgtcattgtgaatttcttcgataatggcccatttgggctaatcagctgagttagcgggggcaggcctcctatggagcaggacgggtggatggcaattatagggtgtttagtcatgcttatctctgctttctggtgtcgagtatatatactatggtcgtggtgctggagtttaagttgagtagtatgaatgcggtaatattttggataatataaataggttaattaagaatggttatgttagggttgtacggtagaactgctattattcatcctatgtgggtgattgatgaatatgctaagattttgcgtcgctgggtttggtttaatccagctcaactgcctgctatgatggataagattgatagag

SEQ ID NO: 552927 - DNA, 388 bp, Homo sapiens
aggagaactcacacccagactcttccaaagggaacccagtttgcccttcgcctggggcttttaaccctcttgtgatttaccctgggatttaaaagggggtcccaggtcccgcgaaatgcctgaaccccacctgtgtttgaggcctacactttggggaaaaaggagttatatttggttcttctggaatttggagaggccaatcacgcggacagccctggaaaaatgtgtgctctggctcggaatatagagaatgggacacatcacattcacgtcacctaagttggaatggcaccaaggcttttcaacacagacgcatctgtagccgagtggaaccttgtactaacttatgatagaatgtatccagaataaaagtttttacccgtgttta

SEQ ID NO: 552928 - DNA, 215 bp, Homo sapiens
  misc_feature (146)..(146): n is a, c, g, or t
ccggagcttaattcggccggggtgtggagctgacagataaggggggtgcgtcactgccttggagaatcttggacacggaggcaaagagaccctgcttgggagggcagatgaagtacctgaacgcccccaactgctgccatcgttcnttgccctcaggttcgtccatgctccactgcccacccactggcctgctggcaacactcctgtggtcccac

SEQ ID NO: 552929 - DNA, 179 bp, Homo sapiens
tctagagtcgagcagtgctccatgcttaactgatactttggcggtcagcacggtgctcactgtgtcgacggaacttgtacagggaggcatgcaccgcacatggtgaatacacgttgaccaggctccatgttaacgatatttggaggtcagcatggtgctcacgtgtcgccggaacttgt

SEQ ID NO: 552930 - DNA, 260 bp, Homo sapiens
tacctcctctgcgtcttccatctactgaaactggcgacgagggggtggggagcttctgttctggtgaagggacccgggtcaggcccccagcaccccatgctgagttggagaaaccccagatctctggggcccaagccaggcagtggtgtggtggcaggttgtgccaatctacctcagatggccatccccctgccgggcatgccggcgatcatgggcggtgaggctctgggggtcggatgacaccgtgcttatgcatccca

SEQ ID NO: 552931 - DNA, 342 bp, Homo sapiens
tactcattggggctggtcattacatggggatcactcagcaactcacactgcgcaagacggaaacaaactcccagtttcttaatcaaaaactagccaaggaacacgaaagagaaggaaaagggaagtcctaacatttcccctgtctgtggccaccagtagtgcaggattcccaagcttgcaagctaggagagcactgcctctagaggactgaagaaaagacccaaaaactagccaaggaaaaagaaagagaaggaaaagggaagtcctaacatttcccctgctgtggccaccagtagtgcaggattcccaagctagcaagctaggagagcactgcccctagag

SEQ ID NO: 552932 - DNA, 986 bp, Homo sapiens
  misc_feature (725)..(725): n is a, c, g, or t
cgtcggtctgatataaatataccttagatgaatgtggaagagctcagaagaagtacagttgttcagtggatttattgatgcgctcacaaagagggggccccggaggtacactctacatcaagtgaaatgcattctacatgaccgctttgaggtatgtaggagatatgttggcgttgggtgccatcaatgctagtgcttctgaaaaggaacaccttgaagctctcttaaagcatgttactacacaatggtgttgaagataatattcaagaagttgttgggcatatcagtgaaggtgtgtgcaggcctctaagggttcgaattgagcaagtaatagtagtgaacctggggcagttttattatattaaatttcataatctcctcaaaatgttagtcaccatatgaatcagggtattgttggacaatagtggaactggattattgactaccattgaatgaaatgcatttgctaaggcataaaaaatattcttcaattagcttgagtcttcagtgcaagtaaattatgggacaagggttgaagtttctgaacaaactgatcttggaccatggtgctgaataaatcagagactcatgtggctgtgtgaagtttagataacacgagtctaaagtgagtaacgtgagatgcttgtcaaggtgattgggtgcggttataatgggtctgggattcgtctcctaaagatgtgtacctgtattcaggaagcactttnggccaggtgcattggctctttaatgggaatcgctaattttggtgagaaccagtggctcaattagagtaccctgcaggaggttgaaatgtacgtttatgagacagttggaagtattataggagggcgatttaaaaggggggggaacataacggggaaaacaaggagtataaaacgagaatgtggggcggtcacgtataacaaacaaaaagatatagggaaagtggcggataaatcgctgcaaatattttatggtattgttgt

SEQ ID NO: 552933 - DNA, 157 bp, Homo sapiens
aagacagtagtcggatacgccggttatgccatgatcccccgcgcttccaggtccttccaggtcttccagaagccaaacatcaagaatcagccttcaggaacgccttgaaacgtaccagttcggtgaggcgatagccgcgatagcgacccatggccat

SEQ ID NO: 552934 - DNA, 244 bp, Homo sapiens
  misc_feature (76)..(76): n is a, c, g, or t
  misc_feature (135)..(135): n is a, c, g, or t
  misc_feature (145)..(145): n is a, c, g, or t
  misc_feature (237)..(237): n is a, c, g, or t
ttctagtacgcaattgtgtgtacagtcgcagctgcacaatacaatgacgaggaggaggccccacgacacatagtanaacttcagatataatggtttggtccgtcgcaatgcggtcattgttgtatgttcatatcntttagggttnccgatttatgcgttagccatattccagtgtcggaagcagggcgtcgattggatcccgaacgagtgaatgagtcgggccggcacggagagggnagtaaga

SEQ ID NO: 552935 - DNA, 104 bp, Homo sapiens
cggcaaatgtatcactagattctacgtagtgatctgcttttacttggtaattggtagttctcaaaagacttttttttaaaaaaataaagtccatacttacactt

SEQ ID NO: 552936 - DNA, 276 bp, Homo sapiens
atcctagcacttgggaggctgaggcgggaggatcacctgaggtcgagagttcgagacaagcctgatgaacatggagaaaccctgtctctactaaaaatacaaaattaaccaggcacatgcctgtaattccagctactagggaggctgaggcaagagaatcgcttgaacctgggaggtgggaggtttggccggggacccagatatgtggcgcctatgtgccatctcatacccgggggcaatgtgagcaaacacctgctgtctcaaaaaaaaaaatta

SEQ ID NO: 552937 - DNA, 466 bp, Homo sapiens
  misc_feature (25)..(25): n is a, c, g, or t
ggaccacttaggctagtacgagctnggtgtaatcggtcgaccttggctcctgtggaggcctgctgggaacgggacttctaaaaggaactatgtctggaaggctgtggtccaaggccatttttgctggctataagcggggtctccggaaccaaagggagcacacagctcttcttaaaattgaaggtgtttacgcccgagatgaaacagaattctatttgggcaagagatgcgcttatgtatataaagcaaagaacaacacagtcactcctggcggcaaaccaaacaaaaccagagtcatctggggaaaagtaactcgggcccatggaaacagtggcatggttcgtgccaaattccgaagcaatcttcctgctaaggccattggacacagaatccgagtgatgctgtacccctcaaggatttaaactaacgaaaaatcaataaataaatgtggatttgtgctcttgta

SEQ ID NO: 552938 - DNA, 504 bp, Homo sapiens
atgttacatagagtacaattatagtgaattttgtaatatcttatgcagtctagttgtggtttttggatttttttttttattttggacaaaaaagagtgatttgcgccgtttggctatacggtgctctaaaactcctggcctcaagcaatccctcctgcctgggcctctcaatttgcgggaattacaggtgtgaaccaccaagcccagcctatgaagtctaatttttaagtgttaaaaatattagtagtgactcttatttctggctcaaattaatttctactttatgctaagagtaatatctcccttcaaaataatcagttccgatgtaatctgcttcgggttaacttgtgtatttggcaaaatcccgctattaaaggtatcccactattatgcagtctaccgtgtaagttaaaaagatttttaacaatctaagtaaatactgaaattatccaggagtagtgacatgcccccgtggtcccacttcctaaggacacagtagggaga

SEQ ID NO: 552939 - DNA, 576 bp, Homo sapiens
  misc_feature (23)..(24): n is a, c, g, or t
  misc_feature (31)..(31): n is a, c, g, or t
gctattgaatgtggcttatatcnngtgcgancgagtttccgaggattgtttttctggcgtttggagaagatgcctaaattgagggcggagtcgaaagatgtttaatcccacaaggccacgcggcggggcctcgtccttctcttaccgccatcttggctcctgtggaggcctgctgggaacgggacttctaaaaggaactatgtctggaaggctgtggtccaaggccatttttgctggctataagcggggtctccggaaccaaagggagcacacagctcttcttaaaattgaaggtgtttacgcccgagatgaaacagaattctatttgggcaagagatgcgcttatgtatataaagcaaagaacaacacagtcactcctggcggcaaaccaaacaaaaccagagtcatctggggaaaagtaactcgggcccatggaaacagtggcatggttcgtgccaaattccgaagcaatcttcctgctaaggccattggacacagaatccgagtgatgctgtacccctcaaggatttaaactaacgaaaaatcaataaataaatgtggatttgtgctcttgta

SEQ ID NO: 552940 - DNA, 445 bp, Homo sapiens
tggctaggagcgaggctgggtgtggctcctgtggaggcctgctgggaacgggacttctaaaaggaactatgtctggaaggctgtggtccaaggccatttttgctggctataagcggggtctccggaaccaaagggagcacacagctcttcttaaaattgaaggtgtttacgcccgagatgaaacagaattctatttgggcaagagatgcgcttatgtatataaagcaaagaacaacacagtcactcctggcggcaaaccaaacaaaaccagagtcatctggggaaaagtaactcgggcccatggaaacagtggcatggttcgtgccaaattccgaagcaatcttcctgctaaggccattggacacagaatccgagtgatgctgtacccctcaaggatttaaactaacgaaaaatcaataaataaatgtggatttgtgctcttgta

SEQ ID NO: 552941 - DNA, 105 bp, Homo sapiens
caattccagcaaaaggattaggagggggaaagggccctaattttttttacagcagagacaataaaccttccttaaactcggccgtcaactactttccggacgttt

SEQ ID NO: 552942 - DNA, 226 bp, Homo sapiens
  misc_feature (66)..(66): n is a, c, g, or t
tcgtggtgactagagttcccccgcatgggtaaactaagctaggaactgctcggcagcagcacaggntgctgttgagcgtgttgccacgtaatagtcgagactttcatcgctgaggtctggccggccatagtgggtcgggaacagggcggtggacagcccttgcacgatctggcccatggcttcgcgcgatggcaattcccggatgcgacccttacgccgatgcggg

SEQ ID NO: 552943 - DNA, 465 bp, Homo sapiens
  misc_feature (7)..(8): n is a, c, g, or t
gcggccnnctactactactaaattcgcggccgcgtcgactcttggctcctgtggaggcctgctgggaacgggacttctaaaaggaactatgtctggaaggctgtggtccaaggccatttttgctggctataagcggggtctccggaaccaaagggagcacacagctcttcttaaaattgaaggtgtttacgcccgagatgaaacagaattctatttgggcaagagatgcgcttatgtatataaagcaaagaacaacacagtcactcctggcggcaaaccaaacaaaaccagagtcatctggggaaaagtaactcgggcccatggaaacagtggcatggttcgtgccaaattccgaagcaatcttcctgctaaggccattggacacagaatccgagtgatgctgtacccctcaaggatttaaactaacgaaaaatcaataaataaatgtggatttgtgctcttgta

SEQ ID NO: 552944 - DNA, 455 bp, Homo sapiens
ctataatgaacagcgatagtattattccatcttggctcctgtggaggcctgctgggaacgggacttctaaaaggaactatgtctggaaggctgtggtccaaggccatttttgctggctataagcggggtctccggaaccaaagggagcacacagctcttcttaaaattgaaggtgtttacgcccgagatgaaacagaattctatttgggcaagagatgcgcttatgtatataaagcaaagaacaacacagtcactcctggcggcaaaccaaacaaaaccagagtcatctggggaaaagtaactcgggcccatggaaacagtggcatggttcgtgccaaattccgaagcaatcttcctgctaaggccattggacacagaatccgagtgatgctgtacccctcaaggatttaaactaacgaaaaatcaataaataaatgtggatttgtgctcttgta

SEQ ID NO: 552945 - DNA, 914 bp, Homo sapiens
  misc_feature (11)..(11): n is a, c, g, or t
  misc_feature (13)..(13): n is a, c, g, or t
  misc_feature (15)..(15): n is a, c, g, or t
  misc_feature (17)..(18): n is a, c, g, or t
  misc_feature (535)..(535): n is a, c, g, or t
  misc_feature (580)..(580): n is a, c, g, or t
  misc_feature (610)..(610): n is a, c, g, or t
aattcgcggcngngncnncggtccttctcttaccgccatcttggctcctgtggaggcctgctgggaacgggacttctaaaaggaactatgtctggaaggctgtggtccaaggccatttttgctggctataagcggggtctccggaaccaaagggagcacacagctcttcttaaaattgaaggtgtttacgcccgagatgaaacagaattctatttgggcaagagatgcgcttatgtatataaagcaaagaacaacacagtcactcctggcggcaaaccaaacaaaaccagagtcatctggggaaaagtaactcgggcccatggaaacagtggcatggttcgtgccaaattccgaagcaatcttcctgctaaggccattggacacagaatccgagtgatgctgtacccctcaaggatttaaactaacgaaaaatcaataaataaatgtggatttgtgctcttgtaacaaaaaaaaaaaaaaaaaaaacaaaaaaaaaaaaaaaaaaaaaaaaaaaactccggggggttttttgtgngggggggggaaaagaggggtttaggaaagggggccgtgggccaangggtgtttcttgggcccctttttttgtgtnacagggggggaaaatggggggggcccccccattatgaagggagacgggaaaaataaaatttcgggaaaacaaccagaggtggttcaatcgggtgtttgtatgtactcctgcccgtcgaaaaaaacctcggcaccactccgaagcagacaagcgaacacatgcatacagacaggcacggagtcatcaacaacagtgagtggacaaacaaacaagacgagggaccgacgagagaacgagatcataacgacagatcagaaagcagaaagaagcagcatgatcagacgacacagacataagaacaaga

SEQ ID NO: 552946 - DNA, 407 bp, Homo sapiens
gcggccgcctactactactactactactacattcgcggccgctcgacgtccaaggccatttttgctggctataagcggggtctccggaaccaaagggagcacacagctcttcttaaaattgaaggtgtttacgcccgagatgaaacagaattctatttgggcaagagatgcgcttatgtatataaagcaaagaacaacacagtcactcctggcggcaaaccaaacaaaaccagagtcatctggggaaaagtaactcgggcccatggaaacagtggcatggttcgtgccaaattccgaagcaatcttcctgctaaggccattggacacagaatccgagtgatgctgtacccctcaaggatttaaactaacgaaaaatcaataaataaatgtggatttgtgctcttgta

SEQ ID NO: 552947 - DNA, 85 bp, Homo sapiens
gagcttccagtttcctactatgttattcccactataaaatattctcaactttggggttttagccacttaagtttttattttctct

SEQ ID NO: 552948 - DNA, 916 bp, Homo sapiens
cgttttacttgactttttgtgtgcggacctttttgactttaaggagctgcccggaatataatgttaagggaccacaattgcttagtttaacgggtggtccctttgtctcagtccatcttggtataagattgtcccaaccttaacttgtaaagccataacgttatgacagacatgtccggagacctctgttaaaatcggttttagacatgacaccagggctcatgtaatattaagaatgttctttgattaaaatccaattgacatgtgacatgagtatttgaaatggtgcttatgggcttatcgaagcatattttttatttgtaatccgatgctgtccccagaataagtgtattgtaatatgaatgttaaaattggaccagagaaagccggcaaataagtggtatttgggaaattaaaggaagattgaacccgagtctttatattcctgaatttaattggattaatgggaaatttatccttgttctttctatattggacttgtttttaagtgaatcagctaatgttaataattttatgaccagatccaagctgagttccatattagccctgttgccactttataacttttaaaaatttgacatagaatttttgaaaattaacttgacccaaaaaagttaataaatattccattgccagtttgggtgccacaccaaactctgcccttgaattggaatagccaaaatgtggcccatagttccagtttagttagagccaattaaaagtgggaaattcatttagaatactttgtttcacaaggaatatgagagagataaattacttgtgttgattagggagatttgtcacttaaacctcttccattatttcaacctcttgtacagccataaatccatgtaaatttagagctatagaataaaataaccgattgcacccttta

SEQ ID NO: 552949 - DNA, 620 bp, Homo sapiens
  misc_feature (593)..(593): n is a, c, g, or t
ctataatgaacagcgatagtattattccatcttggctcctgtggaggcctgctgggaacgggacttctaaaaggaactatgtctggaaggctgtggtccaaggccatttttgctggctataagcggggtctccggaaccaaagggagcacacagctcttcttaaaattgaaggtgtttacgcccgagatgaaacagaattctatttgggcaagagatgcgcttatgtatataaagcaaagaacaacacagtcactcctggcggcaaaccaaacaaaaccagagtcatctggggaaaagtaactcgggcccatggaaacagtggcatggttcgtgccaaattccgaagcaatcttcctgctaaggccattggacacagaatccgagtgatgctgtacccctcaaggatttaaactaacgaaaaatcaataaataaatgtggatttgtgctcttgtatttttaagtggattaaaaaacttactaccttaaaaaaaaaaaaaaaaaaaaaaaaaaagacaaaaaaaaaaaaagacaaaaaaaaaaaaaaaaaaaaaacaaaaaaaaaaaaacaaaacaaaaaaaaaaacaaaaaanaaaaaaaaaaaaaaaaaaaaaaagaag

SEQ ID NO: 552950 - DNA, 471 bp, Homo sapiens
  misc_feature (130)..(130): n is a, c, g, or t
gtctgacctgcacgctctctctgatgatcccatatgaatcgtatggttcatgtccttatagttgatgacgacgttgttctaggctgtcatgtagtcggctatgttgtggtccacgatgaggcgcagcaanctgtggagcagagtcaagtcgatcttctcatacattttctcaaagcgggattccagcatgacatggcactcgctttcattcgtctcccacacgtccggcagtttatggatgcctgaggagtagcagggcaggtctccagcaggtttagaaatcctctggcaaagattagcccccaagggagcttaatcataacctttccataacgcaatcccactactgattcccacggtatacattgtggactggcatgggccctactgggctttcccctcagttaaacagagaacactatttcccttaactaccacgcatcaagagagaggcttgcgggggatcctcta

SEQ ID NO: 552951 - DNA, 673 bp, Homo sapiens
  misc_feature (10)..(10): n is a, c, g, or t
  misc_feature (15)..(15): n is a, c, g, or t
tttaaaaagngcgcntgcgtgagataaggtcgccctcgcgtgggtccccattcttcacaaaggggaggacgttccaccaccgcgtgtccgccgccacacgaggaagtacaacgtgccgcctcgggcggtctttccacaaaaaaggccgctggctatatctgaccactgctaagaggggtcgctccttggcaagattacccgcgctgcgagggacaatgctctacgctcccccggcgggggtgagtattcaggtggggaaacaaccgtagtagacttccgcgccgaaccacccctctgggcgaggaagaaaaattctctctccgacgccccaacacgccccgccggaactctcaaagggcggtggaccagcggcgggcgcattttaacccggctccgaaatatgtccccgcagggttgtcaagagagctgtcaaacaacgcgcgccacaatcgaaggcccccaagatatacgactctgctcgagaaattcctacggcctctcatcccaggtcgcactccccggcagcatcatttggcgccccacggcgagctccacaaataggcgtgaaaagggaaaaagaaaaaaaaaggcaaaagaaaagttggaacaaaaagaagaaaaaatttttttaaaaaaatttggcctaaaaaaccatcacaaatccccaaaaaaa

SEQ ID NO: 552952 - DNA, 816 bp, Homo sapiens
  misc_feature (23)..(24): n is a, c, g, or t
  misc_feature (31)..(31): n is a, c, g, or t
  misc_feature (639)..(639): n is a, c, g, or t
gctattgaatgtggcttatatcnngtgcgancgagtttccgaggattgtttttctggcgtttggagaagatgcctaaattgagggcggagtcgaaagatgtttaatcccacaaggccacgcggcggggcctcgtccttctcttaccgccatcttggctcctgtggaggcctgctgggaacgggacttctaaaaggaactatgtctggaaggctgtggtccaaggccatttttgctggctataagcggggtctccggaaccaaagggagcacacagctcttcttaaaattgaaggtgtttacgcccgagatgaaacagaattctatttgggcaagagatgcgcttatgtatataaagcaaagaacaacacagtcactcctggcggcaaaccaaacaaaaccagagtcatctggggaaaagtaactcgggcccatggaaacagtggcatggttcgtgccaaattccgaagcaatcttcctgctaaggccattggacacagaatccgagtgatgctgtacccctcaaggatttaaactaacgaaaaatcaataaataaatgtggatttgtgctcttgtatttttaagtggattaaaaaacttactaccttaaaaaaaaaaaaaaaaaaaaaaaaaaaaaaanaaaaaaaaaaaaaaaaatctccccaaggggggaacccgggcaaaagaggggcgagagaacctaagggggggggcgccgggaacccctttgggccccttaagaggggggcaaatccagaactgcgggaacaacgggggcaacgggtccgggtgcaacacggtaccggaccaattccaa

SEQ ID NO: 552953 - DNA, 482 bp, Homo sapiens
ctcaacgctttatacttcgagcagcctggcagttgtgaaactgaagttgaacagtgtgtagagaccctggaatggttgtgttacaacaggatgatgctttgccatgaacttgtggaactcatctatcaacaggccacatctatcccaaatttctcttatatgggagctcgcctgtgtaattacctgtcccatcatctgacaagttaggccacagagtggcaacttccgccaatagctactgcaaagatgtcggactgaatatgaagtgaaagatcaagctgcacagggggatgaagttactcgaaaacgattgcatgcatttgtactctttctgggagaacttgagtcttagtcgggagatcaagggaagaagtggacaggttacaagagcagatattcttcaggtaggtctacgagaattgctggatgccctgttttctagtcctatggatgacgattggatttgtggagtaaaattgtta

SEQ ID NO: 552954 - DNA, 798 bp, Homo sapiens
  misc_feature (25)..(25): n is a, c, g, or t
  misc_feature (538)..(538): n is a, c, g, or t
  misc_feature (540)..(540): n is a, c, g, or t
  misc_feature (544)..(544): n is a, c, g, or t
  misc_feature (548)..(548): n is a, c, g, or t
  misc_feature (551)..(551): n is a, c, g, or t
  misc_feature (554)..(554): n is a, c, g, or t
ggaccacttaggctagtacgagctnggtgtaatcggtcgaccttggctcctgtggaggcctgctgggaacgggacttctaaaaggaactatgtctggaaggctgtggtccaaggccatttttgctggctataagcggggtctccggaaccaaagggagcacacagctcttcttaaaattgaaggtgtttacgcccgagatgaaacagaattctatttgggcaagagatgcgcttatgtatataaagcaaagaacaacacagtcactcctggcggcaaaccaaacaaaaccagagtcatctggggaaaagtaactcgggcccatggaaacagtggcatggttcgtgccaaattccgaagcaatcttcctgctaaggccattggacacagaatccgagtgatgctgtacccctcaaggatttaaactaacgaaaaatcaataaataaatgtggatttgtgctcttgtaaaaaaaaaaaaaaaaaaaaaaaaaaaaaatttttggggggccttgggccctggagaaagttttttaacccantngttngggngcnggngccccataaggatcagtgaccacgggccaaaagggggccccaaggaggacccgggctcagcaaaggtgtgggatttcaccaataaaaaggccggggacacccgcgtttgacaatccacgggagtcgaggacatagggccaacacaggggccacggcgtcgaataaatacgccggtggacacagggagcacagcgcgacgcgaacgttacaccaccagatacacacgcacaagcaggaacaacac

SEQ ID NO: 552955 - DNA, 221 bp, Homo sapiens
gtctgaggatcccttattcgtgtgcactagatctgagaaacagactcaaattcttttttctgtgaccttaaatcaggctcagagccctataatggacttcacaattctattttgttgtatgtgaccaataaattatctttaaaactatgctgtaagtgtaaaatatatacagaacttcaaaggcatactacaaaagaaaaatgtaaaatgctaataatgtt

SEQ ID NO: 552956 - DNA, 587 bp, Homo sapiens
  misc_feature (169)..(169): n is a, c, g, or t
  misc_feature (219)..(219): n is a, c, g, or t
gaccgcggacctcagatgaatgcggctgttaagacctgcaataatccagtaatggcatacctcctgactcatatagttcgcatcaagcgaaaataggagaaccagagcacccgatgtggttgctacaggagtgggcatgaagcttggagagtcgtaggaccgattcaantccagaaagccattaacgaattcggagagggactctttctaagatggggnttctaggaccaaccaaaacctggtttgttactgggggctaagaaaaaaacccttggttttcctagaactttcgctctcaccaacacttaggcacgtatcacccatggaaagcgcttagcttgatggaatagggctgttggtggaaaagctggttttcatacccaagggcagaggctttaaccaacggaaaaattagcatggcttcccgtgggcttcaaaggagggaaaccgccaaaacgggggaacacccctttcaagacaaaaaagcaggccaaggcattgtactggccaataaagcatgactaacgaagactgttaagaggcaaaaatacgctctgattcctgacctcagactgattgtcctaatc

SEQ ID NO: 552957 - DNA, 220 bp, Homo sapiens
agtcgatctctagcaggatccccggccatgtgatttacagccactctcaatgaagtagcagatatgctctcgagagcttgatacttattgatacttggttggtcttgattagattagatacaccatgcccatttcagcatagagttcgggacatgagacgtcgaggggagatcgtggtgcgtgatcgtctttatatagttttcaaagtcacttcctataa

SEQ ID NO: 552958 - DNA, 797 bp, Homo sapiens
  misc_feature (181)..(181): n is a, c, g, or t
  misc_feature (205)..(205): n is a, c, g, or t
  misc_feature (249)..(249): n is a, c, g, or t
  misc_feature (257)..(257): n is a, c, g, or t
  misc_feature (280)..(280): n is a, c, g, or t
  misc_feature (314)..(314): n is a, c, g, or t
  misc_feature (364)..(364): n is a, c, g, or t
  misc_feature (368)..(368): n is a, c, g, or t
  misc_feature (378)..(378): n is a, c, g, or t
  misc_feature (390)..(390): n is a, c, g, or t
  misc_feature (435)..(435): n is a, c, g, or t
  misc_feature (451)..(451): n is a, c, g, or t
  misc_feature (466)..(466): n is a, c, g, or t
  misc_feature (472)..(472): n is a, c, g, or t
  misc_feature (482)..(482): n is a, c, g, or t
  misc_feature (493)..(493): n is a, c, g, or t
  misc_feature (507)..(507): n is a, c, g, or t
  misc_feature (618)..(619): n is a, c, g, or t
  misc_feature (629)..(630): n is a, c, g, or t
  misc_feature (632)..(633): n is a, c, g, or t
  misc_feature (636)..(636): n is a, c, g, or t
  misc_feature (641)..(643): n is a, c, g, or t
  misc_feature (645)..(645): n is a, c, g, or t
  misc_feature (651)..(651): n is a, c, g, or t
  misc_feature (655)..(656): n is a, c, g, or t
  misc_feature (660)..(660): n is a, c, g, or t
  misc_feature (672)..(672): n is a, c, g, or t
  misc_feature (678)..(678): n is a, c, g, or t
  misc_feature (697)..(697): n is a, c, g, or t
  misc_feature (701)..(701): n is a, c, g, or t
  misc_feature (727)..(727): n is a, c, g, or t
  misc_feature (790)..(790): n is a, c, g, or t
gggcgccgagatgtgggagctgctggccgcggcgtgggcagttcaggggctgggcggctgaggtccgagccgggctctgggttgaaggatcctgggctgggagcggagggggagcggaggaggagcgggcgggcggggaaggaagggtcttcgcggtcgacttaggggcctgccggctggnggggtcagggccggaggggctgtngcgccgcgggaagaacctgcctcggggcagagcgtcttgttccncgagatcnctccagcccgaatagcgcctggnagacagctcggagggctcggtggagaggatcgcncggtcccagagctccgttgggccaccttttccccccacactccttatgcntggnggagggaganccttttccatcntggcgaaacatcctttatatggtgcaaatatctattggcaacttngcctcggccataatgnagattttctttttcnccatcnacttaattanttcttttaacncaggatttttaggnggatcacatgaggagggggccactcttcagttgttacagatggaggagacctctttttttgttgcctgaacaaagatgggcaacttgggcttgtgtcacacagaggatatnncatattttanncnntgnaaatnnntntttggntgtnncatncaacaggtgggntgtggntgggattttacgattatgntcanagaaaatggtcaagttctatcatgtngatccaactcctttggccagttaggagttcctcatggacctcgaagatgtgtggttcccaggncattgag

SEQ ID NO: 552959 - DNA, 398 bp, Homo sapiens
ggggacactaaccacccttcccttaagggaccagcgactgcagttgagtcatgatctgctcggaatcctcctgctaaagaaggctttgggcgtgagcctcagccgccccgcaccccaaatccagtacaggaggctgttggtacaaatactgcagaaatgacaccaataatggggcagacacaacagcgtggcttaaattgtgcccacccagggaaggtgttgaatgggaccctgttaatggccccatttggatgtaaatcctaagctcaaatttttgttactccattactgtgatttttggttgggtccccaaaaaaatcgttaatccaaacccaaattatgttcctgctgtatttcctgcttccctgttgaattggtgaataaaaccttgctcttta

SEQ ID NO: 552960 - DNA, 133 bp, Homo sapiens
  misc_feature (24)..(24): n is a, c, g, or t
  misc_feature (69)..(69): n is a, c, g, or t
  misc_feature (89)..(89): n is a, c, g, or t
  misc_feature (91)..(91): n is a, c, g, or t
atttgtaagagctgtttatatatnctggataccagagttttgtcctgtaataggcatttcagttatctncactcagttggtggcttgtntnctcattttaatgatgtctctggatgaaaagattatgtttaag

SEQ ID NO: 552961 - DNA, 702 bp, Homo sapiens
gcagctcgaaaagcgatgcctgattctggtttcctggggctgcgtgcccacttcgtgtggacccagacgctgatgagcgtgcgagcagtgcgatgtgcccaatgaaataagaagctgggtgcttgtgctgtgctgtgcttgctcagggatgcctgctggtgtgcgttggatggttgacccagtatcctgtgaggactgtgctggctacatgtgatgctgcactgacgctgtgtgtgcttgctttgtcatgatgtgcccgcaaagtgaaagaactcgttacttctgttgtgacagctgtgcatccaaggtgaggaacatgtggcttggacaagaggaatgatgagaccaagaggtccgagacagacaagtcaccttgcatatcgtcaatggaagaaccgcctttcggggcgttggaccttccaattcccggtcagatggagaaccagcgcagtacccgagaaaagggtcgcccgttgacgacccgcagcgaaagaagagtggaaacgtgagttccgcagttcctggaccactccggaacagccaaagtgtggtacaccgctccgaaagctttgaccgcaaagagggaaaagagcctttcccaatcgtggggcttgtgggaaatggtggggagtgccaatggccgtaaattatgtgtcgcgatgtaaaatggctttttgtgggccccgaaagtagccaatgggg

SEQ ID NO: 552962 - DNA, 110 bp, Homo sapiens
gtttatttgacacgcctcctttttgttccaactctacaaacagtttccgaaacacagtggaaggttacagtgaccccacggaaagtatgaccctgctgttcgagtcttca

SEQ ID NO: 552963 - DNA, 302 bp, Homo sapiens
  misc_feature (91)..(91): n is a, c, g, or t
  misc_feature (121)..(121): n is a, c, g, or t
  misc_feature (133)..(133): n is a, c, g, or t
  misc_feature (268)..(268): n is a, c, g, or t
accattcgtttggagcgcgggcccggtaggtaagtgaagcatggtcatagactgttgtgcctaggagagtcctggtacagtgaactagtgncttggaatttcatcagcaagtaataaatcnccacggaggaanaccgaggcgtggctgaacgaaatgccagagtggagattctgagggtgcattatctggagtgctatcaacaggagtccaaacgacggaaggcatcgtactaatcgaagaagtctatccgacctaccggcaccaccntggaacgggcccccacgacccccgtgggaataag

SEQ ID NO: 552964 - DNA, 319 bp, Homo sapiens
tcttagaggatcccgcttgatgtacatgctcatctgtaccatgaagtttaggcagacatggagacacctcacggctccacctctctggacacaggaaagatgatatgacgagggagcacaggtcagcgtgggaagagggtcatgttggacatgggggtggggtggtcgtccccgagctcctcacattatgcctacaacaacgacagacacatgcatgtgcctttgcagaaacaaagtcaggtttcttcaagtcacaccgggacgggcaggaacaaatctagcctctcagtcccacacaaggcagctgtacctcacccgt

SEQ ID NO: 552965 - DNA, 271 bp, Homo sapiens
ttttccagagtcatccagcaattaaagaactgcctctgtagaccaacatacagatgtagatatatagtgtctagagaccacaccccggtagcaggttacgccatgtcaccgagccccattagattcccagagggtcttagtacctggaaagtcaggccaacaagcaacgtttgcatcatgttaatctcttaagtattaaaagttttattttctaaaagttataaatcatgtatttacaaacatatttttcacagcgtggcttggttcccat

SEQ ID NO: 552966 - DNA, 393 bp, Homo sapiens
  misc_feature (7)..(7): n is a, c, g, or t
  misc_feature (19)..(19): n is a, c, g, or t
  misc_feature (59)..(59): n is a, c, g, or t
  misc_feature (163)..(163): n is a, c, g, or t
  misc_feature (353)..(353): n is a, c, g, or t
  misc_feature (372)..(372): n is a, c, g, or t
  misc_feature (391)..(391): n is a, c, g, or t
aggactngggttaaacatntctattagaatgtaaatgagacactcacctattaaaaggnaaaggtaccttattagatttttaaacatcaaaaacaaaacctgcccaggtgcagtttttggattacagtggctcagacacctgtaatcccaatactctgggagncccaggcgggcgaatcgcttgaggccaggggttcaagaccagcctgggcaacatggcacaacaccatttctactaaaaatgcaaaaaactacccaggcatggtggtgtgcacctgtagtcccagccactcgggaggctgaggtgggagaatccgttgagcccgggaggcacaggttacagtgagctgagntcatgccactgcactccancctgggcgatagagccagntc

SEQ ID NO: 552967 - DNA, 117 bp, Homo sapiens
cacccccttccccctttttagtcccccaacttgagatgtatgagggctattaggtctcccatggagtgggtggaggcagaacaggtattactctgtacactgacttgcgcacaggcg

SEQ ID NO: 552968 - DNA, 793 bp, Homo sapiens
cagggtggtacatttgttagaactgatgaacctacattgacacatcgttaccactcaaagtccatcgtttacattagcattcactgtggtgttgtacatagatgcatccaccattacaatatcagatagaatcatttcatgccttaataatcccctcccctgaatccctgatcttttgctgtccccataattttgccttttccagaatggtatgaagtggaactatacactgtattaccttttcagatggcttctttcactcagcaatgtgcaatttaggttcctctgtgtcttttcatggctgatggctcatttcttttcagtgctgaataatattccatgtctgaatgtaccacagtttatttctagagcaatactttttacaaaccagaattataccccaacggtgggacaaatggggtggggaggctgtctgagagttgtgagtgtgggggaagtggaaggtctttgactgacttttcgctgtgcataaaaagcttctgtgagcatcaagaagagagtagtggtctgggggagagcccaggatgagaatcttgcaaaaatacatccttcaccacaataaaaggcgaatccctctcctcttacatttccccactttcttcccacagcaggcctgggatctgcttaagtccaaaaatgttcctataagttagcaaatatcttatgtcacatactctcgcaaacagtttatgaaacatattttagactaaacaagtgaagagaatgaagcgtttggatggtgaagtcctgatccagaatattagcaaggaac

SEQ ID NO: 552969 - DNA, 483 bp, Homo sapiens
caagatgtatgcgaaatgccaaaagaaactggcacctgactggcttattttcttcattggtggtatgacaagaaagataatacttgctccatgtttgtctatggtggctgccagggaaacaataacaacttccaatccaaagccaactgcctgaacacctgcaagaataaacgctttccctgattggataaggatgcactggaagaactgacagaatgtggctcatgctctgagtaatgttcctgtacatgactgatgctaaagactggattcacagtttaactctaagaattcaaagatcttagaaattcacagaacagaacgattgcatatacatcctattcatcaatatttggatattttgatgcaaaatatccatacgttttgatttcatatttatgtcccatttatctccaacttctagaactcccagtttatacctgtgtcactctcaattttttccagtaaagtacttgatgtaaa

SEQ ID NO: 552970 - DNA, 723 bp, Homo sapiens
tggaggctgtggccgtttcgttttcttggctaaaactcggtgggagtgatggcgggccggcgcggcgcgacaccgggctccggaaccactgcacgcacggcggctgcgcactgacctacaacacaaatgtctgcgatcttctagcaggcgcttgcagcatgctcagaatgcattgactgggcgggaaacagcgcaactactacttgcttccattgctgctggatgtactactctcatttacaggctggtggacttactcactacgactgcacgctgctcacttcatccacaccactgaaccagactttccaacaccactcataccactgccgtgtgcgtgtcaataggcaaacccagtacgcctctccaaaaatgcattaactgcacgacactcgacctgcgcccacagtccgcagcgctgcatagataccacacgacgcaagggtagtctaggagctcaaaccacgggtagctcgacattccggccctatcccgcaacggactccccatcgtccggcccctaggagatcctctcggcatatgcaatctaactgccgaaatacctaacaaatgggcagcgcctcaatgaaacgcccataacagccacccaccagaaccataagctactacccactgcgacacttggccggcaaatctgacacacaataaactgtccctacaaatccttacatcctgcgagcgacacgcctctctcaaccctcg

SEQ ID NO: 552971 - DNA, 288 bp, Homo sapiens
cgaaaggcggaggacagaagtactccataaacgaaaactcgggccagaatgacacagaggttggagagggaacgggagcctcttgggagagtattagaccttgacaaaaaccaggtgggcagggtgcaccatggtcagccacatacgccagtaggttgatggccgacaggataggcacagccagatcggtggtcccaggcacacacgtagtaggcatggctagcggctagaacataacataccctcgaagcgccgagggctgggccgccataacttctacaatcgaaa

SEQ ID NO: 552972 - DNA, 569 bp, Homo sapiens
ctagtttaagaataatttttcatgtaagacaagacagggagtatttgtttctacatcatgaaatgagtccatctattcccctctgtcccttactaaaatctggaaactaaatgactgtaaaaaatgaaacaggtgttaaacacccccagacaataaaatagaagcaatggcaaagcaagattttgggaactgaaaaataaatggatcagtgttaactgactcaatagacaacagaaatgaaagtatcagtgttagatagaggtgtttcactaaaaaacccagaagtgggttgaaagaagtcaaaacacacatggcccgcagtaccttcccgtgtaaaggtaattgaccactaccccctacacgagtagtaagagaagtgttcacagactaatctccactgaaagagggatgcaactcagttcgtggagatagggggatatcctacactatatgacagggtaagaggtatttatacttgaaagactgacggaaggtctcacattattgaacacagaaaagatcttctagagtacgacgtgtccctccaaacctccaccgccaagaaaaaa

SEQ ID NO: 552973 - DNA, 750 bp, Homo sapiens
ctggtacgccccggagtatcgggatatcttggccaacaatgacctttggggctgccaaagctgcctgcctccgagagttgggcggggcgagtagttgcaatgacaaacatttaacccaatagcgaggagatttcagacgctacggccgcaataaccaatgacaagaaagaatcctttcgaataggacgtgtcaggcaacctagacggccggtgccgctgcggggcgtccggcggtcttccgttccgcacgcagggcggggctggctgtcccaaaagcggacaggtggttgtcgtccgttcccaagctggtttgaacaactatggggtcgggctcggccgtcgtcgttgttctgtcgccgcatccccgcttccgggttaggccgttcctgcaccgctcactcctctgctcccttcggacccatagatctcaggctcggctccccgacctgccgcagcccactgttgacccgggccgtacgtgcgagccccgatgtccaccagtgtccctgcacgggaaacggaaggagatctacaatgtatgaagcgaccctggacagtgtacgcgatgaactggattgtggcggccgagtaagacgcgtgcggttggcgctgggcaagcttcctcggagggagtacaagaacaaggttcaccttcgtcggtccctgatgagagagagtccagacgttaaccggcgagaaagagcccttagaccactccatatcgcgaccaccaaagctcatgtggatccc

SEQ ID NO: 552974 - DNA, 200 bp, Homo sapiens
tgcactgcttcggatacacccaccgcaactgtctgtctcatatcacgaacagcaaagagaccgaaaggtgcatagtctgagaagctctcaacacacatgggcttggccaggaaccctattaacaatggcaggcttccaccagaatttcaagaattttagggccctccttccaagctttttacccagaacgggcgatccaa

SEQ ID NO: 552975 - DNA, 950 bp, Homo sapiens
tagcaaggtcaccacaccaccgacctgtccaatagaaggccttcgagtacgggataatcctatttattacctcagaagtttttttacttcgcaggatttttcttgagccttttgaccactccgagcgctagcccccgtaccccccaactaggagggcactggcccccatgaggcatcatcccgctaaatcccctagaagtcccagtcctaagacacctccgtattactcgcatcagggagtatcaatcactcatgagctcaccatagtctaattagaacacaaccgaagccaattaattcaacgcgactgcttattgacagtctttatcctgtgagtctctattttatccctcctacagagactcctcagaggtacttcgagtctcccttcatccaatttccgcccggctttctacggactcagcacttgtgttagtagccaacaggcttccacggactgttcacgtcatccatctggtctgcaacttttcctcactatctggcgttacatccggcgcaactaagtatttacaccttgtactagtccaaatcactcacgttcgggttcgaaagcccgccgcgtgatgctggcattgtgtgagatgtggttgactatttctgtatgtctccactctatcgatgagggtcttacagaagcatcattagtacatctttggaggctgcagcaagagtagtggagcatcctactatcacctgggaaggggccctaatttcggtgacccccgtgttgcatggagggtgcccaatgtgcctatgttgaagtcagcagggccgcgcggatcctaatgcgagttgggagacttcttggcgggatcttggacaggcacctcctccggggggggcactatgggcacccgccaaatgaggcgcggagaaacataggttatggtgaccgcgcatgttcgcctaacgtgtccggtttggaattc

SEQ ID NO: 552976 - DNA, 923 bp, Homo sapiens
cgtgtggacgagggtcaacaagtttgggatcaagcggctgccgttcctccaaaagcgaccgaagcgcgagcagattacccctccgagccagtgtagtgaacacacttcagaaacgtgtaggtgccggtggtcaccgaggggatgcgcgccctccaatgaggtgccggtgggcgggggccgctcgtcgctgacgcgggctggagcggccgagtcacccggcagctctcgggacccggtcacccggctcggcaacccgtccagctggctcgacctacggcctctagcctccgttgcccggtcctttgctcccgggccgagagacaggttggccggaggggggctcgttccccttcgggttctcctcggtgacctccacctccgggcggcgccgtgcgttgtctttagcggcccgccttgacggggcgaggttccccggtgaggcagatctcctgggggccgtccgtgccgcgtcgggccgacgtggcagcactcgcagctccttggaactggcctccagggctcccggggggttaccgaaggcccctcgaaggctatgcgtcggctccaggctgttggggggccagcggtctcctcggtgggcgtcaacacccgggacttcccgccgaactagggcaccccgcccatgcttcttgccagtggtgctcgaagggcgcccggacgttttccgggtcccctgcctcggaaagtcagtctgtggccgtgtttcccccttcgtgccgcccctttgctccaggcccggtcttgagaccaatcttttttgggcaacgccgaccaggggtgtcgggtattaaagccggggagccctccttgccttggaagatttccgcgcgggagagacccacgcgcggcaccccggggttggggtgagagcgggcgcgcggggtccggcagggggccggtca

SEQ ID NO: 552977 - DNA, 125 bp, Homo sapiens
tgctgagattacagtcatgagccactgtgcccaacctgtaagcctaggtttctcctgtaaaaccaagagaagagcctcctctctctctacggaattcagcaaagatcacatgtatgtatgcacct

SEQ ID NO: 552978 - DNA, 209 bp, Homo sapiens
  misc_feature (5)..(5): n is a, c, g, or t
  misc_feature (49)..(49): n is a, c, g, or t
  misc_feature (166)..(166): n is a, c, g, or t
aatanacacagtgtgctatagttaatcagaagcctcatggttctttttnagatggggtcttgccctgttggctaagcttgtcttggactcctgggctcaagggatcctcacaccttaacatcccaagtagctgggactacaggcacacaccaccaccaccaccatncctgagtcttgttgggttttttttagtcaatgtatttctaatt

SEQ ID NO: 552979 - DNA, 114 bp, Homo sapiens
tctagcctcgccagtgtctagcctcgcccagtgtcctagcctcgccagtggtcctagcctcgccactgactcgttagcgctccttccttcttcctagcttccttcaccaaatcg

SEQ ID NO: 552980 - DNA, 316 bp, Homo sapiens
atatcaattaagttaagcgcagagcatcataaggaccttacttttcaaaatccatgctggtgaacttgacctctttgatactttaggattgatattacaatctcaagaggtatcacggaatattgaggactggtattcttaaagaagagattaggccgtaaacagagcaaagaacatatgaagagatagacaagacagccattttacaagccaaggagacagatctcagaataacaaccttgctaacaccttcatcttgaacttctagcctccagaactgtgagaaaataaatttttgttgtttaagcctcaaaaa

SEQ ID NO: 552981 - DNA, 983 bp, Homo sapiens
  misc_feature (25)..(25): n is a, c, g, or t
ggaccacttaggctagtacgagctnggtgtaatcggtcgaccttggctcctgtggaggcctgctgggaacgggacttctaaaaggaactatgtctggaaggctgtggtccaaggccatttttgctggctataagcggggtctccggaaccaaagggagcacacagctcttcttaaaattgaaggtgtttacgcccgagatgaaacagaattctatttgggcaagagatgcgcttatgtatataaagcaaagaacaacacagtcactcctggcggcaaaccaaacaaaaccagagtcatctggggaaaagtaactcgggcccatggaaacagtggcatggttcgtgccaaattccgaagcaatcttcctgctaaggccattggacacagaatccgagtgatgctgtacccctcaaggatttaaactaacgaaaaatcaataaataaatgtggatttgtgctcttgtatttttaagtggattaaaaaacttactaccttaaaaaaaaaaaaaaaaaaaaaaaaaaaaaaaaaaaaaaaaaaaaaaaaaaaaaaaaagggggggggggggaaaaaaatacccccgggggggcccccaattcgcgccccccgtttttgttggaaaaaggcggccccaaaagggggaggcataaaaagagggcggcgggggcggcggtaaccacaccccgcgcggggaaaaccgctgcgcgggacctttgggggaagaactcgcctgccggcgggggcgctatagggggcacccccccccacgagaaataggagccggcgaaaaaaacctggcggttgggggcacccgggttgttgtggcgtacaatggtctcgtttataaatagtcccgctcaaaactacacacaacaggagagcagcagaacacagcagagcgcgatgcagacagcacatccaccacacaagcagcacacacagcaacaagcaagcacagcggcaagcacacagaacctacaaaac

SEQ ID NO: 552982 - DNA, 104 bp, Homo sapiens
ccgcaattcatttatgtagcatggcacatggggcatgctcctggcactgtgctttcttcatgtgcctatgcctggatgcctctgatggtgcttggatgatgctg

SEQ ID NO: 552983 - DNA, 1467 bp, Homo sapiens
cgaggagaagcatggctgacttccttggacgatgcacgatgagccgggatgagcagacgtagcccgagccactgaagatccctttcgaccggaaatgacaatacatcatcaagcctgacgtgtggatggaggtatcagagtgaagctgcgtgtgcaagattatccagtatgtagtgaagacccatgactgagtcctcagtaccgaagaacagtcacggacgaccgggggcacgtaacaaagactggtggactgcagaaactgacgtctagcggcctagctggtaacaacctgttcgctgacatctgtagccgatgatgtggcaggactctggctaagcgatgacgataagcccggattgctgtgggatgaaaggtggatgttcctgacgtcctcacgctggggagaagcatgaaagccacgatagtgtaccaggatgacgcctgtaaccgagggagggatgtcattggtgacggcgattgcagaagtatggtagcatagcggagcagactcccttagctgccgctcacatggtctaggttattggcggcatccaatatagcagccgtggcgcatcgggacaggtggtcgcatcgcgtccaatgccccccagcaaccgaaattggcactgaacccaagagaggaccccgggacgagggagcgtagcacggcaatatgcccacacaggaacccgggaggaaaaagtctgaaggccttgggggtgaaagcacaaggggggttttggaaaggccccatccaaaagacacgtgaaatagtggggagccaacgggccttgggtaaccccttgggaacgcgtgaggaatccctggggattcctcacgaggcatggagggtacctcttcttggcggaaacagccagaacgaggaactgtaatcgggaagcaaaatccttgagagggtaaagcacagggccattcccagtgcagggggatgtccggttccacacaaccctgtggtggcaggtctacccgcttttcccgccggggcgcccgggctaaacaccaaacaattggggctaatccacctggcggaaaccacaaacatgaattttcacaacccaagatgggagcgagaagaaacaaagtcccctgtgaaaaaatctggccgacgggagactcacggagcgtagtagcccacgagcaccatgatagggggcccaccacgacgttgttggcagaaacagagagggcccccgttatacaaacaaaacaaagggggccggggcggaaaaaaaccacgggggcggccaaagacccacaccccttttaaaagggcaccacgtcagcgccatacacaatgaaacgacgagcggacacaacgatagcaagcagacgcacgtcgtagaccgaccaagacttgctagcgactcgacacatcagagaacaactagaagcatctggtggcatataccaaaagagaggccagtcatcgcggccaatgacggcagc

SEQ ID NO: 552984 - DNA, 107 bp, Homo sapiens
  misc_feature (28)..(28): n is a, c, g, or t
  misc_feature (74)..(74): n is a, c, g, or t
  misc_feature (86)..(86): n is a, c, g, or t
atccttacctttttggcagctgctcttnctgccccctttaatgatgatgacaagatcgttgggggctacaactntaaggagaattntttcccctaccaggtgtccct

SEQ ID NO: 552985 - DNA, 199 bp, Homo sapiens
ccagaggtcagatcaagatcgctaatccggcgtctagtccctaccgcaattgccccaacaacgcgcctctcgcgatctgagtggatgcgccggtgataacggattcccgcgaaccacgaacacgcagacggcgataagaaggatgtatgccgatctgaccggaggcaacctctgatgagcggaagacatcagagtcgca

SEQ ID NO: 552986 - DNA, 876 bp, Homo sapiens
  misc_feature (876)..(876): n is a, c, g, or t
tcgtgccgaattcggcacgagctcctgtggaggcctgctgggaacgggacttctaaaaggaactatgtctggaaggctgtggtccaaggccatttttgctggctataagcggggtctccggaaccaaagggagcacacagctcttcttaaaattgaaggtgtttacgcccgagatgaaacagaattctatttgggcaagagatgcgcttatgtatataaagcaaagaacaacacagtcactcctggcggcaaaccaaacaaaaccagagtcatctggggaaaagtaactcgggcccatggaaacagtggcatggttcgtgccaaattccgaagcaatcttcctgctaaggccattggacacagaatccgagtgatgctgtacccctcaaggatttaaactaacgaaaaatcaataaataaatgtggatttgtgctcttgtatttttaagtggattaaaaaacttactaccttaaaaaaaaaaaaaaaaaaaaaaaaaaaacaaaaaaaaaaaaaaaaaaaacaaaaaaaaaaaaaaaaaaaaaaaaaaaaaaaaaaaaaaaaaaaaaaaaaaaaaaggggggggggggggcaaatttattaagccgggggggacgagattaatgcacgacaacttatttttgtagaaagaggacacacattgtagaggggtgtttattataaagagcggcagggggcgtatttaaaaaaagaggtggggaggaaaaaaatcgtgtcgtggtttctttggggagacagccctcctgtggggtggaaatatgggcgcacaacacggagatatatgacgccgggggaaaaaaaatagggtttaggtgaaagcagctatgttgcggagatatgtcgggtgatataatagn

SEQ ID NO: 552987 - DNA, 980 bp, Homo sapiens
tggctaggagcgaggctgggtgtggctcctgtggaggcctgctgggaacgggacttctaaaaggaactatgtctggaaggctgtggtccaaggccatttttgctggctataagcggggtctccggaaccaaagggagcacacagctcttcttaaaattgaaggtgtttacgcccgagatgaaacagaattctatttgggcaagagatgcgcttatgtatataaagcaaagaacaacacagtcactcctggcggcaaaccaaacaaaaccagagtcatctggggaaaagtaactcgggcccatggaaacagtggcatggttcgtgccaaattccgaagcaatcttcctgctaaggccattggacacagaatccgagtgatgctgtacccctcaaggatttaaactaacgaaaaatcaataaataaatgtggatttgtgctcttgtaaaaaaaaaaaaaaaaaaaaactcgagacctagttctctctctctctactcgggatcgccggaaatacgggacccgtatggggcctccctccggaaaagggtcgaacacaatttggaaatcagccagcacgcaaagaacacttgctcttcgggggcaaacccaggatgaagagacgagctgggggatctgaccacagggttcctgatagaagacagggctctggcgggcctgacggtaaaaggtaacctaaggaaacccaaaggggcgcagagtggacacggtgatggaactctaacggcctcacaaccagggaagggggaccgaagcaatcgggggacccacagtggcatgacccactagatggacgccgggaaagacactccacggggagaaccgcgtagaataacctctctggacaaccattgaagagccagaaagtggctataacttggcgttaagcggccgcgcccatccgagaaatttagcggcccggttatccgaacctgaaaactctctctacaaacaagcacacacc

SEQ ID NO: 552988 - DNA, 524 bp, Homo sapiens
gcacgagttccgttatcatgctgtcttttacgcgaattgctatcgttcgcaatactgttattattattgttatttttcgatagagtgtaagcagcagcgacggcggccatcgccatagattgatgatcatcgtccacaccaacacccgcatctttcttattcttgtcgtcgtcgtcatccacgactatgtcagattgagaaaagtgattattactgtcattgccgttgtcagtgttattattgttttcgtcatcttcgtcgtcttgttgattatgcgctgtttgccttaaataccaatccataactgcgttatgttgttcattggagttggcatgatccacattcgaagatgattcgttcgcactcaatgcgctaatattttcagaatcatcattattatcctcgcttctattactgtcatcattgttattaacatcaacatcactactactttccacaatattctgctttttcgagtgtttgttttccagatccttcgtatgcaattgaggatcatggttctg

SEQ ID NO: 552989 - DNA, 808 bp, Homo sapiens
  misc_feature (7)..(8): n is a, c, g, or t
  misc_feature (466)..(466): n is a, c, g, or t
  misc_feature (470)..(470): n is a, c, g, or t
  misc_feature (477)..(477): n is a, c, g, or t
  misc_feature (479)..(479): n is a, c, g, or t
  misc_feature (483)..(483): n is a, c, g, or t
  misc_feature (535)..(535): n is a, c, g, or t
gcggccnnctactactactaaattcgcggccgcgtcgactcttggctcctgtggaggcctgctgggaacgggacttctaaaaggaactatgtctggaaggctgtggtccaaggccatttttgctggctataagcggggtctccggaaccaaagggagcacacagctcttcttaaaattgaaggtgtttacgcccgagatgaaacagaattctatttgggcaagagatgcgcttatgtatataaagcaaagaacaacacagtcactcctggcggcaaaccaaacaaaaccagagtcatctggggaaaagtaactcgggcccatggaaacagtggcatggttcgtgccaaattccgaagcaatcttcctgctaaggccattggacacagaatccgagtgatgctgtacccctcaaggatttaaactaacgaaaaatcaataaataaatgtggatttgtgctcttgtanaaanaaaaagncngaanataaccttcctttcttacggatcgatacttaccaaaactattcatatttttnccttgtcgggcccgcttaggcccacccgattttttacctagaccaagcttattcatgcggcccgaattggaactcactgggccaattccccttatgaagagcggtaaaccattaattggccgccgttttcaaactccgactgggaaaccctggcgttcccaactaatcgcttggagaaaatccccttttcccaacttgggaatatccggcccaaacgattggctttccaaacagttcgcaacctgaatgcaatgggaattgagcctttttttg

SEQ ID NO: 552990 - DNA, 239 bp, Homo sapiens
gtctcctaatttaaccaccgctacagcaacacagtcactcctggcggcaaaccaaacaaaaccagagtcatctggggaaaagtaactcgggcccatggaaacagtggcatggttcgtgccaaattccgaagcaatcttcctgctaaggccattggacacagaatccgagtgatgctgtacccctcaaggatttaaactaacgaaaaatcaataaataaatgtggatttgtgctcttgta

SEQ ID NO: 552991 - DNA, 2551 bp, Homo sapiens
gagacagagttttgctcttgttatccaggctaaagtgcaatggcacaatctcagctcactgtaatctctgcttcccgggttcaagcgattatcctgcctcagcctccgagtgaggtgggattataggcacgtaccaccacgcccagctgatttttgtattttttagtagaagacagggtttcacagtgttggtcactctggtcttgaactcctgacctcaagtaatccacctgcctcggcctcccagagtgctgggattatagcgcaagtcactgcaccaggccaaaattagtttttatgcatgcctaaagatgtttatgctgtagacttttttttttttttttgacaaagtgttgctctgttgcccaggctggagtgcagtggtgtgatctcagctcactgcaacctcagcttccccagtagctgggattacaggcgcgcaccaccacacccggctaacttttgtatttttagtagagacagggtttcaccatgttggccaggctggtctcgaactcctgacctcgtgatccacccgccccagcctcccaaagtgctgggattacaggcgtgagccatcgtgccattgcaccttagcctggacaacaagagcaaatcctattgtcttcacccactccaagccaattaaaatctctgggaaagtgttttaatcattgccccaccttttcttctacagccaatgtgttcctttaaaattttaagtcaggtgcagtggctcacacttgtagccccagcatttgagagccctaggtgggaggattgcttgatgccaggagatagaggctgcagtgagctatgattgggccactgtactgcagcctgggtgacaagacaaccccgtggtctttaaaggaaatatatataaagtcatatcctttgtacattgctcgaaccacagtagtttctctcattcagtaaaagcccgtcattaagagctccataattctctttatctcagctgggattaaccccttggtgtcttcagtctttcttccggccaggacacacactccttggccccagtgcctgcgctagtcatcccgtgatcacttcatggcatttcccctccctttccagtctttgttccatggtcacctcagtgagaccttccttggctatttaaaatggcagcaggtaattcctcctttctgtacacacaaatatcctcacacttgtccttttttgctattttttcaatattgcctctgttatcatctgacctatgtattttccttaaacttacttggttatcatgtgaaagatttttgttttatagctgctgtattttacagaagggcctggcatacaatagttactcgataagtatctgttgaatgaatggtgttctaggcatttaaagtttctcaggtgatgaagtgggtaaccagggttgagagccactcgtgtagaggtcaccttgaatttgtatccaactatatcagcttgtattcctcttctttccctttttaaaatcagcaacacagtcactcctggcggcaaaccaaacaaaaccagagtcatctggggaaaagtaactcgggcccatggaaacagtggcatggttcgtgccaaattccgaagcaatcttcctgctaaggccattggacacagaatccgagtggtgagtatggtttttagcaaaatggacgtctgatgaatcagactaggttcaaggtgttgtgctttgacttctgaggacttctgtggttgtgaaattgacaccagtaaattatgctgcaaaatttgtgtattgcagaacactggagagatagtaattggaagaattaggtgtttggttgtttgttttttgtttttttttttggggggagacagggtctcactttgtcacccaggctggggtgcagtggcataatcacagcttattgcagcctcgacctcctgggttcaagcaatccttccacctcagccccccaagtagctgggaccataggcgtgtgccaccacacccagctaatttttggggtttttgttgtgtttttttgagacaaggtctcactttgtcacgcaggctggagtgcagtggcatgatctcagcttgctgctacctttgcctccaaagttcatgtgattcttgtgcctcagcctcccgagtagctggaattacaggcgtatataccaccatgcccagataattttttgtatttttgtattttgtttctccatgttgcccaggctggtcttgaactcctgagcccaagtgatctgcccaccttggcctcccagagtgctgggattatatgcttgagccaccacagccagccttgaataaatagttttctggtgaagatatttattgggcactgaagtaattgttagaaagcaacaattcaacagttacgcctggcataattgttaatattttgccatttccatcatgtcagtcttgttagaacaggtgttagtagctttattttgtacatgaagaaaacagactctcatgttcctaggtctcaggtctttggtgccagccttggactctaaatttttctcaattttctcctgtaatttt

SEQ ID NO: 552992 - DNA, 273 bp, Homo sapiens
gtctcctaatttaaccaccgctacagcaacacagtcactcctggcggcaaaccaaacaaaaccagagtcatctggggaaaagtaactcgggcccatggaaacagtggcatggttcgtgccaaattccgaagcaatcttcctgctaaggccattggacacagaatccgagtgatgctgtacccctcaaggatttaaactaacgaaaaatcaataaataaatgtggatttgtgctcttgtatttttaagtggattaaaaaacttactaccttaaa

SEQ ID NO: 552993 - DNA, 224 bp, Homo sapiens
gcggccgcctactactactactactgctcgaattcaagcttctaacgatgtacggggacatggttcgtgccaaattccgaagcaatcttcctgctaaggccattggacacagaatccgagtgatgctgtacccctcaaggatttaaactaacgaaaaatcaataaataaatgtggatttgtgctcttgtatttttaagtggattaaaaaacttactaccttaaa

SEQ ID NO: 552994 - DNA, 368 bp, Homo sapiens
catcctctcctcctcctcctcctcttcttcctcctcctcttcttcatcttcctggaatttggcccattccactcggcaacacagtcactcctggcggcaaaccaaacaaaaccagagtcatctggggaaaagtaactcgggcccatggaaacagtggcatggttcgtgccaaattccgaagcaatcttcctgctaaggccattggacacagaatccgagtgatgctgtacccctcaaggatttaaactaacgaaaaatcaataaataaatgtggatttgtgctcttgtatttttaagtggattaaaaaaacttactacctgctacctgggttaggtctactgggttagtctacctgggtaccgagcca

SEQ ID NO: 552995 - DNA, 1678 bp, Homo sapiens
  misc_feature (1118)..(1118): n is a, c, g, or t
  misc_feature (1122)..(1122): n is a, c, g, or t
  misc_feature (1185)..(1185): n is a, c, g, or t
  misc_feature (1343)..(1343): n is a, c, g, or t
cgctttcttgttgtgtgtgctgctgctgttgttctgtgttgttctctgtcttcttgttgtgttgttctgctcgcttttgtgtgtgtgttgtgttctgcttcgtgtcggtagttgtgtcttctgtctgttggtgttgcttgtgtggtctcggacacgtctacgttgtcaccacacggtggcccctttggctccggcggtcccccatgttggccaaaagcgggtttttttacgcgcccccccgttttttataccggtctctttatgtgttctggcactctggggtgcccaatattgccccccgcaggtgttgaatctgtagggggtgcttcattgagacaccgggaatgcttttccttatagccttctgtgctgctgtgtccctgggcgtttgttgcgcatatatatcccgtggttttgggtgattcctcccaggtccgaaggggttttctaccttaccgccagggggccccccgggtagcacaagttgggggggcgcctgcgcaaatccccgcaacgacgttagtgtctggccagacctgccctcttgtggaggaatattaagggcgccgccaacgttgtgctggagccttatcggttctcccatgggggtaaactcccccgcccgaggggtgccccccccgctgtctggagggggccgtgggaccgccgttgtgtgttgccccagagggatcgctgaattttcccactgggatctttggtgaaatgctgtgagtttcttgtccgcgccccctgttttctggagagggaacttaactctctcggggattccacggccttctctcgggtctttcccagggtctttccgcgtctttcttcggtatcccacgggaatttctcgggggaagttggggccttctccctataccccggagatagtgggggacaccacaggagtttttcccccacccttattgtatagactccgcaaagttggagtggcctctttcccacctcggagcacaccccctcctatagggttcttctctggacccacagcgagatttttcttggcccccctccacggagcacacctcccacgcgagactctgttgggtccacacacacatcgtgagatttatagaatagagagcgagatntttntatatggtgtatatatagagacagagaggagatttttgtccccaccacccttgtagacacacncacgcggcacacatggtataggtgtatgcgcacatatattgtgtatatggtggcacccacatcggtatatatatatgagattataattcttgggacgcacacaagagattgttaatatgagaaatttttgataaccacttctgagaaataagagaagncttataagttttgaatcactcccctcttttttgtctcacatgaaatttcttataaaggagttattgctcttataatgctgtgtaatctatctttattgttctttgaaaataacctgccattttgttggtatccatagttccaacccaccatccatttatgaaattaattagattcccctggcccattaaatggcttttaagaataataataataataattttttaagttagcttgagaacaccaattggccggtaatatttcataccctaaattaagactctgaccttggattgttgaattataatgatatgcccccttttcttattaaaaccca

SEQ ID NO: 552996 - DNA, 269 bp, Homo sapiens
  misc_feature (27)..(27): n is a, c, g, or t
  misc_feature (55)..(55): n is a, c, g, or t
ccatgtaaatctattaattctaatttnatattagagacaggagagcatgctacanacacagtgcacttcctgggctttaaaccaaacaaaaccagagtcatctggggaaaagtaactcgggcccatggaaacagtggcatggttcgtgccaaattccgaagcaatcttcctgctaaggccattggacacagaatccgagtgatgctgtacccctcaaggatttaaactaacgaaaaatcaataaataaatgtggatttgtgctcttgta

SEQ ID NO: 552997 - DNA, 586 bp, Homo sapiens
cagctctggctgtggacgattgggacaagagcgggttcatgcgacctctatgtggtactatggctataaagactgatcttgggaggttcctaacaacggaagatagtccggtgataaatacattcgaacttagagtgcaggaaggaatgaaatggcctcatgtgtaatgtagtcttgttggttagttcgagggtgttgtacattaataaggcggttggggtactctgattacttgtgagaagactcgtaaggttaaacaatcgacattattacagattgtctgatttttacgaccagacaagaagattgaagctctaagtgcctgaaaacccttttctacagagtagttgtttacacttcccttctgagaaccctatgaaaaccaggaccttatttggctggtccacactgtacccctagtctagtactctgtgtgtgtgtgtgtgtattacatatttaagtgagggaactttcattcacatgattagaatcaaacaaaaaatacctgtttttatctaaaaggggccgtaaaaactagaggatactaattatacttctgttcaatatgactttacgggtacccgtc

SEQ ID NO: 552998 - DNA, 619 bp, Homo sapiens
  misc_feature (564)..(564): n is a, c, g, or t
tcacagggacgcgatccatctgctgatcggaagttgattgctgccgaactcgacatcgaagcgagatatctctgcgacaagttcaccttcaggagcaacgtctttggcaagcatggagatgtcccgaaccaacatcccggagcggaggctgcagcttgatatgaccgccgccagaaactttgccttcgaatggaatgcgcgaggtattgtagaaatacgccccgtctttgccatccgccacgattcttgacacccaaacatccgaggccccatcgccatatagttcatatcgtgtggatctcaatatgccggtatcatccggcgtaatcacttgtgcatccaaggtgctccattcattcgggctcccgtcagcagattccggaagaaatgtccggcagcttgtctatacaaacgacctgaacgcctgaacgagccattgaatccaaccgctttgcagtctgcggctctatgtaatccagacttggaacacctacgtgcctatatacgccaatatccgcatcatcaacgccgcagagattctcttcatcgataagctcaaacatnatcttgttattgagcaaaactctgccaagtcccgtagtgtgagagatgagttgct

SEQ ID NO: 552999 - DNA, 413 bp, Homo sapiens
ggatttgctggtgcagtacaactagggcttaatagggacttcatcttctccatggttggtctgtactacatcaacaagatctcctccaccctgtaccaggcagcagctccagtcctcacaccagccaaggtcacaggcaagagcaagaagagaaactgaccctgaatgttcaataaagttgattctttgtaaaaaaaacaaaaacacaaacacaaaaaaaaaacgcccggggcgcatctctatattgtcccggggcgggggagcaaaagggttattcggaaagtgcgccctgggccatagcttgtttcccctggacccagctttctcttgttcccaaggggggaaattctggcgggtcccccatattagggaggcgatataatttcaataagccgggttacccggttttaagg

SEQ ID NO: 553000 - DNA, 159 bp, Homo sapiens
atgcagaatacaggagtaatctagaagctagtggaaataaagagatgatatagaagcactaaagcaatatgctatggactattcgaataacagctcttagcgaagggactgaatcctcgtgaatgcatactccggatctcgctagagattccgtggaga

SEQ ID NO: 553001 - DNA, 800 bp, Homo sapiens
atttcacccgggaaacgattagacatgattccgaatttatacgacccacttagggaaattggccctgaggcccaaaattcggcaagaggcgcctttcttgccagaggccccgtttgaactcacgggggggccatgatggtggtgggtacgggcaacccgtggcgctctcctccctcctgtccctgctgctctttgctggggatgcagatgtacagccgtcagctggcctccaccgagtggctcaccatccagggcggcctgcttggttcgggtctcttcgtgttctcgctcactgccttcaataatctggagaatcttgtctttggcaaaggattccaagcaaagatcttccctgagattctcctgtgcctcctgttggctctctttgcatctggcctcatccaccgagtctgtgtcaccacctgcttcatcttctccatggttggtctgtactacatcaacaagatctcctccaccctgtaccaggcagcagctccagtcctcacaccagccaaggtcacaggcaagagcaagaagagaaactgaccctgaatgttcaataaagttgattctttgtaaaaaaaacaaaaacacaaacacaaaaaaaaaacgcccggggcgcatctctatattgtcccggggcgggggagcaaaagggttattcggaaagtgcgccctgggccatagcttgtttcccctggacccagctttctcttgttcccaaggggggaaattctggcgggtcccccatattagggaggcgatataatttcaataagccgggttacccggttttaagg

SEQ ID NO: 553002 - DNA, 129 bp, Homo sapiens
ggccagtgtgtcctgactcccatcataactgttggaaattccgtatccgaatcccactctttgataaaccccagcttcttctagaactggacacttctgctgaaatttggaatatcttatgtgatgcca

SEQ ID NO: 553003 - DNA, 1030 bp, Homo sapiens
atttcacccgggaaacgattagacatgattccgaatttatacgacccacttagggaaattggccctgaggcccaaaattcggcaagaggcgcctttcttgccagaggccccgtttgaactcacgggggggccatgatggtggtgggtacgggcaacccgtggcgctctcctccctcctgtccctgctgctctttgctggggatgcagatgtacagccgtcagctggcctccaccgagtggctcaccatccagggcggcctgcttggttcgggtctcttcgtgttctcgctcactgccttcaataatctggagaatcttgtctttggcaaaggattccaagcaaagatcttccctgagattctcctgtgcctcctgttggctctctttgcatctggcctcatccaccgagtctgtgtcaccacctggtatgttcttgacagctgggtaaggggtgtagcattccgttttttggcattggatcttactgtgatggtgccagagtttttccttccacacctacctctctctctgttctccctccccgttttcctaaacttgaacttggattctttccttgatgctagtgtcttccctaggaggcaccaggctggcagatgcccactggtgccatgacctttctgtcttcaccatatagcttcatcttctccatggttggtctgtactacatcaacaagatctcctccaccctgtaccaggcagcagctccagtcctcacaccagccaaggtcacaggcaagagcaagaagagaaactgaccctgaatgttcaataaagttgattctttgtaaaaaaaacaaaaacacaaacacaaaaaaaaaacgcccggggcgcatctctatattgtcccggggcgggggagcaaaagggttattcggaaagtgcgccctgggccatagcttgtttcccctggacccagctttctcttgttcccaaggggggaaattctggcgggtcccccatattagggaggcgatataatttcaataagccgggttacccggttttaagg

SEQ ID NO: 553004 - DNA, 607 bp, Homo sapiens
atttcacccgggaaacgattagacatgattccgaatttatacgacccacttagggaaattggccctgaggcccaaaattcggcaagaggcgcctttcttgccagaggccccgtttgaactcacgggggggccatgatggtggtgggtacgggcaacccgtggcgctctcctccctcctgtccctgctgctctttgctggggatgcagatgtacagccgtcagctggcctccaccgagtggctcaccatccagggcggcctgcttggttcgggtctcttcgtgttctcgctcactgccttcaataatctggagaatcttgtctttggcaaaggattccaagcaaagatcttccctgagattctcctgtgcctcctgttggctctctttgcatctggcctcatccaccgagtctgtgtcaccacctgcttcatcttctccatggttggtctgtactacatcaacaagatctcctccaccctgtaccaggcagcagctccagtcctcacaccagccaaggtcacaggcaagagcaagaagagaaactgaccctgaatgttctacaaagaatcaactttattgaacattcagggtcgacgcggccgcgaat

SEQ ID NO: 553005 - DNA, 296 bp, Homo sapiens
tttcgggccacgggtttttgcccattctaatatgttggctacacgggcatttattgcaacatatggggcaaagggagctaggggtttagcataaccccggggggggtcccctatttaagaccggaggggttttgggtgtgaaagggaaaatagtgtggggggaacaaaaacaacaaccccaggggtttagatacagcaacaaggccaggagagagaaaaaccaaactcaatgagagagagagggggaggcaataagttgagtgtttctctggtgtgggggggcaaatcaagggtga

SEQ ID NO: 553006 - DNA, 409 bp, Homo sapiens
aatagaccatgttggacaccattaattattattcatagtaaggaaatggtttgcctttagaataaagtatatcttttccatttttctcaacgtcttctacagttttaggccatacctgttttccatgtttttaaaatctagttaagtctactaaacactaactaacttactctttactttctcaagcactaatggaaatactggattataaccaatctaatactctctgggcatttctactagacactttgctcagtgtgatttaaggcagtttataatcactccttgtggtcttgaggccagttttcaattcatgagactcatatatcctagctagttttaattaattttgcaaggaagatgccaggagaagcaatattaaatgctttcttataatcaggttatttca

SEQ ID NO: 553007 - DNA, 1014 bp, Homo sapiens
  misc_feature (634)..(634): n is a, c, g, or t
  misc_feature (641)..(641): n is a, c, g, or t
  misc_feature (682)..(682): n is a, c, g, or t
  misc_feature (689)..(689): n is a, c, g, or t
atttcacccgggaaacgattagacatgattccgaatttatacgacccacttagggaaattggccctgaggcccaaaattcggcaagaggcgcctttcttgccagaggccccgtttgaactcacgggggggccatgatggtggtgggtacgggcaacccgtggcgctctcctccctcctgtccctgctgctctttgctggggatgcagatgtacagccgtcagctggcctccaccgagtggctcaccatccagggcggcctgcttggttcgggtctcttcgtgttctcgctcactgccttcaataatctggagaatcttgtctttggcaaaggattccaagcaaagatcttccctgagattctcctgtgcctcctgttggctctctttgcatctggcctcatccaccgagtctgtgtcaccacctgcttcatcttctccatggttggtctgtactacatcaacaagatctcctccaccctgtaccaggcagcagctccagtccttactgccttcaataatctgggagaatcttgtctttggcaaaggattccaagcaaagatcttccctgagagtctcctgtgcctcctgttggctctctttgcatctggcctcatccaccgagtctgtgtcacnacctgcntcatcttctccatggttggtctgtactacatcaacaagatntcctccnccctgtaccaggcagcagctccagtcctcacaccagccaaggtcacaggcaagagcaagaagagaaactgaccctgaatgttcaataaagttgattctttgtaaaaaaaacaaaaacacaaacacaaaaaaaaaacgcccggggcgcatctctatattgtcccggggcgggggagcaaaagggttattcggaaagtgcgccctgggccatagcttgtttcccctggacccagctttctcttgttcccaaggggggaaattctggcgggtcccccatattagggaggcgatataatttcaataagccgggttacccggttttaagg

SEQ ID NO: 553008 - DNA, 419 bp, Homo sapiens
gcaagattagggctgctgtcacttgcatcatcatcctcaccattctcttcatcctcctcttcattttcatcatcacttccattgtcatcatcacctgaagctctaccaatacttgtaatttcatttttagattcctcatcacttcctgttttactaacactttctaaatcttcctttagagcatctttgtcaaacattttactgtctgttgagttttcataaccatcactgccacttgccgttatggatggaaccactggttgcatttctcttcttgtcttagaacacttgatcttgggagatttcacatcagaggtgcccgagtctaatgtccttcatctttctttgagagaagagttgatagtatgttgaataatgtttttttttctcttttgtacttttttgtgtaattttttgct

SEQ ID NO: 553009 - DNA, 533 bp, Homo sapiens
  misc_feature (207)..(207): n is a, c, g, or t
  misc_feature (252)..(252): n is a, c, g, or t
  misc_feature (257)..(257): n is a, c, g, or t
  misc_feature (294)..(294): n is a, c, g, or t
  misc_feature (331)..(331): n is a, c, g, or t
ctcgggcaggtgcttcagcttgtggatgaagttgatcatgtactcgcacatgggcgagcggtggatacggtacacaaagcgcccgttctccagcctggcatactcagtctccaccttctctaccacctgtttgccagaggagcacaccttggtggagacgctgatggtcatgctatcagcagagctgtactgagagctgacccatanaaggctcccgggccctcctggatggtgctgttgaggtcggcccanaactngacaaggaagaaaggcattatggggcccttctcatanaactccgtcaatcctccctttttctcggggaaatttnggtcatagatctgggcgcacatctactgggccccaggggtggggttctgaagaaacggcgggggtttcggtctgtgtgccgaatgtgcacaacaggtgtttgctggtacgtgttcaggggtctcgctggcaacctcccatgaaagggctggaaatactcccaggaagccgcaaccggggaaggaaggcaatgggtacgggtc

SEQ ID NO: 553010 - DNA, 742 bp, Homo sapiens
  misc_feature (3)..(3): n is a, c, g, or t
  misc_feature (35)..(35): n is a, c, g, or t
  misc_feature (77)..(77): n is a, c, g, or t
  misc_feature (188)..(188): n is a, c, g, or t
  misc_feature (226)..(226): n is a, c, g, or t
  misc_feature (264)..(264): n is a, c, g, or t
  misc_feature (362)..(362): n is a, c, g, or t
  misc_feature (369)..(369): n is a, c, g, or t
  misc_feature (410)..(410): n is a, c, g, or t
  misc_feature (417)..(417): n is a, c, g, or t
aanagatgggtctccctttgttgttcaggctggtntcaaactcctgggctcaaagtgatctgcccacctcagccctnccgaagtgctgggattccaggtgcaagccaccacactcaacctcctacctccatgttctgggtatcattaaggtaatcagaatcctcctgctgtagtcacgcttacccttntaagcaggttccccaggattcagagagccccggatttntcctggactccatgtgcagatgcctagtatttccattntgaccgttgccctccttgttcttcttgcctccctagttctcctgtgcctcctgttggctctctttgcatctggcctcatccaccgagtctgtgtcacnacctgcntcatcttctccatggttggtctgtactacatcaacaagatntcctccnccctgtaccaggcagcagctccagtcctcacaccagccaaggtcacaggcaagagcaagaagagaaactgaccctgaatgttcaataaagttgattctttgtaaaaaaaacaaaaacacaaacacaaaaaaaaaacgcccggggcgcatctctatattgtcccggggcgggggagcaaaagggttattcggaaagtgcgccctgggccatagcttgtttcccctggacccagctttctcttgttcccaaggggggaaattctggcgggtcccccatattagggaggcgatataatttcaataagccgggttacccggttttaagg

SEQ ID NO: 553011 - DNA, 458 bp, Homo sapiens
  misc_feature (146)..(146): n is a, c, g, or t
atctagaggatcccacactgggttcgagttccacgctatagagaggatccttgcaacagtgcaggaaaaagtatgtgaaaggggatgtgtcccttgccgatgcccccaagcctattgccaggcattgcctatggccaggttattgnatgtgctgccaccggtctcagaaaggatccctggctgtaagctggggcttcatgacaatcactgggttcctgcctgccacagttttaatcgggcaatccataagaaagcaaaagggactgaagctgaagaggaatactaaagtccatgtgagaggcaacaaaaggaccggtttctaaagctgcaaaacacctagatacacccgttcaaatgagcgtagccccctgagtcatcactctagaagaatctgtacatcatcaggactgcattgctcaggcattttctaaactctaaatttacgagctgtacaaaaa

SEQ ID NO: 553012 - DNA, 822 bp, Homo sapiens
tggaaacggggtcttactccagccggggtgacagagcgagactccatctcaagaataaaataataaaaacaaaaataacactataaaatataaacactttatgtacacaatctcacatcatctttcacagtctgggaaggcagatatttctggtaatcctcatttaacagctgacgcctatctaaggctggtataaaagtcagtcactggtccaggctcacacagccaatgctggagggctgtgtggcacccagagagcacagtggctggctgggaataacccttcaacttaatagtccggagcaggggggttctaaagctcccttaaggctttcccactagtaagcttccaggttctgggtacagtttctcagcctcggacttactggacgttgggagtcttgatgagtcttggttggagagcgctgtcctgtgcatgcgcggatgtacggagcatactgggctctatccattaggatgccagtagcacccccctccaaatttggcccagtgtgtgacagtcaaaatgtctgcggaccttttgccagatgtcccctgggggacaaaattctggcctaaatgtgagacaccagcgagttcttgggaaaccatttaaaacccctaaagccaaggaatgtacctgtgcaagattggccaagggtcaccaccttcgacaactggtcactggtgggctgggacccggtgtttacacccttgtaatctcagcacttggggaggcccagacgggctatccaccctgagtaggagttcaaacagtctgccatggggtaacccggttataaaacaaacatcaacaagaac

SEQ ID NO: 553013 - DNA, 487 bp, Homo sapiens
  misc_feature (487)..(487): n is a, c, g, or t
cttctggagtcttccaaaccaccttccctcatctttcatcaatcatgtacagttgtttacacacgtgcaattgttgtgcttctaatatttatgctttataaataaaaccagaaccaggactgcaaacccaaaaaaaaaaaaaaaaaacaaaaaaaaaaacaatgttgtggggcggcccgcggcccccaagaaaaagttttaaaacccactcgtgtgggggcgcgcgccggggggcccccaattagaggtaacatcggaacagcgcgcccaagacgctgtctcccaaaggagaaaccgcctggcccacggcacaacgcgggctgggttttccccccaaataaaaaaaaagcgccgcgggggggaacaagccggagcggttggcgcaaaccactcccaaaagagacgtccggggagggaccaacgcggaaccacaacacagggggttcacaagggaggtcgaaatcaaattagcccgcgccgggagcgn

SEQ ID NO: 553014 - DNA, 540 bp, Homo sapiens
  misc_feature (1)..(1): n is a, c, g, or t
  misc_feature (64)..(64): n is a, c, g, or t
  misc_feature (109)..(109): n is a, c, g, or t
  misc_feature (118)..(118): n is a, c, g, or t
  misc_feature (123)..(123): n is a, c, g, or t
  misc_feature (141)..(141): n is a, c, g, or t
  misc_feature (150)..(150): n is a, c, g, or t
  misc_feature (154)..(154): n is a, c, g, or t
  misc_feature (157)..(157): n is a, c, g, or t
  misc_feature (171)..(171): n is a, c, g, or t
  misc_feature (173)..(173): n is a, c, g, or t
  misc_feature (175)..(175): n is a, c, g, or t
  misc_feature (197)..(197): n is a, c, g, or t
  misc_feature (203)..(203): n is a, c, g, or t
  misc_feature (208)..(209): n is a, c, g, or t
  misc_feature (221)..(221): n is a, c, g, or t
  misc_feature (238)..(239): n is a, c, g, or t
  misc_feature (247)..(247): n is a, c, g, or t
  misc_feature (252)..(252): n is a, c, g, or t
  misc_feature (254)..(254): n is a, c, g, or t
  misc_feature (287)..(287): n is a, c, g, or t
  misc_feature (289)..(289): n is a, c, g, or t
  misc_feature (296)..(296): n is a, c, g, or t
  misc_feature (302)..(303): n is a, c, g, or t
  misc_feature (305)..(306): n is a, c, g, or t
  misc_feature (309)..(310): n is a, c, g, or t
  misc_feature (312)..(312): n is a, c, g, or t
  misc_feature (333)..(333): n is a, c, g, or t
  misc_feature (338)..(338): n is a, c, g, or t
  misc_feature (433)..(433): n is a, c, g, or t
  misc_feature (441)..(441): n is a, c, g, or t
  misc_feature (446)..(446): n is a, c, g, or t
  misc_feature (461)..(461): n is a, c, g, or t
  misc_feature (539)..(539): n is a, c, g, or t
ngggtgggttttttttatgcaataatttaaatgtaaaaaaaagttttataaatgaatctttttnagttttccgaacttccaaatatgaattcctttctttatgattttntaaaaaagnaaaanacagtagtcccaaaaaanagagtaagngagnggngcccatctaatagngngngggggggggggggggggggggngggggnggggnntttggtggtggnaggtgggaatttattgnnctggctgnacttntntaccaggatgcagagttctccaggtagctggangntggggantggttnntnnttnntnggtgggcattagggtggtggntgagngagcgggaagagccctgggggtcccaaaccgctggagattggggcgagttacacgccattgggtcgctggagctgggactgtgctccgggggcanctccccgnttttnatgatcttcttgatnttggatcttttgttttgaaacaagatttttacctgagttggggaacaaaggcacacgttaccgggacattcagaggtng

SEQ ID NO: 553015 - DNA, 383 bp, Homo sapiens
atcagaggtcatgtgtgtgacacgtcaaaggccagcttctaatggaatcattgttccccgggacagaggccctctgagtacatctggactggaggcccagattccaggtcgcggtgctgcagaccaggccgcgtccgcagtgcccgtgcaggaacagacgccgagactcacgcagtatgacccgtcacgccgatcggataatatccctgatcacttttgccgttggaggcaatatctgcttaggattcactgcacatcgaattaagagagcagaaggatgggaggaaggctcttctacagtgctatcagacttccactggaccaacatttccggatcttgcaaggacaagtgcattgaacttcgaggctggacctactggtgg

SEQ ID NO: 553016 - DNA, 108 bp, Homo sapiens
  misc_feature (36)..(36): n is a, c, g, or t
  misc_feature (61)..(61): n is a, c, g, or t
  misc_feature (93)..(93): n is a, c, g, or t
acaagagagataaggcctacttcacaaagcgccttncccccgtaaatgatatcatctcaanttagtatggaataaagtggacattttaaaaantcgacaaggcccgta

SEQ ID NO: 553017 - DNA, 429 bp, Homo sapiens
ggggaggaaatacatttttggctcataaaaaaaaaaaaaaataaaaaaaaaaaaaaaggggaaaaaaaaaaggaaaaaaaaaaaaaaaaaaaaaaaaaaaaccttgggggacgcttttttcaattcgattatggatttgaaaaggtttaaaattggggccaaattgggaattaattgggaaaatgggccttataagaattcattttccaattaattgcacgtcgtttaaaaggaaaaccatggggaaacccatgttaatccccaagtaaaacatcttgattaaaatacctgttttaaaagcggggggagtagcaaaaaggcccttaccaaacggttttccaaacagatgggcaactggaatgggaaagggaaattgtaagggtaaaatttgggtaatttgggttattggataattaacccaattgtccc

SEQ ID NO: 553018 - DNA, 150 bp, Homo sapiens
atgcttcaacgtctgccttgtccattgataagaccttgttgaccatcgttttaccttcagaatgcgccattgaaccgacattaaggtgtcttaaattgggcacaccgccttcaacagcacggaggcacgtcttgcacagtttcaaacaac

SEQ ID NO: 553019 - DNA, 226 bp, Homo sapiens
aaatgatagacgctagcaagactaataaagaaaaaaagagagaagaatcaaatagacacaataaaaaataataaaggggatatcaccaccgatcccacagaaatacaaactaccatcagagaaatgcaaatcaaaaccactatgagatatcatctcacttataactatttctaagcctacctacataaatattggctcaaaataaagcccaccaacttaagaatgt

SEQ ID NO: 553020 - DNA, 882 bp, Homo sapiens
agcagagaagatttgctgaatatctgcattgaacctgacaccatcagcaaaggagactttataagctataggaagtcgaaaggtgagaaaccccaagctgcacgtggagggcaggagtggtctccaagccagccagtgcacttggcttgatcccggaggaagcaggggctctttaagcatggacagtgaggagtatgaagcgaggcctgtggaggtgaaaggctccccaggaagctgcagtctctgtggatcctcaggaagagagaacagatgctcaaaaagccccaccccagtgagcagcagaagacaagcaagtctgagaccacacttttaggccaccgtgtggacccaacacagggaacaggtgcctcagcaatcccaacagtgtcgtcagaggggtccccaagggcaattttccatggcaagtaccctctcgtgccccccactccaggcagtgcttcccaaaggtgtgctctgtcacctgcttgggcactccgcgactccataagcgcatgtcaacatctcggcgagacggggtgccccctcctaaacaaccgggactcaccctcaggcggctccaacgacggaacacaggacttccctcgtggtctccttcccaggctgacaccaccagtgagagcccaacggggggataagctgccaaggccactacaattcgcctctatgaccgtgcagggactccaggaaggtgcatcctgcccggggaccttacaaaggccaagggccccaacgcggcggcattcgagagcccggcacagaaagcaaatcagtccaccctaaggcaaagatggaggggcccctcagccaggacaaacgaaacagatacaatacacaacgaccacaagggtggcaaccagagat

SEQ ID NO: 553021 - DNA, 582 bp, Homo sapiens
gagacagagttttgctcttgttatccaggctaaagtgcaatggcacaatctcagctcactgtaatctctgcttcccgggttcaagcgattatcctgcctcagcctccgagtgaggtgggattataggcacgtaccaccacgcccagctgatttttgtattttttagtagaagacagggtttttaccccatgttggccccaggagggtctcctatctcttgaccttaggatctgccccgcctaggcctccccaaagtgatgggattacaggtgtgagccacagcaccctggccagtacatgttttttatgagtgccggttcttacggtatgttcacgtagagactgaaggctataaaaactttccttaccactagaacatgtaattggtagcctttcagagatttatccgtattacggttcttgatttgtagacgtatatataacattcacctaatgttttgtgttcttttttccctgcagatgctgtacccctcaaggatttaaactaacgaaaaatcaataaataaatgtggatttgtgctcttgtatttttaagtggattaaaaaacttactaccttaaa

SEQ ID NO: 553022 - DNA, 813 bp, Homo sapiens
gttagcggcagcgggtgctgctgtcactgttgtgctgggggcccggtcgccaggcaaagagccctcccacgttatgaggggagtcctgagccgtttcctgaatgtgttaagaagtgggctggcttatggtgtccatcatacgtgcatggggcagcacgctgcagagtttccgagacgcagcatctttgtctcatatgaaaagcctctacactggtcgcagccaaaccttgatgaagggcctccaagctcgtgaccttcgggatctggacgctgctctcatcagtgattcgctgcctctgtgccattgacattcacaacaagacgctctatcacatcaaagctctggacgcttcctccttgccctggggcatttgccctctctgagattgtttgtctatggaactgcaggtcccacgattggcggtcctggcacccctgatggtggcaagtttctccatccgtgggtatgctggtcgggctccggtatctagaagtagaaccagtatccagacagaagaagagaaacctgaggccagcatgatcacctccaggactttctcgttggccacctggccatcttcattccttcgtcggcgtctccgtcttaaatttcttttctattccatcgatctgacctttattcacgttttagcctcttttgttaatttgtgccaatttacacgataatgcatactgaaaagtatataacatgtacgtacaaatgtaaagaatactttgacacgtgatactacgtaagtccaggccagtcaaagaaatggcccagttctcggaagccaatgtgtgtccttacca

SEQ ID NO: 553023 - DNA, 1525 bp, Homo sapiens
ccggaaatgttatacaacagcgcttgttctggtcggtggagcgttcttacaggtctaaacggtattgaggaacacacggaggtggcacaacgcgcgaccaaattttgtgtggggaaaggaaaaacaatgctcaagggggtgtcccgaaagatggtcagtttgggtgtgacgccccccatatttttcatcacgacgtctgtcactccgggggagactacaaagagttcgtgaggccctcttctcaaaggggatggacactcgctctctgtgattgggagatggatgggagcccctcctgcatggttggggggaaagttttaatagggccgctttccagagacccccagagatggcgcagacattcttgggggggtgtaacaccacgcggggaagggtgtataatgccccccccccgaaaattgtgcgcaggggcgccgtgtgccgcaaagaagatccaatggcgcacaaaaagatcaccggggccccccaaaatagaggcggagagacctggggcctctgggtgtagaaaacccccgagagaggggagagcttaagcgacccaagagtaccggggggtgcttcccacacaaaaagatttgttgagagagaggagaagcccaccccccccccgcagggggggtctaccacacacaacaacaacaccagaatgctttgcgcagaaagagggtttggggaagacactgtccctgtgaagagacagagacaggccgtcctcacaccagagagactttgttgagatacagatttcacaagagtctctcacgagtctcctctctgtggaggagattctggcaccaccctgtgggactactcctcgctacttgtgagaaaaaatattctctgtgaaagagccccacacacacttgtggggagagactacacacgacgctctgtgagagagagagagagtgtgagagagcgcccccgcggttgacaacgcacgttacacaacgagatggtgtaggcgacagacgctctcacacaggggggatcatctctgtggtgcgcgacacctgtgtgagagtctcagagagagagtgggcgcacacaggagacctccgggcgctaagataggaggggcacagacgcgcgcacagagcgcccaagagggagatataagagagagaccactcttctcgtgagacaaatctcacgagaggttcaagatctcggtgagagagctcggagagatatgcgccgccactctatgccgccccgcgcctcgttctgtgtgaagaatagtggcgcgagagaaactctcttagtatcttgtggggatagacctctgggaccacaccagaccaatcccaagccgaacaccatctccataagagacccacccacccgcccgggatagatgtggaaggccaatagatggggttttgtgagagacaccaatggacaacaccaaagattttggaggccaataagcccacccagaaaaccagagggacaccctttgggggaacaaggaggccccattaaaagattccgagagttctca

SEQ ID NO: 553024 - DNA, 190 bp, Homo sapiens
gcggccgcctactactactactactgctcgaattcaagcttctaacgatgtacggggacatggttcgtgccaaattccgaagcaatcttcctgctaaggccattggacacagaatccgagtgatgctgtacccctcaaggatttaaactaacgaaaaatcaataaataaatgtggatttgtgctcttgta

SEQ ID NO: 553025 - DNA, 294 bp, Homo sapiens
actgtgggacccgcgacgctcgcagaccgcactttaggtgcttctctgctcttcctgctggaggaggcggtggaggtgtacttaatggtggaactgccgcctcccacagagctgaggacacccccaatggctctgccactgctcgaacttgaagccacctccaaagccaagaccactgccctaggagtaactactacctccaaccaggcctaaaccactgccgacaccactggaaccgacatagccactggagacggtggactgcaccacagagatattgcctttcggagaaca

SEQ ID NO: 553026 - DNA, 774 bp, Homo sapiens
  misc_feature (7)..(8): n is a, c, g, or t
gcggccnnctactactactaaattcgcggccgcgtcgactcttggctcctgtggatttttttttacaagagcacaaatccacatttatttattgatttttcgttagtttaaatccttgaggggtacagcatcactcggattctgtgtccaatggccttagcaggaagattgcttcggaatttggcacgaaccatgccactgtttccatgggcccgagttacttttccccagatgactctggttttgtttggtttgccgccaggagtgactgtgttgttctttgctttatatacataagcgcatctcttaccgccatctggctcctgtggaggcctgctgggaacgggacttctaaaaggaactatgtctggaaggctgtggtccaaggccatttttgctggctataagcggggtctccggaaccaaagggagcacacagctcttcttaaaattgaaggtgtttacgcccgagatgaaacagaattctatttgggcaagagatgcgcttatgtatataaagcaaagaacaacacagtcactcctggcggcaaaccaaacaaaaccagagtcatctggggaaaagtaactcgggcccatggaaacagtggcatggttcgtgccaaattccgaagcaatcttcctgctaaggccattggacacagaatccgagtgatgctgtacccctcaaggatttaaactaacgaaaaatcaataaataaatgtggatttgtgctcttgtatttttaagtggattaaaaaacttactaccttaaa

SEQ ID NO: 553027 - DNA, 453 bp, Homo sapiens
  misc_feature (303)..(303): n is a, c, g, or t
  misc_feature (384)..(384): n is a, c, g, or t
  misc_feature (391)..(391): n is a, c, g, or t
  misc_feature (420)..(420): n is a, c, g, or t
  misc_feature (432)..(432): n is a, c, g, or t
  misc_feature (450)..(450): n is a, c, g, or t
gattggctcttgttgcccaggctggagtatagtggtgtggtcttggctcactgcaacctctgcctcctgggttcaagcaaatctcatgcctcagcctcctgagtagctgggaccacaggtgtgcacaacacctgggctaatttttgtatttttagttagaagatggggttttgccattatggcaggctgatctcaaactcctggcctcaagtgatccacctgccttggcccccccaaaatgctgggattacaggtgtgaggcacctcgcccagccacaatttgttcttgatcctttgactttntccctatttgttcaagcgattctcctgcctcagccttcccaagtagctggggactacaggtgcgtgccaccattgcccggntaatttnttgtgaatttttagtaagtagtacagggntttcaattgttnaggccagggttggtcttngaa

SEQ ID NO: 553028 - DNA, 763 bp, Homo sapiens
  misc_feature (159)..(159): n is a, c, g, or t
  misc_feature (519)..(519): n is a, c, g, or t
taaaaaaggggcggtttttttttaatttggtaaagtttgccccggggcccccccggggggggggggggggggcccccggttttttttgggccctgaagccccccacggggttcctttttcctccccctttttcttcctgtgaaaggggaaaaatctgcnccccacggggggggttatcccgcttcggatcgtggagactcccgtcgtggggggttctgggggaggctgcttgtgtcaggatgttgagtgggccccagggctctagtatgtgcttccccccctgttgggtcgacgagccccctggtgttttttgacgcgccaacagagagaggggggtgcggccgcggcgtctcacgcagacaaccactctataaacaggtgcggggggtgtgcgttgccccctcttcctcccccctccgcaggccccgaagagaggggtttcccccacagagaacccctctgtgggggcgcccctccccacacaagaaagacgggtggcgccccagtgtgtttgggcgngagtgcaaagcgcgccctcgggacacagaagggaggggtcgtgcgtgggcgcgcacgcgcggagagcgagaacaactacgcgagaagtccgcgggtgtgctgagcgagaaaggaaatatacccccaacgtggttggtgggtcgtggtctgtcacgtcacggcgccccccaaagcggactacgcggtgcgggaaacaacaggcaggacgtccgtgggtgggcggcccacaaccaacaacacaggg

SEQ ID NO: 553029 - DNA, 538 bp, Homo sapiens
cttaggtctcgatcgttactccaaagcagagagaaagcattatagtgaggaatgacacgggctctcctcttaccgccatcttggctcctgtggaggcctgctgggaacgggacttctaaaaggaactatgtctggaaggctgtggtccaaggccatttttgctggctataagcggggtctccggaaccaaagggagcacacagctcttcttaaaattgaaggtgtttacgcccgagatgaaacagaattctatttgggcaagagatgcgcttatgtatataaagcaaagaacaacacagtcactcctggcggcaaaccaaacaaaaccagagtcatctggggaaaagtaactcgggcccatggaaacagtggcatggttcgtgccaaattccgaagcaatcttcctgctaaggccattggacacagaatccgagtgatgctgtacccctcaaggatttaaactaacgaaaaatcaataaataaatgtggatttgtgctcttgtatttttaagtggattaaaaaacttactaccttaaa

SEQ ID NO: 553030 - DNA, 230 bp, Homo sapiens
aggagctggatatgtccacaggactcagtccctacccctcgacttggcctgcctggtcagtgtctctcctgagaactgcatacttagatatcacacagtgcccaatacaccaagcagaaaaaggaaagtctagtacctgagctagactccactcgctcgaggctacctagagaacaagaaggagtacaggactacctatatgataccgtacggcatgcctgctatactta

SEQ ID NO: 553031 - DNA, 499 bp, Homo sapiens
  misc_feature (7)..(8): n is a, c, g, or t
gcggccnnctactactactaaattcgcggccgcgtcgactcttggctcctgtggaggcctgctgggaacgggacttctaaaaggaactatgtctggaaggctgtggtccaaggccatttttgctggctataagcggggtctccggaaccaaagggagcacacagctcttcttaaaattgaaggtgtttacgcccgagatgaaacagaattctatttgggcaagagatgcgcttatgtatataaagcaaagaacaacacagtcactcctggcggcaaaccaaacaaaaccagagtcatctggggaaaagtaactcgggcccatggaaacagtggcatggttcgtgccaaattccgaagcaatcttcctgctaaggccattggacacagaatccgagtgatgctgtacccctcaaggatttaaactaacgaaaaatcaataaataaatgtggatttgtgctcttgtatttttaagtggattaaaaaacttactaccttaaa

SEQ ID NO: 553032 - DNA, 112 bp, Homo sapiens
gctgcccaggtagggtcagaaagaggggtatacacaggaagctgcactgagatgtgttcccccagccccagcaacgtcaagtccttgcctttggctgagtttaaaactttcc

SEQ ID NO: 553033 - DNA, 1264 bp, Homo sapiens
  misc_feature (11)..(11): n is a, c, g, or t
  misc_feature (13)..(13): n is a, c, g, or t
  misc_feature (15)..(15): n is a, c, g, or t
  misc_feature (17)..(18): n is a, c, g, or t
aattcgcggcngngncnncggtccttctcttaccgccatcttggctcctgtggaggcctgctgggaacgggacttctaaaaggaactatgtctggaaggctgtggtccaaggccatttttgctggctataagcggggtctccggaaccaaagggagcacacagctcttcttaaaattgaaggtgtttacgcccgagatgaaacagaattctatttgggcaagagatgcgcttatgtatataaagcaaagaacaacacagtcactcctggcggcaaaccaaacaaaaccagagtcatctggggaaaagtaactcgggcccatggaaacagtggcatggttcgtgccaaattccgaagcaatcttcctgctaaggccattggacacagaatccgagtgatgctgtacccctcaaggatttaaactaacgaaaaatcaataaataaatgtggatttgtgctcttgtatttttaagtggattaaaaaacttactaccttaaattgatttgctacatgcttaaaatgatagaggttgctcagcatttttggagtacaagggggtcagagagacatgtgatgaaaattacagggcgagtacagagatttagaagggaacgggttttaatgcgagtatctttgacagagtcttgctctgttgcccatgctggagtgtagtggtgctcgctgcagcctcacattcaaaggctcaagcaatcctcccttggcctttgaagtagctgggaccacaggctcatgccaccatcccctgggtcatttttaacttttttgtagagagggtctgactcttgcctatgctggcttcaaactcctgggctcaagcaatcctccttccttggcctctcctgaagtgctgggatacagttatgagccaccacacctgccaagtgctttgtgatactatgcatttgttcaatgcagattgggaaacttaaaatttgaatggagattatgttgatgggctttggcagttcatttggatagactgggatgagaagctcttgggacttgtgactggacaaagcattccagtatattaaaataaaattaagccatattactccactcataaaaagcaatcctatggtaggtacatggaggttgggaatagtgcacggaaaggtggcagctttctttggcttcatgttttaatctggtaaagttcaagattgcactttaagcaggcctcctaaatattttagatttcttggggatatgctaaaataaaacaactaaggcatcaaaaaaa

SEQ ID NO: 553034 - DNA, 629 bp, Homo sapiens
  misc_feature (11)..(11): n is a, c, g, or t
  misc_feature (13)..(13): n is a, c, g, or t
  misc_feature (15)..(15): n is a, c, g, or t
  misc_feature (17)..(18): n is a, c, g, or t
  misc_feature (602)..(602): n is a, c, g, or t
aattcgcggcngngncnncggtccttctcttaccgccatcttggctcctgtggaggcctgctgggaacgggacttctaaaaggaactatgtctggaaggctgtggtccaaggccatttttgctggctataagcggggtctccggaaccaaagggagcacacagctcttcttaaaattgaaggtgtttacgcccgagatgaaacagaattctatttgggcaagagatgcgcttatgtatataaagcaaagaacaacacagtcactcctggcggcaaaccaaacaaaaccagagtcatctggggaaaagtaactcgggcccatggaaacagtggcatggttcgtgccaaattccgaagcaatcttcctgctaaggccattggacacagaatccgagtgatgctgtacccctcaaggatttaaactaacgaaaaatcaataaataaatgtggatttgtgctcttgtatttttaagtggattaaaaaacttactaccttaaaaaaaaaaaaaaaaaaaaaaaaaaagacaaaaaaaaaaaaagacaaaaaaaaaaaaaaaaaaaaaacaaaaaaaaaaaaacaaaacaaaaaaaaaaacaaaaaanaaaaaaaaaaaaaaaaaaaaaaagaag

SEQ ID NO: 553035 - DNA, 324 bp, Homo sapiens
  misc_feature (132)..(132): n is a, c, g, or t
gcggcgaggcttgggaggaaacccccccaatgggggtgttttcccccggggcaggagggggggcctgaggctttcaagggtttttttccccttcgagtaatttttaaaaccctgctttgttgtgtcctgttnccgggtttggccctcctgggaatgactgggaagtgggttttccggacgattgtttttgaaacatcgtggccccaggggccagggttttatgggcagtagccttaaaattgtggaaaaggaaccccccaagggagaagggtgagaggagaaaccaaatatgagggttttaaatacctcccccttccgtttgga

SEQ ID NO: 553036 - DNA, 1009 bp, Homo sapiens
  misc_feature (11)..(11): n is a, c, g, or t
  misc_feature (13)..(13): n is a, c, g, or t
  misc_feature (15)..(15): n is a, c, g, or t
  misc_feature (17)..(18): n is a, c, g, or t
  misc_feature (553)..(553): n is a, c, g, or t
aattcgcggcngngncnncggtccttctcttaccgccatcttggctcctgtggaggcctgctgggaacgggacttctaaaaggaactatgtctggaaggctgtggtccaaggccatttttgctggctataagcggggtctccggaaccaaagggagcacacagctcttcttaaaattgaaggtgtttacgcccgagatgaaacagaattctatttgggcaagagatgcgcttatgtatataaagcaaagaacaacacagtcactcctggcggcaaaccaaacaaaaccagagtcatctggggaaaagtaactcgggcccatggaaacagtggcatggttcgtgccaaattccgaagcaatcttcctgctaaggccattggacacagaatccgagtgatgctgtacccctcaaggatttaaactaacgaaaaatcaataaataaatgtggatttgtgctcttgtatttttaagtggattaaaaaacttactaccttaaaaaaaaaaaaaaaaaaaaaaaaaaaaaaaaaaaaaaaaaaaaaaaaaaaaaaaaanaaaaaaaaaaaaaaaaaaaaaaacaaaaaaaaaaacaaaaaaaaaaaaaaaaaagagaggggcgcgcgcgcgcaataaaagaatacagcagggagggcgagccaacgaccagacagcaagcagatatagaaaacaagagcggaccaaacaaaaagagggagaaaataaagaaaaagagagagagggcaagaaggaaaaaaaagcagcacagaacacgtacgacacaaaagagaagacacggacgagacaaaacagaggagaaggaaaacaaccaacaagagggaggggagaaaccaatggagaacacaacaccaacaagaaagaaaaaacacagcagggaggaaaaaaacagcacagaaggggtaaaaggagggaaaaaacaaagagagaaataagagaggagagaaagaaaagaaggagagaaggagaagagagaaagaaacaaactacaagagg

SEQ ID NO: 553037 - DNA, 724 bp, Homo sapiens
  misc_feature (11)..(11): n is a, c, g, or t
  misc_feature (13)..(13): n is a, c, g, or t
  misc_feature (15)..(15): n is a, c, g, or t
  misc_feature (17)..(18): n is a, c, g, or t
aattcgcggcngngncnncggtccttctcttaccgccatcttggctcctgtggaggcctgctgggaacgggacttctaaaaggaactatgtctggaaggctgtggtccaaggccatttttgctggctataagcggggtctccggaaccaaagggagcacacagctcttcttaaaattgaaggtgtttacgcccgagatgaaacagaattctatttgggcaagagatgcgcttatgtatataaagcaaagaacaacacagtcactcctggcggcaaaccaaacaaaaccagagtcatctggggaaaagtaactcgggcccatggaaacagtggcatggttcgtgccaaattccgaagcaatcttcctgctaaggccattggacacagaatccgagtgatgctgtacccctcaaggatttaaactaacgaaaaatcaataaataaatgtggatttgtgctcttgtatttttaagtggattaaaaaacttactaccttaaaaaagaaaaaaaaggggggggggcggcccttttgtttatttgttttagtttttttttgtttatgatatgtttgttttttattgttatgtttttattatactattgtatattagttttttatattattgtatttagttgatgagtgatgtaattagatagagtggagagaggaggagagaatgaagataaaagagaaaatttcttagagagagaacgaggagaaggag

SEQ ID NO: 553038 - DNA, 337 bp, Homo sapiens
  misc_feature (18)..(18): n is a, c, g, or t
  misc_feature (148)..(148): n is a, c, g, or t
  misc_feature (291)..(291): n is a, c, g, or t
ggcacgagtgggcctttnctgtcctgcaagggaaggactccgcccaaccagtgaaagtatctacccagaatagtagatactgaaatccctgagatttgggcatgtgggtaaaatctagtgccagtcttctcctgggtaatggcctgtnctttgttctcctgaaggagcttagtgataaggcaggggattatttctttggcacgcttcacaggccctgactgtctgcttgatagttttgaaaaggcctgactggagaccgcatttcaacatgagatttggaaggaacacatnttcaaaccgtgtcacccaccattaaatttttaatatcataggtgta

SEQ ID NO: 553039 - DNA, 926 bp, Homo sapiens
  misc_feature (11)..(11): n is a, c, g, or t
  misc_feature (13)..(13): n is a, c, g, or t
  misc_feature (15)..(15): n is a, c, g, or t
  misc_feature (17)..(18): n is a, c, g, or t
  misc_feature (547)..(547): n is a, c, g, or t
  misc_feature (592)..(592): n is a, c, g, or t
  misc_feature (622)..(622): n is a, c, g, or t
aattcgcggcngngncnncggtccttctcttaccgccatcttggctcctgtggaggcctgctgggaacgggacttctaaaaggaactatgtctggaaggctgtggtccaaggccatttttgctggctataagcggggtctccggaaccaaagggagcacacagctcttcttaaaattgaaggtgtttacgcccgagatgaaacagaattctatttgggcaagagatgcgcttatgtatataaagcaaagaacaacacagtcactcctggcggcaaaccaaacaaaaccagagtcatctggggaaaagtaactcgggcccatggaaacagtggcatggttcgtgccaaattccgaagcaatcttcctgctaaggccattggacacagaatccgagtgatgctgtacccctcaaggatttaaactaacgaaaaatcaataaataaatgtggatttgtgctcttgtatttttaagtggattaaaaaacttactaccttaaaaaaaaaaaaaaaaaaaaaaaaaaaaaaaactccggggggttttttgtgngggggggggaaaagaggggtttaggaaagggggccgtgggccaangggtgtttcttgggcccctttttttgtgtnacagggggggaaaatggggggggcccccccattatgaagggagacgggaaaaataaaatttcgggaaaacaaccagaggtggttcaatcgggtgtttgtatgtactcctgcccgtcgaaaaaaacctcggcaccactccgaagcagacaagcgaacacatgcatacagacaggcacggagtcatcaacaacagtgagtggacaaacaaacaagacgagggaccgacgagagaacgagatcataacgacagatcagaaagcagaaagaagcagcatgatcagacgacacagacataagaacaaga

SEQ ID NO: 553040 - DNA, 373 bp, Homo sapiens
  misc_feature (46)..(46): n is a, c, g, or t
  misc_feature (54)..(54): n is a, c, g, or t
  misc_feature (341)..(341): n is a, c, g, or t
agcccttatgtttccacccctttaacctcaaatgtattcctttgtnagaatttncccctagattccttatttaatgtcctgcagtagacctgaatgtttgtgtgccacccgagaattcctaatgttgaaatctcatttcccaatgtgatggtatttggaggtggggcttttggtaagtgataggtcaggagagtaacagcgctcatgaatgggattagtgcccttatataaagagacccagagagctccatcaccccttctgccatgtgaaagggagaagacaaacatccacgaaccaggaagtgggtcctcaccagaaaacaaatctgtaagcaccttgntcttggacttcccagcctccagaattgtgaga

SEQ ID NO: 553041 - DNA, 260 bp, Homo sapiens
ggccccccccccttttgtttttttctattgagggggtttttcaagaaagcccggggccccccttttttggtgggggtcccccccagagggatttttttaacccccttggttcccccaaaaaaaattttttcccccgggggggggttttttcttttttttcccccccccctttttttaagggggccaaacccgggggccccctggggtgggccttggggaaaccccccagtaaaggcccaaaaaaggttttttttgggcca

SEQ ID NO: 553042 - DNA, 330 bp, Homo sapiens
ccggtaccccttcgacggtgtctgatgctcgatgtgcatccgctgggggcatttcaactatgttgcgcatggtgtcatggtgttacaggtaggcgaggactggatggtgtcccctacccactatgcgatatggattccgcctggtgttcatcattcatcccgaaaccgtggtgcggttgcttatcgatccgcatacctttcggtcggcgcgtcggcgcagatgcccagcattccgactgcgttagcggttagctcgttgcttagggagatcttggacgaactggcccgtcgtgacatcggcgaggccgttaagccagaacaccgtcgaag

SEQ ID NO: 553043 - DNA, 223 bp, Homo sapiens
aaataccttaggtattagattccatggtatgcattaccatgaattttgtccaggacatgagaacgatgccctaaggcttcttcagcactgatctagatagagctagacctggtgcttggagaagagacatctttggaagaatcatctggcgagcaagttcaagcagtgggttatactttggcacctgcatccatagataccataggacacgattctcggcctt

SEQ ID NO: 553044 - DNA, 166 bp, Homo sapiens
ggaaaattgagaccaaaggaaggggggtttccaccccaaatttgggttggaaaacaaaccccccccatttttgggggaaaattttgtttttttgtaaaggggaattggccctggccaaaaaggtcaaatttaattatgaactgcttttaatccccctccaggttta

SEQ ID NO: 553045 - DNA, 194 bp, Homo sapiens
agagccccatgacagtcgtggaatctgtgggttgaggcttccaaacttcctgggaaggacgggacagaattggacgaaagtttcaaggagtttgggcttccaaacttcctgggaaggacgggacagaattggacgaaagtttcaaggagtttgggaaaaaccgcgaagtcatggggctctgtcgggaaggagcg

SEQ ID NO: 553046 - DNA, 937 bp, Homo sapiens
aaggccttcagtatggcattttcatattcactctatgtaaagattgaagcccaaagatgagttaaattcagtgctgtattgaaaccagtcagtgcaaaaaaaaaaaaaaaagttttaccttggtaaattttcatggttaacttcagttggtagtggttaaaacatgcaccaaattctttataatgtcctgtgtggttctcaatgtgatattcttgacatttgcttgtcctttactgctgggttctgggttttaaatttaaaaagtagatgtagctcatcatttttacttccaaaacggtggagctaaaaacggctaattgatcttgagataagaataccctttactaaggcaaagatttaatttgaaactccaaaatgatttatagaaccgaaaggcaatttcccatttgtggtcttctgccgaatttctgattggcttacaccacttgaggatactgactggttccaccggtgctatatcaggtcctctgatttccatgaccctatgtttgttcgggcaacttccccttttgtttcactgtggatcgtttttgtaccgatttactattgccatttcacattctggctgtaacacttgcttacccttgttttccaaagctatcctttgaggacgaaggtcacattgtgttgttagcctacccttccactcaggctctgctgtgtcaccttatcccggtcacgatgtgcatgcctttaacactgcgtgtctataatctgcccttccataccctgcctgtttcaaccttatttagcaagaccagcgtgcgtttgtcagtcaccctactagccccactggtccccataaataaacacccccgcgtccggatccgcttcctaaaaccgcccgcgccccgcactggttcaccactttctgcacacacgcccacgccccccctgcccctcacaccccacacgc

SEQ ID NO: 553047 - DNA, 203 bp, Homo sapiens
cgtgggttccttgcagaaagaggctttagagaattggtcatctgtgttgactgttcatgaataggactaatgcttttattttttctttatttactgatttttgagacggaattttgctcttgttgcccaggctggagtgcaatggcatgatcttggatcaccaggacctcggtctcctcagttcaagcgatgggtaccgagct

SEQ ID NO: 553048 - DNA, 313 bp, Homo sapiens
agcggagcggcgcgcctcctcccttccccgctccgccggcgctgctcctccctccgcccagcacatccccctttggacctccctcctactggtcggggggacggcggcggcggcggcggcggcggcggcggcgggaggggagggcgtgcgccggccgagaggtgtcggcggcgaggcacaaggaagtatcaagtggaaggtcgtccgatcggacggcacgtactcctgctctcctcacgcagcatcatggcggagccgagcggcgtcgcccgatgcacgtccagacatatccccacgcaggcggccccggtga

SEQ ID NO: 553049 - DNA, 393 bp, Homo sapiens
gcacgagaagctatgaaaaaccacccaacccaagcaaagaaaaaaaaaagagcaagcttttcttcagtgtattcgatcttacttttattaacttttactaattcaatgaaggaccaaatgacatctatcaagactgtggtagctagcgaacaaaggataactattttgtcggtgtaaaacaaaccctgcttccgctttgctctctacccgacattttttttttcactttctcagctcttttctttgccacgaaagcgtgtaaagcgatacagatcctaccgtgtctaatgacatcgttagcgcccctctacatggttgccttaagtacagacagaggaatgattaaacctaagacgaggatagtccttatgcattatgaaaagcaattcaggg

SEQ ID NO: 553050 - DNA, 168 bp, Homo sapiens
tcgcggtgacctgggagctggtaccacacggggactgccgaagaggcagacagacggggcgtcttggtctcgtaggtctcacgacacatcgggtgctgatgacgctggacactgagacacggcgaggaaggcagggtgggctcccgcacgggaggagggccccgaaac

SEQ ID NO: 553051 - DNA, 402 bp, Homo sapiens
tccatcggatatgcgggccatgtatattgcatgaccagtgctagggccagtgccaggccatagtgagggcatgggcagaagccatggcatggtcagggcatggtccagggcaggtccagggagcggccagcaccaagcggggccaaggcacaaccagcgcagggtaaggcaggacaatggcaccactgggccatgacagggcaaggtcagcgccaggagagggcagaacaggcagtgcccatggtgggtgccagggcagggatgggccaaagcagtggccaggacatgtccaaggccaggtcagtgccagaacaggagcaggaccatgaccattggcagggccagtgccatgacaggaccagggtcaggacaaggggcagggccagagccagggccagagcc

SEQ ID NO: 553052 - DNA, 163 bp, Homo sapiens
gctggtgcgagtcccgacgttctcctggtcatatatcactctcctacttagcaggacctcacaatactagtcacagcgctagactccctctacatataaagcgcagcaacacactgaggctcactcaccgctccacattaagcctagataatgagcctcattc

SEQ ID NO: 553053 - DNA, 170 bp, Homo sapiens
  misc_feature (162)..(162): n is a, c, g, or t
gccatagtaacctttgcacatctttctgaacgtatgagaaaaataaaatgatacataaagcacctggcaaatagcaagtcctctgcaagtgctccggaaatgtttatcacacgcctactaagaaacacagagtttcactcagtttgttcaaatttcccatanagtatgta

SEQ ID NO: 553054 - DNA, 541 bp, Homo sapiens
atgtaagattgcagaggtttttaccagtattatgaagttatatcatgaggatgtgtgcggtagtagaatttttcgacagcagagacatttgaaagccattacagttgatcttgaagaaacaaaagccatggacggtattgtattgtctggaatgtgtgtgaaatgcagttgttctaaaattctgccacactttgcccagtggatttttactatttctatccgttgcctcatttgaaagaaactttttgaaattaatagaaaagcagtttaactccaaagaaacattgacagatatgactagtaactgttgaacatgataaggattatgttcaggtcattatggatcattgacaaattgcagaacataaggcttaaaaataaactgtgctgttattcatgagtgagataaataggtggggttgtttcaaaaaatacactaatgttaaaagtgtgactccattattttgtttctcctgtgacatggattcttactgacatgattatagataaagctcggtacacattttccctgcaaaaaaaa

SEQ ID NO: 553055 - DNA, 627 bp, Homo sapiens
gtttgacacacccctcaaagacactttttttaggggccccctcctattgggagggcgcgaggtgggagcgccactagacgcccctggaggaggatctacttctaccacccctgaagaaagaggggtgggaatagaagcaacatctcttttggcgaggtgctccaacaacacaaaatgggctcctctcataacacgctcttgtccagatattctttttataagaaagaacaccccctctcttccgccactgtccccccccgagaacctccttctttccccgcggggggttctttctggcggagtctaccctgggactactaaaataagaccgcttggataattctccagaggggtgttttttaaaccctcacactacctcggggcgacagaggaccccgagaattccctcggggagaaatcattttctcccctctatctttctcaaaacaaccatctttttccaccgctgtcctctatgatgatgatgaatgcttcccccggggagaagaaacaccccccccccccccacacaataaaaaccccccccgcgggtccaaaattttggggttgagaaaatttttttttaaacacaaaaaaatttggggggagagaacaaaaaattatata

SEQ ID NO: 553056 - DNA, 130 bp, Homo sapiens
ctcacccgctctggccagagatgacttttggacacatgtgtcgtggaggccgactgtttgcaccaaccaaaacctggcgccagttggcatcagtagcagtgaacacaaccccaataacgatacgccatct

SEQ ID NO: 553057 - DNA, 454 bp, Homo sapiens
  misc_feature (443)..(443): n is a, c, g, or t
tttttatgtttttatttttttttaagacaaggtcttactctgttgcccaggttggagtgcagtgatgaattacagctcactgcagctttgaattgggctcaagtgatcctcccacctcagcttcctgagcacctgggaccacagatgtgtgccacttcgcctggctaattttgaaaaactcttttttgtagagccggagtctccctatattgcacaagctggtcttgaactcctgggctcaggcaattctcccacctcagcctcccaaagtgctgagattatagctgtgagccaccgtgcccagcctggaagctagaggctgttttcaatatgtcattattcttcatttggttagggataaggtttgaagggaggggtaggaaagttttcaaagggcggagagttttcaaagggcatcatgtttaacagggcaggcaacacgntcaagcccctt

SEQ ID NO: 553058 - DNA, 263 bp, Homo sapiens
ctggacctactcacaaacagctggctgggtacggtagctcatgctgtaatcccagcactttgggagactgaggcaggtggatcttttgaggtcaggaatttcgagaccagcctggccaacatggtgaaaccccgtccctactaaaaaaatacaaaaattagctgtgtgtggaggtggcactgtgtagcctctacagtccggagcaggatgcggtgcagcatgggatctggccgtggtttgtagaaggtcgctgagtgggatcc

SEQ ID NO: 553059 - DNA, 128 bp, Homo sapiens
gagatcacaccactgcactccagcctgagtgacagggcaagactccatctaaaaaaaaaaaagaaacgggaaatcaaatccttaagtcaactagttaaattttactgtatgcagccatggcactccgg

SEQ ID NO: 553060 - DNA, 111 bp, Homo sapiens
ctgctttccaaactcctgattttcgtaccacttgaagatcttgttttttcctcacactccgatggatgatttcatgagaggtgagagagacaacacgggatgaagactgta

SEQ ID NO: 553061 - DNA, 198 bp, Homo sapiens
tgagtcggtaccgattacgatcctagacggtttttcatggtttgatagctgatctttagcacggaataatatcccacttctggatgtaccacagtttactcatcctttcatctactgaaagacatcttggttgcttccaagttttggcaattatgaataaagctgctatgaacatccatgtgcaggtttttgtatgga

SEQ ID NO: 553062 - DNA, 229 bp, Homo sapiens
ccgggggtgggggggccttccccccctttccggttggtttggttcccccggcccttttttggtggggccccccccgtggggtgttcttttttttcccgggcccttttctttccggggtgggttccttggggggggttcggggatttgccttttccccccttcccccttgggccccttgtggggttggggtttcccctttttccccttaacctgggttttgccctttcca

SEQ ID NO: 553063 - DNA, 621 bp, Homo sapiens
  misc_feature (11)..(11): n is a, c, g, or t
  misc_feature (13)..(13): n is a, c, g, or t
  misc_feature (15)..(15): n is a, c, g, or t
  misc_feature (17)..(18): n is a, c, g, or t
  misc_feature (594)..(594): n is a, c, g, or t
aattcgcggcngngncnncggtccttctcttaccgccatcttggctcctgtggaggcctgctgggaacgggacttctaaaaggaactatgtctggaaggctgtggtccaaggccatttttgctggctataagcggggtctccggaaccaaagggagcacacagctcttcttaaaattgaaggtgtttacgcccgagatgaaacagaattctatttgggcaagagatgcgcttatgtatataaagcaaagaacaacacagtcactcctggcggcaaaccaaacaaaaccagagtcatctggggaaaagtaactcgggcccatggaaacagtggcatggttcgtgccaaattccgaagcaatcttcctgctaaggccattggacacagaatccgagtgatgctgtacccctcaaggatttaaactaacgaaaaatcaataaataaatgtggatttgtgctcttgtatttttaagtggattaaaaaacttactaccttaaaacaaaaaaaaaaaaaaaaaaaacaaaaaaaaaaaaaaaaaaaaaaaaaaaaaaaaaacaaaaaaaaaaaaacaaaacaaaaaaaaaaacaaaaaanaaaaaaaaaaaaaaaaaaaaaaagaag

SEQ ID NO: 553064 - DNA, 136 bp, Homo sapiens
caatgctggacgaggacgaggatgagcgtgtgagacgaggctgtcctgcggcagttcacgggagatggggcttttccggaggaccagagcccaccagggcccttcaagctgaaaccacatggtcggttgcctcaag

SEQ ID NO: 553065 - DNA, 587 bp, Homo sapiens
  misc_feature (11)..(11): n is a, c, g, or t
  misc_feature (13)..(13): n is a, c, g, or t
  misc_feature (15)..(15): n is a, c, g, or t
  misc_feature (17)..(18): n is a, c, g, or t
  misc_feature (560)..(560): n is a, c, g, or t
aattcgcggcngngncnncggtccttctcttaccgccatcttggctcctgtggaggcctgctgggaacgggacttctaaaaggaactatgtctggaaggctgtggtccaaggccatttttgctggctataagcggggtctccggaaccaaagggagcacacagctcttcttaaaattgaaggtgtttacgcccgagatgaaacagaattctatttgggcaagagatgcgcttatgtatataaagcaaagaacaacacagtcactcctggcggcaaaccaaacaaaaccagagtcatctggggaaaagtaactcgggcccatggaaacagtggcatggttcgtgccaaattccgaagcaatcttcctgctaaggccattggacacagaatccgagtgatgctgtacccctcaaggatttaaactaacgaaaaatcaataaataaatgtggatttgtgctcttgtaacaaaaaaaaaaaaaaaaaaaacaaaaaaaaaaaaaaaaaaaaaaaaaaaaaaaaaacaaaaaaaaaaaaacaaaacaaaaaaaaaaacaaaaaanaaaaaaaaaaaaaaaaaaaaaaagaag

SEQ ID NO: 553066 - DNA, 593 bp, Homo sapiens
  misc_feature (5)..(5): n is a, c, g, or t
  misc_feature (11)..(11): n is a, c, g, or t
  misc_feature (55)..(55): n is a, c, g, or t
  misc_feature (104)..(104): n is a, c, g, or t
  misc_feature (175)..(175): n is a, c, g, or t
  misc_feature (217)..(217): n is a, c, g, or t
  misc_feature (232)..(232): n is a, c, g, or t
  misc_feature (257)..(257): n is a, c, g, or t
tgctntgaatnccagcccgggtgacagggccaagacttttttctcaaaaaaaaanggaaaaaaaaaatttttacccattttttagcccataattttttattggnctgttcacaattttaatccccagcaacttttggtaggccttgaggaggattgctttgagggcccagggagntttgagaaccaagccagggccaacaggacccaaggacccctnatctcttaaagtttntttcttttttttttaactacatccnaaagttaagctgaagaaaagaagcaataaaaataagtgcaagaaataaggccaatgctgtggcttcccacctgtaatcccagcactttgggaggccaaggtgggcagatcatctgaggtcaggagttcaggaccatcctggccaacacattgaaaccctatctctactagaaatataaaaactagctgggcatggtgggcgccacctgtggtcccggctactccggaggctgaggcaggagaatcacttgaacctaggaggtggaggttgcagtgagccgagatccagtaagcccactctctctagcctggccgacagagccagattctgtctcag

SEQ ID NO: 553067 - DNA, 684 bp, Homo sapiens
tcacacactattccaggttctggctactgaatgatcccacagctagaggtctatacgtcatacgctccacttctatttttagcagcactaacaatacattcccaaaaaaaactgtctctctagcttctcctacactgtagattcaccactaagaaattggcacttggaacagatcatcagagcttattcaaactttgcacccactcttcacccatgcactcacttatgctgcttgcactgtgcactatatagtctctactctacacttcgtcatcacctgctgtacgataggcatgacaaaccgccaaccataacgcaaacataacaggaggctgctaacaccgatacaatcacagagaagacatcttgtccaattgacctaactccctttatataatagggaccaatacttctatacgtacattgtcacccccaacttcttcctaaaccacccctgggaaaacgacacttacactctagatacttccagtcacagtgtgactacattctccttcttccaagggatacttcttgaccgggtaaccacctacggaaattacaacgaaaacgttaatgatagccctctccggcacgcaaaatgggcgcctgtacttccaaccatcccaaataccccccttcgccacgaattacccatatttcaacgagagaacgccatctgccaca

SEQ ID NO: 553068 - DNA, 722 bp, Homo sapiens
  misc_feature (11)..(11): n is a, c, g, or t
  misc_feature (13)..(13): n is a, c, g, or t
  misc_feature (15)..(15): n is a, c, g, or t
  misc_feature (17)..(18): n is a, c, g, or t
aattcgcggcngngncnncggtccttctcttaccgccatcttggctcctgtggaggcctgctgggaacgggacttctaaaaggaactatgtctggaaggctgtggtccaaggccatttttgctggctataagcggggtctccggaaccaaagggagcacacagctcttcttaaaattgaaggtgtttacgcccgagatgaaacagaattctatttgggcaagagatgcgcttatgtatataaagcaaagaacaacacagtcactcctggcggcaaaccaaacaaaaccagagtcatctggggaaaagtaactcgggcccatggaaacagtggcatggttcgtgccaaattccgaagcaatcttcctgctaaggccattggacacagaatccgagtgatgctgtacccctcaaggatttaaactaacgaaaaatcaataaataaatgtggatttgtgctcttgtaacaaaaaaaaaaaaaaaaaaaacaaaaaaaaaaaaaaaaaaaaaaaaaaaaaaaaaaaaaaaaaaaaaaaaaaaaaaaaaaaaagaaagggggagcacacaaacgggagcaggaagaagaaaaaccacaaacaagcaagggaggggaggaagcggggaaaactgagaggcgcgcgacaaagggcgggaaaaaaaaggaaacaaagagaggagagcgcggggcatcgagggagaggggggggagacgagcgagagaggg

SEQ ID NO: 553069 - DNA, 988 bp, Homo sapiens
  misc_feature (11)..(11): n is a, c, g, or t
  misc_feature (13)..(13): n is a, c, g, or t
  misc_feature (15)..(15): n is a, c, g, or t
  misc_feature (17)..(18): n is a, c, g, or t
aattcgcggcngngncnncggtccttctcttaccgccatcttggctcctgtggaggcctgctgggaacgggacttctaaaaggaactatgtctggaaggctgtggtccaaggccatttttgctggctataagcggggtctccggaaccaaagggagcacacagctcttcttaaaattgaaggtgtttacgcccgagatgaaacagaattctatttgggcaagagatgcgcttatgtatataaagcaaagaacaacacagtcactcctggcggcaaaccaaacaaaaccagagtcatctggggaaaagtaactcgggcccatggaaacagtggcatggttcgtgccaaattccgaagcaatcttcctgctaaggccattggacacagaatccgagtgatgctgtacccctcaaggatttaaactaacgaaaaatcaataaataaatgtggatttgtgctcttgtatttttaagtggattaaaaaacttactaccttaaaacaaaaaaaaaaaaaaaaaaaacaaaaaaaaaaaaaaaaaaaaaaaaaaaaaaaaaacaaaaaaaaaaacaaaaaaaaaaaaaaaaaagagaggggcgcgcgcgcgcaataaaagaatacagcagggagggcgagccaacgaccagacagcaagcagatatagaaaacaagagcggaccaaacaaaaagagggagaaaataaagaaaaagagagagagggcaagaaggaaaaaaaagcagcacagaacacgtacgacacaaaagagaagacacggacgagacaaaacagaggagaaggaaaacaaccaacaagagggaggggagaaaccaatggagaacacaacaccaacaagaaagaaaaaacacagcagggaggaaaaaaacagcacagaaggggtaaaaggagggaaaaaacaaagagagaaataagagaggagagaaagaaaagaaggagagaaggagaagagagaaagaaacaaactacaagagg

SEQ ID NO: 553070 - DNA, 999 bp, Homo sapiens
  misc_feature (11)..(11): n is a, c, g, or t
  misc_feature (13)..(13): n is a, c, g, or t
  misc_feature (15)..(15): n is a, c, g, or t
  misc_feature (17)..(18): n is a, c, g, or t
aattcgcggcngngncnncggtccttctcttaccgccatcttggctcctgtggaggcctgctgggaacgggacttctaaaaggaactatgtctggaaggctgtggtccaaggccatttttgctggctataagcggggtctccggaaccaaagggagcacacagctcttcttaaaattgaaggtgtttacgcccgagatgaaacagaattctatttgggcaagagatgcgcttatgtatataaagcaaagaacaacacagtcactcctggcggcaaaccaaacaaaaccagagtcatctggggaaaagtaactcgggcccatggaaacagtggcatggttcgtgccaaattccgaagcaatcttcctgctaaggccattggacacagaatccgagtgatgctgtacccctcaaggatttaaactaacgaaaaatcaataaataaatgtggatttgtgctcttgtaaaaaaaaaaaaaaaaaaaaactcgagacctagttctctctctctctactcgggatcgccggaaatacgggacccgtatggggcctccctccggaaaagggtcgaacacaatttggaaatcagccagcacgcaaagaacacttgctcttcgggggcaaacccaggatgaagagacgagctgggggatctgaccacagggttcctgatagaagacagggctctggcgggcctgacggtaaaaggtaacctaaggaaacccaaaggggcgcagagtggacacggtgatggaactctaacggcctcacaaccagggaagggggaccgaagcaatcgggggacccacagtggcatgacccactagatggacgccgggaaagacactccacggggagaaccgcgtagaataacctctctggacaaccattgaagagccagaaagtggctataacttggcgttaagcggccgcgcccatccgagaaatttagcggcccggttatccgaacctgaaaactctctctacaaacaagcacacacc

SEQ ID NO: 553071 - DNA, 1106 bp, Homo sapiens
  misc_feature (11)..(11): n is a, c, g, or t
  misc_feature (13)..(13): n is a, c, g, or t
  misc_feature (15)..(15): n is a, c, g, or t
  misc_feature (17)..(18): n is a, c, g, or t
aattcgcggcngngncnncggtccttctcttaccgccatcttggctcctgtggaggcctgctgggaacgggacttctaaaaggaactatgtctggaaggctgtggtccaaggccatttttgctggctataagcggggtctccggaaccaaagggagcacacagctcttcttaaaattgaaggtgtttacgcccgagatgaaacagaattctatttgggcaagagatgcgcttatgtatataaagcaaagaacaacacagtcactcctggcggcaaaccaaacaaaaccagagtcatctggggaaaagtaactcgggcccatggaaacagtggcatggttcgtgccaaattccgaagcaatcttcctgctaaggccattggacacagaatccgagtgatgctgtacccctcaaggatttaaactaacgaaaaatcaataaataaatgtggatttgtgctcttgtatttttaagtggattaaaaaactttactgacccagagaagacacacgaccatcaccatcccatacacaccacacaaacaacatttttgtggacgcactctcggacctcctcgcgagaaagctttttcagagaccttctacgtttgtgaccgccggtgaacccacaaggtattactgtgcacacacgtggcacacaacagcgtgtatccaccagcagcaacacctcgcgagcacaagcaaacacagagtgcggcagaaatatgcgcacgacacagattaaataaaagaccgccgcgggtgataaacccgcagacacagttctgaaacgacacatcccgacaaaaggagatatcaccgaaaggatccacataagacagagggggacacattcataaaaaaaacacgaggggaggtgtatcccaacaaggccgaacaaccgctagtaaatagtattaacgaaaaagatagtcaccacccgggcagcttgagttgtgtgagacacaccaagcgagccatcggaatatagcccgaaatagaacacaccacacagaaagcgacaacgcgagatgccgaccaagacaagaaccgcaccgaccacaacgcacgccacgaacgatgctaagacactcgaaagcagccgaatc

SEQ ID NO: 553072 - DNA, 1010 bp, Homo sapiens
gactgtgtcatgatacatcactctgatttgcttgcatcatttaggcgccctgttaattacctgactatggcctagtacaggtgctaccacgatgttctccggcttcgcgaaaatgcctctgcggtgctatcagtatttacctttgtcttgacggtcttccgccccgacgggtgggtgtgtctcctccgtccacgggctgcgcgcctgttgctacatctcacgaggcgacgccggcttcgagcgtggtgtccgcaacagcccatgttgccgagggcggggtcgccctgtgataaatgacgggcaccgcttcgtcccagatgggttgtcctccgggaccgcctccctgttcttgcagttcggtcccgtgtggattcccacgcgaaccggtcggtgtgtcgcgttagataatccgaacaagagggccgccggccctcgaagtgagtccacagggcggtctgcccacccttagatgggtcgacgccaacgatgcgtgcgaaccgtccgcagcgtgccccgccccgggggtgaccacccctccggcgaggaagtctgaggaagcgcctcagtgggggccccctccgctccgccgccgagagagatagatcgttcagttgccgacacttctggtgccacgtcacggtgcagccaccacgtcggcggcgtcatcaacactcgtcgctttggccacaaaaggtgtggatctcgctccccctcgcccctctgcgggttttctgagcaggaacagcgcgtgcagcccattacgattcatgtgtcccccaaacgcccccctattagtggacaatctcaggtgaccggctccgcgtaaactgggccacacgcttctggcacatacctggcccaccctcggttgtcaccccctactcattgctgcccctttgcccccccgcgctaagacaattcgccgtcgtactctggaacccccagggctcaagacgtggggcacctttgtgccagccaaaaacacaaaaattttttcagccaacaaaaca

SEQ ID NO: 553073 - DNA, 796 bp, Homo sapiens
  misc_feature (11)..(11): n is a, c, g, or t
  misc_feature (13)..(13): n is a, c, g, or t
  misc_feature (15)..(15): n is a, c, g, or t
  misc_feature (17)..(18): n is a, c, g, or t
  misc_feature (536)..(536): n is a, c, g, or t
  misc_feature (538)..(538): n is a, c, g, or t
  misc_feature (542)..(542): n is a, c, g, or t
  misc_feature (546)..(546): n is a, c, g, or t
  misc_feature (549)..(549): n is a, c, g, or t
  misc_feature (552)..(552): n is a, c, g, or t
aattcgcggcngngncnncggtccttctcttaccgccatcttggctcctgtggaggcctgctgggaacgggacttctaaaaggaactatgtctggaaggctgtggtccaaggccatttttgctggctataagcggggtctccggaaccaaagggagcacacagctcttcttaaaattgaaggtgtttacgcccgagatgaaacagaattctatttgggcaagagatgcgcttatgtatataaagcaaagaacaacacagtcactcctggcggcaaaccaaacaaaaccagagtcatctggggaaaagtaactcgggcccatggaaacagtggcatggttcgtgccaaattccgaagcaatcttcctgctaaggccattggacacagaatccgagtgatgctgtacccctcaaggatttaaactaacgaaaaatcaataaataaatgtggatttgtgctcttgtaaaaaaaaaaaaaaaaaaaaaaaaaaaaaatttttggggggccttgggccctggagaaagttttttaacccantngttngggngcnggngccccataaggatcagtgaccacgggccaaaagggggccccaaggaggacccgggctcagcaaaggtgtgggatttcaccaataaaaaggccggggacacccgcgtttgacaatccacgggagtcgaggacatagggccaacacaggggccacggcgtcgaataaatacgccggtggacacagggagcacagcgcgacgcgaacgttacaccaccagatacacacgcacaagcaggaacaacac

SEQ ID NO: 553074 - DNA, 536 bp, Homo sapiens
  misc_feature (11)..(11): n is a, c, g, or t
  misc_feature (13)..(13): n is a, c, g, or t
  misc_feature (15)..(15): n is a, c, g, or t
  misc_feature (17)..(18): n is a, c, g, or t
  misc_feature (509)..(509): n is a, c, g, or t
aattcgcggcngngncnncggtccttctcttaccgccatcttggctcctgtggaggcctgctgggaacgggacttctaaaaggaactatgtctggaaggctgtggtccaaggccatttttgctggctataagcggggtctccggaaccaaagggagcacacagctcttcttaaaattgaaggtgtttacgcccgagatgaaacagaattctatttgggcaagagatgcgcttatgtatataaagcaaagaacaacacagtcactcctggcggcaaaccaaacaaaaccagagtcatctggggaaaagtaactcgggcccatggaaacagtggcatggttcgtgccaaattccgaagcaatcttcctgctaaggccattggacacagaatccgagtgatgctgtacccctcaaggatttaaactaacgaaaaatcaataaataaatgtggatttgtgctcttgtaaaaaaacaaaaaaaaaaaaacaaaacaaaaaaaaaaacaaaaaanaaaaaaaaaaaaaaaaaaaaaaagaag

SEQ ID NO: 553075 - DNA, 230 bp, Homo sapiens
  misc_feature (52)..(52): n is a, c, g, or t
  misc_feature (62)..(62): n is a, c, g, or t
  misc_feature (72)..(72): n is a, c, g, or t
  misc_feature (80)..(80): n is a, c, g, or t
  misc_feature (82)..(83): n is a, c, g, or t
  misc_feature (92)..(92): n is a, c, g, or t
  misc_feature (99)..(99): n is a, c, g, or t
gtcatctctggtctgtagctgtttcctgtaccctgtgggttcctagcttcanactcgtacangacttgcatntcagggcngnntgggaggtntggggcnggagggcctggagttggggtccccaggctgagggtcatggttgtgtgtcttctcctgaggaaagtgtgaggtgctccctaacctatgacttccccgccgaagggaaacagggtcctggtatcctaagggta

SEQ ID NO: 553076 - DNA, 1705 bp, Homo sapiens
ggggagggtgggaggtgggatttagacaggaaaggggtgagagtgattgtgttgtgggcgaggaagcgtttccgatcaccctggatgccgtatcagggacagggatgaccttactcctccattgttctggaagatctcacaggctgatgagcaggatggagacgagagacgtcatgggaagtgaagtcatgagtgcccgattcctcattagagcaaagagtccatgtagcatactggtaggtatctgtcattggggccagcttggagtctgacaggactggacccgttagacgtctctgggcgtagccgttcagaagtcttggatgctctctgaaatttctctaactaatacgagtgttttatataaaacgttgtgccaaagaggtccactttcgagcttgtacaactgtataagcactaagatctcgcagttcaacccacggcgatgtaagggtggcttcaggaatctaccttggactttattcatgctcgtggctctcgtagtcgacacagaggcccacaagagtgaacatgtgcctcttaaagcccgaggaagtcaagaattcacccttacgaatggacgggccaatcccacacttgctattctctacacaggctcgtgcacaagagtaagatagacagcttacgcacgtaatcgcttacgcacagtagagaagcaaaacacaaaatcgaaccaaaatacaaacagtaagaaagtcgcgatatgacacaatacagagcaagcccatgagaacgtctatgtgccaggcacttcagcaaatggcaatctccaaaaaaccccacagtggaactgtgcgctagagatacaatgacaccttgttgcctctggcgcactaacatgcatgaaagtctccacagggggatcaccacttagggtcatgacatacacatcgatgtaaatcacagaaaggcatatacagagagacatgcagcaagacagtgtcacgaacccaccttaaaaggacagttgcagaacagagggcacacgggcacatcctagacgaccacgagaagcacaagaacagcataaggacgagcgctgacaatacaacaaacagaacaacccacagagacacaggaaacacgaggacgaccaaaggaccgccaactgacacgcatcccgcgacccacagacacaagacagaacgagaagcagaacaaacgcgacaaaccacaagccatccaacagacacgccagcggacggcaccaacgatgacgccccacgagcgccacacagagcgacagaagtgcacgcgaacggcggccaaacggaacagcagacatacgacacaggggcccgcccacaaaaaacagcacgaacccaacgcgctcggatacgcaagaccaccaacagcggccgctccaggaaaaaggcgacgacaagacgacccaccatcgaacagagcacagaggacacagccacagcagtcaaccagagtcgcaagacgacaacaaatacagaacgaaccaccatatacagggaagcacacaagacaaagacacacagaacaaacaccacgacgacgaaaccaagagaaaggcaacaccaagcccagacgacgcaagacagaacacacggccgaacaaacacatagaaggaagagaacccacagcgcgcagaagccaaacggcgcgccacacactcaagcacacaatacacacaacgcagacgaacacaacaca

SEQ ID NO: 553077 - DNA, 515 bp, Homo sapiens
  misc_feature (11)..(11): n is a, c, g, or t
  misc_feature (13)..(13): n is a, c, g, or t
  misc_feature (15)..(15): n is a, c, g, or t
  misc_feature (17)..(18): n is a, c, g, or t
  misc_feature (472)..(472): n is a, c, g, or t
aattcgcggcngngncnncggtccttctcttaccgccatcttggctcctgtggaggcctgctgggaacgggacttctaaaaggaactatgtctggaaggctgtggtccaaggccatttttgctggctataagcggggtctccggaaccaaagggagcacacagctcttcttaaaattgaaggtgtttacgcccgagatgaaacagaattctatttgggcaagagatgcgcttatgtatataaagcaaagaacaacacagtcactcctggcggcaaaccaaacaaaaccagagtcatctggggaaaagtaactcgggcccatggaaacagtggcatggttcgtgccaaattccgaagcaatcttcctgctaaggccattggacacagaatccgagtgatgctgtacccctcaaggatttaaactaacgaaaaatcaataaataaatgtggatttgtgctcttgtatttttaangtggattaaaaaacttactacctgggttaggtctacctgagga

SEQ ID NO: 553078 - DNA, 452 bp, Homo sapiens
  misc_feature (395)..(395): n is a, c, g, or t
ttggggctccattcagtgtgatatgaagcaccgccaggtcctttgagtttaaagcgggggctcgtagtgtcgggcgagcagtttggtgattaactggtggaggttgagggctaagcataggggggtatctaatcccagttggggtctaagctatggggtgtccagatatgttaaagccactttcgtagtctatggggggtcaaggggagtttttaacaagtcaggtgagttttagcttgatgggggagggggtgatctaaaacactctttaggcgggcttctatggagtggggtaaatcgtgtgaccgggggggttggcacgaaattgaccaagccgggggttagtatagcttagttaaactttcgtttatggctaaaggttaatcacggctgtntcccgggggggtgtggctaggcaaagcgtatggagctgcatggctgcgtgcttgatg

SEQ ID NO: 553079 - DNA, 473 bp, Homo sapiens
cgggtccgggggtaaatagcacttgccgttacataggcatgtgatttcaggtatttcgtacgtgatgaacattgagatgtcagttggaagacaccctgaaatcttatgagtcgcataccccaagcaccctctaatagctagctagtaaagtaacgcaaagaatgcattcatctctccattttagatggctagatgttttgtggaagatcttagaattgcctgcctcatttgctgggaaaaatcagataggaagtggccttaaggggatacttttacttggaaagttacaacactagtacaagtcttaacacatttaacatttgcttgttgaaaagcaatgcgaaagtcaaataaaattaaacatgttttacttttttcctcacaagaacataaaaattatggaggggaacttaacagggaatttaaaaaaagtaacacaatttttccttttagtagtccttgggtcgttatga

SEQ ID NO: 553080 - DNA, 725 bp, Homo sapiens
  misc_feature (11)..(11): n is a, c, g, or t
  misc_feature (13)..(13): n is a, c, g, or t
  misc_feature (15)..(15): n is a, c, g, or t
  misc_feature (17)..(18): n is a, c, g, or t
aattcgcggcngngncnncggtccttctcttaccgccatcttggctcctgtggaggcctgctgggaacgggacttctaaaaggaactatgtctggaaggctgtggtccaaggccatttttgctggctataagcggggtctccggaaccaaagggagcacacagctcttcttaaaattgaaggtgtttacgcccgagatgaaacagaattctatttgggcaagagatgcgcttatgtatataaagcaaagaacaacacagtcactcctggcggcaaaccaaacaaaaccagagtcatctggggaaaagtaactcgggcccatggaaacagtggcatggttcgtgccaaattccgaagcaatcttcctgctaaggccattggacacagaatccgagtgatgctgtacccctcaaggatttaaactaacgaaaaatcaataaataaatgtggatttgtgctcttgtaaaaaaaaaaaaaaaaaaaaaaaaaaaaaaaaaaaaaaaaaaaaaaaaaaaaaaaagacaaaaaaaaaaaaagacaaaaaaaaaaaaaaaacaagaagagaaagcaaaaacacaaaaaaagaaataaaacacaagaacgagaaaaacacaactaaacacaacacgagggaaaacgggacatcaggcgccacccacatagcgcgcgcgcaagcaggcgcaaaaccgcacgcgcacacgaaaacagagacagcgcggcggcact

SEQ ID NO: 553081 - DNA, 251 bp, Homo sapiens
  misc_feature (74)..(74): n is a, c, g, or t
  misc_feature (111)..(111): n is a, c, g, or t
  misc_feature (189)..(189): n is a, c, g, or t
  misc_feature (235)..(235): n is a, c, g, or t
gcagacgctgcggtcgctctagacggatccccaggacacgactgggaccggggaccgacactatttgctacttngtactaaaacactggaacacttttaaccacgcttagncctctagacgacgttactgacacgtggttaccttgggacatgtaaactagacacctgcaaacttaaaactgacctggnccaccttcacacctgggtaacgggacaacacgctgcaactaaacgncttccgtgacaaacga

SEQ ID NO: 553082 - DNA, 836 bp, Homo sapiens
ggagggtgaggcacgagaatcacttgacttgggaggcagaggttgcagtgagccgagatcctgccactgcactccccagcctgggtgacagagtgagactccaaaaaaaaaaaaagaagggcaagtaaaacggtttatattccagttataatttaccacctccttgtggaacattcagatgtgtaatgtgaatgtgacctcgggtggactctttttagacacggtaagaagaatacggatttataaggtcgaaaaattattcacgtacattattctttaaaattctattaccaagagaagaaaaatatgcttggaatccggtgggtaatgataaagccgggaggagatagatttacagagaagtgatttcaatttcaggtccaggttaaattcaaggttcaaagaacccaggaaaacactttgtgtggccttgttgtaatttccctgtgttttaacattcccgttaggtgtacaaggggtcaaacagaagagactggacaaattgtggaaacccctatttaaggaacatttcttaaaatcggtttcttttcctattaagcatacatttttgctttttaaaattctatttacaccttttatggtttgtgggattccaaagcaatcatataaaatatattagtggtttgctaaaaacaaggtttttccaggagaatttttttgctacctgagaagttttagtactaagtttcgttggaaggacacttgaaaatttgctaaaggggtggggatgatggttgtggacacaataacggtcattttataactaaatagcacttaggtatgaagcccttggtgggtgttgggacaaacaaaga

SEQ ID NO: 553083 - DNA, 307 bp, Homo sapiens
aatgcacaagtcactaacataccacaggtcctaaactaccaaacctgcattcaaaatttcggctggggcgacctcggagctgaacccaacctaccgagcagtacatgctcagactccaccagtccacgcgaactactatactcaatagatccaataacttgaccaacggaccacgttaccctagggataccagcgcaatcctatactagagtccatatcaacaaaagggtatacgaactcaatataggatcagggcatcccgatggtgcagccgctattacaggttcgtttgtccgccgattaccgt

SEQ ID NO: 553084 - DNA, 265 bp, Homo sapiens
taggtaccacattaagccattctcttgtaagcactcaaatgtatttgcaatttttcttttagctgcaacaacaaaaacaagcaaacaaacaacaaataccttgaaactaggcttgtccaatgatgtacatccatcctttcccagggcaagccagcaaggtagcacctcaccacaaagcaaaagcatgcttcatacacaggcaggtcaacatttcaccaatcacagttcaaattccaggctcaaactcttgacaatcccgttttca

SEQ ID NO: 553085 - DNA, 261 bp, Homo sapiens
ggtcgaccatgactgtcatagtcatttggttagcacttatttgtggacagacaatccactggggtgtagaaagattagtgcttctgcttctagttctattaacttttcatgtcactccttttttttgtttttttttttatataaaatggggtctggctcggaaccccgggtgggattacgggggcgctttccaagctcagggcaccccccaccaacggggagggggggacaacccaggtggggccccccaaaagccccccg

SEQ ID NO: 553086 - DNA, 306 bp, Homo sapiens
agaggacaacttctcagatacgggaacacttaggtctcgggatccaggaacacatcgatctgggtatcaaatatgacccaagcattggtatctacggccatggactacatataatggatgcagggtaggccaggataacagcatcagacagacaagaagcgcaggacaggctgcatagaggccaaacacagaatcagccaaggaggaggccaatgcgctggattccagcagaagtatgatgggatcatccttcctggcaaataaattcccgatactatccaaaagagcaataacaagtatacagtg

SEQ ID NO: 553087 - DNA, 182 bp, Homo sapiens
atgttgctagccacatggtggaaccccgtatctacaagaaactagcccatgtggtggcacgtagctgtaatcccagctacttgggaggctagaggcaggagaatggcttgaacccaggaggcggaggttggagcgagccaagacctgcagcattgcactctcagcctggcgtagacaacagc

SEQ ID NO: 553088 - DNA, 157 bp, Homo sapiens
ccaccctgttttatgcatttgcactcgctaagaaacgatgacgattcagcatgctgaagatagtatcctcccttatacaggggctaacacagagggcagatactgttcgtgcttctgagatcttgatcacaagtacattgctttaggcaagttacaa

SEQ ID NO: 553089 - DNA, 570 bp, Homo sapiens
cccggcccatcccacagtggtggactaaggacggaagtgggacccgtccagggccatttctcgagggagcacatcatcgctctaagacttctcccaggacccagagcagtacgtgtgcggctgaatggagtgatagtgaaactcactctgtcaaaaagcaccttttgttcgaactcctggaggacgagcgtcggatgagcggcgtcccaccccacagcttctcggtaagtcgtggctcgacgtctgatcgtactcgctgactggagttaactgcggcgaaagacctggacagcaattgaccaggagattcggtgctgaggactcaggacagctggacaagcaagagcacgggagaaggagtgcacagtggtcgtgagaagacgtttcgctgctgtgaggtcttgaaacggatgacctacgacaaagggtgctcttaaagaaattttggggattccagattcaaggtccggcaacttaggccccaaattagtttagaagctatgagatctctctaaagtattagatattagtgtggattgtgaacacacttcgagaggactctcactgtgt

SEQ ID NO: 553090 - DNA, 701 bp, Homo sapiens
gggtttcactttattgcccagactggagtgcagtggtgtgatctcggctcactgcaacctgtgccttccaggctcaagcgattctcctacctcagcctcccgagtagctgggattacaggcttataggcgtgtgccactaccgcctcactaattctttttttgtatttttagtagagatgggatttcaccatgttggccaggctggtctcgaactcctgacctcaaatgattcccctgcttcagcttcccaaaatgctgggattacagatgtgagccaccgtgcccagccttttttttttttttttttaagatggagtctcactggtgtcacccaggctggagtgcaggggtgccatctcggctcactgcaatctccacctcccaggttcaagcgattctccggcctcagcctcgggagtagctaggattacgggtgcccgccaccatgcctggctaatttggggattttaagtagagacagagtttcactatgtgggccagccgggtctcgaactccgtgacttcaagtgattcacccacctcggtctcccaaagtgctgggattacaggtgtgagccattgtgccaggcctatgtaaggcttgggattagcttaggggattctaaattaatagcacctcatacttggagtggttaatagatatatatgtatgtagtgggtaataagttaattgagatct

SEQ ID NO: 553091 - DNA, 268 bp, Homo sapiens
ggggggggggggcccccccccggggaaaattttggggggggggggcccccccggggacccccccccccggaaaaaaaaaggggggcccttttagggggttcccccctttcggggggggggggggtaaaaacccccaaaggccccccccccgggggggggggtggggggccgggaaaatttcccaattggggggggggggggggggtttttttttttttgggaaacccccccaaaattgggaaaaaaaaaaccccccctttttttttta

SEQ ID NO: 553092 - DNA, 174 bp, Homo sapiens
tgatcagaggatccgagaaatatccaaagatgcttatcatattcgatatatatacaaaagtacttatgagattgagtcaggaataaagaagaaatcatcctgaataaaattttgtgggagagattggttctgtgagagaagtctttaagcattggatgatatatttagatcaat

SEQ ID NO: 553093 - DNA, 166 bp, Homo sapiens
  misc_feature (46)..(46): n is a, c, g, or t
  misc_feature (61)..(61): n is a, c, g, or t
  misc_feature (110)..(110): n is a, c, g, or t
  misc_feature (121)..(121): n is a, c, g, or t
  misc_feature (141)..(141): n is a, c, g, or t
ttgccacagcacacagcttagggccccttttctgtgggtatgaggnagagacaaagtttgnagttgcaaagggctcccccagaccttttcaaggcatgttctaaggtagncgagtccggcnccatacaccagcccagaaanatctgccttgctgcctaagaaccaa

SEQ ID NO: 553094 - DNA, 229 bp, Homo sapiens
ccgttgtctatggctgtgtatacagactctctttgtcctgtttttcctgttacggttcatcacaggatagtgaatgtagctgcgctgtgctgtgccggtaggatcttcctgtacatccattctccctgtaacagcttgatctgctcaccccaaactccaaatccatccgtacccctccccccgataaccgcaagtctgttattgtgtagttctaaatgttggtctgatt

SEQ ID NO: 553095 - DNA, 949 bp, Homo sapiens
tactcatgttgtagtctcagcaatttgggaaggcctgcaggcgggtgtatcatgaaggtcggagtattgacgtaccatccttggtctacatcatgggtcgagaaccccggtggattacttagatagatagaacaaaatttagccggactgtggtttggcatgcgcacgctggtagtccgcagctattctgtagagggctagagcgcgagggagaatggtcttgaggtccccatgggatggcagtatgcttatgcagtagatgcccgaagataggtaccattgcatcttctcatcctgggtctgaatagtagaaaagaactctcatccttcaaataaatactataattgggaaatttgtttgcaagtggaattctaaataaaaaatacttatattgaggaagagggggaccctaatttttttgggaaaaaaccattctttagggtccttagaggtttctatttgaacacttggaaatggattgcactctcaatattttcttaggtttgtgtagaaccagtgtagtacgtagatgtaccttgtttggcatgggtacgagagaaggggagtgcgccaaataaaagtgctcgagggagggtggggcacgtattcgttgagagaattggtaaatagactataggaggagaggggagggtttaccagcgtcttaagtgagttgccgatgatttcattctaaaggaaagttcgaataggcctagggagagggtaattagaaagtggaagcgttaaggaaggttattgggtaggcaatctaatcaccagagaatgcatgcgcggaaatggctggattagtgtacaatgtcgagtccaatttagtctggagagagggtttgtttgaccctgatttgagggacgcagacagtttacaaagtgcatgacaatgttgggagttgggaaaaatttataaaattgggggcgcggccataggaa

SEQ ID NO: 553096 - DNA, 154 bp, Homo sapiens
gaggatttcctggcaggtggaaatcaggaggtggaggttgcagtgagccaagaacatgccattgcactccagactgggcaacgagagtgaaactgcttctcaaaaaaaaagatacaaaaacaaaaacctactagtcctgatttccaccttgcca

SEQ ID NO: 553097 - DNA, 120 bp, Homo sapiens
tgctctcgaggatctccaggcaaagctctacactgttacagtgtagggaaaatagagtgtgtatcagcagagaccaccgaagactgcatcgccaagatcattgaattggagaagctgatg

SEQ ID NO: 553098 - DNA, 402 bp, Homo sapiens
acaatggatctgctttccttccagtcttcccaggtgccttggcgaaactcaaaccataaataaaaggaacagagacaccaggcatggtggcttctgctgcaataccaacaccttgtgaggccgaggaggaaggattgcttaaggctaggaattcgagaccagcctggcaacatagtgagaccctgtctctacacaaaatgtaaaaattaccctggtgctgtggcacggacctatagtcccagctattcgggatgatgaggcaggaggattgattgagcccgggagatcaaggctacagtgagccgtgttcatgccactgcaactgcagcctaggcgacagagcaagaccctgtcccatgggggaaaacaaaaaggatagaacatctgcaagtcccaaacagt

SEQ ID NO: 553099 - DNA, 587 bp, Homo sapiens
gctgcgcaagtgggtcgacaggacgctacttcccctatcatagaagagcttatcacctttcatgatcacgccctgataatcattttccttatctgcttcctagtcctgtatgcccttttcctaacactcacaacctatcctgcccgccatcatcctagaccttatagcccttccatccctacgcatcctttacataacagacgaggtcaacaatccctcccttaccatcaaatgaattggccaccaatggtactgaacctacgagtacaccgactacggcggactaattcttcaactcctacatacttgcccgatttttcctagaaccaggcgacctgctacttcttgacgtttacaatccagtagtactcccgatagaaggccccattcttataagtattacatcacaagtcgcccagcactaatgagctgaaccaatatttggcttaacaacagattcatttaccgggccttttaactaatcccctttaactcgtacatcaccgattgttatactttgggcaaagctctctatttcttttctgctctctctcttttatctcaccctcccctagataatatataaa

SEQ ID NO: 553100 - DNA, 173 bp, Homo sapiens
ctttgttcgatttttcagtgcttttctctggagctttgtcgacaaatttttcaactacttttacttcaggctctttctttgatgctgcagtagcttttgctactttatcgctggcggctgatttctcttctgcttgttcagcagtttcttcttgtgccttttctctctggtat

SEQ ID NO: 553101 - DNA, 543 bp, Homo sapiens
  misc_feature (11)..(11): n is a, c, g, or t
  misc_feature (13)..(13): n is a, c, g, or t
  misc_feature (15)..(15): n is a, c, g, or t
  misc_feature (17)..(18): n is a, c, g, or t
aattcgcggcngngncnncggtccttctcttaccgccatcttggctcctgtggaggcctgctgggaacgggacttctaaaaggaactatgtctggaaggctgtggtccaaggccatttttgctggctataagcggggtctccggaaccaaagggagcacacagctcttcttaaaattgaaggtgtttacgcccgagatgaaacagaattctatttgggcaagagatgcgcttatgtatataaagcaaagaacaacacagtcactcctggcggcaaaccaaacaaaaccagagtcatctggggaaaagtaactcgggcccatggaaacagtggcatggttcgtgccaaattccgaagcaatcttcctgctaaggccattggacacagaatccgagtgatgctgtacccctcaaggatttaaactaacgaaaaatcaataaataaatgtggatttgtgctcttgtatttttaagtggattaaaaaaacttactacctgctacctgggttaggtctactgggttagtctacctgggtaccgagcca

SEQ ID NO: 553102 - DNA, 147 bp, Homo sapiens
ctactggcagagctggggcgagatgcagaacatcacctaccacgcgggacgcggtgtggagctgcggggcatggcaaaagttcaccaactacagcgtccagagtgctggccatacacccaagactgggtaacggcgctacgcagaca

SEQ ID NO: 553103 - DNA, 783 bp, Homo sapiens
  misc_feature (11)..(11): n is a, c, g, or t
  misc_feature (13)..(13): n is a, c, g, or t
  misc_feature (15)..(15): n is a, c, g, or t
  misc_feature (17)..(18): n is a, c, g, or t
  misc_feature (517)..(517): n is a, c, g, or t
  misc_feature (530)..(530): n is a, c, g, or t
  misc_feature (563)..(563): n is a, c, g, or t
  misc_feature (584)..(584): n is a, c, g, or t
  misc_feature (602)..(602): n is a, c, g, or t
  misc_feature (621)..(621): n is a, c, g, or t
  misc_feature (657)..(657): n is a, c, g, or t
  misc_feature (690)..(690): n is a, c, g, or t
  misc_feature (695)..(695): n is a, c, g, or t
  misc_feature (721)..(721): n is a, c, g, or t
  misc_feature (725)..(725): n is a, c, g, or t
aattcgcggcngngncnncggtccttctcttaccgccatcttggctcctgtggaggcctgctgggaacgggacttctaaaaggaactatgtctggaaggctgtggtccaaggccatttttgctggctataagcggggtctccggaaccaaagggagcacacagctcttcttaaaattgaaggtgtttacgcccgagatgaaacagaattctatttgggcaagagatgcgcttatgtatataaagcaaagaacaacacagtcactcctggcggcaaaccaaacaaaaccagagtcatctggggaaaagtaactcgggcccatggaaacagtggcatggttcgtgccaaattccgaagcaatcttcctgctaaggccattggacacagaatccgagtgatgctgtacccctcaaggatttaaactaacgaaaaatcaataaataaatgtggatttgtgctcttgtaaaaaaaaaaaaaaaaaaatgctcaaaatggcagcgctggaggaaaaattcacnttgtcttcggtantcctgagcgccgggcctgaaggactcctaggcntggagcaaagcgacaaaacanaccattttctattgacanacagcggcaggacagtcancctctataaggtttctgatcaaaaacccttgggganctggtcagtgaaacaaggtcaaattataacatntccanctgtgtgcaactttcaaactggggantatntttttgtacccaataataaggttttaaaaatatggaataatgaaaatgttaacctgga

SEQ ID NO: 553104 - DNA, 322 bp, Homo sapiens
gctgactccgcacttttccactgtatgatcttgggcaagtcacttcacctctctgtgccttggtttcctcatttataaaatgtggataacaggccgggcgcagtggctcgcgcctgtggtcccagccctttgggaggccgaggcaggtggatcacaagatcaggggattgagaccatcctggctaacatggtgaaaccccatctctgctgaaaatacaaaaagttagccgggtgtggtggtgggcacctgcgtcccgtattgggaggtggaagatggtatggagaagggagtgaccggataggatgatcagctggaaaagga

SEQ ID NO: 553105 - DNA, 169 bp, Homo sapiens
aaaatggattaaaaactttttttccctttgtttggcccttccccccatttttttttaacctgttaaactttaaagccatagcttttgttttatattggggcatataatgggttaacttagttccccaataaatcaatcctgtttttccccttttcgatgttggttatta

SEQ ID NO: 553106 - DNA, 691 bp, Homo sapiens
ggctagaggttcccccagaatcacactcaaagcgcaggctggtctccttacagcatgctctgttgtgacagggttcagagaggcaggcgtgcatcagcgtgcaaaaaccaggaaggcagatcagagagggatgcctgacagcggtacctccccacacccacctccaaccgaatcccacaccacagccactagtgcaagcatatttcaaaaaccaaaagcaagcgtgtgatagaaccctgctgtgtctaggaaagaaaggaagtcatctttctcgctgagctgtctctaaccacattccaagacatctcagagctggggtcatttcatctcccgctgcctcctatacgaatcagcatcacccaaaaaactttagagacttgaaagttacaaaggcttatagaatggttgggataaggcctatcttgggaagctattttcacttttttttccttaaacaagtccttaagtatatataataaaagctgagtacagaaaacattagacaaagggctctcattcatctaggaccacttaccaatttcacagttgggtcctgcatacccctcagggcaggaccactgatattggtcagggcctgtgtagctacacgttccccgttgagacaggctgatgcgtcccacagtattgagactgccaagatctggagtcacagagagctgtgaaatgcgac

SEQ ID NO: 553107 - DNA, 494 bp, Homo sapiens
  misc_feature (11)..(11): n is a, c, g, or t
  misc_feature (13)..(13): n is a, c, g, or t
  misc_feature (15)..(15): n is a, c, g, or t
  misc_feature (17)..(18): n is a, c, g, or t
  misc_feature (433)..(433): n is a, c, g, or t
  misc_feature (441)..(441): n is a, c, g, or t
aattcgcggcngngncnncggtccttctcttaccgccatcttggctcctgtggaggcctgctgggaacgggacttctaaaaggaactatgtctggaaggctgtggtccaaggccatttttgctggctataagcggggtctccggaaccaaagggagcacacagctcttcttaaaattgaaggtgtttacgcccgagatgaaacagaattctatttgggcaagagatgcgcttatgtatataaagcaaagaacaacacagtcactcctggcggcaaaccaaacaaaaccagagtcatctggggaaaagtaactcgggcccatggaaacagtggcatggttcgtgccaaattccgaagcaatcttcctgctaaggccattggacacagaatccgagtgatgctgtacccctcaaggatttaaactaacgaaaaancaataaanatgtggatgcggcagaaaacacctgtaaaacgacggggggtggaaatttgagg

SEQ ID NO: 553108 - DNA, 216 bp, Homo sapiens
ctgctggggcttggcactgaacatgtctcttcctaactccatgttcagtaacttttttgaaagggtagctggaagtcagctaccgtggaagtatttacaccacagaaattggcaacaacggcaattcaggactcctcagccctagattgcgaggccaggccccagccccactgagaagtctgtacagcccggggccctcctgccaagccccagctg

SEQ ID NO: 553109 - DNA, 1125 bp, Homo sapiens
aggcacagacaccaaggacagagactgctgtgcttaggccgacctccgccacggtgttaccaacatgaagcgtgctcgcagtcaaactgtgctactcctcaccatctgcagtcttgaaggagctttggttcggaacacaggcaaaggagccattgtgtgtgagagcctggttttctcagtacttccagacctgtgactcgatctatggcaaggcacctgatggacgacaggtcatagagtcccagatgcttcaggccgaggtccaagtcttactttgaaaagtcgaaaggagcagttgatacccctgatcaagaaggctggaacggaactggttcaacttcttagaggctatttctgttggaacttggaacacatgactgccatccagtgaagtagtccgagacgcattgtcttccaacgcgccagctggccgtctagaaaaccatactggccagtcctagagctccgtgtccctatccaagttctttgctaacaataagatggcatgaatgaagtacgaataaaaagcacaaagaaagccatgaaaagcttgtgttattggcccattgtgaggacccttgcgaatagaagctatgggacacaacctgtgatctttggatgccccgtgggcccccatggagcttaaggtggaccctgtcggtcctaatagtgaggtatcccctgaggagaaactccagtgtggccttagcactgaagtgcacggggaaatgtctctacccccagtataagaaatgcggcgcacgcgggcggtgaaccaagaaagcgttgatatcagggacagaatttgcgaacagtggaggccctggggagggcgccctacggtggtcttcttcgtcaaagggggaggcagctcacgacgagagagccgggcgagataaatcaggaagtttccgcccgggcagcgggggaggactgcatggaagcggacacccctgtgcggagcgtgaataaggggcaacaggaccaaaaggcggcgacccccgacaggagcaagagggcagagaggcggtcagaggtagccaaacaaaggcagtgggaccaaaatgagaagacaggggtgccggcatcgcagacaagcaaacagggacagagaagaagaacaaa

SEQ ID NO: 553110 - DNA, 501 bp, Homo sapiens
  misc_feature (11)..(11): n is a, c, g, or t
  misc_feature (13)..(13): n is a, c, g, or t
  misc_feature (15)..(15): n is a, c, g, or t
  misc_feature (17)..(18): n is a, c, g, or t
  misc_feature (436)..(436): n is a, c, g, or t
  misc_feature (442)..(442): n is a, c, g, or t
aattcgcggcngngncnncggtccttctcttaccgccatcttggctcctgtggaggcctgctgggaacgggacttctaaaaggaactatgtctggaaggctgtggtccaaggccatttttgctggctataagcggggtctccggaaccaaagggagcacacagctcttcttaaaattgaaggtgtttacgcccgagatgaaacagaattctatttgggcaagagatgcgcttatgtatataaagcaaagaacaacacagtcactcctggcggcaaaccaaacaaaaccagagtcatctggggaaaagtaactcgggcccatggaaacagtggcatggttcgtgccaaattccgaagcaatcttcctgctaaggccattggacacagaatccgagtgatgctgtacccctcaaggatttaaactagttaaaccccantaggancaagaggcttcgcccgaaactcctccctctttttgtcaaagcgtgaataaaatagagca

SEQ ID NO: 553111 - DNA, 265 bp, Homo sapiens
agaggggcgggtgcccgccccagaaaacaagccagggaagaggtggagatcctggcacggcccagacgccgtggctcagccttgagtgcggccacagacacatcgtaacaggagcacccaacgtcatttttccatcaagaagaagaaggcgatatcaccgtattggggaagggagtgtttgagtggggagatgttgagctgtgacgtaagcctgttatttggaaacacggaggtaaatacaaaaaccaaacacgcccagcaaaac

SEQ ID NO: 553112 - DNA, 764 bp, Homo sapiens
cttaggtctcgatcgttactccaaagcagagagaaagcattatagtgaggaatgacacgggctctcctcttaccgccatcttggctcctgtggaggcctgctgggaacgggacttctaaaaggaactatgtctggaaggctgtggtccaaggccatttttgctggctataagcggggtctccggaaccaaagggagcacacagctcttcttaaaattgaaggtgtttacgcccgagatgaaacagaattctatttgggcaagagatgcgcttatgtatataaagcaaagaacaacacagtcactcctggcggcaaaccaaacaaaaccagagtcatctggggaaaagtaactcgggcccatggaaacagtggcatggttcgtgccaaattccgaagcaatcttcctgctaaggccattggacacagaatccgagtgatgctgtacccctcaaggatttaaactaacgaaaaatcaataaataaatgtggatttgtgctcttgtatttttaagtggattaaaaaacttactaccttaaaaaagaaaaaaaaggggggggggcggcccttttgtttatttgttttagtttttttttgtttatgatatgtttgttttttattgttatgtttttattatactattgtatattagttttttatattattgtatttagttgatgagtgatgtaattagatagagtggagagaggaggagagaatgaagataaaagagaaaatttcttagagagagaacgaggagaaggag

SEQ ID NO: 553113 - DNA, 328 bp, Homo sapiens
agcctcataagttacacgtcattccctactaaggccagacctcctggtatctgcccgggctccctcatcccacctccatccggagttgcccccgatgcatgtccagaataagcaggaatgctcggtggtgagaagagttaagtccggctcagactgaataagaagagattaaatttgccttaaaaattaactggcagtggctttgctgaccggtctgaaaacaactgttcccatcctcttgaccgcaatttccttgtgacacagagaagggcaaaagtctgcacccagcattgacggagggagtatttcaggattcacttcaggggct

SEQ ID NO: 553114 - DNA, 1305 bp, Homo sapiens
  misc_feature (11)..(11): n is a, c, g, or t
  misc_feature (13)..(13): n is a, c, g, or t
  misc_feature (15)..(15): n is a, c, g, or t
  misc_feature (17)..(18): n is a, c, g, or t
aattcgcggcngngncnncggtccttctcttaccgccatcttggctcctgtggaggcctgctgggaacgggacttctaaaaggaactatgtctggaaggctgtggtccaaggccatttttgctggctataagcggggtctccggaaccaaagggagcacacagctcttcttaaaattgaaggtgtttacgcccgagatgaaacagaattctatttgggcaagagatgcgcttatgtatataaagcaaagaacaacacagtcactcctggcggcaaaccaaacaaaaccagagtcatctggggaaaagtaactcgggcccatggaaacagtggcatggttcgtgccaaattccgaagcaatcttcctgctaaggccattggacacagaatccgagtggtgagtatggtttttagcaaaatggacgtctgatgaatcagactaggttcaaggtgttgtgctttgacttctgaggacttctgtggttgtgaaattgacaccagtaaattatgctgcaaaatttgtgtattgcagaacactggagagatagtaattggaagaattaggtgtttggttgtttgttttttgtttttttttttggggggagacagggtctcactttgtcacccaggctggggtgcagtggcataatcacagcttattgcagcctcgacctcctgggttcaagcaatccttccacctcagccccccaagtagctgggaccataggcgtgtgccaccacacccagctaatttttggggtttttgttgtgtttttttgagacaaggtctcactttgtcacgcaggctggagtgcagtggcatgatctcagcttgctgctacctttgcctccaaagttcatgtgattcttgtgcctcagcctcccgagtagctggaattacaggcgtatataccaccatgcccagataattttttgtatttttgtattttgtttctccatgttgcccaggctggtcttgaactcctgagcccaagtgatctgcccaccttggcctcccagagtgctgggattatatgcttgagccaccacagccagccttgaataaatagttttctggtgaagatatttattgggcactgaagtaattgttagaaagcaacaattcaacagttacgcctggcataattgttaatattttgccatttccatcatgtcagtcttgttagaacaggtgttagtagctttattttgtacatgaagaaaacagactctcatgttcctaggtctcaggtctttggtgccagccttggactctaaatttttctcaattttctcctgtaatttt

SEQ ID NO: 553115 - DNA, 880 bp, Homo sapiens
ggttagccaagatggcggtagcgatcgctgcagcgagggtctggcggtaaaccgtggtttgagccaggctgccctcctgctgctgcggcaggcctggggctcggggactgatagatcttcacccccccaaggcaagcagcaagccagttttcatctctgggatgacaagccccagttcccaggggcctcggcggagttaaatacgataccgtgggcaattcatccagccccaacgtcatctctggaatccccatctaccgcgtcatgaaccgggaatggccaggatcatccaaccccaagcgaggaaccccaacttgcgaaggcagaaggtgctgaagctcctacaatgagcttgacattgtttaaccaaccatggaccgcatcctctatgagtctcagccggcaggcccggaatctccttcatagatgaccaactatggtgaggagggcaccgcacgtgggagatttgccgccgccttgacacaccacggcactggtgtttcgacaagtaccgggcagccaaggttgtgctgatgtatccggggacttaccccccgtggcacttatttcaagtggcccagtgctatgggacaccttcatgtgtctttggcgcaagggggcgccagattgcctgtcccctacggttgcgagggaaaccgccactttcgtcactattcctctccattgccacgcagtctcctcagggggggggcggattacgcagacaagcggtgcactgccagcggtcacgtcatggtacctcggacagggggcgccattaggggacccccatgccggttacatttcgtgccacttgttggccattctttttttggcggaaaggatacggttccggcactttacggtttcggatcgcttc

SEQ ID NO: 553116 - DNA, 450 bp, Homo sapiens
  misc_feature (11)..(11): n is a, c, g, or t
  misc_feature (13)..(13): n is a, c, g, or t
  misc_feature (15)..(15): n is a, c, g, or t
  misc_feature (17)..(18): n is a, c, g, or t
aattcgcggcngngncnncggtccttctcttaccgccatcttggctcctgtggaggcctgctgggaacgggacttctaaaaggaactatgtctggaaggctgtggtccaaggccatttttgctggctataagcggggtctccggaaccaaagggagcacacagctcttcttaaaattgaaggtgtttacgcccgagatgaaacagaattctatttgggcaagagatgcgcttatgtatataaagcaaagaacaacacagtcactcctggcggcaaaccaaacaaaaccagagtcatctggggaaaagtaactcgggcccatggaaacagtggcatggttcgtgccaaattccgaagcaatcttcctgctaaggccattggacacagaatccgagtgattctaagcccgcaagattgggggtcctctagagtgacctcagcacaaggtgcc

SEQ ID NO: 553117 - DNA, 913 bp, Homo sapiens
  misc_feature (7)..(8): n is a, c, g, or t
gcggccnnctactactactaaattcgcggccgcgtcgactcttggctcctgtggatttttttttacaagagcacaaatccacatttatttattgatttttcgttagtttaaatccttgaggggtacagcatcactcggattctgtgtccaatggccttagcaggaagattgcttcggaatttggcacgaaccatgccactgtttccatgggcccgagttacttttccccagatgactctggttttgtttggtttgccgccaggagtgactgtgttgttctttgctttatatacataagcgcatctcttaccgccatctggctcctgtggaggcctgctgggaacgggacttctaaaaggaactatgtctggaaggctgtggtccaaggccatttttgctggctataagcggggtctccggaaccaaagggagcacacagctcttcttaaaattgaaggtgtttacgcccgagatgaaacagaattctatttgggcaagagatgcgcttatgtatataaagcaaagaactgggattaaccccttggtgtcttcagtctttcttccggccaggacacacactccttggccccagtgcctgcgctagtcatcccgtgatcacttcatggcatttcccctccctttccagtctttgttccatggtcacctcagtgagaccttccttggctatttaaaatggcagcaacacagtcactcctggcggcaaaccaaacaaaaccagagtcatctggggaaaagtaactcgggcccatggaaacagtggcatggttcgtgccaaattccgaagcaatcttcctgctaaggccattggacacagaatccgagtgatgctgtacccctcaaggatttaaactaacgaaaaatcaataaataaatgtggatttgtgctcttgta

SEQ ID NO: 553118 - DNA, 1258 bp, Homo sapiens
  misc_feature (7)..(8): n is a, c, g, or t
gcggccnnctactactactaaattcgcggccgcgtcgactcttggctcctgtggatttttttttacaagagcacaaatccacatttatttattgatttttcgttagtttaaatccttgaggggtacagcatcactcggattctgtgtccaatggccttagcaggaagattgcttcggaatttggcacgaaccatgccactgtttccatgggcccgagttacttttccccagatgactctggttttgtttggtttgccgccaggagtgactgtgttgttctttgctttatatacataagcgcatctcttaccgccatctggctcctgtggaggcctgctgggaacgggacttctaaaaggaactatgtctggaaggctgtggtccaaggccatttttgctggctataagcggggtctccggaaccaaagggagcacacagctcttcttaaaattgaaggtgtttacgcccgagatgaaacagaattctatttgggcaagagatgcgcttatgtatataaagcaaagaactgggattaaccccttggtgtcttcagtctttcttccggccaggacacacactccttggccccagtgcctgcgctagtcatcccgtgatcacttcatggcatttcccctccctttccagtctttgttccatggtcacctcagtgagaccttccttggctatttaaaatggcagcaggtaattcctcctttctgtacacacaaatatcctcacacttgtccttttttgctattttttcaatattgcctctgttatcatctgacctatgtattttccttaaacttacttggttatcatgtgaaagatttttgttttatagctgctgtattttacagaagggcctggcatacaatagttactcgataagtatctgttgaatgaatggtgttctaggcatttaaagtttctcaggtgatgaagtgggtaaccagggttgagagccactcgtgtagaggtcaccttgaatttgtatccaactatatcagcttgtattcctcttctttccctttttaaaatcagcaacacagtcactcctggcggcaaaccaaacaaaaccagagtcatctggggaaaagtaactcgggcccatggaaacagtggcatggttcgtgccaaattccgaagcaatcttcctgctaaggccattggacacagaatccgagtgatgctgtacccctcaaggatttaaactaacgaaaaatcaataaataaatgtggatttgtgctcttgta

SEQ ID NO: 553119 - DNA, 214 bp, Homo sapiens
gtatcgatgggcagtggggcgcatatgcatcctaggctatatatcggagtatacgtagcggtaagtaacaaccggacctctagaactatagctagcatgcgcaaattaaagcgctgatatcgatcgcgcgcagatctgtcatgatgatcattgcaattggatccatatatagggccggggttataattacctcaggtcgacgtcccttggccat

SEQ ID NO: 553120 - DNA, 1292 bp, Homo sapiens
  misc_feature (7)..(8): n is a, c, g, or t
gcggccnnctactactactaaattcgcggccgcgtcgactcttggctcctgtggatttttttttacaagagcacaaatccacatttatttattgatttttcgttagtttaaatccttgaggggtacagcatcactcggattctgtgtccaatggccttagcaggaagattgcttcggaatttggcacgaaccatgccactgtttccatgggcccgagttacttttccccagatgactctggttttgtttggtttgccgccaggagtgactgtgttgttctttgctttatatacataagcgcatctcttaccgccatctggctcctgtggaggcctgctgggaacgggacttctaaaaggaactatgtctggaaggctgtggtccaaggccatttttgctggctataagcggggtctccggaaccaaagggagcacacagctcttcttaaaattgaaggtgtttacgcccgagatgaaacagaattctatttgggcaagagatgcgcttatgtatataaagcaaagaactgggattaaccccttggtgtcttcagtctttcttccggccaggacacacactccttggccccagtgcctgcgctagtcatcccgtgatcacttcatggcatttcccctccctttccagtctttgttccatggtcacctcagtgagaccttccttggctatttaaaatggcagcaggtaattcctcctttctgtacacacaaatatcctcacacttgtccttttttgctattttttcaatattgcctctgttatcatctgacctatgtattttccttaaacttacttggttatcatgtgaaagatttttgttttatagctgctgtattttacagaagggcctggcatacaatagttactcgataagtatctgttgaatgaatggtgttctaggcatttaaagtttctcaggtgatgaagtgggtaaccagggttgagagccactcgtgtagaggtcaccttgaatttgtatccaactatatcagcttgtattcctcttctttccctttttaaaatcagcaacacagtcactcctggcggcaaaccaaacaaaaccagagtcatctggggaaaagtaactcgggcccatggaaacagtggcatggttcgtgccaaattccgaagcaatcttcctgctaaggccattggacacagaatccgagtgatgctgtacccctcaaggatttaaactaacgaaaaatcaataaataaatgtggatttgtgctcttgtatttttaagtggattaaaaaacttactaccttaaa

SEQ ID NO: 553121 - DNA, 810 bp, Homo sapiens
  misc_feature (449)..(449): n is a, c, g, or t
agcggacggcattgcactgagccatccggacgaggattctctcagtctagctccagactctcgcctgcgccccactccccgcgtccgcgtcctagccgatccatggccgggccgccgtgcggcgctccgctgcgtccgtgctggccagtccgtggccgtggtcccttgtgcctgtgatgccgcctgtgggacggctctcagtcccctggtcgagccgctctgcggccgtgtgtgggatggccccctagtgtgacgctcgagtcgctgggacgtgaggcgacgggatgtagcgagtcggttgcaatctggagcatttgcacgtcgagcagaaagtagcaagcgaaagaccacgtcaaacgagctgtgtaaccagaagtccgcggcgctgcaaggtggtgacgcgcccgtaagcaagatcgtagactggggggtggatactgactttgctntgggagcgtgtggatgacttgggggcgcgatagacgagcgattggttacccaaaagaagcccaagtccccaaatctttggggagctagaaactggacaccgctttaacccatggaatcccaggcccaactatcttgcagaaacggcgagattgcgagttctggccttctttgccccagggaatcagtactgcctttgtggcccttttgggcaaagagggcaacaaagtagacccctgtggtccagagaatattccgaaaccttagtgtcacagggagctgccctaagggggcgtcctggttactcatgaaggcctgcgcccttgttgcccttattcaaggcttctataattcaccaaccag

SEQ ID NO: 553122 - DNA, 207 bp, Homo sapiens
tcctgtatagggcacagaaatgacaaaagcaaaatatattagttacatatatattagaagataaatctgttaagaaataaggtaacggctgggcgcggtggctcacgcctgtaatcctagcactttgggaggccgaggcaggtggattgcctgagctcaggagttcaagaccagcctgggcaacatagaccttatctctatagaatt

SEQ ID NO: 553123 - DNA, 625 bp, Homo sapiens
gtttacacaacaccaccccatcatactctttcacccacagcaccaatcctacctccatcgctaaccccacgccagcccggaccgccggcgggtggtgtccgcgcccacgggcccctggacccagcctcagccgccgatggctcccgcggcctggagcccgccccgacgggcagcctgaggaggccactgggcccccacgcccctccggccgcaccctgcgccgaacccacacgttcaacagcggcgaggccggcctggggaccgacaacgaggatgcacgcccgggcgggcacagacttggaccaactcctcccctatgggggggcggacaggactgcgcccccacgtgccctaggccagggggcccacccgatgcccttggcagtgccagcccaccgggaaccaggagcgagagacggtgccagaacgccaggggcccgagggcaacctccgagtgggtgcatcaagtcaccccactcgagatcaacccgcggagttggaggggggacaccacatacacgacacaaaggaaagcacacacaacagaatcgacatacacaccatatccatggagccgcaagacagctgacaacgggttaggggagtggagtgggcgggagcgact

SEQ ID NO: 553124 - DNA, 309 bp, Homo sapiens
  misc_feature (240)..(240): n is a, c, g, or t
cccccccccccccccccgggttttttttaaaaaaaaaaacccccgggggggggggggccccccccccccctttttttttttaaaagggcggggcccctaaaaaaaaaaaaaaaaaggggggttttggggaaaaacccacgaaaaaaaatgttttaaaccctttttcccccccaccacaggggggattcccccctttggggcctttctccccttaaaaagaaaaattttaaaaatgttccnttttttaagttcccctggaaagcttaaaattttgcctttgaaaaataaaatgaagccctacttgtgggc

SEQ ID NO: 553125 - DNA, 168 bp, Homo sapiens
ctcgcggactcagtgtcatgttacgaagagatataactaagcactgacacttgttgatacagtgaaaaaacactgcaattcccttttaccatttgagctaattacgtttatctacctggatcaaatatgatcagctgaatttcatgggaacaaacatcccagacccag

SEQ ID NO: 553126 - DNA, 426 bp, Homo sapiens
  misc_feature (41)..(41): n is a, c, g, or t
tcccaaaccgtcataaggtaaaaaatgtttgtggttcaaancattgccctttggagcaaaaactgaccccggatcggaaatttactttgcccacccaaatggcctatgttcaccgagcattttaagttcctctgagctggccgggtgtggtggctcacaactgtgatccccaacattttgggaggctgaggtgggaacattgcttgagccccaggggttctagaccagactgagtagcatggtgagaccctgtctctgctgggaatgtaaatattagccaggcatggtggcacatacctgtagtcccagctattgggaggctgttgggaggacagtttgagagcctgggaggtcagggctgcattgagccgtgattacaccactgcactccatcctgggtgacaaagtgagaccctgttttataaa

SEQ ID NO: 553127 - DNA, 669 bp, Homo sapiens
gcccaacttgggaaacccaagttgcgcagctccgttgcgcattgactgtccacggctcgcccggctcgtccgtactcgccctccgccagtccagatagatagcagcgcagagcagctagcttgccgtgttctccctgtatgttcggatacattagtatgaccatttaggtgttgctgtctccactactccattgttctatgagaaaatcatagggcggagtcgaggcgcatgatatccagtggcaggctttgacagaaattgggatcacctttaaagtaacgcttgatcttggatgcctcagctgtgagaccttacaaagccggattccggtatagttgcctctatctcgtcttgttcgctgacttaaagggtgcccctggtctccagattttctctccactctcctgggactgttgcctgaaatcacgtatcctggttcgggttcaaggccccagatgttccccctatgtgccactgtgaagtttctaggggcttggcacagctggcctgcatcgcatatctcatcacctttcctctgaatacttgctaaagtccggttacagtatcctaaggcagaaatgtcaggggccagtgcgcgctacagccagcgcccagtaccgcggtgtgatgggcaccattctgaccatggtgcgtactgagggcccccg

SEQ ID NO: 553128 - DNA, 299 bp, Homo sapiens
  misc_feature (94)..(94): n is a, c, g, or t
acgtgactcggactaccccgatgcatacaccacatgaaacatcctatcatctgtaggctcgttcgttacatggtccatcatagaattctcactngtgatatataaactcgagacccaacacattaatacagttcttcaatatatctactcagtcttcctcaattaccactactatatcttatgttaccgtctaacaatcctattccacactgttcatcgcgctcgagagggcgtagagaattatatcctctcttgctcatacagttgatagatacgcccgagcgcagttccactatagg

SEQ ID NO: 553129 - DNA, 194 bp, Homo sapiens
ctccttccaccagccctgctagagctacctgtggagcaacctgctcatgatacatcaaacatgtgagacagcactccaaagtagaattataaagaagatcatgtccctgttaacattattataaccctacattttgtgcattaagtgtaagtgtataagcctatcaatattaaaaagcgagcgagcagattttg

SEQ ID NO: 553130 - DNA, 376 bp, Homo sapiens
taaaaaaaaaaaaaaaaaaacccggttggggccggggccccttttacgggtccctggggattttgggcccttttttttgggctttaaattttttcccccccttgggggaccaaaggacccttttccccccgaagggggtttaactggggggggccaagggggggggaaccccccaaaccccggtttttttttttggccggcccccctgggaacccctttaaacccccctagggtttgggttttgggcccccaccccttttttcccccccaaaaggggccccgggttttttccaaaagggtttgcccggttgcccccccctttttttttgggttttttttaacccctgggcccaaaaaaagggccccccttttttta

SEQ ID NO: 553131 - DNA, 163 bp, Homo sapiens
cgttaccgggtgagagtacggaatagtgagtcatgagtgctgatggttgggtctgagatgaaaccatagggaaatgaagctgtcctcttgccctgagtcagttcctgagtggaggccacaagatcagataagccagtttatcaatctgtgtggtgccggctga

SEQ ID NO: 553132 - DNA, 940 bp, Homo sapiens
  misc_feature (263)..(263): n is a, c, g, or t
  misc_feature (397)..(397): n is a, c, g, or t
  misc_feature (413)..(414): n is a, c, g, or t
  misc_feature (419)..(421): n is a, c, g, or t
  misc_feature (428)..(429): n is a, c, g, or t
  misc_feature (445)..(445): n is a, c, g, or t
  misc_feature (480)..(480): n is a, c, g, or t
  misc_feature (483)..(483): n is a, c, g, or t
  misc_feature (486)..(486): n is a, c, g, or t
agcgtcggtctcattgaactcgcctgcagctcttgggttttttgtggcttccttcgttattggagccaggcctacaccccagcaaccatgtccaagggacctgcagttggtattgatcttggcaccacctactcttgtgtgggtgttttccagcacggaaaagtcgaagataattgccaatgatcagggtaaaccgaaccacatccaagctatgtcgcctttacggacactgaacggttgatcggtgatgccgcaaagaatcnagttgcaatgaaccccaccaacacagtttttgatgccaaacgtctgattggacgcagatttgatgatgctgttgtccagtctgatatgaaacattggccctttatggtggtgaatgatgctggcaggcccaagntccaagtagaatacanngggannnagaccannagcttctatccagagnaggtgtcttctatggttctgactaagatgaatganatngcngaagcctaccttgggaacgactgtctaccaatgctgtggtcacagtgccagcttactttaatgactctcagcgtcaggctaccaagagatgctggaactattgctggtctccatgtacttagcacattattagtgagccaactgctgctgctattgcttacggcttagacggaaaaggtttggagcagaaagaaacgtgctcatctttgacctggggaggtgggcactttttgatgttgtcaatcctcactattgagggatggaaatcctttgagggtccaaggtcttacagcttgtgaaacaccccaacttggggtgagaagaaagaatttgaacaaccgaaatgtccaacaatttattgctgaatttaagccccaagcataagaaggaacctcagtggaaaccaagaactgtaaaacgcctccctatgctgtgaacgtggaacgtacctctc

SEQ ID NO: 553133 - DNA, 122 bp, Homo sapiens
cttctagctggatactccgaacgccaacctcaggcagccctggctgtggtcctgagtgaaatgacatggtgcctggcccccgtctctgccctagtgtttacttactacagcattctcagtgg

SEQ ID NO: 553134 - DNA, 195 bp, Homo sapiens
  misc_feature (142)..(143): n is a, c, g, or t
agcgtcggtctcattgaactcgcctgcagctcttgggttttttgtggcttccttcgttattggagccaggcctacaccccagcaaccatgtccaagggacctgcagttggtattgatcttggcaccacctactcttgtgttnngatcagggaaccgaaccactccaagctatgtcgccttaagaccgggttaatc

SEQ ID NO: 553135 - DNA, 856 bp, Homo sapiens
gaggaggcttggataccggagcgcgagcagtatgctgggtgggcaccatggctggtatcaccaccatcgaggcgtgtgaagctgcaagatccagtgttctgcaggcaggaggtagatgatgcagaggagctgagctgagcgctctccagcgagaagtcgtagggagaaaggcgggccgggaacacgctgagtgctgacggtggctcgttgaaccgtaggatccacgctggttgagagaagagctggcaccgtgctcaggagctcctggtcattgcccctgtgtaaagcgtggaatgaacgctgaataaagctgctgatgagagtgagagaggtatgaaggttattgatatccgggcctttgtcgatgagcgaacagatggtacctccaggaaatccaactcgaaagatgctaagcacattgcaggaagaggcagatcggaaatgtatgaatgaggtggtctggtaagtatggtgatcatttgagggatgaccttggaacagctgagagtgaacgatgctgagtctggcagtagtcacgtttgctagagattggatgagcagattagactgatggaccatgaaactgaagtgttgagtgctgctgaagagaagtatctcatccgacggataggtattagggaagaactccagattcttagtgatgaactccaggaggctgagacccgtgctgagttaggctgaaagatccggaggcagctggacagacacttgtgacctggacgattactgaatgcgccaaggggccctctgcccaggtctgggcaacctgtgctataagttaggccccccctctggggccccttacgaccggtgggcctgggcctcggggcacgcc

SEQ ID NO: 553136 - DNA, 385 bp, Homo sapiens
gacagtcagtactggttgataaaaagggctctgaaacgaagcttttaagtagatttacggaatcgctctcacatctgctcatctgcaaatcattgtattctcttgtatatggtcttgcattgcctcagacatcaatgagcatattctgatgtactctctggatctgaactcatcttcacaggtaggactcactgtggcgtcactatcttattcgatagcgctgattgcttcgcactgaccttgctcaggttcgcatgtagttaatcgtggcagtctactgttcagatggagctcagtattcagtgcgagacgaaaggcaggcatatagctaccaatatgcatgttacattgaatgtatacctagtgagttcagtagggcgtgcct

SEQ ID NO: 553137 - DNA, 197 bp, Homo sapiens
tacaactcttcatcatgctgcacagatatacattgtgtggactctgatgggaagcacagcacctcgatctgcatatactgcacagtaacttgagttttagaatcaggcgtaaccaggcaaagtgccattacggcgtagttactgccagattatggcagtttagcattgtgtgccaagacaatggttaaaggcataca

SEQ ID NO: 553138 - DNA, 175 bp, Homo sapiens
cccccccactattaaccttatgcctgaagccaatttccttttttcccttcccaaatggaaaaatatcactctcctacttacaggactcaacatactagtggacagtcttatactccctctacatatttaccacaccacattgatgaatacctgattagggaagtaagtacactga

SEQ ID NO: 553139 - DNA, 570 bp, Homo sapiens
cggccctggaatagatactcgcccttattgtccctctcgtagtagttatgcgcatcgccatattccacttcaccggcggccttctgagtacgttttctgcctcagctcgatctcgattgtgggctgctcgtagtgcacggccgccactaacttgtggtgcagccgatagcgcttgcggaagagtcgcctcagttcggcgtccaggtctgattcgttgaaggctccgtcggttgggcgctggcgcagttcattgaggatgttgtgggtgctcaccaggtcatcgcagcgtaggctcaggtcgcccttgtcgtgtcgctcacgcccactgagttcacgcacttgcacaccgacgtctggttgtactggcgcgcttcgtagcgtccctcggggtcgcagccgggttcgtagagttcatcgttgttccacgagcgcgtgctcattttgtgcacccagcgtgcggtcgttcttgggcgctcatgtgcgccttgagcagcagacacttggaggtcagcgtggagtattcgacctccatgcccgagcccagcttgcggcatctggtcagcggtccta

SEQ ID NO: 553140 - DNA, 856 bp, Homo sapiens
gctgtgtcacgtaggcgtagagctacatccatatgggaattggagccgggaacttggattgccgccgaaacgagagcagtgaaaatctttaatataagcagatgaatgctgcgaatttgaatgaggcactcctctgttatgctggctcagcttgtgcctgtcgctagtgagagatatgtgtgatgtcaggagtcaaaactactggtaaaggtttggcaaggtgtgatgatagaagatggggatttaagaggcacatgcctggtatggtcaatggtcataaggagagaaaaccatgaggagcactggagctgttgggaatctggtgatagtctggacagaggtctgggactgtgcaactaggagactgccttggagaaacactgggaataggatatacagggacagaatatggacctgaagaggtgtggtggaatagaaggacagaagcgaggaatgatagatcgtatgtagaactggctcgtgtatcctggtggataagaaaattggcttagtagaggtcggagacttctagaactgggctggaatataaggatctcggttgataaatcgtatcatttccctacatatttactctgatggagatgaagaggaacggccagaagatttgtggtgagtgaaaacgtgtgttcaggaccgggtggggccttcttattaacatttgggctgaagtaatgtttcgggggtgggcaaaaagcgttagatatttctggggagcttcgattggaaggcccgaagtggttgtttttaaccccagaaaatattaactcctcgtgtttttggtcacacaaaaaaagctcccgggtgttgactttgtggacggggaaggaattatgcc

SEQ ID NO: 553141 - DNA, 130 bp, Homo sapiens
cacacacaatgagatcctgtcacacacacacacatacacacacacacacacacacacacatatcacagttgtgttccttatgagttgaaaagtcacgaatacatgtgttgaaacatatctggggattcaa

SEQ ID NO: 553142 - DNA, 528 bp, Homo sapiens
  misc_feature (501)..(501): n is a, c, g, or t
ttccagacatagttccttttagaagtcccgttcccagcaggcctccacaggaaccaaagggagcacacagctcttcttaaaattgaaggtgtttacgcccgagatgaaacagaattctatttgggcaagagatgcgcttatgtatataaagcaaagaacaacacagtcactcctggcggcaaaccaaacaaaaccagagtcatctggggaaaagtaactcgggcccatggaaacagtggcatggttcgtgccaaattccgaagcaatcttcctgctaaggccattggacacagaatccgagtgatgctgtacccctcaaggatttaaactaacgaaaaatcaataaataaatgtggatttgtgctcttgtatttttaagtggattaaaaaacttactaccttaaaacaaaaaaaaaaaaaaaaaaaacaaaaaaaaaaaaaaaaaaaaaaaaaaaaaaaaaacaaaaaaaaaaaaacaaaacaaaaaaaaaaacaaaaaanaaaaaaaaaaaaaaaaaaaaaaagaag

SEQ ID NO: 553143 - DNA, 1398 bp, Homo sapiens
tctttctcttgtggtgtcctgcacaatgtcgtggtgctatctgttatttatttctgtctccgtctcttgatcttctgctcatgactgtcgggtgtgcaccaatttactagtcgctcctgggtcttctcttagtgtggggtcttttttcttactcccaggtttggtgcacgcaaactgtacacccttgcggttgccacgcgaaaattcttttttgcggactttcctgtccccggtgtgtatcccttcccttctctcgaaccccccctgggctccgtaagtctttttctcagtggccccatcttttgttccctcaccaccggttttttttgtttgtggcccctgtctggttttttctttcggggattttccccgtttcttgggcgttgtctttttcctcgagtgggtagatagcaccaaggggggttcgcctctgcataggcgcccccctttggtagtcgtccctcttggattttctttgtaggaggctccgcaggtgttacccctccccgggggtctggctccacattgccacgctttttgtgccacgggtgcaaccggagagttttattttcccactgctttggggggtgaatgtcccctttgcccaccgtcgcccgcttgatttaataatttgtatatggttggtcccccgcggcgtcgcccgggtttttatagtccccacgcggtgttctccctctgtttttctgtcccccacgcccacttttgtcccccatgtttctcttctgtgggcccctgaactctctctctctctctttggggtccgcttccccgggagtatccgcggattcgctggagagggggtgtttgcgcctcttggcaccccacataggccctcttgtggtgttctccgcgcttgttttttgtttctctctttctctttttttcttcttgttttgtgtttctgaggcacccgagagtgttgcacactctctttgtttgtgctctcaaggccttgggggtgtcgccacttgaaccgccgttatcttccggtcttcccacacgcacaccctctctcgccctcctctctggggtgttccaagcgagtttgctcttctgccctcacagagactcgccacaagttggctcgcgagttacacacaggttgcccacccacccacacgcccaccctgagtttttttgtttgtagtttttatgtaccacagagtggggtttctacccacataattcacccacggctggtttcgaacttctgagcctcacggtgatccaccctgcctcggcctccccaagtgttgggattaccacggtgtgaggccaccacgcgccggcctaaattttaaataatttatattaaatcccaatgtggctaacatattacttccaaccttaattaacattaaatttttgaccagatta

SEQ ID NO: 553144 - DNA, 443 bp, Homo sapiens
acaattacttttacccagggaaaaatccctgtcccacagctatgggttgtcagttcccatctatccagccactgtgatgggctctctgtggagtggatgatgaggctctgtgcagaacccgaagtgactggtgagtctaatgaaggcccagagctcagcaaggtccctgtccagagctgacgggtggcggagtgagacccgctctgctcttaagcgctcacagcagccaagaaaccatccagcatgcatgtgatcagtcctgtgtgcaaatggctctgaggacacacatgatatgagggacactctgtgacaacccacttgtccaattatcctgttcaattttaagccacaaggttatggactttaccaaattggtagaaagcaaaggtgcctccaatcttagaacttaaagaaatcccctaaccatgctcttgaataagcca

SEQ ID NO: 553145 - DNA, 821 bp, Homo sapiens
  misc_feature (2)..(2): n is a, c, g, or t
  misc_feature (63)..(63): n is a, c, g, or t
  misc_feature (73)..(73): n is a, c, g, or t
  misc_feature (94)..(94): n is a, c, g, or t
  misc_feature (120)..(121): n is a, c, g, or t
  misc_feature (137)..(137): n is a, c, g, or t
  misc_feature (140)..(140): n is a, c, g, or t
  misc_feature (195)..(200): n is a, c, g, or t
  misc_feature (202)..(202): n is a, c, g, or t
  misc_feature (204)..(204): n is a, c, g, or t
  misc_feature (216)..(216): n is a, c, g, or t
  misc_feature (275)..(275): n is a, c, g, or t
  misc_feature (280)..(280): n is a, c, g, or t
  misc_feature (283)..(283): n is a, c, g, or t
  misc_feature (291)..(291): n is a, c, g, or t
  misc_feature (297)..(297): n is a, c, g, or t
  misc_feature (301)..(301): n is a, c, g, or t
  misc_feature (353)..(353): n is a, c, g, or t
  misc_feature (372)..(372): n is a, c, g, or t
  misc_feature (382)..(382): n is a, c, g, or t
  misc_feature (496)..(496): n is a, c, g, or t
  misc_feature (530)..(530): n is a, c, g, or t
  misc_feature (563)..(563): n is a, c, g, or t
  misc_feature (597)..(597): n is a, c, g, or t
  misc_feature (600)..(600): n is a, c, g, or t
  misc_feature (666)..(666): n is a, c, g, or t
  misc_feature (671)..(671): n is a, c, g, or t
  misc_feature (701)..(701): n is a, c, g, or t
  misc_feature (748)..(748): n is a, c, g, or t
  misc_feature (806)..(806): n is a, c, g, or t
gnatcaccacaggcggcacgatgaacgaggaccacatatgctaagcacggcacaaaaggaggncacgtcagtnacagacacagacaccacagcnaaggtggggaagcggagaccattggnnttccgtgtgcaaaggnttntgggaagatgggtggagtttgtatatttaaagacagctgttagaagcaggatttnnnnnntntntttttttttttnaattatgtgtctttttttttttttttgtttccaaggttttgaatgattttttttttttntggtnaanggaaatcntatttngggntaggtgttgggtggcatttgaagatgtggatcttcagagggatggaaaatcnattttaaggggctcaacantaggggtttnttaaggatttggaaaattattatgggaaatagaatatgctggagatatttgggaccaaaaatagggttttccaagaacttcagggctccataaagggattcttcaataggttanctaggtatttgggcacttcacaggaaggaaaacnccctctggggaaaccaggggcggaggtcttcangaatgtggaggttctaaaacagaagtagatcctnaantgaccacgagtggggttctaaaaggacttggggattccacatgtgagaaccggatttagggccagnaggantcaggtttctcaaggtactcggggatcttnaggaatgagaggtggaatcttggagaaccgggagatgggttctcaanggatttggagactccaaaagtgagaaatggattcagggcccaaaaaagagtttcccanggattttggggttct

SEQ ID NO: 553146 - DNA, 703 bp, Homo sapiens
ttagtcgttttcttggcttcctttttagggtactgattggagaacggtcacgtgtacatgaagatatctgtgaatgagtgttccaagggcataaaatgcctgtaaatgttcgtgttgtacaagaaaaccaaagggagcacacagctcttcttaaaattgaaggtgtttacgcccgagatgaaacagaattctatttgggcaagagatgcgcttatgtatataaagcaaagaacaacacagtcactcctggcggcaaaccaaacaaaaccagagtcatctggggaaaagtaactcgggcccatggaaacagtggcatggttcgtgccaaattccgaagcaatcttcctgctaaggccattggacacagaatccgagtgatgctgtacccctcaaggatttaaactaacgaaaaatcaataaataaatgtggatttgtgctcttgtaacaaaaaaaaaaaaaaaaaaaacaaaaaaaaaaaaaaaaaaaaaaaaaaaaaaaaaaaaaaaaaaaaaaaaaaaaaaaaaaaaagaaagggggagcacacaaacgggagcaggaagaagaaaaaccacaaacaagcaagggaggggaggaagcggggaaaactgagaggcgcgcgacaaagggcgggaaaaaaaaggaaacaaagagaggagagcgcggggcatcgagggagaggggggggagacgagcgagagaggg

SEQ ID NO: 553147 - DNA, 236 bp, Homo sapiens
  misc_feature (2)..(2): n is a, c, g, or t
  misc_feature (18)..(18): n is a, c, g, or t
  misc_feature (23)..(23): n is a, c, g, or t
  misc_feature (29)..(29): n is a, c, g, or t
  misc_feature (31)..(31): n is a, c, g, or t
  misc_feature (52)..(52): n is a, c, g, or t
  misc_feature (69)..(69): n is a, c, g, or t
  misc_feature (75)..(75): n is a, c, g, or t
  misc_feature (86)..(86): n is a, c, g, or t
  misc_feature (89)..(89): n is a, c, g, or t
  misc_feature (91)..(92): n is a, c, g, or t
  misc_feature (105)..(105): n is a, c, g, or t
  misc_feature (108)..(108): n is a, c, g, or t
  misc_feature (110)..(110): n is a, c, g, or t
  misc_feature (142)..(142): n is a, c, g, or t
  misc_feature (146)..(146): n is a, c, g, or t
  misc_feature (148)..(148): n is a, c, g, or t
  misc_feature (154)..(154): n is a, c, g, or t
  misc_feature (156)..(156): n is a, c, g, or t
  misc_feature (159)..(159): n is a, c, g, or t
  misc_feature (176)..(176): n is a, c, g, or t
  misc_feature (193)..(193): n is a, c, g, or t
  misc_feature (199)..(199): n is a, c, g, or t
  misc_feature (213)..(213): n is a, c, g, or t
  misc_feature (230)..(230): n is a, c, g, or t
cnaggtcgcacgcgtganactgncttccngncgcctcccgccgcagacgccnccgcgattgcgctacgncgcctnccaaccctgtnggntnngcccttagggggnaantncctcccccagctgccaaggacatccaagaagntctntnggacancngtngggtatcgaggcggacngacgatccgcgctcaanaaggtntatcagtgcagctnaatggaaaaaacattgnaagacg

SEQ ID NO: 553148 - DNA, 162 bp, Homo sapiens
ttttttttttcagtctgatgtagctttattgagaaaggaaaaagggaacagtctcgctagatatcagatggccagtgacagaggcgcaaatgatcccttccgtactgcggatgtgtgaatcgcatccatgcacactggcacgcgatgcagtcgtacgagagg

SEQ ID NO: 553149 - DNA, 631 bp, Homo sapiens
acacagaatccgagtgatgctgtacccctcaaggatttaagcggggtctccggaaccaaagggagcacacagctcttcttaaaattgaaggtgtttacgcccgagatgaaacagaattctatttgggcaagagatgcgcttatgtatataaagcaaagaacaacacagtcactcctggcggcaaaccaaacaaaaccagagtcatctggggaaaagtaactcgggcccatggaaacagtggcatggttcgtgccaaattccgaagcaatcttcctgctaaggccattggacacagaatccgagtgatgctgtacccctcaaggatttaaactaacgaaaaatcaataaataaatgtggatttgtgctcttgtaacaaaaaaaaaaaaaaaaaaaacaaaaaaaaaaaaaaaaaaaaaaaaaaaaaaaaaaaaaaaaaaaaaaaaaaaaaaaaaaaaagaaagggggagcacacaaacgggagcaggaagaagaaaaaccacaaacaagcaagggaggggaggaagcggggaaaactgagaggcgcgcgacaaagggcgggaaaaaaaaggaaacaaagagaggagagcgcggggcatcgagggagaggggggggagacgagcgagagaggg

SEQ ID NO: 553150 - DNA, 1348 bp, Homo sapiens
gagacagagttttgctcttgttatccaggctaaagtgcaatggcacaatctcagctcactgtaatctctgcttcccgggttcaagcgattatcctgcctcagcctccgagtgaggtgggattataggcacgtaccaccacgcccagctgatttttgtattttttagtagaagacagggtttttaccccatgttggccccaggagggtctcctatctcttgaccttaggatctgccccgcctaggcctccccaaagtgatgggattacaggtgtgagccacagcaccctggccagtacatgttttttatgagtgccggttcttacggtatgttcacgtagagactgaaggctataaaaactttccttaccactagaacatgtaattggtagcctttcagagatttatccgtattacggttcttgatttgtagacgtatatataacattcacctaatgttttgtgttcttttttccctgcagatgctgtacccctcaaggatttaaactaacgaaaaatcaataaataaatgtggatttgtgctcttgtatttttaagtggattaaaaaacttactaccttaaattgatttgctacatgcttaaaatgatagaggttgctcagcatttttggagtacaagggggtcagagagacatgtgatgaaaattacagggcgagtacagagatttagaagggaacgggttttaatgcgagtatctttgacagagtcttgctctgttgcccatgctggagtgtagtggtgctcgctgcagcctcacattcaaaggctcaagcaatcctcccttggcctttgaagtagctgggaccacaggctcatgccaccatcccctgggtcatttttaacttttttgtagagagggtctgactcttgcctatgctggcttcaaactcctgggctcaagcaatcctccttccttggcctctcctgaagtgctgggatacagttatgagccaccacacctgccaagtgctttgtgatactatgcatttgttcaatgcagattgggaaacttaaaatttgaatggagattatgttgatgggctttggcagttcatttggatagactgggatgagaagctcttgggacttgtgactggacaaagcattccagtatattaaaataaaattaagccatattactccactcataaaaagcaatcctatggtaggtacatggaggttgggaatagtgcacggaaaggtggcagctttctttggcttcatgttttaatctggtaaagttcaagattgcactttaagcaggcctcctaaatattttagatttcttggggatatgctaaaataaaacaactaaggcatcaaaaaaa

SEQ ID NO: 553151 - DNA, 648 bp, Homo sapiens
actggtcactatcgggacttccgcatcctgtgatgttttgttgcttaggatatgaatggctgagcggagggtgtaaaaccctggcactctgctatgggtactgaggttcttccgtgccatccgtgcccatcactttgtttcatttgtgtttgtgtcgtgccaaaatgtgacgcttgacggaacctctgggatgctcatggaatggaatggatgcgcccatgaagcatgggacagtggagcttggtttggggatggaccaggaaatacaggttttgtgaagggtcccatgagaggaccttgtctattgggacggagtgtgggagacctgagactgggggaggggtcatttggaaatgatgctgggcgctacttggcatttgtccattgttgaggcactgtccatttgtgacggcaccaccgtgggtcatcaggggatctggtgcagagggagtataaagccccagggttggtcaggggagggccagaccgaagaaggtttggtggataagcagaacctttttgtctccctctgattgctcctaagcctcatgctcccttgccctgggtgtccctgttgctccctgatcttctccgtgacctgtagttaaaacttccaacagcgctttggaccttaatttgaccggatcc

SEQ ID NO: 553152 - DNA, 116 bp, Homo sapiens
gcggccgcctactactactactgcacgaattcaagcttctaacgatgtacggggacatggcaaattacagaaaaccaaagacaaggagaaaaatctaaaaaaaaaaagttgtactg

SEQ ID NO: 553153 - DNA, 705 bp, Homo sapiens
  misc_feature (530)..(530): n is a, c, g, or t
ctccggaccttcgtggaagaatccatctacaatgagtttctcgagagaaccgtggatgaaagcaaagcgagaggaaagtggggaacccgctttgagcctggacacctcagtgagggtgcctcaggtgggaccaaggagcatgtttgaacgaaggtcctaggtctacatccagtcttggccagagggagggcgcgataactcctctgtggcggagagcgtttggcgcgcgagcgtgggtttcattcatcaagcctactgtctttggtggggtgcaggatgacattgagaattgccaaatgaggagatctttgggcctgtgcagtccccctgtggcaagttcaacgaagattgaggaggtggttgagagggccaactaacaccatggtatggcctggcttgcgtgtgtggttcaccgcgggatctggcacaatgccatggtacttacacccaggcactccagcgtcgcgtgacccgtgtgcgtgtaaacgagcctacgagacatccgtcacctgccacaccgccatttggangggtttatgggaatctgggaaactgggagggagctgaggttgatggattgggcttaaaggcctacaacaagaggtcaagacggtcaccatcaaggttcctcagaagaactcgtacagagccgttgtcagtgagggccacttcacagtcctatcaaattccacaaccacttgaaca

SEQ ID NO: 553154 - DNA, 341 bp, Homo sapiens
gcacgagcggcacgagcttttttgtttttgcccccagttctgtccacaccccttccctttcctgtcctgtcctttctttcttttttgatagaatcttgctctgtcgcccaggctggagtgcagtggtgagatctcagctcactgcaacctccacctcctgggttgaagtgattctcgtgcctcagcctcctgagtagctgggactgcaggcacgcgccaccacgcccagctaatttttgtatttgagtagagacggggtttcaccatgttggccaggctggtctcgaactccgcatctcaggtgatctgctcgcctcgggctcccaaagggatgggattac

SEQ ID NO: 553155 - DNA, 1019 bp, Homo sapiens
gctgtggctgtaagcgaggaggctccacagcggacgtagcagctaccgctagccagtgatctggcgcatccagcgcatggcccgtgacccctccgcaggcatcattctgggtgtgcgctgctggttagcaatgatacccgtaaggcggttaactgatgagtgacatgctggctgcgcctgatttgcggagcgcacaacgataccatgggacctgctgtcgcgagatcgttcctacgagcaggcacacgctagggtgacacttgtcgttgttgaacaacactgatggcgatccctgaacgtgagtgtccgaagcgtcagtctagcacggatgccactgagggcgttcgcagaataccgcgcatccctaggtctcatgaggacaagaagacttgcccattccgtgggcagaggtatccacgggccaccattctatgacttggaacgtagggataccagagtaggcagacgggggaaacgcgaggtgaccctcacctaggagctccgaacttgcacatggtacaccctgcgtggcctgcgactcgacacgcacgcgaaacttgcaatggtcaccagagaagtaagaccggctagggtagtggttctaggcagcgcaaatagaagaaccaaggaagcaactccatcagccgcttggaaccttcgtccagcggaagactcctcgagacggacctctttgagcccaagaatctatatgaacaagcacagacggaggcatgcggaccctgtccactcgagcgtgacatgtagcagggcagaggcacgcccctggagcttctcgtggcacacacgggtcaatccctgactggccaaacctgggacggcccaaggccctgtggcaaggcagccggggcagacaagtgtcacccatgagctgtggcatagctgagctgctgtgcccagtggctcagggaaccttctcagcgtacttctactcccgaaaggattgaccatcaccctgtcagtcagtcaagtgcttccacaagactggcctctagctatgg

SEQ ID NO: 553156 - DNA, 238 bp, Homo sapiens
ctggtgtacatgaatttgactatcatgttggacatggccgacagggaaggggtcgtagacatctacaactgcgtcaggagctgcggtcacggagggtgaacatggtgcaatacagaggagcagatatgtgtttatccacgaatgcgatcctaggaagcctgtctttgtgcgggacaccgtctggtgcgctgcttcccaatgttagcgtctctggtattatgacattgtaacaaacgtg

SEQ ID NO: 553157 - DNA, 206 bp, Homo sapiens
  misc_feature (22)..(22): n is a, c, g, or t
tggccgtaagcagcgtgctgtnatcctccctactccatactaccaatttgacaattctcaccaatagcttcctttcctcccacccacccctcccattttacccagaggaagcccatcactgacaccacctccaccaaccaccgaaacctactcgcttagtatccgcagaaacgactgccacggagattccatatccccagataatg

SEQ ID NO: 553158 - DNA, 266 bp, Homo sapiens
  misc_feature (39)..(39): n is a, c, g, or t
tgatgagaaattataaccaagcacacatatagcataggnactaaccccatataccttctgcatatgaatgaattagaattaactttgcaaggagagcgaaagctaagacccccgtaatccagacgagctacctaagaacagcttagagagcagatcccgtctatgttgcacaatagctgggatagattcataggtagaggcgacgaacctaccgagcctggtcatagcttgttcgctgtgctttagattctaagtttcaactttaa

SEQ ID NO: 553159 - DNA, 320 bp, Homo sapiens
  misc_feature (5)..(5): n is a, c, g, or t
cctgntctcgcccaacacctcaatacctgttagtgtttttttgttttaatttttttgagatgggtcttactctgtcgcccaggctgaagttcaatggtgcgatcttggctcactgtaacctccgcctcctgggttcaagcagttttcctgactcagcctcccaagaggctgggtctacaggtgtgtgccactacccccggctcatttttgtattttttgggtagagacagggtttcaccatgttggccaggctggtcttgaactcctgacctcaagtgatccacctgcctcagccttccaaagtgttggggataacatca

SEQ ID NO: 553160 - DNA, 650 bp, Homo sapiens
cgaccgcgtggtaggctaaaggcttgccgttgttcctgcacggctaagtgcccaggttcatcctaattgagctgaacactagtcactgggttccacggttctcttccatgacccatggcttctaatagagctataacactcaccgcacggcccaagattccattccttggaatccgtgaggccaagaaccccaggtcagagaacacgaggctagccaccatcttggaagtggcctaccaccatcttggaagtggcctaccaccatcttggaagtggctcgccgccatctgaggagctctgtgagcaaggacccccgggagaaagcatttatggtgaggagaaaagcagctggtatcacactctacccaagtcccaaaagcaggttcacataactcctgtcttcattatctgatatccgggactttttccctttcaccttccattataggatgatgcagcaagaaggccctcaccagataccagtcctttgatcttggactacccaggcttcagaactataagaaataaatctccgttctttgaggattacccagtttgtgctattctgttatggcagcacaaaatggactaagacataggtccaatctaaggcctttctcccagaggacacctcatagctgtgaatgaat

SEQ ID NO: 553161 - DNA, 143 bp, Homo sapiens
agtcctcacctgcacggtgggtgttggggttggtgtcaccgtggtggtggtggtgatgggtgtcaggtttgtactctgtgtgccggtgggtgttggggttggggtcaccgtgggggtggtgatgatgggtgtcgtggttgggg

SEQ ID NO: 553162 - DNA, 919 bp, Homo sapiens
taatagtcactttaacattgagacctctgactcattgaattcaggttttttaagtacttgaaactcttcagtattctccttgattttagtttctttatatacatttatgaagtagaaagcattgtttggtaaactgtggttgagaataaatagcctagtctcttatcctctttagcgtggcattaaaggtgaagttctgcaaatgggagagtgttcacagtagatagctcagattgattgaacacattgaggcaagagcactcctgcatgagataccagcattttcacaaatacttgatatgtacagttcttgtatttagtcattgtgtcaacccatcatccccaagcacagtcttctttccttttacatatgtctatgtacgggaaaaaaacaaaacaaaaaattgcagcttacgattacactcccaaaatgtgggtaatccgtgtcttacaaaaaacatttctgaacacagcacaagtacaaggatcagaccatagcataagtgacaagtaaggagtgcattgtggacacgtatgatatgaagcgggaggggcgactgagacattgactgctccttcaatagcgctgtccacaagtcaattaaccatgctaaagtaaaacagggcaaaatagaatcagatgccaaacgtcatacatacaagacacttaagaaaaacaaaagctgagcaatcacgagacaatactagccagaccacaagaagacaacgccaaccacatcagacacaaacaacaggaatcccaacatacccacagaaacagagaccaaaaaccacaataagacgagaacgtgagcgacaaacaggaaaccaaacaaaggtaatacaaggacagacatgacgcgaccaatacagagcaatagacaaacaagagcaaacaaaggaaaaaatacgaaaacaa

SEQ ID NO: 553163 - DNA, 1180 bp, Homo sapiens
ctgcagtaactctacggttctaagtgtagcgatgggcctggtgttgctgcagaaatgccatgttggtgactcgtgcgccagtgcccaagcgctaaccctgctgaaagtttctcagcgaaatctcatgtggacgatctggaccccgctgagagtgaactgcttttgagtgagatggtcccagagtgcctggaggagctggactgcaagcccctgcccaacactggactggctgtttctctcaggcccagagaccctggcaccagctggctcccaaaatggcgatgacgacctggacacctgtgcccaacaagcagtttgacacatgagatgctgcaagccatgctcttggcggtcctgccagtgaacgcatgctgatggcgagctccagccctgtgtgagtgggtgttgccggcaccactgggacttgagctgcccgctaccggtgaaccccaggttacaccgctgcagaggcacgtgcccgagtacctgcaagaattgtctataagtccccagtgcagcaattggccacgaacttgaggcacagcgccaggcattggcacagactggtgattggcacaagggcccccaggccggggtgtgcaactggggagacaaggaaagaacgtctgggccacacgaagcgacgccagaacgtaccgattggaggtgccagtgcgcgcacgaagccatacaagtgtgcagggcacttagtttcccgcagtagacaaggacaccagccatatcgtcgcgttaccatttgacccccgagtagccgtcaggaagttatccaggtgtggctaaagcccgaccagaaaataaggttggtagagtgtgggcccagaggggcccaattgcgtccccagcgattggggacacactagaggaaaaacgaaggattggcacaagtgacaggagaagagatagcagccagtattcgcgccccgcagggggagggtattgcacagcacttgtggaacatgcgcagggaaaccaggggtgggggaaaacgcccagcggcagcgaaagtcaagagctgggtggagtagccaaggtggggagaaacgctggggaagaggagcgtgtaagacaaagcggggagaaggcgagtgagggcaggaaggcacagctgaagcaatggacgaggaggaggcggcgcgtgcagaggaggacggagaaatcg

SEQ ID NO: 553164 - DNA, 167 bp, Homo sapiens
cattagatgtttcagttccccacgtttgctcatgcatagcatgtattatgctgttaaacctactgggtttgccccattcggaaatctgtggatcacgtcgtatgtgccaatccccacagcttatcgcatcttgtcacgtccttcatcgcctcttagagccaaggcat

SEQ ID NO: 553165 - DNA, 705 bp, Homo sapiens
gccgagactggagctgggtgattggctcccctgagatattacggaagcggctgtcggctgtcgtgagtcgtctccacacagagagtgactcaatgccctccaatgacagtgcgacgccgactgctcaggccgtacctggatgcagcctcggttcccgggagggccctgagcgaggccaagcaggcaccctcgatgtgaggcaagctacaggagggtatatgggtcctgacaaaccccatcttggacgagggtggtatcttgggcctgtcactgaatcactcagtgggatcgagctggccatcatgctggatgacggacacgcttgttgtgtccgcgcacgcagttggttccagtccagctatggagatccgaggccgtggtgacctctacagctggctgagggatgccacagccaaggcctatcagtgacctggctgttgcgtagtggcccgccagcggctgctctctggggactcaacagagaagcgcactggtcgccctgtcaacaaagtgatcaagtccgtctcagccacaggcctctcagtcctcattccttcggaacaccagacctgactccccgtttggcccagccccatgtccccacattctcagtcgtccaacccatcatcccgggactcttctccaagcagggacttcttgccaagcccttggcagcatgaaggctcccatcatcatcaccgagca

SEQ ID NO: 553166 - DNA, 419 bp, Homo sapiens
ccgggagtcgctcaatgaagcggctatacaggccatcctgtaccttgccgtggttgcgcatccactcgaccgcagcgttaggattggtgagcatcacataatgaaattcgccggatgcacctggcttgctcatgatgaagttcagctcctggagcttcttcatccggcgacgccaggtgtccacggcacgttccccgagaaaccccgcttcagccgcaaacgtgctggggttctcgatagatatgacgggatgatcgggcatacgcgcccatagacaaaacagcacgtgccctgcaggttgtcccttcgaatcagcgtcaataatctgcatggcaatgggcagtgtccgaggaatcgtgctgaagccgtcgtgggtttttcgtgtccatttcaacgcttcgggaatgtcggggaagtgg

SEQ ID NO: 553167 - DNA, 146 bp, Homo sapiens
gtgtcgctatatcatataccctcaacaattattgcctccttcatcgacaatgtgcggttcctgcgtagcagctagaagctaaggatcttgggacaccgaatgtggtaccctgccagaaggagcaagggtaccaagactgtgagtgc

SEQ ID NO: 553168 - DNA, 128 bp, Homo sapiens
gcgaccatgtccgtcgcttccgcactccgcctgcagcccttttgccacagttgccgggccgctggctgctggctgcctctagtggttcagaggagaatattcacagtggtgcctgggccttgggtggg

SEQ ID NO: 553169 - DNA, 105 bp, Homo sapiens
tccctgcagctacacagcagcacttgtgcacaattgatacacgaggaaagtcgttcttataaatatgtctattgacagaggatacccatatcatcatggcatcta

SEQ ID NO: 553170 - DNA, 108 bp, Homo sapiens
tggatttgctggtgcagtacaactaggcttaatagggacatgggaggattgcttgaagctaggagttcaagaccagcctgggcaacgtagcgagacccatctctacca

SEQ ID NO: 553171 - DNA, 463 bp, Homo sapiens
atggcgttctagaggtccctgcatttactccatggctcaccttacacatctcctcaactatatcctttgcaatatcctttatagtaaatcagtaaacataagtgtttccctgagttctgtgagccgctccagcaaattaattgaaccaaaagagggggttgtggtaactcccaacttgaaggcagttagtgagaagttccagaagcctggacttgcaactggtggggatgagggcagtctggggccagagccctcccactgtgggatctgaggctatctccaggtagacagtgtgggaactgaatgggaggatactagctggtgtccgctgcttgccatgtggggaaaacctccacatgtgttcatagaaggcttcctcggtgttgatgatggctgttgcggtgtaaaggcagaggaaaaacccagtttgagagttttctggaaacaacctccattttacaaa

SEQ ID NO: 553172 - DNA, 117 bp, Homo sapiens
cagggtctatgcttgatttcagtccatcatgaatcaccttctctgattactagaaaaaggaaggagaaatgggatcatcaagttgaaaatataatggctgtgaaaacaaatacaaag

SEQ ID NO: 553173 - DNA, 352 bp, Homo sapiens
tctccctcaaaggggcgcccaaaaggggggttttaaagccccccttgtgttgggaaaaacttttgggcccttttttaaaaaaaagggggtaaatgttttcatcccgggcccccaccaacaaaatacttgttttatcaccacgttataaataaagatgtctacatcagagctgagaatgtatccacacttcatttttactcaccgaagaggaggaaagcatcagatcaataagtggggcggcgaccctcatctatataattagagctgtggtcgcacactgtgtattctacagcggagtgatgttcaacacccacctcatattgtgggacgccttagtgcaggtatctcagca

SEQ ID NO: 553174 - DNA, 395 bp, Homo sapiens
agcagagtaagaagcagacagtctcactgtgtcgcccaggctggagtgcaagttgcatgatcttggctcacaactgcaacctccgtctcccgggttcaaacgattctcctacctcagcctcccgaatatctgggattacaggtgcccaccaccatgcctggataatttttaaaaatatttttagtagagacagggtttcaccaactaggccaggctgctcttgaactcctgacctcaggtaatccacccgccttggctcccaaaatgctgggattacaggtgtgagccaccgcgcctgaccactttagcttttcaaatctgtcttcgtagacgataatggaatatctaccaagctaaatattcacctccccatgaccagcaattttacttctagg

SEQ ID NO: 553175 - DNA, 317 bp, Homo sapiens
  misc_feature (46)..(46): n is a, c, g, or t
  misc_feature (295)..(295): n is a, c, g, or t
aaaaacaaaaaacaaaaaaactctgctccagcttgggcccattggntcgcatctgtaatcctagcactttggaaggctgaggggggtggagcacctgaggtcaggagtttgcaaccagcctggccagcatggtcaaaccccgtctctactaaaaatacaaaagttaggcgggcttggtggcgggcgctataaatcccagctactcgggaggctggagcatgagaatcgcttgaacccggggatggaggttgcagtgagccaagatcgcgtcactttcattccagcccagggcganaagagttgaaaatccatcttca

SEQ ID NO: 553176 - DNA, 219 bp, Homo sapiens
  misc_feature (48)..(48): n is a, c, g, or t
tataattttaccgtccaagagggcgagcctcttcgatactccctttgntttcgttcgtcaaaaaggcctttcgaaaaaacaagagaggaacaacagctaccaccaccgagcattctacaaagccccgtcctcgcgtccagccctcacaggcttcgcagtgaaataaaaagtgccccgcccaaaaaaaaaacacccccaaacacacacacaaaaaaaccc

SEQ ID NO: 553177 - DNA, 661 bp, Homo sapiens
cccagacgtggaggaggaggagggaggaggccaggtggaggaagaggaggaggaagaggaggatgaagagtgcctgaggagtgagcgcctggctctggaatgggccctgtgtgcgctggacgatgtgacttcctgctgtgagcacatccgcatcctcaaggtgctgtgtgtgcttcctgatccatgtgcatgggcatgtatcctgccatgttctgcctgctctgcgcttgttgctacacctgatcttctgtgctatctgcatgtcttctgatgatccctgtcacctaggatgtctctgtgggcatgcatgccatgctacattccttttctctcctctgctgctcttgtcttttttgtcttccctgcattgtgctgactctcacctgatgttttgtgctttcctcattgcctgtgatgctgtgtcttgtgtgctcaatggtacgtgcatcagtgatgaactactgctcttctattatctctggactgcctgccaatccttgcatgagttccacgctggacctgcgctcatgctttgcaccccatgcacatggccatgcttgtgtagccccatcctctacgtgcagccacaaccatgcctgcaggagttcctgcgccagctgctcaccttctacaatggtggctggctggctgcaggagctga

SEQ ID NO: 553178 - DNA, 116 bp, Homo sapiens
ggtcgaagaagcagctgatcaaatccaatgcaactctttgagggatagtgatatgtgaatagcagtgtcagtctaggatatagcacatgataactggctgagaattaccactagta

SEQ ID NO: 553179 - DNA, 526 bp, Homo sapiens
  misc_feature (16)..(16): n is a, c, g, or t
  misc_feature (36)..(36): n is a, c, g, or t
  misc_feature (47)..(47): n is a, c, g, or t
  misc_feature (53)..(53): n is a, c, g, or t
  misc_feature (64)..(64): n is a, c, g, or t
  misc_feature (69)..(69): n is a, c, g, or t
  misc_feature (73)..(73): n is a, c, g, or t
cagcgaagcttggggnctagtctccaacagaggccnctacatgaaanccgttnttaggtagccncttcnctcnctagattttctggataactgctgcagctctctatcagccttgctgcttcacttgcacttttatgttatggagacagcttctttccttaacctcatgaaccaactcctgctagcttccaacttttcttctgcggatcatcactctctcacctaacagaattgaaagagttgcgctcttgctctgaataggctttggcttagggatgttctagctggtttgctcttctatccagaccactcagactttctccacattagcagtaaggctgtttcactttcttatcattgatgtgttcactggagtagcatttttaatttccttcaagaacttttcctttggctgggtgtggtgtctcaggcctgtattctcagcgctttgggaggctgaggcaggaggattccttgagcccaggagttcaagaccagactgggcaacgtggtgagaccctgttgc

SEQ ID NO: 553180 - DNA, 155 bp, Homo sapiens
tctactcaagaaatcacaacataattacatcttgctgtgcttgcggttagacagggaatacttttacactgctggtggtacaactactatggaacacagtgtggagtgtcccttacaaaactaaaagtgcaactaccatttgtgagcagcgttgg

SEQ ID NO: 553181 - DNA, 463 bp, Homo sapiens
cgcacgtttccacttaattacttacgcatgtgaccagataccacctgttccccaaacacctatggaaataattttgtttttttttttaaaaaagggatgagatcatgtgctttgcagggacatggatgaagctgtgaagccattattctcaggaaacttacagaggagcaggaaaccaaacaccacatgtgtctcacttgtaagcggaagctggacacatgagaacacacggacacagggatgagatcaacacacactggggcctgatgcacgggccgtagcggggagagcattaggataacttgctaatgcatgtggggcttaatacctatgtgataggttgataggtgcagcaaaccaccatgggacacgtttacctatgtgacaaacccgcacattctgtacttgtattcagaacttaaaatattttaaaaatctttagagaatacacaaaaaaaaaaaa

SEQ ID NO: 553182 - DNA, 469 bp, Homo sapiens
aggagatatagaacagagaaggagcagatcccacgaagtgactgcagatctggaataatcagataaaggggtagatcatgaccatagagctcacttaaaaccggcctatacacctacaaggaattggggtaggatcttctcctcagccttgccacaatagaatggacaatgcccttctagtatgtttggtgaaggtcttgaaggcaccatttcccccatccaccctggggagaaattgagtccctaacgtcaacgacaaggcttattgaggctgagtttgcaacagatccgatctgggaggtagaaacaaaaatgactgaacatctttttatcccccaatcgttacaaagcctaaataactctaaacgggatgggagggcaaatttcaggtcagttgacatcctggagaagatatcctaggtcctgtctcattccctagaccgcatacactccaaccgtgtaatctcag

SEQ ID NO: 553183 - DNA, 760 bp, Homo sapiens
ggagcaaattcacaaacgcctgtttggtggaacccaagaggcaacttgaagaattaatcaggtgtctgccacggggtattcactagttaccccccgccgcgtgtatactctgtggagggtgcatataaaagaggtgggaataacggggagcccaccgtggcggcagaacaagatggtcgtgtgcaaccgcccccccgctcattgtcacgcgagcaagattgtgtcccaaacacaaaactgtgtcgcacgcaccgctgtcggtttgttctcacacaagaggcgctcgtgcgataattttgtggcagatgggtccgcattgcccccgtccataactttttcgtgaacaccaccccggccccccgatgttgtaggagctgtgcaaagcagcacccgaagtcattgagtgggtggcatctggtccaccgcccgggtataagctgtgcacccacggacaaactgagagaagtagtgtaacacaacagcgaggaacagtaacatagtggtttcttctcgccgccccatgagaggtaggcgtgcacttgctcctcgaacgacaggtcacatgagtcgcggcctcacctcctggcaaataaatggctttagatgaaggattgtcgctatatgatgacacgccgacgtcttttcgacgctagcggctaggttccctccttagcgtactattagcgagttctgggccgtcagtcttacgcaggacgaggctgacgtcgcaagcaaggaaattaccagcccaaaaaaaaca

SEQ ID NO: 553184 - DNA, 205 bp, Homo sapiens
gaactagaggacccacggagagagaggccagcccaagcctcagctacatgtctgtcccattccaatagcatccgcacgcaggtggtatgtattataggacttgtattttctccttatattttaccccctggcctattcctgtctccccgtctgggcattcaaggattatgaagactgtcgtcgtatgggcctcggtgtctccagt

SEQ ID NO: 553185 - DNA, 282 bp, Homo sapiens
gctcgactcttagcttgccggggacggtacccgagacccggtgtctgctcctgtcgtccttcgcctcctcaatccctagccactatgcgtgagtgcatctccatccacgttggtccaggctgtgtgtcgagattggcaatgcctgctgggagctctactgcctaggaacacggccgatccagacccgtatggacagatgccaatgtgacaagaccattgggggaggagatgagtccttcaagaccttcttcagttgaggacgggcgctggcaaagcacgtgc

SEQ ID NO: 553186 - DNA, 232 bp, Homo sapiens
aggatccggtggcgaggagcgtcggattattgggacctggaacacacagatttcaagaccaacacacagacttaccgagagaacctgcggatcgcgctccgctactacaaccagagcgaggccgggtctcacacttcggcagacgatgtactggctgcgacagtggggcccggacgaggcgccctcctcctgcgtggcataaccatgtacgcctactgacggcacaagatta

SEQ ID NO: 553187 - DNA, 433 bp, Homo sapiens
  misc_feature (4)..(4): n is a, c, g, or t
  misc_feature (11)..(13): n is a, c, g, or t
  misc_feature (15)..(16): n is a, c, g, or t
  misc_feature (47)..(47): n is a, c, g, or t
  misc_feature (121)..(121): n is a, c, g, or t
  misc_feature (186)..(187): n is a, c, g, or t
  misc_feature (325)..(325): n is a, c, g, or t
  misc_feature (363)..(363): n is a, c, g, or t
  misc_feature (417)..(417): n is a, c, g, or t
atcnggctgannncnnaagcaacatgcatcataaaaaagacacaatntaaaggaagacaatctgctgagtattaaaaaccatctaaatatcaattctttgcaaccagcacagaactaattngctatcaaatccaaaccccaccaaggttaagtttggctgatgtaggccaggagtcaatgtagggnnaaaaatttcctcagtgcaagagagctgagtagtgttttggatctttctctggctggtacaagcagtattagaaaatctttttggcaagggagaaaaataaatacaaatggaatgctacatttttaaattagcaaactntctcaggaatgataaaggtatcagtaaagtagcaaggngataactttaaaacattatttgtctggggctcaaaaaacactcaaaacaatttntttaaaggttgcacaa

SEQ ID NO: 553188 - DNA, 698 bp, Homo sapiens
gatgccgcagacctcattttggcaaggcctgcgagaatcagcctatcaccgccagcaagcgggaccgcttgcacaaggtcatgtggatcacgttactgttcgctaactggatctggtgcgtgcctatcaatgaatcaacgtgcattggtatctttgtactaccctctgtacaagcttagccgacgtgggatcatgccagagcatgagtcgagcccgatatgatgggcgaaccagcttcatggcacacgttgatatcagattcaacagtgttcacgtggatccgggtaccaatggcacgtacgctgtgtacgtctacatatcgctaatacatgatcttgggcacgcggtatattatcctgctcgcattggatactagggcatccagagtcgataacctgacgctaggcctttgaagctgacgtgattcttccggtactacgctgctcagatcagccattacatgcattgtagcagcaataggtcacagattttgacgaagatgctcatcagacagtcctaactgacaagtgatttaaccatcactgtatatactgtgaatagggagccctgcacgctcacgtgtatcttgtctgacgattttaccagcccctagcctttcagccacatcgatttagcaactgtgcacgctagtacatcaatcccctcttgttccataccgttgcgtccgtcttcgctcg

SEQ ID NO: 553189 - DNA, 1138 bp, Homo sapiens
gtggaagcgtcagtggccggtatgctggctcaaatgcagatagccgatgaacatccagatgaagtgcaggcactggtgcttaagtctggagtaatcactatgctggtgggggcagaacagatctttggtagaggccattgtggtgcgccatagtgtccatgggaaccatgagacgttgcacgtcgtgcgcatgcgtggataagcggcatggtcgcatactatggcatgttgaggcatgtggttcttgggtcggtggatgctgggcggcgggccatggtgtgcctcgtcacacatgttcctgaaggtttgtgcagggactttccattggacctgctgatgatggcagtgagggctgctaggtgtgtgtacgactggacaggctcgcacggggctgcgctgtgtggcctgaggtacaaccttgtcccggcttaatccctggtcgcatttggagaagagcattgccctgctgtgggtccgggaccggccagagaatcatacacattgttgcttcgcgcaagccaaagcaacatggggcacagcgcggttcctcgagacgtgcgtaaagggcagaggattcgaagcaatcggactggtcgcgcgacgttgggtggttgcggggcattgctcgcggggaggggcgtctagtccgcactaaattgccatttggggacgacaaggctgccctattgatgcccttggggggcgttcatcgcatgggatccggatgggccgcggggaccacaacggagttgaaccattagttcggagtcgagaagaatgtttgatacactaccgcgctagttgaatcttcggggaccatggccatcaagcgatacggtgaacgaagccttcggacggagaagtccttcgctttcccgaggacgctaatacggatggcactagagagtcttcctcgcccccgagttccatgtgataggtccgaacagtggatcctcgggaagagcgtggtccttttgcggggaagaaccccctaggggacgaatcgctcaatgggctacccggctcggtgtggcaggacacttcttggaagggaacggtcacgggttgttaaacccttcgaaaagaatgtccaacagggttcgcgcggagagacgcatgttggacacacggaggtaca

SEQ ID NO: 553190 - DNA, 245 bp, Homo sapiens
  misc_feature (4)..(4): n is a, c, g, or t
ccanagttctcgtcgatactagacgattatgcaccaccaccacagagattatacttacacgtgattactggtcattcccagttcactgtgatgactatccatcaaagaggatatatgcgatagagtatggatatcggtcgtgatctgtgactattcagtctcatccaatgtggaggttcctacagacgattcatattgagcgttatggtaactcacgtagtgctccacctacacgagaaccaggt

SEQ ID NO: 553191 - DNA, 510 bp, Homo sapiens
  misc_feature (225)..(225): n is a, c, g, or t
  misc_feature (227)..(227): n is a, c, g, or t
  misc_feature (413)..(413): n is a, c, g, or t
cgagcgtttgcacagcgctcacgacgctgataaaaacggcgccggtcagagcgtaggatgctttgcctatctgcctgctgtcgcgccgtcattggtcaatctgcacaccggctagcgccaacctgtcgaccacttcccggtaggtcagcaggtgcatgcggtggccggcatcggaaacccggaacgtttcttcgataccctcgagactgctacactgacgcccantncctcatgcttttgccgaccacgcgccctacagcgccgaggtcttgaatttcacaccggcgctgccgttggtcatgactgaaaaggacgcggtgaagtgccgcgcctttgccaggcccgactggtggtaccttgcggtggacgcggcaccgtcaccggcgtttatcgcctggttcgacacgcagttnatgcgtttgctgcccgctcgccttttgccttaaaacgctgctctccaggacatactcatggacaccaaactgctcgatatcctcgcttgcccgatct

SEQ ID NO: 553192 - DNA, 360 bp, Homo sapiens
ccgctgctgatgataatgataaaaagaaactagtgagggcgtttaagaaaaagttggccggcaagggtactggtaatggagcatccggaatatcggagaagtaattcagctacagggtgaccaacgcaagaacatatgccagtccctcgtagagatgggacgggctaaggacgatcagctgaaggttcaggggttttaagtgctggtggctcactgaagcttaagtgaggatttcctggcaaggagtagaatttcccttctctcccttgtcacaggtttaaaaacctcacagctggtataatgtaaccattgggggtccgcttttaactgggactagtgtaactccttcaggcgggtacc

SEQ ID NO: 553193 - DNA, 305 bp, Homo sapiens
attagtgatctggagggtacttggtctaaccagtagttgtcttttcacgaacatggtacctgggaacttgaggtaatgagtttggacagagggagtaggcaaggaacagagagcttaaaattgaaaggttaatatcctaagaggaacctgtagctgaatgactacagtgttataccctccaatctttgcaggtgggcatggaacactgcttgtatcaccctgtgcacggtataaatccatatatccacaaaaacacacatccatccatcatcatatacatggtttgggatgagcaggtgaaatgg

SEQ ID NO: 553194 - DNA, 576 bp, Homo sapiens
  misc_feature (479)..(479): n is a, c, g, or t
agcggacatttgtcaatctgcgagaccggttcgccaatgtagtcggccgtaccgtgccgttcgtacaggccgaagacttctgcgattgcctgttcagtattcatcacgcactcccccacagctcagtgatattgcgctcggccatcgccggcccgacgctcatgcccacaccggtgtgcatcaacgccgcattcacccccggcgccgcccgcaggaacgaaaacggccctgggccacgggaaccatagacgccctgccagcgctccacgacctggatcttgcagcccaaggtgtgttcggccagttcgatcatccaggtgtccacttgttcggcattgaacggtgatggatcgctgccgttggtcatgactgaaaaggacgcggtgaagtgccgcgcctttgccaggcccgactggtggtaccttgcggtggacgcggcaccgtcaccggcgtttatcgcctggttcgacacgcagttnatgcgtttgctgcccgctcgccttttgccttaaaacgctgctctccaggacatactcatggacaccaaactgctcgatatcctcgcttgcccgatct

SEQ ID NO: 553195 - DNA, 226 bp, Homo sapiens
gaccggtatgagcggctgtggctctagcgtaggcttgcagctgtagctccgattagacctctagtctgggaacctccatgtgctgtgagtgcggccctcaaaaagacaaaagacaaaaaattttttttttttactttcatggcttttgtgatggacctgggttactttcatatggaaaaaaataacctctgttaaaaaaaatcagtctcagagttctcttgtggtg

SEQ ID NO: 553196 - DNA, 387 bp, Homo sapiens
  misc_feature (169)..(169): n is a, c, g, or t
gctgttgtcaggtgttggtaggaacaaacactaaatgattttgacggccttgagctttttcagacaggaactcaaagggtggccaggtggtcccagggatgccgctttgggctgccagaagccatgctagggttggtccagtctcttggtgcaggggtttggacgcagnactatgtacccaacttctgttagagttatcagtttcaaaccccacccgtgcccccaacaccatccccagtgtggggaggcacatcagtaaatatcagcctcttgacacagatgctcacggacctacacggtggcaaaaaagctcttaaaaatggggccgtgactttaggagcaggggcagcccttgaaccattacccaagttgggcagagcagggaag

SEQ ID NO: 553197 - DNA, 198 bp, Homo sapiens
agatggccgaataggaacagctccggtctacagctccagcgtgagaacggcagaagaccgggtgatttcctgcaatttccatctgaggtacccggtccatctacttaggaagtgcgaacacagtggcgcacagtcacagtgggttcgcgcacaccatcgcgcagcccgagcgcaggcgcgaggctacttcttctacac

SEQ ID NO: 553198 - DNA, 139 bp, Homo sapiens
acaggcagtcgtttaattacaggcacagagccacgacagccggcctcaccttcatgctcgaaggatgtatactctggatatagaattctggatatacagttgttttttctttttttttaactttttatttattttttcc

SEQ ID NO: 553199 - DNA, 320 bp, Homo sapiens
agcgaggccttgaagatggcgcagccgctgagctcgtgagccacttgatccgcgcgccgttgcggcagatctccgccttggcgccgctggtcgcattctgggcacccgaaatcgcgtaccggaagtccgttgccgtggtcgtaggtcagcacgtccttgtggtcgtcgctgatccagtcgtgcggcccagccagcagatccacgttctccttgcggcgcaggcccttgtcggaggcgttgagcgtcagcgcgcacagcggtgagatctcctcgccctcctcgttcttgtccacgcccatgccgtgctccaggctcgtggg

SEQ ID NO: 553200 - DNA, 619 bp, Homo sapiens
tctatgatctgctctggggacgctgatcttttgtgtgtgtgtgtgtgtgtgtgtgtgtgtgtgtgtgtttgcaagtggcgggtggtgcaggagacacagggtttcgctttgtcccctaggctggagtgcagtgacgtgcacatggctcactgcacccttgctctctttggctcaagaaatcctctgcctcagcttcctgtgtagctgggaccgcaggtgcacgtcaccacacccagctaattcttttttatatttttcacgtagagatgggctcttgctgtgtagcctagggtggtctcgaactcctgacctcaagcaatacactcgctttggcctcccaaagtgctgggattacaggcatgagccactatgtccagcctgacagatatttttgtgcatatttaggacaactcaaatatcgctgtctgcttgggaggcagatagtatgcatggagagaaggataggtaaaatgcagaggcctacacagaacattcactcctatgttggaaaacaacgcggttaagatgatggcagatgtcctttcgatctaacgcagtgtgaagatgtatcttgcatgaagcatgattactctgctccgcactctcatactcacccaga

SEQ ID NO: 553201 - DNA, 296 bp, Homo sapiens
gctcatgttatttcattaatttaaaggctaaaatttgtgtccttagctaggcacatacattcattgtttttcacttaatgcactcgtcatttgcatacgacagtggcattctgaccacacttgtacgttgtaacctcatctacttctgatgtttttaaaaaatgacttttaacaaggagagggaaagaaaccccctaaattttgctttgtttccttgaggatgtggcgacatgttttgtgattttatttgtgcgggtctgcccacgttttgttaagggcgtgacagtattggggct

SEQ ID NO: 553202 - DNA, 337 bp, Homo sapiens
atggagttttgctcttgttgcccaggctggagcacaatggtgcgatcttggctccctgcaacctgcgcaccatgagttcaagtgattctccagcgccctctcctaagtagctgcgattacaggtatccaccaccatgcctggccaattttttgtatttttagtagagacagggtttcaccatgttggccaagttggtctcgaacacctgacctcaagtgatccacccgcctcagcctgccaaagtgctaggattacaggcatgggccaccaaacccggccaggtctgtcttcttagctcacaggttgtacaggtctcctgctttctgcctctggaag

SEQ ID NO: 553203 - DNA, 734 bp, Homo sapiens
ggctgcccagaggccgggatccggagccgcccgaagccggtgccgtatgcgccctcgtgtgcccccggatgcccccgtacgtgtccttccggcaaagtggtccggactcgagcaaaattccggcgatgtgttcgggcatgcggtccaagaacgactcagtgctatgaggacattcagcagtgatcccgtgttacacagtgggacagcaccttcgtgcgaccgatgagagcaccacaagttcctgtgacgtgtgattgtggagagatcagtggagggggtggcttctctggctgctccccctaagcaatacgggccgtgttgcctaaggcactatccgtgaaggctggtgtgaggcagaacggtggacctgtgtacctgcgagatcgagctggctggtcactccacagacgagcggaatgatcagtaggcccaagacggcttgccgcgtacggggaaaccttggacccaccagggggcttccccaactataggcgcacttggctcgcgcgcaacgcaatttcacccaagggaaagagacccagggcatggacccttctcaccgggcgtagatcaaagacgcacggagatggtgggaacggtcgcctaggggctatgaaccaaaatgctgacggtggtgcagtctattcagccattgagcaacccgccactgcgcaccggaacaacgcgagcctagctcgattatgcactgggtgctaccacactgtggtaaccta

SEQ ID NO: 553204 - DNA, 457 bp, Homo sapiens
agggaaaggcaggataatgggggagagaatggagagagagaagtggagagtggaaggagagaggaaatagatgcacgagagacaggcaaataggagaggtggggaagaggaggaagatagtgagagcacatgagaagtgaagtggagaataagggtgatggagcagacagaggctgtagggctaaaggtggacaaggggagatcagggatggaatcagtagggagacagcaagagacatgtgcaggagaatgtgaattagagaagagagaggcaaatagaagtgacgaaagttaaaaagggcatgaacagtgagagaaggaggaagggacagaaagtgacaagaatggaggagatagtgaagcgaggtagcgcagaatgctctctctctctctctcgctctctctctctctctctctctctctctctctctctctctctctctctctctctctctct

SEQ ID NO: 553205 - DNA, 249 bp, Homo sapiens
agctgctcttgaggatcccctctggatgcaagtgtactaagccagctagggaagaacacacctttgatcttcagaagtgagcttatgtgcaaacactgggacagcccgctggctccccacaatacacacatggcacacagacacacacaaacacacacacacagacatggacacaggtacacacaagcagacacatacacacacagacacagacacacacacacacatacagagacacagacacacacg

SEQ ID NO: 553206 - DNA, 1530 bp, Homo sapiens
  misc_feature (285)..(285): n is a, c, g, or t
  misc_feature (838)..(838): n is a, c, g, or t
cttgttagctcgcctcgttgtgactcaacgagtcaacgcgctgcgtgcgttgtcctcgtcgtgtcgcccacctacggtgcgtggggaggtagttcgccccccccccccggccgggtgggtgtgggcagtctcctcggcccgctctcttttctccccccataaggagtgtatttccttttctcgatagggcgtcccacaatagtttatttaatatggtctccactagtggcccgccgtgttttctttggcgcctattgagaggcaccacatgttgttgcgccccanagagtttgttcccaaaaagcccacgcttttggacaaaaatggttgtcagaaggcgccacaccccctgtggagggggaatttttgtgcccccgcgcggagacacccatgccccacggggagtgattcccccggtagagaacgtcccctgtgaggtgttgtccccgtgtggcgaccacaggtgtgcacacaggagaacaacataagatggggcgcccaaaacacgcaacactatttgggcgggtgggaaattcccccgccgttgggccccactttgttgggacaaaaaaggggaattttttttgggttcttcgggagaaatactcttgggcgccccttcggggggggaacactttcttttatatctacgcgggacacatttagagtggctccccccgaaattattattctggataagattggtccgccacacttggtgcgcgcctttgtgataagctcattctcgcgcgatattgtgggcagatgatcctttgggattaaaaacacctttttgtgcgagagggatacagtcaacacatcctcaacacaacagagntgtttttgtgaaagagggaaaagagggcgcccaaagagtttctcgcctctccaggaggatgtctcccagatcccacagaagatgtcgacccctgtgactctcagagagacccctacttctcatcagataacacctttatataagcgcacacatttgggcacacttgtgtgtttctgcgcacatcactatccccctgtgtgggccgcgcacaccttatcgcctcacattcacagtctgtgttgtccacagcgtgagagcgctcacaatatatggagatcacacacccgcgtgggtgcgtgcacacctcggccacgaagaaagagaatgggctaaacgctgagactgtccacggtgaggagatccacaaggccacactttttataaatggggaggaaccgcaggcgaggcccgcgccacacatgctggagaacacaccgcggctgaaaggaaagggtttgcgctggctggaacttaacacggccccacggggagggcccacactaactggctgccacgcttttttcacctgaacctttatcttccccaggagagaattaacacgctcgaaggagggccacagagagaaagccctcccccctgagctgcaagtggaagggcaccccgcacgccggcccgggaggaggcggaggtggccaaaaaaacctgggccaatttgtttaaacccaaaaata

SEQ ID NO: 553207 - DNA, 211 bp, Homo sapiens
tacttgagattttgtgtcatatcaatttcaaaacatttgcgatcttggttgagctgcattatctttcctattgtatcccaaaccaaatcttataatcacttcatttaaaatactgagcggtattgaatacttcgaatcttaacaggcaatgtgcagtcctcatttggtgatgtaaagaccctcaggtatgactcccagggttgcatgcttg

SEQ ID NO: 553208 - DNA, 89 bp, Homo sapiens
gcggccgcctactactactactgctcgaattcaagcttctaacgatgtacggggacatgaaataaaattacaacatagctacctggggt

SEQ ID NO: 553209 - DNA, 529 bp, Homo sapiens
  misc_feature (8)..(8): n is a, c, g, or t
  misc_feature (10)..(10): n is a, c, g, or t
  misc_feature (86)..(86): n is a, c, g, or t
  misc_feature (91)..(91): n is a, c, g, or t
gacctcgngncccattgtttttgcctatcccagcaaaacacacacacacgactcttacacacacaaaataaagacacacaaggacnttttngcaacaagaaaagaatctcagttgccaagcagattgatatcacacagactcaaagcaaaagcatttggaacttctttatttcaaaacagaagtgtctccttgcacttagcctttgcagacccttgactccaggggagatgaccttggggaggaagtgtgtcaactatttctttaggcctgtttgcctccgaacctatatgtcccttgatctcttcctcggtttaaattttcaagtaaaaatgaggttttcattgcctcagctattctttctggcttttccttaaaaattcaacctttgctttaaaaactacaactttttgaaaaaaaagaacaaacaaggttccctttgcccatcttaacccaacccattatttttaaatacctttgccctaacctttttttgtctaaaaaaaaattttttcatatttaaaaattaga

SEQ ID NO: 553210 - DNA, 926 bp, Homo sapiens
ggatggtaacggggcagagaggctgtcgcagagtggggaagatgactgccagcaggatgtggatctagagtaaaggacagtattccagtgactgaacttcaacaagtggaccttttgaaagtcatgcatctgtcttcggaacgggtccaacttgttgtgaaaaatgagcttttgcctagatcatccccttgacttttcagcaaatgaaaatttccaggttcagccaagataaaatgaattgggagccacactgagaaagcattcagggtctattttgctccgctaagaattaccgatggcattcagaggcagtgccagcaggtacagggtcgtgccattttcttttcaaggctcaaatgttttcactggatgtaggagaggggtaatgatgagagtattgaatgtgaggatatgcatgatgatccatcaaaaagcgaaagttatgggagagccacacttgagtggtggaaatataaacgtcgggtgtactgtaatagtgtgctgttcatggaaacggaggggctgaatgcttgtgaatagtcatcttcgtactgtaatttgctgtcccacgacatagagtactgagagaaaaaaataatggaatgaagacaagaagccggtggggcccatcggccatgcaaatatgccaaaaccagtttggttgggaacacggccccgacgtcatgcagggcacagcggtgccagaggcaccggacaaaaccagcgagttcccacgaaaaaaatgacgggaccacgcgtatacccacaaagtggtgggctaggggacacaaagtagccaagtaatatgcaaccccgcgggagaaagaagaccaaccacacacagcggacagcgggaagcacccaaaccagagacaagagtagaagaacagaaacaaggagaagattaatcctctgcctagcaaagt

SEQ ID NO: 553211 - DNA, 131 bp, Homo sapiens
  misc_feature (98)..(98): n is a, c, g, or t
ggggacttcctctctcccactcagctcctgagtagcgtgactacaggtctgtgcccccacacctacctaattttctgtattttttttataggaacagntctcactatgtgcccaggctgctctttaactcc

SEQ ID NO: 553212 - DNA, 481 bp, Homo sapiens
ggtattcggcatacatactccgcgtgtagtgagccagttttttctgtagccattatactagagctgatgggatgcaagattgcagtcggcgtcccatcaggatcctttaagtacttctctgcattggttattccagatagccattcgtctaatcttttttcaaggtttttaacttctttgcgatgggttcgaacttcctcctttagctcagagaagtttgatcttctgaagccttcttctctcaactcgtcaaagtcattctccatccagctttgttccgttgctggtgaggagctgcattcctttgtaggaggagaggcactctgatttttagaattttcagtttttctgctctgttttttccccatctttgtggttttatctacctttggtctctgatgggagcaagatgtattgcccccatcagacacgtcttggactctgtttttgataaccaacaaaggtcaatgtatagaaatcc

SEQ ID NO: 553213 - DNA, 183 bp, Homo sapiens
gcttgatatcgaattcggcacgagctgacattctgattcgaatgacactgaccaggaatcggaatcctgtcgattatactggacagcttgtggcaagtgaatttgcctgtgacaagccacattttttaaaatttatattgtaaatattgtgtgtgtgtgtgcgtgtgcatatatatatatatg

SEQ ID NO: 553214 - DNA, 765 bp, Homo sapiens
cggacgcgtgggcgtgcacgcagttcccaacacttctcgtcatcctctctttggtctcttgattctgctgagcggtgctgtgaggatttcttttttattttattgatgcccctgaaccaagtgcgaaatgcttggtgggaaacggtctactacatttttaactgggaaagtactataatccatgttgaaatttgtggctttggaaggggtccatccgtgtttccctatgacagtcttctgggaaggagctgcctctgaaatactcttcttctggcttacatgaagatctctaaatgctatccagcaggaggtgctacagcaagataagggaaattttggaatttggagggtctggctaccttattacagctcgtgctaagcttcagcttaagcaacaggattaacaccttaaagttccagaaagatttggaggggctaaaaaagctgaaggagagccagtttccccaaaattgctgcagtgagaagaggagttggtaactttaaacagaggctgaaaaacttatagaattagcagagaacgtggaaaaggtagaggatggagtggcaggactctacaggaggctcttaaaggtggaatatcaggttcaccagaaaatgggtgtgctcaattgaagcaggatccaaagaatgctgatttaaagaaaacagcttcatgaactccaagccaaaaatcaaagctttgagtgagaaaccagaaagagtagttgaacaagctagggaagaacctgaatagtaaagcaagac

SEQ ID NO: 553215 - DNA, 100 bp, Homo sapiens
gtactgttcatcagtatgtatgacttcatagtaatcccatcataatcggaggttttggcaactgactagttcccctaataatctggtgcccccgtgtggt

SEQ ID NO: 553216 - DNA, 335 bp, Homo sapiens
  misc_feature (154)..(154): n is a, c, g, or t
  misc_feature (294)..(294): n is a, c, g, or t
  misc_feature (300)..(300): n is a, c, g, or t
gatagcagggtctcactgttgctgaggctggagtgcagtggagtggtctccgctcattgcatcctccgcctcccaggctcaagcgatcctctcacctcaaactcctgagtagctgagactacaggcacgttccaccacgccggctaattttttnaattttttggtagagatagggtttcgccatgttgcccaggctggtctcaaactcttgagctcaagcgatctacctgccttgggctcccaaagtgctaggattacaggtgtgagccactgcacccagcctatatatctaanaatggnattttttttttccctgcaaaaaaggtttaaaaaca

SEQ ID NO: 553217 - DNA, 842 bp, Homo sapiens
tcgatggaccctgccccgggggctggagctgtccccgtgagtgagtggacccccatacatgacccgagttcttcagctggctgggagccgcctggtcacttgaccctgcagatgcctgcgcctgggagtgacccagttgagaaacatgctacatgcactgatgcgggagggctgcctggcaaggcaaaagctgccccccaggtgtcggcttgtcaactgtgtcacctggatgactttgtgatgcccatgagatcttggagcctcaggcttggagtcaggaggacatgccaggaacaattggggtccttggtgtaattattgactttcccatgtggccctgcaaacatgcaggttgaggcttgtcggggtcaaatgccatggctgggtggacggtacttggaatggtcctttgggaattgacatggtctgtaagggttggttgcgcaatcgtgttctgtgtagaccccaaggctgggaggcaagggagggtggcatattgttgccccttaacaacaatcctttgaacacgccttaaccccctggaacccccctggctttgcgaccgactatgcccaatagagccgcttgcctctgtcaaggcccttgagacaagtcaacttcccttccttctcagcccaacaccaaggcccccaggccccccctgtggccccgaagcctccgaggcatcgttgtgccttcgtggccccgcgtcttgggggaccaggtgcccccggctttggtgaccaggcttgcggaattatgcctatcaaacgggactttgggacccccaagcgaagaaagtgtaggaaagtttctcccgaagatgctcattcgtcaacgta

SEQ ID NO: 553218 - DNA, 455 bp, Homo sapiens
aggccaacaatcaacgttattatttagcatttctggaagttctggcaaatatgttaagccaagcaaaagaaacaaagacaaaaaattgaggaaagaagacattgtttttatgtgtggtatgattattacatcaaaaccccaagaaaataattattacaatttataattcaaggctgggcacggtggcccacacctgtagtcccagcactttgggaggctgaggcgggcggatcatttgaggtcaggagttcgagaccatcctgatcaagatggtgaaaccccatctctgctaaaaatacaaaaaaattagtcaggcgtggtggtgggtgcctgtggtcccagctacttgggaggctgaggcaggagaattgtttgaaccctagagcagaggttgcaatgaactaagatcatgcccctgcactccagcctgggtgacagagtgagactaggtctca

SEQ ID NO: 553219 - DNA, 1315 bp, Homo sapiens
  misc_feature (522)..(522): n is a, c, g, or t
cgccgtcagaaggggtcctggtgacagagtcccgcgttctctccttgaatccacttcgccagcccgccgtcctctgccgtcggaaccctgttaacactcggccctcaccgtgatgtcaggaacttgtctgactacctgcatcatagtctctatccaatattcgagtagctgatccccggagtcacaaaataggacgcatgacttgacgattctgctcacgcgctatctgttgagcgaaccgtgggcacaagggccaatccgtagagtctgacgaggatgaggtccacgtagcgtgatcaattgccctatggcagggatagacagacctaattgagcaaccgttaccaatatcgaggtgtaccgaacctgggtcgtcatctctgtaccgccaatgcgtgcaatgcgagatcgacgatgacctgaacctgtcgtatggaacctcacccatgcgagttgggggtgggatgtccagtcgcattcaattcaccaaattgaggaccaagcgtcgtaactcaagaaacnacgcgggaattggacatggggggctgatcccccttttttggcacgcccaaagggcgtccaatcgaacacttcgccgagagggaagtccgaggatggttgtagctttgcgaaggcaactcaaaagtggctaacgtaacgactatggggtacggattgtggtacactctctcattggagccccatgggaggaagcccaaacaattggcgtcagcaaagcaccctgagcgcctgaatcgcacccaagggcggatttgggcgactccgagttggccgtacggattcgtcggcaagggcaggcttttggctagacccacccaatggtttacaacgaacattgcaataatggggaaaccagaagtaccgtccgtagcggatcctattagcatgagaccccaagaaagacttgggccgcaccgataatgggaaatggctacggcactttggaacacagccaattaacgggcgctgtgtaataaacagtaggacaaggatgcacccaacacctaattccctaagaggggccacacgtaacatgccccgacaaggtagcgaacttggggggaccattgactaaggttgggccccgtggagatttggtggatccattgtgtgggcacacacagaatgataaaatatgtggccccacgcgacatttagtatccaatgggaccgtgaataaccaaagtaagacgtatggtgggagaagatataagcattgggcccacaatggataccagaagtaggcggaacgtgatcgccattggtataagggaacttccagcatttcgccaca

SEQ ID NO: 553220 - DNA, 198 bp, Homo sapiens
aagccgtatgttaaaataaacagggcacttccaacaggcagtagagaaataagcaaaataaattacagcagtgtaatgggttaatgtgttagagaataactaggactgggacatgcatctttgactaggtggtcagtggaggcctctcagaggcagtaacacttcgcacttgcgggagacccagcacgaagcagatgg

SEQ ID NO: 553221 - DNA, 989 bp, Homo sapiens
  misc_feature (610)..(610): n is a, c, g, or t
agcggaagatgatgaagatgcccctatgataactggatcttcaggatgacgtccccatggtgatagcctgaacgagctttcctcactagaaaccaaatggtgtaaatatattaatttgcataagagatagtatgatggtttattttgataaaggatgcacttatgaagattggcaatatgtgattgtatctatatgggccaaacagacgagaaagaacgaagaaaagaaaaaaaagggaagaaaagggaaatgaataagacttggtgaggtaatctagagcgtgttgaaacttgtagaaaccaagggttgtggatctttgagtaatacccaattgtggtctttcggcatgtggacacgatgtacagtggtagttctgttcacaggggtctggtgactatgtgcagtgcggccgagtgctttaaaacgtttcgtggtaacacagatcaatgtcacgggctgtccgacggtaacactactcggggccaaaaaacgttctgtcatatatattttgcatataggcagcgaacagacaaagggtgttattcttgactgtaaattacaacccatgctaacgacagaaagttgaacgtcgggagtgggaataccccngccattttcgtccagtgtgaagaaacgttgtggtgtttacccagtacatttttaccagttttctggagtttcgggaaacctaattaggtttatgaaaggggtacatagtgtggttgctgtgaagttgctattttagagacggcgggaaagaggaggatacccagaatgagcgtgagttgaattcacgggggtaacactccttctaccaatggggggaaaacacatcccggggggacaagaggggcacaagggtgcataaacgaggttggggcgcatccatgttaagaaaacaccacaaacatggggttgtaatagaaggaaccgccccattatacggcccaataagggggttggggggagggtggcgacaaaccgcaca

SEQ ID NO: 553222 - DNA, 584 bp, Homo sapiens
cgtggtggttcacgcctataatcccagcactttgggagcggatcacgaggtcacgagatcgagatcagcctgaccaacatggtgaaaccccgtctctactgaaaatacaaaaattagctgggtgtggtggcacgtcgcctgtaatcccagctaattcttgtattctttagtagagacggggtttcagcacattggacaggctggtctccaactcctgacctcgtgatccacctgacctaagcctcccaaagtgctgggattacaggcatgagccaccgtacctggtcgatggtaaaattttaagctgactcttttaaaatgagtagaatctatgtataaaacaagaaaaatgactagcattctccagcatatactaaggacaataatacaatacgtgggcaaaatacaacctggcacaatgacctacatcagtctggcaacagccagagtaaaccaagattgctgaacgcgcgactgacctagttactggtgatgctatcacttcagcttgaaacacatgactctagtgtcccagctgctccgtcgggaataggcccatactcataggaataaacaccctcctg

SEQ ID NO: 553223 - DNA, 540 bp, Homo sapiens
  misc_feature (351)..(351): n is a, c, g, or t
ctgcggggctgccctggcccccggcccctcctgggcgccctggtcccgctcctggccctgctccctgtgttctgctagacgcgtggatgtggagggaggcgcgggctccgtcctctcggcttccccatgtgtgggctgggaccgcccacggggtgcagatctcctggcgtgtccaccatggccccgcagaacgccaggaccgcctgctgccaagggctcaggcatggacccctccccttctagtgcacgtgacaaggttgtggtgactggtgccgtgatgtttgacagtagagctgtgtgagagggagagcagctcccctcgccccgcccctgcagtgtgaatgtgtgaancatcccctcaggctgaagccgcgcgccgagcgcgcccaccgaggatgacacactcgggaagccgtcaggatgtcagcgtcgtttccgccgcgtcgacaatggcactagaaagggcaccggcccgtactgcgtgctcgcatgatccagctggggcccacctgtagccctagccacacagcacagcgacag

SEQ ID NO: 553224 - DNA, 506 bp, Homo sapiens
ccatgcaagaaatcactaactgccctacaccaggacaggaaggaatggcaggatggcgctagaaagctcagagctgggccagagcaagaggtgtgacactagccaaagacgggctctgactctgatccccaccaggagcctcgacagccacccactccaaccaccaagaccatggtacaggacacaagcgacacaagagcacaacacacaaccaaaggaccaggcgccaacccaagcaaacacagccaagggacggaataaaaccaataacacgcacgacacgggccacgaactgtaacggcaagacagcaaccaaacggagacgcccccccacaggaacacagcagccccgcaccacacgaaccacgaaagaggacccacaagagcccacaaccacacaaacacgcccacatacaatacacacccaagaaaccagagagaagagacacccaccaagcagaaacacacggacaaacaacacaagacacctgactggccccccacca

SEQ ID NO: 553225 - DNA, 302 bp, Homo sapiens
ataatgcttgtggacttcaggtccaatggtctccagaggatgaaagctggagtctgtacactgtcctactagagacagcacagccaacctagctagcaccatttgtattagactgaacaatatatactaatagaattcagtcaaagatacacaatctgaaacagctacatggggtgtactctaacagtggttgcaatgtattagaatgagcattacttctctgctcatctagatctgcactcctaggcctactttattcagtcaagccccaggctaaggcaaagccagtacacataaaagtt

SEQ ID NO: 553226 - DNA, 863 bp, Homo sapiens
  misc_feature (610)..(610): n is a, c, g, or t
  misc_feature (623)..(623): n is a, c, g, or t
  misc_feature (746)..(748): n is a, c, g, or t
  misc_feature (765)..(765): n is a, c, g, or t
  misc_feature (809)..(809): n is a, c, g, or t
  misc_feature (818)..(818): n is a, c, g, or t
  misc_feature (820)..(820): n is a, c, g, or t
  misc_feature (823)..(823): n is a, c, g, or t
  misc_feature (831)..(831): n is a, c, g, or t
caccatggcattcctttggcttgtgtcctgctttgcccttgtgggcgccacctttggctgtggggtccctgccatccaacccgtgctgaccggtctgtccaggatcgtcaacggagaggatgaatcccctggctcctggccctggcaggtgtccctgcaggacagaactggctttcatttctgcgggggctccctcatcagcgaaaactgggtggtcactgctgcccactgcggggtcaagacaaccgatgtggtggtagctggagagtttgatcagggctccgatgaagagaatgtccaggtcctgaaaatcgctcaggtttttaagaaccccaagttcaactccttcaccgtgcgtaatgacatcaccctgctgaagctggccactcctgcccagttctctgagactgtgtctgccgtgtgtctgcccactgttgacgatgacttccctgctgggacactgtgtgccaccactggctggggcaagaccaaatacaatgccctcaagacccctgacaagctgcagcaggctgccctgcccatcgtgtccgaggctaagtgcaaggagtcctggggttccaagatcaccgatgtgatgatctgcgcaggnccagtggcgtctnttcctgcatgggtgactctggtggccccctcgtctgccagaaggacggagtctggaccctggcaggcattgtgtcctggggcagtggtttctgctccacttccacccctgccgtgtatgcccnnntcactgccctcatgccntgggttcaggagatcttggaagccaactaagtacacggtccttncctcttccntnttnctcccccnccgtgcatctacaataaaaatcatctaattag

SEQ ID NO: 553227 - DNA, 491 bp, Homo sapiens
  misc_feature (161)..(161): n is a, c, g, or t
tcttgaggatctccattggatatgcggatagggcgaggggtacatctaagagcaacaccattccaggcagtaggaaaggaaagcagcaggctgtctcttcaaagagggcaatatcaagatcttgttcttcatcccctgctgaaagaccgaatttctcctgntcttacagatgaccaagtcgtgccactgcaccaccacgatactgacgaagaaggctgtgtggcaggtgaactccacgattttcctctgctcataggtccactgctgcccgtagctgtcttccacatcgttgatccagcggtcatcccagtccactcggaggcccaacaggtgaattgggaggaagccgttctcagccagaatcacaaagtaagtaaagaagcctcccaggggctggatcattccaatctggccataggccatgctgatcagccgctcattcacaagtttgtctgttttgggatttctaggctgtctcttcatgatgtcac

SEQ ID NO: 553228 - DNA, 626 bp, Homo sapiens
agctgtatctgcacccacagcgagaaagtccctagggagtattctgaccaaagtcttggtccttgaaggagaggcatagtcttctaattgctttgatgaatcacagaccaaacagtgattcagctctgaaaaaaaccttagagatgggcattccaaggtctcatggggttagtagcagaagcaggactggaacccagaacccaagttggaccactagactggtgcctctccctaagcccactctgcctcttccatgtctgtgaatgagcttaccactcctagctatgcaaaactgcatagaaccatttcagcaagaggctcaggtagcattaaagaagttcccacctcaacgatgtcaattttttgttactgttgtcttgaggaagcatgtttgcttttaaacgctcccaaattaaaagccattctcagccttcctacaattgtatgtgcgctgggcgcagtggctcacttctataatcccagaactttggcaggccgagccaggccagatatcttaaggccaggagttcgagaccagcctgcacaacacggtgaaaccccacctctactaaaaatacaaaaattagccgggcgtgttgacgggcacctgtaagctacccaggagg

SEQ ID NO: 553229 - DNA, 651 bp, Homo sapiens
ttatccaccttgttttgtcctaaagaagatgacctcaaaggcttcaatggtgatggggtcagcacgtacaagcggcattttggtgtagtatttgaagagaaaatgcctagcacagacactatcttgtcatgaacagtatggtgttgatattcaaacagtggtgcagagtggctctgttgacaatcaatggtagcatcccccgctctcagtatggagaaattggcaatggtccctacagctcatgtggtgcattcacctggatgcaatatatgacactttccaaaagaaatgcaagtcagcatttgccacatattatatttcatgatcgctgtcaaagttcaagtactagcacctttggatgctgcgttatcacgcagcttggtatataacctgggcaaggctacagctttctaaccggtgtcccacactatgggcatgttccttgttgccacaagtcaatgttgccttaggcttatgtcatcacatttatgagcatttcagcttctcataatattcagagataccttatgaatatagaccgctccttcttccgtggttcacttgcgctggtgtaaaagccccccgctctctaaggtgccttcccttcttgaatcaagctgcctatcttgggtgtgcgagtgttaattaaaa

SEQ ID NO: 553230 - DNA, 108 bp, Homo sapiens
  misc_feature (32)..(33): n is a, c, g, or t
cggctcatgggggcgcatcacatcttctcagnncacaaactcattctcagcagctgtgcggcggttaatttcatcttcgtacttattcttgaagtcctccacaaagcg

SEQ ID NO: 553231 - DNA, 652 bp, Homo sapiens
  misc_feature (15)..(15): n is a, c, g, or t
  misc_feature (61)..(61): n is a, c, g, or t
  misc_feature (80)..(80): n is a, c, g, or t
  misc_feature (165)..(165): n is a, c, g, or t
  misc_feature (211)..(211): n is a, c, g, or t
  misc_feature (293)..(293): n is a, c, g, or t
  misc_feature (321)..(321): n is a, c, g, or t
  misc_feature (330)..(330): n is a, c, g, or t
  misc_feature (340)..(340): n is a, c, g, or t
  misc_feature (348)..(348): n is a, c, g, or t
  misc_feature (350)..(350): n is a, c, g, or t
  misc_feature (354)..(354): n is a, c, g, or t
  misc_feature (356)..(356): n is a, c, g, or t
  misc_feature (361)..(361): n is a, c, g, or t
  misc_feature (366)..(366): n is a, c, g, or t
  misc_feature (392)..(392): n is a, c, g, or t
  misc_feature (399)..(399): n is a, c, g, or t
  misc_feature (403)..(403): n is a, c, g, or t
  misc_feature (422)..(422): n is a, c, g, or t
  misc_feature (434)..(434): n is a, c, g, or t
  misc_feature (449)..(451): n is a, c, g, or t
  misc_feature (496)..(496): n is a, c, g, or t
  misc_feature (502)..(503): n is a, c, g, or t
  misc_feature (506)..(506): n is a, c, g, or t
  misc_feature (508)..(508): n is a, c, g, or t
  misc_feature (515)..(515): n is a, c, g, or t
  misc_feature (525)..(525): n is a, c, g, or t
  misc_feature (571)..(571): n is a, c, g, or t
  misc_feature (630)..(630): n is a, c, g, or t
tgtccttactagtgncacattcttgctgaagaacaagttctctggaagtgaaactcaaatnggggagaacaagagatacnggtaggtatcagttctgctagggtcttcagggagcccgggggccccaaaacagtgctactcaaagatgatctgcagacttgtgcnggtcagtgaacacctttttttttttttccccagtctgtgacgtggngatttagaaattgggggtgtttaaaaactttttagcatttcaatgttgctgtgatatccaagtacatgatcaatggccttancctacagaacagtctggccagtttgggngctgtcaancttgccgggncggcagcncncagngngaacnccatncctgtcatcggcaataggaatgcatnttgatangtgnggggctggaaaacaaaaancctggtcctttnccatacatagtttgnnncagcctgccctagggtcccataactcccccacaagtcctggaatncttccnnaantntttggcncccagtctgncctggggtcaacctgctcactttcaatcaaaatcaaaataaaaatnagtgccttgggaacaaagataaagtggactagggcatctatttagattcctggagtaanccctggctaggctagcagaagt

SEQ ID NO: 553232 - DNA, 241 bp, Homo sapiens
gcgatagacattgtatcccagagcgaaacacatacatattaaagttcacgtataacacttcttcatcatattatacagttgctcagaattcattttctgacatattgtaaatatagactttttcaaataaaactgttacattgttttttgaaatgtatcaagtggtatgtaacatacccttactgaattgatcattaccacgcccaggtaattttttggcttttttttttttttaattgct

SEQ ID NO: 553233 - DNA, 159 bp, Homo sapiens
accgatttgcttaaccgggctcctcacgcccgtaatcaatatagagggagggcatgtgcgggctgtgtgtgtctgtgttagggcggtctggacttggcagtttcttgctcccagcacccggcccctcctcacctcttccttattccatagctgagagag

SEQ ID NO: 553234 - DNA, 941 bp, Homo sapiens
  misc_feature (12)..(12): n is a, c, g, or t
  misc_feature (522)..(522): n is a, c, g, or t
  misc_feature (563)..(563): n is a, c, g, or t
  misc_feature (941)..(941): n is a, c, g, or t
taaagaaagaantttaagagctgtgagacagaagcaccacgtaacctataaaggaaaacctatcatattaacagcagatttctcagcagaaaccctacatgccagaagggattggagccctatcttcagcctccgtaaacaaaacaattatcagccaagaattttgtatccagcaaaactaaacctcatatatggtgcttagctatctattttgttatctattgttgttgctcaaactgttcaagctttggccattgggagctctttcacattggctcttgtgtacttttggcatgccctcatccactttgtttggagcacttcttctttctggcaccacaggatgctccaggctcatcttgtgttttcttctctgcattggccctagacttagtcatttctcctaggagccctggttcttttttttttttttttttttttttgatgaatggccttagaaccaagatcttggtgatgggtgtgctcattgctactgtgatgacactgcttctcccattctanatgaacagaactaggaaatatatgtatgtgactaccactgnatatacatatccttttatgtcctattgcatattattaactaacattagttcctgacttaaatgatgaggtctgagcccacatttatctgcttatttcccaactctatatgtctatttcacaaacattgcttataacacgatcacaccaaagccactatatttactgatcaactgtcatttctaccttgctcccttgtattgaaactattggcaggactaactaattctcctttgccaccgaacggaacatggagctccgatacgaaaacctcactgcgcgcgttgcttctctgaatataccctccaacaaaaactccccctgcgttgcgtctgggacatccccagcacgtttcttcgtaccattattttatcacttan

SEQ ID NO: 553235 - DNA, 201 bp, Homo sapiens
tttgcatcagttgcgggagaagcccgggtggctctacaagtgagagcaggtacacagacagaggctgacagagccctgctccctctgctctagggggtagtctagggagccccagctcagaccctcccaatgcttatatgctgaagctcacagaatgggctatcttgcctgacagcaagtccaagaatgagtttaatatca

SEQ ID NO: 553236 - DNA, 140 bp, Homo sapiens
gaccaagtatagcaagcctctaaaaggactactgagaaacagaatcagaaactctagattccagttgtatttgtcacctgggttgacatgaccagacaggcttttccaggcctgggtatccagggaggctctgcagccct

SEQ ID NO: 553237 - DNA, 1375 bp, Homo sapiens
gggcaaatggcggacttcgagagctacgacgatcgggcctacgaggagcttcggcgtgcggtagagggtcccggcggctagtgcgtggtggcctagtggttcccgatagccctagaaggatgttggcccacatgagccccccgtacacagcatacgtacggaaatctacctttcaatacggttcagggcgacactgagcatgcgtatctttgaaggcagtctcagccactaacgcgagtgttacgggctaggtcagagtagcaatagaacgcagataaatgttaaaggacttctgctaatgatagaacttcgactgaaggtggcattccgcgttaacggaaggccttgcacagtagcagatggtgcactggttggggcgactcggtctactatcgatggtggacgagttgcacgataggcgaggaaaatcatagcactacaacggtgcgcttctgcgagttcacgaaacaggtgagacccacgatcgcacagaaggagatcgcggtaggactcctcggacgaattctacggacgcgtggactcgtggcactctccccagtgggatcgcacttacaagcttcttggccgttcacgagcgcattagcaccctaccctgcaccggacgcgcggcacacggcgcgaaggtctaaagatacggcgccaatcgccgcatgccgcagcggaaaacacaaggagcgccccccccaacgagcgcaacgccggccctcccaccgcacagcaatccggcccacactccccgctcccaggtaggccgacatccccacaccaactgcgacttcccaccgacggaacaccccaaaacgacgacagagagggacacacacgaaggcccccaaggaacgacgcgaccgacacacccacacggctcacacaccccccgcaaacaagtccggcggaacgccccccatcaaacccaacgagtaccacacagcaaccccaacatccgaggcacacatcagcccggggcggtcgctccaccgggccataccacccagggaaccaccccgggcaccaaccacacggaccgcaccagaacaatgaccgcccccgtcccggctaaggacgcccgcgcaacatggagacccaggcggcgcgcacaaccaaagccaagcaccccacacaacaccacggaagcacaatcacagcgcgccagacggaaccaggacccaccgacgcaactacgcagccccccccgcacagcccaacaacagaccaggaaccaaccgcataagacaaaatagcaagaacggctacacccacgcagcccagccacacatagaaacgaaggcacaaacaaaagacgcgagacacgaaccgacagccacacacaccccaccacccaacagcacactgg

SEQ ID NO: 553238 - DNA, 200 bp, Homo sapiens
tcactgaggctgaagtacagtggcgtgatcatggcgcactgcagtctcaacctccggggctcaagtgatcttcccatctcagccttccaagtagctggggaacccaggtgcacaccactacgcctggctaatttttgtattctttgtagagatggggtctctcccatgggcacagtctcattgtttctatagtttattac

SEQ ID NO: 553239 - DNA, 1143 bp, Homo sapiens
gtctgaagtgcggggtgtcattcgccctaccgcccgacggctgcttgtagactcccgtgcaccgctgctcatgtaggagtcagcgccccgtaggcttgtcgccaaggtatgcagcggctgattactcaggagaccaagctgtgcctgagtgtaaactacaactgtctagcctagccgtgtccggagaagccgtgatgcgtggatggtagcaagaccgaagcctgcacaacgaaatagtgatactctcagacacaccgagaccagactcggcagtgaatcctgctgttaccgcaagtcgcgttgcctatcgacactgtgaactagaggcgattggaactgagattgcgcttggccttctgcctaacgcgatgtatggggctagaaagtctcgtggtgctagttcgggtggactctcatatgcgagggagcacgagcggggctcaatatgattcgtacctgttcgacccgtgttggaacatcgagagctaaacggggaagtgtgacgtgtcttggagaaagctagctggcagtgcatgtagccacgcctggggacgtcgagagtcgtacatgagcgtatttgagtgcctgagcgtgggttaatccctatagacctgatcagagcccgtaggcaatctgagcagtgccgtttagacgctttcgtgttgtgccgctggaaggctcctggtgtcgactggccttttgcgtgccctcacagtcccgttacctccctagatcggctagtattgtgcttagcatccgtgagtgctgcatgttggccatgactggatagctttagtgtaactctaccagtcagacgacttggtcaccaggagcgtggaaccgtaccaacgcggcatattccctgaagccacatgctgtcactgaggtccaggaggcgttatgtgcccaaaaaggtttggtggtcggctaacaccattttcccaggaaggctttagaaaccgaagcacggcataatagggggataaaggagtcagagatgataagccaatagtagttgtgtggtggagaaaaacacatcgaggttgagtgcacaacaacgcgctgtgatatagcagcacatatacgactgacgagtcaaacacaaagatgacgcgtagcgacagacacagatcacagcagata

SEQ ID NO: 553240 - DNA, 269 bp, Homo sapiens
ggtggatacggatgggagggggatcgctgatgtggcctggggtcggctagggagtgtggtccctacccacaattctctcacccgagtaccctctctgtatctaccaggggtggtagccatgtggctgccccatttatccacctccatcttctttgcagcctgggtggctatgggtacttcgtgggcgcacatcctacagttggaaatccatccagaggtcatgttccaataaacaggaggtcgtgtatttggtcacgacatttctctga

SEQ ID NO: 553241 - DNA, 168 bp, Homo sapiens
ttcagtagtcgtcagctcatttccctcaagcgggtggtgacgtcgtagaaatggcaaggctcaaacttccaagcacttgttatacacttgtaacccagcttgggtaatgggacacgcatcaaaatcagatgaacaagggacggctgttttgcagtcagcagtggggtt

SEQ ID NO: 553242 - DNA, 362 bp, Homo sapiens
  misc_feature (24)..(24): n is a, c, g, or t
  misc_feature (73)..(73): n is a, c, g, or t
  misc_feature (98)..(98): n is a, c, g, or t
  misc_feature (106)..(106): n is a, c, g, or t
  misc_feature (134)..(135): n is a, c, g, or t
  misc_feature (148)..(148): n is a, c, g, or t
  misc_feature (151)..(151): n is a, c, g, or t
  misc_feature (170)..(170): n is a, c, g, or t
  misc_feature (175)..(176): n is a, c, g, or t
  misc_feature (218)..(218): n is a, c, g, or t
  misc_feature (247)..(247): n is a, c, g, or t
  misc_feature (294)..(294): n is a, c, g, or t
  misc_feature (324)..(324): n is a, c, g, or t
  misc_feature (348)..(348): n is a, c, g, or t
ggtgcacggaggcgctggcccttntgtggctagaccgagcctgtgggatataccacggcagaggagcccatanccatgaggagcctctgggccctgcncttgctgntgagcgcctggctgtgggtgagcgctgnncctgtgccaacgncgnccgacaacattcaagtgcnggctnnaatatctctcggatctatgggaagtggtacaacctgtgcatngggttcacctggccctggctgaagaagancatggacaggatgacagtgagcacgctggtgctgggagaaggcgctncaggcggagatcagcatgaccaggacttgntggcggggtgtctgtgaggagacntctggagcttatgg

SEQ ID NO: 553243 - DNA, 421 bp, Homo sapiens
  misc_feature (18)..(18): n is a, c, g, or t
  misc_feature (60)..(60): n is a, c, g, or t
  misc_feature (85)..(85): n is a, c, g, or t
  misc_feature (174)..(174): n is a, c, g, or t
  misc_feature (200)..(200): n is a, c, g, or t
  misc_feature (383)..(383): n is a, c, g, or t
  misc_feature (394)..(394): n is a, c, g, or t
aagggtatgcggacgagncaccccagtctgagatggctcctgcggttgtgagcctgaggncaccatcctctgcctcctggctggntggctggctgcaggtgaccgggtgtacatacacccttccacctcgtcatccacaatgagagtacctgtgagcagctggcaaaggcaatnccgggaaggccaaagaacccaccttnataactgcttcaattcagggcaagacattccctgtggatgaaaaggccctacaggaccagctggtgctagtcgctgcaaaacttgacaccgaagacaagttgagggccgcaatggtcgggatgctggccaacttcttgggcttccgtatatatggcatgcacagtgagctatggggcgtggtncatggggccancgtcctcttcccaacggctgtctttgg

SEQ ID NO: 553244 - DNA, 675 bp, Homo sapiens
ccaccccactcttaatcagtggtggaagaacggtctcagggataatattcatttagccttctgagcatacagggcagacaagaagatgcaagcaaagaaaaaacggagccaagcaaagaccgcaaaagactagagaacaagcacaacacaaccaccaaagcaccacagcagcagcgcaacgaacagagagagccaggagcgccgggcgacaacaacgaaaaggaaaagacagcagaagaaaacaaaaaaggacacaaagacaagacgaaaaaaagcgcagacaggaaaaaaagaagacaaaacacacaagacagcaaaaaagaccagaacaagagaagaaagagaaggacaacgaaaggaacagacaaggcagacagagcacaaaaaacagagaagacaacgaaagaaaaaaatgaacaagaacaaaagaaaacaaacgaataagacacgaaggaatagagacaagaacacaaagaacagagagacaacagaagaaaagaaaacggaacaagaacgacaacaccaaaaacaagaagaaagaagaaaaagacaaagtaagaagacaaaagacaacaaaaacgaaaacacagagagagaagagagaaacagaacagagaacggagacaaacagacgaagaaacagagagaagagagagagaagagagacaagagcaa

SEQ ID NO: 553245 - DNA, 476 bp, Homo sapiens
agcttacccttactggatctcagacgtccagtcctccagggctgtgggagaatcaatgtgtttggtctctaagccgtccagcctctggtattctgtgacagcagcctgagatggactaagccgtctcataagaagagacgatgacatgtacacagacatagggaggatcctgtgaggacactaggagaagagggtcgtctccaagcccaggagaggggcctcaggaggaaccagcactgcccacacctggatctcagacctccagcctccagggctgtgggagaatcagtgttttgtgtctaagccgcccagcctctggtattctgtgacagcagcctgagatggactaagccatctcataagaagagacgaggacacagacacacacagagggacgaccctgtgagggcacagggagaagacggcgtctccaagcccaggagaggggcctcaggaggaaccagccctgcccacaa

SEQ ID NO: 553246 - DNA, 1878 bp, Homo sapiens
  misc_feature (393)..(393): n is a, c, g, or t
  misc_feature (404)..(404): n is a, c, g, or t
  misc_feature (408)..(409): n is a, c, g, or t
  misc_feature (411)..(411): n is a, c, g, or t
  misc_feature (423)..(423): n is a, c, g, or t
  misc_feature (425)..(425): n is a, c, g, or t
  misc_feature (443)..(443): n is a, c, g, or t
  misc_feature (445)..(445): n is a, c, g, or t
  misc_feature (465)..(465): n is a, c, g, or t
  misc_feature (470)..(470): n is a, c, g, or t
  misc_feature (489)..(489): n is a, c, g, or t
  misc_feature (492)..(492): n is a, c, g, or t
  misc_feature (495)..(495): n is a, c, g, or t
ttgggtccgggtgcgtggctggaggcagcgagcgccgtatcttccgggcccgcccatcggggtcccctaccccattccggaccccggcgtgcgagcgcgcggccccggtatcacccgcctcccggtcatggtgctcaaggccttcttccccacgtgctgcgtctcgacgtgacagcgggctgctggtgggacggtgggtgccggatcagatcagcgccgtggtcctggcgttcctgcactttcccttaatccccatccaggtcaagcatgctcctgtgcccaggtgcggcaggccagccaatgtgtggacgtggccgtgctggtgcacctgtgtgccactgccggcaggagacccgaggagagcctgggtccgcttcctggagagcctgggtngctgtcttccnccannangccctggctgcngntgtgccgggagagaggcngnacgttctggagctgcgaggncaccnaccggcaagcgcccactgnccncgntgcccctggtgaggaccaggtcatgctcatcttctatgaccagcgccaggtgttgctgtcacagctacacctgcccacctgtcctgccctgacctgccaggctggagccaccactgccagcaacaggggtggccatggctgcctgtcttcgacacggatagcactgcagtgagtgtgctcttccagacagatgaccgcatttgatgagtggccccgatgcggctgaggccacatggacagtacggagggcgtggaggaccacgcatcctcgcggatgctggcacaggcagacacctcgaggacccatttgtctgcatgttcggaccagacctgcatgtacgcataggtctacaagactgtcacgatgcacttgcgcgaagtggttcaaagggctactgggacacccatgatcctatacctacgagggacgcaaaacatcgtcacaacggtgacggaaacaggactcctggcaacccgggctgcgagaccaccatcacagctacatctacagctacaacgtgacagggcggacgaaaacccctgaccacaagcgtgaaatgcaggaacgggccaaccaccgggagagacctcacttgatgactcgcttggcacagttggccccttgggcacatcaatgcctgctgtccctgagcatccaccgggggaggaaagccgagatcggggcattcatgggcactgaacgccacaacggctccctgtgggcatgaacacgttgggcagaaggacgcatcaaggacattacgtgatggcagataggcatagaactggggatggatcacacgcctggggactcacgaatgaacccactggtgcgcagcagggtacaccacggttgcctgggggaacgcagtacatagccatatagcacaaaatccaacatggtgtgaatacgtcgttacaaatcccagccatcaatgtatgcacacataccgtagtgagcacaacatcgcattgcggaccgttggcgcatcatcgtagcctggtacgtggcaccaatcaagtgttgcaccatgcgtaccaacccgacgctcgagacagtagacttgcagcggccctataccggttacaacaggtcaacggcggggacgcagacacatcagtaggcccacatggttactctcacgaaagcgaccagtggcaaggagccacaagcagcggtcatagaccgagcagcacttcagtcagtgactaacagctaaacagaggtcgtacaagtacgcgtagcctgggcagagcaccgaggcacagtaggcacaaagagataggctagaagcatagaggtcagagcagacgagtcgacacctatgcagtaacatgtgtccttctctccttcgctcgtgctctctctcgccaccaacagcg

SEQ ID NO: 553247 - DNA, 797 bp, Homo sapiens
gacggggcactggggaggcagggttgggtccgcctcgagcggggagggtgatgctgcaccacagggcggggctggaggtaaagcgcggagcggagagggaccaggctcggactgatttgtgtccaggctagcccagaggggcgggccagatcatcagaaaagcccttactgaggaaaaacgtgtctcaacaaaaacatcagctgcagatcttgtgacgagaaaccagatcaccttgtgggaagatttaattatttctgagttgcgagagaggtttccttcacacaggttcattgtgcagaagaggccgcggctttctgggggccaagtgtgtgctcacccagagcccgacgtggatcatcggacccccatcgacggcacctgcaattttttgtgcacagattcccgacgtgttggcggtatacgcatgtggattgtgctgtgtccgacaagagcttgaattcggcggagtgatttaccactgcaccagagtgaggcggattgtacactgggcgccggcggggtccggggcgccttctggcaatggccagcgggctccggggtctccgggggagacagatctctcaaaagggccttggttcctgacagacaatttggcccaaatggttgaaccctgcgacccttgaagcctgtaccctgagttaagcatgggagcggttgctggattggcaagggcggcatgggtccccagtgatgggaagctccccattggccctctgccactgggcccagggggcccggcggtgcctataaccgttgggcgcgcctggttggaacg

SEQ ID NO: 553248 - DNA, 427 bp, Homo sapiens
cgggtattgtcgaaggacactttttcctcagcgcacggctagtccaaaatcccttggtgagctgaaccgttgctcctgggatgaccaacgcttgaagagactacgttactaacttgctcaccgcttcaatatgtccacactcatagtgaggcgcactgcaccccgattttctgaacgctgcctaactcacccaccagaccacatcatgttctcatcattaacttcccaagtgtccttaaaatggctgctgtatgttacaatatgtgtgtcttcaccggcctgctcatcaagctgcaggcgtacaaaggtgaccatgacatatcgccctatcagacgctcagtcataactcatcgttctaactcttctgcgtactgggcaaagcgtgcgcctacgatcttagtggccctcggatatctctcttcgcgc

SEQ ID NO: 553249 - DNA, 120 bp, Homo sapiens
acgtggtcggatcatctggcatcacttactccatttagatctacgtttctccctttagaatagaaatgtctgtcttatgcctgtcccaccattgtattttggaagtgattgttccccgct

SEQ ID NO: 553250 - DNA, 109 bp, Homo sapiens
gccccgcccatcgacccccttctatgaactctccttgagcactcctggcctactggtagatggcggcggcgcaggaggcggacggggcccgcagcgccgtggtggcggt

SEQ ID NO: 553251 - DNA, 128 bp, Homo sapiens
gcacgcagcaatccagctcaaaacgcttagcctagccacacccccacggaaacagcagtgattaccctttagcaataaccgaaagtttacctaagctatactaccccagggttggtaaatttgtgcca

SEQ ID NO: 553252 - DNA, 398 bp, Homo sapiens
aggtgcgctcagacacccgggatcagtcagaatataaaaaggaagcagcaggacacgcccggatgccctgaccacagagacgcatccagtattggcagcgttgggcttggaggcttctgcaccgattctgagagttctgccagcctggatccatgccttgtgtccccagaggtgactgagccaaggaaggacccacagggagacaggggggcagaaggttctttggttccagaccaccacccgtcccaggagtgagaggaaccctccgtcctccattccctttgtcgagttgtcccccgaagttttggttgggaaagtccagcagaggtacctgaagattggtcctcaagatcaagtcttcccagtgggggaacctgccccattttccccaggagaat

SEQ ID NO: 553253 - DNA, 341 bp, Homo sapiens
cttgaggaccccgggtcgagggcgtacaacaagaggtctggctagggttagtgtaaacggtagactttattgatcagtgaatatagtgtccaagaattgctaccaccattatccatgaggaaaatgtaggtaagataaagaagtgggactgatattggtgaatgggaggacagctagtaaaaagtgtatgatttgagtgaacattttggtagaccaacatgtgtatatagatatagttggctatctggggatatgaaagatggtctactttgtcatccaataacttgggttctgggtctcatttctttggttaaaagccctcaaattcaacaatttgcacc

SEQ ID NO: 553254 - DNA, 385 bp, Homo sapiens
gatgtatcatattggcaggctgcttgaactcctgatctcagtgatctgccactggctccaagtgctggatacaggcgtggcatggctgccacatgtatttatttgcatcaacttgaaggaaattttcactgggtatagaattttgggttgtagggattttctcttggatcattgtgatgatcactccactgtattctgttttccactgttgcttttgagaaattgccttgtggtctaacaggtgcttctttgacagtaatcactcttttttcctttggctacttttaagagcttctgtctgtcttggaggtaggcatctcactaacgcgtatctaactatgtgcttttatttatcacgcatgagatcctttgggctcccccaagc

SEQ ID NO: 553255 - DNA, 90 bp, Homo sapiens
aagcgctcgaacccaggagatggagggtgccagtggaacagagatcacgccactggagtgttactcactccaagcctggtaatcaaatcc

SEQ ID NO: 553256 - DNA, 803 bp, Homo sapiens
gaacccgggaggcggaggttgcagtgagccgagatcgcaccatgcactccagtctgggcaacagagtgagattccgtctcaaaaaaaaaaagaaagggaaaaaaaatatagcattatacctcttcctggtctcaacgcgccaggaaaattctggaacactccaaatccaagtggaataatccaaaacaaaatttataagtataaaataatttcactctcttatagtaatagtatactttaaaaagcctcagggtatatgatcttctaaacagctacaattcaagtggcacgctacattaaccaactatgtcctctagtggagaacaattaggcctatttcactgctgtgtagcctcagggcctaactgtgggtgccaaataaatatgcggtagaattacacctggattggtaaaaaccattcgtttggtttacaaatgtgccaaaaatctcaaagaggccctgtatttatggtaattcttggaaattatattgattggattcctcagttatggactggttgggtgtgactttagtacataggtactcaatattataaaaactcaaatatttggctgggattttacacaagatcttcccttttctacaagttaattttcaacaagtcatggggtatctctaaagaggtatattgatggttagaagcatgttcaaatttttgtgcttatcaggactattgttagattttcccagacgaattcataatttcaagagccattctgctgaagatttgcaggagtgaactttactttgggatttaacacttgtgcgggctgagggtatt

SEQ ID NO: 553257 - DNA, 353 bp, Homo sapiens
cattttttaaaaaaaaaaatctcataggctggtatgaggaatggcaaatctcgcccattatttattatcaatttaaaaatatttctaaggcctttggtggtggcagcctcttttcttgattgttttcatcaaataaggtacatttgtgggaaaaacatgcttattttcttatatttccttaccaaaacttgaagtcaggatattacccttccttattaaaacctcttttactaagactggcaatgaaatcccattggatgccatattgggcactgtggaccaatctccaccctctgtatgccctctctttttgatgtggccacggagaggtcactgtctcctgacctgccctt

SEQ ID NO: 553258 - DNA, 493 bp, Homo sapiens
  misc_feature (4)..(4): n is a, c, g, or t
  misc_feature (208)..(208): n is a, c, g, or t
  misc_feature (217)..(217): n is a, c, g, or t
  misc_feature (221)..(221): n is a, c, g, or t
  misc_feature (240)..(240): n is a, c, g, or t
  misc_feature (249)..(249): n is a, c, g, or t
  misc_feature (251)..(251): n is a, c, g, or t
  misc_feature (269)..(269): n is a, c, g, or t
  misc_feature (284)..(285): n is a, c, g, or t
  misc_feature (293)..(293): n is a, c, g, or t
  misc_feature (295)..(295): n is a, c, g, or t
  misc_feature (302)..(302): n is a, c, g, or t
  misc_feature (306)..(306): n is a, c, g, or t
  misc_feature (310)..(310): n is a, c, g, or t
  misc_feature (336)..(336): n is a, c, g, or t
  misc_feature (348)..(348): n is a, c, g, or t
  misc_feature (385)..(385): n is a, c, g, or t
  misc_feature (393)..(393): n is a, c, g, or t
  misc_feature (488)..(488): n is a, c, g, or t
cttngtttttctacccatgtagttttcttgcaaaccaatcagaatccatggctttatacaatttgcctaaaatctcgacccgagatatatgcttcatgaaattacaaaatgcatcatatatcattcatggtcaatcctgccttttctagaacttttggctgctagcatatgttggtccaagctaatagttgatcttttggatcctganacacatacntaanatccctcaaatatgccttnggcttatantncatggccagagccttttnctccgccatgattannattgcagntncaccatnagtnaagnaagaagaatttgcagctgttactgtnccgtaggcttcnatgaatgcaggttttagtttggccatctgctccagtnaggaaggncggatgccattatctttggtaactgtatcttttcctggtactttgaagggtaccacatcagaaaggagtccttcatcctgtgccttcttggctanactgt

SEQ ID NO: 553259 - DNA, 395 bp, Homo sapiens
  misc_feature (386)..(388): n is a, c, g, or t
  misc_feature (392)..(392): n is a, c, g, or t
  misc_feature (394)..(394): n is a, c, g, or t
tgaaaatgtgtctaaaatggagtggaagtcaggggccatcaccgaaggggactgacaccagggaagctagagcctagcttcccctccccgccttccccctagggaaggacccagaatttatgctgcagagctaggaggtcagactgggcaaaatagagctgtctgtattgtgcccagggttgaggtgggaggaatgtttctgctcaggcaaggctccaacaagccaggctgcctgttaaggggcacagatttctggccctcttaaaaactgctatgttggcctggtgcggtggctcatgcctgcaatcccaatactttgggaggccaagatgggtggatcacttgaagtcaggagtttgagaccagcctgaccaacatggtgaaannntttntnt

SEQ ID NO: 553260 - DNA, 125 bp, Homo sapiens
tagctggacatacttctggtgggcactgtgcggaaacttgaggatgactcgttgagctgcatgccttaaaggcatggcgtgtctcctcacttagtgcaggtccatcgaccacaagccctgtactg

SEQ ID NO: 553261 - DNA, 838 bp, Homo sapiens
  misc_feature (7)..(8): n is a, c, g, or t
gattttnnttataaaaataagggatcggatggagagagctggcaatagagtgagccccaccacgtggtaaaatatgggtgacctacccttattttacacacaaacctggaccgtgttaaccccgccattgttaccacgggaaatatatccaccctatggtattatagaacgttcccggccaccacgacatgtcccaatgggttgcaccattaacctggagtggtccttcagacctagccatccgtgttttacagacccacgggcaaacgtttcttttcggcgggggatattttttgaaaacaaattttggtggtaccaaaaagttccgcgcccactatactgtagccattcattgtccccccgactactgtccccccaaaatggtgttccccccaacttctcgtcgctttacctgcgcgaagtagaaccactgcctcattttttagaaagaagctctcgtcttctaggccgcacctcgttgggcaaacacaaacctgggtaaaacccaaagttatatgttcccaagcacccggagaacgccttaatcattactccccaagacgtccaatccaaactctgtcgcgtggagcacacccttccgcaaagacaaatgttacaaagactttacagctgtacagaataagggttctccaagggtataaattctttgtgacagcccaaggaaatgccggttcccacatataccccaccaatattttttcggaacaccattgcgggtaattatcattgggatacatcatccataaataggagcagagtctctctccttttgtttcaaccacctaaatttctttaaaaaaatgcccttcggccacaa

SEQ ID NO: 553262 - DNA, 140 bp, Homo sapiens
caaacagcgaaacgatagatacatatctctctggaccagtgattctgtggtgaagctggatgaattggacatgatgcactcactgggtgtgatggcgcttgtttaatgaaaaacgtgcacgcgagagatgagttccgcta

SEQ ID NO: 553263 - DNA, 889 bp, Homo sapiens
  misc_feature (172)..(172): n is a, c, g, or t
  misc_feature (243)..(243): n is a, c, g, or t
  misc_feature (261)..(261): n is a, c, g, or t
  misc_feature (279)..(279): n is a, c, g, or t
  misc_feature (348)..(348): n is a, c, g, or t
  misc_feature (380)..(380): n is a, c, g, or t
  misc_feature (387)..(387): n is a, c, g, or t
tttggggtgtcccctctcggtggctccagggtggctgggggtccttttccggttgaccccccaaaaaaccgggggtctaagaaaaagcctcccaaaaaaggttgtttgtcccaaaatgtttcccccccgtaggcactttcctaaccttcggggcaggtattgggcctcaaangagccaatcgattgagcgccaaaaagtgattctatttgcaccaatcgaaggcatgaaaaccctgggcgaangcattctagcatgggacnagtcgggcctatctcacngttgttcccctcagtctttgtccccaaaacccaggttgtggttttccaaacgggcttttcggggagagnttttgggggggaaaacccccctattgaacgcntgctcangttcattagataaaacccggtgccgaaattagtgattgactatctaagaaggtttggatgaagctaaggcagcttcgcgagcggccccccatgcaagcgcgcattcctgaggggctgaatcaaaccttggagcaatccagagtcggtgctcgctctggacttacgagagcgacgcagacacccactgccatgccgaccatatgggaccagctagggggcgtagtgctaatggaccacttcgaacggacacacttattgtcaagcatcatcttgcctggtatgacaacagaaatgttgggctacagcaaaacagggatcggtggacatcatggcccacatggcatccaaggagtaagacgcgtggaccaccagccccagcaagagcacaagaggaagagagagaccctcactcgctggggagtctctgccacactcagtccccgacacaacgtgaatctcccctcctcacagttgctatgtagacccaagaagagggaggcta

SEQ ID NO: 553264 - DNA, 719 bp, Homo sapiens
  misc_feature (51)..(51): n is a, c, g, or t
  misc_feature (71)..(71): n is a, c, g, or t
  misc_feature (81)..(81): n is a, c, g, or t
  misc_feature (99)..(99): n is a, c, g, or t
  misc_feature (107)..(107): n is a, c, g, or t
  misc_feature (177)..(177): n is a, c, g, or t
  misc_feature (217)..(217): n is a, c, g, or t
  misc_feature (277)..(277): n is a, c, g, or t
  misc_feature (314)..(314): n is a, c, g, or t
  misc_feature (319)..(319): n is a, c, g, or t
  misc_feature (354)..(354): n is a, c, g, or t
  misc_feature (399)..(399): n is a, c, g, or t
  misc_feature (408)..(409): n is a, c, g, or t
  misc_feature (412)..(412): n is a, c, g, or t
  misc_feature (430)..(430): n is a, c, g, or t
  misc_feature (446)..(446): n is a, c, g, or t
  misc_feature (479)..(479): n is a, c, g, or t
  misc_feature (482)..(482): n is a, c, g, or t
  misc_feature (538)..(538): n is a, c, g, or t
  misc_feature (566)..(566): n is a, c, g, or t
  misc_feature (592)..(592): n is a, c, g, or t
  misc_feature (636)..(636): n is a, c, g, or t
  misc_feature (643)..(643): n is a, c, g, or t
  misc_feature (708)..(708): n is a, c, g, or t
aagcgaaaaaaggataaaagaagttatggggagctactggacaaagagcanagaggtcagggggagcactngaagtgggancacagaggttaggggganaaatggangtgggatcacagaggttgggggagctactggtacgtgggagctcagaggttgggggagcaactggacgtnggaacacagaggttgggggagctcctggacgtgggatcanagaggttggggcagctactggacgtaggatcacacaggttagggggagctaacagttgcnccagctccctagggagctggtgagctcggactgagcnctggngctcacaagattgaggagtagggtggaggagttgnagaggatcccctgaagagaaaaaaaaaaaaaaaaaaaaaaaaaanaaaatagannaangtgtttagaaaggagggnacgggtaagggcagtntccggggggagttgggggctaaatcggggcggnaanaaaaaatgggagtttataaaaagttttctgtaaagggcagcagggaggtgggtaangcgctggggcggtgggtacagggtcganttatagaaaggtagctcctacggcgngcagaagggctgtattatctggttcattgtcgcgcagaggtgcnccatgcnaagctacgggaaggcaggactttggggacacagccggtgggagaagggtgaggcgatcccctcancacgtccttgt

SEQ ID NO: 553265 - DNA, 138 bp, Homo sapiens
cttgctcccagattcaaacacctcccattaggccccattccaacatttgggatcaagatttcaacataaggttatgaagaggacaaaaatccaaaacatagacagaggtgttaatcatctttccatgattaagggttc

SEQ ID NO: 553266 - DNA, 137 bp, Homo sapiens
tgagctcggtcctacatcataaacatatagacaataacacagagaaactaaagagtgaaaatagtcaggtacctctattgttgcatattgcatatgcaggaagttagttagttataccagcaccaaagtcccagatc

SEQ ID NO: 553267 - DNA, 849 bp, Homo sapiens
tggcctcatcgcagtaagtagcctgcctcgggccacgcagtgagccggcatcatggtattccttcaaagtagtgctgcgaggggccagcaccttgggcttccgtgttgcaatggggcaggacttcaatgtgcccctctccatttcccggctcactcctgggggcaaagcggcgcaggccgtagtgcccgtgggttgacttgggtgctgacgcagtcgcatgtgcgagaatgcggggtagccctcacacaacatcgaagctccaggaacaaagatccgggcctgctgggtaagcgctctcagccctgggcccttcagcaggggcccaaggccgggttcaagaagcaaaccgcagaagacacaagctcgctccgaaccgcgtggttcccaaggattgccaagcacagccagcgggctgagtgagagaaacaacaggagggccttggcgtgccgactggccgggtggacaggggcccagtccgccgttcccctttcccggcattccttttgcgcaaccttcaagcaggggcaacccgagtttccattgcaaaggaccccggactagaagggaagcaatcctggaagcaaaattccaagggggcccccttaacacaggccctcacacagggtaccgcttaaccacgaagggcgtggcccctgtccccctaggggccttcggttgggaccccctatgccgttttgtggcgcctgacagtctggctaaatcgccccgggtgacctcaaagcacggaggccatgatggtagcttagaccccgggccaaacagccacaggcccgggacacggccccaacgccggtctggaagagcggtcacctccaatttgttagcg

SEQ ID NO: 553268 - DNA, 374 bp, Homo sapiens
ggccttgtcccctcctttgagaacgtgccctcagtgggggcagctccctggcttttccggctcctccgcccacaggattcaggcacgctcagccagctctggtttcatccacactgaggggcctgtctgtgcataggtccctcactaaatgcacaagaagcctttactggtgttgctatgttaaaatgtgactgtcatcatccaattccagtttgcccatctacaaaacaggtataagaagagacagaaggcctagcatacccaaaggtctagaccggtgtacttggaaaataagaattattaatacttaaaaaaggtagcaaaaaacatgaaaacatatattcaccattcttaaaatacatattaaaaaaaaa

SEQ ID NO: 553269 - DNA, 87 bp, Homo sapiens
cggcggtggcggcagcgcgtccatccgggtccgagtaacctgccgccgccgccaaaactacgccaacgtggcggacccggaggctgt

SEQ ID NO: 553270 - DNA, 620 bp, Homo sapiens
ggagttcctccttgctctcgcccctactctttctggtgttagatcgagctaccctctaaaagcagtttagagtggtaacaaaccaaaaaaaaccacaccaacacgactccgcagccacaaaaggggatgagaacagcagctatctgggaccaccccccggctgactacccagtaaccggagaccggccatggccccctgagaggtccttcgggaaggctccgccactccctaacgaaggacagcaccaacccagagcaccagggcggaacacaccgaggacgtgatgcaacgagggaagccaggcgggccattgcgcacactatcgggacggaccggtggaccgcgacccactacgtgaccaacttggccgcaacaacacattacacacaggcacacagcacgagggaatctccatcgggaggacactaataaaaactaagacaatgggaaaactgggaagagcaacccaagaacggcaccaaaagggaccgaaggagcaactagcggggcaccaaagggtcccaatacacactgcgagggcgaggaagaaccggcaccgacaaccgcgacagcaaaacactactgtccacgagaccgtccaagaacacaacaaacaagg

SEQ ID NO: 553271 - DNA, 100 bp, Homo sapiens
ggattacaggcatgagccactgcatcatggccggagttcttaaatcagttctgccaaacctggactgaaccagacagcatacacacccatgcggcccatg

SEQ ID NO: 553272 - DNA, 489 bp, Homo sapiens
  misc_feature (109)..(109): n is a, c, g, or t
ccagtcaaagcagaggaaaggtttccatttggcaaagccatagaaaagggcagctgtgaagacataggagtagaagaggccagtgaactcagcaagctcaatgtctcanagagtgtgtgaggcagcgccgagagctgccaaggtgctctgcgtgtccaaacacagtaacatctgtgtcgataggctgttgtgctatctagcacctcagtttctgtccccagatgtggtgtcacgtggtcatttcagcccgaatctctgtgtggagcacagttattcagggttcatttccacccatttcggttttcctttacttgcgttcctggaagccttttcctggaagcctgcccccagcccagccaggggatccagtcagcagcgtggagggattcaagtgccttcagggtctggccttgcgtctggggctgaggccactggtggaatcatggccctggggattatttgacttctttaagaaaaacaaaaaaaaaa

SEQ ID NO: 553273 - DNA, 342 bp, Homo sapiens
ccccggggggggggccgttttaaaaaaaggggaccccccgggcggcaggaattgggcccaagacaatttcccatccctttaaggccttgggcctcccatttggatttttttaaggaaaaaattgggggcccggctttcccgggtgggtatttgccgggcccaatgttttacccttaagttaatcctttgctttagaggccagtttggtaacaaacacccttttgccccaattggggggttttattttttagaaggggtttttcccccaggggcagggaaaaaatgttcagggtccttggtaaaaaaataaatttaaaattaaaaaaagtttgcagaccccca

SEQ ID NO: 553274 - DNA, 245 bp, Homo sapiens
tccctgtacatctatgggggaaggggagggaagaaaggatctcatacatgtcacactgttctttttccaggtgaatgattttcctaattttcaaggtctgatgccctttttataagcttccagagcacctgaggtgacttgcaccaagtcatttagcatcatgcaattttaaatgtctcttattatcacctaggagattgggagcaagttgatggcaaggactgtgctctgtctgagttctggca

SEQ ID NO: 553275 - DNA, 758 bp, Homo sapiens
  misc_feature (68)..(68): n is a, c, g, or t
  misc_feature (71)..(71): n is a, c, g, or t
  misc_feature (630)..(631): n is a, c, g, or t
  misc_feature (644)..(645): n is a, c, g, or t
aagaaaaccagaacaatccacactaatagtataaattacagcacatctagaagcacggtccaggcaanctngtagatttaatactagaactgaaagaagcttttaattattcctcctctggtgatttattagacacttggaatctaagagtctcacaagtggatgagccaggtttataccacaattaaccaatagaaagggtctggtctaaatatgccttaaaagccaaatactaaatctaaagggtgtgcatagttgagtctaaaaagaactaaaatatagaaattaaaagttccacacattatcaaaagcaataaatttactaagaggcagaactcccaaaacaagttatctaacatgaaaatggatgtacaacctgaacagaactttctgtgaagtgttcacataaattttcagacatgagctgcaagatattatgactatatctcaaacaggttcataggttcaacaaagtccaactaaaaccaataaatgacataatgacatcatagttcacttgttctcttaagaaaagtccctcaggaaagtgatagagaaaatacgagacaacttggttgttcaaattctttacatctatagacaagtcaattaaaaagacctcctggaacnnctgtcatgagggnnctttcttaaaaaaacaaaaacccaatagctatcgcttatgaatatataggtggtcagaatgattagattgtggtatataattaggaagattaagtaggaaaacgaagttaatc

SEQ ID NO: 553276 - DNA, 285 bp, Homo sapiens
tgttcctggaattcaagtgaagtaatgataatgatataaatataaacgcacatgttgttgtctatgagacatacgacatgtgcgtttttgatttatttacaatgagcaagcgcttgtaaaaacgcatgttgataataatttgaaataggggaatgaacaacctgacagttaggttctattgaattaaagtctacaacagttgcccctttagtaagtataccttgtaattctatttgaacatttgcatcaaatacattaaatagatcagcatctattaaatataaa

SEQ ID NO: 553277 - DNA, 191 bp, Homo sapiens
acttttgtagtactacaaaagatgtatgagattgaagcatctgaccattctccccaaacatagattaggggggaaccccccataacactcacgtgctcgatgatcttatcctaagatttcaactgaagaccccacgatcatcactggatatttacccataatcactgcttattacaactcattactggagc

SEQ ID NO: 553278 - DNA, 187 bp, Homo sapiens
atagtgctacatctatgtgatgggtggggtggggagggaatcactgatgctatagaaattgcgctgcccccccaggccagccactgttccttttggttcaacgtctctttttattccttgatatttttcttttttttttttttttttttggggaatgggccatttgtaattttaccaaaggttccat

SEQ ID NO: 553279 - DNA, 158 bp, Homo sapiens
accacagctggacagacatcacaggataacccaggcgtgggaggaggccccacggcctgctggtggagtctgacctggggggattggagggaaatgacctgccctccagcactaccaaagtgtgcgattaagtactgtattctttccacttaaactga

SEQ ID NO: 553280 - DNA, 161 bp, Homo sapiens
  misc_feature (60)..(60): n is a, c, g, or t
  misc_feature (127)..(127): n is a, c, g, or t
  misc_feature (147)..(147): n is a, c, g, or t
gaagaggaggaaggagggcgagcgaggaggatggcggtgtcggggctcctgacggaactntaatgaatcattgattgaccagcactattttaccacgttggaatgaatgatcaagaaatgggcatanggcttttagatccaacatgnaacagatggatgtt

SEQ ID NO: 553281 - DNA, 242 bp, Homo sapiens
cccacgagcgcatgactcactcccttcatgaggcttctgtagagatacatcacttaaggagcgcaagcccggccacgtttccagagctggtattctgtatgtgaacccacagagatctgggcgggaatccgtatgtggccagttggatagacagaaggcggcatcaatccacatggggtcaatatcgccatccaggactatccattggggtccatcaggctgaagattggcttgttccgctg

SEQ ID NO: 553282 - DNA, 214 bp, Homo sapiens
gcgggctgaccacaggcttcgcgcccatgaaagggggcgaagagtcacccacagctatacgcggggccctggacaccctgcaccagctggacatcgacggaggtatactaaacgcccatgtggttgggctgtactcaatcatgggcaacaaggacctgtggcctatgatgctgagcagcattttaattccgggcctgatgcagtgcatcgagct

SEQ ID NO: 553283 - DNA, 179 bp, Homo sapiens
atctagagagaaaccctatttctttacagtttactaataactatcttactagccttatggtgtgttgtgtgtgcgtgtgtgaattacacagtgggggaggtatgaaacacagagtctaagatgaaactctacttttaattttttttttttttttaaaggctttggaaatttcataaaac

SEQ ID NO: 553284 - DNA, 940 bp, Homo sapiens
ccctgtggagacggacttcggggggacaatgggaaagccccagtggccaggggaaacgcgggggtggaatgaggccaaggaaaggggtcccgggatcggcttggaagggccaaccctcccgggcaggcggccgtacacccgggtccgcaacagtagcaatgccgcgtgctgttggggacaccagcaagacacacctgagaaggattaaggacaggctcaaacagctggcgacgccaagcgctgtggagtacagccgtagcacgaatagagggagacccagttcacgatctttcttggagcggggcaggagagacgagaggagaaacgggtagggacgagaactgacgcacacatacacagccttggaccatgagacagaagccgtccgtgggaactccactggcgcgtcggaatgcgcgctgccgtgcacagccccctggacggaggggggccaggcacaccactacagaggagctgcaagcccgtggcctggcctgcatacatgccctgcttccacgtggctgccacgctgacacacccacattcaccaaacccacccgcgccctgggacgcagccacgccaggagtgaggaacacggccgctcggagagcaaggcacaacctacgagcttcttcggggcagcagagaacttaggagagaagcagcggaggagccccccggcagatgcacccgcacccgggccccagccgttccaatcctgtgctagcagcctggggcctccactctggccggaggaaggaccgcaggcagacagcttgggcctctaacagcttttgtccggagctagacttcgtgtcctttcagttggtaaatggttttctatagaatcaataatatgtctttctttaaatatatatttgttaaagttataccgcttgctctatgggaatccgcttcagccgattccaatataatact

SEQ ID NO: 553285 - DNA, 876 bp, Homo sapiens
ttcaccatggtgggtgggaccctgtacacgtatctgaaaactggaggggcttacaaaggctctcatcgctgctcagtacagcaggggctctattgtcctgcgtgctctccgctaccaccccacttccatttagtggcaaaccaaaccgtacccctgaattactccgcaaatttcctgccggcgaggtcccagcgatttgagggtagatagatggattctgtgtgtctgagagcaacgccattgcctactatgtgagctatgaggagactgctgaggtgaagtactccagagtgcagtgagccgctagcgtggtgcagatgggtgatgcttagcatagattccgatataatgcccccagccagtacctgggtgttccctcaaccttgtggcatcatgcaccacaaagaaacatgggcgactgagaatgcacataggaggaacgatggaaggacgaacttctaggcggacctagctggtactgcgtctcactgtgtaaggactgagggatctcccttgcatggctagtggacagaactgatgtgacgattaggtctgatcaattcggcaggttgtcatgcaccccttggttggtgggctctataaaagcaggtactagagccttactttctcgtcatggctcttttcccacatacgcaacctgcttggttgccttctactcttgcaattaatcctagacccgcatgattccagtgggctgtcttgggtcgaaagtgaaaactcgtgtgatgaaggaatggtcccagggattcgaatgctaataaaagtttagccagagagcccaaacctaaaataaggaacacaccacggaacagagaagggtttcacggggaaggagacagcaagaaagcccccagg

SEQ ID NO: 553286 - DNA, 533 bp, Homo sapiens
ctgctctagagccagtaccctgatccctccacgtcatcctggatttacaggaatctgtcatagctttttcttgttgtagatgatagcccattggattgtccccttggggggatgagctaggggtgcaaggaacacctgatgagtagataagtggagctcatggtatttcctgaaagatgctaatctatttgccaaacttggtcttgaatgtactgggggcttcaaggtatgggtatatttttcttgtgtccttgcagttagcccccatgtcttatgtgtgtcctgaaaaaataagagcctgcccaagactttgggcctcttgacagaattaaccacttttatacatctgagttctcttggtaagttctttagcagtgttcaaagtctactagctcgcattagtttctgttgctgccaacagatctgaactaatgctaacagatcccccctgagggattcttgatgggctgagcagctggctggagctagtactgactgacattcattgtgatgagggcagctttctggtacag

SEQ ID NO: 553287 - DNA, 684 bp, Homo sapiens
gtaacgtggactatgctctagcaaaccagaacgacatgggaggactatacctatgattcggcgcatgagctggagtcctaggtgcagctctaagcctcaacttattaggagcgggaacgtgggcaacgaccgaggccaaaccttcataggtaaatctgaccaacatcgtacatacgttcgtcggttcagcagaaccatgccatgtgtcaatcacatctttcttttcatcagctcaagtacccgatccagtagatcaggtaggccttgggctaacgtgcacgttaggtatgccgccgtacatttaactgctgcggtggcccctcgcgtattcacttgggacgctctttcgctccggccacttaaagagcgacaactacttataggcatttgcgttgtacccatacgttaagcacgttgcctcctcgtgcatcacgtgaacctccacgtggtgcttacagacccattctcttagccttgattagcgctggttaggcggtccggtggaagcccgagggggaacccatggggttgacatacccaggtgtcagtacaccactttcctgccgttgtgagccatcgggtgtacaagggttatcatccccccacctcacttgggtggaggtcgccttcccagattagtcaccccttaaaccccaattcatttccttccccatttaccagcca

SEQ ID NO: 553288 - DNA, 852 bp, Homo sapiens
  misc_feature (141)..(141): n is a, c, g, or t
ggccccaaggcttataacctgtgggaatggatctatatacccctgatccggcatttttgttaaacctgggcgaaacaattggtgtttaccgctcgccgcaaatggctcgcaaacagtgtgtatactgtaagcgacccgtcnggggggagtcttcttgtgatggtttccttgtgcaacacgatggtcttgcccccccagccacagtggtggtggtgcccaccgcacccgggtagcccgcaatgttttggcaggggtgcctccaccaggaatgaccccagtgtcgggtgaacacccggaagtgctcgggagaagcccccgtgtcatgaaaaagggggagattggaggccccggtggtaccatcaccgtagaacaggcggggtcccacccccctcgccgctgggagggctaatggacagaggtacctaccaaccttgcggggggcgatcgttacaagaccccagaaggtgcttcaatcacccgcgcctggaggaattgagaccaccccccccctcttgcgttcaggcaagtcagaaagaacgggcaccctcggggagcaccaacagaccagccgggagcccatgccccgggacatcccagctggcggccacgcgaaaaaatgtgttgatctaacggcagaagccaggatcgccacaattaatatgccactacgataatgtataaagggttatgagccttggaaccccccgccaggcaacatcataacacaagaccccaggctggatattacccccccctgtggcggcccagatggtagggaaggccgcgcctgggaccacgatgtgaagccccctgggccatatggggaccccccaaccttcgcccacaagacaa

SEQ ID NO: 553289 - DNA, 711 bp, Homo sapiens
ggcctgtcctgtcccacggctgtccagagactgcagatctgttcagggcacctctagaatgctcgtcatcttttctaggtgtcaacaggtactatctgtcacataactaactttcgaggcacttggaacatacctgaactaagaataaatctgttcacttgtatagctcacttgaacgatcaggagaatcccatctaagagacacataggtacctctatcgtgacaactcgttgcactgtccccgaaccaggtctgaacatgaggtgcgagacgtactgcactacccatgagggactgcgccgagcgtccacaagcatgtcttgttcaccagtagtccgagacaaccctgctttcgtcagcccagggtttgcatcccctttgggctacctcgctcgtaggaccttgacccagcatgaaccttcgcagccctacacgagcttgcacaaagcgccgcaagttggccctgttgaggacagtcccttctgccagaatggcagttgggggacattataacgcgtgcccttgcaatgccatctccacgtgatcataatgtttggatattgtgtacacttacgaaccaccacggttggttatccttcgacttagtggtcaagggatgttcccaaataacccactagctgcgataaaaccgggcgtcttgcgacacatccagatgtgatgcgttttaccggcttgcacacttgccatcc

SEQ ID NO: 553290 - DNA, 396 bp, Homo sapiens
tgtttgtgaatttcttcacttgcactctaattcggacttgccaaaggatttgctatttggtgttatgggtaatacttttttctggcctagttttttcagaggtcctaaaatagaaatttacttttttggatagaagtacagaattttgagaagaaactaaattttccccaaattttaaggaaaaattgtcattatctaaaaatgttgttataaatgtgtttcatattaccttcttactgtgaaattccctataccagacagagttagggaaattttaaaaatttaccctatttattttctggaactaaatcaagccttaactataacattttgggagtaatgggaactacttctggctttaagtaaataaaagtcattgttttcaaccgtgtttca

SEQ ID NO: 553291 - DNA, 275 bp, Homo sapiens
catgaaatgaacatctacatgctgttaaataacattttaaaatgtatgtatctagtagccaatatcatagaataccatatccaatatgaatagaaacagcacaatttacttcaaagcaggaaatctgcatcaggctttaggtgtgttgtcaaagatacttgtcggatattaccgtcatttgagcagtaagcaaaatctgaggctcagcaaaatcaagtgacttgctaagtgctgacgggtcaagagtctttgagaattcaaactaccactgtgct

SEQ ID NO: 553292 - DNA, 929 bp, Homo sapiens
gtgcgaagctgtaggggaactattgctagaggtgtgccgggggacaggcaaggatgacgcgggcatcaagacgcgtgtgccacgcgcatgtacaagaggtctgcgctctggctgagaccacgaaagtccaggtaaatagccaggtgtctacctgtgtacgccccatatcgcaggatggtcgaaaagatgaaccggaatgaacttatcgtagcattgttggtagagcacgatataccatgtcacatggaggaacatgcctaatacaagatgaggatagctacgttccctcgaaccagtcgtagagtgccaaaagtaaagttgccaagcatggggcggaagtctcgacctttacagggctaaagcaggagaggcggctcggaagtaagtgagcacagcatcgaagaccagttgaaggccctctagatttcagatacacggcatcaggactcatgtgccatgcgccagggaagccatgaacaggtaggagctcggctgtgggagatcacctcgtggtcagagaacacaattgcctatgcagtgctgtcgatacttgtagaactctcagactgtgctctttttggccggactatgaggtacgtgactgggctgcgagccggaccgctggaaacgctcggccagttggggggctccgtacctgtatcacccgtgcgtcgttgtgtggcgcgcagcgatagtaggcgctttcgggcggtacccgtatccaaccggtctcatctgggatggtatagccttgtgtcctaacacccggggaagcatctgccgggggctctcccgacgccccccgacacttgttttcccgtggcgtggccagccgtttcgccacggccatccactgggtttggctggccccaatttgaccgcgtttacccttggccctctggtcaccaagcttgctgcttcgggaagcc

SEQ ID NO: 553293 - DNA, 1385 bp, Homo sapiens
agcgggggtggacgggcacgaggacacccgggtgggctgacctgtgcacagccactgaccttgctatcccacctaggacctggatgtacacccggcctgaatgtgaactggatcagtgaccgcttgactcctattggcgcttatccagacagagcattgcaggcttcgttggtggacgctgggtggaacaccattgcgatgttggcctggcctatccaagatcgaggcgataaatggtcctcgtcatgacaagaccacagtagttgtaacagaacaatcacctatgtatggcatgacccttgtgaatggccagactagtcttacaccaattgtgtgcaccctctggggcttcatacaccttgctagactagatatcagtggcttggtagacttaatcacagacacagtgtgactgtgttgtcgcagtgtgcttgctgtgacatcaggccgtatgcgcactgtctgcgcgacttcttgcatgtcacctgtgtactggttgcaaaggcaccatggctacgaagcatgcctttagactgccacgcaggttttactctcgtctgtcgcacccaaccacacggacaccacaatctcggtgcagctgcgtccccaaactatgctccacctgaagggcaatacagctggctgtcgcgcccttcttcatacatgtccggcggcctaagatccgctagtctgcctctgcggacacatattcccccgtagcagacctaattctaaccacgttactcctacctattctatcccgcgcgggcaacacaggcacacactttgtcgcgaacctcgacggcccccccccaacgggtactaatgcgccttgggttctgcaacggtcggcgccaattgctaggcaacattatggttgccggccatctatcaacgtatctaaattccgcgcaacaagcaagcttgtagctacccattcccacatcttgtggcataccttccgttcaatagcatcgcgtcgcttggacttgtcgcgctccattgtcgtaggcgcgatagcggctccacgtacagctctggggttacaggccccactaataacttgtacccgtactctcgaccatggaatcacatcgcgtccatgtaccgtccgcgccacggcggtttgtacttctccccaaacaagtcatggcacacgtctaccagggttcacccggccaaccccagcgttttaccggtctgtgccaagtgtacgggtcgcgcaagcgcaacccccgccaagcgggatccttccactacgcggcatccacaacatcccgcatggccaccagtctcctctgcgcccgccattaccagcgtgtgcataggcccaccggtgggcactaaagccccgcgcaccccacacatgtccgcactgtgacatg

SEQ ID NO: 553294 - DNA, 214 bp, Homo sapiens
cgtgtgggtcctggagactcacgctgtgctccatctgcactgggtccgcctccacttcagtgtttgacctctgcaacaggcagacacaaaggtcttctcaccctgtcactgctcagtgactggcgatgtcgtacacggtcaatgactgactatgttaatacgaaaatggcttcataaactatcgagctgccgagtagtctccctactgttgact

SEQ ID NO: 553295 - DNA, 84 bp, Homo sapiens
  misc_feature (34)..(35): n is a, c, g, or t
ccggggtttgcatgggggggtcctctttccccgnntgcgctgggcggcgtggcgtgggggcaggggggcggtgggggggccctc

SEQ ID NO: 553296 - DNA, 181 bp, Homo sapiens
acgcgtttgtgccacagggttaaggaatttatacaacttgctttttttgaattgtgatgaaatttactatattaactatttttaggtttacagtttagtgacaataagtatattcatattatcatacaaccatcatcaccatccatctccaaaactcttttcatcttgcaaaatctgcgtg

SEQ ID NO: 553297 - DNA, 116 bp, Homo sapiens
  misc_feature (71)..(71): n is a, c, g, or t
  misc_feature (100)..(100): n is a, c, g, or t
  misc_feature (116)..(116): n is a, c, g, or t
gtaaatatgaaaaaagtgctacataaaacacttcttaaacttttttttttttaaaaactgctccttgtggngcaggactaccccataggcagtgtacccncaatagatagcctttn

SEQ ID NO: 553298 - DNA, 281 bp, Homo sapiens
ccccccccccccccctttttccgggggggggggggggggccccaaccggttttttttcttggccccctttttttttgggggaaaaacgggggtttttttacccacgcccgttgaccccccccagggaggggggggggttttttggggcccccccgggttttttttttgggggggggggggttttggtttttttttttttaaaccgggcttttttttgggggcccccccccccccaatttttgccccggttttttggccccccttaaaagtttttttgggga

SEQ ID NO: 553299 - DNA, 795 bp, Homo sapiens
  misc_feature (494)..(494): n is a, c, g, or t
  misc_feature (527)..(527): n is a, c, g, or t
  misc_feature (581)..(581): n is a, c, g, or t
  misc_feature (769)..(769): n is a, c, g, or t
tccatctgcggtgaaaaatattagttcggctattggtatgtttatacagcatgctcacgatgaagtataccatggggtatacagttagcagcccgtgtatgctctttgtgacttgagttcccagctaatccaagcagataatttccacagatcactggaaagctttggcgagataagagcgcctacctaaaatgcgtatccgtgctgcagaattgtcaagcttgccctagaaggaaagtcaagtgcccctgagcacaagaaggaagcttggctagatcagggatgccacctgatgcttgagaagtgccttgacacattttgaacacaaatagtttgatcagctctcaaaatacaaagggaggtttcaaaacaataagacataaaatagataaaacagaccagaggctctccttattgtttggcaaggagacaggagaaacaagcagtcgcatagtcgtttttccctaaatctaatacgtttcacttaacgctgntgtgatctgtgacatatgggatatattacttgngtctttgtcaaacaacaaaaacttgaacttagccctttatttgctgcagaaagngtgcttctagtggcttcttaaattgaatggcattttataatgaacttaccatataaaaacatgatttgggctctgaactagtagtgatagactttggttccaatgagggactggaaaaaataattggccctaaactttctgtatctttgctggaaagagttccaaagttttttcaagagtggggcggntttgtcagagccatccagaggccttc

SEQ ID NO: 553300 - DNA, 182 bp, Homo sapiens
  misc_feature (124)..(124): n is a, c, g, or t
  misc_feature (137)..(137): n is a, c, g, or t
aaggatctgtgggcatcttgtcccattgaaatcttctcatatactgtttgagaggagaagcaattgaacccagtaatctaaggtgaatgaatagtatgtgtccagcggaagaactgtctggggngaggagagtatgnttgtgtccacggaaaaagggaacgctggactggggcagcaggcta

SEQ ID NO: 553301 - DNA, 292 bp, Homo sapiens
cccccccccggaaaaaaaaggttttttttgggaaaaaaaaaggaaaggccggaaccggccccaaccccggggtcctttttggggccccaaaaaaattttacccgggccccaccctttaaggggaacccaggcccccccccccccttttttggggaaggaaaaacccccctttggggtttttttttgggggaaaaaaggggttttttttttttaggttttttttgggaatttttttgggggccaaatttggggggtttttttttttaaaaaaaaaaaaaaagtttttttggga

SEQ ID NO: 553302 - DNA, 139 bp, Homo sapiens
gggatgaacatttattgtacagaactattggtgatggcctggatacggttttgtatgaattgaaaaactaaacggaataagagaaggaaaaaagcaggtattaaaggactaagaattgggaggactcaggacatctaat

SEQ ID NO: 553303 - DNA, 685 bp, Homo sapiens
acgcgttccactacgtgcagctgtggacagcctacaggggcctccagcctgtgccatcacgaggaggtgattgagctgtatgggggtacccaacacatcccagtatatgcagatgagtggcttttttggcaagggtccctccattaagccggttcatggacatcttctcgcgtccccggaggacttgcgctctcgcttgtccttggtgttgcgttggacttagcttctctggggccagctatgccatggggtttgaccatcggacagtctcttaccacggacgtcgactggacgccactcccggagacgtgcgtgtgataggggcctcctgtgccagtggttctgtcgcggcgacagggtgtacgtccgttcctgagaggcggagtgaggacgttgtgcttgtgcctcgaagccgtcgtggtggcccatgtgaactcaggctgtgcctcattcactcgaacagtccttgtccgattcgtacacaaggtgaatgcgcgtgcatgtgtgtgggccccgatggctcgccagctcttgcgatgttgggcagaagtccaggccaagacgatgcgcacttcttcagtgaccgggggcaagccttggcgaaaaatccttgagaacgggctcacttcagccgggaccgaattcgcccgctgtgaaaacggggaagattatcggctggaacctg

SEQ ID NO: 553304 - DNA, 355 bp, Homo sapiens
  misc_feature (61)..(61): n is a, c, g, or t
  misc_feature (136)..(136): n is a, c, g, or t
  misc_feature (224)..(224): n is a, c, g, or t
ttttggcttttttgcctcccaccttttagcccacattcatttaactccactactgtgaaancttgcttaaagaaaatccctcttggccgggtgtggtagcccacgcctctaatcccagcactttgggaggctgagncggggagatcacaaggtcaggagatcgagaccagcctgaccaacatggtgaaaccctgtctctactaaaaatacaaaaattagctggncgtgttggcacacacctgtaatcccagctactcaggaggctgaggcaggagaattactttaacctgcggggggagcctagattgcgctactgcactccagcctaggcaacagagggagactctgtctcatt

SEQ ID NO: 553305 - DNA, 310 bp, Homo sapiens
gatttttttcctgacatgtatggtagggggagaagtacatacatgtcaggaaaaaaatctatactgaatttttaaaaccagaaaaaaaactgtgatggtttagcaggcgcgcaggcagttaggggaaggtttaaacaaacagctgcaggccgggtacagtgggctcatgcttgtaatcccagcactttgggaggccaaggtgggagaatcacttgagcccaggagttcgagaacgacctgggcaacatggtggaaccgcatctctacaaatgggtcgacgcgggcgagatttaggtagttgggaggtggc

SEQ ID NO: 553306 - DNA, 166 bp, Homo sapiens
ttttctgctgagactgaattttctgctgtccacgagccatatctgtaattccagctacttgggaggctgaggtggagaattgcttgaatccgggaggcagaggttgcagtgacgcgtgatggcaccgactgcactgcagcctgggcgacagtgagactctggtctc

SEQ ID NO: 553307 - DNA, 778 bp, Homo sapiens
  misc_feature (560)..(560): n is a, c, g, or t
aagctttaaaaaaaaaaaaaaaaggctgaattcttttttcttcatcactggcatatctgcctattctccaaaattattatgactattcagctcactttaacagttgaacttcaagcgacaatctttgaacacccctttctcatgtgatttaaaatgaaaccatttgggaaaagtttcttctagccagtaatagatttttttttaaatggctctgccttgtgccgagaaggatgttcttttaagaatgaatctttggatgtctgataccaccaaatataggtggtagggagagttggaggctggccctttgagcaggccattagcttacttgctggggcatctccgatagcttattggcctacctttttggctgggaaaccaacctggttttgaaaacacaaattctatgaagactggcagctaaggattcatccggtagacttaagagcttttggtccttgtgggatatttcagtgggaaaccacatcagtctcaatactggtcattttaccctgactcagaagcagctgacttcattcccttgccatgatattatattnaaggcaggcattgtacccagacataagagacacattatcgtgtttcacgcaggaaggattccaggtttatgaacctctcagaccagatcttgcttgacccaagcggagactttcgcatgtgtgtccatgaagaaaactcattcttaattccccagtcaatttaaaggccagtatcctgaagtacttcgaatgaaatgccctggttaacccttggaact

SEQ ID NO: 553308 - DNA, 1195 bp, Homo sapiens
  misc_feature (599)..(599): n is a, c, g, or t
  misc_feature (655)..(655): n is a, c, g, or t
  misc_feature (666)..(666): n is a, c, g, or t
  misc_feature (809)..(809): n is a, c, g, or t
  misc_feature (843)..(843): n is a, c, g, or t
  misc_feature (1181)..(1181): n is a, c, g, or t
  misc_feature (1185)..(1185): n is a, c, g, or t
  misc_feature (1193)..(1193): n is a, c, g, or t
agcggagagcctcgcggagggtgagcggccggcggcttcgaccttggagtcccaggctgtgtgggacttggcgggcgctaatattgacacctgctcagaagaccagaggaccccgttgatggaagcagccgaaaacaaccatctggaagcagtgaagtacctcatcaaggctggggccctggtggatcccaaggacgcagagggctctacgtgtttgcacctggctgccaagaaaggccactacgaagtggtccagtacctgctttcaaatggacagatggacgtcaactgtcaggatgacggaggctggacacccatgatctgggccacagagtacaagcacgtggacctcgtgaagctgctgctgtccaagggctctgacatcaacatccgagacaacgagggttccagaggccagaaatgggaagtccagccacaaataaacccactaaatttgataataagaaagaagatttgacacagaaacaagaagatttctaaaagcacactattaaatctccaatgtgctgaagtctggtgtctgaggagggagggctgacacttcctctcagagcttgagaacgggtgggcacgggccnttgccattcattgttggcacggggaggtctgcatttggaacccctcgctgcatgtnagcagacccanctccacctagaaacagggaccactggctgtgggcaccgctgctccctgcaggcacgcaggccttctctggagtgactggtcctgagctgcagtgcctcctccgtggggctgcagggcttccatgactgtatccagggggtttnttacctcatttccaccggagttcttttcccattncgggttaaggattgacggcaccatgaagagaggagccctgagccggcagaaggaagagaagagggaagcagaggagccctgagctggtggaaggctgtggcgggtaccttggaggaagagaggagggaagcaaaggcagagaacaaggcagaggccacccccaggtggggccacctcacccaccgcccccggagactgcgtggcggggaaggcggccctagtgtggctggtcggcctgcatgcctgggcagtttgcagcctgtccaggtgtcagagctgttagctctctgatgctggtggctgttcccccagaatggaagcattgattaaatttctanacanaaaccccncc

SEQ ID NO: 553309 - DNA, 742 bp, Homo sapiens
  misc_feature (728)..(728): n is a, c, g, or t
  misc_feature (732)..(732): n is a, c, g, or t
  misc_feature (740)..(740): n is a, c, g, or t
agcggagagcctcgcggagggtgagcggccggcggcttcgaccttggagtcccaggctgtgtgggacttggcgggcgctaatattgacacctgctcagaagaccagaggaccccgttgatggaagcagccgaaaacaaccatctggaagcagtgaagtacctcatcaaggctggggccctggtggatcccaaggacgcagagggctctacgtgtttgcacctggctgccaagaaaggccactacgaagtggtccagtacctgctttcaaatggacagatggacgtcaactgtcaggatgacggaggctggacacccatgatctgggccacagagtacaagcacgtggacctcgtgaagctgctgctgtccaagggctctgacatcaacatccgagacaacgatgacggcaccatgaagagaggagccctgagccggcagaaggaagagaagagggaagcagaggagccctgagctggtggaaggctgtggcgggtaccttggaggaagagaggagggaagcaaaggcagagaacaaggcagaggccacccccaggtggggccacctcacccaccgcccccggagactgcgtggcggggaaggcggccctagtgtggctggtcggcctgcatgcctgggcagtttgcagcctgtccaggtgtcagagctgttagctctctgatgctggtggctgttcccccagaatggaagcattgattaaatttctanacanaaaccccncc

SEQ ID NO: 553310 - DNA, 215 bp, Homo sapiens
tgcttagcttagtacgagctggtggaatggcgaggggacacagaggcgcagtcatgtgggatcgacgatccctggcattctacagcgacagcttcgggggcgacggcccaggccgaacgagggggcagggcccgcaaaatcgcaagctgcagaagggcggccttgggtgggttgggggtgtgggtgatggtgttggtgtgtgttggtgtgtgagg

SEQ ID NO: 553311 - DNA, 374 bp, Homo sapiens
taggctaaattataactgcgtcatatatctaaatttgaatagtcataagttactgctatataaaaacattttgcccatatattctatgacttcttctacttcccttaaattatattcctttgacctaagcataatattgattgtataaatttgtcatcatttgtagtctggttcctttcttctgactcatattctaaaataatgccagattctagataatagagacaaggtacattgatacaggataatttatcttagtttcagcttgatgacaaacaattatcccctttatcttgctttacccacacttcattcacactctcccttgcttgccatcttcggatttacagtatacttaaggtattccgtgaggg

SEQ ID NO: 553312 - DNA, 307 bp, Homo sapiens
tactcgtcagcttatccagaggctgaagcacgaggatcacgtgagaccaggaggttgagatcaacacataagaccccgtctcttaaaaaaaaaacgaaaaaaaaattattggggtgtggtgctggcacttgcctgtcatcccatcccacatctcagttacttgtggggctgaagcaggaggatagcttgagcctgggagtttgaggctgcagtgagtgtgatcacaccatactccagcttgggcgacaaagcaagaccctgttttcaaaaaaaacaaattcttgggcaaaaagggttccggtaaact

SEQ ID NO: 553313 - DNA, 383 bp, Homo sapiens
tgtttttgagtcaggggctcactgtgtcacccaggctgaagtgcaatggcgcagtcatggcttactgcagcctcgacctcctgggctcaagcaatccttctgccttagcctcctgagtagctacaactacaggtgtgagccaccacacccagctaattttttattaataaattttttgtggagatgggttcttgctgtgttgcccggactggtctctaattcctggccttgtgtggtcctcccacctaggtctcccaaagcagtggggattacaggtattaacccaccgcacctgggccttaacattttaagtggaaaatttaactttttccttattatgttaagcaattcatattctttcattattggaaatattaaaaatt

SEQ ID NO: 553314 - DNA, 104 bp, Homo sapiens
gaagaagtgaattcgctgtacatcttgtcaccagcactgggcctctgtcctttgtttgccttccgcttaatgtcaaagataaaatgcagttaccttctgggggg

SEQ ID NO: 553315 - DNA, 373 bp, Homo sapiens
gacctgatttctgtccttcctccttttctaatatatgcatttaatgctgtacattttgaacaaagtttatatttaaattttagcaaagccacatggtttatcaagaaagctttctgaaagaatggggttcatggggcacataaaaagaaaaatgttgcagtatcatggagtttatttgaacaagtgggagagaataacagtctgacagaggaagaaagaataagacattcatgtttgggcatgtgcctgtagtctcagctactcgaaaggctgaggtggcaagatcgcttgagcccagaaagcagaggtttgcgtgggctgagattgcgtccctgtacttccgccctggtgacagaagcaagacactgtctcc

SEQ ID NO: 553316 - DNA, 148 bp, Homo sapiens
actagaagcggcttctgtgaactctgctctttcggagttctttctcaacttgtccctatacggtcacttggttgactactcggtctcgatgccgagtatttaagcctttagatgtgagtttaccaccgcgcttgtgggcgtgcattcc

SEQ ID NO: 553317 - DNA, 354 bp, Homo sapiens
ctcgaaaccatttaccctatagacgctatccttatagacttcccatagactcggagggaactgcagggagaccaactgatttagagcgaattggacatggatcgatgagcgacctctgattgattactgctagaatgaacttgtcaatgatgcatgggctattaccatggaagctatacaagcgacctatgaacacccttgctagtacacctgtcaatagccctgctcctaccgatgaaccacatggacagtacacatacttataactccagtgcagaattgtctgcactctatagaactctatatcagctaataatgcatcgctgaaccatatttcactagagatttgcggtt

SEQ ID NO: 553318 - DNA, 104 bp, Homo sapiens
cgactctttggatcccctgagcccaggtgatgtggtttggatttgtgtccccacccaaatctatgtcagactgtaatccctagtgatgtaggagggggggtttt

SEQ ID NO: 553319 - DNA, 181 bp, Homo sapiens
ggtcgtattctccggctcagacgcaacctggctttcgaccgtgatggttgggaaatggatagtaaaacagctgcctggcctttcacactttccaccgcgatgcgtccgcccatgagttcgaccaggcgttttgagatcgtaagaccaagtcccgttccaccataattgcgaatcgtaaggt

SEQ ID NO: 553320 - DNA, 387 bp, Homo sapiens
cacgagggtcacattattaagcgagaccccggtccgcttaacgacccggtaaacagaaggatagaagtctaacctcagcgtctggctgtctgcgatcctattttgcatgccaagcggaggctgattctttcctccaaaaattccaaacttccactgcatgtacggcggaaccccaagctctgaatgtcgagaaaggtggtactggttacaaatgaagtcgactacccaccgttcaaactccgtcctcgtcatactggcgtttttttccgggtcgtcgtcaccttttgaagtgtgcttcgacccagttctgccgggcagagattctacattctgtgcaagcgttctaaagaatcgctcaacgtgcccgccgtagtggggtctctttac

SEQ ID NO: 553321 - DNA, 152 bp, Homo sapiens
  misc_feature (21)..(21): n is a, c, g, or t
  misc_feature (113)..(113): n is a, c, g, or t
ttttatgcattctaatggctntgcccataggagagatacccagagtggcaaacagaggctaaggaaaaaaatgcataatacctcgagacatggtttttggcaaaaactccatnactttaaactagctcttttactatcggacctacataaga

SEQ ID NO: 553322 - DNA, 201 bp, Homo sapiens
  misc_feature (36)..(36): n is a, c, g, or t
  misc_feature (42)..(42): n is a, c, g, or t
cctgttgttttgtccaaaacaaactgcacaccacanacaganactcaaagattgcgagaagtcaggaagaagtttctggaagagactctgcctttttctcttgtaagcatgcttgtctcccagggactagtctaccaaggttatttggcagctaattctagatttggatcattgcccaaagttgcacttgctggtcccttg

SEQ ID NO: 553323 - DNA, 140 bp, Homo sapiens
ctcacgtcattgtcatggtggtagagttcagccagggtgtgttatggcgcgagagaccgacagaacctgccaaggctctgcgtttggtgatcggtcatactcgcccaggacaaccaaatggccgccaaggctgacattgc

SEQ ID NO: 553324 - DNA, 304 bp, Homo sapiens
gcagccagccgcccgccgcccgcccggcccagctcccgccgcggccccttgccgcggtccctctcctggtcccctcccggttggtccgggggtgcgcagggggcagggcgggcgcccaggggaagctcgagggacgcgcgcgcgaaggctcctttgtggacttcacggccgccaacatctgggcgcagcgcgggccaccgctggccgtctcgccgccgcgtcgccttggggacccgagggggctcagccccaaggacggagacttcgattcgggaccagccccccgggatgcggtagcggccgc

SEQ ID NO: 553325 - DNA, 867 bp, Homo sapiens
  misc_feature (170)..(170): n is a, c, g, or t
tcttctgtgtcttctggggctcttttgttcataaaatcgccgccaaaaaaaaaaaaaaaaaacatctcggggcccccggggctcgccccgcaaaccgagataaaccccacgaacatcgcggggccagaggtggttcttctcttctacccgcgagaccaaacgtacagtgnattaggggcggaggaacctatacgccccggaagagtggattcgaggagtggccacaaaaactccgccggggagccgcacccataacggcgttgcggaggctggtggtccacaccaacagtgcgtcgcaccgaaatacacacagagcacgcgccgcccgcggtggcgcacttgataaaatttccgcatgtttggccccctcacgggtggagcctcacagtgtggaaggggaggcaccaaggaggcggcggtgactagcacaaagaatcccagaaggtggcacgggagcaattcgcgtcgacccacacacgactacaagacagttacaacccgcggggaaaaaccaaaccacaggcgggggacgctgacgttctcccggaggaggggtcacctccatacagatcccccttcgtgggagcaagacggaagtacgacaacgagaccggcgcacataacaacagggggagaaaatgagaagggctctccaaactcattgagcaccagaagttcaccgccagcgagtgagacaaacaacggagaaaagagggtcccgcaacacaagaaatacacccaaaaaggggacacccacctcacaggggcccgagaatggcgtcctatcacgggggaatccgctggccccaacacaccgaggaaaatcaccccgacttttaccccctctataataaaatactttgttgc

SEQ ID NO: 553326 - DNA, 252 bp, Homo sapiens
  misc_feature (58)..(58): n is a, c, g, or t
tggcattttggaggaaaaggtggggcctcctcgccagcctcctccccctgccctggtnaaaccctcaactctactactaaaaaaaaaaaaaaaaaaaaaagccaagcctggtggcatgtgcctgtagtctcagctactcgggaggctgagccaggagaatcacttgaacctgcgaggtagaggttgcagtgagctgagatcgtgccactgcactccagcttgggcaacagagtgagaccccatctcaaaaag

SEQ ID NO: 553327 - DNA, 1777 bp, Homo sapiens
taaagttttggatttttttttaaactcctgtgaaacaagtagacacgagtaacaaccagcctccgtgggagaaatttcacacaccaacgtgcctgtggagggctcgtgggaaagcgtggaggggcgtggagcgagggttgtgggcagaaggtgcaacgagggaggggaattcctcgccctctcgagctccacgtgtgtagcccctccacgtggtcagtgacactccagagggagcagggtgagggacaataacatatatgagctcaaaacagaggcacaaagaggttcagcgaaaagaacacgagagagaggggtggaagagacgcgtggagcggagaggtggggacgaccaaacaacagaacaccaataacaaaggggctacaatgtgcgtaggcccagtgagtaagagaaaactcaccaagacaaaaacaaaaagtgcctgtggcgcacaatatgtgcgacagtgcgagatcaagagaaaacgacccccctcaaaaaacgggggagacagagacacagacggagcgcacgtagagagagagagaaagcgacaaagcacacttgtgggaggaagatagcacccacaaacatatcaccccaacaagacaaaccaccacgggcgagcacatacaatagacgcccgagggcgccgcacacaaaccgcagaggcgcgcgaccaacgaagacgaccagagcgaccagccaaggcgagcgaagccagcagcacaacgcaccgcagaacaaagaggaggcgccaccaatcacacggagtaaaaaagcgaaccatacctgagagaaggaatacaacaaaaaaggtagaggcaacatacacaagaggagaagaccaacacgtagaggaagtagaccccaaacaaccaccagtgaagcagcaatagtgatcaaccaccccagagagaaaatataaacaacaacacacccagaggaaaaaagcagcagaataaagaagcattccaccagagagataacaaaaaaacactggacacagagagaccaccaaagactatggggccacccccaccgagacaggataacacacaagcaaaagtaagaaaaacacatcagagcaagaaaccaccacaaaaacacaagaacaacaagagaccgacgcaaaaacacaacgaaagaggcagatggaaaacaaacaaaagaggaaggcataacacaataagaaacaagaagaacacacaagcaacgaagaggcacagaacaggaaaccacatcgtcaccaacaaacaatcagacgacaaacgaacgaaaccacacgagacaagacatacagcagacaggcaaatacataaagaaagaagcacaaccgcaaggcaacaagacagcaacacacacaccaggcacgcgcaacaaacgaagcacacacaccacaatacaagaataagagtgatagaagacgacagggaggtacattgcgacaagagcagagagactaaagaatacagagcaaacagaagagagagcagacaggagtatagaagcacaccacgatagggcagacaggaaacagaaaaacaaagcacagagagaagagaattaagagagcagaagagaggagcgcaatcgaagcaacacacgcggcacatcagcaaaagagagcaactgaacaaaaataaccacaaacaaactagaacaaagcaagaaacgaaacgagatcaacacgaacaagacaacactcaaaaccgagcacagcaagacagaaagcacagactaaagatcatgacgtagaagcgacacataaaagaaaca

SEQ ID NO: 553328 - DNA, 1093 bp, Homo sapiens
cactccttggcgcctgcctgagtcctccaaatcaccacaggactattcctagcccatgcactactcaccatcacgcctcaacctgccgttaacactcagaatcgtcccaccatcacgtcgaagcactgtaacatttatgagtcttgcagtcatcctcctaccttcacgccaagtggcgccctcaatattctttatctgcctcttcctacacatcgggcgaggcctatattacggatcatttctcgtacgtcagaaacctgaaacatcggtattatcctcctgcttgcaacgtgatagcagagcagcctatcgatagagctatgtcctcccgtgaggccaaatatcattctgaggggccacgagtaatcacagagatcgttgactgatccgccatcccatacattgggacagacctagttgcattgaatctgaggaggctactacagtagacagtcccaccctcacacgattctttacctttcacttcatctatgcccttcattattgcagcccctagcagcactccatctcctattcttgcacgaaacgggatcaagcaatcccctaagaatcaccttccattccgcataagatcagctttccacccattacgtacaccatcaaagacgccctcggcattaacttctcaatgcgtctcctccttaagacctttccactcttttttaaccaacctctaaagggaacccgaaaaaattatactctaccacacgctatataaaccgccgccccagatttttagcccagaggaaattccccaatgagaataacattctcgaccgccccataaatagtcaggaggcttgtacaaaaaaaatacacctcgacgtagaaaaacacccagacattatacacagacataatgtccacaagcaagcttttttctctccttgtttctttttctttgtttctacacccacgcctcaatataaaaacacatatattacaagcaaacactaccaaacacacacaacacaagcaactacacctacctatagaggcacaaggcgggtgatacatttgtcttatttgtttttgcggtacacacacaacatcactacagaggaaaagaata

SEQ ID NO: 553329 - DNA, 246 bp, Homo sapiens
  misc_feature (229)..(229): n is a, c, g, or t
gaggtccaactctgttgtcttttgtaaaataagggttgcttcattatacagaagaattttgaactcagaaattccaggactgctccatttgctttatttgctataccttcaagggcagagagtcagggcaactctgtgaaccccaagtgatcagtcaggtgatggcaatacttagcctgcaaatctactaaaacaagtcataaagtttccatttagtgctgtacacaangaagaaatatttaacta

SEQ ID NO: 553330 - DNA, 669 bp, Homo sapiens
aaataaagcagttacaaattgtgataagtgctttgaaggaaagaaggggtctgagacaacaacagggaaggggcctctcttgaaacagtagttgggaaggaggcagacatgcaccagtgatgtggtgacaggtgctctgaaggaggtcaccaggacctgacctctttgaaggatcagaaaatacttccctgaaggactgacatttgagcctagacctgaagggtgagccatcaagctaagacaattggggaagagcattccagggagagggaagagttgggcatggccctgaggctccttatagctggaggaatgcatggatcgcttgtctgaagcactgacaggatggactgagctgagtggagagagacagtagagtatgaaggcatgcatacgcattggccacatactcctttccatagagactcgttcaaatttgtataatgtacataatttaacagttatgcggtaaagtgcagatgaactgtctcgttgagatgtactgtaacgttcactgtagggatgtataacgggaatgaattgtgatgtttgacaatgttggcacaattgccaacgtaccgttatgctttctaaacgaattttaagttttcaaagtatttttgttacatagtcgactcttttttcaatggacgcctctcaatttacgct

SEQ ID NO: 553331 - DNA, 520 bp, Homo sapiens
  misc_feature (12)..(12): n is a, c, g, or t
tatccagttganaagttgaaaaacccaaagggaaaaaccctttgttaaacgcgcgggctttaagactgttggggaccacccgaccccgacattggggcgccaaccaccggcaaacacgcggcagcgcaacaccgggcggaacacccctttcggcggcacacacgcacaccggagcgcgcttttaaacgagcagcgcgcaacgaccgcgggcgacacccacacccgcgcggaaacaacagttttcctccacttggcggcgcccaaaccgatttgtggggggccccaaaaagcgcaggcccccctcgtgggcgagggcgccatatcagatacccagaaaccgctatagcctaacaaccgccgcgtgccaactgcaacacagcgtttctcccccagggcggacaacagccccatggggccggcgcacccccaccgacacaacccgccgcgcgcgcaaatcccccgcccccccggctgtcgaacacccaacaccccccgcgctcctggggggcaccacaccacg

SEQ ID NO: 553332 - DNA, 277 bp, Homo sapiens
  misc_feature (60)..(60): n is a, c, g, or t
  misc_feature (107)..(108): n is a, c, g, or t
  misc_feature (134)..(134): n is a, c, g, or t
  misc_feature (139)..(139): n is a, c, g, or t
  misc_feature (141)..(141): n is a, c, g, or t
  misc_feature (181)..(181): n is a, c, g, or t
  misc_feature (204)..(204): n is a, c, g, or t
  misc_feature (249)..(249): n is a, c, g, or t
actctagaggtatccccgctcacgcccactaggacggctcatgggctgccacgtcacaanctctgatctcgaccgtgcatccttgtcctcttagacaactcctgtgnncaccgtttctccctccacagggcctnagccntngtgtccggtccctaggaccaggctcttccagtgctagganaggtatgagcagcctctcacctntgagctgtggggatcacaattgctgcctgcctcagtcttggactncttgtgggccttacgggtactgagctcg

SEQ ID NO: 553333 - DNA, 272 bp, Homo sapiens
tggggaagcggctttgtttccaggtaacacggcgggtttcaccacatgggactggctgcagtggtgttcatgctgtgatctgctgaggcgtggtgagcatgatcctggttgtgagtgctgcgcatggggaccatggggtgtctgcgtcaacgtcacctgcgggggcgggatcagggctcctggcttcggaggctgctggatgaccagcggtgtgggtagcccctgcttgctgacgcccgacctgcgtaggctgcgtgaaggtagagaacaag

SEQ ID NO: 553334 - DNA, 312 bp, Homo sapiens
gtgtatgacactagggtagtttgcaggtggtaagccatttaccaagatagttgtaggtaaagaagggcagatttattagagaaatgtgaaaatatgttgcagtgggcagctcagcagagaaggggctacctgcaaagaggcaagggctggaggaaagttttgtagggtcctgctgaagggtgctacgtgtggaatgaggtcattgtgcccgcaggttgtttgtgattagctgtctctaacaattgttcatacaataattgttcattattgttctcaacttggggctctccccaacctggggacccttcctta

SEQ ID NO: 553335 - DNA, 440 bp, Homo sapiens
tagctagttggttttcaacatgccttcctcaccaagcctaatcatttctagcttttaatttaaagtgaaagatgtacaaccctttctttcacttgatcacttagaggccactgtagggttattattaattggcctaatttcaatattgttgtatcttagggaatagggaggccagagaaggaggagagagatgagggaaccactggtcagtggagcagtcagaacacacaaaacatttgccaagcccaccaccttgtatgggcacagattgttgtagcccaaaacaattgcaatagtaatgcatccagaattggtgggttcttggtctcactgacttcaagaatgaagccgcggaccctcgcggtgagtgttacagttcctaaaggcggcgtgtccagagtttgttccttctgatgttcagatgtgttcggagttcttcc

SEQ ID NO: 553336 - DNA, 334 bp, Homo sapiens
caggtacagatgatagaaacacatatctagggtaagtaatagacacaactattaagtgtatacagacgacagaaatctgtactttacgcaccaattgcaaatgcacagataacaatgaacttggggcactgaaaggtcaaagggaatctcaaacatattcactattttaaaatttaagacaacgaagcttagacaaaaaaccccaacatatacaccatatataacagtctattaattaatgactatccaatattaacttttatctcaagccactaagcacccttcatagtagattcatgtatcatctcctctttggctatgagatgcgtagttt

SEQ ID NO: 553337 - DNA, 1209 bp, Homo sapiens
ggcggggagcggcgtcgccaagctacttctagccgaccagcaccttcgctgcaagcccattttcatctcgggacatggaacgaggccaaggcgggagggtgcgcgaggctcgtaccgtcgccgtggtatcgggagtgtgcctgacacactggtgcaccgaagttctcagcttggtacatcactgtgattaatgggacgggatacagtccgtatgaaattgtttagtgaatgaatgcccgatgtcacagaccccgagggttggtgtgatcttcgtggtcattcaagggagatgatcagactcgtggaataaagcaattaagagtagtgagaatgcagcgggacgacattgttatgcgggttcttctcactgaaacatgactgcggtccaatggctcagatggatttacctatccgaagttctactgttgggccacgtggtccgtggcagcgtcgattccagtgcgaggagcatgcgcgcgttggtgtcgctcgattttcgcgagcgtcgaattttagcgctccatgtgattcacaatgggtcgacctgttcgttgggatcccgcgcattccggctcggcaatgatgccctgaagtttcccttgctgggccgtcgtttgttttgtccctgatgcatgccgtgggaccgtggggttagtaccgggcatcagcctgtttctttgtcccttttgtgctgtgcccacgtggtggttggttgtgcctggtccacgtcccggtggcatctcggctcttctccttgctgatcgtgcaggagtgcccttgtgcctttgctcctgtgtagtgcacgggagcctgccacggtcggggccctgtcctcgtgtccttcctcattggttgcccctttcgcggctgttgagcgccctggggacgagcctcgtcgcgcttcgctgcttgggctctggccttctgtggctgctgccattggcgcttgtgatccttgcctacggccgtgttccggggtgcccaggcgcatctcctccgcctttctggcgccggcttctttcctggtgcgcgggcgctccgggtgccgttgccattacgtggggccaaggtttcaggtcctgtctgtctgggtgccgtgtgccctcggtgttcttcaatgctcgtggctgtctgcccgcttctcttctcctgtgtctgcgcccgtcgccgtggccggcgggcccctcctgtgcccctctgtgttctccg

SEQ ID NO: 553338 - DNA, 220 bp, Homo sapiens
agcgcatcttctcccatcagttttttacttcaagtttactttgtctgatattaatatatccaggcaaattctctttaggttactatttacatggaatgatctttttccattatttaactttcaaccttttttgtctttagatctaaagcgaaggatggccaggcgtgatggctcatgcctgtaatcccagcactttgggaggctgatgggagcaagatgg

SEQ ID NO: 553339 - DNA, 150 bp, Homo sapiens
cccacttccacctttacttaccagacaaccttagccaaaccatttacccaataaagtcataggcgatagaaattgaaacctggcgcaatagatcatagtaaccgcaaggcaaagttgcaaattgtaaccgagcttatatgagcaaggact

SEQ ID NO: 553340 - DNA, 912 bp, Homo sapiens
gagcgtcaacgaatgacagaccattataaagagtattccgcataatgcaacgaactagaatactcgagaaagtccgaaggccacgtaaagtgcctgagctactattaagaatcgctgcccatgtacgcagcagaatttatgtagcatacttaaagccgggaagcgctatggagggaaacgaagaagcttgagtttgaacattacagacacaatgttgatcctacggtacctcaaggggacagtgctagaagtttggccaaacagagcgaacaaaaaggtcaagatgcttacccaggtggctctgccatccccggacagtgccaaggagctattatatacgaggtactcaccagatgagctgcggatagtctgcccattaatagaacagtggcctgtagtgagtccgccctctggatcctgtagctccctgcgtctagacatgtgatggtgattcagatgatggcgagagatggtcgaggctgatgagaaacggaacacacataataggcacttctggatcaggctcctctggcgatgtagtctgaaggggtatatgcctctgcctgaagtcgaggaggagctctcttccagggtaaggaatcggtgcatcgaagacagatcaaaggctgcccagtcctatgaagacagattggtcccaaaacgtcgtgttacgtgtccatgtcgagtgcctgcggtacaatgccataggtctttcgaatgcctatatggttggaatttgtcgtgaacggtatggcgtccaacaaggaaaggaagggctgatcacttataccgtgcccgatgtgagaatagtggccatccttcttgccggtttgggatggcgcgtgttcttgattagacctaccaggggggttgatgtaccgcggattttggaccgccggaaaaatggcggaa

SEQ ID NO: 553341 - DNA, 619 bp, Homo sapiens
gtgtggtatctccatatttaaaagtcaggacaggaaggaagatggggacggattagccatgtgacgtagaagaaccaagaggtgtcccaaaagccagggggagagagtttcaagaaagagagagtgagcagtggtatcagaagctacggatagtccagtaaaatgaggagtgagaatggaccattgaaattagcaacaaagagattccgggagacttggaaaggaacaatttggatacggtggaggatgaaaatcggatcaaagagcaaaaagggacgtggagacattacctataggtgactggggagttccactggtaaggagagctgagaaagggagtgggatctgaaggagaacgtggtgagatggggggttggggggtgagagcaagtgacgtccggtggcttctctttccttaggggaaatggaaagcaaggacataagctaagtgaagaaataggagggggtttggcgagcctaaggagagaggagaaggtctacgtcaccttagagagggggagagtgacctgattagagaactgacgtggatggccaggcagtcctaaaggaggttcaggacagaagtcggtaccgagagttgcatggcccaggatgtcag

SEQ ID NO: 553342 - DNA, 765 bp, Homo sapiens
tccaccagagattggaaatccagattacgttcagtggtatagtttaaaaattaccgaagcaggctgggtgcggtggctcacgcgtgtaatcccagcactccgaaaggccgaggcgggcggatcacttcaggtcaggagttcgagaccagcctggcaacatgatgaaaccctctttctgctaaaaacgcaaaaattagccagacatggtggtatgtgtctcaaaaacaataaattaataaaaagaaaaattactgaggcaactccatcagaagcctgtaccccagactacctggcatagtccctgattgttgaagacaaagtaatctggtgtgtggttggtggaaaacacttgcagaaaaacaatcagaataaaacaaaaactatcaatggatgataacttaaaatggccatagttaatctgatgagagtgtgtttgacaaggaaattggtgacttctgtggcacatggtgttttaaacaataaccaaaattatgactgatgacattatactaggacatatcaacagcaagtgtgctgaaaaactttctgtggaagtttatacaattgtctggaaatatacaaataacatttaacattaacataagcctaatttttaaatatctccttttacaggtgaacgaaaattttttgagatttcccagaatggaaattctaaaatcaggttgaatcacgatttcgggtaaggggggagtaggcgatggggaatggctggcctgcggggtattagcaggggaaattttgaag

SEQ ID NO: 553343 - DNA, 250 bp, Homo sapiens
tggcagctatgtaaaatggatgagttctgatttatcctcagctgggtagctgtggctgtatagcagtactactgattggtgtacattaatttggcatccagaaatttggctaaattcatttatcagttctgggaatttttgggatgagtcttcgggtttcctaggtatatgatcatatcatcagcaaacagtgacaggttgacttcctctttactgattgggatgccctttatttctttctcttgtctga

SEQ ID NO: 553344 - DNA, 1078 bp, Homo sapiens
tgggtttttggggtggatgggtgggctaaaatggcaatagtttctttttgcgggagacatatttctggccaataaaaggactaagaaggggcacaactttttttttaaataaccatagaaggaaagatactttaaaaaaaatctcctagatagttttggtagcggccataacttaattttgtgggtaacaattggtcgcactatttggtagaaaagggaggcaaccggtatgttcgggggttatatgggtaaggtttggttaagggtattagcgctttgggtttttaaagagaagatttaacacagtggtttctggggattaagggatatagctttctccagaagtgtgggtcacatttcatttcctgggtgtgtagagaagcgtctttaaattttcttcgtacctgtgtgtaacccaaaattcttcccagtgttttttaacaacatcctctcacagtggtggggggtttcctttattatacccaacaggcagaaagaataaaccggggcatttattaaaccatctggcgcattaaactgttggggccaaagtgtggtgtggggttctacccttatgaggtctgtataacaaagagaacattgttcctccaagaccagaagaggaaactctgcggcctcacagggggtgttttttaaaaatatgagacgagggtggatctcgagaaatttttttttatccaagatgtgaaaagggttttcataaaggtggccacatttaaacgccttttttccccgtgggagtggcctactagagaatttccagggggcaattttagggggggggggaaaccccgtgtgggttgggaacatcctaaccggggttttttttcaacaaacaattatttttcgacgaacgtcgaggatttttacaaaaggggcgtggggggaaaaaacttattctattattttttggtaaaagaagaatataattgcccaccagaaaagtcaataatatcaaaaggagggtgtagttcaagaaaacaacacggggggtataaataaacaaatcaaccgacgagtcattttttccttaaagaaagaattataataaggattc

SEQ ID NO: 553345 - DNA, 303 bp, Homo sapiens
aatattttatttttttttggtagagccgaggttcccctaatgttcgcccaggctgggtcttgaaactccggggctcaagtcgtatccccccatctcggcctcccaaagtgctggggataccagttggtgagccaccaaccccagctttatttgcacaactttaaaatttagggtaaaacctggtaaattctcccactaggtgaagtcacttaatttatttaaaagctataaaattgggaattatgggatattgaagaaaatctggagaaaaatatgttaagttcagattgtagttcacagtat

SEQ ID NO: 553346 - DNA, 504 bp, Homo sapiens
taggacacaaaggaatgtgctctggagactctcccagcactccctcaacataaggagaagaaaaacaaattttcctttctcttatagtatgagtttatagatttctgttctctgtaactagcaacttcaagcattctgttttatctaagtagtggagtgaaggtcataaactgtctgagcaggcctgagatacagccacctggacgccatagtgaaggtcatggaataagctgtgctaggcactaaaggaaaacctagataactgacatctgggttgcacagcaacggtcatgtgtaatcctgagttatgaacctgtcacaatttgattaattgctctgcctctgtatccttgctttcacaccactgtaactgtaagcctgcttcaagctagcccactccctttttgaagtgtgtataaaagtcaagtgctgtctttgttttaggcccagttttccagatgtaagtctgagtacactcaataaagatcctcctgcttaaccccg

SEQ ID NO: 553347 - DNA, 1093 bp, Homo sapiens
gtgcagtggcacaatcacggctcccaggctaatgtttttatttattaatattagtaatattttttatttatattattattttggttgagataggagttgctccatgtatgcacaggctagtatctcaaactacctaagctcaagccatctgcctagcctatggcctcccaaagtagctgggattgtagacataagccacctcacccagcctaatgaatatataatctaacattgtaagaatgaggtactgtttccatcagtctaatacagatataataaacttccctaccaaacaccagtttcatatttgcattgtcttcattttcattatcgcattgttcactccgtcgataaacttgcacatggacacaatgctcatcatcactacatgcacaaacttagctgcaacgggcacgacttggtatattcagcaaagacaataatattaaacacacgcgacactgccaacatataatatgatacctattcatcagttattttcctaaaaactgctgtattctccagaaaacataaccttcaattacacccctgtttagttgtagaggcttaagaccccaatcttccgtcacatactgtaacaataggggaacaagaaggctaccatgacacctagacatgtgtagccagtaactagaaaggttacacatcctgcacaacacgtaacttccttgcttcatcccactgcccctgtactcaggactccatcaaacacgtccataaccccacaacgaactaaaaaggtaaggcacacgatcaggcacaacagttcctggaagacaccaccaaagggggaccgcaatcacaacagatactttcaatccccaggagccacacgaacgaacaccaacaaaaaccaaccacccatagcacacctgacactaacacgaccaggccgacggaacacacgcgccaatgcaaaaccgaaccaacacggcgaataacaaaagagacacgaacccaagatctgtcgaaagcaatcaaacacacacagagaacgagacacgcaccccaaaaacccaagaaacaagcaacagacctacctcacccaactacgagaatactacacgagcag

SEQ ID NO: 553348 - DNA, 702 bp, Homo sapiens
aacttaggatcacgccggttttcgcaagaatttgagaggctatagcagacaccttaacagagagcaggagtcatagcaagctctcagtaactataagagtagcgtactgtggcaacagtacagacttccacagcatatgcgggcaagagagcagacattgccagttattgacagactgtcgcagaaggagcatttgtaccaggccgttaaagcctgaagtgcctcatatatcgaactaagcactccagtctgtgcgacagatacagactccttgtgacacagctataagtccaatgacgcacacgcgggtgactacaacgtctacctctcaggctcatgagcatcgagtgcctttggatcacgactatagcgtcaacgacagatgaacgctaccactaccagacttttgtacagtcatagcagcatgaggtcatctttatgcaggagattgtcatctgatgactagactccatagcaatacccgcaacgagcgccctaatagttagttttcacgttgaataacagcttcaaacttaacttacgattttagcttagtcactaggcttagaagtagtactgaaggtctaataagaccgactattcaactattaaccgaaccctctgggctaagtaccctgttttagcgcccaagttttacttggctacctaagtccctctatactcacaagcctattgccctcg

SEQ ID NO: 553349 - DNA, 146 bp, Homo sapiens
gctcttaccaacatctactactcaccccactgcctacgaactatcatacgctgagccagcaacttagtaaggactagcttacacaatagcttttatatgtatagatacctcttcacggactccacttatgactccctaaagcccat

SEQ ID NO: 553350 - DNA, 223 bp, Homo sapiens
cggatgtagcgctctaaggtatgggatacagatgaatgcaccatgcatgctaattttgtatttttagtagagatggggtttcaccatgttggccaggctggtctcgaactcccgagctcaggtgatctgcccgccttggcctcccagagtgctaggattacaggactgatccactgggcctggtgaaaatttgtatctgtttgatcagtgtcttcttaatccc

SEQ ID NO: 553351 - DNA, 105 bp, Homo sapiens
agagagttgtctacaagcccgacacagtagcatttgtgccaataactggttggaagtggtgacaacagtgctgagagccaagatgctaactatgccttggattca

SEQ ID NO: 553352 - DNA, 413 bp, Homo sapiens
  misc_feature (124)..(124): n is a, c, g, or t
tttgttcggggtttgaggtgccaccttacaaaaggatgggtgtacgctctcttttcagaatgtggttcatctcaaagccctttacactttggagccaggcctgttcaattttacaaataacacngttttgcttgtagtcagggtgctgtgacaacatgaagagttcgagctacctcccaggatgagtgcaggttttcctggtgacaaatctcaggcattcaaaggttctgttagcagtgccatacttgtgggtttacagagatggtgtgtctggctgagaacaaaggagccgtaccaggaaagttgaagcatatcttcattttcaagtccaggctaaaataaggtctgaggaaaagaatgagctgcgtgtgaaggataggaacagaaatcatgaaagatctgtttgtccaggc

SEQ ID NO: 553353 - DNA, 203 bp, Homo sapiens
tattgactcggagaattactagtgccttccatgcactagcttattatgtacttatatagacagttctataattattctgattataaagatgaaaaaacaaacacacacaagttaactgtacagatgaactggtggcacaatcagcggggcagcgaatagattaaaagctcagcagctaggttggaacactcaggtgactgaat

SEQ ID NO: 553354 - DNA, 234 bp, Homo sapiens
  misc_feature (15)..(15): n is a, c, g, or t
  misc_feature (28)..(28): n is a, c, g, or t
  misc_feature (126)..(126): n is a, c, g, or t
  misc_feature (128)..(128): n is a, c, g, or t
  misc_feature (167)..(167): n is a, c, g, or t
  misc_feature (170)..(170): n is a, c, g, or t
  misc_feature (174)..(174): n is a, c, g, or t
gcgactcctctgagntgagtttgaggcngtccccgactccttcctcccccttccctcccccttttttttgttttccgttcccctttcccctcccttccctatccccgacgaccggatcctgagtgnanaggcggtggcagctgctgagttctcggtgaaggtgagtntgnaccntgccgccgccgagtggagcgctctaaaatggccgccgtccctggtcgcttcttctcgagt

SEQ ID NO: 553355 - DNA, 158 bp, Homo sapiens
acattaacatttgaacttagctagtaattctataactgacctattccccgtactaacgtattggtgtccccgtgtggcatgttttctagagcgttcctactttaaagcatggaacatgcaggtgatatgggaagtgttgaaagacctgagaaaacgag

SEQ ID NO: 553356 - DNA, 142 bp, Homo sapiens
ctcgctccctttccctaatttcctctgtaaacggttggaatttcacaagtcgagcattctcaatctgtcgcatcagtttcaccgcacaagatgccctcaatggcttgtccatggtaagcacagccccttctgtcgtcttctc

SEQ ID NO: 553357 - DNA, 207 bp, Homo sapiens
tgttgcatggcatcatctgcagcaattcgcgcttcaagcatgttggttcgcgcatgcaggcaagcaagcaaacagcaaggcattgggtgcaccacagcaagcaagcaagcaagcaagcattcaagagcaacaagtcaccatccgcatccacagcaagcagcgtccaaccaacacaccacacagcccccatcgtcggcacccagcaca

SEQ ID NO: 553358 - DNA, 196 bp, Homo sapiens
gtggccttcgcggctgtcggacaacttctggtgggcctgtgcggaaggcttgaggataaatcgctgtagctgcatgcacttgacatggcctggcctgtcgtcctcacttcagtgccaggtccattcgaccaaagcccttttctgatcaactatctcattgtccagcccggggctaccgagcctcgtaattcgctaa

SEQ ID NO: 553359 - DNA, 188 bp, Homo sapiens
aacctttccccccggggctttttttttttcccaaggaattttttttttttctaagggggcctttccccccccctaatttttttttattttttaaaaaaaattttcccccttttttttaattttcccgttttaaaaggattttttttttttttttgggtttcctttccaaaaaaaaaaacttttttcca

SEQ ID NO: 553360 - DNA, 978 bp, Homo sapiens
agagaataaggagactggcggagatggcagtctctcgctggccctgacgctgctcctgctgtgcagactctcccgctgctcaggcgagggcctggctggagcccccagatcacgcccgttccgtactgacacgcagcttctgagcgctggtcagttgtccacgtgaagagccgttcattcagtggctggagatctccctgaaaatgcaagaacagggttccagaacatggctctctatgctgacgtcggtggaaaacaattcccgtgtcactcgaggccaggatgtggggcgttatcaggatgtcctggaagcctggagcacagagaggcgcccactgctaggcacctgatgagtgttacgacttcttcgacgaggagtccgtacaggctcctcaggaaggctcataggaagtaacgaggacatttccatcatcccgcctctgtttacagtcagcgtgggaccgatcggggcacttggaacgggcccgtgggtgtccactagaggtgctggctgcggcgatcggcgcttgtgatcgtacgtacttggccttcagtgcgaagagccgacatgcatggcctgagggcgggagcccagccctgtccttgcttccttctaataaacatcacaggagctgggactgcccaacaaggtctacatgcctccctcttacagaggtaagacacatgggtgggaccaagggcctcaaggaccacgtgagccgcaaccttcatgtacaggcagcaggccattgtctatcctacagctaggccactaagggagggctcgaccgtgatgaatagagcccatatgggcttgaacccataatccacctggagtcccctacgtgtttgaccatcaagccgcgatagtgcacactctccgttgaaaggaccactgccccaaacgcacggaagcggaatcaactagagggcaccacacctccagggaaactgtcacctctgacgtgcatggaggca

SEQ ID NO: 553361 - DNA, 886 bp, Homo sapiens
  misc_feature (11)..(11): n is a, c, g, or t
  misc_feature (16)..(16): n is a, c, g, or t
  misc_feature (32)..(38): n is a, c, g, or t
  misc_feature (40)..(40): n is a, c, g, or t
  misc_feature (43)..(43): n is a, c, g, or t
  misc_feature (45)..(45): n is a, c, g, or t
  misc_feature (106)..(106): n is a, c, g, or t
  misc_feature (108)..(108): n is a, c, g, or t
  misc_feature (116)..(116): n is a, c, g, or t
  misc_feature (143)..(143): n is a, c, g, or t
  misc_feature (148)..(149): n is a, c, g, or t
  misc_feature (236)..(236): n is a, c, g, or t
  misc_feature (256)..(256): n is a, c, g, or t
  misc_feature (328)..(328): n is a, c, g, or t
  misc_feature (381)..(381): n is a, c, g, or t
  misc_feature (449)..(449): n is a, c, g, or t
  misc_feature (472)..(472): n is a, c, g, or t
  misc_feature (476)..(476): n is a, c, g, or t
  misc_feature (486)..(486): n is a, c, g, or t
  misc_feature (572)..(572): n is a, c, g, or t
  misc_feature (578)..(578): n is a, c, g, or t
  misc_feature (582)..(582): n is a, c, g, or t
  misc_feature (604)..(604): n is a, c, g, or t
  misc_feature (606)..(606): n is a, c, g, or t
  misc_feature (639)..(639): n is a, c, g, or t
  misc_feature (644)..(644): n is a, c, g, or t
  misc_feature (662)..(662): n is a, c, g, or t
  misc_feature (678)..(678): n is a, c, g, or t
  misc_feature (699)..(699): n is a, c, g, or t
  misc_feature (702)..(702): n is a, c, g, or t
  misc_feature (705)..(705): n is a, c, g, or t
  misc_feature (715)..(715): n is a, c, g, or t
  misc_feature (728)..(728): n is a, c, g, or t
  misc_feature (765)..(765): n is a, c, g, or t
  misc_feature (768)..(768): n is a, c, g, or t
  misc_feature (771)..(771): n is a, c, g, or t
  misc_feature (842)..(842): n is a, c, g, or t
gacgcgcggcncccanccctcccctctcacgnnnnnnncnctncncagtgtggccgcgaccctaccctctgcaaggcgatggcccgcgccccgagcgcagggtggngnggctgggngggcggccatgggctgtatcggctctnggggnncggcgggtcaggcatttctggggaccaacagatggccgaggctcagaggatagagacggctgctccagctaaaggtgaatgttgganacacagtcagcgatgctgcncaagtacaccgagcgagccctaactatccaggagatcgctgcgctggacaggtcctccctgcatggtatttnccaggtggtgaaggaacacgtgaacaagcctaccgacatggcccagggacgantggctcacctcattgagtggaagggctggagcaagccgagtgactcacctgatgccctggaatcagcnttttcctcctattcagacctcancganggcgaacaanaggatcgctttgcagcaggagtggctgagcagtttgacatcgcggaagccaagctccgagcatggtcttcggtggatggcgaggantccacngatnactcctaagatgaggactttgntnggggaatggacacagacatggctgggcagctgnccctngggccgcacctccagganctgttcaccggccacnggttctcccggcctgtgcgcnaangcnccgtggagcntggagagcgactnctcacagaccgtgtccccagacaccctgtgctctaanatntgnagcctggaggatgggttgttgggctcccggcccggctggcctcccagctgctgggcgatgagctgcttctngccaaactgccccccagccgggaaagtgccttccgcagcctggg

SEQ ID NO: 553362 - DNA, 386 bp, Homo sapiens
ctaggtactctagaggatctctcctctcgacatcttctgtaacaccaggtcccgcgaagcgcgtgtggcgccacggcggacattgacggctcttgagagtctcatcgagatgggcttccccagtggacgcgctgaaatggctctggccctcacagtgaaccagggcatcgaggctgcgatggactggctgatggagcacgaagacgaccccgatgtggacgagcctttagagactccccttggacatatcctgggacgggagccccatttcctcagagcaaggggggcttgaaagggatcgtgggttctgctgccggaaaaggcaaaacccgcttggagtgaagagggaaaagactgggaacaaaaactaagaggaatgtcggaag

SEQ ID NO: 553363 - DNA, 108 bp, Homo sapiens
ccgcctcagcctcccaggcagctgagaccacaggcgcatgctgccacgctcagctaatttaagaacaaaaattttagggtggcggtttctcactatgttgctcaggcg

SEQ ID NO: 553364 - DNA, 169 bp, Homo sapiens
cagaggtcaggctcgctcagcgtcaggtttgattcgggaggatcctataggtgcgggggcttatgtatgatatatgggcgttgatttagtactattcactgtttagtaacctcgtttagtatggtgtatattttcgtaattatacgattgctcggggaatctcggttat

SEQ ID NO: 553365 - DNA, 1170 bp, Homo sapiens
gaatcttagttcaacgtttaaattatgccacacagaacccatctaaatccccttgtaaattataacatgtatagtccaaagaggaacagcatctttggacacctacggacacaaaaccctatgatacgaagacgacgccaaaacaaaaaacacacccacaccaccacacaaacaaaacaaagagagaagagagcacagccaaaccacaacaaaagaacacacaaagacacaacaaacgaggagagcgcgcgccgcaaggacccaaaaagagaaaagaaaaaacaaggagaaaaaaagcagaacacacacacacacacacaggaggaaagaaaacaagaaacaagggaacaaacaagacagaaaaagaaacacaacagagagacaaaaaaacagacaccaagaagaaaaagaacaacaaccaacgagcgagcaacaagggaagcaaaaaaagaaggagaaaaaacaacaaacgcgaccaacaacaagaaagcaacgcaggacacacacgacagaaaacaccacacaagagagaaacaaacacaacaacaagaagagggaacacgcagcacaagagacaagcaaagggaacacaaaacagacaggagaaaaacgagacacacgaaggacacaaaacacagcagaggaagacaaagaaagaaagaaggaggaaaacaagagagacaacagaaacgaactaaaagacaaagaggagaaaccgcgaacagataagagaagagagaaagagaacagcaacggcaaggaaacaaaaaagaaagcagaagaacacaagacaaacaacgaagaacggaagagcaaagacagaaaaagcaagagaaagaaagagagaacaagaagcagcacagacaaacagcaagaggacagaaaggaaagcagcagcaggaccccagcaaagcgaggagaaaaaggaacacgagaaagagagagaggaaggcagcccccgggtagctcgaaaccaagaggaggcagcgaaacacacgaagcgcggacagagagaaagagagggaaaggagagggcgcgacgcacacagcagcagaggagaagcagcagaaagagtagcaagcagcagaaggcgacagggagggggacgacgagagggagaaggccaaacgagaaccacgggagatagcgcgcagggcagagcgcaagcg

SEQ ID NO: 553366 - DNA, 369 bp, Homo sapiens
caacctcttcatggtgcgcttggcacaaggcctgacacatttaaggaagggcacccttaccctctgcccctaccacagcgaccggcaacttatgaaccaagtggacgaggctggactgctcactgtgcttggctctttcctggatggtcgaaacattattctaagcaaatcacactatttattgcatgggctgggggctgccatgcaacccccaatgctggttaccttagatgaagaactgcggccattggcaatgtctgtccctgtgggccatgcaaaggacgttgtgggccaagctggcaaaccgaaaactatcacaaggatccagacgcatacaaccccaatggtggtggcccacggggaacgggc

SEQ ID NO: 553367 - DNA, 387 bp, Homo sapiens
agggtacagctcctgcagctgctttcatgggctggcgttgagtgcctgctgcttttctagtcgtgtgggacaagccgtagatggatctaccattctggggtctggagggtagtggtcctcttctcacagctccactaggcagtgccccagtggagactctatgtggggctccagtcccacatttcccatccacactgccctagtagaggctctccgtgggggcttcgcccctgcaggaagcttctgtctggacatctggacatttccatatacttggcctccacatccggcatcctctgaattcaagcaattctcctgcctcagcttcctgagtagctgggattacaggcatgcgccaccacagatgtatggatgatatccatacat

SEQ ID NO: 553368 - DNA, 499 bp, Homo sapiens
  misc_feature (37)..(38): n is a, c, g, or t
  misc_feature (463)..(463): n is a, c, g, or t
  misc_feature (474)..(474): n is a, c, g, or t
ttttctaacattgccttacaccgtgtttctctttttnngggaggggtggggtgtctaatgctgtggtcttgctcatctgcatggtagtgccatgagggtagttgggttcctcctggatctctcccaggtctgttggagagaacagacagacttagaacccctggagggaagctggcagcttacctcacccttgggtacagagtcttggaggtcctcctttctggcatcagctgggtaggcaggactttgttctctgagtcactttgggtcagtcccttgcctcgctggctctgcaggctgaattcaccttctcaacacctagcccatgttttcctgcagccttatggctgctattcctcccaagtgagttccagcactggctcaggcatgctagttctttaccacagagctgctcaagtgcacaagcaactgcagtggaagccccatgacattccagtctgtngagtgggcaanacctgggaagcaagttcaatgccgt

SEQ ID NO: 553369 - DNA, 775 bp, Homo sapiens
  misc_feature (208)..(208): n is a, c, g, or t
ccaggagggcacagcactgcacctgcagacaagcctgccagccctttctgaggcagatacccaggaactaacccagatcctgaggaggatgaaggggctggccctggaggcgagagtgagctggagagacaagacgaagccctggatggcgttgcagcagctgtggacagggcaaccttgaccatcgacaagcacaacaggcggatgnagaggctgacctaggggcagaacgtccctgcattcctgtctcaccctgcacatcccgctgagatggagggctgggcggcagtgccagggctgcagaggcctgtggccctccggagtggtcttcctctggatggggctgctactgtggggctgcttctgcaccaggggcctccccaggtgtgcaccatgcctgcctcccacttggctgtccctgctgctgggcaggacccggccacatgttctgcggatgctgcagaagtgtggaccatggcgggaccccaaggacacttggcacaggcctggaagaggccgccctcgtcttgtctcggctccctttcatggacagactggccttcttagctgtactataaatttgtgagtgaagttagagcccagctcacttagccagctcactttgagggcatcctataaacacccaactgttcttttatcgtctcggttttagccaaaagtgaaattagcatgactgcatctttcaaacaaaaatattgatttctgcttttagggccccgtttccatccagaaataaagggaaatgctggcttca

SEQ ID NO: 553370 - DNA, 1129 bp, Homo sapiens
  misc_feature (208)..(208): n is a, c, g, or t
ccaggagggcacagcactgcacctgcagacaagcctgccagccctttctgaggcagatacccaggaactaacccagatcctgaggaggatgaaggggctggccctggaggcgagagtgagctggagagacaagacgaagccctggatggcgttgcagcagctgtggacagggcaaccttgaccatcgacaagcacaacaggcggatgnagaggctgacctaggggcagaacgtccctgcattcctgtctcaccctgcacatcccgctgagatggagggctgggcggcagtgccagggctgcagaggcctgtggccctccggagtggtcttcctctggatggggctgctactgtggggctgcttctgcaccaggggcctccccaggtgtgcaccatgcctgcctcccacttggctgtccctgctgctgggcaggacccggccacatgttctgcggatgctgcagaagtgtggaccatggcgggaccccaaggacacttggcacaggcctggaagaggccgccctcgtcttgtctcggctccctttcatggacagactggccttcttagctgtactataaatttgtgagtgaagttagagcccagctcacttagccagctcactttgagggcatcctataaacacccaactgttcttttatcgtctcggttttagccaaaagtgaaattagcatgactgcatctttcaaacaaaaatattgatttctgcttttagggccccgtttccatccagaaataaagggaaatgctggcttcaaaaaaaaaaaaaaaaaaaaaaaaaaaaaaaactgtggtgggcgcgccggcctggggcccccggaaaagtttccttaaaccatctcgttggggcggcggccgggcgcccaggtagggtacaggttagacacttgggggcaaatacgcggggtcccaaagggagaacccgggggcatagaacttacgctgcgtggggtttctacaccaataaaaaaacgcgccgcggggggaacaccgagcggcggtttggagaacaaaattcacagagaggggagatccgagggtcaatcaccggggagctctatacaacagggagtcaaaggagaagctcggatatcaaatacggcccgagatg

SEQ ID NO: 553371 - DNA, 515 bp, Homo sapiens
ccaggagggcacagcactgcacctgcagacaagcctgccagccctttctgaggcagatacccaggaactaacccagatcctgaggaggatgaaggggctggccctggaggcgagagtgagctggagagacaagacgaagccctggatggcgttgcagcagctgtggacagggcaaccttgaccatgttctgcggatgctgcagaagtgtggaccatggcgggaccccaaggacacttggcacaggcctggaagaggccgccctcgtcttgtctcggctccctttcatggacagactggccttcttagctgtactataaatttgtgagtgaagttagagcccagctcacttagccagctcactttgagggcatcctataaacacccaactgttcttttatcgtctcggttttagccaaaagtgaaattagcatgactgcatctttcaaacaaaaatattgatttctgcttttagggccccgtttccatccagaaataaagggaaatgctggcttca

SEQ ID NO: 553372 - DNA, 304 bp, Homo sapiens
cgtacaatggcccgccctgccccaaaggaggactgtgtctgtcgatgagtgacggttgagtgtccatagctgcatgtagtgtgtaccacatggagcttgcccactggatggcagacttcacctgggggcagctattgtccaactgcacaggacacttgcatttgaagaattgtgcacatacttatcttgactgcaggtgtctcaataagtacttcacgcagatgcatgtaacgcccctgaatggatgtataaccctgattgccctgacatgcgcacttgcatgcactgtgttccacccattgct

SEQ ID NO: 553373 - DNA, 486 bp, Homo sapiens
agatccatttatctttttctctccctttttttttaatttttatcttttgagacagagtcttttgctgtgtcacccaggctagattgcagtggcatgatctcagctcactataacctccgcctcccaggttcaagcaattctcctaccccagcctctccagtagctgggcccacagcacatgccaccacgccctgctaggtttttttttttttttttttttttttttggtgtttggtgtttggtatgtttagtagagacaaagtttcactatgttggccaggctggtctcgaactcctgacctcaactgatctgcccacctcacctcccaaagtgctgggattacaggcgtgagccaccgcgcctggtgtaaacggggctttttggcagtctgttctgagatacgtctccacaacggttacttgaaggaaaatgcatacgggaccagctgccataatatagtcttccctccatacctgccccttcat

SEQ ID NO: 553374 - DNA, 295 bp, Homo sapiens
cggcacgaggaaacaagaagtttaattgactcagttccacatgtgtcaagggagggacctgatgggaggtgatgggatcatgggggtggtttcccctatgttgttatcataatagagagggagttctcacaagatctgctggttttaaagacagcagtttcccctgctgtcactgtctctctcctgctgccttgtgaagaaggtgcttgtttctccctctgccatgattgtaagtttcccgaggcctccccggccatgtggaactgagtcaattaaacttcttgtttataaagta

SEQ ID NO: 553375 - DNA, 548 bp, Homo sapiens
aaggggggggtcccccccggggggggccgctttaaaattagggggtcccccggggtgcgggaatttggcccgggttcagctttttttcagggggggtcttgtgaggaagggccttttccaaaaagggaaggggcgaaaatccccgcttccccaataatgaaatggcccagattttgttttttttttttttcgggggtgggaaaatttgggccgggctttttgtggggggggcttaggaccgggggggggggaaaaaatggggaaaaaaactcggttttcctccccgtttttttaaagggaccccgttggggggtaaaatttgtttggcctaatcgagggaaaaggccctgtcttttttcccccctcctgcaatcccccgggcagggggattcccctgttgttttttagtaattccctggggtttaaaacaacccggggggggcctttttttgggcccttttgtccacccctttttggggcttttataaacatagtgaacttgctggttgaaaaaaaaaaaaaaaaaaaaaactcgcgtggtggtttta

SEQ ID NO: 553376 - DNA, 266 bp, Homo sapiens
  misc_feature (35)..(35): n is a, c, g, or t
  misc_feature (51)..(51): n is a, c, g, or t
ttcacgtgctgcacagccacactgtcatcacaggnaaacctgctcctaganacacactcccctgcccagcaggaggagggcttatcaccccagctaggttgagagcaccttctaagcaggggtcccacattcccaatccatgtctgcactggatgtgtccacaatgtcaactctgctaacagtaacaactactgcaaaggagcataccttgcattctcccaaagagggataatggggaagtgacagtccctttaataaagtccagg

SEQ ID NO: 553377 - DNA, 464 bp, Homo sapiens
  misc_feature (6)..(6): n is a, c, g, or t
  misc_feature (123)..(123): n is a, c, g, or t
  misc_feature (181)..(181): n is a, c, g, or t
  misc_feature (220)..(220): n is a, c, g, or t
  misc_feature (272)..(272): n is a, c, g, or t
  misc_feature (341)..(341): n is a, c, g, or t
  misc_feature (413)..(413): n is a, c, g, or t
  misc_feature (442)..(442): n is a, c, g, or t
  misc_feature (446)..(446): n is a, c, g, or t
ctcgcngagtcagatacagcagagaagggaaagtcaaatttccggaatggctatgtgtctggggtttcatccatccgacatggaagtggacttactggaagaagggagagagaatggaaaagnggagcattcagactggtctttcagcaaggacgggtctttctatctctggtactacacngaattcacccccacggaaaaagatgagtatgccggccgngtgaaccaggtgacttggtcacagcccaagatagttaagtgggatcgagacntgtaagcagcatcagggaggttggaagatgccgcattgggatgggatgaattccaaattcggctggctngctttttaatatggatatgcttatacacttacactttatgcacaaaaggtagggttataataaggttaacanggacatgatcttctttataattctacttngagngcggtctccatgtttgat

SEQ ID NO: 553378 - DNA, 168 bp, Homo sapiens
  misc_feature (62)..(62): n is a, c, g, or t
gaggtgatctagaggatcccggcgcacattttaacattgtcatcggtaggcacataaccagnccagccgttgaagggacagatctcaggctgtcaccatggaactgcagaccttccctcctccagaaccttgaagggaagccctgagagaacccaggaattttaaggg

SEQ ID NO: 553379 - DNA, 768 bp, Homo sapiens
  misc_feature (120)..(120): n is a, c, g, or t
  misc_feature (148)..(148): n is a, c, g, or t
  misc_feature (157)..(157): n is a, c, g, or t
  misc_feature (176)..(176): n is a, c, g, or t
  misc_feature (190)..(190): n is a, c, g, or t
  misc_feature (196)..(196): n is a, c, g, or t
  misc_feature (222)..(222): n is a, c, g, or t
  misc_feature (327)..(328): n is a, c, g, or t
  misc_feature (367)..(367): n is a, c, g, or t
  misc_feature (377)..(377): n is a, c, g, or t
  misc_feature (393)..(393): n is a, c, g, or t
  misc_feature (399)..(399): n is a, c, g, or t
  misc_feature (417)..(417): n is a, c, g, or t
  misc_feature (431)..(431): n is a, c, g, or t
caaagataattgatttgatcttatatttatttgtttttaggataatttttgatctttttgtaaactgctttgcttgttaatatctggtgaaaaatcaaattgagttcatttgtgttcacntttccatattttcccgagatatcctagntcatcaaangataacaggttcatcaganattacagtcagaanaatccntttttctaactggaataggttagcangggaaacaatatattcttgtatatttaacctgttcattatattcgtgtagtgctattatagctgaaaaacctcatgttcttataaagcatagctgtgttggtcanncagttttatacataagttcataattatttcatggtgcgncctatttggnaggcccgtgttagacnttttanacaatcccatccatatcntgtaattctctgantggcaagaatggatggagcatttctgagttaacagtgctggacagtatcgtactgggtgtcataaactctttatgaatggtaatattattgtaacattggaacatctggggccctcaaactatattgcaggttttcagacagtatgttttgaagggcctcttttggtgtaatgaatttctgttaatggtcttgaactttatgttcttgaaggtggctttaacacaagaatttgaagggttgataattaatttaatggggaacagtccgggacacttgttgttggaagaaccaaaaggtttggtttggagaaagggcgcccaaagattgggacttggg

SEQ ID NO: 553380 - DNA, 689 bp, Homo sapiens
cacagggctcatcccagtttagtaagcgccgcatttacataggtaaagcggcaagcactgttgtacacaacggcaaacataattaatgtctatgaaagaactccagctatctgtggtctggaaaccattatgtgctctagcatgaaagactctcagtaatcagcagagtcaacagtcttcgcacagactctgtgctgaacggtagaccatacgcttgagctccgtcagtcaatgaaacacacgttctcgtatagtcatatgtttggacattcacatccatacagatttgatgcgctccatctaggctgtagagagcattcgagaaacatattgcgctccctgagcttgtgtcaccctatcacaatgctacaaaagagctggtgaagtcttcatgtatcagtacacagcttgtgcagatcagtgttcccatcctgttcatcagttctcacgtgtgtcccaagagggtagagcccttgttagtgcaagacaagcagccttagtcgatcacagtctcaagtagcagcgtcgctagcataccgtcagtattcattcaagctagttaacctccttcgtggaaacagcagtagctctctgtagcaggagtaaatcccactgcctgtctaaataacacattattctctggccttatagctcttatacatgtgcttctctttctaaataatggtttg

SEQ ID NO: 553381 - DNA, 156 bp, Homo sapiens
ttattataataatttgtggccacacccatagcatatggaagttcctgaggccagagatcaaatccaaaccatagctgcaaactatgctacagcatgtagcaagagccaaatctattaacccacagatgccaggccagtgggcttatccgaccgaca

SEQ ID NO: 553382 - DNA, 85 bp, Homo sapiens
cccgctccccgtcctcccccctccccgggggagcgccgcgtgggggcggcggagggggagaagggtcggggcggcaggggccggc

SEQ ID NO: 553383 - DNA, 80 bp, Homo sapiens
  misc_feature (33)..(34): n is a, c, g, or t
acatctgtgtacttctgtgcatcagtgacgggnncgcagatacgcagtattttggcccaggcacccggctgacagtgctc

SEQ ID NO: 553384 - DNA, 83 bp, Homo sapiens
tctagaggatcctacatgatgctccacgctccaatcgactgctgtcacttcaccgttccagtttttaaatcctgagtcaagcc

SEQ ID NO: 553385 - DNA, 158 bp, Homo sapiens
atacgaactcgagctttgtacccgtcgatagggccactccatattacatggcaatcgtaacgatggtcgcacagcagatctaggacatgatgcaggcctgataactaatggtcgccgcccattgtatcccccatataaatggctgctcacatcaccta

SEQ ID NO: 553386 - DNA, 763 bp, Homo sapiens
gagccgggacgtattaaagggaccggagcggggagttcccgacgccgcagcgtcgcttcccttccctccctctctggccctccctcctcccaccacatggtccctcccccagcgctctccagtttctgtgccccaggagctacgcgaagtcttcaggatatggagtcctgagcgagcaagtttgcctcaagagccctcggagtaaaaacagtgactttcacatgggcgcaggaggtcctctgagcacgtatggagacgctggacaatgagtccctttcacagccaaaagcgtcgtgacggcaacatgctgtggcagggcctttcaggacccgctggccccggcgccgagcattcacggtgcgcttgggacgaggaccctcgcctgtgtcaagggaaacagcaagcgtgaacctactgggatccactaagcagtcacaaagggacaggcccttttcaaaccgaacttggaaatagacgctagtgggcacactgtcaacaagtctccggaatgtctccgtgacaaggatgcaagagaaggagagctggatgaactgggggataaatgtgatagcaaggtattccagaagtaagaaaggaggaaccgaacaggttcacaagttgagtgcggagtggagaagtctcagaaaatcataccgatggcctgtccgagacagtggctgggacagagtcatgggcaggtcagtggttaaccgagggccatgaaaggagttggcatcaaaggagcatggccatttcgttgagc

SEQ ID NO: 553387 - DNA, 136 bp, Homo sapiens
gtacctctatcttatctgaagctcaacattcataattagtgcccacacaactgctgtgtcttcatttcatagattggatttgggttgggggagtattttctttgagagattaaggatagagagattaaggatagag

SEQ ID NO: 553388 - DNA, 796 bp, Homo sapiens
gaacaccgccagcgccttgacaccagtgatagaaccgtggaaaaagcggaggggccggaagggagcaaaagaggaaaggggagagacggtagcaagcgtgtaccgaagttagaccaaagggagaaaaagggcgaacaagggggacaaaaacgaggacagagaagaaaaaaagaagaggacgatgacacgagaaaagaaaacgagcgaaaagaagacaggaagggaacagagaaacaaaggaaagaaggacagcacgggggaagcaccgaaaaagcacaaagggagaaaagagaggagaaagaggaaagagagtgcaacggaacaaagagtagcgaacaggggaaagacacaagcccagcaagagagcaaaaacgcggaagagcacagggaagagagggccaacagagggaaaaaacaggaagagccaagaccaaccaaaatgaggaaaaggaggagagctccggacaaaagggaaggcagcaaaagagggcagagcaggggaagaggcccgatacccaaaaggacgctcacggaggagagcgaaagaggggaacccatgaagagagaccacgccgaacagaaagaaagaaaagcggcgaaaacgagaaaaacaggggcgaagccctgaagagagaaagcaataaaagcaacagaacacggagccggaggtaagaacgcaagcaaccggcaaacagccaagggagaaaaaaaccccgacgaagacaaagagcaacagcgcgagcggcaccaagaacagctagaagaacaatggcgaaagaatggggcgcgcgggcgc

SEQ ID NO: 553389 - DNA, 956 bp, Homo sapiens
gcccggctcccgcccccgcctgcgccgcgcctccctgctcctctgccgccccgcctgctggtggcactctcagccccgcagccggccccgcctccccggaagggccccgggagaagcagctgccccggctcatcatcagcaactcttctgaaggccaagcacaagccgggcggcaccccaaacctgcagcagaagaagagccaggcccggcctggcccccgcagcactcgctgtcctgcttcccagtaccgcaagctcgcactcactccccagacaggcatcctcactctacgacgctgctgcaccaaccccaacccgctccgacgctgcgcgcccacgctgccccacacacgacctaccgcgcaccagcgaccctgccgcccgcctgccccgcgcccagccccctcctactcaccccggccccggcagcagcctgcccaccaatctgcctacctgccacggcccgcacccccactcaaagcgctactccgccattccggccgaaggccccaaccccccgcgcccgccacccgacccctgcctcgccgcccgccccccaccggacgccccaaccccgcaccgcccacgcccacccccccggcccacccctacccgacccgacccgcccccgcccccccgcccaccgcccgccccccacccccgcccactccgacaccccctgccccgccgcggccaccccttgactgaccgcactcacccgccccgccccccaccaaccgcccccccccccccccccccccccacaacgaccccggcaacccatggcacccaacctggcccaaacgcccagcccaagcgccccccacccccccgcccccgcccaccacgccccaccggcggccccccaacctcacccaggcacggccgggaaacgccccacccccgcccccgccttacccggcgcaagcccacaaggcccccccccaccccccggg

SEQ ID NO: 553390 - DNA, 261 bp, Homo sapiens
cctccggccggcatacttggacttctgggtcaagcaattctcctgctcagcctcctgagtagctgagattacaggtgcccgctaccacacctggctaatttttttgtgtttttagtagagacagggtttcactgtagatggtctcgatctcctgacctcatgatctgtccgcttcggcttcccaaaatgctgggattacaggcgtgagccacttcgccctgcccccccccccttttttttttttttttttggaaaacgggg

SEQ ID NO: 553391 - DNA, 217 bp, Homo sapiens
gtctctcaggtctgacttaacttggtctttcatctagaattatgtgacatgctgtcatgacctccatcctttagcaatttactccttttacagactctgtcctgattcccttgtccctcttcctatttctgtaaatgctcttatcttttcctctactgactcttatacttttgctatacatttcaatacctgcctggttctcctccccgggatacag

SEQ ID NO: 553392 - DNA, 721 bp, Homo sapiens
cgcggcggctcacgcctgtaatcccagcactttgggaggccggggcgggtggatcacttgaggtcaggagtttgaaaccagcctggcccacatggtgaaaccccatctctactaaaaacacaaaacagctgggcattgtggcacacacttgtaatcccagctacttgggaggttgaggcaggagaactgcttgaacccaggaggtggaagctgcagtgagtcgagatcacaccactgcactccagcctgggcaactgagtgagacgccgtctcaaaaaaaaaacaaaataaaacaaaacaaaaagaccaggctgggcaacatagcaaaatcctgtttctaccaaaatttttaaaaaccagccaggagtggtgtctagtcctagctacttgggaggctgagtcagggggatcccttgaacccaggagttcagttacagtgagctgtgatcatgtcactgcactccagcctcggtgagagagcaagactctgtcccaaaaaaaaagaaagaacgagagaacagagagagagcaacgagcagagggagcagaaagtacctcaacactggtaaccatagagaagacccaaaatatagggaatatagtccaaaatgaccattcgctgggtgcggtggcccaagttcgtaatccagcactttaggaggcaagggcagaggactgctggagccaggagttagagaccagctgtgcaacatagaggaga

SEQ ID NO: 553393 - DNA, 497 bp, Homo sapiens
  misc_feature (1)..(1): n is a, c, g, or t
  misc_feature (62)..(62): n is a, c, g, or t
  misc_feature (68)..(68): n is a, c, g, or t
  misc_feature (71)..(71): n is a, c, g, or t
  misc_feature (108)..(108): n is a, c, g, or t
  misc_feature (110)..(110): n is a, c, g, or t
  misc_feature (117)..(117): n is a, c, g, or t
  misc_feature (136)..(136): n is a, c, g, or t
  misc_feature (139)..(139): n is a, c, g, or t
  misc_feature (142)..(142): n is a, c, g, or t
  misc_feature (152)..(152): n is a, c, g, or t
  misc_feature (154)..(154): n is a, c, g, or t
  misc_feature (167)..(167): n is a, c, g, or t
  misc_feature (175)..(175): n is a, c, g, or t
  misc_feature (202)..(202): n is a, c, g, or t
  misc_feature (204)..(204): n is a, c, g, or t
  misc_feature (213)..(213): n is a, c, g, or t
  misc_feature (245)..(245): n is a, c, g, or t
  misc_feature (248)..(248): n is a, c, g, or t
  misc_feature (256)..(256): n is a, c, g, or t
  misc_feature (269)..(270): n is a, c, g, or t
  misc_feature (273)..(273): n is a, c, g, or t
  misc_feature (313)..(313): n is a, c, g, or t
  misc_feature (317)..(317): n is a, c, g, or t
  misc_feature (329)..(329): n is a, c, g, or t
  misc_feature (356)..(356): n is a, c, g, or t
  misc_feature (358)..(358): n is a, c, g, or t
  misc_feature (361)..(361): n is a, c, g, or t
  misc_feature (369)..(369): n is a, c, g, or t
  misc_feature (373)..(373): n is a, c, g, or t
  misc_feature (379)..(379): n is a, c, g, or t
  misc_feature (389)..(389): n is a, c, g, or t
  misc_feature (497)..(497): n is a, c, g, or t
ngtttccgcgggtgggtgttcgggggggggtggggagaggggggggggtggggccatggggntcaaangcnagaatcttactcctaaataacataaacagcaatatgngngactacngtcattcattaacttcggnggngangttcattaancnggccattaaaagngcatttgngcaattccaagggggggggggggtaantntccaaatcncccaatagacaaggaccccagggatgacatanagngtgctcanttccacccagtgnnacngggaacactggttgctctcttcaaacacggggccaagggngggnctcatgtcacangggggggggcagctgggggggggggcncnggncccacaancttngggccngggggggggnggggctcgggctccctcttgctcctctcccaaaacctcttcataaggggggggggagcgggggggctctcttgctttgggcatggccaaatattttatggccttctcn

SEQ ID NO: 553394 - DNA, 1171 bp, Homo sapiens
  misc_feature (580)..(580): n is a, c, g, or t
  misc_feature (589)..(589): n is a, c, g, or t
  misc_feature (603)..(603): n is a, c, g, or t
  misc_feature (618)..(618): n is a, c, g, or t
  misc_feature (621)..(621): n is a, c, g, or t
  misc_feature (685)..(685): n is a, c, g, or t
  misc_feature (821)..(821): n is a, c, g, or t
gctatgtacgagggccgggtgtgtattctgcctgtagccctcgtcatggtggcgcctgtgttggtacttgtgtagcggcggctctgctagtcggctttatcctcttcctgactcgcagccggggccgggcggcatcagccggccaagagccactgcacaatgatggagctggcatggagcaggccggtgtggcccagcctggtgcccctgtgatgcctgacgtgatgcctgagatgctggatggcaggcctctggctgcctggacggtgacctggtgcatgcctgcctacatggccctagctgtctgagcccatgctgggtggcctgggcacgaatgcagatgacgaacgaggaggaatgctgtcatcctagcccaggatggaggaaggttgtcggagaatgccagctggaaactcacctgtctggggaaaattggacgctaagaaactgcggaagctcggaggagaaacaagcgcgaaaggcccagcgtgaggcagatggaggctgaacgtgaggatgcggaaacgactcgagtcccagcgcgaaggctgagtggaagaaggaggaggagcggcttcgnctggaggangagcagaaggaggnggaggagaggaatgnccngcgaggagcaggcccagcgggagcatgaggagtacctgaaactgaaggaggcctttgtggtggnaggaggaaggcgtaggagagaccatgactgaggaacagtcccagagcttcctgacagagttcatcaactacatcaagcagtccaaggttgtgctcttggaagacctggcttcccaggtgggcctacgcactcaggnacaccataaatcgcatccaggacctgctggctgaggggactataacaggtgtgatttgacgaccggggcaagttcatctacataaccgcagaggaacttggcggcgtggcaacttgcatacgacaagcgaggcgaggtgtccatcgcggagcttgcccaagcatgaagtcgctcatcgcctgggcgggagtccctaggcagcccagctaacccagccttcctcttggaccagagttgtgtggctagttgtataatttaatcgtcgagagctgggagtagtgttagcgggagacaataagatgtagactgtaaaaaaaaaaaggggggcaaaaccaagggcggaagacggt

SEQ ID NO: 553395 - DNA, 990 bp, Homo sapiens
  misc_feature (971)..(971): n is a, c, g, or t
gtcgcccggggccatggagcagcggtactgcaagccgagtggtgtcccagtcggggggcctccccggaagtcatccatctgaatgtgggaggcaagagatcagtactctcgccagattctcacctggatcccagattccttcttctccagtcttctgagcgacggcatctcgaaggctggaaaagaatgagaccgggagacaatctttcaatcggcggaggaaccccttaaagttttacgcccccattcttaaatttcctggggcaaccaaaagagttgggatccccagggtggggtccaacggggtccagcctcttccaatagaaacggcccaggtttctatgggacttcacctccttcttggttttccggtcggccgtgagggttacgaagagaggaacgtctggaactcgatctcctttggggcaaacacgggtctcttctctccagtggtataactgtgcgtgccaccaaggtgtgccccaggtttgacacgcgggggagaccgtgcacacaggcctaaggtgggggctccagcaagcgtaatggaagggacggggcaagccccattgtccgtgccggtagaaaatactgatgcccccacaagctttggtccttccgtccgagacacccaaggttccattcgtaacaaaggcaacacaggggcggatccgcgggtttgggaattggccgtcacccaaggccattggcgatgcgtccagagagggttgcacgcaatcaaccagttattagaggggggaaggtctactactcgtggtgcacacaccggccattacctacggattgtgaggcttccctttgcgattaaagaacgaattctttgtcagagaggctatcgcacacagggagatgtgcgccggctatggaactaccccaagcatgatgggcttggtaatccatcgcacaaggctggcactcgcaccagaatgggtgggcctcacacattgtgncgcggaaaattgtgaacca

SEQ ID NO: 553396 - DNA, 595 bp, Homo sapiens
  misc_feature (109)..(109): n is a, c, g, or t
  misc_feature (245)..(245): n is a, c, g, or t
aacaaggcctaatggacccaatgggatttaacggaaattttcggaggcttcgggtaccccgtttggccgtgaaggagtacctgaaactgaaggaggcctttgtggtggnaggaggaaggcgtaggagagaccatgactgaggaacagtcccagagcttcctgacagagttcatcaactacatcaagcagtccaaggttgtgctcttggaagacctggcttcccaggtgggcctacgcactcaggnacaccataaatcgcatccaggacctgctggctgaggggactataacaggtgtgatttgacgaccggggcaagttcatctacataaccgcagaggaacttggcggcgtggcaacttgcatacgacaagcgaggcgaggtgtccatcgcggagcttgcccaagcatgaagtcgctcatcgcctgggcgggagtccctaggcagcccagctaacccagccttcctcttggaccagagttgtgtggctagttgtataatttaatcgtcgagagctgggagtagtgttagcgggagacaataagatgtagactgtaaaaaaaaaaaggggggcaaaaccaagggcggaagacggt

SEQ ID NO: 553397 - DNA, 295 bp, Homo sapiens
ccccccccccccgggggttggttttcctaggatttgggttttttggggccccccctttttttttgccccaccccccccccccccttttaaaggggggggggtggggccacgccccccccctttttggggtttttttttttctttggggggggtccccccaggaaaaagaaaaaatttggggggggggggggggggggggggggcttcccccccccccccaagggggggggtttggggggggggggggaaaaccccccccctttttttttttttttttaaactggtggggggccca

SEQ ID NO: 553398 - DNA, 486 bp, Homo sapiens
  misc_feature (486)..(486): n is a, c, g, or t
gctctcggggtgtaacgtgctccggtgatctattggtcacttacgcggtctgcctattcgacagtcgtgtgtgtcgctgacttccttggcactgcgaattctgtcgacccacattagtaacagatgtccaccgagctgcgcgacacgcgccagtcatgcgttgacacgactactgccgagagttgcgagggttactgaagtgcacggttgatgcgcactctaataactgggggtacctaccatacgcaagaggagcgatagatacgaacgtattacgtgacacgatgcaggaaactgttcacggacagactgaaaccgacacgcatgattcaggcacgttgtggacgcacaggcacgggttcggtccattacaccttctaggaaatgacaaaacaggggccaaaggcaacacggggccttggtcgttggccaacccctttccaggcgcacacacgaaaagagctggggttccagtttttcgccccn

SEQ ID NO: 553399 - DNA, 119 bp, Homo sapiens
gtgtgggcattctcttttcgccgctgtgtacggtcctgacgcctctggacacggtgggggttttgggtcccgcgctcgccttcgtcctcctggtcctcgctgtttcctgtgtgcccttt

SEQ ID NO: 553400 - DNA, 114 bp, Homo sapiens
atagggccgtgatactgtgttttgagccacagaaggttgtgtgtgtgtgtgtgtgtgtgtgtgtgtgtgtgtgtttgtgtcaagaggagttgtgttctttgtaaataaaggtta

SEQ ID NO: 553401 - DNA, 289 bp, Homo sapiens
  misc_feature (97)..(98): n is a, c, g, or t
ggtccaccagattagctttggcctggaagcaatggctctaaaatcaaccattgatttaacttgcaatgatatttttaccaggctgtttcagctttcnntctattttgcggaattggaatttcttagctgtgacacatccaggttacatggcatttctcacatatgatgaagttaaagcacgactacagaaatatagcaccaaacccggaagctatattttccccggttaagttgcactcgattgggacagtgggccattggctatgtgactggggatgggaatgagcgt

SEQ ID NO: 553402 - DNA, 158 bp, Homo sapiens
caggagaatcgcttgggctcaggaggcggaggttgcagtgagctgagattgcacccttgcattccatcctgggcaatgggagtgaatccttgtctcaaaaaaaaaaaattttttttttttttggaaaagaggccagtgttgatgccctgaaagctaag

SEQ ID NO: 553403 - DNA, 252 bp, Homo sapiens
gacgtggcttgtggttaccgctggcttggtccggaaacaggagccgagccataatgttatacccagcagaactggattgcgccgttggggaaggctcctcaggataaccctttgaggaagaagaaactaaagagatgccctagctgcagtgtgaactcttgtgcatggacgacaatagcagttgggggctggtaatgccactgacttgtggaggttgggagaggagactgcaggcgcaggcgtgctggaggc

SEQ ID NO: 553404 - DNA, 821 bp, Homo sapiens
gagaccagcctggccaacatggtgaaacccctgtctctacaaaaatacaaaaattagccaggcgtggtggcagatgcctgtaatcccagctactcaggaggctgaggcaggagaatcgcttgaacctgggagacggaggttgcagtgagccgagatcaagccattgcactccagcctgggcgacaagagtgagactctgtctaaaaaaaaaaaaaaaaaaaaaaaaaaaaaatttttggggggccgggctcaaaaatttttaaaacccttttggggggggggggcccaagatggggtcaccgtgtaaaccggcgctataagcgggccccaaaggaaacccgggcgcccacgacaaggccggggttcccccccaattaaaaaccggcgggggggaacacacgacgcgtcggacccaacacccaaaggggagcttccggagggccacatacggggcgtcaaacacagggggcaccaagcagagctcgaatttcaaattacacccccgacgcagggatacaaagcgagtacacagcacgaaatagcgggacgacaaagagactaaacaagaggcgcataacatgcccgcagcaccccggggaacagcagcggaagcacaaagagacggcaacgaaccaaaccaggggcacgaacagaaaggaagagcagacaaagcgcagaggacagaacggcagaagaggggaacagcagtatgaaatcagaaccacacgggcaccagcgcggacatgcattacgaagagaagccaagacgaagagagcgaagaagaacgcaccaacgaccgacaccgcacgccaaccgagaa

SEQ ID NO: 553405 - DNA, 104 bp, Homo sapiens
gccttgcgttttctttctttctttctttctttctttctttctttctttctctctctctctctctctctgtctctctcccctccctcccttctgtcgtcttctcg

SEQ ID NO: 553406 - DNA, 995 bp, Homo sapiens
gggcgccaagggagtcgctgagccggaagtgttcggcaacgagcaggccagtccggccggtcaacggcatgcgtctcggccgcaaagggacaccgccaggaattggttacccatcggtcaatacgaggggcacgccagggagaagggccaagatcgaagctcttcagagcatggggaaaagcgcggaaaggaacctgagggtggactttcaccctcttgataggagaaaacaggtgggtccagtgcgacacattccgtggcggacagagcacgcttccttccccggatggactgcgagacactcgtggtatgagcgaaagggcaattgtcgacatgcacgcttgatgcgatgatgccccaatgcccgatttgcgtgggacattaccttgtctcggctatctctcgatcagggcctgccacatctggaagaggcccgcctcgaagtaccacgtatccccgctagcttgtgtgtcactgctcttattacactaggccactccatggctaattacacctgtcttgggtgcataggtggatcatgtaccccgtcatgcacagctgcagcccaccttcacacccatgacggatgcgcactggctaggcacattttcaattaaaggacatgctgcagaagaagatgccaaaaaggaccatgggctatccgacgccactacgtgaaccataggatgatcgctatcggatgaggacccgtgcagaagtctttcgaccacctagcggagggtcaagtgagggacatctggaggctgggctctctcgacacgtagctcagccagtcactccttcccctgtggattgatgaaatatacatccctttgaatgagtttgactctgagcctgtagactccttctgactaggcagagagcgcaaccctactcatttccgtgacgatgagggcggcaaaaacagacatttcttccattcatggaacctggatttggatctctacagccgcagctcatattcgcttctacct

SEQ ID NO: 553407 - DNA, 1009 bp, Homo sapiens
  misc_feature (21)..(21): n is a, c, g, or t
  misc_feature (61)..(61): n is a, c, g, or t
  misc_feature (81)..(81): n is a, c, g, or t
  misc_feature (96)..(96): n is a, c, g, or t
  misc_feature (122)..(122): n is a, c, g, or t
  misc_feature (133)..(133): n is a, c, g, or t
  misc_feature (147)..(149): n is a, c, g, or t
  misc_feature (168)..(168): n is a, c, g, or t
  misc_feature (174)..(174): n is a, c, g, or t
  misc_feature (177)..(177): n is a, c, g, or t
  misc_feature (181)..(181): n is a, c, g, or t
  misc_feature (193)..(193): n is a, c, g, or t
  misc_feature (213)..(214): n is a, c, g, or t
  misc_feature (223)..(223): n is a, c, g, or t
  misc_feature (229)..(229): n is a, c, g, or t
  misc_feature (239)..(239): n is a, c, g, or t
  misc_feature (246)..(246): n is a, c, g, or t
  misc_feature (266)..(266): n is a, c, g, or t
  misc_feature (273)..(273): n is a, c, g, or t
  misc_feature (898)..(898): n is a, c, g, or t
  misc_feature (916)..(916): n is a, c, g, or t
  misc_feature (979)..(979): n is a, c, g, or t
aagatcttttaaaaatatttngaattgttcccccttcacactcatttttaaattgtttggntgaggtcctcaatgtctatnatgtcaatgcaaganaaaatacagagagaagttgtgaaatnacacaatagcnattaattggggggnnncaaaatatcatggccttcncgggcngcngcancgcagctttgtnacggggttatgcgggtttcnnccggggggngggggngcgctgggcngcctgcncgttcccgggtgtgtggcgngcggggnggccccctcgggttccgtttccttcgtgcgtggcacatgctttttttctcctcatgggcaattgttggggtgtttcgttgcctgtcttgggcggcctggggagggtgggggagccttggtggggggggggtcgggccggatgggattgggtcagaggggcgggtggctgtcgtctgcttatctgcttggcggtgtgtggcatttgccaccgtggggggctaacgggggcctcccacactacctgccgggccccggggggccagcgatggtgtgataaccagtcaccgatgatgagttgcagttggaccaagtacagatggaggggctggcccatgcagggcctcggggtgaggttcactaggactagctgcagggggacctggctacactctgtggcacaacagggcttcacaaaatggacactacacgtgacgtgggctgaaaggtggagcagagactgggtgggagtgtcagttgcacgttgtggggtaagggggagagggagcagggcaagtgtattatgtactgtgctctaacattctttggaagtctttcaaagattgctgcagttcctttttaaaacaggtctcttattccgtcattcttgaaagacttctccttacancatctcatactgattggncgtgatgaaccgggacagacagcaggccagcgcatgccaattaactgggggaatgcgattccnacgccactcccgcgatgattccctgttagt

SEQ ID NO: 553408 - DNA, 227 bp, Homo sapiens
aggggggggggggggactttttttttggacccccccccgggggtgtttttttccccccccccccccgacccccaatagaggggggcccttttttttttggggggggggggtacccttttttttgagggggggggggcttttccaatttttttttttttaaagccccggggggttttggggttttttaacccccctttaataaaatttttttccccccccgggggaga

SEQ ID NO: 553409 - DNA, 262 bp, Homo sapiens
  misc_feature (23)..(23): n is a, c, g, or t
  misc_feature (48)..(48): n is a, c, g, or t
  misc_feature (76)..(76): n is a, c, g, or t
  misc_feature (90)..(90): n is a, c, g, or t
cacccagtagtccccagctactntgggaggctgtaggtaagaagactngcatgagccccaggagttccagcaacantagtgagacctcantctctactaaaaattttaaaaaatggcatgggcgtggcagtgctcacccgtaatcccagctactcaggaggctgaaatgggagaattgctcgagcctgggaggttgagactgcagtgagccgtgatcatgcgcttgactccggcctgggtggagagcgagaggccgtcttaa

SEQ ID NO: 553410 - DNA, 349 bp, Homo sapiens
gtggcgaatggcattgaggttgatggacgctctctcactcttgctccagacaggaaggtgatccagtgacagcgggggactgtgcggcgcagcgttgacggtctgcatggaatctcctcatgagaaaacttctgagtgcaagcatggcctgtggtgaccatgttgtgcttcagcaaggtgccttccaggtagatgtggtggtcactcagagccttgtagacagcagccagcaccttctcggtcacatactggcagggcttcaagtcatggtccccatcagggaggatctcaggctccacgatgggcacaatgccgttctgctggcagatactgcaattgggccagcggg

SEQ ID NO: 553411 - DNA, 109 bp, Homo sapiens
tacgctgtactgttggtcgctgtactgcatcctgctgcttagcccgactgtcttcttctactatcttctcctgtttggccaccctagtgagtctgacctctcacttttc

SEQ ID NO: 553412 - DNA, 231 bp, Homo sapiens
  misc_feature (39)..(39): n is a, c, g, or t
  misc_feature (86)..(86): n is a, c, g, or t
  misc_feature (95)..(95): n is a, c, g, or t
  misc_feature (217)..(217): n is a, c, g, or t
  misc_feature (223)..(223): n is a, c, g, or t
tgaagtagcgcagggtcggcttcggggcgcgcaaaggtngaggaagacctgcggcggcgggaggagagctgtggccaccgctgcgnccggagacnaccgcccccactcctggagtccagcccggcgctcacctccgccacctcctcagggttctgcgccgcctcgcgaaagacttgcttgctgtgggcgaggtattggtagagcggtggaaggtgtngatgtncgtgcggt

SEQ ID NO: 553413 - DNA, 1435 bp, Homo sapiens
  misc_feature (403)..(403): n is a, c, g, or t
gaggttgcagtgagcagagatcgcgccaccgcgactccagcctgggcgacagagtgagactcgatctcaaaaaaaaaaaaagtaccaaggcagactgcgagcaccagcaattgaactaagaaatccatcgtatgagcattttgagaaagccacagcttgcatgcaggatagcaacgaatagaatgcagggtgggcccgttggctggggtgacaaaggtgttgctgtgtaaccgtgagaaaccaatgaggaaacaacaattatttcaccagggcatagtttgtggcgttcagtggcttcgcgcatcaggagacaacgtggctcagacatggaacagagacagacgtgaactgacacggatacgaggggtcctgactgggcattgaaggcgtcttcaccatccgnagggctaggaagcacctgtgtgcacgaccattgacccgtgtggacagcctatgctcctcttgttaaggcagtcgtgacgtagaactcaggaggactgcggacgttgcgacgggggtggctagcgcagcaacatgggtgcctatgggcacaccattacttgggacgccaggttccagcaggttccctccaactaatcagcgaagcttttcatcgcatgccttggcagcactcaactagactgactaggacaatcccagttaagaccacggtagtccacgcagtgcactctacttttgcaggaagtctctccacgcgcggacgcactttgggcgtaagcgcacacgtggcgatgaacttctcggacgttatacaaacaccagatggctactaaggcgggaaggggttcccactacctttaacacaccgtgaactcctacttggacgcacagtacacccagatatgggtgatagtagatgattatggtgcatgatgccgtttgttgatgatgctgctgatgtggtctgtaccaagcgggtggaagaacatccgaacgagaaattagggggttcttcccgttggagcaatcttcattacacaccattcaccccagggagcacctcccgtcaggtcccccaattacatccccaagagcaacacatctcgcacatgctagactctcacgaagtgatcgaaattgcgctaagtctaacctgcccctagggtgggcttctccaccacgtttttataagcaagggctgttctccctgtctttcagccgcgaggccccatacaccggggagcgcccacacaaggggaggcaccccgaccacacgcccgcagcaagcgggagaaacacaaccacaggcgaaaacacccccacggaccaacgccgagaggcatgagagcagctcaccaagcgtacacgccgcaaccccacggcggccgttacacgccaccaaaggagcgacccccagtggtagagcgccgcaaccaacactcgacggagtccgcaggtgtacgaaaaacacaga

SEQ ID NO: 553414 - DNA, 229 bp, Homo sapiens
cattgatggctgcgactgcttagggtggtggttgctgaaggtggggtgacagtggtaatttcagtgatttttggtttggtttggtttctttaagagacaggatctcattctgtcactcaggttggagtgcagtggtacgatcatagttcactgcagccttgacttcccgggctcaagcaaaccttctgcctcagtctttccagtagctaggaatatcaagaatcggcac

SEQ ID NO: 553415 - DNA, 788 bp, Homo sapiens
  misc_feature (245)..(245): n is a, c, g, or t
  misc_feature (290)..(290): n is a, c, g, or t
  misc_feature (340)..(340): n is a, c, g, or t
  misc_feature (342)..(342): n is a, c, g, or t
  misc_feature (349)..(349): n is a, c, g, or t
gtgggcgcctggcgagtggactgttcgagcccttccgctgggacccgggccctggctccggccccgcgatgggagctgctctccgcgggctgagcctgtcagcatcctcgacgcaccctggtccctgaagtcggagaagagcccctacccacccacaccccttgccccattttgggtcgaccatgggtccagtctacgatccagtctacggcacgggtctgaaaggagcaagacgatgatctggngtcggtgctgaggagcggtcccgggggcggcttccgtccggcccntcctgggacccgcactcgcgctccgggcccgctcgacgtcggccaccgananacaccangtggagatggctcgggagcgctcctaagaacgtcacctcctttatacgaatcagtacggcgcatcgacgcggcagacggagaagtacctcagtcctggctaacgcccaccatgatggctctacgctggccgctctcaggacggcaaggcaccgttctgaggaagtgctcggtacctgcgagacgacacttccagtgaggattgctcacgcatcaagggcttccgcgtgccgttcctttccatcatatggctgggaacccaccatactgcacgtgcattgagctataatatcgagcttacaaacgctgacagactcctcgagataaggacagcgacgaggcacagtatgcggtggtgcacagtgcggataacaaggagtggacccctggaaagccaggaaccgggaatagcaagacacgaaagaaaaaaagggacgatgc

SEQ ID NO: 553416 - DNA, 410 bp, Homo sapiens
acttcattttttaaaatgctaattggaagtagacacttttttttttaggtttctttaatcttatctaaaactcttaagacaaactcttttcctgcattccacctctgctgtgacgctgtctagttgaaagggcatttgctgtaaattatatgaggacatccagctggtgtgttctatcgcatgtaaagtaccatttatattttggaaaaatgtaaagaatggattaatttagattgtgtaaagccataaatatgtattttcccacgttatacttatattgcaatgggttttatttttttgttgttgtttagctttttagtattttgatacatggtataaagtttagactggtatgccgaacaacggataaagtgatatataatttatatattaaagcttacactatatga

SEQ ID NO: 553417 - DNA, 497 bp, Homo sapiens
  misc_feature (82)..(82): n is a, c, g, or t
  misc_feature (171)..(171): n is a, c, g, or t
gcttttgtggagaaaaccaagggcccttgggggccccctgccctttttagaacccatggggagaaaaaaaggaggccgttgngggccttgaaaaatgggttaaggcgagccccctccggagggcagaggttggcccttcttaaagcaaagaccccgcaaaggtgccttggnttcccgatttttttttttaacccgaaaaaggttttaatttataattccctatttataaaggtggcccccaccataagaataatccctggctgggccttaggatttttccccccttgggaaaaaacccttaaaccaggttaaagggagggggcggaggtttttttttttcccttttttaaaaaagggtggttaaaaccttaaccaaggggaccccctgggagccaggtccggatccttgtggagaacccaaagggcctttttaccggaaccaaggtcaagggtgggaaggttttttttttttttaaataaaattcccaaaggttata

SEQ ID NO: 553418 - DNA, 495 bp, Homo sapiens
tggacttagtcctaaaagtaggagacatttgcctctaagctgttgtctcccaccccacctttctgtgagccgccggttccctgttgtccacatcaagctgtgtgctgggcactgggtgcaggaatagctcgaccacagtctctatcctgggggtaaaggggtgaccagcccacatagggatggactgctaacagacagtcccaaagtgccatgagagaagctctcagggcctgggcgtgatggttcatgcctggaatcccagcactttgggaggccgaggtgggtggatcacttgaggtcaagagttgctgaccagcctgtccaataaggtgaaactccatctctactaaaactgaataagtgcattaattaatgatccaaaaattagcctgacatgggggcatgcacctgtaacccagctactttggcagctgatgcaggaggatcaatttgaaccccaaagccgaggctgaaatgagccaaaattactaactg

SEQ ID NO: 553419 - DNA, 109 bp, Homo sapiens
tatggtgtgctcacacgataaatcctaggaagcaagttgatatcatagctcagaacatacctatgtacccaaatggttctttttttccggagtagtaagttacaatatg

SEQ ID NO: 553420 - DNA, 165 bp, Homo sapiens
tgagtaatatgatgaacgtttttgacgacttctagtagctcgctaaccgtcgccttacccccgcactattaacctactgggagaacgtctctgtgctagtaaccacgtactcctgcatcaacactatcactactccatactatagaggacatacaaccatagcta

SEQ ID NO: 553421 - DNA, 840 bp, Homo sapiens
ttttgaatgcagactattttattgtgttagaatagaatttaatagaattatctattaaaattatattttcaacatataagagctttgacaactgataactggatccttccaaataaatgcatttgttaacaaatgtaaagtttagaataaaattgctaatggccctacctgatactgtgaaattttaaactctctaacagcagttgttacaattcttggcctgagtacatctttgtccatggctaagacagttctcactttaaaaaagcagacttgacaggacttgaagttaaccattcaccactcagcattccatcctgaaagccagagctgctcctagtcatagctgatgccttacacattacccacagtggcctggtgggcagaggtttcagttttcccagtttacattaggactcctaatttcctggcatcacattttctttgaaggttttgatgagtcccattgtttgaaatttgctctcttagccagttggaagaagcaagaattgttacttatgcctgggctgaaaagaaacaacaggttgaggtggaggttgaactctggtaactacacctggcttatggacctgttttcgttggcaggaaaatgttttggttcagagctgttaaatgatagtattggcagaaactccgcgatagtgaattagacgttgcactaattagacttgatgatcattgtgtgtgcttcttcctggaggagctgattaccgttccccctggatgccatggcctctcctttccgggtaaaagaggggcggaaattccagctacccgtctgtttgtgggcgttctcaattttgtttttcccaaaaaatt

SEQ ID NO: 553422 - DNA, 441 bp, Homo sapiens
actgacccccaaccagggccaatccacataactggaattttaaaaaccttcaaagcctgggcttgggagccacttttcagttgggaacctgggtctggggcttggatcacaagggtactttcaaaagagggctttccagggctcagctcccaaccagctgttaggaccccacccttttgcctttattgtcgacgtgactcaccaaacgtcggggagagagagcagtcagaccgagctttctgctaacatggggaggtagcaggcactgtttggactctgagcactgtttggactctgggcactgtttggactctgagcactgtttggactctgggcactgtttggactctgagcactgtttggactctgggcactgtttggactctgagcactgtttggactctgggcactgtttggactctgagcactgtttggactctg

SEQ ID NO: 553423 - DNA, 302 bp, Homo sapiens
  misc_feature (99)..(99): n is a, c, g, or t
  misc_feature (101)..(101): n is a, c, g, or t
cggcacgaggcattctgatgttaagagttgggccccatcctctctaaagtccctctgggctcagcaaatccatgactgtggataagaccccagcagccntnacatttctcctccacactccccactcacccagcagcggtgcccacctttcctgattcacgagaagtgaagcctgcactatcttggactctccagcagcttcctgtctggagtcagcttcagggatctgtgtttgtgttgctgtgtttctttttatgtttattgaagtactactgacatatgataaacatcacagagtgtac

SEQ ID NO: 553424 - DNA, 331 bp, Homo sapiens
caatagtggaactgaaaagatctcaaaatctggacttgaaaagaattcctggatctatgaacttttctcctgttatggttcattctgggagcgctgctggtggtcattattatgcatgtataaagtcattcagtgatgagcagaggtacagcttcaatgatcaacatgtcagcaggataacacaagaggacattaagaaaacacatggtggatcttcaggaagcagaggatattattctagtgctttctgaagatccaccatgtgttttcttaatgtcctctgtggcaacagtctgaatgatgacacttgatgtgtgacactgcactgtaa

SEQ ID NO: 553425 - DNA, 300 bp, Homo sapiens
atctggtgcaggatatacataagctggtcggcgtgaagttcacccgcataactccaatagtatatcccgcgactgtttgcacacagtatgacaaggacattgaccaaaacaagcaggatcagatctatggccacatttcgtggccatcttaaagccttgactgtgaaaaccccctcgcgcagggcccggcggatagggaacagcacgactggcacagtgagggtcaccgcgagcagcacggccaggcgcacacagaggatgaacgggtccttctggctgtacatgtgcagcatctccgct

SEQ ID NO: 553426 - DNA, 245 bp, Homo sapiens
  misc_feature (1)..(2): n is a, c, g, or t
  misc_feature (230)..(231): n is a, c, g, or t
  misc_feature (235)..(235): n is a, c, g, or t
nntcggtacacccgctagcggcattaagtgaacggggtgttgcctcgctgccttgctgcctccagcatgacagcccatggtggggtgcaccagggcaaacttctctcttcctaccctcctagaattctcccagcccactgctggcctctcttaaggaggatctagatctgaggctcaagtttgcaggtggggacgttcacttaatgccgctagcgcggggatccttaganngacncagcagcaac

SEQ ID NO: 553427 - DNA, 719 bp, Homo sapiens
caatagtggaactgaaaagatctcaaaatctggacttgaaaagaattcctggatctatgaacttttctcctgttatggttcattctgggagcgctgctggtggtcattattatgcatgtataaagtcattcagtgatgagcagaggtacagcttcaatgatcaacatgtcagcaggataacacaagaggacattaagaaaacacatggtggatcttcaggaagcagaggatattattctagtgctttctgaagatccacaaatgcatatatgctgatctatagactgaaggatccagccagaaatgcaaaatttctagaagtggatgaatacccagaacatattaaaaacttggtgcagaaacgagagacgagttggaagaacaagaaaacgagacaacgagaaattgagcgcaatacatgcaagataaaattattctgtttgcatcctacaaaacaagtaatgatggaaaataaattggaggttcataaggataagacattaaaggaagcagtagaaatggctttataagatgatggattaagaagaggtaataaaccctggaatagatgtcagcactagataaaatatgatagcagttcatgataatctagaaaaggtaatatgaaaggacgaagaagatacaacaaatgggagctacatactaagtggcgtaacaatcaaacatatacgtcagaaaagctagaaggaaacagaaaa

SEQ ID NO: 553428 - DNA, 435 bp, Homo sapiens
  misc_feature (382)..(382): n is a, c, g, or t
ccctcgaagcctgaggaggcccaaagtctcaaaaggcatacattaggctactctttacaggactctgtgcttccctagaagactgcgtgaaacaatgtccagaaaaggtaaactctagtcttcatggctaatttcctccacctacctaatttgcacgatcgaaacaaagcttcttctaaaaccgctactcagaaggtcttatgtgggtcttgattcgaccatagccttttaaaataacagttgaaatgtcaaagaaatcccaagttcaccgcaggtgttcctggactgggctgttaagtcgtgacagtcaacatgagagggccaaggaaggcgggaacctagggctcaggcggaggggccaggtcagattcagaagagctgngcgctcttttttgtatgagcctgggtcttgctctcttgccgggctggagcaca

SEQ ID NO: 553429 - DNA, 683 bp, Homo sapiens
gccgggcgcggtggcgcgtgccagtaatcccagctactcgggaggctgaggcaggagaaacacttgaacccaggaggtggaggttgcagtgagcctagatcgcgccattgcacttcgatctgggtgacagatggagactacatatataaaaaaaaaaaagggaagaaccagaaaaggaattgttgcttttaaaggggtttaatatagcgctgtgtcattatgcttaagctataactggttaataaaatggggtgtctctatgccatattcagtaaacacaactttggtgagccactacgttcgaataagtaagtctatcagataccttcagttaaaaaaattttgtgccctgcaaaggtcaggagtttgagaccagcctgaccaacttggtgaaccccattctctactaaaattacaaaattagccaggcttgggggcaggctcctataatccccagctactcaggaggctgaggaaggagaatctgctcgaacccaggaggcggagttgctgtgagtgaagattgccccattgcactccagcctgggccaacagagtgaagattccatctcaagaaaaccaatacaaccaccaaaacacaaaaaaccagcacggcaggaaggggggtcccacttttaatcagcctttggggggcaagaacacgatgatttgcccggagctca

SEQ ID NO: 553430 - DNA, 543 bp, Homo sapiens
  misc_feature (210)..(210): n is a, c, g, or t
atcaagcctattatattgtggagcccaatccatgagccgttacagaggacctgtaagacatgataatgacctccgtactagacaagggaggcgtattcgaaggactgcaccatgcttcacttatattcgcatgccactgacttcactcacctgctgtacactatggccttctatacgggagtactctgtcaatgagctcttaagtgtttntcttctgaggaagtttacgagccttgtaccacttccggctagactctaccctctacctaggagggcacttggctctgactatgcattacactgatcaacctctatgagtaccactactagaacgcatacgttgtactctcattacgtagggcacattcctgagctcaccatagactaattgattacctctctaacccaataatttaagcactgcttcttggaaggggtactgggcccatattgtaccctactacagaggctgaacttctggtcttcccttaacaatttcgacggcgtgtacagcttgacattttctcgagtcacggcttgcgg

SEQ ID NO: 553431 - DNA, 118 bp, Homo sapiens
atcctcagtatgttcccaaatctgtgctgggcattggcaaggacaaaacatatactagtggggtttttctactaattattttttggaggcattattttccccacacacaagagctttt

SEQ ID NO: 553432 - DNA, 197 bp, Homo sapiens
ggacctaagctactccacaaacagaaactagggcataatcctggttcgtgacctgagagacatgggtggggtctcataaagaggacgtaagctatgaaataatgtgagagtctctgtacacctctgtagacaaacatacatcatttacattgtttagcacttaccgtttctttttcataagtggacacgttttttgc

SEQ ID NO: 553433 - DNA, 236 bp, Homo sapiens
aaagttcgaaccgctgaaactgtacactgaaacattttaacttgcattaatgctttacgtctccgcatatatattaaaaattcacacacaaatcaaaatggaaccactgccactacctcatttctgtcccctatttttccactcgcaatcatatactacgtaccttttgaccccatggaacaaaaatatctaacgttcagaactaccaataacaggaagaagagaaatttcttttt

SEQ ID NO: 553434 - DNA, 406 bp, Homo sapiens
gatatctctgaggatcccggcacgagcgcccaagtgatctacccgcctcagtctcaagtagttttattttttttgagacagggttttgctctctgtgcccagagctgcagtgcagtgtgctatctcatctcgctgtaacctctgcctcctgcgttcaagttattctcatccctcggcctcctcagtagcttggattacgggtgcatcaccaccacactctgtgtattttttgtatttttagttgggacggggtttcgccgtgttgaccaggctggtgttgaactcctgacctcaggttatccgtcctcctctgcctcccacagtgctgagaacaggcgagagccacagcaccttgccagacatagggtttcataagagcaccattgtgagacactggtcagggaag

SEQ ID NO: 553435 - DNA, 466 bp, Homo sapiens
tgcggattgttctgtccagatattatgtaccggccagtgagacactgagcacgtggtccttctgccataggcagcccagctgctggtccagaaccgtgtagcccatgggacatgtgctgagtacggagttcatgctgacgtcccaaatcttggcagttttgtgcccataatcagagagcacatgggtgctgtcgggactccaactaattgtgtaaatcccaccgtcgtgggccttgcttccgcccagcgcgcacaccttctccccagtcttcccgtcatagatgtttctggggccgtcagcactggctgtggcaaatctgttcccatcaggagagaatcgcacacagttgacaaagcggctgtggtcgccaactgtgaacttgaacttgaatgggggtccctcaaagaatgccgcgcagttatcatcgcttcccgtggccagccggtatggccggctctgcttgat

SEQ ID NO: 553436 - DNA, 768 bp, Homo sapiens
gcctctcaagctgggggtcgttcggtgcggttacacgcggctacaaatgcgtatcggaaaagtgttatttctgttcgtgggccatctatcctggacgcggatgatgtacgtccgcaaggtagtagatagggtgtgcagattttgaataatataattatgtctaatatgaaagtttatgaatatgaagcgcttaaggtcctcggaaagttaggtggaccaaggggattccggaaagcagtgtggtaaagagcgttacagtggataattcatttgaatttgaaaaatgttagaaatgatactatcaaataccagcgagagctatggaataaaactattgatgcgatgaatgatgagtcgaatgaaatcaaaagaagcgcgaagctaagattgtatacctgacatcagattgaacgaattacatgaagagagctagagaaagtgtcaggatatcagagaagtcaagcaaatactatcatcttatcggagtgctctcttagcggcaagggaaagagttggaagaagaaaatggtacaggagttacgtagaggatgtgtactagtggaagagtgtccttaaagaatctctgtaggcatttctcgatgtagcatgtgaggactggccttgtggtattggaaactgctaaagtcattgtactttgtacattaagggcattgaacatgaaaaggcgttaaaagaaatacttcctgggttgcatctaagtaatgtcggaactacgggtgtaaatgctccaaggggaattcacgtaaa

SEQ ID NO: 553437 - DNA, 141 bp, Homo sapiens
tgacctctctcacactgatacagatgtgagcattacgccctggcacagttacttttgcaccaacctaatatatacatattttttatttctacatttctatgctttctagattttcaatgtagaatgtataatctagtgtgg

SEQ ID NO: 553438 - DNA, 216 bp, Homo sapiens
gtcagtgatctaccggatcttatcgtgacgtcgcgtgcatttggctgactcctatcgctccaagcccagcgctcagccatggcatgcccctcggatcaggtcatgtggctcctcagtgacatacttccacaagtactccggcgaggagggtgacaagcacagccttgagcaagaaggagctgaaggagctgatccagacaggagctcaccgattgg

SEQ ID NO: 553439 - DNA, 143 bp, Homo sapiens
ctcacagactgctgctgtcgagagcagaagctgctgagcagtaccagcagtgtgctgtgatgcacgtgctgtaactgacgacgtgctgtctgcagtgcctgctgtgctggagcctgccctgccaagtacaagcagcttgagtc

SEQ ID NO: 553440 - DNA, 212 bp, Homo sapiens
gctcgaccagattgtttcatatcatttatacttgcggtaagagtaaactagataactgggcgttgtggtgcacacctgtagtcccagccactctgaggcaggaggactgcttgtgcccagaagttcgaggctgcagtgtagctgtgattgtgctactgcactccagcctgggcaacagataaaggaaactccatctctttaaaaaaaaaaaa

SEQ ID NO: 553441 - DNA, 1023 bp, Homo sapiens
cggccagcgcgccaaactttggttgttcccaggcctcgccgttgctgttcccctcttattcattgagagagaggcgttagtccgcgcgcgggtgcaagtgagtccacctgccccctttcagtgaatccaatgtgtgtccctgtactctggcgtttcccctgaggtcccccgttataggcgcccccctgttgtcctcaaaacaaagcttcccacccaccacaatacctttatcctttatttattctaaagacacttgttcaagagacgccttctcacaggaagattatgggaaaccccctttttttagaaatatatatccttggtaccccgccacttacatttcctcagtctcccttgcatttccgccctttcccatttcccctatccgcacttccttgtaacacttaccacgactcgagggttctcacccgagttccctcgccccttttgcccacttccacagtcccaatttgcgccccccccccacttgggttttcttgtaacctctttttcgaggtacccccccgagctttccggccgggagctatatcttttccaaacctctcctacaaatacagttctcccccccgcttaatattctcctatgagacaccaaggcggagcacatttcggacactctccttgtaccggttgagccacaatctcgcaagtaagtactctcccggattgtaaacccccacattctgttatataataaatatacacatctcaccagaacagtctttgccacatccatggagacgtgtctccccacacatattagagcctttaaaacaccagaatagccaattctcccggacagtcttataacccaacccactttctacccgctacaacagacccgggggtatactaccggtccaatgctcttgagaatcttgtggagccaaacaccccagtttctatgccccatctgtctctagaattaattctgccttaaaatttttgtaaatagggcccgtatttaccctatagcaccccctttaccccctttagagccca

SEQ ID NO: 553442 - DNA, 833 bp, Homo sapiens
  misc_feature (37)..(37): n is a, c, g, or t
  misc_feature (257)..(257): n is a, c, g, or t
  misc_feature (311)..(311): n is a, c, g, or t
  misc_feature (453)..(453): n is a, c, g, or t
  misc_feature (598)..(598): n is a, c, g, or t
  misc_feature (604)..(604): n is a, c, g, or t
  misc_feature (714)..(715): n is a, c, g, or t
  misc_feature (731)..(731): n is a, c, g, or t
  misc_feature (833)..(833): n is a, c, g, or t
aaggtgaagatagtgaagttagggagatagtaaatantttgagcgactgcgtctcaggcgatcttgggaagccagagcagcacacccggtcatgtcggtcacaagagtggtggtacacaaagaaacatatttggctgaggaaggggaagattaaccaacaaagccattttccaaacaacactacactttcttaaccccctcagatttttcgcctcgtttccccctcccttgccccaacacaaacaccaaccgtattnacgcttcagactgcgaacgctgagcagacccccttcatacctactctgccccgnatcaacatttaattattatatatgcggaatatagagtacatccatgccaccacaccccctcccctacaccatatttgtcacctctgtccgcgcctttccctcgcccgctccctccctccccctctctctccacacccccacncctctcctttttacaccacccgtcttaccaacacctcctctcttctagccctctcccgctacccctgttctcactctcccctttccctaccactctttcatcacctcccccacatcctcccccacccccccctcagtcccatagncacctntttacaacattcttctcccgctccctcttcccagcaccacccccctcccacctgcctctccccccacccgccctgtttatctttcaatcgtttgcctgttgaaattgtgnngagaacatagattganataaatccatcccactcctctccctcacttcgtaccttacttccctttttctcttctcccctgtccccacaccattctccaatttcatatgataagccccan

SEQ ID NO: 553443 - DNA, 934 bp, Homo sapiens
  misc_feature (342)..(342): n is a, c, g, or t
gctttttttcagataatctcttctattttcaatatcagaatctcaatagtatagacgcacagagaactttttcgtccttatctactgtgaggcctactctttaatgttcgcaccattacgtcgtttcacccccacccggcccctttacccctttgtggggttcgcaaataatttttgttcccgggattattttatatttcctgccctatattttccttttcgctgtaataacttgagctcacaaaaacgctttatcacgtgcctcaacactacaagggaacctctgtgaccaaatggcccccgcctaaaattgtgctgtgagaattttaatatgcacatagnccccgggaagcgtggattacgaacaattttcgcctcgggagacttcttcccacgaaacgttgccctcattcttgcggggaaattggcacccctagcggaacagaaatttactcgtttaacagctccccaggagaaactttgaccgagctgtttcgctgcctgatgccgcaaagagaatattgatcactgcggactggcaaccaactgtgaaacaagttcgttttttgccccacaaaatgttaataaagagaaagtttacccaccaagtgtggagtagtggatcacaccagcgtagaaccacacacactgtgggagggcaccacaggggcacgacacacacacatcacaagagttccgaggcccccccgagcaccaatatggagtaaaatttccccggtctgacattgaaaaagaacaccaaagtcagcccaccacgatgatgagtggcgcacccacggaaactccaccgtaacctatggagggggacaggccacgaggcaaatctactcaaaatttgggggcggccacaggctgcccgctggcgggaaatggcccaggcccaccaactggggacaaaaccaaaaacaccaca

SEQ ID NO: 553444 - DNA, 208 bp, Homo sapiens
cagggtcactttcagcacttgctgtcatcaaaccactcaccaagttacccacaccaggcctgatgtgacatcgtgacacctggcttaccggtaatacgcgcaaagttgtgccttaagccgattttgttcgtgacgtgtccaattgttttggccttttgaacgggatggatgttacaagtcgtatgagagatcatattggaaccggaat

SEQ ID NO: 553445 - DNA, 326 bp, Homo sapiens
tctctacacggtcccctcctggagtctcgtggctgcgcgccccaggtcacttgttaacttcttctctttctctacgctctctccttcagctagtgaggcctcctctgtttctgaatgactctatggtggcctgctgttgcggcgcttctcccattccttcttgtaccccacatgccgcggtctgagcctcctctaaactcggcccgtgagcttctgcccgctgctgtctgctcatcctccaggatggcttctgtccactccagctgcgtcttcagctaaacggggtcctgctcgtgtgggggcgcctctagtgaggaagctgcggc

SEQ ID NO: 553446 - DNA, 510 bp, Homo sapiens
gtcactgaggctggacatgctcatggggtgatctatatctccctgcaagccatccagcaatcccaggcacgaagtattcctcccacctcagcctccgtgaagctacgctgggactcagaagatgtgtagctgcctatgcctggcgtatttatccagctcttttatatacagacaaggtcttgctgatcgtggcccagggtaatcgtgagagctcctggcctctagccttcacccacctctgcgctcgctgaacgtgcttgggattccagggcatgagcccatcatggtatgcaccctgccattactcctctgtgctcactagccacgtcgcatgctccacctgtagctactcagccatgtgtcaggttgcgttctctgactcgattctgcacgtctgacctgacttggcatggtagcctgagtggtttctcccctgaagtcatctctcaggcgctgtgatggcgaccgagccgcgcatggtgataggttcctgtgacacctcatgggtgt

SEQ ID NO: 553447 - DNA, 826 bp, Homo sapiens
gagcgggcttagctcatcatggcaagcgatgtggcttacctgtgttgtggcgttggcggctcttggcatggggctatcctctgcggtttgggactcctcagaacgaatgaacagtcgggagctatgggatggactggctgtggagccgattgagccgcgagccctgtcatggttccatagtcgcagcacctgaacgatgaaggcccatgatatctctatgctccctacaggtagcttatgctgttggcctcgccctaaggctgctggagttgtaccgtgcatttgccttcttctgcaggaatagtcacttactgatcaagggacgagactcggttaataaagaacgtattcgcacgtagctgtgtactggtatgagtcggacttccacttcttcgcaggtgtatactgaattattgaccagagcagatttgtcagtagtcttcatgactgattgatgatctattcagaggcatcaggggaccatcaatcagtgacacgacacaagggtgatgtcacgtcagtcagtagtatactagataagtcctgcgcgaattggcggtgaagtacgagggcttcgcaacgttgggagctagctatcgtagttatacctaagggcacggaccccacatttcataactggaggatctgggacggtgctaaaacggctcgcggatctccgtgccttcgatatggagacacgtccagacgttcccaaggttcaaggcagaattgctccttgcctcaagctctccatgaagtatagtcgtggactaaccagggcgcccgaacaaccaataccccgagggacatcgccgaggatcagcca

SEQ ID NO: 553448 - DNA, 264 bp, Homo sapiens
tgagtgactatcatatgtgatgtggccatagaacagggatccatagagtccaggaacctgaaactggggggaacttgtgatcctgaagaataagaaaagaggactagcatggtgtgtctcgaaacgaggatggctcagatgtgggatcgtaatgattatcaaatgtccatttctatggtaatgattccagtggacccatcagacaaaagcacacaaagacctcctcttccacaggggagactgaggggggagagtgtctcttgg

SEQ ID NO: 553449 - DNA, 135 bp, Homo sapiens
  misc_feature (16)..(17): n is a, c, g, or t
  misc_feature (38)..(38): n is a, c, g, or t
caatagtgatgcaganncgactcaccctgacaaccganttctgcgcctgagatcgaagcattgtgcttgatcacgccaccaattgccgctgacgtcagcaagaagtctcgaatgccctttgcatcggcatcgtcg

SEQ ID NO: 553450 - DNA, 941 bp, Homo sapiens
gtgcgagtcccggcgcgcgttctgctccgcgcgggtgcgaaaccctggggtgggcaggagtcgtggccggtggccggggccaggaccggtgaactaactgtggctcccccacgctgccttcgcagtgggccctgtgctccctggtgctgctggccctcgtggctggactgtgagctggtgctgtgcctggcgtgctgtgagactgtgcgcgctggcagctttcgtgtgagccaagctggtgtgcatggtgtggagcctggactgctggtgcgccaggggtcggctgtgaatgagagattcaaggaaccgccccagatgaacaggccttgagcctgggagtttcgtgacgggagcttggtcagtcaggccttggaagaaggctggatgaattgacaaggagccttccgcgggtgtcaatttcttgacgcgtctgggaacctgcgcccggagttgtcattcatcagggcctggcccttgagacccgtgaactgtgagcgagtagtgtcggggacggggaagccccgtgatccaccttatcggccttgagggtaaccttgggaaaggggcccggttcccacggtcgaacggccttggttgtgctttgcctgcggtttgggtacccgagggatcgccagagcctttggggttgccttgggttccttccccggcgcaagttcagaagcggcgtagtgcccttgccccccgcggcgttgggagggggcttggccattggggttggggaccccgttgaaccgcctgtggttgaacggttaccccgtgggcgaaattcccgttggcgcggcgggaccagaacccccgcgagggggttagccttgggcaggttctcgagaacgttcaacggtggaggaaacccccagaggctttgggtggcaattccaatctggcgtcccccgttatgccttggggtttgaagactggag

SEQ ID NO: 553451 - DNA, 140 bp, Homo sapiens
aagtgtgggaggcaggacactgtatggtctttatgagaaaagatacttcccatatactttatgggtaatttaaggggtttatcaacggtaaatggtgactatctgtctaaattcatgtctaagcttagagcaataaaccc

SEQ ID NO: 553452 - DNA, 192 bp, Homo sapiens
gttgataaccagcttatcttatcagtagttttattgctgatcaggcaaaaatagttttccaaagttattttcaataaagtatatacaacgtctcatatatcgctagtcatgataaagtaattgaggcagtttttaaacctgagtgtgagtttgttcatcacaggtctgatatgtgtctaagggtgttcgcac

SEQ ID NO: 553453 - DNA, 923 bp, Homo sapiens
ggcaggagtcgtctgagaaggggcactcctccatgggacttggtgcccatcggtcgccagatggggagactgaagccgtggatgtgtgtctctctgagagtttggagcggggctggtgcccgaattcgaccgcagcaggattctctactacatttctagagccccggaggtggcagagctggcagaccctgggcaagtgaaccctagggcatgcaggagcaccagggcgccgacgccggcgcagacggggacggaagggcccgacccgcagcccagctgtgcacagagtgccatagccaaggacttaaggctcatccaaacggggactcatatacgcgccgccaccgggaaggcccggcggcgccaagccgtctacaccggatgcccgacggagattgcctggagtgccgccgagcaggtgtcatcgtgccgcgggggcgccctgggggatgccaggagccggacggaagcgggagggagagcaaggacgaatggcagcggtgcataaggggccggaccgtccgttggatgaacggccaccgttggcgccagtgcgacatagaaccgtaagtggccgagtgtactgggacaacaggcggccactcgaatcgtagggcaaggcttgtcgcgggcaacgccagcccggtacgggagcggagagtggacaagtaaacgcatatgcaccgcccctggcgacacagcacgggatagggcccaagcagcgcctggggcagatgaccctggcacggggggtggcgccactgagcggccgtggccgatgggcacaggacaggtgcaataggcaggcgcagccagggcagtgggcaccaccgaggagggcaccgtctggtgacggacatccgtggcaccgaaagacgcgaaggacggccgcccatcacccgcaagccacaaagggggagggc

SEQ ID NO: 553454 - DNA, 960 bp, Homo sapiens
ggcgctcggaaacaaacttctgttagtctgatcaccgtcagggtacgtgctaccaccgctgggtctgcctccgcatgtgtgatggcaggagagaggtccggtcctgggacagctggatggagacgttggtgcgtgacggtgaaataactttaccgataaggaatagcgtaatatgtggcgaattaatcttcttgccaagcggtttcatgtccaagtgctgcttgttaacaagtagccagatggttttcctaatctccgcaaggatcttgctcatattaggttacacagcagtggtgggtcaatccccaataagcctttatctgactcgccaggcgtaacagcgagggttcggggatggagtctcgatgttgtacttggctgtgagcatccgcagtagtagtattgctctccagactcaggagttggcctgattgatataacgtattggggatcccctatgtgctaccctcaagattcacgtaggtttcccaatgtttcctggaaacgaataggcgtcgagaatgagtcagcctcaaaggggatatgctttcgtaggatagaaaatagccctggtcctcacaactactttgccttgatgtctgggcaagacattcttttatcaacgttgaaaaggaccatggagttggttgcatgggcaccaagtatgtccgaattgcacattctcctggggtaaatgattgcggctgttgtggccttggactgtgcacgcgtggccagaacactgatcttgggaaggtgtcccgagtagcagtggtgcattgacacccatgttccggactgggggggcaaacagatttgggttccccgtttccaaaagtcgctaatgggaaccaaggcatctgaactgtcactaacacttcagatgtttgccgttggcgtgacaactgaatgtggggagggcttaaaaatactcggggcaagaaatgttcccaccacggg

SEQ ID NO: 553455 - DNA, 698 bp, Homo sapiens
tcgagtgttgtctgtgcaggagatggagtttgagtgtcagagaatgtagattagctgttaccttttgtagaatcttagttactaataaagcactactgtaatcttagcacgagtttaactccaccctcatttacacctctcctttgattcctttccgagccatgaaaatagtgcatagtttgcctggtagaatcgactcacgttcataaacgacgaatgttagatgagcaggccgtgtatgaacgccgctctgtatccatccacgcgtgcatagctgccaagcagggagctcacagaaggggacgggagcaccgaggccagctgacgctgcacccatgagtcccgcgagactgggatcccccatcgccatcagtgattttggaagagaaaaatgaaagttctgttcgttgatccagttgcgatctggggagccccatctcgatatttccattcctggctacttttctgagagaaaatcaagtcctttttttctgggccttgctaatgggcatacggaagagagggcttctttagcgtggtcccctgctggtgggggtgggtccccaggggccccctgcggctgggctcccctgtgcacggcaggttcctgctgatgaacctgctgtttgtattgttgtaggaaaccaggctgtatgctgaactagaacggatgctttgttcgaactgcatgttacaca

SEQ ID NO: 553456 - DNA, 382 bp, Homo sapiens
tctcagtagctctatagtatccccatttggattgcgacgacctcgccaggtacgcaaggctccacgaggaagtgacttcatcactccggatgcatcgttgtgtccggcttgtactccagtgcagtacaatactgtctactcctactccaagtcctgcagagatggatcggaaagagatgcgccacttgttaacaaagtggtgacactattgtccccctcagcgaaacttgcatctggaggcaaaccctgacactggagtgctcacagtctcctgggagaggagcaccaccccagacattactggttatagaattaccacaacccctacaaacggccagcagggaaattctttggaagaagtggtccatgctgatcagagctc

SEQ ID NO: 553457 - DNA, 940 bp, Homo sapiens
cggcgttgagctttcccatcgctccggcgtcggtccttggggcgaccacgtgtggtggccttttgaaaaccgggcttctccgccgcccgaggggtgctgtggtctgtcacaagaccccttttctccgagggcacccctctcttggggtcccccctcgcgcgtccggggattttcgcgcatttattccgcaaggtgctgacctgggagctccccccccccctgtgggttgctcggggacctgccgcttatcccttatgcggacgccggggatacatcctcgacggtttctccccgaggctgggagcgtggatggcgcgtgggcataccttctcagggtcggccccccccttgtcactctccctggcgcgctcgccctaacctcgggaggtacaactttttcctcgctgtttagccacggccggccgcccaggtttgggttcctgggcgcccccgccctttggagtctatttccccctcggtctattctcctgcagccagcgcgtttaggcccaaaccgtctttcaaacgggggagctctttcttccaggttacgctgcgcaagagaagccctcgtaattgccgctcgccccagtaccccctgcgggctctctcttcggaataattactcccggttgtttcacataccactctcagagatcacagaaaacatcctcggtaacactacaccacagctggtcgaccccccaagctcttttcaacccagtgttatacactgggaggctccacccccaccccacaagagatacctttccctctcgtttttccactcatcccccccccctccccatatagaccaatcccctccctccccgacccaacgaaaggattctcctcataaccaagaatccaccgcaccttaccccgattgccacctagtcagccgaccaaaataaaccttttggggacccctacaaaaaca

SEQ ID NO: 553458 - DNA, 210 bp, Homo sapiens
gatatattagatatggaattcagtctatctgcaagagagagcgtattcagactatccctctatcctatttgaataccctttatttctctctcttaccttactgccctggccaggacttccagtactatgttgaataggagtggtgggagacagcattcttgtcttgtgtcagttttcaaagggaatgtttccagcttttggttatttcag

SEQ ID NO: 553459 - DNA, 170 bp, Homo sapiens
ttgatgtgcactcgcctctggtacaccgcctgcctccatgtggttcgtgtgtgtgacactcagtgtgactaaacgtcgtactgccacttctgcagcccgatgactccacgcagaacgcgcctaatgggtccctgagtctcgaatttcctaatcttggtcattcgctcttt

SEQ ID NO: 553460 - DNA, 172 bp, Homo sapiens
gacgctgcgcttatgggccgtggtgccggtgggcaacgtgtgcggcaccttgctggtggcgtacgtgatgctgcacttgccgatctttgacaccaagaccgacctggccttcctggaaatcgggcgcaaggtcatggaaaacgacgcctaccagatgttcgccaagggcatc

SEQ ID NO: 553461 - DNA, 195 bp, Homo sapiens
ggaaggaagtctcacggcttctttcttgctagtagaaatgatacacctacgagaggaggacaggaagtctcacggcttctttctttgctagtagaaatgatacacctacgagaggaggacaggaagtctcacggcttctttctttgctagtagaaatgaaatctacgctagatacgcgtcatccacgcgagatga

SEQ ID NO: 553462 - DNA, 540 bp, Homo sapiens
agtcacttattatccgtaatccgtgacgacgttgtcacttggggcattgacttcttgaatcatggccattgccagtggccacgtgtatccccgtcttagataaccccagtaaagaagttgaataaaatcgagccattaatatgtgacttgacagcgttagttacgagactgcttaaagactccttttcgtctaacacatagtaattacttcagtgtccaaaatgaatgtttaaagtaagtacacgtaatccttccaaggctttaaatactcatagcatgtttagtacctgagttagagctgtaaaagcaattcacagtacatttgcccaagagccatgtgttcaaaaatcaccagaggttattccgggggcaaaagaaaacaaacaaaaaaccacacatacacacacacaaaacacccagtacaattttttctttccttttctactttgatgcttaactgagacatgaaaatgttctgagaacagtctgaacccattctggcttcaaatatttacagtgagtctcacttcgtttatagct

SEQ ID NO: 553463 - DNA, 828 bp, Homo sapiens
  misc_feature (286)..(286): n is a, c, g, or t
gatgtcactctgtaccagaatgcaggacctaatatgccccaggtgccaagactataacttaacatcatcaactctgcctcaagcccggatggcagccgaacaagccactctcagccacgagcaatcgatacttctcgagaaggcgtctgcatataaggaccctggtgttcctacttgcgtggcaagataccctgcataaatgccaactgacaatcgttcatgcagattcattcactcatcttacagatcgtgttgtatcactcagctataataggaatctctccanggtcaagcaaggttcaacatattcaaggaaggtagaacgtctcctcagatttacactgacttttcacgaggttcgttcccaccgcaccggcccgtgcagtaggaatgaaattacgttacagacgatttaagttcctttcataagtatgaaagaattgatacaagggcgtatgtgtctcgtaaacctggtctgcagaaagtcgaacttacaaaaactgttgtgacagaatgttatgtacatatattgatatgtaactgcattagtggccatttggaatcacagtggtgatcgtgtgaatatatttaacactgtgtgaaattaatttacgttgctatctcattgggaatcataaagaacaaccatgtttcttcctgttcgtgtacactttaaggtacttatactatccttttaaacttcaagaaaacaaagttgtcacgcgtatttcacctgaagggcgccttaagcttgcccgagtggttccaagtttccccgttcacactcgaaccttttactaattgttgagctacacgagatctctacct

SEQ ID NO: 553464 - DNA, 278 bp, Homo sapiens
ggactgcgtaggacggggaaaacaagactgacatgttccagactgttgacctctttgaaggcagagacatggcagcagagcagaggaccctgatggctttgggcagcttgacagtgaccaagaatgacgggcactaccgaggagatcccaactgggatatgaagaaagcgcatgagcatacgagagaattcacagagagccagctgcaggaggtgaaagcatgtcattggccttcagatggtcagcaactgaggcacttccaggccggcatgacaggc

SEQ ID NO: 553465 - DNA, 722 bp, Homo sapiens
gatttgagtgtctttccccccctcaccctcaccatctgaggggctccctgagatcttggtagaggaggcccctcctgcccagaccttcgttgtttccccggtggccctgtgctgtcttgctgttggcagactgcctgcagccatgattttgtcatctgacatcatgtgagccaaagactgagccgttgatggcaggaataataagcaatactacacaacttgcgtactttcagaaaacttttttttagcttcaccgatgacaacagaggaagaagggaactgggattgggtaagttctcctccactgtttgaccaaattctcagtgataaactatgtgtgcagatccctagaaggagaaaacgctgactttcttgttaacgtgtggcacataaggatctgcagaatgtgccgtagaccagggaaagggatcttgtgtagttcttctcgtccatactccaagtgtcatatgaatctaattgtattgttgttatactggtgaccacgaatattatgcaagtggcaccatgtggtggtgttctatttccattcaacaggaacgttctaatttagcagagaagggcaagctaggagaaaggcccacgggaacccttgaaccacgaccaaataggacaccgagtcccgattacacccccggggcatcagcttgttcctggcaaatcaatacgggccccccggacccgggtcattcgagctgaccttc

SEQ ID NO: 553466 - DNA, 139 bp, Homo sapiens
tgaggatcccacggggatatgtgcacaggctctggagcaattaaagccactgctttcgttactcaaagtggctggcagagagggatatcttattgccatcttccacgaagagcacagcagagttctgcaagcaactcca

SEQ ID NO: 553467 - DNA, 164 bp, Homo sapiens
  misc_feature (147)..(147): n is a, c, g, or t
ctgacactgctctgggttatggatctctgctcagctccagtagctggatacaggcattgcaccacgccagtaatttgtatttagtagagactggttctcatgttggtcacgctgtcaggagcaggtgatctgctgctcggcctccanagtgctgcgatacaggt

SEQ ID NO: 553468 - DNA, 239 bp, Homo sapiens
  misc_feature (164)..(164): n is a, c, g, or t
tcccaagcatgaggaactgtatgtatttctgacatgaaaacttaaaaaaatccaccaggtcagaaaacctgtcatcaccattttattccactcacagtcttctaaagaaaaagtcataaaaaaaatctatcatcaaatgtagtcacttggtgaataaacatggncctagtgtgtttcattgaaattaagactccattgattatgtgttccaagtttctacatccttgggaaggggtacc

SEQ ID NO: 553469 - DNA, 245 bp, Homo sapiens
tttcatcaggtcccaatcctggcttccctctttagaactctcaagaaaaggaggattaaactaaataaacagacagaagcgctctggaacaaaagtacaaaagacagccagagggtgtgcggagagggtgaggtgcccgcgtggacgtgcgtagataatcgcatgcagcactggaactcctgatgaggggtggggtccctacttctactcaaggtatgagggattgcggggtgggtggagagcgg

SEQ ID NO: 553470 - DNA, 950 bp, Homo sapiens
gccctagcaggtcaggcgtggagtgtagcgctggtgccatcccgcatcccggatttcctgggatccgtggaggtgggggctgtgccctgagtggatgtggcacagtggaacctgggatggtgttgctgggtgtgacagcgagtgctgggaattgtgcgagatttcactccggggctctgggtcgagctaccccgtgcttcagtgcggtcctgctgcctcctctccccaagacccttcggggacacagcactgcagacccgccggagacaacttgtgcgggagcccggagtcctcggaataacacttggtcttctgatagccgtcagcgtctccgttgataaaatcatctcgcatttcgggggccgccggaacttggtgcagaaggcccagattgggtagatagccggctgagcccggatgtggggcaacctggtgcttgaccaccctctgacctggcctcacggcacctggtggcggactgggctgaagcctttccggaatggacctcatcaccggggcagcgcaggagacagtacccgtgtgagcgtggctgcaggcggtcggtgaagccaggctccagaacccgtgtcccttggaaccctgtatagccagtgtcagcacgtcttaggcacccgctgaggcagcaggccgtagcgcggtatccagtggcctattagtcctggtgcctccgtcaatagacagagcaggttggaagcgtgagggtatgcacaagggctcacaagcggaaggatttggaagggccttggtcatagccatccgtgtagccttggccagaaaaggggaattttcttcccgtgtgcgctgaaggatgggttatagacacttcccgttgtaccacagaatgttagaatgcaccagtgatgcaagagcataggtcggggcgttcagtatttcgagttggagcctgacatgttgaggcacagaaggag

SEQ ID NO: 553471 - DNA, 412 bp, Homo sapiens
tcataccccatattctgctctctctctcccacctgcctatccttcttaccaaagctgccctgtccagttcccaacaatggaatacccagctggtagattaagagattgccagaatggctgaggccaacgctcctcagccatctcctccttcaaaccctgcaaacccataagatctcagcacagaatccactttattaaaaccagaaagtttccgtcactaactcttaacactcgttgagacaggcaataacacaatcagcttggccacgtcatcctgtaggatggagtctgtcctcgcagactgggatttccaagttcttcctaacagccatatttttttttcctgtttgcaaaactcggagatcagtgaagccttttcaccaaatatgatagcttgtatcttaggaatctt

SEQ ID NO: 553472 - DNA, 196 bp, Homo sapiens
  misc_feature (6)..(6): n is a, c, g, or t
  misc_feature (170)..(170): n is a, c, g, or t
ccccgntgcacgtggagagacagtatatcaaaacacatgtgcacacagattatgtttgggctccaaaactggatcgcaaaagaaagaggagaagaatattttgtgtgttccgtggtattcttttataagtaaagtttacccagtgcatggaccatgcttcagctcagggnacaataatccccgtcccataaccact

SEQ ID NO: 553473 - DNA, 639 bp, Homo sapiens
ggtgtttttaacagaaggcgacaaaacaagaatttggtttcagaaaaggcagtcaattaatccacgttttcaattttgaaaattcttgccgtacgagtgggctgcttctgacccaaaagagtctttattcttagcagtggggcctcagagtggaataaatatcagcgccttcacaagcaagaagaaagtgtgtggttactgtatcacaatcagccagtcacggtgataagctctagatggcacatagactagtcagtggcaaggatttgtgtctgtgatccttcgggtgtcagcagtataggcattgcccaacggtgttcatgcagggcaccgttttctgtatggagatgacagcttgagtgttcagtaagacgccggaaaagcagcgagaaatctgccatgtatagattagtatacagatcttgctcgctacgtcagtaatcaggcggcatagctttaaaaagaaatcagccagatccttcttggtctatgcacagcttgggcgattatactcaagtacaactgcactagtctcttggaatgcgttgattttagtatattctggacagtgggtttcaggtagcatgtccatccataggaccacacggattcgcttggtgccagcatcgtggatgtcgc

SEQ ID NO: 553474 - DNA, 565 bp, Homo sapiens
agcgggggcgaggcttgtccccgcgttgagccgccgccgccgccgccgcctcctcagctgcagcctccgcgccagggcctgtccacgctggccacatctgtcggactatcaactaaccgtttcccgatacaagcagtctgtcacggcacgtgactcgctgcatccagtactcggggcgcagacgcgctaactgccctgcactgttgggtgacgcttacagcgagatgccctgtcgccggcaacgttacctcaccaatgagggcgaagcgacgttggctggccctgccgggaggcccatacctctactctctctggctacatgcgtgctccatgcaacagttggcatatcatgttcgctgttgcacacctgaaacttggcgggcattccctttcctaacagtctcggcacgcgccggtgtgcgccgtacaggaatcggggaacccgtcgatccttcgtctgggccgcccataacacgccggcacaacattgttggccagcgtcctggactaccgggctgcaacagtggacgtcggaactccccctcgtgcgactttcctctcgttc

SEQ ID NO: 553475 - DNA, 113 bp, Homo sapiens
gtcctacatagcaaaaaagacacgactgtgtgactaatggaagcccaaggcttatatcccagctcttgctgtgcctacactaataggatcagtgtctaccggccaaagaccac

SEQ ID NO: 553476 - DNA, 286 bp, Homo sapiens
  misc_feature (260)..(260): n is a, c, g, or t
ttttttttgagacagagtttggcactgtctggatcacagttcattgcagccttgacctcctgggctcaaacgatcttccttcctcagcctcttgagtagtggggattacagctgtgtaccaccacactcggctaattttttattcttattttgtagagatggggtcttgcttatgttgcccaggctggtctcaaactgctggcctcaagtaatcctcccaccttggtttccaaagcatttgggattacaggcgtaacttnccacaaacggtgagcattatatttct

SEQ ID NO: 553477 - DNA, 443 bp, Homo sapiens
ctgtctgccccaatggcccccttcctgggaaataattaccaatcccctacatttatagggttgttgccagtgattaacctgagttatccacatgtaaatccatatagaacataggtgcctgagataagctgataagattattagaaatccctgcttgttggccatggctcacaccctgtaatccctagcacttggtggggccaaggcaggcagattgccctgaactcaggagttcaagaccagtctgggcaacatggcgaacccgtttctactaaaaatacaagaaaaaaattagctaggcatgatggcacatgcctgtagttccagctactcggaggctgaggcatgataatcgcttgaaccttggtggtgggaggttgcagtgagccaagatttgctactgcactccaccctgggggacagagggagacattttctctcaa

SEQ ID NO: 553478 - DNA, 405 bp, Homo sapiens
  misc_feature (121)..(121): n is a, c, g, or t
  misc_feature (167)..(168): n is a, c, g, or t
  misc_feature (179)..(179): n is a, c, g, or t
  misc_feature (193)..(193): n is a, c, g, or t
  misc_feature (195)..(195): n is a, c, g, or t
  misc_feature (201)..(201): n is a, c, g, or t
  misc_feature (262)..(263): n is a, c, g, or t
  misc_feature (310)..(310): n is a, c, g, or t
  misc_feature (312)..(312): n is a, c, g, or t
  misc_feature (362)..(362): n is a, c, g, or t
gttctgtggacctgtgcacctaccccttggaaatgtctgcgggtatttctaattccacaggtcatcagatgcctgcttgataatatataaacaataaaaacaactttcacttcttcctatngtaatcgtgtgccatggatctgatctgtaccatgaccctacataannctggatgcacntcagctgaggcccnangtatgngggctgtggggtgggtgggagtgtgtctgctgagtaaggaacacgattttcaagcattctnnaaagctcgaattcaaggtgagcacagttaactggcataaagctcagnantgctgatcccaatgagtccggggatttcgtaatcaggtcccttggcgttnggggtgggtgtgctgacaacttagctcaggtgccttacagtct

SEQ ID NO: 553479 - DNA, 277 bp, Homo sapiens
cagcagatcacttgaggtcgtgagttcgagaccagcctgaccaacaaggtgaaacccatctctaccaaaaatacaaaaattagccaggcttggtggcaggtgcctgtaattccagctactcgggaggctgaggcaagacaactgcttgaacccgggaggcgaaggcctgaggttttccatcttcattctcttttgtaatcaggagacggtgaggcatgggccaatcccattcctgccttccagttgcccaaccggcatcttcgagggtaccggagct

SEQ ID NO: 553480 - DNA, 243 bp, Homo sapiens
ctgaccgttgactatctctacaaaccacaaagacattggaacactataccttttattcggcgcatgagatgaagtcctaggcacagtactaagcctccttattcgagccgagcttgggcaagcagagaacacttctaggtaacgaccagatctacaacgttatcgtcacagcccatgcatttgtaataatcttcttcatagtaatacccatcataatcggagggtaccggactcaattcgtaa

SEQ ID NO: 553481 - DNA, 167 bp, Homo sapiens
ctctgaggatctgaaagacagcagctgaatcaggtgggtatgctaatttcacaaaaagcaaagcgtatcaatgttctcgtgtcatcccaatagacaggaagttctctcactgaaaggaaacgaagccaggtggggtatacgttccattatcagctggttccatgtca

SEQ ID NO: 553482 - DNA, 503 bp, Homo sapiens
cccccttttttttgtgggtggggtttttgaattttacccaagggcttgttaaccaagttttttgccttttttgtttccccccccggaaattggtttccccctttttttaaggccttttttccctttttgggcccatgggggaaattccccttttgggagggggccttgctttttttccccaaattgcttggtgggggggatttttttttttgggggggtttttttttttaattgggggggttttggccctttccccaatttttttttgggtggggtttttttaggtttggggtgggggtttttttttccctgggtttttcccgggggggcaattttttttcccttttttggaataaactgccgggtttttttttgggtgggaagtggggaatgggaattttttttatttttggggtcctaaaggtttttaaggttccagggggtttgggcccaaaaccggtttttttttgggaatttttttttttaagggtttttatttttta

SEQ ID NO: 553483 - DNA, 115 bp, Homo sapiens
tcactgcccacatgactggctgcccgttaatgctgctggtgcacctgcagccctgtgctccagtgagagactctgtggccctgtagccctgcacctctactggctgaagctgcct

SEQ ID NO: 553484 - DNA, 279 bp, Homo sapiens
  misc_feature (42)..(42): n is a, c, g, or t
  misc_feature (44)..(44): n is a, c, g, or t
  misc_feature (46)..(47): n is a, c, g, or t
  misc_feature (51)..(51): n is a, c, g, or t
  misc_feature (55)..(55): n is a, c, g, or t
  misc_feature (68)..(68): n is a, c, g, or t
tacaggtgttagtgggatggggtgtttagcttggtagagatngncnnaagnaatntttttgttcccanagaaagttttggcttctataggttgacccatacgaaattgccactttaaaggtcaaaaccagtccattgttagcagtttcgtatgttcaccgattagttacagcctttaatttagactacataccctcgtgcaggatcatctgaggctcggcctcagttcggtcctccataaaaaaagggtaaccgcgtagatatatactcctgctccact

SEQ ID NO: 553485 - DNA, 330 bp, Homo sapiens
catacaaataggttacatggcagtggaaaattagatttcaagtgaaattaaggttgcaataaaatgatggagagattatcttaaatggtggagatcaatgaaatcacaagcttccttataagtgaaagaagaaggcagaagaaaggcaaccatggaggtggtggcatgagaaattactcaacatcactgacttttaagatacaagaatgaggacccagcgcggtggctcacgcctaatcccagccctttgggaggccggggtgggtggatcacgaggtcaggagttcgagaccatcctggctaacatggtgaaaccccatccctactaaa

SEQ ID NO: 553486 - DNA, 364 bp, Homo sapiens
agggagagtgtcactcatcatcctgctcaccgatggcgaccccactgtgggtgagactaaccccagaagcatccagaatatcgtgcgggaagctgtatgtggacggtacaggctcttctgtctgggctttggtttctacaggagctatgccttcctggagaagctgtgactggacaatgggggcctggcccggcgcatacatgagagactcaaactctggcctgtaggttcaggactttaccaggaagtggcaacccactgctgacagcaaggagctttgagtaaccaaggaatgccggggaggagggcactctcaacatttcggggttctctttcaggggcttccatgaggccggaccgccct

SEQ ID NO: 553487 - DNA, 902 bp, Homo sapiens
  misc_feature (103)..(103): n is a, c, g, or t
ttgcgtcagcgtgctgttacagcttgatgtgtgctacagcctttatgtccctcgccttgtggctgccccaatttggagacgggcctccacatttcgcatgtgngagaccccgccttctgtggtagccccttgtatagcatggttctagccctccttgtggggggtcacaatttctatagcgcccgcccctttggtttccccccatctccgaaaattgtggggcccacgaaaaaacccggtatcaccccttgtcctaatgggggcctcacacttggggccccacttggctggtcgttatcggcctcccccctgccgtttcatgttgcttggccccccctcctccccaagaactgttattgtcccccccctcatcttggccccccccttttttcttatccccaattagctcgcgcgtaggaaccactttattcgggcacgtcgagacatatctcgtaagcatctcccccctcgcaacaagtaaaacctatcttgtgtcaaacctctcccttgaagtaaaggactctcccagtctttaataagaactatgaatcaatgtgctgagcgcccagtgtttcgcttacaccacgtttgtagggcgggagaaaaatattctccctttttcttgattagaaagacccacctctttttatctctccgctcttttgtcaagagcggtggcccttggaccactcatgctcctgctaggacgcatctgggggggccgatggcgcgctcaactatcggtgagctccccccaagagggggttttgttataaagctaaaaagcgcgcctaggcacccccggcacattgcgcttaccaaagaacagtctgtccaaaataaagatgaagattcaactcccctaaaaaaaaaggtttgagcccacgagaccaacaaaaaca

SEQ ID NO: 553488 - DNA, 443 bp, Homo sapiens
cacaaatgtaaacaggcttatgaggctgaggtggaatgtggcatgctttgtgaggaaggcgtagctccacaaatgtcacccagagtgtctactaaatgtgtggacgaagctcactacaatatgcatctcacatggtcaagccagtaattcatcatgattctgtcaagactattgactgcacctactactatccggttcctgatatcttatgttttttcctcgctcggcttcaaacctcattactgcgctttcatttaccgttctttacgacagtctctctcacaacatgagtgctctttcaccacgtagtgtacgtttcgaccttataacgtatccatcctatatttagtaacctgtccgattttcccagcttcactatcatttcaatcattgcctttccatcactttctctaccctctcttcgtcctttactatcatactcg

SEQ ID NO: 553489 - DNA, 513 bp, Homo sapiens
  misc_feature (38)..(38): n is a, c, g, or t
  misc_feature (80)..(80): n is a, c, g, or t
  misc_feature (507)..(507): n is a, c, g, or t
cactggctccctcgttatcccatgtatacatcaaatgntaaggtcactccacccccacgacgccagaatgaaaaggtgtntatctcatggattctaacttttccttcattgaaagaaccaattccttataacctgggtgccaagacgccacctgcatctatagaagtagatgacaatatagaattgataagtggtcaaaatgagagaatgggcccactgaatatatcaactccagttgaaccagttgttgcttctaaatctgatgtttcacccataattcagccagtgcctagtataaagaatgttccacagattgatggtactaaaaaaccagcagtcaaattgcctgaagagcatacaataaaatttccaagcacccaccacacgcaacaatctcctcagagcgcaaaagttttcctgatcgttccacccagccagtagttttttctccaactcccatgttcacacatgaagaaaaggctagttatcctgcagaaactgctcttntaatgg

SEQ ID NO: 553490 - DNA, 300 bp, Homo sapiens
tttttttttccttgagacggagttacgctctgtcgtccaggccggactgcggactgcagtggcgcaatctcggctcactgcaagctccgcttcccgggttcacgccattctcctgcctcagcctccccagtagctgggactacaggcgcccgccaccgcgcccggctaattttttgtatttttagtagagacggggtttcaccttgttagccaggatggtctcgatctcctgacctcatgatccacccgcctcggcctcttttaaagatcccagcctaatgcactttctggaggtcgacg

SEQ ID NO: 553491 - DNA, 1465 bp, Homo sapiens
aggcagatcgagattgttcccaaggagaagatcgtaatcctcctctgtggacggaacaccatgtgcacctactatccgatggtcgtcccttgatggagcggaaggcagcatttgacatcaagcttccggaaaccaaaggctgccagactcatggccacggccacactcaagaggaactctggcaccatgccatgtatgtggccgtgaaaacggctgatcctttgctatgagatccagagaacgcaagccaattccacagaaagttcaatgagaatagtgggctcccggcacagcgatgcagaagccatggacgagtgcacagggacaggactcatgtgatggagctaccacattctgggattcatgacacatgctgaagcaatacaaggagaggaacgggcagacctacataaacctggataagatcccaagtgacccccatcgacttgcgttacctctcacaacagatactatatagatgccccatataggaggactagtggagcatcgaaaagcgaagggaagtacctggaatatagataccaaaaaacaatgaaaaactggatacagtagaaaccacgaaaaatgcacagggaagaagaaacaagcagcgacaaggaagaatcaatgagtgagccataaagaaacaccatggaaaacaataaaagatacgacgcagaaccccccaatcaccacaaaagttacacagaaaaggatacacatgacgaaagataattgagaaagatagaaaagagatcataaaggcaatattttgcgcacagtccaagtggaaacatatgaataatgacaaaaaacaacaccaagcaaccacagacaaaacagacattaaaggtacaccacattaaaccactcagtagaacaaggggggcagcaccaaattcaaacacacagcacgattcaaaacagagagcggcagtacaccatcagagaaagagcaaagcagacaccaaaaacaacaataagaaacgccaacaagctaaaccaaggagaaaacacagaggctaaaacacaaaacagatatgacaaggaaaacacaccaacgccgagaacagagcacagcaaaaaaggacaacgaaacgaaaaagaaaagcacgcaaacccaaggaagcgacacacaaaaggagagaaacaagagaaataacgaaaaggagatcaaccaaaaagaagcaacagcacaacgaaacaatggaacagcagaacgaggcaagagcagacaaggaacatcagaggagaccacagacaaaatgacagcaccaccaaaatggaactgttcaaaaccacgaacgcaaaactataaccacgcaggtgcgccaacatggagcccgaaagaaaagagaacaacgagggaaccatagagacacacagcacaccaagagctgatagtcaacacacacaacaagagaagaatgagcaacagaacacgaaccacacaaacatgaagtgg

SEQ ID NO: 553492 - DNA, 221 bp, Homo sapiens
agaaaaaaaaaaaaaaaactgatgaggccgggtgcaatggctcacacctgtaatcccaacactttgggaggctgagatgggtggattgcttgagttccagatcagcctaagcaacatagtgaaaccccatctctacaaaaaaaaaaattaatttaaaaataaaaatgggtggtttgaaatatgaactgccccctcccctgaaggccatgaaaaaaaaaaaa

SEQ ID NO: 553493 - DNA, 1507 bp, Homo sapiens
  misc_feature (1507)..(1507): n is a, c, g, or t
gtcttcaaggctctcatcgctgctcgagtacagacggggactcatgtgtccgcgtgctctccgcatccatcccacttccattgttggccaaaggcaaccgcagcgccatgaataatctccggcgagagagtttcctgccggcaaggatctcaggcatttgagggtgatgatggagtgctgtggtggtgggagatgcaacgccagttgcgctagctatgtgagcacatagaaggagctgcgcgggaagtactccgaggaggcagcaggccaggtgggtgcagtgggtgagctttgctgattccgatagtagtgcccccgagccagtacctagggtggttccccgagccttgtggcatcatgtcacacgaaacaaacaggccactgatgaattgcgagagggaggaagtgaggctgaatgctaggcggctgctggaatgcttactgtgaagaccgagggactttaccgtgggttggggcgaaacagaagtggaccattgggattgaccatcgagcaagttccgtctgccaccccttgtacgatggcgtcctcatagaggcagggtttcctaaggaaggccttcctatttccagtcaaggccctttttcccaaataaccaaaccgggtggggctcccatacaaagcgttgcaattaaaaccaaggggcccccaggattcccgaaggcagtgtacattggaggcggaatgttgtgacaacccaggtgttgggaggcaccgatatggccgcaaggtggcgaattgccttaaccacaggttgtggcaaggagggcccaagttctataaaaaggtgtaccgacaccaccgtggcggggaacacacgacaggcgagggtgagttcagaggggagggcgacacgtgagtgaaaaggccagaagaaaagcccccaatgatgtgcttgaaggcgggggaaacgacgccactatacaactacaaacgacgcaggctatgacccccggggcaaccatataacgaaggcgcacaaaggggggacaaaatggataaaacacatggaccacgtgctgatgcaattgaaggagccaagaacgccacaagggggcccaataatgcgttctcacgcgtgtgcaccgaaaagataatttcccgacattagagggggaggataatgacatttacagcgcagaaatttataccaatgggggaggagaggaagtaatatattgtatggggcgagagacatatgagtgggagagcagatatataagatgagggagttggttgtggtaacgaagaaattagtctcgatggaacgaactactaaagatgtagtaagagaacaaaggagaattaacgagggacgagaggaggaaaacgacggcacaaatagttggaagagacgacagagacgtatgaggttatatagagagacaaagactactagaggtaggaacaaaaaatgtacgaaagacagcaaacaaaaggcaggagagggattatatcggtatgtagtcgttttgggaaggatgaatn

SEQ ID NO: 553494 - DNA, 508 bp, Homo sapiens
  misc_feature (214)..(214): n is a, c, g, or t
  misc_feature (391)..(391): n is a, c, g, or t
tctgctctgcactctcaggtattccctgctcttactccaaaaagatggacccaggtccgaaggggcactgccactgtggggggcatggccatcctccaggtcactgcgggccaccccctggccatggcccaggccctgcgggccacccccccaccatggtccagggccctgcgggcacccctggccatggcccaggtccctgcgggcagccccnccaccatggtccaggccctgcgggcctccccctggcctatggcccaggtcacccatccccctggtcccacatcactgaggaagtagaagaaaacaggacacaagatggcaagcctgagagaatttgcccagcttgacctggaatgaggcctaaaccacaaatcttctcttcctaatnaaacaggcctcctagaggccacattctagcaaaccaaaacgagacccacttcgacaatcaaagaacacaaaaacacacaaccacacactcatgtatacgccaactccacacacaacc

SEQ ID NO: 553495 - DNA, 178 bp, Homo sapiens
ggcggaatccgagatgtgtaaccctatgagagcccgtgagcatgactcagacgccggcggagcggactgtacgttacacactcgagcaccccgggcaggagccgcagcgtgccaggctccgtgctcatgtctgcttctccgggatccatgagcatggatggcgacagcgcaggagtac

SEQ ID NO: 553496 - DNA, 319 bp, Homo sapiens
cgggatcgagggcatggggctgagcaacaaggtgttctacgccaaccccaacctcgcgtcgcgcaagttcatcaagcccgaagtggccaatgacccggcggtgttcccgcccgaggccgagatgaagaagatggcgcagcccgaggcgctgaacaacgacatccgccgccagatgacgcgcatctacacgtccttcaagaccggcctgtaaagaacacgatgaacagcaggacaggggagggctacctggtcatcgaccgggtggtgaaggacttcgtgagcccggacggcggcagcttccgggcggtggacaacgtgt

SEQ ID NO: 553497 - DNA, 810 bp, Homo sapiens
  misc_feature (152)..(152): n is a, c, g, or t
  misc_feature (187)..(187): n is a, c, g, or t
  misc_feature (281)..(281): n is a, c, g, or t
  misc_feature (330)..(330): n is a, c, g, or t
tccgtctccgcccataggcggaaaataacattaacctacggaggaaatgttcctcgtcgaagagcagagatttcgggtggagaaaccacatctccggtttgcgacacacttcctccagcacttgtcatctcggcacgcaaccgactctactntttggccgacacgctttcttgacagtgtgccgccnccacaaagtttgctgctctgacttggtgagatgagaggtgttcactcactctcgcccctctcaaaaagagaggagagagagccttgtgaggganagaatctctcacggagcgagacacaacactcatagcaggctctggccgnagaggtgcacactcccttctattagagggataaacaacactcacctcggcgacccacgtcagtttattatccggagatgataatactacatatgcgccgcactatagatcgctcgcgttggacacatacaatagttgctcacagatatatctttaagtatatactagagagatacatactcacgtttcgctcacttacacagagaatatcttggttggggcgcattttttcccacacgattattggaacggtgtcctctccgcgagtggcaagtgtttgtgtactctccaccactcgggccaggtcctcaccgcgagagagacagtctcagagacactcactgtcttgtgaagtcactcccgcagtggggacagcgctcgctttttctcacaccccttgttctctcctacgggaccgctcctcttccccgaacaagctgaaacacacggcacatcaggtggaggacaaacaaaggaacaa

SEQ ID NO: 553498 - DNA, 311 bp, Homo sapiens
taagacatgctgctgcgtatttcaatgatgcttcatgagggcaaggcctgggctctgctagggcaggatggtgctcttagagctacctgagctggacaaacccatggcagacagaacagaaagtctggcacctgctgactccggccctcccgtggtcacttcatcacacagcaaattcttaaaacgtttgggttttttcaaacgaagcatttaacgtccagtgttcagttttccgtgcttcagcggaacgatgcgtagcacaagttgaagcgccgaatcccttcctattttagcacttccaagtatcctgg

SEQ ID NO: 553499 - DNA, 548 bp, Homo sapiens
  misc_feature (517)..(517): n is a, c, g, or t
ttttttgagacagagcctgactctgtcacccaggctggagtgcagtggcgcgatctcggttcactgcaagctctgcctcctgagttcacgctattctcttgcctgagcctgccgagtagctgggactataggtgcctgccaccacgcctggctaatttttgtatttgtagtagaaaaggggtttcaccttgttagtggttcctaaaataatatgtgatgatgataaagcacatatgacaaaatgttcacaaacactgaatcttggtgagaagattgacatctttgtactattcttgcaatgtttctggaaatctgaaactatttccaatgaaagattcaaacctttctcttgtttttgattagaaaataatatcctgagaatggtctaatatctaaaaccaatcatactcttcagacttgcttatggtatctaaatgcaagtggtatttgcctaggaccctgggttgaccctttaccctactctaataccttgcaatcgttgccgtgtctaaagctngtactctcataaaaccatcgtgagtctcaaa

SEQ ID NO: 553500 - DNA, 248 bp, Homo sapiens
tcccccaaacgcagagaggactgactttctttcttgcctatcaaacctgaagaacactggggcggttgcaggccctttctcaccctcatccagagtgtcactcttttaccagagctgcgctgccatgtcctcaatctgacctactcagccatctgcattcccgcacctgcacaaggttaacaagcatgggaataaaatggcttcatctcccagagtcattgtggcatggtaactcctctctgcgtttg

SEQ ID NO: 553501 - DNA, 332 bp, Homo sapiens
  misc_feature (104)..(104): n is a, c, g, or t
gagacagtctcactgtcgcccaggctggagtgcagtggtgtgatctcggctcaccgcaacctcggcctcccaaagtgtggatacagtcgtgcgcactgcgtccngcctccttttcttttttctctcctccgtctttttctatcctacctccctgcctctttcctctctcctccctccttttcctttttcttctctcctccctccctcctgtttttctccatcattccctctcccttcctttctttttctcccgttccccgtttgcctccctcccctttttctttcctgtctccctgtctcctttgctcttttcctccctttctcccgtccct

SEQ ID NO: 553502 - DNA, 1794 bp, Homo sapiens
  misc_feature (15)..(15): n is a, c, g, or t
  misc_feature (26)..(26): n is a, c, g, or t
  misc_feature (49)..(49): n is a, c, g, or t
  misc_feature (102)..(102): n is a, c, g, or t
  misc_feature (162)..(162): n is a, c, g, or t
  misc_feature (176)..(177): n is a, c, g, or t
  misc_feature (310)..(310): n is a, c, g, or t
  misc_feature (339)..(339): n is a, c, g, or t
  misc_feature (619)..(619): n is a, c, g, or t
  misc_feature (636)..(636): n is a, c, g, or t
  misc_feature (649)..(649): n is a, c, g, or t
  misc_feature (652)..(654): n is a, c, g, or t
  misc_feature (665)..(665): n is a, c, g, or t
  misc_feature (683)..(684): n is a, c, g, or t
  misc_feature (705)..(705): n is a, c, g, or t
  misc_feature (788)..(789): n is a, c, g, or t
  misc_feature (805)..(805): n is a, c, g, or t
  misc_feature (808)..(808): n is a, c, g, or t
  misc_feature (814)..(814): n is a, c, g, or t
  misc_feature (839)..(840): n is a, c, g, or t
  misc_feature (857)..(857): n is a, c, g, or t
  misc_feature (877)..(877): n is a, c, g, or t
  misc_feature (915)..(915): n is a, c, g, or t
  misc_feature (921)..(921): n is a, c, g, or t
  misc_feature (924)..(924): n is a, c, g, or t
  misc_feature (954)..(954): n is a, c, g, or t
  misc_feature (956)..(956): n is a, c, g, or t
  misc_feature (960)..(960): n is a, c, g, or t
  misc_feature (969)..(969): n is a, c, g, or t
  misc_feature (972)..(972): n is a, c, g, or t
  misc_feature (982)..(982): n is a, c, g, or t
  misc_feature (995)..(995): n is a, c, g, or t
  misc_feature (997)..(997): n is a, c, g, or t
  misc_feature (1054)..(1054): n is a, c, g, or t
  misc_feature (1165)..(1165): n is a, c, g, or t
  misc_feature (1312)..(1312): n is a, c, g, or t
  misc_feature (1478)..(1478): n is a, c, g, or t
  misc_feature (1530)..(1530): n is a, c, g, or t
  misc_feature (1613)..(1613): n is a, c, g, or t
  misc_feature (1715)..(1715): n is a, c, g, or t
  misc_feature (1746)..(1746): n is a, c, g, or t
  misc_feature (1776)..(1776): n is a, c, g, or t
  misc_feature (1792)..(1792): n is a, c, g, or t
actctgtgagctggnctcggtatccncacatttaaaatgaggagttggnttatatgattgggtggtatatgtggctcatctcgaagactgtctattatagangggcaaatggtagtgcctcattgcaggtgtggagtctgtgtcttgaggacatcgggagantctagatgatcagnncacgcccgggagcttgtccttctccgagcggctcagtgaactggagcagctgcggcgcacagtccatgaaggtcagcccacaccacccagcccccacgcccaaccctcgtgcctccctgaaccactccactgnctttaaccctcagcctcagagtcagatgnaggggtaagtaccagatggagaccactgcccgcctctcctgcacctgggccaccacccacaactggcccccatgtgcacacaccttcccagaccaactggggtttccccttgatgctcagagaaaggcctcgaaccaacagcaccacctgggagctgttggaaatgcagagtcttgggccccacccaccccagacccaccgagtcagatctgtattgtaaccagatccccacaaggaaaagcactgctacagaggatacgaggagctctgggtatggagnttccttttaaggatagntcgctctcttganttnnntaagagttagntttggctatgctattttnntacctacccattaggcttgangacacacacgcagacacacacacacacacacgtcaaggaaagtgaagatgggatgtttccaagttctccctattgcaagaaanntgggggttttgaatcnatngtgttntagaataaagaaaaagtggaatgtnnggatgtcatcacaccanggttgtatttccaaaccaanagagaatgcggtcccccccaccccatggccctacctgncaattnacnaaagccctgtaagatccaataattgcctangncccnctgtcccanatnagataacacnagaagttcatttncnctgtagaccagtgacgtcaatgactgtttgctctgtgataccgtttcacaaatccanaatgcagacttttctctgtgccatgcaggatgcagctgtgtgtgatatggtttacagtaatatttctttctcaaagtagcaggcttgttaaggagaagataagcaacagancctggggaaaagggcaggtgtccaccaatcgatgtggtagctctttgcccctcctcggacagcaggaattagcttccccaggcattttctgtatgtgagttgtattgtgggatgtacaaatatcatctgttcctttgggtttccagnccagtagctctctattttggggtcacacatgggttctcagaccgggcgcggtggctcacacgtgtaatcccagcactttgggaggccaaggcgggcggatcacgaggtcaggagatggagaccatcctggctaacatggtcaaaccccaactctactaaaaatacnacaaattaggcaggcatggtggcgggtgcctgtagtcccagctactcaggangcggaggcaggagaatggtgtgaacccgggaggttggaggtttcagtaaaccgagattgcaccactgcactccagcctgggcnacagagcgagactccatctccaaaaacaaacaaacaaacaaaccaaaacatgggttctccaaaggcatgcccactgtctcccatggagcttgacagcccatnccattagctctcactgttaggtttctggggnaggttcttctacttgattggaaaatttccnaataaatctttccagnag

SEQ ID NO: 553503 - DNA, 145 bp, Homo sapiens
cggggacttgtctctcacctgaaaagctgcttacgggcccccactcgtcgtgggtttaaagcggattaatgggagggttggtggttctggggctggcagggcttcccagcagggcagccccttcatgtggtggcgagcttggtag

SEQ ID NO: 553504 - DNA, 203 bp, Homo sapiens
gggggccccccccccccggggaaaaaattttttggggggggggggggttttccattttttttaaaacccccccggggggggggcggggggggggtggtggggggtccccccccccattttgggggtgggcccggcccccccttttttgttttttttttttggggggggttgggaccccccccctttttttttttttgggggga

SEQ ID NO: 553505 - DNA, 190 bp, Homo sapiens
acacgcgatgggtagcaaagcagatgacagctgtacagacattcacttaaacatatattttagtgagcacacactggttctctgggaactgttatgagggctgggcgcattggtatggaaacaacatgaacagtacacaaacttgaaaagagccctgatagcagttaccacgtacacccatctgatggag

SEQ ID NO: 553506 - DNA, 172 bp, Homo sapiens
ggggtgactagcaggaccccctttgagtgaataatttatacttatttggttaatgtctggtgctttctatcacctcttctaatctttttatgtatttgtttgcaatgttggggtaagactttttttatgagtactttttctttgaagtttagcggtcaacttgtctggagta

SEQ ID NO: 553507 - DNA, 117 bp, Homo sapiens
ggtcgacccgcatccacacaggccagcaaggccctgtgccagtgccgcatctgcatgcgcaacttcagccgcagcgagctcacctgcaccacccagcattccggcactccacgacag

SEQ ID NO: 553508 - DNA, 456 bp, Homo sapiens
  misc_feature (9)..(9): n is a, c, g, or t
  misc_feature (199)..(199): n is a, c, g, or t
  misc_feature (223)..(223): n is a, c, g, or t
  misc_feature (228)..(228): n is a, c, g, or t
  misc_feature (230)..(230): n is a, c, g, or t
  misc_feature (240)..(240): n is a, c, g, or t
  misc_feature (450)..(450): n is a, c, g, or t
cacttcaancgacatcgcaaaaaggtggctcggaaattctggtggaagaacgtgaagatgattgtccttatctgcgtgattgtttttatcatcatcctcttcattgggctctttgccactggtgccttcttttaagtaacagggaacctctcccacctgcccttcttttcagggacaaccctccataaatgtggccaanagggtctcctttcctgtcttcctntacananaatgctgctnggtcctcctacccctcttcccgaggccctgttgccacgttgtatgccccaaaaggtcccttggtcccccggaaggaaaaaaaaaaaaaaaatggactgtggctgcattttttgggtccttaaagtgggctggaaagacctaaagggcccagcatgtggctgggaaactgttggtggccagtgggtaataaagacctttcagtatccctanaaaaaa

SEQ ID NO: 553509 - DNA, 82 bp, Homo sapiens
gtttttttttaaaaaaaaggcaaattttgcctctcccacttctataatttgaaaaaataaataaaccttttcttttttgtga

SEQ ID NO: 553510 - DNA, 327 bp, Homo sapiens
tgatatctgcagaatcggcttcatcgcacgcaaacggtgaagttagtcagaaagagtaagataaataccatatgatatcacttttatatggaatctaagagatggcataaatgaacttttccacagaaaagaaaatcttgtactgtggaaaagacttatggttgttaagggagaggggatggagtaggatgaattgggaatttggggttaatagatgcagactattcctttggaatggattagcaatgagatcctgctgtgtagcactgggaaacaagtctagtcacatgcaatggagcatgataatgggagtttgcgtgcgaaagc

SEQ ID NO: 553511 - DNA, 553 bp, Homo sapiens
taaggatgcataggcaatgtcaagaaaaggcaagcggcaggcggtgtggctcacgcctgttatcccagcactctgggaagctgcagcgggcagatcacttgaggtcaggagctcaagaccagcctgcccaacatggtgaaaccacgtctctaataaaaatgcaaaaattagctgggcatggtggtgtgcgcctgcattcccagctaatggggaggctgaggcagaagaatcgcttgaacccgggaagcggaggccgcagtgagccaagatcacactactgcaccccagcctggatgacaatagcaaaactctgcctcaaaaaaaaaaaaaagaaggggcaagggggagaggggggggacatttcctttttctggtcaactttagcggggggagccccacaattacggtatggggggtgctcggtgtatggggggtgcccctgtgtatggggggcgctcgtactccagtggtgtactggcggcagtgttcaaccggccgggagatccaatagggggtgcagcgggccgggctcagcaccccggggggcgggcaa

SEQ ID NO: 553512 - DNA, 1261 bp, Homo sapiens
gagtattagctggagggactttgatgctggcctactaattgtcgccctctgtactggctgaggaggtaactcgatgtttccactgaaatggtgaggtattcaagaattcgtaggactgaatctatggctgctgggcagtaaggaagagctccataatcgaaggtgatatccttctagatagacatgtggctttctggtagacatcagagaaggtagttatagtccagtgttacacgaaggatgctcctgcagaattcgtctatgttgctccacattcccactcatactacattcaaggtatactactactactaatatatacccaagtggattttccatgcattcaaagcactctatagtatgttgctggaaactatatactatttcataaactttaccatgattgtaaatagaatacaaggcattagtaataactgcttaagcttggggattagaaaaatagtcgcgctacagatagtatggtcgtagagggatcttgggagaatcacaatataaaatagggtgttaaccttaagctacggaatcttacattggaagtgtcaatgcagtagaagagtccggttccataaatgttatgttatggacaacagaaaacactgacggatattgacattgagggaatttcactacttacgtcttgacaatttaataggaaagtaaggacatttccaaacgtggcagagctgataaggatgcgtgtaaaatagtccacttggtaggggtacaaataacatcttacgggtaacatatatccggcgaggatttcgaactggtgatcgttctaaatgcggcacaagtgattaatataggagctttttaattgatggactgcatggtttggtggggggcagccagagtggttgcaggaacgtagaagttgatcgttagattaaaggtggagattgactggccccaggaaaagggggtgcaagatgggttagaaagttccaaaagattaaacaacaaaataccaaccacaattttacaaaaaggggttgggagtggagggcaaacaactggtaaaaggtatgcttatagaatcttgacagcaaatacagatggaaattggggacaggaagaaatattcatggagacgaaattactggacggacaaagcatggaatttttgaaaatttataacaggtgaatagaaaaatttatcgaataataactatgtaagtgtttggaaaaaggatataattccagattacaaaaatgtaaaaggaaatggaaattagaa

SEQ ID NO: 553513 - DNA, 249 bp, Homo sapiens
tttaaaatagccgacggtggcatggaatccgcttcattcaatggagatacattgcaccactctgattagactccactgcattcaaacacgctgcatggaatccactgcattcaatcgggatccattgggccacactgcatggaatccactgcattcactcgggatccatttcacaacgctgcattgactccactgcattgaatcttgatgcatggaattcactgctgaattggtatcaattacataatt

SEQ ID NO: 553514 - DNA, 935 bp, Homo sapiens
ccttctcctccttctcctccttctcctcctccccctcctcctcctcttctgcttttctgttaacacacatttgcatcctctgctgtcccctgacatgtgagcgtgtgagcgagtgtcgtctgtgttcttgctttccttgggaacctaggtgattttttgcttttttaaaaaaggtgtttgttttgtttgtttgttttctatataaggacatttgcctgcacgtatataagtgcaacacgtgtgtgcctgctgtctgaagaggccagaagagagtgtccgatcccttagaatgcgagttgcaactgcttgtgagctgtgtggttgctggtggccacgcctgtctggaagagcagctggtgctctagaccactgagccatctctccagccccataggtcatcatgtctaagactagaaattaacaggctggagagatggctcagtggttaagagcactgactactcttccagaggtcctgagttcaattcccagtaaccacgtggtggctcacaaccatctgtaatgggatctgattgtcctcttctggtgtgtgtgaagaaagcaatggtgtagtcatataaataaaataaataaatcctaaaaaaagaaaaaaattactacatataattatagaagtcagggaatgttgtctcaacgggatgtgtaacctgcgttcacagcgcaccaagtgtcccttcatcttgatggtaaccttagtcagggtcagacaagttagttaagcggcgagggtgaatgctcacggggaacaccttatagggaacacctggcattagcaaacgggcggggcaacgcctgcgggtacatcaccctgggtctagtcggccgaacgaggccggagagcaaaggtggcagggtgcccaaaagttccaggaccaggaaacccaaaatacaaccgctggcaccaagcgtttcct

SEQ ID NO: 553515 - DNA, 317 bp, Homo sapiens
agccctggctgatcgcttcggccagacgactgaggtcctgcccctcagtcggcgtgatgaactgggcggcttcctcgcacagcacaaagcgcgggcgatcgcgcgcggagagatagagttcctgggtgactgcgttgaccacgaccatgacgatgacgttgaacaggtcaggcatcgccttgagacgctcgagctcgagcacgacgaattcgtcgttgcggatgtcgagggtcgaggggccgttgaaataatggccataggcgccgcccgacccgaaatcgcgcaggttgaaggcgagctcacgcgcggtcggcacg

SEQ ID NO: 553516 - DNA, 339 bp, Homo sapiens
acattagccaggcatagtgcacatgtgcctgcagatcccagctaccctggaggcagaggtggaatgatcatctgagctcaggtaggcggaggctgcagtgagctgagattgtaccaccgctctccagcctgagcaacatagtgagaccttctcttcaaatgatacataaacaaacaaaaagaaaccctcatcctctgttgatcctgttcccaattgacccttgaacctagcgcaggatgtgtgctaaaggccaacatgaaggacatcatgaccctaaatatatcctctacaagctgctacctaatgttgaaattcccccttaaacctttggtgcctttc

SEQ ID NO: 553517 - DNA, 837 bp, Homo sapiens
  misc_feature (13)..(13): n is a, c, g, or t
  misc_feature (33)..(33): n is a, c, g, or t
  misc_feature (36)..(36): n is a, c, g, or t
  misc_feature (40)..(40): n is a, c, g, or t
  misc_feature (48)..(48): n is a, c, g, or t
  misc_feature (58)..(58): n is a, c, g, or t
  misc_feature (62)..(62): n is a, c, g, or t
  misc_feature (115)..(115): n is a, c, g, or t
  misc_feature (119)..(119): n is a, c, g, or t
  misc_feature (128)..(128): n is a, c, g, or t
  misc_feature (140)..(140): n is a, c, g, or t
  misc_feature (151)..(151): n is a, c, g, or t
  misc_feature (162)..(162): n is a, c, g, or t
  misc_feature (169)..(169): n is a, c, g, or t
  misc_feature (175)..(175): n is a, c, g, or t
  misc_feature (185)..(185): n is a, c, g, or t
  misc_feature (189)..(189): n is a, c, g, or t
  misc_feature (200)..(200): n is a, c, g, or t
  misc_feature (206)..(206): n is a, c, g, or t
  misc_feature (235)..(235): n is a, c, g, or t
  misc_feature (242)..(242): n is a, c, g, or t
  misc_feature (245)..(245): n is a, c, g, or t
  misc_feature (327)..(327): n is a, c, g, or t
  misc_feature (353)..(353): n is a, c, g, or t
  misc_feature (393)..(393): n is a, c, g, or t
  misc_feature (494)..(494): n is a, c, g, or t
  misc_feature (497)..(497): n is a, c, g, or t
  misc_feature (525)..(525): n is a, c, g, or t
  misc_feature (545)..(545): n is a, c, g, or t
  misc_feature (568)..(568): n is a, c, g, or t
  misc_feature (582)..(582): n is a, c, g, or t
  misc_feature (633)..(633): n is a, c, g, or t
  misc_feature (636)..(636): n is a, c, g, or t
  misc_feature (679)..(679): n is a, c, g, or t
  misc_feature (688)..(688): n is a, c, g, or t
  misc_feature (692)..(692): n is a, c, g, or t
  misc_feature (728)..(728): n is a, c, g, or t
  misc_feature (741)..(741): n is a, c, g, or t
  misc_feature (744)..(744): n is a, c, g, or t
  misc_feature (753)..(753): n is a, c, g, or t
  misc_feature (796)..(796): n is a, c, g, or t
tatgtaatcaatnattttattattttcatcaanaancaanaaagcaanaaaaattganagcnagttctcaagggaaccttttttgaagtgaagagcaagggcctgaatgagctanctanatggaaaanagtatttgcaanatgcaaatggngaactaaaggntcatgangggaanagaagggggntgtntacagaggaanagaaangaagggaagttatgggaagttcaatcaanaattggnaanaagctaggtcagtagtttacgaaagtggtcatctatacagtgcctgagtttgggttctgggcctggatcatgtaagaaaggnagcaaagtctgggtgccatgaattanacctgcaatcccagcactttggaaatctgtggtgagaggntctcttaaagctatggccttgaaaccagcctgggtaacaaaaccaagcccttgtatctaaaaaacaaaagggcaggtagattccagaaaaataatgttgcnggnagggggtgataaaatacagaaatgtganaaacagcaaaccctcaactnctgtttcattggctcccagtgtnttaatctgtgtttnctaacactttaaggtacatctgaaataccccccaaacccagaaagcttttnaanagctaggttgttcaagaacttggaaaattcaccttctgatgtnctccaaganagantccattttttatacaccttatttgctcagacctgtnacttcagcctggngtnaacacaganacctagttttcctcaaactcctcttgggctttagagagaaggngctggccctttgagccaagcaggttattggttagtagtcct

SEQ ID NO: 553518 - DNA, 328 bp, Homo sapiens
gcactgaatgtacccgactggttataggtgcgggtgttcacggctggaatcggccacactgcagacgaagcgatacccggagcgggtaacaccacccagatgtgcgagcaccgcgggccacccaggtctcggtgatggaagtgggcctgggcaacagccccatgggccgcttcaacggcgcagagttgaatgggcaatgcacagcggtgtgccaggtcggcaacatcagtgaggcgtgcaaacggcgtgcgcaccttgatgggctaacatctatgtgtacgacctgaacgtccaggcccaggactggtacgaattcaccgatacctac

SEQ ID NO: 553519 - DNA, 437 bp, Homo sapiens
  misc_feature (69)..(69): n is a, c, g, or t
  misc_feature (121)..(121): n is a, c, g, or t
gtgtgtgtgggaggggggtgccttaacctgtgtggtagtaaacttccaggttaatacataggccttttnccctcaagggtgaccactgttgttgccccaggctggagtgcaatggcgcgancttggctcaccgcaacctctgcctccctggattcaagcgattctgctgcctcagcctcccaagtagctgggattacaggtgcccactaccacacctggctaatttttttgtatttttaatagaaacagggtttcaccatgttggtcaggctggtctcgaactcctgaactcatgtgatctgcccccccctcacccgccccttggcctcccaaagtgctaggattacaggcgtgggccatgacctgctttttattatcaatctataataatatgtattgttcctatatcattaaatattctcctttaaatatatcta

SEQ ID NO: 553520 - DNA, 1729 bp, Homo sapiens
ccccgtccctgccctccccgctcctgagggccagtgccagtgacagtgcccaaagaagtgcaggtcgtgatgagcgtgcgaaccatgtcacgaagtggactattcctgtgacagacccaggcgaccgatggacgtcagcggacagatgaagtattgctctgtccccgagttcatggttcctgcaagccctctaggaggtccgaacagcctgcaagcatccgatcccactatgaccacaagaaagagacgcctataccagacgctttcatctacagaccctcgcgagaacacaaccaacactgcagccctgaacacagaggacatcccaaggaacagaacaagacaagaccccaatagatgcacacatacttgacaccagacggacagagctagcgaccttcgcagtaagcttgcagtagccgcgccaaaaacagacaccccaggcacgcgacaatctagagcccaaaactctgaacgctccgcccgaccatagaccgccacagaccacgccccgcgcagcgcaccagataggaccccgatatagccacagcatagcacccacagtcgaggtacgaccaggagagcatcccaccccaaagaccgtggacaattgccaaaactcgaccccaaacaccggacgcgtagccagatttcggacacccgccagcgcaaaacacggcccagagaaaaagaacacaccaacatcgcccaacgacacgcgcccagcacgcacatcctcccacagcagcatcaccaatcgccccaacgcccacccacaaacaacccgcccacaaagaagcgcccccacaccaccaccaacacacacacacgagacacaaacaacaaccacacctgacattacatcacagaaacaggacacaaaaaaaaacaagcaccgaaacgcgcgacaacacaaaccgacacccactgcgcaatgtcgaactgaaacacccgcacagtccccatgccagagagcacagcgaccacgggaccaccaacaaccccgcacgacacccactacgaacaagagaacccccagaaccaacacacgctggacccatgaccaacagtcaccacaaagactcccaaacccaacagccgacgacgtgacccaatacactaacacacacaaaatcaacacgcagacacccccaacacacagacgtccactaaccagactaaacactcactcaactccacgattaacagcaagccctgttcatcacaagcaatcagacaccactcaacgcaaaaataatccatgcatacacatcatatcgcattatgcaccaccatgcagcaccatcagcgctaaatacacgaacaccataccacgcagaaacgatcaatcaacacacagaaggagaacctacgatacaactagcagaaccacacagcacgataacatcaatcccggctcgagcagagttccgagatacaccgagcaacagacacacatggacaacaccaactcaggccaccagttcgaccactgctctcgcgcaaatccactcacacagaagcgatgaacgacacgactcacagatgaccgaaaggaaaagacactgcagacacacgagccacaccatctccatcgcagagaacacgaccgcgacgaagcacacgcatatcagaccaccgaagcttcacacgtgcaacgcacacgatcaggagatagagcaagaacggacaagacatcaagatgcaacacgccagagccacgacgaac

SEQ ID NO: 553521 - DNA, 815 bp, Homo sapiens
ggacatttgtgaaagcaaagcaagaatgaatgctttcccgatctcagactggctggattcagatcagtgtgttggctggttctcattttaaggggtaagcagttgctattctgtgactttagtagatctctttgtgtgcacatatacaatgtgcattatacatatatattaaatatatccacaaagcagatgggcaaaaagattttcatgctaatcttcaaaggttcatgctcaatattgtgaaaagcttttaaaaggtgtcttgaaaagacaatcattctccgtcccgtttaactttcttgtggcaagctataccggaaaagcggcatgtcaaaaatactttaggttctacatagatctctttctctctttgtccagtagtccgtccgttaaacgtccatctatcttattttaccttttactgacaatgtgaaactcgcaagaacaaatgttctctttttaacatatacagtcataaactgttcaggtaaccataacaaaactaggtgtcatttattaacgtattattcacataatgtctgatccagtatgtgcttgtcgttactttacacaatcgtgactgtgagacatgtctgcttgtgacctggtcttaccttttctccatcacattcgtacactatcgtgtgaactaccagcatttaactgataaccaatccaaaggaatattccggtggctgccacgctcctgcacggtcgacctcttaacttggctacggtcggcaaccacatgctcaccggcttaaacaccctaccttttggccccatagaaaaaccatcacttggatcccaacact

SEQ ID NO: 553522 - DNA, 442 bp, Homo sapiens
aggctgattcctggcagatgactagttacccctaataatacggtgccccgcatataggcgtaaccccgcataaaacaacataagcttctagactcttaccatcctactctcctacctcctgctacgaatctacatatagtaggaagccggagcacggaacaggtatgaacagtactaccctacccttaagacagggaaactactccactaacctgagagcctcccgtaagacctaaaccatctatctccttaacacctaagcaggtgttctcctctaatctaaaggggccatcacatttcatacaaaacaatatatcactatacaaaccccctgacataacccaataacaaaagaccctcttcgtatgatccgtcctaatcacagcagtcctactatctcctatctctaccagacagctgaccggaatttcagccgaattct

SEQ ID NO: 553523 - DNA, 655 bp, Homo sapiens
  misc_feature (479)..(479): n is a, c, g, or t
cgacttcagctcggacccacaccacctgagtccacaagggataaagggcaggataaatcctcgcaacccctgatgaaggaaataatgtatataatggtccatttccaagacaaagggcgtggaaattggcttaggtcagcaaactacagaagaaataggatatactagccctttgcttgaatagccagtgcctgcttgtcagcccccagcttctcttgccctcacctgaaccaaagaagtttagtctaaaatgaaggttttctagcctgcaaaatggctcactttttctgttcttatcagcctgcccagctacttaggtcataagtcaaatacttaaaaagcccttgagctgactaggattgcaatgcattgtaggctgcaataaaatgcagcaagacaacctaaaaaaaaacacctaaagccccaacccaacaaccaatagacaacgtccaggaagatcgtgaccccatagtactcancctgtgaggaaaggagggagggacctgtgcactagaggataaattgcttgttgtggctgtgctgggcatgcctgcccatcagacacccatcttgcaagactgtcattaaaatctcactttcgctgttctccaggtctctgagtccattctttgggtttggacggatgagtttgttt

SEQ ID NO: 553524 - DNA, 148 bp, Homo sapiens
  misc_feature (52)..(52): n is a, c, g, or t
  misc_feature (56)..(56): n is a, c, g, or t
accctaaaccaggagcctgcggcacttgctgggcctccctagctaggctacngatnccagtaccagaggagccccaaaactttgacagcctcgtgggctttgtgacggccccaggggctctgcgtggtaacaatgactgaaaaaaaaa

SEQ ID NO: 553525 - DNA, 389 bp, Homo sapiens
tggggccccccccccaaaaaaaaaggggggtttttttatttaaaaaaaaagttttttttttccccggggaaaaaaaatttttttaaaaaaagggggggggggtttttttttttggggaaaaaaaaaaatcttaaaaaaaaagggggccctttttccgcgggggagcccccccaaaaaaaaaaaaaaagggcaaagggcccctccaaaaccccaaaaaaatgggtaaaaaaaaacccgcttttttttttttaaaaggggaaaaaggggggtttttccggggggtttcccccaaaaaaaaaaaggggtcaacaaaatgtttttagtctgacaacccattcctgtcgatctcagcgggatcatagttaacgacgcacgcgtgagctcagttg

SEQ ID NO: 553526 - DNA, 150 bp, Homo sapiens
acaagacaaaataaaactcaacatctccagaagacctttcttacctttgaaaaaaaacaaaaatgaaattatgtggcatgctgctgcagcctttaagtattgtagtaactgggaattgccaatacaccgcggcaagggctacgctttttg

SEQ ID NO: 553527 - DNA, 105 bp, Homo sapiens
tcaagttctgaggatcagcactgcagtgaatcataactcttcacctgcgctgtggacactgagaacatccgccgtgtgttcaactgactgcctgtgacatcattc

SEQ ID NO: 553528 - DNA, 100 bp, Homo sapiens
caagtccactctataggatccccattttttcaactggttctgatcacatgtttggtgggggtggggatgagcaatcagagattcactttagctcttgaca

SEQ ID NO: 553529 - DNA, 714 bp, Homo sapiens
actgaacattttttttaacttgatttaataaaaatgttaattttggaaaaaaaaaaaaaaaaaaaaaaaaaaaaaaaaaaaaaaaaaaaaacaaaaaaaaaaaaaaaaaaaaaaaaaaaaaaaaaaaaaaaaaaaacaaaaacaaaaaaaaaaaaaacaaaaaaacaaaacaaaccaaaaacatatcaaaaacctaaccaaaaaaacaaaaataatctttgaccccgactgtccaccacattttccatctgcatatcccaaattaccgacacccactgccggctccaataattagaacgatccccacaactccgatgctcaaagtccattgcccaacatacctaaggacaaagccaaccaacaaatcatgacacaccgctccaactatactcccaccaccaacgtacctccagacgtaactgtcctcacgaacacccctgaaaaactgatacagcccaacgtcctcccctgattcatcgacaagatcaccccaccagttgtcattgttacacaccttcgaaatggtaaacccgccccacacgatttacacacacagtcttcctgcccaaagactacctctttaaccaaaagttccactatctaaagttcctgaccttaactcacgaccaaaaacactcccctcttgaacaaacgccgcttccaatacaccaatgctacacccccaatatcgatgcatcccctctccccaccacc

SEQ ID NO: 553530 - DNA, 502 bp, Homo sapiens
  misc_feature (465)..(465): n is a, c, g, or t
ttgagacagtctccctctgtcgcccaggctggagtgcagtggcgcgatctcggctcactgcaacctccgcctcctgggttcaagagaccctcctgcctcagcctcccgagcagctgggaccacaggtgcccaccaccacgcccggctaatttttatattttcagcagagacggggtttcgccatgttggccaggctggtctcgaactcctgatggcaagtgatctcccgcctcggctcccaaagtgctgggattacaggcgtgacaccgcccctggccgagcatattaaaatctagttttcaaaactgaactgcaggcgccgctgtaccaaacgcttccctctgctgcacaaccccagcctacagacaactggtcacttctcctacccgcagtcatcccaggacttgccagcggaaacatccttgactgatcgcactgacaccacactgacatcgagcgacgtcncgagaggagcccacgacgtcgagcggcgcaattagta

SEQ ID NO: 553531 - DNA, 271 bp, Homo sapiens
tggtaaccatgaatctattctccatcactatagttttgccttttccagaatgctgtaagtggagtcatacaatatttagcctttcagtctggcttctttctcttagcagaatgcatatgagatctctgttgggtttaccagcgcgctgctcatccctttttattgctgagaagtattccatcatgtggatgtactactgtttgtttatccattttccagtggggttgtttctgattatgaataaaggtgctataaacatttgtgcacaggt

SEQ ID NO: 553532 - DNA, 872 bp, Homo sapiens
gtgataaggccagcagtcatcccgggatgagcagtgggcctgtgccgtgctggctgtgcacctcaatcacgctgctgggagagcggcctgtgcagcaccgcgtaggtgcaggccaatgagtctgacctctttcatgagctacttcccacgggggcctcaagtaccaggaaggtggtgtggagtcagcatttcacaagatctccacaggagccccatgttgccattcaaggaaagctcgtatccatggtgagaggggaaaaagaacactcctgtgccacctgagcgggcacttgaactgaggacagcttcaacactggcggactgcttcatcctggagctgggccagaacatctttcgcctggtgtggttggacaagtccaacagtcctggaacggcaacaaggctgagagacctggccctggtcatccgggacagtgagcgaacagggctaatggcccatggtggagattgtcactggcatggggaggagagcctgtgtgaggatgatccgaggtcctgggccccaagcctgctctgaaggagggcaaccctgaggaagacctcacaggtgacaagggcaaatgccctaggccgaagcatctgtataaggtctctgatgccactggacaggataaaccttgaccaaaggttggctgactccagcccatttgccccttgagacttggctgatattctgatgacttgcttgtgtgctggacaaacggggctcttgtgggaccagatctaattatctgggaagggggccgaagaagccgaattgaaaaggagccggcagtagcctgcaggtgggcccgagggttcaaaccgcgcatgagtagccccgaaactcaggggaggaatctgctcaaggc

SEQ ID NO: 553533 - DNA, 143 bp, Homo sapiens
cgttttacaaccgttcgttgacttggtaaaacccttgcgaccttttcccacaggaaacagtttattcacttttttacttgggaaaacccctttgggcctttttccccacaaaaaccctttttattccttttttacggtgaaaa

SEQ ID NO: 553534 - DNA, 294 bp, Homo sapiens
catacctgagactagtgtgaacaataggtctactccttttctctgcttccttttagcagacaagtactttcaagccccagaggtatcaggacaaaattatgggaaagaacggtggaaacagatgtctattatttgattttagccacagaaagccacagtcttaattagtggaaccctggtgtcccatgggaggagattgtgagaaccaccaaacttgtctagtcagttccttgtcaccattgcaaaaactggcctccctacgctgtggcttactcacaattcccaggtcatgta

SEQ ID NO: 553535 - DNA, 1391 bp, Homo sapiens
gagactgcgcaaggctggggggttatgggcccgttccagtgcatgaaatgagcaatgagggcagtggatgtggagcacagggtgtggccagcgtagggtccagcacgtgtgggtgtgtaccccatgtgcctgtgtgtcagacatgggacatggcatgtggtgacacatgtgacatgagtgggtccccatgctgccacctcaacccacctgcaacttcatttatgtagcagtgcacatgtgggcatgctcctgtgcacaggcgtttctcatgtgcctattgcctgtgatgcctctgatggtgcttggatgatgctgtggaatgacatgtgcagttgctcctggtggatgtttgcagcatgggactgtacaccagtgatgggtgcgacatgctgtgcccactgtggatgtgttgtgtgcccctgtgtgaacatttgctgcatcgcaatgtggatgtgcttggcaggtgtgctctgtgcctgggctggtgcttgcctgtgtccccactgattgggcaccttgctgtggccacaaggggatcttgggtagctgtgacgaatgggtgccctagcgatgttggagaacttttgggttagacagcatagtaattgacccatacaacgcggtttccatgagcccacttggggggggcatgaggcatatggggcagtggagcatggtaaccagggcaattccccatgtgggggcatgctccaaaggggggcccatttgggcgggactggatggaacgcgatggaacataagggcggaaaggcccggtggctgtggcgccggagaagtttggacatttgcacgctccttccaagggaagggcgaacagtggattgcgcttgccaacgggccaaagtggggcagcgattgaaacggggcacggcacggcaaagccgtgtagcagccagtggtaagaaagggccggggggcaagcgggcgccaccttggtggacccccttcccaaagaaagggccccaccgggagaggccccaaaaagggggccggggtggcccatcaggcacaggtgcaccggtgcaccaacacggggaacagccccggaggggcaaactgcagtgggaatggcgccatccaagggcagggttactaccggggtgcccatggtgtaagtacactagagggtgctcccagggggggtcttcatccccaaagagacagctggagtgtaggtgtggaaacgagttgtgcccccagacaccacaaagtgtatttggcgtcgagtagtgggtgcaccaaagtagaagtgctgccagagtggtggccccgtgggtagtgatgacacacaggttgtgtaaccaacttcgactggtgggctacacttttagcacgatgtgtcgtcccacagtagattgtacacagctagt

SEQ ID NO: 553536 - DNA, 1342 bp, Homo sapiens
  misc_feature (563)..(563): n is a, c, g, or t
  misc_feature (568)..(568): n is a, c, g, or t
  misc_feature (576)..(576): n is a, c, g, or t
  misc_feature (614)..(614): n is a, c, g, or t
  misc_feature (704)..(704): n is a, c, g, or t
  misc_feature (858)..(858): n is a, c, g, or t
ttatggccgggcgcggtggctcatgcctgtaattccagcactttgggaggccgaggcaggcggatcacaaggtcaggagtttgagaccagcctgcccaatatggtgaaaccctgtctctactaaaaatacaaaaattagcctggtgtggtggcgggcacctgtagtcccagctactcaggaggctgaggcaggagaactgcttgaacccaggaggcgaagtttgcagtgagccgatatcacgccactgcactccagctgggtgacagagcaggactccgtctcaaaaaaaaaaaaaaaaaagacctgtactcagggacccaccactacacagctgtacagcaagggaaccacagtacctccttcaactcaaattgcttccccaacaacattgtcaggatgttaaataaaacaatgtttggaaaacacagtgcttcatgcgtagtaacaatgctaaatataacacttaaaatgtgcaaacctcatgatttacctaatcagcctctaaatattatataattctagcccagaaacttacattcctcagtctccaaagggagacctncacanaacaatantttactataatgtcagtttctatcagcatttcacatantcacataaataaaacttctgtatcgaatattaaactcacaagtccataggtttttaaaatatctctaatgtaaaagattcttcaacattnattataaaccattgattaacaaaaagttcctggtcaagggtggtggcttatgccttgtaatccagcacttttggaaggccgaagcaaatggatcacttgagcccacgagtttcaggacaagttgggcaacccagtaaaatctgaaacttacctntattaaaaacccaaaatttaccacgccgggtagaggaccctgaatccacgtttctaaaaggttggcatggagatcccttggcctgggaagccaggtcacacccggattttagaccaggcaacaatggggaccttgtcaaaaaaaaaataatcgcaattggggcatttgggacaattcccttatgggggggtacacaaaaagggcgcggtttacaacgcggagtggaaaacctgggtcccaatatactgttgggaaaatccctttttgccatggataaataaaagcccccccatagctcttcaaagtgcccccacgtgtcaagaatatagggatatttttaaaacgccaatatttaaaagttttttcacaagcgactggtatcctttaacagaaacacccggggtgggtggtctcttaaagactctttaaagagcccccagggggaaaatattgtggggcgcccgacccccattgtggggggggc

SEQ ID NO: 553537 - DNA, 595 bp, Homo sapiens
gcccgtctttctgaaacggaaaaaagggactaattttttccccccctaataagaggcacgaaatttcccccccccccgattatttcttccccccaccccctccccctagagtcacacacctgcacttcagcagtgtgcccatttgtctcttccccctgaaaaactgtcgtacatacaccatagggggagccactttcaaacagagtaagacaagtttctaacaggcgtcttgagaccaggttttggcagatacaaaaacacagaatcaccacacccactgattagttttcttgagtgtttcacctaatcagacaacaccttcttgacaagttcagcaactatacactttcaccgcttgtcattaatgcgcgcactgtacatcaccccctcacgtaaacagtcaagccacacttttacatatacccgcccccttgtgaataatacacgcatgcagtcattttttccaaacaaaaagtcacatacttcttcacagagtcacccacaaacttcttaaggcatggtaatacttgtaaaaggccatttatgcgtctcaatttccacccccttcaatatttcttccccctaaccacaaaac

SEQ ID NO: 553538 - DNA, 889 bp, Homo sapiens
  misc_feature (409)..(409): n is a, c, g, or t
  misc_feature (792)..(792): n is a, c, g, or t
ggatccagccagagttggaatgatgatttatttctaaatccagtactttagcgggtgaaaattctatctggacccatgaaaaatttacctgggcttagggccagagtaaacacagtttacaggaggaatgaaggctctcatgtgccaatccagttcattggtgaaattgtcagtactgtacttagacccaacatagaaaatgtggtgattctcttacctagaactgggacctgtgcgggattgttaactttattactggaccttcctgcaggagtgattatcacatatgcctatgttcagcacctgagtgatttgattttgctgcctggtcccagtctgaaggtaagattgtgattcatcactggatccagcacctcggtgatttgactcttcttttttggggaccccnaaaattttaagtattgtcaattttgggtgaatcctgcgagccatgtttatgttgactcttcccaaaatgttggctctacatgtttggttgcccatactgggggctccaatattttccccatttagaccattggtctacctattgctctgggtttaaacaacccagggtgcactgttaacttttttttctggggactgcggttgccagggggacctctgtcgacctttaactccatggtcccatcaccaattacctggtggttactcccctttctcctggcgccgggcttcggttccccgaggacacttggtggccgatttactgggctatgcttcctagggtcgagtcagatctccccctttttttccagggtcccgctattnggcgcattggccgccctttttggttggactcaacccctaggggttgcaagtttgcctactcgtgtgccgtccctaacggggacccttgtgactttta

SEQ ID NO: 553539 - DNA, 366 bp, Homo sapiens
acctgcgtgacggtcccggaagggtacgctgttacagtatagaaattcttattgtatagaacaagaggttcgccagtcatgtagctggccaccccagagggcaaggggtactggtttcgggtggtgctcagctctgaagggatgggtggaaggggaaacgttgggagaatttgcagtctgtccctcagcatgtaatcatgatccttgggagatatgtgcacagtctatccctgggattgagtggtcctaccagcgagaatggggtcatttcttggccaacatctgtcagcatccaatgaagttagcttggtcggggaaatgtgcatgtacgcgtctccacctgtgataaactacacataacaaatt

SEQ ID NO: 553540 - DNA, 751 bp, Homo sapiens
catgctagcagtggttgaacccaggtaccaataggggctagtatcacagaggcctcacgtggtgtcctcggtaattataccacctgtgcctgtgtcagagggaatgaccgggactgaaggtaccttacgactggctcatattatcaaaggaccttggctctttctagatctctagtctctcttcatatccttcatcaggtgtgttaagatgtctctgagaagccatcaaggcaaaagagaactttaagtaccatgtaccagcccggagttttgggaaagaaagaaaggaaaggtcacagtgagctaggatagggaaccttcctgccctttcggcttgcagacggccttcgtatcccagaacagctgagaaatctatgaagctgagattctgaaggacccagtgttaggttcttccagttaggcctcagttcccttccttttccaggggcggtcttagttcccatggccctgaaacacacagatttcccgcttccttgcccagaagccactggccgcccattttgccaccagtgcatcctttttacaagtggaagaactaggatggctttccaaagtcttctagaaatgaagtctttctctgtgcagctttccccttggagcggagtgagatgttcattatctgggctgggaaacacttccaggctctcctcccccacccatagacggtttgcttagttggctatgtgcttcttattcacctttgctcggaacggggcgacacagaagcacc

SEQ ID NO: 553541 - DNA, 451 bp, Homo sapiens
  misc_feature (274)..(274): n is a, c, g, or t
  misc_feature (314)..(314): n is a, c, g, or t
tcatgtactatgacagtgtaaaagcggctggtacggtcgatatccgatatgtacagcgtcgaaagaaagaaaaatgcttgtacatataggcaggcaaaaaaaaaaaagtcctgttggaaatcatatagacaaacattggcaaagctgctactgccatggtaccagtgttaaacctggtgttctacctgtgcatcttttactgatttttatgacagattttatatggtaaccattcggagaactcggtaagtgctatggcttccttaaactacgnatttatcaatatgtgctcccggggggtttaacctctgganagactgaatggcaaccagagaatgtaaacaaccaaggtgcatctgggttatgtttctaaaataaagattacataaaaacgttgggggttttctcctcgtgtgctcctttagaacccctctctccgtcgtctgtctaa

SEQ ID NO: 553542 - DNA, 477 bp, Homo sapiens
  misc_feature (426)..(426): n is a, c, g, or t
taaggttggaggggggaatgccggaaatggtacggggtttggaaactctttcatataagtaaggccagggtgaggggaggaagtttccaaaggaggggtatgagtgggtcgtagcggaatcgggggtatgcggtcgaattcataagaacggggaggttagaagtagggtctgggtgacaaaatatgtggtgtagagttcaggggagagtgcgtcatatgtggtccctaggaagattgtatgtggtgagggtgttatataataatgtggtgtatccggctatgaagaatagggcgaaggggccggcggagtataaccagaggtcgaacccggagactagtgcggacctccccttcggcaaggctcgaagggggtccggatgggcatcggcatagtggtggagataacatcatattagggccaagggntcatgatggcaggagtaaccagaggtgtccatgtgtaggacaaagggtgga

SEQ ID NO: 553543 - DNA, 1301 bp, Homo sapiens
ctccctctttttctccttcgtcggtggaggagctgtgacgtctggctatagtgttcatcgcaacgcgcggacaattttgcgcgtgtgcttgtgagtttattcggtgatgtggtgtgcgccatttacaccgcgtggcaatgtgtctgggtctcgggaacgatcgtgttggggcgtccactgttttttggcgtcaacggggaattgtttttccacccttggttctgggcaggcacacgctttcagtacggcgcgaaatttgctccgctattttctacaggcagggggaaggtttccttaagggcaactttcaaagttggactgaaatggattttcttacttcgggagcttggtctgaagatggccgtaactctcggatttagagttccgaggttacaccacagaccccgggccccagggagtcgagtatttgtttaccccccccgggacaccgaaatgttttcctggttgaagaaagggccggcggaattttcggggaactgaactgctggtaatttcacgaaaaaagggtttggctcttccacgaggcgcccattgtatgagcttttaattgcctgtacaaaggttgggccccctaggaggtttccttttgtggccacctgtggccccacggcaagagtcctcttgcgggttaccagagcgtccttatggggaggggcctttcctagtgtcgcgaagggggccctgcctattgggtgtttccctagccggttctatcacctggaggatgttggggccccaaaggcgtgtctgaaggtctcttcggtcgtcttgtgggagaatacttctgaggggaaaagaaggggctataaataccactggaagtttttgtagaatggtcgctgagttgaatccaccacgggggagagacaccctcgtgtataactattctaacgcttgaacacactgcactgttgtgcgcccacacgctgtcttggctcacgaccacgcggtgtttctgggcactcaaagcgctgatagagtcacatgtctgaccctgggaacccacaactggtataagaattggcccctatagagaagcccactgcctgagccacacgctgaggcacattgttggagaaccccacaagaatgaggatatctgcccacaccaccccccacttctcagaacacgaagggtgggaatccacgataccgcctgccaatgccccacgccacgtccccaccagcataaacacagggtctccttggcacgctgtattttctggagtctggatgttgctcttcttaagacccttttataaaattttggacaaagacca

SEQ ID NO: 553544 - DNA, 218 bp, Homo sapiens
  misc_feature (181)..(182): n is a, c, g, or t
  misc_feature (208)..(208): n is a, c, g, or t
tgcttctgtctcatcgccgccgccgctgccgctggctcgccgcggggactgcacgacagctgcccgggccaagcccgctacctcctctgggcctacacttctcgcacgatgataagagcacttttgaagaaacgtgtccatactgttgccagctgttggttctgataactctcgagtgcgnntcaaacccaaagccagttgctcagcnaagtcctgta

SEQ ID NO: 553545 - DNA, 397 bp, Homo sapiens
aaggttctcactagaactgatgttagcacagttcgacggagcaaaactatcagacgacactgtaaaattgcttactggactgaataaactctgtttagtccagataaaagggttactcttagttacaagtgttatttgtaaagtcctgtcatattcatggtcgaaactgggttgaaagcaattgaaaatggtccaacagatcagatcagataggcacacacgcctggagtggaggcagggttgtatctaagcctccaccatcagtcatgttacattcaaggggccacagtggaggaaaataaatccacaaagtagattatctaattaccatcaaaatgagtcagaagcaaaaaacaacaccctccaacagcctcttaggagtacaacctgccggtgg

SEQ ID NO: 553546 - DNA, 530 bp, Homo sapiens
cgtagagtcgagcgtgtacgcgtcttgcttggtgtgctctgctgttatcatcgtcgctactgtgaaaatccgtggcgttgcatactgcattaggtacatccctgagaacgcattgtacgtacattgattgctttcgccagtgtgatgatctggaatgcgaccggagcacattgttctgaagaatcccaggatgagtctgtcgagggaagaatccggtcatagcctcccctctgagaccggcctcagatcgagggcagtccattatctgtcgcatacatctgtcatgtccctgagattgcgggaggcagagggatgcatggatgtccacatctgtcccgggtgagaagcaaggctagctctgccttccacatgcttctcaggatgccaagaggcctaggaacccagaaacccccttggaggagctgtgtatgcgggggtgccaggaagggcatagctcctgcccccaggcctaggcatgctgcttgctcggacatccccacttcctcctcttacccaacacatgcaggcta

SEQ ID NO: 553547 - DNA, 1290 bp, Homo sapiens
ggcccctggatgcgtccccgatctctcttcgtgtggagaccgatggggcgggtgtcacggtcaggagggtgctcatgcgtggaagtgaatgctgcgcctgcgattctgctgactgtccgatgcgccagcccatgtgatgaaccctgcatatgccatgctgtgacgcctgtttctcgtgtgctgattcgtgtgatgtgaaacatcgcaatcttgttttcgcactgtggtttcctcatgtaggaatgacgagacgacagttgtgtgagcacaacttgaacttgatgtgacacgacacgcctacatcacattgacgtgtgtctctaactgtctccaacgtggtgcagcagtgcattcaacttgacctgtctatgcttacctcttgggaatatgacacagcatgtacgaaggcacgcgcactgacgacaacgcgcacaacgggcacccaaggccacctgcaccagggctccaatcgggtcatcacgacctaccacgcacggcaaggggaatgacaggcccaacctttgcctcgcgggcgacaccttaagcccgcgtgctcgccttgctgctccacacattgggcacgcaacggaccgtgggctaccactaccaggtgtgaagtatcgccttatacaccacggtgaatcgccccttaccagaaacaccacgacgataccgcctaacgttaactatccctcatcacgatacccattgcaactactataaccaaccgcacctcgcagcgcaaatgagaagagattggcacgaggccacaacgcggtacagaagcgccgattacccaatccatgatcggcactctgcgtcgctgcatgtgccatttggtcaagttcactctgcgccattaagtcccgctgttcctatgcgctcccattcgcaccacttggcgtccccgtagggctggagtatacatcgacgatgcgatagagttggtgactacgcgcaaaacagtcaatgcagatgggcactaacaacgcaacgcaacaagagagtgaacattggacagagacgcaacagacaacacaacagtcagcgcaacagaccacgcaatgagacacgaccacgatgggcatgagcgctcgacaaaggaatccttacctgccccaaagctacctgaggaacgcttgggcccccaggagcaagcgcaccaccagaacacaggcccaagggtacagcaccagcataaagcttacaaccactaggggactagatgtcgaccgccacgactacatctgagggcggcatcaccacagatcagatgggcataactacgcc

SEQ ID NO: 553548 - DNA, 1073 bp, Homo sapiens
gccaaccccacacacaccacaccacgctccccgccacgcccatgcactagtgacctatagacccgtggtttaacaccagcacgtgatggtactggtccggttataacctgaggcatatcagtcgacccacgctgtactggcaacattagaagatataaaaattttgccaggtgcattgtgttcacacctgtaatcccagacgcgtttgtgaatgaccaatggtgtggaggattgcttgagcccagtgcatttgaaaccagccctggacaacgtgatgaaaccctttctctaccaaaaaataaaaatacaaacaaagaaagagtgtgtgaaaaatttagccgcggggcggtgggtggtatgtggtgccgtgttggttcccagccgtggtgtgggaacggggcgtggtggtgtgaagagaggtatgaaattcaaaccccccaatggaaggtttcaaacgcctgtgccgatggtagacacctccagtggtctcagcaactctacacttgtccactctcctcagaccttgtgagatatgaacaagaaagacaagatcacccttgagcactctcctataaaagaacacaatacacagagtgacagaacctctctctctcaccacagagtgtctccccctacccctttttacaccatatcatttacacacaagatatcagcgtgtatctatcctctcttctcactgtttatatgtcacagcgtgccattattttggctcccccactctatcatttcgaaccgcccccaggagatcaaaaccaaatacccgccactcttcgacgacaacttacctctacacacacaaacacaataccatacgacactatacaacacacaaccattctctaatatacaaataccacatcttccaaaaaaaaaaacccccctattctcataccacgaatccttatcatcccaacaatactcttctatgtcgacaaaacaacacctaccacatcttctaaacccattatgtagccccccacaaaacatctcccattcccacaaaccccccatcacaaacaccctgtgaccacaccccatatatattcccccta

SEQ ID NO: 553549 - DNA, 137 bp, Homo sapiens
catcatgtaaacaggaattattcccattgcttgtttttagtcaggtatgtcaaagatgatgattgtaggtgtgcggtcttatttctgggttccctattctgttcccagtctgtgtgtgaaaaagtgttgggcgataa

SEQ ID NO: 553550 - DNA, 109 bp, Homo sapiens
gaatatagatgacacgagggagaacggccctatactctgaaacattcgaaggtcaccaggtataagaggagagggcgatgtggccaggcgcggcgaggaccacaaagcc

SEQ ID NO: 553551 - DNA, 114 bp, Homo sapiens
gtaaagttcagcactcttttccttatcaggatctttcacactagtcctctattcctagtcactgtatagctgctcatctattacctccccgccctatctgatcggtcttctcgc

SEQ ID NO: 553552 - DNA, 268 bp, Homo sapiens
atgtggttgttactgctttcattcagattgcaggcgtttcattgttactaatgttggggttgtttcatcgtaatcagagaatactgtctataaccttttaacttctgggacatacattcaggtttcctttgagggctcatgtaagatattagttcagggatatttaaaatgaagctatgttccccattattagagaccacttgctacatcttctagaattacttcttaataacataatcaaggccttctatatcatagttattgaacc

SEQ ID NO: 553553 - DNA, 313 bp, Homo sapiens
gtaaaaactaactccttttcacaaagtggaagttaccagaatgtgatttcagaggccccgggggatttatcatgtgaggggtggggggggggggttgtggtgtggggtggttggggtgtgatgtggtgggggggtggtgcggggggggggggaggggtgagggggtggtgggggggggtgtggtgtgcgaggtgagggggggttggtgtgagggttgcgcgggggtgagcaagatttggactgtgatgttggttgttctccactctttctacaggacagaacagggcctctagagtgggaaatggcttttggg

SEQ ID NO: 553554 - DNA, 979 bp, Homo sapiens
  misc_feature (42)..(42): n is a, c, g, or t
  misc_feature (843)..(843): n is a, c, g, or t
  misc_feature (928)..(928): n is a, c, g, or t
  misc_feature (961)..(961): n is a, c, g, or t
cgtaggctacctatgaggactccggacagcacagaggaggcnggaagcgcgcggagaccatgtagtgagaccctcgcgaggtctgagagtcactggagctaccagaagcatcatggggccctggggagagccagagctcctggtgtggcgccccgagtgcggtagcttcagagcctccagtgcctgtggggctggaggtgaagttgggggccctggtgctgctgctggtgctcaccctcctctgcagcctggtgcccatctgtgtgctgcgccggccaggagctaaccatgaaggctcagcttcccgccagaaagccctgagcctagtaagctgtttcgcggggggcgtctttttggccacttgtctcctggacctgctgcctgactacctggctgccatagatgaggccctggcagccttgcacgtgacgctccagttcccactgcaagagttcatcctggccatgggcttcttcctggtcctggtgatggagcagatcacactggcttacaaggagcagtcagggccgtcacctctggaggaaacaagggctctgctgggaacagtgaatggtgggccgcagcattggcatgatgggccaggggtcccacaggcgagtggagccccagcaaccccctcagccttgcgtgcctgtgtactggtgttctccctggccctccactccgtgttcgatgggctggcggtagggctgcagcgaagaccgggctcgggccatggagctgtgcctggctttgctgctccacaagggcatcctggctgtcagcctgtccctgcggctgttgcagagccaccttagggcacaggttggtggctggctgtgngatcctcttctcatgcatgacacctctaggcatcgggctgggtgcagctctggcagagtcggcaggacctctgcaccagctggcncagtctgtgctagagggcatggcagctggcacntttctctatatcaccttt

SEQ ID NO: 553555 - DNA, 112 bp, Homo sapiens
actctaaggatccgcgtggtcagcaatctctgcctgggttccaaagtgcaggatacaggcgtagcctgtgctcaaagttctatttcttgtctgcaggaaccacgcggctacc

SEQ ID NO: 553556 - DNA, 293 bp, Homo sapiens
aatgataaatcgagctctgtacccgtaacattcgtgtccagtcaatacacaccaacacaacaatcatgtcactcacacacaacacactcatatgatcatacacacactcacatacaacgacatctcatgtacactcattacagctcacattcacatatgttcatacgcaatatcctcatgtacacttacactcacactataacactatacacacacagcactcaacacactacacacacactcatgtactctcacacataacattacacacacaggacacgaatgttcagggc

SEQ ID NO: 553557 - DNA, 207 bp, Homo sapiens
  misc_feature (197)..(197): n is a, c, g, or t
  misc_feature (204)..(206): n is a, c, g, or t
ggggggggggggaaacccttttttaaaaaaaaaacccccccaaattggaaaaaacctggggccccaaaaaaaaaaaaaaaccccttaaaaaccccggggaaaaaatttttttaaaaaaaaaatttttgggaattttttaaaaaaaaaaaaaaaatttttttttttaaaagtttaaaaaaaaaaaaattggggggggnccccttnnna

SEQ ID NO: 553558 - DNA, 374 bp, Homo sapiens
  misc_feature (169)..(169): n is a, c, g, or t
  misc_feature (321)..(321): n is a, c, g, or t
cgccagagcactgtatggcaggcccccatggaggatcaacgcagtggctgaacaccgggaaggaacgggcacttggagtctggacatctaaaacttgagtcattctctatagacagagcatcgagaaggcaagaatgaaaaaaagaatctctctaatgttcagggcccnctgaagccccaagctaagccatcataaccctgtgacctgcgacatatacatccagatggcctgaagcaactgaagaaccataaacgtgaaatagccagttcctgccttaactgatgacattccaccattgtgatttgtgcctgcgtccaccnctaactggatcaattggatcttgtgacattccttctcctggacaatgagtctt

SEQ ID NO: 553559 - DNA, 187 bp, Homo sapiens
agtatggatgtaagggatagtgcttatctttacgagctgtggagttcttaaatatcaaccatggcactttctcctgaccccttccctaggggaattcaggatcgagaaattttccatcgagccttattaaaatagtaggactagtacctgtgggcttcagtgatgggatagtacacttcactcagag

SEQ ID NO: 553560 - DNA, 111 bp, Homo sapiens
ccaagacggagtctcgctctgttgtccagatggtgcagtggccaatctcggcccagtgcaacctccgcctcggggattcaagcaagagtcccccctctagcacctcagtcc

SEQ ID NO: 553561 - DNA, 830 bp, Homo sapiens
  misc_feature (15)..(15): n is a, c, g, or t
  misc_feature (76)..(77): n is a, c, g, or t
  misc_feature (129)..(129): n is a, c, g, or t
  misc_feature (132)..(133): n is a, c, g, or t
  misc_feature (140)..(140): n is a, c, g, or t
  misc_feature (148)..(148): n is a, c, g, or t
  misc_feature (158)..(158): n is a, c, g, or t
  misc_feature (162)..(162): n is a, c, g, or t
  misc_feature (165)..(165): n is a, c, g, or t
  misc_feature (226)..(226): n is a, c, g, or t
  misc_feature (231)..(231): n is a, c, g, or t
  misc_feature (233)..(233): n is a, c, g, or t
  misc_feature (235)..(235): n is a, c, g, or t
  misc_feature (238)..(238): n is a, c, g, or t
  misc_feature (241)..(241): n is a, c, g, or t
  misc_feature (246)..(247): n is a, c, g, or t
  misc_feature (249)..(249): n is a, c, g, or t
  misc_feature (298)..(298): n is a, c, g, or t
  misc_feature (311)..(311): n is a, c, g, or t
  misc_feature (336)..(336): n is a, c, g, or t
  misc_feature (348)..(348): n is a, c, g, or t
  misc_feature (352)..(352): n is a, c, g, or t
  misc_feature (365)..(365): n is a, c, g, or t
  misc_feature (367)..(367): n is a, c, g, or t
  misc_feature (371)..(371): n is a, c, g, or t
  misc_feature (376)..(376): n is a, c, g, or t
  misc_feature (428)..(428): n is a, c, g, or t
  misc_feature (432)..(432): n is a, c, g, or t
  misc_feature (437)..(437): n is a, c, g, or t
  misc_feature (442)..(442): n is a, c, g, or t
  misc_feature (458)..(458): n is a, c, g, or t
  misc_feature (638)..(638): n is a, c, g, or t
  misc_feature (673)..(673): n is a, c, g, or t
  misc_feature (678)..(678): n is a, c, g, or t
  misc_feature (683)..(683): n is a, c, g, or t
  misc_feature (687)..(687): n is a, c, g, or t
  misc_feature (725)..(725): n is a, c, g, or t
  misc_feature (741)..(741): n is a, c, g, or t
  misc_feature (825)..(825): n is a, c, g, or t
gggctcatttgttanctgttttgcgcacatcaaagctgccacagggtcctcgcagcagctctgccagtagcgcaanngctgcccgtgctcctcctgtacgctggggggaagtgcagccagctcgctgcncannctccgcnccaccatncggcccaggncccnccncagctccttcagcagccgcacggtacgcgagtcaccctccagccgcagcaggtcactgtcnctcantnanatngtngcccnncncccgtcatcacggatgtgcacgtccccgtcggtcagcagcagcacagcnagcgggtgcaccngagaggagtcccggacgaagacgcngccattggactngacngccaggaaagacngnagcnagccncgcccgaaccggggggccgcccggggaaggggcgacgggggccagagcgcangcgngcccngcagnggcgcgccgagaggcngcaagcaggcgggcgcgcaggcaaaggaaaaggcaagcgcgcggcaaagggcaaaggcaagacaaaggccaggcaaccgggcccccgagcagccaacccaaagaaacaaagcaaagggaaaaaagcagaaaggaaggaaggaaaggcggaagagcgggcaaaggccgcagccacgcaaancccggcaacgaagcaccccagggaaaaaaaaaacncaacncaagnaagnaaaggcggagaggcagcaaaggcagggcaggcacgaancggccaggcaaacacnaaccaggccccggcacgaaaacaacccgggggaagaaaaccgaaaggagaaaaccccacaggcacccgaaggcaaaaagcaacnaaaag

SEQ ID NO: 553562 - DNA, 187 bp, Homo sapiens
actcatgcagcagtcctacaacaccttcaagtactactcccactttctcttcaaagtggtgaccaagctggtgaaccgcgctaccagccccacctggaggactttctctgcgcatcaacttcaacaactactaccaggaccctgaggctgctctgcgggggacgtgcacaataaaggagttctcgga

SEQ ID NO: 553563 - DNA, 412 bp, Homo sapiens
acagtgcgtcctgttaggtactggctttcacatcatactattagagaggtctgtacccacccaggctgcacggaagacgagagacatgcggacctcctgagcaaagctgagactagtactgaatactacatagatgaccaactctcagaaactaccagctgaccaaaaaaattacgatatccaccactgtgagcagactggcgaaacaagatccaggccctccaatatctccttcaggcagctggagagctatcccccgcacctcaagcacctataacgagtgaccataccggatataacttcagaccgtggactgtggatataaaggtcaaagccactgcatctgaccaacaggttgacgtgatacctcctatagcgagcacaagtaacatccaggacgccagctaagccc

SEQ ID NO: 553564 - DNA, 116 bp, Homo sapiens
agtgttacattctgaattacttaatgtacattctgtgggcattgctgtttgcatttctggccgtctccctggtacgtgtatttgcaccatatgcttgcggctctggcatacctgag

SEQ ID NO: 553565 - DNA, 118 bp, Homo sapiens
cttctagctcggtaccccacaccacctgagtctacaccacctgagtcgcaggcacatacttcctattctacaccctagtaggctcccttcccctactcatcgcactaatttacactca

SEQ ID NO: 553566 - DNA, 251 bp, Homo sapiens
  misc_feature (9)..(9): n is a, c, g, or t
  misc_feature (12)..(12): n is a, c, g, or t
  misc_feature (14)..(14): n is a, c, g, or t
  misc_feature (16)..(16): n is a, c, g, or t
  misc_feature (20)..(20): n is a, c, g, or t
  misc_feature (90)..(90): n is a, c, g, or t
gatagaatngancngntacnctcgcgacgtgtatccctcgcgaacgtgttatccctcgcgaacgtgttatccctcgcgaacgtgttatcnctcgcgaacgtgttatccctcgcgaacgtgttatccctcgcgaacgtgttatccctcgcgaacgtgttatccctcgcgaacgtgttatccctcgcgaacgtgttatctctcgcgaacgtgttatcctcagttagacaaggtagagccgaggggtaccgagc

SEQ ID NO: 553567 - DNA, 272 bp, Homo sapiens
gatcgtcctcaccctgtctcctcacctgtcgtccaagaagggcaggggaccctgagaagacaattttctgatactgaccatgaccttatagagacagattccaaagacggggcctccacatcccttagaagaggtactacagattttcaaagcgaaaaattagattcaacaagctcattccccatcctcggtcattcttaccttgtcacttcacctgtcaaccaagaaagaggggaccctgagaagaggattctctgatactgacaatgatc

SEQ ID NO: 553568 - DNA, 268 bp, Homo sapiens
  misc_feature (9)..(9): n is a, c, g, or t
  misc_feature (12)..(12): n is a, c, g, or t
  misc_feature (14)..(14): n is a, c, g, or t
  misc_feature (16)..(16): n is a, c, g, or t
  misc_feature (20)..(20): n is a, c, g, or t
  misc_feature (90)..(90): n is a, c, g, or t
  misc_feature (224)..(224): n is a, c, g, or t
  misc_feature (229)..(229): n is a, c, g, or t
gatagaatngancngntacnctcgcgacgtgtatccctcgcgaacgtgttatccctcgcgaacgtgttatccctcgcgaacgtgttatcnctcgcgaacgtgttatccctcgcgaacgtgttatccctcgcgaacgtgttatccctcgcgaacgtgttatccctcgcgaacgtgttatccctcgcgaacgtgttatctctcgcgaacgtgttatcctcctctcntcacntggataacacgttcgcgagggtaacgagctcgaatcgta

SEQ ID NO: 553569 - DNA, 883 bp, Homo sapiens
  misc_feature (54)..(54): n is a, c, g, or t
  misc_feature (76)..(76): n is a, c, g, or t
  misc_feature (85)..(85): n is a, c, g, or t
catttagcccaacaagaagcacagcactttgaaaagtcaaataggcctttggtngctctgtacatttgcaattttncatttgttnttagtttatagcactaataacacttcagtcgtgaatctacagtctcaatatgataagtcttagaacatgttctagaaatagtggtaccttgctgctattatacttagtaacttataccccaatataataataagtattaaatacagattgtgtatgcattctttgtgtgtatatgccaactgtactacttaacctcactgatgagcaattagaaaaatacacaaattgtcatagtgaaaataagtcttggtcaattcagatgatacgtgaacctgataaatgctctaatagatatgctattttgtcctgtattgcttgttttacagtatggtgcatgttgtttgctaagtaaaatgataataataataaagtataccaattttaaggttagaattaaaattttgcacatatgcttcttgatattctgaaatgtattctgtggcttaattatcttattcatacacatttcacttggctttttacccctaggaaataattgtccaagtatatatctcgtcttctttcttgtaactttgattaaactgcttacttcaacttacaacattgtaaagccagaatacctcattttaacagtgaaaaaaaatatgatgacctgatgtgttctcttgtatttgatttgaactacctaaataggcttaactgtaataataaatatacaattttggcaggcattttttcctttgtttggatgaacattttgttattggtccacttctaattttgtcttaaagagttataaactcagtgtcaataaaacatcttgttatataataaaaa

SEQ ID NO: 553570 - DNA, 804 bp, Homo sapiens
  misc_feature (337)..(337): n is a, c, g, or t
  misc_feature (531)..(531): n is a, c, g, or t
agcggctgttgaactctatgagtatggttttcgcctgtcttccttctaccccatggcagctgtgggaagcagtggctcagagccaaagtctcttggttaatcgtatagctctaccaagtactacgacgtagataatctgttcaaaatgtgtatgaggtgagctgatggaggctacctgagaaggtcataagttacattccagacagtcatggcttatgtgcagaggtcgctatgtagaaccgcttagatattagatagtcagtgcgtgaatagtcacaaaggcaacttgaccacttctgtatcacagaatactgctgataactatcttccactgttngtcttgcgaatcacaccattaccaagcatttctggcactggtggtagataattatgaccgcatcgagtgtggattctctaataagctatttatagagtgcattcgagatgtgatgttaccgcgatggatatggggtaaaactgatgacaagaagagtgcatatgaatgcaatgttatgttacactagtctgagntgtgattacatttgcggttgatgatagttggttgtagtccagggagaggtcgtggggtcagttcaactccactagaaatgatttttcgcttgtttctacagatggctccttcgtgggctctgtgtaggattagagtgtccatttagtagaacaaatagaccttgctatatccttgcatggaggtttagcacctttccttggtgacattctagctgagtctgcaatacttacttcccagatgaggcctagagaaaatcctcagaatttcatgga

SEQ ID NO: 553571 - DNA, 380 bp, Homo sapiens
  misc_feature (9)..(9): n is a, c, g, or t
  misc_feature (12)..(12): n is a, c, g, or t
  misc_feature (14)..(14): n is a, c, g, or t
  misc_feature (16)..(16): n is a, c, g, or t
  misc_feature (20)..(20): n is a, c, g, or t
  misc_feature (90)..(90): n is a, c, g, or t
gatagaatngancngntacnctcgcgacgtgtatccctcgcgaacgtgttatccctcgcgaacgtgttatccctcgcgaacgtgttatcnctcgcgaacgtgttatccctcgcgaacgtgttatccctcgcgaacgtgttatccctcgcgaacgtgttatccctcgcgaacgtgttatccctcgcgaacgtgttatctctcgcgaacgtgttatcctcatgtcctactagtatcatttctttcttgacggacataaggataacagttatttattaggatgtgacaccagacgacgtacgtaccttacacctgattacggttttcttctactttcactgttatctgtgaccactacaacgcccatgctacgacacagactg

SEQ ID NO: 553572 - DNA, 872 bp, Homo sapiens
  misc_feature (54)..(54): n is a, c, g, or t
  misc_feature (76)..(76): n is a, c, g, or t
  misc_feature (85)..(85): n is a, c, g, or t
catttagcccaacaagaagcacagcactttgaaaagtcaaataggcctttggtngctctgtacatttgcaattttncatttgttnttagtttatagcactaataacacttcagtcgtgaatctacagtctcaatatgataagtcttagaacatgttctagaaatagtggtaccttgctgctattatacttagtaacttataccccaatataataataagtattaaatacagattgtgtatgcattctttgtgtgtatatgccaactgtactacttaacctcactgatgagcaattagaaaaatacacaaattgtcatagtgaaaataagtcttggtcaattcagatgatacgtgaacctgataaatgctctaatagatatgctattttgtcctgtattgcttgttttacagtatggtgcatgttgtttgctaagtaaaatgataataataataaagtataccaattttaaggttagaattaaaattttgcacatatgcttcttgatattctgaaatgtattctgtggcttaattatcttattcatacacatttcacttggctttttacccctaggaaataattgtccaagtatatatctcgtcttctttcttgtaactttgattaaactgcttacttcaacttacaacattgtaaagccagaatacctcattttaacagtgaaaaaaaatatgatgacctgatgtgttctcttgtatttgatttgaactacctaaataggcttaactgtaataataaatatacaattttggcaggcattttttcctttgtttggatgaacattttgttattggtccactttttttttttttttttttatttttattttttttttttttaatttttttttttt

SEQ ID NO: 553573 - DNA, 249 bp, Homo sapiens
  misc_feature (214)..(214): n is a, c, g, or t
  misc_feature (223)..(223): n is a, c, g, or t
ggtagttacccatatcattcatgcgtggtcgtagctttttgctagtgtgaacaagtgagagaagaaaatttgccagatgaaaatgaagagcaaaaacaaagtaatcaaaagcaagagaatacagaagtggaggaacatttggtgatggcaggaaatccagaccagcaggaggacaatgttgatgaacagtaccaggaagaggcagaagaggagnttcaggaanatttgtaagaaaaaagggcaaaaaaa

SEQ ID NO: 553574 - DNA, 160 bp, Homo sapiens
gagggagcagggccctagccaggaccggtaccctatcctctaggatccagaccttgttttggaggcttgttcttaacttttggcgcatgtgtttcgagtttctctatttttaagatgttgaaggcctattgtaccgtttgattttttttattgtttgtga

SEQ ID NO: 553575 - DNA, 185 bp, Homo sapiens
tggggaaacaaggccccccagggcaaactgcccatggccctggggttttggcccctgtgggttcaaaacaaggcccacccttcccctggaagtgggggcccaaaattaaagggggcccatttaaaggtttaggcaaagggggaaaccaaattaccctccaaaataaaggcccctgggctttttta

SEQ ID NO: 553576 - DNA, 108 bp, Homo sapiens
tgacagagcaagactccatctcaaaaagaaaaaatatacaaagaaagaagtataaaacaatataatgcctaacaaagaacaacccttaacaatagcagggtacaacca

SEQ ID NO: 553577 - DNA, 211 bp, Homo sapiens
  misc_feature (9)..(9): n is a, c, g, or t
  misc_feature (12)..(12): n is a, c, g, or t
  misc_feature (14)..(14): n is a, c, g, or t
  misc_feature (16)..(16): n is a, c, g, or t
  misc_feature (20)..(20): n is a, c, g, or t
  misc_feature (90)..(90): n is a, c, g, or t
gatagaatngancngntacnctcgcgacgtgtatccctcgcgaacgtgttatccctcgcgaacgtgttatccctcgcgaacgtgttatcnctcgcgaacgtgttatccctcgcgaacgtgttatccctcgcgaacgtgttatccctcggctctaccttgtctgatctgaggtcgcggataacacgttcgcgaggggtatcctctagagatc

SEQ ID NO: 553578 - DNA, 204 bp, Homo sapiens
  misc_feature (9)..(9): n is a, c, g, or t
  misc_feature (12)..(12): n is a, c, g, or t
  misc_feature (14)..(14): n is a, c, g, or t
  misc_feature (16)..(16): n is a, c, g, or t
  misc_feature (20)..(20): n is a, c, g, or t
  misc_feature (90)..(90): n is a, c, g, or t
gatagaatngancngntacnctcgcgacgtgtatccctcgcgaacgtgttatccctcgcgaacgtgttatccctcgcgaacgtgttatcnctcgcgaacgtgttatccctcgcgaacgtgttatccctcgcgaacgtgttatcctgcctccattccccagttcggtcgcccttctatgatacacttcgcaggggatcacagagc

SEQ ID NO: 553579 - DNA, 117 bp, Homo sapiens
ggagggaagtagctccgaacaggaagaggacgaaaaaaataaccgtccgcgacgccgagacaaaccggacccgcaactactaggaacaggaggggtcaatatccaacacagccaacc

SEQ ID NO: 553580 - DNA, 619 bp, Homo sapiens
ttaataatacctttaaagttctcactagttaattactttatcaattcaaaggccattatatattatcttaatatgaaaaagtttaaaatattttattataaatataagttggaaattctttatataattattgaacatggaaaatatgtaaaaatacaagcagaattttgtggctgaaaagagccatttaggtattcagtgatgtactatatagcataatattctaattcagtagactaaaggtccaaataactttgttctaatttaaattattcatggactaattatttgcctttgggtacatcttggggtataatttattaatccataaaattaggttaatataagttggtgaaaacataattgtggttttcacaatattgaaatttgccatttgatattggaatacattcttaaattttggttatattatacatcattttaatgtgcatttcttgctcttttttttgctaatgacttattacttgctgcttgcttcatatttatttttatgacaatgatcttatacctccagcacgttttggctgattccctaattcaggcccactcggccttaccgcgcggccccaccttatcacaccccctgccttcggccccc

SEQ ID NO: 553581 - DNA, 2110 bp, Homo sapiens
  misc_feature (257)..(257): n is a, c, g, or t
  misc_feature (799)..(799): n is a, c, g, or t
  misc_feature (801)..(801): n is a, c, g, or t
  misc_feature (803)..(805): n is a, c, g, or t
  misc_feature (2075)..(2075): n is a, c, g, or t
  misc_feature (2084)..(2084): n is a, c, g, or t
aggcaagatttcaatagcagatacagtgcactgaatgtccaacatcagatgttgaaaagccaacacgaggagctaaagaaacagcacagtgacttggaagaggaacatcgcaaacaaggggaagacttcagtagaacatttaatgaccataagcaaaaatacttgcagctccagcaagaaaaagaacaagaactttctaagctaaaagagactgtatacaatttgagagaagagaatagacaactaaggaaagcacnccaagacatacatacacagcttcaagatgtcaaggtaaaagaaaaccaaacgtttcactatttagtgtttgcctgctttatttggtagaatgactttaaaaagtcattccctaattggcctgctttacaaatccacgttgttattgtgggctttgcattaactagagtgtacctaatatttttaccacttcagcattgtaagctaaaagatggtctgaaaatctgaatattctcattagtactgaaattattctcatgctagttacatattaataagcttttatttataaaagtttactaataatgagaaatttgtttctttggttttgatttcattgtaaataaatgattatgatatttgggtagcacgttttagattttggaatactacataaagcgtagtgttctctctacgatgatttttaaacttaacacatgctgctacaacaacaaataaacaagcaagtaacatttgggtagccatatcacgatcagccaaagaagaatttgtcgtagaatgttaaagctcaacatgtaaaatncntnnntgtgtcaagcaacagcataagaatttactctccgagcatgaacaacttgtagtgactttggaagaccacaagagtgcactagctgctgcacagactcaagttgcagaatataaacaactgaaagatactctgaataggattccaagccttcgaaaacctgatccagcagaacagcaaaatgtgacccaggtggcacattctccacaaggttacaacacagcaagggagaagccaacccgagaggtgcaggaggtgtctcgaaataatgatgtgtggcagaaccatgaagcagttcctggaagagcagaagacacaaaactctatgctcccacccataaggaggcagaatttcaggctcccccagagccaatccaacaagaagtggaacgcagagaacctgaggagcatcaggtggaagaggagcacagaaaggccctggaggaggaagaaatggagcaggtcgggcaagcagaacatcttgaggaggaacacgatccatcaccagaggagcaggatcgggagtggaaagagcagcatgagcaacgagaagcagccaacctcctggaagggcacgcgcgtgctgaggtgtacccttcagccaagccaatgatcaaattccaatcaccctatgaggaacagttggaacagcagagactggcagtgcagcaggtggaggaggcccagcagctgcgggaacaccaggaagctttgcaccagcagaggctgcaggggcacttactacggcagcaggaacagcagcagcagcaggtggcaagagagatggccctgcagaggcaggctgagcttgaggagggccggccgcagcaccaggagcagctccggcagcaagctcattatgatgctatggataatgatatcgttcagggagcagaggaccagggaatccaaggagaggaaggagcctatgaaagagacaaccagcaccaagatgaagcagaaggagatccaggtaatagacatgagcctcgtgaacaaggaccccgagaagccgacccagaatctgaggcagatagggcagctgtagaagatataaacccagcagatgaccctaataatcaaggtgaggatgaatttgaagaagccgagcaagtgagagaagaaaatttgccagatgaaaatgaagagcaaaaacaaagtaatcaaaagcaagagaatacagaagtggaggaacatttggtgatggcaggaaatccagaccagcaggaggacaatgttgatgaacagtaccaggaagaggcagaagaggagnttcaggaanatttgtaagaaaaaagggcaaaaaaa

SEQ ID NO: 553582 - DNA, 883 bp, Homo sapiens
aggaattacagatgctgacaatactgtgggaacctggagaaaattaagatgtccagaattgattgaagcgttcttaactctcagaaagctggtgaagaaagaagcatggttacaaaaggaagaatcttgatctgacgagatgaatcctgatgacagggaaatcaaagaaagtagaagagatgcttgctgtacagaactcgaagaggtattttgccagagggtcgtgtgatccttggaaaagatttaatgtgggttgccaaaggaagagctagtggtaggaatctggaggttcctcgatgaacatgggcaagagtattcagatgaaggcagactatgggtgctgggggaaagaggcaaattatgattgtgtcctcaaattttgtaatggtgctttagatgagagatgagactaagtgtgtggattctatgtccaggaagatgaaagctctattacactgtgttcacattttgtgcttgtgatatatatttcatatatatactaagaactggggtctgagattttgatttacctagtgtgactagatttaacctacttcctaggtgaacaatccacgttgtgatatgtgggtctgaaaagtacgcgtggaaagagttgccgaggcggtgaagcatcctgtaggacatggttatctttgaagcgactaaagtaaagagctttgtggaagtggcttccctttattcctaaaaggaaggtttggtacccgtggtacttgtcatggcccctttcggtaaggaacagcgttcctcaatgtggaggaaggcacagcatagtctgtcaaatgtggtgaaaggggcaagggcacactaagttttaacagttaggggggctccacatttccaccaaaaatgtaatccgaattaa

SEQ ID NO: 553583 - DNA, 1503 bp, Homo sapiens
  misc_feature (257)..(257): n is a, c, g, or t
  misc_feature (1468)..(1468): n is a, c, g, or t
  misc_feature (1477)..(1477): n is a, c, g, or t
aggcaagatttcaatagcagatacagtgcactgaatgtccaacatcagatgttgaaaagccaacacgaggagctaaagaaacagcacagtgacttggaagaggaacatcgcaaacaaggggaagacttcagtagaacatttaatgaccataagcaaaaatacttgcagctccagcaagaaaaagaacaagaactttctaagctaaaagagactgtatacaatttgagagaagagaatagacaactaaggaaagcacnccaagacatacatacacagcttcaagatgtcaagactcaagttgcagaatataaacaactgaaagatactctgaataggattccaagccttcgaaaacctgatccagcagaacagcaaaatgtgacccaggtggcacattctccacaaggttacaacacagcaagggagaagccaacccgagaggtgcaggaggtgtctcgaaataatgatgtgtggcagaaccatgaagcagttcctggaagagcagaagacacaaaactctatgctcccacccataaggaggcagaatttcaggctcccccagagccaatccaacaagaagtggaacgcagagaacctgaggagcatcaggtggaagaggagcacagaaaggccctggaggaggaagaaatggagcaggtcgggcaagcagaacatcttgaggaggaacacgatccatcaccagaggagcaggatcgggagtggaaagagcagcatgagcaacgagaagcagccaacctcctggaagggcacgcgcgtgctgaggtgtacccttcagccaagccaatgatcaaattccaatcaccctatgaggaacagttggaacagcagagactggcagtgcagcaggtggaggaggcccagcagctgcgggaacaccaggaagctttgcaccagcagaggctgcaggggcacttactacggcagcaggaacagcagcagcagcaggtggcaagagagatggccctgcagaggcaggctgagcttgaggagggccggccgcagcaccaggagcagctccggcagcaagctcattatgatgctatggataatgatatcgttcagggagcagaggaccagggaatccaaggagaggaaggagcctatgaaagagacaaccagcaccaagatgaagcagaaggagatccaggtaatagacatgagcctcgtgaacaaggaccccgagaagccgacccagaatctgaggcagatagggcagctgtagaagatataaacccagcagatgaccctaataatcaaggtgaggatgaatttgaagaagccgagcaagtgagagaagaaaatttgccagatgaaaatgaagagcaaaaacaaagtaatcaaaagcaagagaatacagaagtggaggaacatttggtgatggcaggaaatccagaccagcaggaggacaatgttgatgaacagtaccaggaagaggcagaagaggagnttcaggaanatttgtaagaaaaaagggcaaaaaaa

SEQ ID NO: 553584 - DNA, 1783 bp, Homo sapiens
  misc_feature (257)..(257): n is a, c, g, or t
  misc_feature (799)..(799): n is a, c, g, or t
  misc_feature (801)..(801): n is a, c, g, or t
  misc_feature (803)..(805): n is a, c, g, or t
aggcaagatttcaatagcagatacagtgcactgaatgtccaacatcagatgttgaaaagccaacacgaggagctaaagaaacagcacagtgacttggaagaggaacatcgcaaacaaggggaagacttcagtagaacatttaatgaccataagcaaaaatacttgcagctccagcaagaaaaagaacaagaactttctaagctaaaagagactgtatacaatttgagagaagagaatagacaactaaggaaagcacnccaagacatacatacacagcttcaagatgtcaaggtaaaagaaaaccaaacgtttcactatttagtgtttgcctgctttatttggtagaatgactttaaaaagtcattccctaattggcctgctttacaaatccacgttgttattgtgggctttgcattaactagagtgtacctaatatttttaccacttcagcattgtaagctaaaagatggtctgaaaatctgaatattctcattagtactgaaattattctcatgctagttacatattaataagcttttatttataaaagtttactaataatgagaaatttgtttctttggttttgatttcattgtaaataaatgattatgatatttgggtagcacgttttagattttggaatactacataaagcgtagtgttctctctacgatgatttttaaacttaacacatgctgctacaacaacaaataaacaagcaagtaacatttgggtagccatatcacgatcagccaaagaagaatttgtcgtagaatgttaaagctcaacatgtaaaatncntnnntgtgtcaagcaacagcataagaatttactctccgagcatgaacaacttgtagtgactttggaagaccacaagagtgcactagctgctgcacagactcaagttgcagaatataaacaactgaaagatactctgaataggattccaagccttcgaaaacctgatccagcagaacagcaaaatgtgacccaggtggcacattctccacaaggttacaacacagcaagggagaagccaacccgagaggtgcaggaggtgtctcgaaataatgatgtgtggcagaaccatgaagcagttcctggaagagcagaagacacaaaactctatgctcccacccataaggaggcagaatttcaggctcccccagagccaatccaacaagaagtggaacgcagagaacctgaggagcatcaggtggaagaggagcacagaaaggccctggaggaggaagaaatggagcaggtcgggcaagcagaacatcttgaggaggaacacgatccatcaccagaggagcaggatcgggagtggaaagagcagcatgagcaacgagaagcagccaacctcctggaagggcacgcgcgtgctgaggtgtacccttcagccaagccaatgatcaaattccaatcaccctatgaggaacagttggaacagcagagactggcagtgcagcaggtggaggaggcccagcagctgcgggaacaccaggaagctttgcaccagcagaggctgcaggggcacttactacggcagcaggaacagcagcagcagcaggtggcaagagagatggccctgcagaggcaggctgagcttgaggagggccggccgcagcaccaggagcagctccggcagcaagctcattatgatgctatggataatgatatcgttcagggagcagaggaccagggaatccaaggagaggaaggagcctatgaaagagacaaccagcagcccaggaggtcgacgcggccgcgaatttagtag

SEQ ID NO: 553585 - DNA, 2042 bp, Homo sapiens
gggagaacatacctgacactagagatgtacacgcgcgtatatcgtggatagttggtgtctgatgactactccatgagtttgactcgtgccagaattagatattctctaattatatcagtggttggaacaggagcctccttagtgacataaatcctggattgcaagcacagggacccataggagaaccagtcgaagagagcactactcgagtgtgcctctagagctaggacctagcacatgacacgaggatgcgatgagcactgataggcgaatgcacgcaatgcacaaagccgagcacagcacattagtgtttgcgcaccacgcgcgctccggatgccatatgcaaagggcatgcgcatagttgcgcacacaacgcgcgtgcgacgcgtacgcccaaatatcgggcaccaagcacgaacgcctacatcgtatgtgcgcctgtgtaccagcaggccaacgcgcaatgtgtcccaaccaaccccggtacaacccgtaactccttttagccgcgaggtgtaatgaactcatatcggaccacactgcttcgaacgacatagaggtctgggttagaactaccgtcgagccgagccgcaacacggtggggggagttacgccgctaaataaccgggaggggcctatgggggttgtggctacctaagataccctttggccgccgtatgtctcccacctttggggtcggattacccgcttcaccaccagaatcgggcggcggtgggttcctgccatattaaaccgttggcacactttttatattcctcatatatagcggcaccataacggcgcgaaatgggtacattgtgtgggcaccacagttactatacaagtgagtcgtacgctattggaggcacaaaggacaccgttgttctatgcggcagcttatggtacgatgcggcgttatacagaagacgacagaaagaggtaagcagaagccgtactggtgctgagtgtgcaagacaaacaggggcggggcttttatttgggccttaaaatggtgcttgggctagcggaagaaggcgtgacatacccgcaggaggaaaccagacacttacacgggacatcgcaacggatggcatacacctgcaatcggcaagccataccctagctctgtttccccacctaagagagcggttggggccgagcattagttcacccttagggaggttccgcataaacacgcttctgggtgtgggccctccagtatccattccaggccccagacatgtgcctaccggaaaaatcagaggagagcaacaggggctgtgacacacagcaacactcttgggcccagcctgaacacagcgtgggtggggtacaacgacgttgggtagccacccctagcggtggggcagggttgtcgccctgggatagcgcataaccaggagggatcaagttgggtggaaacgctaacgtatccaaacaggttgtgtcccgctttcgaaagcatcacccaacaccacaacgagaggtgtcggaccacacacatcagagagaacaatacgcctcaccagaaaggagtggggcccaacacacagcaaacaccggcggcgacgcccagcggaaactacgagtccaacaaacgacggtgctcccgcacacacacacggagctatactatccatacaagacgcaccaacgacccggtcccacccgacgagtaacacaccaggacggagtgcaacgtggcagccacatcgacacacactgacgacactctgcgggaacataccagacgccaacccaacgaaggaaggccaaccgacagcggtacaagcagacccaacagacgcataagccagtagatggagcaacacacacccacacagacggaggcaggaagaacacccacgctctgaccccagacaccgcacctcacagccaacaaatcacacagcaactagacaggagagagcagataacacacaacaccacgtcgatgcaacaacaccagccacgccaaaacatagagtacgaaacagtgcacaccaccatccaccacacacagcacaggaccgaccaataca

SEQ ID NO: 553586 - DNA, 626 bp, Homo sapiens
  misc_feature (9)..(9): n is a, c, g, or t
  misc_feature (12)..(12): n is a, c, g, or t
  misc_feature (14)..(14): n is a, c, g, or t
  misc_feature (16)..(16): n is a, c, g, or t
  misc_feature (20)..(20): n is a, c, g, or t
  misc_feature (90)..(90): n is a, c, g, or t
  misc_feature (591)..(591): n is a, c, g, or t
  misc_feature (600)..(600): n is a, c, g, or t
gatagaatngancngntacnctcgcgacgtgtatccctcgcgaacgtgttatccctcgcgaacgtgttatccctcgcgaacgtgttatcnctcgcgaacgtgttatccctcgcgaacgtgttatccctcgcgaacgtgttatccagcaccaggagcagctccggcagcaagctcattatgatgctatggataatgatatcgttcagggagcagaggaccagggaatccaaggagaggaaggagcctatgaaagagacaaccagcaccaagatgaagcagaaggagatccaggtaatagacatgagcctcgtgaacaaggaccccgagaagccgacccagaatctgaggcagatagggcagctgtagaagatataaacccagcagatgaccctaataatcaaggtgaggatgaatttgaagaagccgagcaagtgagagaagaaaatttgccagatgaaaatgaagagcaaaaacaaagtaatcaaaagcaagagaatacagaagtggaggaacatttggtgatggcaggaaatccagaccagcaggaggacaatgttgatgaacagtaccaggaagaggcagaagaggagnttcaggaanatttgtaagaaaaaagggcaaaaaaa

SEQ ID NO: 553587 - DNA, 415 bp, Homo sapiens
  misc_feature (48)..(48): n is a, c, g, or t
  misc_feature (150)..(150): n is a, c, g, or t
  misc_feature (308)..(308): n is a, c, g, or t
gaagagtggtagaatttcatccttggctggcaggctgtagaattattnttctgtgcttttatttaagtgtggaatttgaatataagaagttgctttgttgtctctttttgggggacaaattcattaacatcacgtgcctgtcatcgtctnggcactgggaatagagcagcgtcatctgcaaatgaaacaaacaggctcctgatttcatgaggcatttattctaggggaaggggagaaagggcaaaaataaacaaatgaacaaaatcatgccagccaaagaaaagtgctgtgaagcaaatcagagcagntaaagtgaacaggtgtggcaggcctggcagtgagggggctcttgtagattagaggtgaaacttgagtgaccacagagaaggaaacggtattccagcagtaaggggta

SEQ ID NO: 553588 - DNA, 450 bp, Homo sapiens
gacagcacgtgaaagagtggaggactccatgactggtgtcggcagagcagggtacaggcaccagtgtagtgagctggcaaccactgcctcgtcagagggtgggtagcaactgtccttactgggggacagcaggcctggtcacaggcttttctccctgtccctgcaagcatcacattgctggaagagaatctcatgccagagcttggaccatccctagctggggggttaggggttgtctcttggtgacctaaatgaaaaaataggtccagatcagagttcgtgatgcatagcagtcacccactctttgaatcatgggaggggaggcctagtcctaggtaaacctaaactctttgaggaaccacagagcccaaggctggaaacctccagaatcctccagcccctgatccccccccccccggggacgcatggaggcctggaacaaccaggggg

SEQ ID NO: 553589 - DNA, 893 bp, Homo sapiens
  misc_feature (132)..(132): n is a, c, g, or t
gatcgaagatggcgccgcaatctgtgtcggtgcataaccagaagagtcttcatgtggacagcctcagggacggcatgtacgagacatcttgtgtctcgattcacgaaaacagagaaggtagccagtggtggntgagacagtagagacgagaattggaaggaacctatcctagtgtgtccacctttacgagagtccggccgagctatacaacagccaccgtgatgatctccagagtcgttgggaatcttacgtgaaagaaggtttggatcgtctcttcctagtacttggcaggacatctccctggaagatagtcgtctaagttcaatctgctggtctcattgagctcgagtgaggttgggtcgtgtcgtccctgaactcgcgatgattctaccagatgtgcagggtgagagatgttcttgatttctatatggccctagttcaagatagatctaaatttgtatgaactcgagggccagtaatctgccctcgcaatgtgcataatcgcttggagttactaagcaattcggagagagacacattgatgtccctgtctttcctggagcaggggctgctcataagatgtttgatgattcaccatgtgaagagtatcagaactgttcttggaaccccacttttctgtagaggaatgtatcatcttttggggctcaccttaccaatggcaattaaggacttctatttcaaattggtgaaaccattttttaatggaatggtcctcattatgacagggtgagaaggacggcacctggttagaaggcggcttgcagtccaccttcaaactaagggtgcggaagatttgctggagagactaaggtttgcgccacaaatttataccataaaaacactgtttggcacatttgtggaaaaaaacgggc

SEQ ID NO: 553590 - DNA, 440 bp, Homo sapiens
tttaccacttcaggaaccctcctccgcctgccagagacatgaagattttggtcatcattgctcagctcctcagagtgggccgggaggggactaaaaaaactgcattaatggtggttaaaacagggtccccttgggaaggcttgggagccaggatgagtgtcgggcttttgtgtgtgcaaaaggtcaaatgtgactgctgctgtttgcctggtttttgacccagtggtggggtttgagcaatgcttttttgcccttccatggaaagtggaaccaaaaatggtgccaaggctggggctgttccctttcgtgtaaaatggggctgttattactctgtcttgaaaaaggaaggtgggatttttggggaggctggtgaaggagggcagggtttttttttttacgtgtcatgttaaaattgccaaataaagtacctctgcctgtga

SEQ ID NO: 553591 - DNA, 105 bp, Homo sapiens
  misc_feature (29)..(29): n is a, c, g, or t
tgggtgatctagaggatctcatccccggntctgggtacatctgaccgcctcttctgggaaccatgaaggttcacgacatccgctggaactttgagaagttcctgg

SEQ ID NO: 553592 - DNA, 110 bp, Homo sapiens
tctcccaagtactggggtggacagatcacttgaggtcaggagattgagattgctcgggggaataggttatgtgattaggagtagggttaggatgagtgggaagaagaaag

SEQ ID NO: 553593 - DNA, 185 bp, Homo sapiens
ctactcacgccagcctacaaagtgctgggatatcaggcgtgaaccatctgctggcccctcctttcttttttagttatttagtggtgagcaggaagtgaaagacggaaattaaagggattttttttttttttattattttttatttttttatatttatatttttttttttatattttttttttttt

SEQ ID NO: 553594 - DNA, 157 bp, Homo sapiens
ctctagcaggatccccctgccgactgggtagcgaaggaccgtcatctgagtcttccattaaggaaggctcctgacctccacatctcatgaggtgaagcctctagctaactactccaccctcttccacacactactcttcccagtgtccctccagttc

SEQ ID NO: 553595 - DNA, 120 bp, Homo sapiens
tgttagttcccaacatacgaatgtgttacaacttaaggttttacacatttcgatgttgggaactaacacacagcgatggggggggaaggaaggatgtttcaggcaagggtcctactccct

SEQ ID NO: 553596 - DNA, 664 bp, Homo sapiens
taacatgctacatcactgttgaaaacaaacaaaaatatttcaaaaataatatataatatatataatatatttatataatgaaaagctattgactagcagcaatgattctaaagttatcttagcaccaagaccatggaggtgaaggggaagggattggtaggggatgaagggactggtggaaccaagaaagggctataacaagttcagcgttgatgacatttacactatggctctcaacggtggcatgaggcctaagagacaacatcaaccaagaaggaaggaagcccccacagttctataatgtctgaaccaagcaggctgaaaacattggggccttgcctgtggccagataacaccaccctctgacaaccaagagattaacctctcagccgaacttgccacatgtatataagacacatctgactccgctacccaaaatgacctgaatccacgcgataggatctctgcatataaaatatgcgtacatcagatgtaggaacatgaacagaagttgttaacagctcacgcacattttttcttccttggcaagtataccggtagttaaatgaatcaaagaccattgatcagactcctctaggttaatcgactacttggcaccgggaataggcaattggctatgctgcttattcgcggtttgggtggg

SEQ ID NO: 553597 - DNA, 142 bp, Homo sapiens
cgggcgcacagcttctcaaagtgctgggattacaggtgagccactgcgcccagccaataattcattgtttaatccttagtttgtgggccatgtcaaaggagtaaaatgtaataagccttttccttttaccgattaggagagg

SEQ ID NO: 553598 - DNA, 150 bp, Homo sapiens
gtaagtgcagagcccccatcagctcaggcttctcagttccctatagccgtcttactcacactgcccctttcctctccctcagactttgtgtttgctgcctctactcttgttttttgttttttcttctggggggggtgtctagacacagtg

SEQ ID NO: 553599 - DNA, 181 bp, Homo sapiens
tgttgtatgaactctatggtgtacttaagttatcaagaacagcatgcgaagtgacagatatacacctgaactggtgtcatcattggagctgagtaagaagaacaataacaccgtatgaatcagaaactgggaatcattcaaggaagatgtgtgaaaaaaaataagaaaaactgagcggccg

SEQ ID NO: 553600 - DNA, 377 bp, Homo sapiens
gaagacagagcaaacctgcccagatctcaggactaccagggattgaatgaaatgagatgtgtgtgcaaagcactgcacaccaccatccacagggatagaaggggccaggagtaccaagctatgttttctaacagcctcatttaaagaacataaaaagaaaaaagtgacattcattttaatgtgtggtactgaatatgtgtaaaatataatttaatatgcaatgagtatacaaaaactgaaactgacccaattgtcccatagaaaggtttttttgataaacagaaattgacccttctggtccttaacgactggaaacttaacatttgttttatctgagttacttcctcaggaaagacctgcaggcatctcaaaaaaaa

SEQ ID NO: 553601 - DNA, 321 bp, Homo sapiens
gcgtgtactggacagacaagatacagccacacagacgcagtttgtaagatgggaagaaccttgttcaagcccatctcttagtctacgtattttgtgtcagtgatgaggaaggaaaaaggtaaatatacagtatacttcacgaaacatcatccactcaaagaaagtgtctggaataagtacaggagagagaatggaacctttcgcaaatctgaaaaacacatatatcagcgaaacatatgcagttctcaatgcagtttcattggaaatgagttttgaaatgatctgattctcatattatctctggtgtattattcaagttgt

SEQ ID NO: 553602 - DNA, 312 bp, Homo sapiens
aaccgcgagagtacgcgttggggagagccccacgttgagaactaataatgaaccattattgtatcgaacaattgttagatgacacgctaatcacaaacaacctgtcgtgcacaatgacctcattcacacacgtagcacccttcagcaggaccctataaaactttcctccagcccttgcctctttgcaggtagccccttctctgctgagctgcccactgcaacatattttcacaatttctctaataaatctgcccttctttacctacaactatcttggtaaatggctttaccacctgcataactgaccctagg

SEQ ID NO: 553603 - DNA, 1262 bp, Homo sapiens
agcggtcgcccgcaacccgagccgcacccgccgcggacggagccaatgcgcggggcgaaccgcgcgcccccgcccccggcggcggggtgggccgggatggacgagggcaagatccgcgccgtgatgcaacaggatggggcaaggacacccatgagtaggaggcaacaaccggaaccgaaggcacagcagacaggagcgactgacggaactataagctggtgcgctgactgtggcgcccggacagcatgctgacagcaaaacagactgcaacatgaccctatacagaattgactccacgacaacccacattacggtcggagccaaatactgatacacccaaaataactagacggacttccgagagacgagaaaaccaacggtggccaactcgagctgcgggaagaaagatagcactggtcggaccaaacccaaggcagtggcggcacgagccacgcagacgagatacaggctgaccatgcacgagagcaacacatgctaagcacatgccgggagacatggctgcgaatggagcacaaaacacagaagagctaaacgaacgacgacccaataacaaacaaccaaacgcagcaggacatcactggaacccgagcgtcacaccacacgatcaacaaggggaagacaccacagttagaaaacgcgagcatccaaaaggactacacgagcacgtgcacgcgcctgacaaccaattggatacaaaggagataggagcaagcaccaacggcgcagaacacatcggtattgacacaaacacacaccagggctcaccagaacccgtgcgagcgacgcagaccgaaccccaatgaatacacattcgtcacagccgacgaactaagaagtcaaggacggaaaaaccacaacagtacgacttcggcgcgcagacacttcgcgggcaacaccagaacacaacaccagacgacgagacgcacaacctctagagggagatggaattccacccagaccaacaccacacagaagaacaagcaaacgaaagatcgccaagacaacagacactgacacaaaaagccgaaaaacacgcacgaagccccaacgcatacacagtgagacataccacacaaagtacaacagtcaacacacaagcaagagtccgcaacgagcatatctacaacgagcgcaaacaacattgagacaacacgagggacaaagacaataactctcaactagaaacaatacaaaatagatcacacaaaaaacgagacacaaacaacaacagagcagcaatg

SEQ ID NO: 553604 - DNA, 377 bp, Homo sapiens
tgagcgttctagaggatcccaagggactcgtgctggtgtctcggttgtaagggatctgctgaggtacacagatgagatatacgtggcctgatgcggggcgtaagccggtaaagagtcagttccactggagccctgagtggacaagccacagcctgtagtggtccgttaacaagaagtgttcgatgcggttgggactgtctcctagccatagtatgcaatcgtcttctctatcgtgctgattatcattttcagggctggtattctctgccggagaggactcttgatgtccgacacctgatcactggggtcattcagaaaagactcgtactcggaatcctgattggacaaatgacttccgggagagtactggtagctga

SEQ ID NO: 553605 - DNA, 615 bp, Homo sapiens
  misc_feature (202)..(202): n is a, c, g, or t
  misc_feature (217)..(217): n is a, c, g, or t
  misc_feature (254)..(254): n is a, c, g, or t
  misc_feature (465)..(465): n is a, c, g, or t
ttcccagtcccccggccccatggggggggattggtgggggcggggctgtccaaaaggtgtggttatcggactggggtccttcttttttgttgtaggaggaaaagctcaggtggaaaaggagggagcctctttcagggtggggcgcaaggccagggcccagggtttttaagggttcttccaaggttaaaaagcctgaaacaantgttttgggaggggntaaaaagcgggattttttcccgcctcccctttggggnttcaaaggccttggggatttttttttgcaaagggccccaaaagggtttggggccccgttagaaaaaaggggggggggggaaaaacagcccccccttgggtcccctgggaccccggttcccaaggggaccggggtttcccccccagtttttttttttgttccaaaaaggggggggggggggtttccctttttgtttccactttaaggggccngggggggcaattttttttttccccccggaaaaaaagaatttgaaaaaaaatttgttttttcaaaaatttggtatggggggggggggggttaattaaaaaaggcaatttcggggatttggggggggaaaaaaagccctggggcccttccca

SEQ ID NO: 553606 - DNA, 380 bp, Homo sapiens
accaggatcctcctatgatgcatgggaattacaggagttgcaattcaagttgagatttgggtggggacacagctaaaccacaccatcaatctctccataacaaaaggatcagaaactactccttttatactgcgttgcagatgaaaaatggaaagtacctctgaatggttccctcccacaatcagtcagactagtcacaggccaagtcttcttttacattgggtgtaaccaagtaaccaaagggaaacttttagagggtattgaaaccccagaaaatgtttcaaggggtgctctttgccacttgctcaatcctgctcccactctgttgcagtgtaatttcatttcaataaatttgtgctttcattgctaaaaaaaaaaaa

SEQ ID NO: 553607 - DNA, 404 bp, Homo sapiens
ctcgatgtggaccatgcgacggaatatctcgggtcaatattatctagtgtaccatccacatgtttcggactgcgttcttagctcgttgctattatattgcgtgatggtggttcaagaaacttgaatcggtgttgcatcaacaacggtatgagattgaacccgaaagacccgtttctatagtatctttgcgtcactttgtttggggcggcacagaatctgtcactcagtgattcttaggaagacagcagcatacaggattccatggaaccagtgttcgattgaagctagtactagaggagcacgcgatccagcagcagttcgtgatgaatatcgtaaaacagtctaggagcccgtgcgattaggtaaaggaagctaggaagaatgaatgagcgctatattccaca

SEQ ID NO: 553608 - DNA, 139 bp, Homo sapiens
ggctcacttacatactggtagtcttacacttgtactccgtggtggtgctttgtggtactccgaaagtagatttattttaattacttgataaaagaaagggtagttgattagcattttccatcccaacatcacccatctg

SEQ ID NO: 553609 - DNA, 381 bp, Homo sapiens
gtaatatgagttgtaaggtatttattaggagaaggtggagagagatcggagcctaatagtggtgatggaggtagtaaagagtatagaaaaggggaaggggaaaagtggttggggagcccggggtgtccgggggaagaagggggtggtagcacttggcgggagtcgcctatatataggggaggacggtattaaattgttcgataatggggcagggtatacacggggcttcacgggaattcggagaagtatagataattgttaatgttgcgatcgtataaaccgttgtgtaagctgcatgggtcaactggtgatagacaatatgtcagatggcggtactagtcccatttttgacactatcttctttggatgaaatttacattg

SEQ ID NO: 553610 - DNA, 869 bp, Homo sapiens
  misc_feature (40)..(41): n is a, c, g, or t
gtccggtgtcatggcggctctaccctgaaggtgccctganntcctcgccgataagaggcagcagttcggaagccggttcctgagcgatccggcgcgcgtcttccaccacaatgcctggtgacaatgtggagtggtcggaagagcaagccgcggcgggggagagaaaaagtccaggagaacagtatccagcgggtgtgccaggagaaacaagttgattatgagatcaatgcccacaaatactggaatgcacttctaccaaaatccatgaaaatgggtttacaaggatagacattggcttttaccgaattccctgagcttggcactagcaaaaatcaaaaatcatttgaaggcactggttcttggagaacaagagtgaagtacctgaatgtaagacaacaatgaggatggacctggtttcataatggacagacagcacaaagtgttcttcgaagaagcttgaagtataaaaccaaagaacctccgtgtggaggagaatgtcatcagaaaaattagtgaccctggaaaatttgtggcttgatgagtctccctgggatccctccagccagctaaccgtatacactggaggttggctgtggtgtggtgcacacacagcttttccaacttacacaaagcgaccactgaccccgggactcttgccacatgcctggcatatctttccaaagcttaaagaactgtcccacaccaaattagaagtatgagcctctcggagtaggccgttggtcccaccctgttgtatgacaataagctaacccatgccacaggcagctgatatcaacccatattgtgcatcggacgtgtccaacgtcgcggcataaacacgtaagcgttaaacagcgagagaattgtaa

SEQ ID NO: 553611 - DNA, 632 bp, Homo sapiens
tcggatgttgccctcctgggtgagcagatatcagtctgtggaactctgggaataatccatcaggcacactttttcggtgcggacagactttcgccagcatcattaacctggcgcaagccagtctagaatacctttggctggaacacttaagcgaagggtttttccactttctagccccccattggtgcatcggttggtcggtccgatgatagtgctgtcagtcatgctcagagcaaagcgacaataaacggaacacttatcttgtcaaaactcgatgcttcagctgtcttgcgcgtcgctgatgtatgagctttgcatgtgtgtgtgttttgtctctgtataggtagaggtattcacatcttactccgactgtaaggttgtcttacttcatctctgcccccaccacagttgccattgttgtaatcgtccgttccaacatggagaaggacatcgagctctctgccagttggcagtcatttgtctgttctttgttgattgcctcattctccagtgaactccatctggccaaatgattcagaatcaggcaagatccctgccatatggcacatccactgaaaggccactcagcaagtccgagtgagttttaatataattatcaccctgatctataa

SEQ ID NO: 553612 - DNA, 141 bp, Homo sapiens
tgaagaggctgccgaaaggccggagcttcgcctgaggatgccacagtgagacatggagcgaaaggagatcattttggacctttaagatttgactgccctactggattttggacttgtgtggggcctgtagccctttgtttt

SEQ ID NO: 553613 - DNA, 571 bp, Homo sapiens
ggcgggcgcggtggctcacgcctgtaaatcccagctctcagggaggctaagaggcgggaggatagcttgagcccaggagttcgagacctgcctgggcaaataataggcgagaccccgttctcctgaaaaaataattacaaacacgcacaacaaaaaaacaacaacttgtgttggggcgcgctcatgaggccctctcgagaaaagagagttttattagaacacaattttgttgttggagcgcgcggcgccccacagatggttaatggtgtcgaccccgtgtgtgcgcccaaataggcagtgttcccacagaggcgaaacacctcgcggggccaagtgagacataggtgcgcttgggaacatacacgcacacaccagattataaaaagaaccgcccgggggggagaacaccagagaacattgttttatcgggaaaccaacattttcccagcagatgtgagagtaactgagaagaaggcgacacagtaccggggagtcttttcacaagctggaagctcaccaagcgagagacgcacagattattctaatattagccccccggcatggggggggt

SEQ ID NO: 553614 - DNA, 1925 bp, Homo sapiens
  misc_feature (1693)..(1693): n is a, c, g, or t
gatcctcgtgtcgcgttgtcgttcgttttttgttttgtctgtatcattgttgttggtggttcgtcgtcgctttgtgtgcgggtgtggtggagccacacacgcggctgtgagcacgtttgtgggggggtgtgggggggctgcttcgggctgggtcggtgttgcgtcttgtgtctgctgggttccgttgttctgcttgtccgtccctacaattcctgccgtgcgtcgctcctcaggcgtgtgtgtgttcttccatctctgatcggtcgggtagtcgtctcgttcggtttgttagatctgctctgtctctccgtcgtggtgggtcatggatctatcggtcggcgttcgggctgcgcggctctggggtggtgtggtgtgtgtgtccttgctgtttgttacgagaatagtgtgcgtggtttttagcatgggggtggttgtgaaagagtgtgccccgacgtagctgacgtggtggggtggttggtatgcgttgtggttatgtgattcgtagtggtgcgtccatcctgttctcttgctcgctccttatgtgtctgctctccatctttgtttgtgtgtttgctgtgtggtattatctccatcttgtttgtgttgtaggagtggcggacgatcgcggtgttgtgtgggttttggttgttattattggtgtgtctgcatgtctgtaatgcgttcatccgcggtggcgtggtttgggtttgttttgcttcttcgctgtggtgttctttcctcgacgttggcgtgcgtcactagttagtgtgtctgttcggctgcttattcacgtactgggggtgtgtgtgttgtgtggggtggggcttgcgcatccctactagtattggtactgtcatcaccatcataggtcctcctccgctgttttgttgttgcgtctacttcgtttttgatgtggtgcggcgcagcaccagcactgggtggctggctgctacaagcatagttatcgtcactaacgctggtgttgttgagtctgtgatgttgagtaagcacgctccaccaccacgtttgggtggtgatgatcagcagcaacagctgcggcagctcgagaacagatgtgatgagggtggtttgttttttgttgttggagagaggaggtctggttgtggggcgtggtgcagatactaggagaagacgacagacacatgatgatggagatggtgtagaggtgttgctgctacacacacaagttgtgctatggtgtggttgcgcacacacgacatgtgtgcacactcgttatagtagtgtgtggtgcgcactactatcgtgtgttgtggtgttggtgtcgtggtgcgacacacaacacgtggtcgcgtcacggattatcgcgctgctggcacagcacacgtgtgcgcagcaaatatatacacacgtgctatcttgttgtcgtgtgtagacgacccaacgtgagtgtgagagagaagaaagctcacaacaccacacgcgggtgtgagagggagtctccacattagtatttgttctgtgtctctccacagagagagcggtgtaagagaatgtagggtctgtgttgtctcgtgtgagagaatatatgtggtgatatccaacattgaaccccacgttgcctcactccactcccactccacccatctcgcatgatgtatcgtcgtcagtgtggatattagtccgatatgagagctcgtgtgtgtgtcgcacnaagagcacacctgtgtgtctaccgagtgttgttgggagcgctcttgtgggtaaatatgaacacattgttgtggtgttgtgtggaatggtgtgaggttgtggttgatgaaattgttagaatggtccctcgccacacaatcaataaaatataataataaaagggaaataaaataaacagttggaaggcagtttgtaagcgttcagggggccggtagatagtaggtaggtgtccc

SEQ ID NO: 553615 - DNA, 232 bp, Homo sapiens
  misc_feature (28)..(28): n is a, c, g, or t
  misc_feature (69)..(69): n is a, c, g, or t
  misc_feature (121)..(121): n is a, c, g, or t
gacctcactttcttagaacatttggctnaaaatggcttgccatcggtacatatgtatctcttgcaactnaaaagcatcaggtcttcctttaaaatctagtcatcaaggccaggcatggtgntcacgctgtaatcccagcactttgggaggctgaggcgggcagatcacttgaggccaggagttcaagaccagcttgggcaacatgccaaaactctgtctctactaaaaatac

SEQ ID NO: 553616 - DNA, 1099 bp, Homo sapiens
  misc_feature (40)..(41): n is a, c, g, or t
  misc_feature (169)..(169): n is a, c, g, or t
gtccggtgtcatggcggctctaccctgaaggtgccctganntcctcgccgataagaggcagcagttcggaagccggttcctgagcgatccggcgcgcgtcttccaccacaatgcctggtaatcaccctgccccctcgcccggcctgtcgctggccgtctgtcccgccgnctcggagcattccgaaaagcccctgaccgccggccacgagtcaagctgccctacccggccacgagtcaagctgccctacccgaggcactctccaaggggagagaaactcctaggccagcgactcaccctgctcgcagccaggacgtgaagcccctaagctgcccgtttgattttctcagggacaatgtggagtggtcggaagagcaagccgcggcgggggagagaaaaagtccaggagaacagtatccagcgggtgtgccaggagaaacaagttgattatgagatcaatgcccacaaatactggaatgcacttctaccaaaatccatgaaaatgggtttacaaggatagacattggcttttaccgaattccctgagcttggcactagcaaaaatcaaaaatcatttgaaggcactggttcttggagaacaagagtgaagtacctgaatgtaagacaacaatgaggatggacctggtttcataatggacagacagcacaaagtgttcttcgaagaagcttgaagtataaaaccaaagaacctccgtgtggaggagaatgtcatcagaaaaattagtgaccctggaaaatttgtggcttgatgagtctccctgggatccctccagccagctaaccgtatacactggaggttggctgtggtgtggtgcacacacagcttttccaacttacacaaagcgaccactgaccccgggactcttgccacatgcctggcatatctttccaaagcttaaagaactgtcccacaccaaattagaagtatgagcctctcggagtaggccgttggtcccaccctgttgtatgacaataagctaacccatgccacaggcagctgatatcaacccatattgtgcatcggacgtgtccaacgtcgcggcataaacacgtaagcgttaaacagcgagagaattgtaa

SEQ ID NO: 553617 - DNA, 827 bp, Homo sapiens
agttggaacgaataggcaacatatctggaccattaagaaaacggatttgtaactagcttcaaactaggccaagcaacttagtttccctgcaaatcaaaatttttacaagcaacttgggttagacctgggtttagacgctaacatcccttccttaaatgccttctgtagttctcaccgatcagtaggcggaagaccatataataattgtcaatggtacctgtttcaaaacatatcgtctctggttttataagtaagtcgatattaattaaactcttggcaactatttcttctttcttaaaggaaacatatcccttaactttttttcttttacactgtgaaaccatacacagtagaaattctgttactctctgttattaactacataacacctgacaaatcacactttttttccatattggcatgtagctacaaatattaacaggcaaggcgaacaaggtaatataatcttaggtttaccaacatatggtgtgtaatccaaataatacttgaccagcttatctaaaatgtacataatcttgacggctagctccatgaattctggactttcaattactttatgttccacacacgcttggggactattacgattattcatttctgcatcctgtaactaaaccgtgatcatcaattttcctggtaatcttctggtcccatgtactattaacttggtccttcaactagaatcttggcaccacagcactcattcgagatcaggtggcttcctgttaatttaacctgtttgccttaataatgggtcacgtttcacaaacaaaccttgcacttaacggcttcaaaatccctataga

SEQ ID NO: 553618 - DNA, 211 bp, Homo sapiens
tggtttttcaacttttttttaaaaaacaaattcaggttccaatgcccctttttcctttcccgaacccagcctttatttaaataactttaaaacaaattttgagggaggggacaggaaaagtttgggtcacggtggaagggggaaaaaagcccattttaaccgccgaaacgcccgttttttttccgtttttttttttgccgccaattttttt

SEQ ID NO: 553619 - DNA, 122 bp, Homo sapiens
ggctcattgtgcggcctcgtagtggcgcttcgggaggccctttgcgtggctcttagtgtggcgcctggtggtgcccgcgacgagccacccctaagtagccacacaaagcgccccccaacgag

SEQ ID NO: 553620 - DNA, 176 bp, Homo sapiens
gcagtagcagccgcagcagcagcagcagcagcagcagcaacaacaacaacaacaacatgtgacaagctggccagggaagcaagtagaaacactgagactgtgggaagaagctgttaaagcaaggaagaaagaagctgctaacctgtgccaaacctccacggctgctactggtgtga

SEQ ID NO: 553621 - DNA, 637 bp, Homo sapiens
aaaagtagctgaatgtggtggtgtgcacctgtaatcccagctactcaggaggctgaggcaggagactggcttgaacccgggtggcagaggttgcagtgagccgaaatcacaccactgtactccagcctggtgacagagccagactgttttaaaataaaataaaaataaaaaattggcttttggaaaaaacaacaacaaaacaaaaaaacaaagaaaagaacacaaacaacaacaacgaaaaagaaaaccacacaacaaagacacaacacaaacgaaacaacacaaaagaaaacacaacaaccagcggcggcgccgcgcccccccgagcactcccccgccgccgcgcccccctagtattatcgcctagccccctttcaagtttctgtcttcgagaaaaaaaccagggcgcgcgcgcatcccataaaataaggaaagagtccagtgtgtctataatatattacaacggacaacgcgcagagctagccagcccatcctcggagttatataataatactactacgatcgtgtctctagtaggatgatggagaaaacaatagactgatagtcagcacgcgtgaggacattatttcttctactagcaggaagccagtccctcttctctattttgtgtgagtag

SEQ ID NO: 553622 - DNA, 242 bp, Homo sapiens
  misc_feature (224)..(224): n is a, c, g, or t
  misc_feature (226)..(226): n is a, c, g, or t
agtacttttcctttcctgaagtagacctcaggccaatctggaagttgaaaaaggaatgcatttaaatcttctatggctgctttaaactcttggagagactcatatgattccgctcagtaaatttttacaatcaagtcactgggttctgctcgcagcgcctcgcaggcggccgccagggcctcccggtagcgcccctggtgcagtagctcccacgagtgccggcncnggcctcgagtggcccg

SEQ ID NO: 553623 - DNA, 787 bp, Homo sapiens
ggacacttcggtgctctctttgtgtgggaccacgacacacgagttctcactgttagatggatgaggaggtagaatgaaaccgaactgcactgggttgtcgtggatgatcagacagatctttgcttctgtggcaacgtggtctcatcagcagcttatccagatcacttccagcatcgcgctgcacgtggttaggtctctctaagaaccctacatagctctgagtcatgtgaatggataagggagcctcagtgccaatgaacatcatgtgtgcgcctccttgcaatacgcaggcaggtggtggtgcgctctgtaggcagggctcctctacatatctgcagatccatcctcaggagctccggccacatcagcgcacgacaagagatgagaaacagttgaaggatggctgtgcttgagacgatctaacccctatatatgcgacgaccaagcaaatggcatctcggtgcccctcctctatgttgcgcatatgtgtccttcctcgtgacggcacattcgttcgcgactcagttatctttggaaccgttgcccctgcttttttgaaactagctgcgacataggggcagaatgcgtgggctggcatgagattcaattcgcttcgcctccactcctgtactgaccagccctctatgagaggtatggccattacctctctttgctgccttgtgggaagaactggacgcgcttctctctacttgtggggcatcaacgaattcgcgacaggtctggtgtgaagcgaaccggtgaaggaaggctgacttttggggcaccc

SEQ ID NO: 553624 - DNA, 273 bp, Homo sapiens
gaaaattgttccttgatgcacttgctggatacaagccctgtgccaataagaacgagaaaggccttacctgaaagtggggaatagctatatatgtggactgaggtacatgaaatccatgatgcacatagcgtgaaattccaacggggcggctccaatgcataacacaagctgttgacatgatttggaatagtcaacggaaacattctattcacgggcaattagaatcacgatggtatagtgtccatgtatgcatcaggatttggtatgttagag

SEQ ID NO: 553625 - DNA, 1791 bp, Homo sapiens
acacgcgtcctcccctcggcggggaggccggctaggggcaggcgggcagcgatgcctgcgtcggccacagctgcctggcactgccctcctttgtgcctgcctcctctgccagcctccgctccaacctccccccccaaccccgcaacgaggcctgctcctgggcccggccgcagggcccgttgcccacagagcgcccaccctgcgcccacccggggtgccctcaccttctgggcccctggctcctggcctcgggtcctgctggtgcccaggtcgcccggccccgtcctccgtgctccgcgtttgccccaccctgctgcccgagctcggcggcgagcctggcacggtgccaggctgcctgggagcccagcccgggcagggcgaactttccagcgagggttggtctcaaactcctgggctcatgcaatcttcctgcctcggcctcccaatgtgctggaattacaggtatgagctaccgcgctcagcccaaacccagggctcttaaccaccctactatgtactgtgctggcccccggtcaagggagagaactcacgtcaggcaaaaatgttttacagagaggcagctaagtcttttccacagtggatgacacagtccccctcacaaaccaccccacagatccaaccccaaggaactctgcttctacgtgtgcccttggggcaagggatgcaaagcaccaggcgatggagctcagaggatggcactcttccagagagctgtgtgtctctgggaaagctaacacgcctctctgagcctgtcagcagatgcacaggcctgtgcacagagctctgcggagaccacgccgacatcgccgcacacccaccctcctgctcatgggacagaccattcacacctgcttcaccaccagccacaggcttgtcggaaggagcagactcttctccacggacaagccactgcccctttgagggcctcagcttccttaccctatgagatgaggaaacagatcttcacttgccacaggacttggggggatgaaaaggtaacctccgtaaagctgcccctggtgtggggaagccaccccatagatgacattgcccgccctccccctaggcccagagctctacagagtcctcaagctggtgtccctccaggctaaaacacttccaccccctgggcagtgcactacagggtggtggggaaggggccatctgtggaagaaacacagggcctggcctggggtcctgggcaagacctctgtgacctcagtttccccagatccctccaggtgtgaccttgtagatggcctctattctggattcacagctgctgaggaggaggaagaggacactgaaggcattccttcagtcccctggggaggttcagatgctcagactccctgataccacctttcctgggcagaataaagtccccaagatgtccaagccctaatccctggagcctgggaaagtgttacctcccagaccaaagggactttgtaggtgtgtgattgagttgaagatctgcagtgagagggtagcctggattagccacgtgtgcccaaaagcagagactccttcccagccgtggtcagagacagaacaaggggacgctgctggctttaaagacggaagaagggacgaggagccaaggagtgcaagtgccgccagaggccagaaaaggcaagggatggatttttcccctggagttccaggaggaaccagccctgccaacacctggattttagttctgggaccccacctcagacatctgacccccttgactgtaaggtaataaatgtgcgttgcttaaaaaaa

SEQ ID NO: 553626 - DNA, 2160 bp, Homo sapiens
  misc_feature (330)..(330): n is a, c, g, or t
  misc_feature (334)..(334): n is a, c, g, or t
ccgtattgtttttctcctgcctttccctcctttgcttgttgtcctcttcgtttctgttgtgtgtcgggctctgtccggtgtgtctgtgcccttttctcccgccgtgttgtggttctccttttcttccctgtctttctttgccccggtgctgttgtgcggccgggggtgtgtgtgtgtgagtccctttgtgtgccctccctgtgtgttcgttgtctcctctcttctccctcgggattcctctgtctgcccctcctgttttgtgtttctttttttttctttttttttttttttttcttgttgttttttctcgttttttttttttgttgtttntttntttgttttttttaagatgaataaattgaagacatttatttcctccaagaaaaatgtctggcacttggaattttcaagctgcaagtagatgtacacattttcaaaagatctttcttttccttcgcttcctcacactgggcacagcaaaacatctctgccttcttttcacgggaagtgaccctcctccccatgggtcaataagttaacgccaaatcgcggcaaaacggcgaattccatctctgaggctctagaagctcaatcttctgggcccctggctcctggcctcgggtcctgctggtgcccaggtcgcccggccccgtcctccgtgctccgcgtttgccccaccctgctgcccgagctcggcggcgagcctggcacggtgccaggctgcctgggagcccagcccgggcagggcgaactttccagcgagggttggtctcaaactcctgggctcatgcaatcttcctgcctcggcctcccaatgtgctggaattacaggtatgagctaccgcgctcagcccaaacccagggctcttaaccaccctactatgtactgtgctggcccccggtcaagggagagaactcacgtcaggcaaaaatgttttacagagaggcagctaagtcttttccacagtggatgacacagtccccctcacaaaccaccccacagatccaaccccaaggaactctgcttctacgtgtgcccttggggcaagggatgcaaagcaccaggcgatggagctcagaggatggcactcttccagagagctgtgtgtctctgggaaagctaacacgcctctctgagcctgtcagcagatgcacaggcctgtgcacagagctctgcggagaccacgccgacatcgccgcacacccaccctcctgctcatgggacagaccattcacacctgcttcaccaccagccacaggcttgtcggaaggagcagactcttctccacggacaagccactgcccctttgagggcctcagcttccttaccctatgagatgaggaaacagatcttcacttgccacaggacttggggggatgaaaaggtaacctccgtaaagctgcccctggtgtggggaagccaccccatagatgacattgcccgccctccccctaggcccagagctctacagagtcctcaagctggtgtccctccaggctaaaacacttccaccccctgggcagtgcactacagggtggtggggaaggggccatctgtggaagaaacacagggcctggcctggggtcctgggcaagacctctgtgacctcagtttccccagatccctccaggtgtgaccttgtagatggcctctattctggattcacagctgctgaggaggaggaagaggacactgaaggcattccttcagtcccctggggaggttcagatgctcagactccctgataccacctttcctgggcagaataaagtccccaagatgtccaagccctaatccctggagcctgggaaagtgttacctcccagaccaaagggactttgtaggtgtgtgattgagttgaagatctgcagtgagagggtagcctggattagccacgtgtgcccaaaagcagagactccttcccagccgtggtcagagacagaacaaggggacgctgctggctttaaagacggaagaagggacgaggagccaaggagtgcaagtgccgccagaggccagaaaaggcaagggatggatttttcccctggagttccaggaggaaccagccctgccaacacctggattttagttctgggaccccacctcagacatctgacccccttgactgtaaggtaataaatgtgcgttgcttaaaaaaa

SEQ ID NO: 553627 - DNA, 320 bp, Homo sapiens
atgctctgccatactgatttgggcgtcgtcaccaaacgttgctcatcagactaaatgacagcaagcgaagtacaaggtttaaagaaaaggatgaaacaacccccaaaggcttcttaggactccattttcaacagggtcttgaaatcactcactaacatgaggtcacacaggcaaaaaaagacagaggcagagacagaatcctgaggacagggtgtggcctccactctccggttcttgggccccacacacccgtgagccacaaatcctttttcctggagaaataggatcgtacatgaatcttcttatacattctagtggtg

SEQ ID NO: 553628 - DNA, 1005 bp, Homo sapiens
  misc_feature (330)..(330): n is a, c, g, or t
  misc_feature (334)..(334): n is a, c, g, or t
  misc_feature (649)..(649): n is a, c, g, or t
  misc_feature (811)..(811): n is a, c, g, or t
  misc_feature (993)..(993): n is a, c, g, or t
ccgtattgtttttctcctgcctttccctcctttgcttgttgtcctcttcgtttctgttgtgtgtcgggctctgtccggtgtgtctgtgcccttttctcccgccgtgttgtggttctccttttcttccctgtctttctttgccccggtgctgttgtgcggccgggggtgtgtgtgtgtgagtccctttgtgtgccctccctgtgtgttcgttgtctcctctcttctccctcgggattcctctgtctgcccctcctgttttgtgtttctttttttttctttttttttttttttttcttgttgttttttctcgttttttttttttgttgtttntttntttgttttttttaagatgaataaattgaagacatttatttcctccaagaaaaatgtctggcacttggaattttcaagctgcaagtagatgtacacattttcaaaagatctttcttttccttcgcttcctcacactgggcacagcaaaacatctctgccttcttttcacgggaagtgaccctcctccccatgggtcaataagttaacgccaaatcgcggcaaaacggcgaattccatctctgaggctctagaagctcaatctagaaggagagattttaattgtaacccctaaacagcaaatgctgacatttgtctngctttcagatagtctccagactgggccagaacatgactaatttattttatcttatccatctatctaggcacaggattaaaatatttatatcagtctgttcactttaaaatgtgcagttacagacaccagcttcagggccactccttaatttttcacagtttnggcttttcattgtttccagaaatgcacagtccttgaatggcgaacactcgcaaatgctgatgaaatctttaagtgaggagcctctaaactaatatgaaaatctcccctttcaggctgcgtggacgctgccccggccacgggtggacggagcttgtcccaatgcctgcttccccgagacaggncccatgagtagg

SEQ ID NO: 553629 - DNA, 356 bp, Homo sapiens
  misc_feature (137)..(137): n is a, c, g, or t
  misc_feature (216)..(216): n is a, c, g, or t
  misc_feature (256)..(256): n is a, c, g, or t
  misc_feature (338)..(338): n is a, c, g, or t
cataagaccttgagcctcctaatggtcccctgtcccttaaaacaaagtgaccaaaatagaaataaaataaaagttagggtatccagccatgtgaaaaagaatccccaggcccggcaataccccaatatagtagctanctaccacaggtggcctactattaataagtatcttgaaatgtagcctaatcccaaatgagatgtgctagaagtgtaaaancccatgctggacttcaaagacttaatgcaaaagaaggagnaaaaaagtaaaatatctcattaatatttttaataatgattacctgatggaatgatgatattttgggtatattgagttaaatnaaatatattactgaatta

SEQ ID NO: 553630 - DNA, 753 bp, Homo sapiens
  misc_feature (1)..(1): n is a, c, g, or t
  misc_feature (243)..(243): n is a, c, g, or t
  misc_feature (718)..(718): n is a, c, g, or t
ngggctctgtaactttcaaacattttgcagattaaattgttagcttaagggtttaactctcaatgccgttgtacattcagtgtgtatcctgacttactctacagtctgtagaaccagttttagaaatcattaaaagattgatttatgaaggaatagcaactttagtatttcttgacacatcatacgttggttgaatgcctttatttctctttaaggtccacagccagtaatactatctcacanatcagtcggtgggttaccgcgttctaagcatatagctcagagttgctcttatggtttttaacttcctccatacgtaagcgtcaaggcaactagtctgttaaaaaggaggccatacttttttgtatttgacaactgtgacagttttggtagctaggatcctagggagggaaatgtttgcctggtaacttctttctgttatgagaggaattaggtaggtcattcaagtgttgatctcacagcttcaatcaccatatcccaagtataagctggtttcgttacaggtgtctacagtcccgatgttcttcggaatgtaacctaagttttggatcctctgagtccaaagcaggctggctggcataatatgtaatttgaaaaataaaatcttatcttgcagcacgatcaggatgttgaatttatggtgtatattatctctaatatccgttactaaatgcttgcttttttaagacgtgtgttntttttgtgatgcagctatcagatttttagtatcgg

SEQ ID NO: 553631 - DNA, 796 bp, Homo sapiens
ggggcctggtaggtcagcaagtgcagagatcgcccggttctacaaactgcatgagcgtaagtgtgatgcccattctgtcatgactgtgccaagaaagtcggacctgcttcacatggatgatctgtaccccgaccacagcatgggcccggagtgcagtccctggaggactgaggaggtgggtcgacgcgggcgggatgccgacccgatcctcatctcactgcggcgaggcctacagtgcccagcaagcagcgggacctgaagatcagccggcgcaacgtgctctcgtcgtgacagccaggcccgtccgagtggaccccagggcttccatcccgacctaggggcccccagcctcgcaccaaccactgcgtgcatgatgcctacccccagctggcaagccttggccagagccggggaggctgggaagctggaggaaggtgatgtcaggagctgacgggcccatgagggcgactggctcaaggagcagggcgaccgcatctgccgcctggaggagacagctgggccagcatggagaacggggatagcgtagggccacagccacacgccaccttcatctcctccgccgcccccttcaccactcagcttctgccagacgggtcgcaccgggctagctggctgcaccagagcctctagaggcagcgccaggggtcagttcccacccccacccgtcccaggcccaggccgaagccagcgcccagctttcctcactgttcctgtggaggatgtctacgcaccaggcgagctcctcgacctctgagggaccatctccccgaccact

SEQ ID NO: 553632 - DNA, 253 bp, Homo sapiens
caggctctttgccgtaaattgtggaatagtggcctggtgactgcaggccggggactcactaaagcatacttagaaagagtgggggcgaagggttgaaggaggaggttgcagagcggcagagtggcacatgcaagccacaggtggaagtttctcccgttctcaatcccctgccttaaatacttctctgcggacctatctccatctctgtaaaatggaaagacattaaaagcacgccccgtctccccaaaaaaaa

SEQ ID NO: 553633 - DNA, 225 bp, Homo sapiens
ccacccaggcgcacttctggacctgggtccaactcctggtacgaacttcagacagggcattgatttctgccctgggcagaacgtttcacggagtcacaaatcacaatctggaacaccacacgaagctgcccctgcatcttccacctggcgacgggacccaggtggagaggttccccctctcgctttgccagcgcccgcagtaccatcgaggccctcgagcaggat

SEQ ID NO: 553634 - DNA, 428 bp, Homo sapiens
gatatttcgcgtgccgggctgtccttctcgatgcagacggctaaggatgtcacggtcaccatcggtggcaaaactcagaagattaccgcggttggaaccgttgctgacgccctcaaggcggcgaaggtcgaggttgattcgagcgatgccgttaacccgggtctgggtacgccactgtccgatggcatgaagattaccctgacgatggttgaccagaagtctcagaagcgtcgtgtcgccgtgcccttctccaccaagaaggtcgaggactccagcctgcccaagggcgagatcaaggtcatcactaagggtgtcaacggcatcaacgaggaaacctggaccgtcgtctttaaggacggcaagaaggtgtccgagaagaaggtttccagcgtcgacgcggccgcgaatttagtagtagtaggggccgc

SEQ ID NO: 553635 - DNA, 350 bp, Homo sapiens
gatcaagacgactctctctgactcacctcatcactcgatgtgatgctgggcattacagacgctcaccacacgcctggatatatatgtggtatttgtatagatagagacggggtttcaccatgttgtccaggctgggtcttgacgttcctgtactgcaaggtgatacacctcgccttgtgcctcccaatagttctgtggattacgaggcatgagccacatgcacctgtggcttttcttgttttcatttcttgagacaggagtttcactcctatttgcccatggctggatgtgcaagtggcagcgatcgttggctcacttgcatacctcgcacctccctaggttcaacgcag

SEQ ID NO: 553636 - DNA, 357 bp, Homo sapiens
cttggaaggtggtttaggcccaagattgtgttggtttgttggttgaagggtttacaggagttgccccgggaaaagtactttttttgggattccgggggggggcccagccggggcccccccccttttgttttgaccagcattttgggggtggcagccggggattggaaaaagggggacccttttttttgcttggtgggccagggggccttgcggttggcttttacaaaaaagacctttgccggtttggggggtaaacccccccttgttattgtttttttttttttggggggggtggggggcccttgtttttgagccgcccgcttttccccccccttgattaaattccttgttccccca

SEQ ID NO: 553637 - DNA, 662 bp, Homo sapiens
  misc_feature (84)..(84): n is a, c, g, or t
gaccatctatcagggaggcgtgtggagcgctgatcgtcaggtgggtgtgatcactggagtacatgagcgtaggagtccgccagntgcacgtagctctgcgccgacggtgggacgttccctctgaagattccatctagtatattatattatagagttctgcgtcggggcctagaccgtcctgagaaacccgactattcggggcctggtgacggttaccgacgggcatgtggacctaagggggcttaacaggtagacaacagaagcggcggcggcggcagccaggagcagcagcagcagcaatctcttcccgaacacgagcaccacaggcgcccgaaggccggaacaggcgtttagagaaacatggcagacgatatgactattgaagcaatgcttgaggctccttacaagaaggatgagaacaagtgtgagcagctgccaacggccatgaagaacgtaccaaaaaaaaaaaaaaaaacaaaaagacgaaaaacgacatgtggaggcggaccagaggcctgaggaaaaaaggcataaaaacaacacatagtgagagacccgcggcccccgagagagagacagcacaccacgggagacaaaagaggggccacaagagagaaacacgaggacacaaaaaaaagagaggggaactcccaccacaaata

SEQ ID NO: 553638 - DNA, 230 bp, Homo sapiens
taacatgttctgagttcatatcccctgatgattgagtcccacaatacagcggatggcccaggagcagaatgaaggcagaggaaaagcctttggctgcggttccgaacaatgggctgtcaacctattgggacgggccccaggatgtaaggggcctgtctgcagaaaacctcagggtctcctttctatcccctggggacacgtctgcttggagttagtatggggtgaaagga

SEQ ID NO: 553639 - DNA, 528 bp, Homo sapiens
tatctactacaaatacaaaaattagccaggtgtggtggcatgcgcctgtaatcaggactactcaggaggctggggcaggagaattgcttgaacctgggaggcagaggttgcactgagctgagatagcgccactgcattccagactggaccacagagcgagacttcatcttacagaaaaaaattagctggtcatggtggcacaagacctgttatcccagtctatccagtaggctgaggcaggagaatcatttgaacctgggaagtgcaggttgtatgggtggacaacttccaagcctgggccacaagaaggatactccatctcaaagaaaaacaaacaaagcaaataggccacgcccggggtgtggtccgcgcagtgtggatcggccagaggttccaggaatttcgagaagcagcctgaaatggtcgaaacgctgtctctaacttaaaatatacaaaaattagccgggtcgtggtgcaacgtgcctgtaatcccagatacttaggagacctgaggcaggaaaattgctt

SEQ ID NO: 553640 - DNA, 139 bp, Homo sapiens
atcaaggaatatagcgcgttaatgttatgtggcaggaataaaagaatatttacaatagtgatgttagggcactcagctgctactacaaattatgagaggccccagtatgctagaaatccatcttggctcaccctgatgc

SEQ ID NO: 553641 - DNA, 553 bp, Homo sapiens
gagagagagagagagagagagagagagagagagagagagagagagagagagagagagagagagagagagagagagagagagagagagccatgataaatctgtgtatgatcatcgctcacaccggactacgacaaagcccatctggtaggcgatttccccccccctcttcaacgacatcctgcacagttacactggcctccataccagccctgtctctaaccctggcccgctcacttcagttaaccccgtatgtcactctcatatttactttctgttcaccaacctctccttatagtccacacccccccctcaacccttccctcctgcccccctccccaatttctccctcacctagccctttttcccctcactggccttttttcccaaacccctactccgccacccccgcgcgtctccatttcaaccccctcgatctctatttttcctcttttgttatttcccaaagtccttaacttttcctctttataatttttaagcttattgtcgattgaaactgttgcctttttttatgtaaatcctttaatatttgtca

SEQ ID NO: 553642 - DNA, 934 bp, Homo sapiens
  misc_feature (595)..(595): n is a, c, g, or t
ggacccggagctgctgacccagcgggtggcccaccgaaccggtgatccacagcggcatggcgttagtggctcgttgagccgcgagcctggcctcgtcctagagctcggccgagccgtcgccgccgtcgtcccctcgtcccccagtcatgcaaaccgccgcgcgggcgcgccctcgtgtctgcgctgtctctccgatggtcgtccgcctcagggccatggcgaagcacgagcagatcctggttcctcgtatccgcccacaagacctcaaattcaaaggccccttccacagatgtagtcactacaaatcttaaattgcgaaatccatcggatagaaaagtgtgtttcaaagtgaagactacaggacctcgccggtactgtgtgaggcccacacagtggaattcttgacccaggtccaactggtgcactggtctcagtaaatgctacaggccttttgactatgatccgattgaccagagtaaaccccacagtttactggtacagacaattttgctccaccaaacacttcagatctggacgctgtgtggaacagaggcaaaacctgatgaataatggcttccaaattgggatgcgtatntggaaatgcccaatgaacatgattacattgggaattcaggcacgttatatttcccagtccccttgcaggctttctttggtggagtctgtgaaattgtcgggtcagtgggctggaattgaagacttgtgtcactagtgtgcccaagcacgagaggactgggtatgagatgcataggtctctcctctacggggggaccagaggctccgtggatggcggccggagggaagccaataaaaatgcggggttcgaacccgtgctgaggggggtttggaggcaaagaaaaggggggaatccggggcggggcccttaagtctgggaaagagggaaagggagttgggt

SEQ ID NO: 553643 - DNA, 211 bp, Homo sapiens
tgggaagttggagacagtcagcacaatgtaactgagaatttagctaaagtctttcagtcatcttttgtctattggctccatgtttcacggatgcgtgtgaactccatgtcattaaatattccccttttttggtcattcctttttccctcttgttaaaactcatccacttcctcatctgtaaaccgatcccccatggttctccacatctcct

SEQ ID NO: 553644 - DNA, 1207 bp, Homo sapiens
gatacgggagttcctccttgctctcgcccctactctttctggtgttagatcgagctaccctctaaaagcagtttagagtggtaaaaaaaaagaaaaaacacaccaaaggctcgagagccacaaaggggatgaaatttctttcgggacatcctccgggttcctcccggttacggatcggtccggctccctagagtccttcgtgaacgcttttaattgcctaagagggaggacactcaggtcaccgggggaaatcgtggctggattacagggagctggggcttgggaattggggaagactggactggcctatgacatttgggtaaaacttacaaaagcgcaagccgggggacccacggaggagaatactaacagtaacgccagtgcgccgtgcggggcgagaaacagcagggctgccacagacatggacaagaggacccagggagttggcacaaggggatcccaataacccttatggcggggaacaaccggcgcacgcacaccggaggacaagaaatatttattaaacgagggctctcgtggcacaagagcaaggggggtgtaatgtggtcacaggacacaatttgggggcgagcaattgttcacaggcatcagtgtctagctagcatcaaaacataaaaggaggacgtgggttggtagaggaactattaaattaacacatgccaaggaagttagtggatagtggggcatgaacgaccgaaaaaggaatattccccgctccagagagcaattgtggaacacaacggggaacgcttttgtgcgacgaggctaaaaactgtgggctacctcatggtgggccgcgacagaatttgtcatcgtggggaagcatgtagaccaagaaggcggcggcacatcatcgactctgcgccccggttggccaaaatgttggtcacccagaatactaggaaaatcgtcactcccgccaaatgtggggcgaccacactatcattcgggggtctcaaacactttgtgtgatggcttgctactgttctccgagggaggaacatgacttatggtggaagaccacaagttgggttttacagaggggagatccacccccacctttactctcagtatcaaacgtggggggcattctaaccatgggggttcaccaaaaagagcagcaagacagagatttctatgcattggtagcatgagagtagggacagtttctagcagaactagcaag

SEQ ID NO: 553645 - DNA, 243 bp, Homo sapiens
ctagaggatcctaattattatttcttgctccacaatgtctctctgaggctgagcatataagaaaatgatctctgtccttttcattactgaaaatcgcctgcggttatttcagaacaacttccacttattttccattgtgcgcccaactccctaagttataagtattgtgaacccccgccccgcagttatgcatggaaagcacaaggtgactagttcggtatgatgtacacagccatttagtaa

SEQ ID NO: 553646 - DNA, 380 bp, Homo sapiens
gctggaaccttccatgggggtttggggtattggctggagccaggacattagtcaggggccccatggacctcacgtgccagggaaactttaatgtggctgtcccttttccggacgccaaggggtgcaggagggtgcttttggccctaccccccccgtgtgacaaaataggagccagcgactcagggctgctcccgggtcaggagggcaacgccttaagtcagacctccctataggtcaacaggggcaacctggggatttttggagcagggccctcctttttcagggttggccccctcccccaaacacctggacacgtggccccaaatttgggacaaggggcccccgcccagcattaaataaaaagggccttaaaagtgtta

SEQ ID NO: 553647 - DNA, 310 bp, Homo sapiens
gcggaacaccaagttaggctggtacctctttgtcaaacatctgaaagtcccccagattggcttcaaggttcctggagctgcggcgagtcatgaagacccaacagagggcgaacaaccttcgcctgactgctgcgcacatcagactaagacacattatatctttttttcagattacctccgagattgcatctgcttttcttacaaagagcatcaggggccatcatgctttgaccttttcaagcctcacaacatccctgtgaggcagacaaaattcagaaacacctccatgccccactgaggtaccgagctc

SEQ ID NO: 553648 - DNA, 575 bp, Homo sapiens
gcacgaggttaccatgggtgttataactggtgatatcttggtcaatggtattccccgtgataaatctttcccaagatccattggttattgtcagcaacaagatttgcatttgaaaactgccactgtgagggagtcattgagattttctgcttacctacgtcaaccagctgaagtttccattgaagaaaagaacagatatgttgaagaagttattaaaattcttgaaatggaaaaatatgctgatgctgttgttggtgttgctggtgaaggtttaaacgttgaacaaagaaaaagattaaccattggtgttgaattaactgccaaaccaaaactgttggtctttttagatgaacctacttctggtttggattctcaaactgcttggtctatttgtcagctaatgaaaaagttggcaaatcatggtcaagcaattctatgtactattcaccaaccctctgctattttgatgcaagaattcgatcgtttactatttatgcaacgtggtggtaagactgtctactttggcgacttgggcgaaggttgtaaaactatgatcgattattttgaaagccatg

SEQ ID NO: 553649 - DNA, 524 bp, Homo sapiens
atctttgtatgtcacggtagtgtcatcttactgacattatggtccacaccttgacacactatagggactcgtctaacaagatacgccctcgttaacgaatggccattgcagggatggggaacgagcacacgatggagatcaacatgagcccaacgagaaagcattgaggtcggcggtcgacatgaacaatacgactaggaagagcataacgtccaagcaacacagagcacggcagcggagacagaacccacggaggaaagcccctcgtctccgcttggaaacacaagaagatgagcagggcaaacagactaaggcctgcgtcgaagaaagatgggcatgaggaaggaggagaagacgacgaataagcagacggtaagtggaggcagctacttgagagcgagggaggtcacagaaagaagcaagcccgcaccccgtcagagcatccgggtggcagaaaccgcccccggcggggcacggaaccatgaaatatgccgccccggccgaggaacgcggcacgcagaaac

SEQ ID NO: 553650 - DNA, 191 bp, Homo sapiens
tcaccgaaatgcaagaagtacagacgctcaacaataatccgatatatacaagtcagacaccatacagtacgaagtgctcagtctaccagtaaaaaatgaatgcggtgtacaaaactacaaaacattatgtaagatctacagcagcactaaacgaactcatgcaactcttactagctcttcaaccttgaacc

SEQ ID NO: 553651 - DNA, 465 bp, Homo sapiens
tctggaaagggattttcattctttttccccgggcgggagtgcaggggcgctatctcagctcgctgcaacctctgcctcccgggttcaggcaattctcctgcctcggcctcccgggtagctggaattatgggcttttgccaccatgcctggctaattttttttgtattgttagtagagacagattttcaccgtgttagccaggctgttcttgaactcttaacctcgtgatccgcccacctcggcctctcaaagtgctgggattaaaatttgtgagccattggccccagcccaagccttgttttctaaaaaaaaacaaagtatttgtaattgcaatcagatttttcttactaaatatctatgatgtgtgggacactttttgaaacacctaatatacttaatattttttcctcaatatttggctattctaaaaaaataaagattacatacggattttctaaagctaga

SEQ ID NO: 553652 - DNA, 169 bp, Homo sapiens
cagttccttatgacagcagatctcattcttaatatttccctattcacagcatttagctgtactccagtctcagaaactttatgtggtgggatgggagggaaccaccgataaccgcctgcctgcctatttatttttctataactgttaattgttcatcactatttagact

SEQ ID NO: 553653 - DNA, 617 bp, Homo sapiens
agcggtacggtttattcttggttgttttttttaactttgagaagtaagattaactatggtacactagtggagcgtgcttggaaatttgaagactcatctgaagtatcacagactcctatttgtaaagcattccacctttattgatacagtttgtggcctatactacttttcaaagaattgattcttgctagagacggtggatcattagaacatattctgtatttgaacctggttgtgattcagtccgtcattcagtctaggtagctgctatgttgattagtgtctaagaagcttacgtgacgattcaaaactatttccaccgctggtgtagtattcgtggaccatgtactgaatcatatacacgcacgatggtacaatccgagtggttggtgctggctgaaatggtttacacgaacacgagtctttcatgagagcacaagaaaggcccatgattcggctcagcaatgttacttaagtaattctagtggtgactaagatcacggtgtctgtccatgggtcgagtttttgaccgtgcgcaatcttgaatggatccattcaaatgcaggttatcgatgaagttgagatagccataccagatgggctttccctaagccttg

SEQ ID NO: 553654 - DNA, 159 bp, Homo sapiens
gcactgtatggccggagtgcatggctggagacaggttaaggtcctctgaaatgacacagaggacaaatgacaagaaatgaattcaggctgggcacggggtcacgcctgtaatcccagctactcgggaggctcaggcacaagaattgcttgaacgggagg

SEQ ID NO: 553655 - DNA, 150 bp, Homo sapiens
acatgcaagcgaattggtagaagactgtgcacataggactgagcttcagatgcagttggtcagcaaggagagtggatattgagcaattacgtcctaaacttttggacctatgagattctacaaggtgttagctacgttgtgcctagctgc

SEQ ID NO: 553656 - DNA, 334 bp, Homo sapiens
  misc_feature (39)..(39): n is a, c, g, or t
  misc_feature (71)..(71): n is a, c, g, or t
  misc_feature (83)..(83): n is a, c, g, or t
aaagctcagaaagcaggggtaccaggaaaagggactaanaatagtcatcataaggtaggataataggaggnccgtgcacagtngactcacaccctgtatatcccagcactttgggaggccaaggcgggttagagatcagcatggacaacataaggagatctcgcctctacaaaaaaatgaaaaattagccaggtgtgatggcgcacacatgtagtcccagctacttgggaggccgaggtgagagcatcacttgagcctgggtggttgaggctacagtgaaccatgatcacaccactgtactctaacctggatgacagagcaagaccctgtctca

SEQ ID NO: 553657 - DNA, 2466 bp, Homo sapiens
gagtccaaacattcggtggagtcgcggacacttccgctcggggactgaggttgctgcagtttttccgcgatagtttggggcagttccgcgcgttgcaggcccttctgaatttcctggacctacgcattggatcctcaaagaactgctgaataccactagaaacatacctgtaaccagagacagctgattatagctttctgcagcaaggaagcccacgtaccaggggctgtcttggcacaattctgctttcccaggaactgcatcactcaggactctgcaagtttccagaagtaagagggaaaatgaccacgttcaaggaggcaatgaccttcaaggacgtggctgtggtcttcactgaggaagagctggggctgctggaccttgctcagaggaagctgtatcgagatgtgatgctggagaacttcaggaacctgctctcagtgggacatcaagcattccacagggatactttccacttcctaagggaagaaaagatttggatgatgaagacagcaatccaaagggaagggaattcaggagacaagatccaaactgagatggagactgtttcagaagcaggaacacatcaagagtggtccttccagcaaatctgggaaaaaattgcaagtgatttaaccaggtctcaagacttggtgataaatagctctcagttctccaaagaaggtgatttcccctgccagactgaggcaggactatctgtaattcacacaagacagaaatcttcccagggcaatggatataaaccatccttcagtgatgtctcccactttgattttcatcaacaattacactcaggagagaaatctcatacgtgtgatgagtgtggaaagaacttttgttacatctcagcccttcgtattcatcagagagtccacatgggagagaaatgctataagtgtgacgtgtgtggtaaggaattcagtcagagttcacatctgcaaactcatcagagagtccacactggagagaaaccgttcaaatgtgtggaatgtgggaaaggcttcagtcgtagatcagcacttaatgttcatcacaaattacacacaggagagaaaccttataattgtgaggaatgcgggaaggccttcattcacgattcccagcttcaagaacatcagagaatccatacgggggagaagccattcaaatgtgatatatgtggtaagagcttctgtggtagatcaagacttaataggcattccatggttcacacggcagagaaaccattccgatgtgatacgtgtgataagagctttcgtcagagatcagcacttaatagtcatcgcatgatccacacaggagagaaaccatacaaatgtgaggagtgtggaaaaggctttatttgtaggcgagatctttatacgcatcatatggtccacacgggagaaaagccatataattgtaaagagtgtgggaagagcttcagatgggcctcgtgtcttttgaaacatcagcgagtccacagtggagaaaaaccattcaaatgtgaagaatgtgggaaaggattttacacaaattcacaatgctattcccaccagagatcccatagtggagaaaaaccatacaaatgtgtggagtgtgggaagggctacaaaaggaggttggatcttgactttcaccagcgcgtccatacaggagagaaactgtataattgtaaggaatgtgggaagagctttagtcgggccccatgtcttttgaaacatgagagactccacagtggagaaaaaccattccaatgtgaagagtgtgggaagagatttactcaaaattcacatcttcattcccatcagagagttcacactggagaaaagccatacaaatgtgagaagtgtggaaagggctacaatagtaagtttaatcttgatatgcaccagaaggtccacacaggagagagaccatacaattgtaaggaatgtgggaagagttttggctgggcctcgtgtcttttgaaacatcagagactgcgcagtggggaaaaacctttcaaatgtgaagagtgtgggaaaagatttactcagaattcacagcttcattctcatcaaagagtgcacactggagaaaagccatacaaatgtgatgagtgtgggaagggcttcagctggtcctcaactcgtctgacccatcagagacgccacagcagagaaacacctctcaaatgtgagcagcatgggaagaacattgtacagaattcattctctaaagtgcaagaaaaagttcacagtgtagaaaagccatacaaatgtgaggactgtgggaagggctacaacaggcgcttgaatcttgatatgcatcagagggtccacatgggagagaaaacatggaagtgtagggagtgtgatatgtgctttagtcaggcctcaagccttcgacttcatcagaatgttcatgttggagaaaaaccttagtgatgtgatggtgcaataaagtcttcactcagtcttcatg

SEQ ID NO: 553658 - DNA, 258 bp, Homo sapiens
tagcgcggggcatgtgcctattatcccagctactcaaggcaggagagttgcttgaacccgggctgagatagcaccactgcactccagcctgggtgacagggcaagactccgtctcaaacaaaaaaaaaaaaaaaaaaaaaaaaaggcccccttccccggttaacacagcccctttctccaaggcaacgccggcgccccaagtgttttatacccattttctcaccccttctttgttccggtgtgcacccctcttccccc

SEQ ID NO: 553659 - DNA, 386 bp, Homo sapiens
  misc_feature (248)..(248): n is a, c, g, or t
aatggtcacagtgatgtttattatactaatgtctctattttctatacatttagaacatttcataaaaaaaaaagtaaaacaatttgaaaaaggaccatacaactaaatttatcccaaaacctccccaaagtaagcaggagcaatggctttgttctggcacaaagcattcagtaaggggccatttgacagttaaatttaattagggttcatttccagaaactttctgctatttttaaagaaacattcanagccttttatgattaccactttcttttaattttccttaacttcagggaatttattgaggaacattaattaattgacttttcgtgggaagtttgaagattgttagttttttcataggttccattctttgccccagtctt

SEQ ID NO: 553660 - DNA, 1481 bp, Homo sapiens
caagtgatgcatcgctatctagaagggctgggcgccagggcactagcagacaggcagctggctcccaggacataaggagcatgggtcctaaccagggaactaaggcttcagcacgcctactggcgatgtcaggccgaacgcccgtgggtccatggcagcgcgtgcaggcagttaattcggtgatccgtcaggcgcccagcacgccagcggggagcacggtgtacgttacctatccccacgttgcgctgactacacggaaggcacaaaggaagagtacgatcgcgtcagagtgtaagagaccaggcagataggaacattaatcatgatggtgatgagtgagctgctcacgagacgcccttatcacggccactggggtagccagggcacgctgtgctctcatagggggacacagtcgactgaacaggcagagggtcgggtcgtggagtggactggtgagactacaggaccgtccacagtctcgtgttgagctctcggactcttgcatgtcccagtccccgtgtctccgctaagtctgattcgaagtagtcgtcgaacgtgatgatagggtcaccacttcaacggggagagctgtcctcccgaagggctctcgagctttcggtacgccgaacttgttagaaagtaaaggggactcgcgtacaattataccaccttgtaccgggaggtctagaagcgattgggtccatcatagcacaagaacttaagcaagatgcgcccattggccaggtggtctgaagtcccagggacacgtccgtcagtgttattgtgcccctctgggtcctggtgaattgcgaaccttgggctttgccatcttcgtgttaagaacttggcaacgatccggatggttgagcaggtgtactaataatcgcgaattccgaaaacccacgggggtctccatcgcgcgccaaggaaaacctgccgctaaaggggccatgcgattttacaggaaaaggcagcacaagagagaggcgaactggggaacaatagcatggacccagagaggagcagcacaagcctggcgagcgcatcaagtgggaaacaacaatggagcagggaaaagatagcacgaagaacacgagaaaaagagagaccccgtgtcaaaagagcacccataaagatgaccccctccgacacaacaacatcagagaataaatctcggagagaacgcaagacagaacaaagcaatcggaggagcacacacagaaacaaccagaggatgagtaagagagcaaaaccaaaaacaaccgcaaagcgcagcgaataagaggaaaaagacgaaacgggagcacacacacgacgcggaccaaacagaagcgagatgctcgatcaaccaagcaagagcacagacgaaacaacagaaagaacgagcagcgaagcaacaacaggcaagaaaacagaacgaccaaagcaaagcaccacagaatcacacaagaccaaccagacacaaacacgccacccacaga

SEQ ID NO: 553661 - DNA, 245 bp, Homo sapiens
  misc_feature (12)..(12): n is a, c, g, or t
  misc_feature (74)..(74): n is a, c, g, or t
  misc_feature (76)..(76): n is a, c, g, or t
  misc_feature (88)..(88): n is a, c, g, or t
  misc_feature (97)..(97): n is a, c, g, or t
  misc_feature (115)..(115): n is a, c, g, or t
  misc_feature (161)..(161): n is a, c, g, or t
  misc_feature (185)..(185): n is a, c, g, or t
  misc_feature (187)..(188): n is a, c, g, or t
  misc_feature (191)..(191): n is a, c, g, or t
atgaggggtacnaaacaggccggtgaccccaacctccaccccctgcccctgagaagagactgggctgaggccananaccaatccacgnggaggaaangccaccagcacccatcangcttcccactggcaccctgaaacctgcccaggctgtgggccgccancgctcgtccacaggcctttgccancnntgnccctcatggaatcaacccagctcgcatctggaaggccatgcaataaaaagggtt

SEQ ID NO: 553662 - DNA, 424 bp, Homo sapiens
cggcgcacagcttctcccctccctcctctgtccctggtcagcttgctgccctaggctccgtcaggtgtctggcctgccagatggcacccacccagcacccacgctactcctacctaacacgtcactcacccccaaggggcagtctggtggggcatggtccgcagcttgcgttcgaatgaggaggaaggagagcaaggggagtgagggtcggggggctcctactacatcgccctccacatccctgattcctgttgttatggaaactgttgccagagatggaggttctctcggagtatctgggaactgtgcctttgattttcctcaggctgctggaggacaagtgagactcagacaggaaagggaaggcccacagacaatgttgccctgggctgaggcttgttttgtcttggggtaaatatgaggg

SEQ ID NO: 553663 - DNA, 808 bp, Homo sapiens
cgttctgtagtggcgctgcttgtgggcccttgcgcggatgtaagctgctggtttgcggctgggaagagcggcgagagcggttcgggcgtttcgtcgggatccccggcaaggatgagatgctgccagagagtctcacccggcatggggtgaagcgttcagcctccccagacgacgatctgggatctagcaatcttgggaggcagccacgacttgtggtaaaatgaagatgagcaaacaaaaagttcttgagacttatgggtgcatgtgactcagaaagaaccatactggtcgtcttgttataggacgatcacaaactcaacatctcacttccgaaccggggaagaagacaacgaacaaatcactgaagaactggagtctcaatatcagcaaagtatggacagtacaattatcaggacgatcatcgcgcgacattgtgcgacttggcttccgcgaggtaggacgcaccatgatggacgaacggtgatgtggctggagcatgatgctgattgacgctgatgattccacctgatcctgtcaagtccaacgatgaatcctgccaggcgtttgacgcgtacgatctaccgcggcacttggctaagaaactcccagctgctgagcgcccttgactcccagtggacggatcccacggagccatcaagatggcaaaagcatatccaccgctgcggcgcaatccgtggttcttagttccaccgcttacttgtgttaacagagccactgtttcgacgcccggcgcgtgcacgccagccttatatagtcaacaggctcatatcacgcgtgtgccctccgg

SEQ ID NO: 553664 - DNA, 103 bp, Homo sapiens
gatgctgtggtgctctcgaggattccccacctgcagaattttaaactcgcctcttgcaatatttcacaagaatttctacaccatattttacatcgttcaaact

SEQ ID NO: 553665 - DNA, 1394 bp, Homo sapiens
gaggggagagaggaagaggacagacataggagaggtagagggtgagtggggaacagagagagagtagtggaagagagcagacggaagcttgaagaggagagagaggggaggaaggcgggacggagagaagcgcggcaagagcaggtgcagaaagcaaagagagcacagaaggaaagagtacgtagcacgagcaggacaggggcagaggggggacaggacagcaagcggtgacgggcagccggcgcgtggcggggtcgaggagggcaaaaggtttgggggggagcgaagagaggagtgagaggggcaagagaggtgggcccaaccccggggagatgggggcaatacagcttgcaggaggcccgacttatgcgaagcgtgggagttgggtacagtgggggctatttgtgtgtgggcgtcaatatgcggtccccgggcaatgggaattctgtagaggggagggagcggtgaagggggtgtggtgcccctgcgagagggtgtgggacacgggaatagttgcgcctgggattaaggaggaggcggaaaggtagagagtccacgaaagagccctgcgtgtgtcgacgtatgaatgatgcccacgggggtcgaacccctgttttgggagcggacaaatgaaatgttgggtcccccacggtgagtggtgtgggtgccccaccgtctggtgttcggtggtgtgttagaaaaatgggtagatatttgtctatatgataggagagggggaatagcacatggtggtagattgtggtgaagattaggagagtgttgttggagtttatgatgagaggaggctgagagagacatgctgggtgccagtgagtgtagtgggagaaaatggtgtgatgagaaattggtggtgttggctgcgtgttgaatggtgtctatgaaccactctagattgtttgggtgctgaaggcacgtgatggcatgttgtgtaatggagccacaagggagataagatggagagcttaagaaagccccgcccacgtggaaagagggtgtgtatagtttgcctcatttttctgcacacaacgcacgttgtgtattgtgatagaatcatgtgagcctcttagaaaggcacctggtttatgaagaaaagccactaagacttaaaatataggtggttatataaaaataataatagtgcacgggtttaaacactaaaatttatgcgaaatatatggtagaaaggggaaaaagcctctcactcttttgacctccccctactgaataaattgtaaatatgaagtttgtcttttttgaaaactggcttatgtgattgagtattcacatgtaaataaattaataaatataatttagcttgaaagaatgctctaccacttatgacccattaaaagggaactgtatgttttgtttga

SEQ ID NO: 553666 - DNA, 118 bp, Homo sapiens
  misc_feature (43)..(43): n is a, c, g, or t
ccgatttggttaaaaatagtagagggatgatgctaactaattnaggctgtgttgataactaaaaaagggtgcacaaaagaatgttgtccaaatcggcaaagtgcagagaatcggcgga

SEQ ID NO: 553667 - DNA, 377 bp, Homo sapiens
aaaataaattcttagtagaagcaatatttgggtcacactacatcaaaataaaattcatcatttatctgaaatttgtgctgggccgagtgcccgtgtcttatccggcagccctaccaggtcctttggccatggacactgcagtgcagttcttgggaggcggtgctggccccaaggctccagagggaagcaagctggcacacgcctcttaggaggggccggagcacgccaaggagatgttctggggacattaggatgatctcaggaagctgagggggaaagctggccctggaatggtccagaaagcaggcaagggttcttcatgagtcagggccccctggaagggaagggacagaaaacagcccgggtgttagttcaaa

SEQ ID NO: 553668 - DNA, 217 bp, Homo sapiens
gtctgtaatgtcgggcggagtacggtatgatgggcagtgaggcggcgcatatgcatctaggctataaatattcgggagtatactgtagccgggctaatgtataacaacggggtacctctagaactatagctagcatgcgcaaatttaaaggctgatatcgatcgcgcgcagatctgtcatgatgatcatggcaattggatccatatatagggcccgg

SEQ ID NO: 553669 - DNA, 664 bp, Homo sapiens
ccggtggtctgaactcgctctgctccgtgttgttggttcgtgcccgaagttccccccggtagggggccgcgccctattcccctccccgtcggttatagtcctagggggcctcccgtccgtctcgccgtattctgtatgggcctgcggtggccgctagatagggctttcgtttattgccaaacgctcttctttccgcgcgttgtgttctcctctctctgcggctttctcgtggcacacaatatttcgcctccgggctctcacgcgcgccggttatccgcccgcgggctttacagcgctctttctttcccttgtactgcacgtgtgcgcctacccctatggtcgccgcgtggcgctaagtaccgcctttcccccgctgacccctctggccagcgcggtcccccctcagatctccacggttgccaccctcagccgtcgagtgctcccactccctcgtggctcaccactcgcgccctctcgttgccctcgtctcccgtcttcaccaccctatttatttcttctcgcaaacttatgttgtctccccctcctctggtctggacactcctctgctgcccgttataaccctctctaccctctcttctcaatcttctcttggaagccgctctaccggccttccgccaaccaccagttttacaataacaaaaca

SEQ ID NO: 553670 - DNA, 114 bp, Homo sapiens
agcaaacaaggcatcagcatttcatgttcatgcatgggagcacacgcatctccgtcccatcagataaccaacaagaggtcaatatatagaaatccgctgatgggagaagatgcg

SEQ ID NO: 553671 - DNA, 1075 bp, Homo sapiens
gtcctctcaagcttggcgttgtccggtgggggttgacaagcgggttcaacgtgcgtatcgaaaagagtgattactgtccggggcccagtatatcctggactacgtgcatgatgttcgtcactgcaagtgaattgcaacggctgtctcaagaattatggcaacagtgctaaattgtcactcataacgatcgtttcaacaacagaagacgcaagccctgcggcaacagttagggtggaaccgatatggcattccggaaagagcggctgggttaacagtgcaggcgtgtaccagtgggcacttaagtaccattatggacatttgaaaggacaggtagaaattatgagacctagtcaataataccaggctagaagacttagtgggatataaactcctatgggaatgggaatggagagaaggaggttggaatgaaacatcaacaccagtgagaggaggcatagcataatgttgtatatactggaaaacatgaatttgaacaggacataaaattatacagtaagctggcacggcaaagtttcacgtgatactcataatggaaagattaatgggaaatattatcaccatacgtattatccggagcctccttctttggcaagtgtgaaaagggaaaagcagtatgggaaaaggagaacaacatggtgtcaacaagagaagatatacggagtaaggagaatgggtgaggaaccatgcggacacgcaatggacgtcccctttaaaagaaacagtgcctcttggtaagacccagatggtacagtgtaagagtatgtagcaaatctgtgggaaagaaatgggccacgtgtttggggaaatcaggtgtggaaaaacgtgagtaaacaagtgtacatagaaaagttactaaataataattgcaaagggttcaagtattaagacttgtaagacaagggataattagggagaggaacattttggtgccgctggagttagggcattattacgaattacattaatttatgaaattatgtaacagagagtggataccgagatttgggacaatttgtagttgtgttaacagtgcttgtacaatggattagacatc

SEQ ID NO: 553672 - DNA, 206 bp, Homo sapiens
ggtcccgtctgataccagcttccttcagcagcgcaggggtgtccctgaggccgtgaaggagtcaattgcgggaatttgcagttatctgcgggtgtggttccagcaagaccaaagctagaaaaggaggaggaagaaactgacccgatcagtgccagaagtcattgtattcaaagaagaataagcaagaagagaacacagaaggaagc

SEQ ID NO: 553673 - DNA, 95 bp, Homo sapiens
ccgaggccacctcgaggacgcggacgccacgctgggccggatccaggtactgccgcagcacgtgcaagatgggatcctatagtctccgcggccgc

SEQ ID NO: 553674 - DNA, 388 bp, Homo sapiens
  misc_feature (17)..(17): n is a, c, g, or t
  misc_feature (24)..(24): n is a, c, g, or t
  misc_feature (28)..(28): n is a, c, g, or t
  misc_feature (30)..(30): n is a, c, g, or t
  misc_feature (32)..(32): n is a, c, g, or t
  misc_feature (36)..(36): n is a, c, g, or t
  misc_feature (38)..(38): n is a, c, g, or t
  misc_feature (58)..(58): n is a, c, g, or t
  misc_feature (62)..(63): n is a, c, g, or t
  misc_feature (73)..(73): n is a, c, g, or t
  misc_feature (75)..(75): n is a, c, g, or t
  misc_feature (78)..(78): n is a, c, g, or t
  misc_feature (81)..(81): n is a, c, g, or t
  misc_feature (84)..(84): n is a, c, g, or t
  misc_feature (86)..(86): n is a, c, g, or t
  misc_feature (89)..(90): n is a, c, g, or t
  misc_feature (92)..(92): n is a, c, g, or t
  misc_feature (97)..(97): n is a, c, g, or t
  misc_feature (106)..(106): n is a, c, g, or t
  misc_feature (108)..(108): n is a, c, g, or t
  misc_feature (111)..(111): n is a, c, g, or t
  misc_feature (115)..(115): n is a, c, g, or t
  misc_feature (118)..(119): n is a, c, g, or t
  misc_feature (121)..(121): n is a, c, g, or t
  misc_feature (127)..(127): n is a, c, g, or t
  misc_feature (129)..(130): n is a, c, g, or t
  misc_feature (136)..(136): n is a, c, g, or t
  misc_feature (145)..(145): n is a, c, g, or t
  misc_feature (152)..(152): n is a, c, g, or t
  misc_feature (156)..(156): n is a, c, g, or t
  misc_feature (171)..(171): n is a, c, g, or t
  misc_feature (190)..(191): n is a, c, g, or t
  misc_feature (210)..(210): n is a, c, g, or t
  misc_feature (223)..(223): n is a, c, g, or t
  misc_feature (243)..(243): n is a, c, g, or t
  misc_feature (247)..(247): n is a, c, g, or t
  misc_feature (249)..(250): n is a, c, g, or t
  misc_feature (252)..(253): n is a, c, g, or t
  misc_feature (260)..(260): n is a, c, g, or t
  misc_feature (268)..(268): n is a, c, g, or t
  misc_feature (273)..(273): n is a, c, g, or t
  misc_feature (277)..(277): n is a, c, g, or t
  misc_feature (297)..(297): n is a, c, g, or t
  misc_feature (316)..(316): n is a, c, g, or t
  misc_feature (319)..(319): n is a, c, g, or t
  misc_feature (321)..(323): n is a, c, g, or t
  misc_feature (340)..(340): n is a, c, g, or t
  misc_feature (347)..(347): n is a, c, g, or t
  misc_feature (349)..(349): n is a, c, g, or t
  misc_feature (352)..(354): n is a, c, g, or t
  misc_feature (360)..(360): n is a, c, g, or t
  misc_feature (366)..(367): n is a, c, g, or t
  misc_feature (380)..(381): n is a, c, g, or t
agttctggtcgtcgtcnaccgtcncgcnananccgntngacgggcaacgcaaggaggnaaannacccggccancnccncanccncnccnnantcccnttccacccncnccncccnccnncncccccncnncccccntgcctgccncgcccgncagncacggcaggggtccntggcgaaggccaggggccnnccccggccctccccacccnaccaagtcatccnctccccccccgactcccacncccncnncnncccaccncgtatccntcccncccnccccagcagaaggcccaccnagtggtgccccattctgtngancnnnaacccgaagaggaagtnaaacccncnttnnngaaggncagacnnaccatgggccacnnatacgtt

SEQ ID NO: 553675 - DNA, 874 bp, Homo sapiens
tccctcatcgactgctgccaaatgtcaccaacagcaatggggcccaccatcagacctggaccatggacgatggatgatgtggagatggagaactatgaggcacctcctgaaaccatggagcgagacggatgggagatgccaagaccaccggggatctcaccaaagcagacatagagcagactcccgtcgataccgcttataacccagggaccgaacgcctccgagagatgaccccagaggaggactgagatgaggccacgcaggaccgactgaccggagagaaccctgacatgaagctctggaaaccttgtgagatggggaccagggaggatggggagggagatggaccaaggacatgacccatatccgctcactggccatagcataatccattagactgagatgccaagggatcaagacccaagcagagagaagatcccatgagaataaggcacgcaatgcagtattgaacaaagcatcaaaaagaactcaacgtccacctaaatcatgccatggactgaccagacacgaacacaggaaacatgcaaatagttgataccatgaatcggggttcatcccatcacatattacaacccatcagagatcaccatccattattactggctgtcacagagatgcaaagggtaagactacctccaagcggggcccgagaggagcatccttggccacaggagaggcggcagacagagaaacaaacagggacaagaagggtccatgctctgaatggagtgcactccgcaccagggggacagggacagagcagacacaggagggacaaagccattctgcgcccaagcggaccccccaccgacccacacaggacaggaagcaaaatgagcagagaaaagtccag

SEQ ID NO: 553676 - DNA, 407 bp, Homo sapiens
ccagaggcacaaggaggattggggcgggagcgtgtgtgttggcttggaccgggactggcggtctgatctggctgaacactccaccgacgtatcctaaagtggctcagtgccaatccagcaaagcagtccattttccctgggccaagatggagaggtatggtttcagatacagaagagttctgggatgagccaaggacaagcgggggtgtcttatatcgaacagacctcgatgaaaatctggaattcaccccagtgccctctgtgggcaagggaaggtgaagatggaaaagttaaaaaagctttgggccactggagaggatcagggccgcaactctggaagaagcaaagggctcagggcatgggggtcagcgctggtacagctgaaggatgccggccttgtgcaggtc

SEQ ID NO: 553677 - DNA, 442 bp, Homo sapiens
tactttccacaggcacttaactattttacaatgagaaaaaataataaccccagtatacaagtgggcatcggacatgaacactacattctcagaagatagagatacatgtagggaaccatgatatgagagagcggagcccaacatgactgagtcatagagaaatgctactccatcgtacactgagataccatctcatgccagtcaaaatggctatttattaaaaaatcaaaaaacaacagatgctggcaaggttgaggagaaaaggaaacacttccacactgttagtgggagtgtaaattagttcaaccattgtgaagacagtgtggtgattcctcaaagacccggaatcagaaatactatttgacccagcaatcccattactgggtatatacccaaagtaatataaatcattctattataaaaatacaaccacacgtgttca

SEQ ID NO: 553678 - DNA, 133 bp, Homo sapiens
gaggatccctggcaggtggaaatcaggattttgatgtttgtcgcgcggtttctgagaacactatttgaagtgcatacgttagacgtgtctgccacgttgttaccatttgttgactattaaggagggtagaagg

SEQ ID NO: 553679 - DNA, 338 bp, Homo sapiens
  misc_feature (47)..(47): n is a, c, g, or t
  misc_feature (57)..(57): n is a, c, g, or t
  misc_feature (65)..(65): n is a, c, g, or t
  misc_feature (67)..(67): n is a, c, g, or t
  misc_feature (84)..(84): n is a, c, g, or t
  misc_feature (96)..(96): n is a, c, g, or t
  misc_feature (102)..(102): n is a, c, g, or t
  misc_feature (116)..(116): n is a, c, g, or t
  misc_feature (162)..(164): n is a, c, g, or t
  misc_feature (170)..(170): n is a, c, g, or t
  misc_feature (196)..(200): n is a, c, g, or t
  misc_feature (227)..(227): n is a, c, g, or t
  misc_feature (236)..(238): n is a, c, g, or t
  misc_feature (265)..(265): n is a, c, g, or t
  misc_feature (267)..(267): n is a, c, g, or t
  misc_feature (295)..(295): n is a, c, g, or t
  misc_feature (327)..(327): n is a, c, g, or t
  misc_feature (332)..(332): n is a, c, g, or t
gtgaaagtgaaaaaagagagagactcgtgacttttccggtttcaganaaacccatgnttaccctnancttaaaactgcttgaanttgtatatatantctccntatatatatatatncaccgacaagggaaatgtagacttcataaacatggctgtataattnnnattttntttgaatacattgtgtttctatattnnnnntgacgacaaaaggtatgtacttataangacattttnnncttttgttaacgttattagcatatctntntgctttattatcctggtgacagttaccnttctatgtagggtgtgacttgcgtgctttttnagggnacttgg

SEQ ID NO: 553680 - DNA, 499 bp, Homo sapiens
cccagtccctcaagtcatcatccgtcgagcttgtccattgctggcgtgagctgcgatcctttggaggagaagaggcactctgatttttagaatttcagcttttctgctctggtttctccccatctttgtggtttaatctacctttggtctttgatgatagtgacgcacagatggggttttggtgttgatgtcctgtttgttagctgtccttctaacagtcaggaccctcagctgcaggtctgttggagtttgctggaggtctactccagaccatgtttgcctgggtatcaccagcagaggctgcagaacagcaaatattgcagaacagcaaatgttgctgcctgatccttcctctgaaagcttcatctcagaggggcacccggctgtatgaggtgccagtaggcccctactgggagatgtctcccagttaggctacttgggggtcagggacccacttgaggaggcagtctgtccattgtcggatctcaaactctgtgct

SEQ ID NO: 553681 - DNA, 560 bp, Homo sapiens
cttgtcaccaaaagaaggacaaaattttccccgggttaacccaaaatccatgggcagcataagggcaggtccttttttgcaaactcggttccaaagtcccaggaaaaaacccaaaagttcaccttcccaagggttagggctccccccccaattttttaggtcaagaattgtgtttaggctggaaaaaccaaaaaaaattcccttttcccttccctggggttgaaaaccccagtcagtggaaaaatgtttggaaacccccgccagtggagcctgggtgggaccccggctttagcattattggatgtcaaaagccttgtttttgtcaaggaactgttttaaaaaatctggcccagggggttttcacctgttaaaagtccccccccctggccccaaggacgctgggaactgtctattaaaaatttgagggttttgtgaaattcccaaagggtttaattggcccccatgggatccttcccattttttgtaaaaaaaaaaattacttttttatcccaggattcccaacccggccaaataataaatattgggacccacccctggtt

SEQ ID NO: 553682 - DNA, 133 bp, Homo sapiens
  misc_feature (41)..(41): n is a, c, g, or t
tcgatctagaggacccattagagcacagcttcttctgcccntctactgttgccagccagaatgggctgcttgtttttgctctgccaaccaggttgcggtagcagtggatgttagcctgcaaacaacattaggg

SEQ ID NO: 553683 - DNA, 891 bp, Homo sapiens
gcaggagcagcaaaatctcactgcaggtgacttagattctaccacatttggtaccataccaccacacctccactcccaccgaccgatccatggtccccctggactagaggtcaccaaagtaatctgcgtgtgatctggtaagaagagcgagagaaagagccaatgctggcaaacgacttaggctcacgaacaactcccagagcacagccgaaatgcctacaatactgcatagacgatccttaaagagactgaacagtgtacaacttcggtcagactgacaaggtcagacgcaaaccgatgtgcaagccaacagacaagtgaaatgctacatagacccagacgcacactcactagccgaagcgcacccgacacaacagaacagtacagacccactcccgcgctccgcaacgaagatacgaccagaagaatgacacgacaaggacacaagggagacaacccagcggccgagctccagaggggcaccacacgacgccgaccaggacggacgccggcacaaacacctgacggaaacaccaacagcagggagcaaacaccgaaacaggagaacaaccataagaaacaagtgaacaacaaaaacaaaataaaacacaaaggaagatgcagaacacgaacaaccagacaacccccagaaagaacaagagaaaaggcacaaagaaagacaaagaagaaaaacgaggacagaggaagagaacgaacaacacaaaacaaaaagagcaacagcaaaaaaaaaaaaaaccaaaccaaacaaaaacaacacaaagacaaacaaagaaaagcaaaaaacacaaaagcaaaagaggaacaaagaaaaaaaaggaacaaaacaagaaagaacaacaacaaaaacaaggcagaaacagcacaagaaac

SEQ ID NO: 553684 - DNA, 145 bp, Homo sapiens
tagttgatgagatatggacatacattttgacaagaaatatgattttgattattggagaagttaatggtcaggcacaggtagaatcaaagtcctgtatgtatgttcacacagataattacatagataacatgtaatgtgtgtttat

SEQ ID NO: 553685 - DNA, 352 bp, Homo sapiens
tacttcaaaaggtaagccctaaaggaagctggaaatacaatgcaccactaaccagtggttctcaacctcatcagacccaggaggctccctttcttttatattttattttatttttaaatgacaaataataattgagtatattcatggagacagaaggccaacagctagaaagccaagtggaacacagttgaaagtactgaccagaagactcaggattttactgatgtaagtaagttatctccaaattgatctaaagatttaaagccgttccaaatcccagtaggtttttcagtggaaattgacagctgattgtgccatttatatggaaatgcatggagccaagataaacaag

SEQ ID NO: 553686 - DNA, 432 bp, Homo sapiens
acggacagtcgtactgcgtcctggagtgtttccctactcttcagcgtgaactgctgctagtgctgtggtcgtcaggcctagacttgatcgaacactggttcctggcgctcctgtctgctgcgtgtcttccttgattcgctgaatccacttctgtgtagcacctgggtcaggtgatcaatcaatgctagtcctcaggatttacaaaataatcttaactcaaagtccaatgcaaatacattaagtaggtaattactcttgatcttgaattacttccgatacgaaagtccttcacatttgacaaactatgcgtactatatttaaggccttccaaattcttctaactcttccaaaagccttctgccttaattatactatacattacaccagtccttctagtagcttattgatgtgcggtaaaagcttgggtaccga

SEQ ID NO: 553687 - DNA, 738 bp, Homo sapiens
  misc_feature (9)..(9): n is a, c, g, or t
  misc_feature (55)..(55): n is a, c, g, or t
  misc_feature (83)..(83): n is a, c, g, or t
  misc_feature (90)..(90): n is a, c, g, or t
  misc_feature (111)..(111): n is a, c, g, or t
  misc_feature (164)..(164): n is a, c, g, or t
  misc_feature (171)..(171): n is a, c, g, or t
  misc_feature (175)..(175): n is a, c, g, or t
  misc_feature (200)..(200): n is a, c, g, or t
  misc_feature (204)..(204): n is a, c, g, or t
  misc_feature (213)..(213): n is a, c, g, or t
  misc_feature (223)..(224): n is a, c, g, or t
  misc_feature (226)..(226): n is a, c, g, or t
  misc_feature (236)..(236): n is a, c, g, or t
  misc_feature (266)..(266): n is a, c, g, or t
  misc_feature (276)..(276): n is a, c, g, or t
  misc_feature (291)..(291): n is a, c, g, or t
  misc_feature (302)..(302): n is a, c, g, or t
  misc_feature (305)..(305): n is a, c, g, or t
  misc_feature (308)..(308): n is a, c, g, or t
  misc_feature (315)..(315): n is a, c, g, or t
  misc_feature (317)..(317): n is a, c, g, or t
  misc_feature (319)..(319): n is a, c, g, or t
  misc_feature (330)..(330): n is a, c, g, or t
  misc_feature (336)..(338): n is a, c, g, or t
  misc_feature (348)..(348): n is a, c, g, or t
  misc_feature (363)..(363): n is a, c, g, or t
  misc_feature (365)..(366): n is a, c, g, or t
  misc_feature (372)..(372): n is a, c, g, or t
  misc_feature (382)..(382): n is a, c, g, or t
  misc_feature (397)..(397): n is a, c, g, or t
  misc_feature (403)..(403): n is a, c, g, or t
  misc_feature (406)..(406): n is a, c, g, or t
  misc_feature (435)..(435): n is a, c, g, or t
  misc_feature (464)..(465): n is a, c, g, or t
  misc_feature (492)..(492): n is a, c, g, or t
  misc_feature (642)..(642): n is a, c, g, or t
  misc_feature (646)..(646): n is a, c, g, or t
  misc_feature (732)..(732): n is a, c, g, or t
ctgaaagancagcagaggcataaggttcgggaagaggttgttaccgtgggcaacnctgtcaacgaaggcttgaaccaacctanggatgantcgtgcatttgacccctaaanaagtttcccataaagcagttggagatgagtgggaacgaatgtctgaatcaggnattaaantgtngtgccagtgcttaggctttggaagnggtnatttcaaangtgattcatnnanatggtgccangacaatggtgtgaactacaagattggaganaagtgggacngtcagggagaaaatngccagatgaanagntgnacatgtntngngaaaggaaaangagaannnaagagtgacnctcatgaggcaaagngnnaagatnatgggaaganaaaccacgtagaganaacagnggnagaaggaatatctcggtgccatttgctcntgcacaagctttgagaagccagcgggagnnggcgctgtgacaactgccgcagacctnggggtgaacccagtcccgaagcactactggccagtcctacaaccagtattctcagagataccatcagagaacaaacactaatgttaattgcccaattgagtgcttcatgcctttagatgtacaggctgacagagaagattcccgagagtnaatnatctttccaatccagaggaacaagcatgtctctctgccaagatccatctaaactggagtgatgttagcagacccagcttagagttnttcttt

SEQ ID NO: 553688 - DNA, 896 bp, Homo sapiens
gaattttattagggggttagtctgcgtatcggggtcatggcagggggttttatattgataactgtcgtgactgaaacttgactggcccctacagactacgacggacgacacctgcataggtgtaaggacgaacgatggttaggtctacggaggctccagggctgggagtagttccctgctaacgggacgggtacgactgttcaacctgttcctgctccggcctccactatacgcagatgcgagcacgcgagctacggagagagggaggtaacgagtcagaagcttactgtcgtccactgcggggaacacgccactcactcgcgggcaccgcattacttacgcggacactacgctccagttgccacaaggcctccgacttactgactgggctatcaactactgcaagcaagatccactcccaacctgccctggccctgccgcccgatcaaccgtccccacaactgtaggtccggccacccctagaaccgcccagcctaggcctcggccccacccctcagcctcgaactaccgcacgcgcccaccacctcgtgcactacggaccccacgcctcactgccgcccgcaccacctcaggatcatccgagtcccacaccgctccaggcggtaccggcaacgacatccgtccaaccgccacgaccccgcccgcatcctcccaacccgccccgccccacaagccccacaccccgacacccagccgccaccacccgcaccccaacaccgcgccccacacccccagacacaccccacccactcaccagcaccaccacacgcacagccagcccccaaccgccccccccaccgcggccgccccccacccacccgcacccaccccgccgatccgccgcccgccacacaccacaccacaccaccagaaca

SEQ ID NO: 553689 - DNA, 146 bp, Homo sapiens
gaatcccgaaactttcgcggctccacaagcattgccttcttattttacttcttttagctgcttaactttgtaagatgcaaagaggttggatcaagtgcaaatgactgtgctgcccctttcacatgaaagaactactgacaacgaag

SEQ ID NO: 553690 - DNA, 580 bp, Homo sapiens
ttgaaccggcttcaagacctggcctatgacggaagtctgtgctaaacatcagggcaaagaagcgtctgccttaccaatgtccaatgtctcaacgcaattgccaattaatgaccgtgggttccctaacctcaacctggggcttgttgctgcccttggcttaaggttcaagcctaacctgttcttgttgccgctggggctgggcaatggcttcaagggcccccaaggttgaattcttggctcaaagcctcggggggcttgcaagggggccaattcttggccctcttgaagaagtaaacttggccaggttgaagttcttccgggttgggacgagggaaagacccattaactgcttcgttttcgcccctggtccagaactccacaccccagctagcagggatcctggccccggtgcctaattgagaagcaccttcctagcctaggcccctcctctgtgcctccccagaggacgtcagggccctgatgtacctgagagggcagctggagcctcagtggaagatgttgcagtgccatcctcacctggtggcttgaaatcggccaaggtgggagcatttacaccgca

SEQ ID NO: 553691 - DNA, 149 bp, Homo sapiens
gtcgtctacgtctatctcctacgtaaatatatatgtgtagctcacacgataaaacctaggaagccaattgatatcatagctacagaccatacctatgtacttcaaataggctctatactctatccggagctagtaacgtcacaactatg

SEQ ID NO: 553692 - DNA, 1298 bp, Homo sapiens
  misc_feature (881)..(881): n is a, c, g, or t
gattcgatggcgtgatgtctcacagcaaagttctctcggctcccatgacatgggtccctcgagcttcctgcctcggaagcgcagacagtcgagagcaatactgatgttgaaggtgaagagcttccctatacgatggacctcgtccaattgccgtgtccacctcatcagtccttcctggcgatacacaagcgtctggctagtgactcacatcgatgcggtaaagtcgacaaggccggtcatccaagtgtgaccaagaaggatgtggatgagaggctgtgaccatttgttagaggcacactccaaaccgatgggtgaatcggtggggcacatccgatgggcctgtcacgtcttgagaaacacaccccctcgggacgtgctgtctcgtggactcatctcataagcacttgactccttgtgactggcaaccacaaatcaaggtgcagtgcaaatggccaatgaggcggcttctcatacctaaatgaaagttttgtgccattgtaaaaatcctttataccgaccatgcaaacgcgtcccctgtttaaacgcgagaccgataaccctttggcaaagcagaacactagtcgcgacccaggggtagtcgtaagggggtaagttgagggcgaaacgaaacaccgaccaaggggctttcgcggtaaagaaaagggcggaaccattatcccaacgacgaggtcgaggttggaagccgcaaaatggttaagccatagagggccctagagggttgccaattccgccggtttggcatccccaattgttggtccccgtctcaaccggatctgcgccaagggaaatcgaccgtgtcccacctgtgaccgtttctccactatttccttgttgccaactccgataggggaaaatcgcanaaaaggcgggtctagcgccaagactgcactttgagaaactgggagaggaacgcacatttgcgccggaggagcggcttggttgagaaaaccgggggagaaaaacgcgccggctgtaaccagttgaaactggcgccaacagccggcaatggggaaaatagaccctttgaagagaaatcgatgtaagcggggccccccccggtcgtgcgaacaaaagaggcacaaggttgacttatggtgaaacgcacaaaagaagagcaaacagcaggcattgaaagctgccaaagaggtagacgacgaatccccctatattcagaagatggtgtggttcccatggagcgcggacgacacaaagcgcggccaactttggctcaagggacaaatcggtgtgaaggtttccggcaaacaagcgagcgtttc

SEQ ID NO: 553693 - DNA, 192 bp, Homo sapiens
ctcctacgcaagctgtatgtccccgctccggaaggtcacatatagatgccgaacttactgcggacacccgatcggcatagcgcactacagcccagaactcctggactcaagcgatcctccagcctcagcctcccgagtagctgggactacaggcacgcgccaccgtgcccggcgggggtttgtggagagcgg

SEQ ID NO: 553694 - DNA, 292 bp, Homo sapiens
caccagccagatgccggtggacaactggcacgaactgatcggcgatccgaccctggccgatgccatcctcgaccgcctggtgcacaacgcttatcggatcaatctggagggtgaatcaatgcgcaaacggacgcagaaattgacgacgccgggcacctcagactaacaatgccacccctgcgtcgctgcgctccgactgcctgtccgaatgatcgtggaacaggtgtccggatcagcgtgggctgagtgtccgaatggcgtggaatccgcagtgttcccgtcatcgtggccc

SEQ ID NO: 553695 - DNA, 248 bp, Homo sapiens
  misc_feature (1)..(1): n is a, c, g, or t
nctgccaaagcgttacccaaaaaaatacaaacacatgttaggaaggtactgtcatgggctaggcatggtggctcacacctgtaatcccagcattttgggaagctaagatgggtggatcacttgaggtcaggagtttgagaccagcctggccaacatggcgaaacccctctctactaaaaatacaaaaatttgccaggcgtggtggcgggtgcctgtaatcccagctacttgggtactacgctttggca

SEQ ID NO: 553696 - DNA, 153 bp, Homo sapiens
  misc_feature (85)..(85): n is a, c, g, or t
tatgctgggtgactctagaggacctctggcacattgaggggttgacagctcttacatatagcttggtttttcggttcgtgagtangcggtggtaccagacattgattcatggggctcggcagtcaatgaggaaagtctcctcagaggagcatc

SEQ ID NO: 553697 - DNA, 596 bp, Homo sapiens
  misc_feature (262)..(262): n is a, c, g, or t
tggcacgaggggcaggccccaactggggcactgattgtcactgccgacatcaagaactcacccaagagtatgacctggaccaacagggttttgtgtcttgactcagtttgctcatcttcattgaggtccacccagggatggggagatgtttgctctagggggttctctgtatatgtggtgaaagctttgttcataacctgtggatctacatgggaagactacccatattaggagggtctggtaatgccagcaaccaatcagncaccacccagagtcacccggccaaaccctcagtgaacaaccaaaatatctctctgtagataccgtccaggctcaggcccatgtgacacctgctgtccacccaccggacctgttcagtaggtttctcccacacccacagccccaggctttcttctttgaaattgcaggcgatctaggtgtggtcttgagcagctatttcctggcaggggccccccggtttgccttcctagagcctgaccagtggattctctggcagatggacatggtgcatttcaaactggagccacatgcccccacccatcccccttggagttgtcgttgttggcaccaagaga

SEQ ID NO: 553698 - DNA, 685 bp, Homo sapiens
catttcgtttgtttctagacggtttggtgggggggtgaagctgcattcataccccttcctcttgtaattctcccctgctctgacagcaccccttttcatcgcagttggggtggcctatggactcgtgtgcatcttcctgcctgcgcttgccatgcaccccgcaagcgctgtggtctgtgcacccctggaaatcttgcagcaagctgcatatctagaagggtgggtctcctttgccctgctgcctgccttcgctccccgtgctttagaggtgtatgtatggagtggcttcatgctgcatctgtgttgccccgcgtgtatatcacatacaaatccacacacaacacaacaaagagaacatacaccacatagcaaaaaacaaaaaaataaacaaccataaaaagacaaaaaaaaaatataaaaataaaaatataaaacaaaaaaatcgaaaaataatagcattttaacagataaaaaatcacaataacaataactacaaacaatacacaaaattgtaagactaacaacaacgaaaaaaaaaaagcataacaacactacacaaaaatacatatacaaacaatctaatataaaaaaataagatacaaaaacacatgaaaaataaaaaacaactaaacacaaaatatctaaaaaagaaaaaaaacatagacaaaccaaataaatacaaaca

SEQ ID NO: 553699 - DNA, 818 bp, Homo sapiens
tggcttggtgtacccgagtatggatatgtgaccaccgtcgacatatggccgcactacgttataacctagacggactccaatgctaaactaatcgtcccaacaaattatattactaccactgacatgactttccaaaaaacacataatttgaatcaacacaaaccacccacagcctaaattattagcatcatccccctactattttttaaccaaatcaggaacaacctatttagctgttccccaactttcctccgacccctaacaaccccctcctaatactaactactgactcctaccctcacaatcatggcaagccagcgccacttatccagtgaaccactatcacgaaaaaaactctacctctctatactaatctccctacaaatctccttaattataacattcacagcacagaactaatcatatatgactatcttcttcgaaaccacacttatccccaccttggtatcattcacccgatgaggcaaccagcacaggaacgccctgaacgcaggcacatacttcctattctacagcctagtaaggctcccttcaccctactcatcgcaaataaattacactcgacgacaaacctaggctcactcaacattctactacctcatctcactgcccaaagaactaatcagactcctgcagcccaaccacttaatgtggtagcttaccacaaggagctttatatagctaaagacaccgtcttaccggactccattatgaactcattaacgcacactgtcgaagcccgcatcggctgggtctcttcgtactgcggcagtctataactaaggggagcaggccaa

SEQ ID NO: 553700 - DNA, 389 bp, Homo sapiens
tttcccctattttcacaaaaaagtaaaaaatacacacacacacacacacacgggaaacacaatcctcatctacatacatatgtatatgtaaataatttttagagagagcacactgctggcttccaaggcggcaaacttgtagaatgtttcctatatggcagcaagaaccacaggatccatgaaaacgctaaggctttctggtgggctgtgtcatagtgttcccgaggtgctttgacagaatgcagtggtatgatcgtaggccctcttatcaaggattcacattaatgtggccaatatgtgtcttcacttgggatgcaaacagcgtgaaaaccagaagagcatcggagtttacatcatctctgcggtttgacccaactatactatatcaa

SEQ ID NO: 553701 - DNA, 633 bp, Homo sapiens
ttacgcccctgcacaacaggagaggtaaagtctgtctataaaggccccgtttcctttaacggtcctgtgaccctgtttctcaagttctgacacttcgcacagggtttcctacatcttaacccaagggtatttgagcatcatattggccccatcttatataaaatgattccatgtctcttgagatcccattaaaatatttggggctgaaaagccacagtgagttaattactggtattaccaaaatgtgccccatctcctcgaaaatataaactagcgtaaagccaaagcacagcgtgggtacaatacaaaaaatactagctgtgctctctatatctctagtaaccaatggccacagtcacaataggccccccaagtgtcggcatggtggattcaatagaccaccctctaccaaaataagccaggcctctgtggaggagaactcgaccacagggcagggccaggaataatccatgagcctggtggtgctaaaaagaaagaaagtgctcaaaacaaaattccagaataaataatgttgttgggtccctagaacccctctataggtttgtccacacctgtaacacctagagccacacaatatatggtgataatattgctcaacacccaagactcact

SEQ ID NO: 553702 - DNA, 694 bp, Homo sapiens
gtgcacggacgaaccatggggtcccgcgcacttcgaggggatttatgaccacggtggggcacattacggccgattccatgagagtcctctatttcatatgtgccttccagaacatctcttgtggtattcactacttggctactgggtgcatggtgagtcacccctcgtcatgtctgcaggcacccgcaggctaatgtgagtcaggatgtctccataatcacgtctaatcggagtttggaggacgaccggggcccatgtcgtcttcagtgccagacaagattatgttacgggctgcagtcgcagaatggtgagatctgggcagctctcaaggtgtacgcaggaacagagagggcagaagcacatcgagtttggcgctatgaatacactggcagtaagaaagagtttccttgtgtggatggctacttatatgaccagaagcacatggaaaagcactgcggtgacccagatggaacctggtctgtgaccgagaaatggcttgcaatgctgagtccagcccctatttatgttgtggagtcctactgggatcggtgacttaggctacttttctgacaggctaggacgccgggctggtcgttgtgggccacaagcaagttacgcatgttttggtgtggcctagcagcggcgtttgcagccgattattagcaccttcatggctgctcgcttttttcttgcc

SEQ ID NO: 553703 - DNA, 560 bp, Homo sapiens
  misc_feature (348)..(348): n is a, c, g, or t
gactcagctctggaactaaggactggacctcgggtcccaagccccagtcttaggagctgctacctccttattaaagtgccaggggccctccaggacgggccccatccaacgccagccgtctcatctctgtcccactctgttagaaaacacctccttatattaagctaaaatctgtcttttccacagtttctttgattcggcctcttggatctttttaagatgctgtgatcaatgactcactcaaatcctctctcaccaatctcaccaccagcatcctcaaattgactgaatttgctgtctatttctaaggtcaaatttgcagccacttcctgatacctcccacggagnttggcgctggtcctccatgcaaggaggtgactgcggccaagggactcaccaaacgtggaggtttgccaaagttatgtcgaagagcctggatctcaaagtgagccgtctcccgggaaacagctcgagacgttcagattctgacatccgctccagtgcggcaggggggcttgagactctcagcacgttcatgtgagagaagaatgcccacgagc

SEQ ID NO: 553704 - DNA, 325 bp, Homo sapiens
  misc_feature (26)..(26): n is a, c, g, or t
  misc_feature (36)..(36): n is a, c, g, or t
cctctctcttcagtcttctctctctngtgtatcgtngttccctgtctgtctctgtctctgtctctctgtctctctctctctctctctctctctgtctgtctgtccgtctgtctgtctcggtctctggctctcgctatctcccgccctctcttttgtgcaaaagacgctcaagtacatctaatctaatcccttaccaaggcctgagttcttcatttgtgacatcccagatttgatctccctagagaatggggtacagaactggcgagttgatttcggggacttggatacctcatagaaactacatatgaataaaagatccaatcct

SEQ ID NO: 553705 - DNA, 414 bp, Homo sapiens
tccctgaacgcagcctgctgagtagctgggattgcaggtgtgcaccaccacgcctggcttacttttaaatttttagtagagattggatttcaccatgttggccaggatggtctcgaactcctgacctcgtgatctgcccactttggcctccctgagtgctgggattacaggcgtgaaccaccacacccggccttgatttcttaacgatgtggataatcagctatatgagcacagttttgggaataaaagcaaacttttgtttcccttttaatctttgatgcttctctgtcgtcggtcatctccaggaatcatggatgttactggactctgttctattccattggccagttttcctaaaccagaactaataccatactcttttttttttttttttttttttttggggaaaaaatt

SEQ ID NO: 553706 - DNA, 451 bp, Homo sapiens
ctgcgtgagtatcccgaggagcacccgtgtgctgaccgaggcccctgaccccaagactaacgcgagaagatagacccagatcatgtatgagacctatcaacaccccatgccatgtacgttgctatccaggctgtgctatccctgtacgcctctgcgcgtaccactggtatcgtgatggactccggtgacgggtcacccacaactgtgcccatctaacgaggggtatgccctctctttatgccatcctgcgtctggacctggttggccgggaccctgactgactaacctcatgaagattcctcaccgagcgcgactacagtttaacccaccaacggcctgaagcgggaaatcgtgcgtgacattacggagaagctgtgcaacggtcggcccctggactttcgagcaagagatggcccacggttggttaccagctccctccctggagaaagag

SEQ ID NO: 553707 - DNA, 883 bp, Homo sapiens
  misc_feature (642)..(642): n is a, c, g, or t
agcgggtgtcatgttagttaccttatagtgactgtgtaattagtgccagttaaatgtatgttaccaaaaataaatatatctaccccagactaaaatgtgagtagtactgttccgtataagtgagaatttaccttaattactagtcatgcctgcaagagaaaagcagtattgtgtttgtgatgaaatagaaagaagagtgtatttgggaaagtaaagtcaagataggaaaattcatgattttagattgcccgtctattgtacactatgttatctcgataacaagatagggcagtgatgacccctgtgtgcggccccatgtatctcagtacccacatgaagctgggctaagctataagtaggaatttggattgtcacacctgaagcaagttgacgacggactttgggagaagatgtgcataacctgtctcacctgtgactgttaaagcaatctggacgtcataaatatcaacagttagctcgtgtatctccttctcgttcaaattgtatcgcaaggtgtacacacttcgccctaagaatggcaggcacagcactagatttactactaagtgggggttgtgtcaacttgcaagtgctgctttcatttcgtgcattcccaggcatgtaacttataaatcttgtatntttcaattcctggttaacccaattggtttaaactttttatttaccccaaaattttaaccttaacaattaggcaaaacttatagaaggggcaagatatatatccccaaaaaaataaatatatagacaccattaaaaaagactttcttcaccagagccgcacatgagaaaatccggggcccaaataagaggggcccgtagaaatccctttcgaagcggggggggggcccccggtttacccaac

SEQ ID NO: 553708 - DNA, 893 bp, Homo sapiens
gccgctcccagccacagcctccctgcgcctcgctcatgctccaacatggcaaaaatctccatgccctacagagacttgagctggtgcatctgagtccctgatttgcttgtcttccagagcgtatgcttggaacaggcatggttactaaactacaactcatcatccacagcaccagccgttccctacagcattccatgacatcaccagcaactcagcttgccattccacaaatgaaccgatgaagtgaccactgcgctgtcctctgcaccggcactgcatgcaagacacactggcaccacccaaccactgctgacctggctcacgtctacgacttatctcacgacactcctctctacactctgactctgcgctgggcctacgccctactcgcgctttgcacactgcacctcacattcacatacaacgtgccatgatccccatatcaacaagcaacgccgcgacccatggacgtgaaccacacatatgtagaccacatggcgccctatacacaaacacacaacacacggacatataacacatactcaccaacgcccatctcaaacgggtacaactcaaattcatcacaaccatcgcacacaaccccagatcacccacatggaagccaacaacattacaaccaacccatcaacttgccacgggaccacacccaaccctggccccaacacaccagctacctcccacaggcacacacggccaccccccagccaacaacaacagcccgcttcaagacaccagcgaccacagaacaccaccacgcccgcgccgcgccgaacaccacgcgacgtcaccgacggccgacgaccccggcccagggcgcgcggccggagaccgcggcacacgcgcgacgcgcccgcgcgcgcgccaggccgacc

SEQ ID NO: 553709 - DNA, 409 bp, Homo sapiens
agcacagccgcctcttgtgctgtggacaccgccaccgcctgtgtcgccgccgcctctggacacggtgtatgattaggccacaatcttcaatgagtgaacatattcctcaattctgtggtggtcttggtcacacatttatggaggttctgaagggcagtggagattactggcaggcacacgacgaactctatgcagacaagggaactgtagaaactggatactggttcaccaagaagcccccatatagagagggtattctggacacacgaagtgttgaattgaaatccacagagcattttacaagagagtctgacctggatggggtcctcaatgcacattttttctgtgggcctcagaattaccggattgaagaattgctgcgtcttgtgaggagggtcttcacttatct

SEQ ID NO: 553710 - DNA, 312 bp, Homo sapiens
  misc_feature (1)..(1): n is a, c, g, or t
nagaggatcccccccgatgagggccaaccccaaactcaaagaacatgaataccattttcaggaatcattcggaactatcttagaggcggtttaccacacctaactaacctgttaaaattaagtgaacgtatctacttaaataaactcaagccttattatagcatcacttaagtggtttctgtctcttcccgtctatcatgattgcccaatagacattcaaatataagataggattttgaaattctaccactcaaaaacctctaatacagaatgatgttcaaacttcccagtcatatatttggccttatcgag

SEQ ID NO: 553711 - DNA, 234 bp, Homo sapiens
tagaggttcccgactagtccaacataccgactaagtcccacacacccagctaatttttttgtatttttagtagcagtggggtttcaccatggtgcccaggctggtcttgaactcctgggctcaagcgatcctcctacctcagcctcctgagtatcagggactacaggtgcatgccacgacacctggcttgtatgtatttattctgtctaattgatttcttcccttcccttcata

SEQ ID NO: 553712 - DNA, 271 bp, Homo sapiens
tattaagtggaactaccagatccatgttgtgattcttcccagtatcattcagcagcccttggcagttgcgaggcaagtcatcaatggggtatggaaattttccaggtgggtgtggttgaaggcagggaagaacgcgtttaggagcacattacaagaaggtgactgtaaggtccaggctgagcaggaaggtaaagcaagaaggaaacatgaggttgtgaagagaagtttagagggatgaggaggcaggagaggtgaacagttgcaggatgta

SEQ ID NO: 553713 - DNA, 136 bp, Homo sapiens
  misc_feature (1)..(1): n is a, c, g, or t
nttggatgcgctacctagcattatcaaccatgaaccttcccgtctacacttatcatcattcacaagttctaagttctactgtaatatcctatgaaatctgctgtacgcgacaatccaacttgtcctgggggatcct

SEQ ID NO: 553714 - DNA, 151 bp, Homo sapiens
  misc_feature (1)..(1): n is a, c, g, or t
nagtgactcgtgtagtatcccgctgagtcgtatccactgggctagaatgtcgttcgggatcatctcaagaacttgatgtgcaactcagtgcatccccgtcaggacagaagtgagtcagactcttctccagattctaaagccgagacacgaa

SEQ ID NO: 553715 - DNA, 766 bp, Homo sapiens
gggcccttccccccgttgtatctccggggaatttttttgcgagcccccaccttgaaagggccttttgcccaattcccgccccttctcctcgtagggaacattcggttttgagggcaaaattatggattcttcccccccggtcaacacccgcggaattaaacataacatttggcgccccaagaagtccctctacaaatcacgagtcgtcacatatgaggatagcgctcctcatatgtatcccacgatacaccgtccccttgggaagagtcttaaagccccaccaccaattaggttcccaatacatttttattttctacgataatcataacctgcggtttatctcacccgcatcgtgtgataagatatagcataatatgtattctcccccctcgagccacatctctctctctcctgagaccccttgtgaaaaaatagactcaatacaaattccttaggaaagattccactcctacgtcctctgcccacaaataactcttcttattcgtacacccaaacaccccccagattacagaatctctacccgagtataaatttaaaagatcatcttactacccccaaccagtttattagacgtggtttatcatgtgttcttcgtagttatgtgtcctttatgattaggtcccccctcccccaacaacttctatatctggtactatattattgccctccaccaccccagcatactaaacccccccaaaattttccccgggcccccaaaggggtacccacgggggtctttcaaaac

SEQ ID NO: 553716 - DNA, 576 bp, Homo sapiens
  misc_feature (38)..(38): n is a, c, g, or t
  misc_feature (62)..(62): n is a, c, g, or t
  misc_feature (154)..(154): n is a, c, g, or t
  misc_feature (176)..(176): n is a, c, g, or t
  misc_feature (178)..(178): n is a, c, g, or t
  misc_feature (263)..(263): n is a, c, g, or t
  misc_feature (312)..(312): n is a, c, g, or t
  misc_feature (430)..(430): n is a, c, g, or t
  misc_feature (572)..(572): n is a, c, g, or t
atttagtagttatttatattgtaagttattgaaaaggnattaagtagatggagaagaattanaggtaaaagaaaaaaaaagttggggtgagaaaaaagagagaagatggatgaagaaataaaagagagggaggaataagagtaaaaatggatantatgagaatgtagagttgggangnaaagttgggaaggaggatgagtgtgataatatggggagagatagaaataaggttggggattagaggaaaggggtatgtgggaggnggggtgggagtaagaaggggaggtgatgaggttgtggaagggggtgtgngagggttagttggggagatttgggtaaggtagaagtagaggtgatgagtaagtgtaggttaaaaatgtaagggaaaggaaagggtaaggaatggaagaagagggttgaaaatgtgaanaaagaaaagtgggaggggaaatttgggatagaatgagagaggtagggtaggttagtgtagagtgaatgattttgttgttggataaaaggaagtgaatgtgttggtaggtggggtggtataagtgttaaattaagaaaatggnaaga

SEQ ID NO: 553717 - DNA, 409 bp, Homo sapiens
ggtggtgcagtttgttattcaccaattacacatttattttcttgttgaatccgtggcttagataccaagctaccttggcagctgctattactaacatgcagaagagaacacacacctgtcctgaattcacaatattcagaatctgactgaggatgatgcacgggtctgttatgtgcagtgtggctgccgtccatacaatgttctgttttcggaggctgctcacagattcaattacggattccacatactagttgtaacttacagtggtgatcactatgtcctctttactttatttttgccactccctcctggcttgttgactctgtattcagagtgaaccatgtatttccggaataaacataaaccactctgcaactctactggggatccgcatgtctacacctggccc

SEQ ID NO: 553718 - DNA, 218 bp, Homo sapiens
tcaggctgagcagtcctacatgtgagcttcccagtagcggggaccacaggtaagcatcgtgacactcagtgaagttgtggtttttattttatttggtagagatggggcctcagtatggttgccacgcgctggaccttgcaactccgtgcactgcaacgggattttccgtgcccgtggccatcccaaagctatgggctattacacggcatgtagccact

SEQ ID NO: 553719 - DNA, 201 bp, Homo sapiens
  misc_feature (138)..(138): n is a, c, g, or t
atgatctagaggatcccgatttcattgaggaattgacaattatgcagaatgggacttgagagacatggatttggttgaagatgactcggacattttacatgctctgaagatggctgtggtagatatctatcattccanggttaaacggacagacaaagacgaacaaaaaattataagcagaccagggtattaatcaaccct

SEQ ID NO: 553720 - DNA, 583 bp, Homo sapiens
tctggaatttataaaggaaagagatttaattgacttacatttttgcagggctgggaaggcctcaggaaatttacaatcttgacggccggggaagcaaacatgtcctttttcacaaggcagcagcaaaaagtgcaaagtgaaggaggaaaaatcccctataaaaccatcaaatctcatgactactccctcactatcatgagaacagcttgggggaactacccccatgatctaatcacctcccatgaggtctctccccaacatgtagggattataatttgtattacaattcaagatgagatttgggtgaggacacagagccagactatatcattctacccctggtccctcccaaatctcctgtttttcacatttcaaaacacaattatgcctttccaacagttccccaaaagcttaactcattttagcattcattcaaaggtcaaaattcctaatcttggtttgacaaaaggaaagtccttttgtccaccaaccttgtaaaataaaagaaagtgtggttctttccagaaatataagggaagaccggcgccggttataatggccccctttccaatgggagaaaaat

SEQ ID NO: 553721 - DNA, 1248 bp, Homo sapiens
gagcgggttcacgatgccgcggcgtgcggtgaaaaggggaggcagcggccgataaatgctattagagcagccgccgcgaagccgtccccgaggccagccgtccttttccttcgccgcaatttccgtccgccgctgatcgggcgatgcggcgctgaggggacccgggcggagtcgcgccggagaacgcgccccgctcggaatcgccttcgcctcgtcgcgagtttccggcccttcaagttggctctgcccggtgcggccccctgttccatcctgggtcccgggtcatgtgaggcccgtcgtggaatcggccgtcacaggaatcatcgccgcggcacgtggcgtgctctgagggtgtccctgcttggccttttgaccacagatccccccggagaatgggagaccggtgccctctggaaaagggcgccgcgacagggatgaaagatgcacccacaatcgcccacgataatccgtggggacggaaacgtgagtgagacaacgggccgcaacgctgggatgaggcgaccctcccaagagggaagagcaccacgcacctgaaaagccacgagaccccctgtggcagtggacagaacccactggggagaccacaccgagacgcacggaaaggcggcaaggcgcacaggtaccaggtgcacacatgtggggagggcacgccaccagtggtgaaagcacacgaccactgcgtaggcaaactatgaacaacatcaccaaaaagggcagggccaccctcgtggtcgtcatacacggcgacctcgtcgtcacacaagtcctgagggtgccaggacacaaaacaacaacacagtcgcaccgcagcaccagtgtggaaaaacagcgaaaacgccacccggtgattgaccagtcaacacgcccgtatgcaggagagtcaacccccgccccagtgttgcagcgattggggcaaccacgacaagagaaaagagccaccaagcgtaggtgagggcacgcacctggtggacataatattgcgagccgcaacaaatagttggtgacgatagatgacaccggcagtcagacaaacaagggcaactaacaagtgacacgccacccgctctagtactacatggcaaacaacgtggagtagagcacgcggtacagatgcaccggtgcccgtacgggaacacacaggggtgagcacccccatctttcgacgaggacatggatgtcacccctagtgcagtggagttgagcaagacacagcacggcggcggaaca

SEQ ID NO: 553722 - DNA, 520 bp, Homo sapiens
ggtccgcccctcggagtcatggtactctcgcctttgccgatccgccgtccgtttgacagcctgagcggcaacgtcaccgagtggactgatgatatccgctgccgctcgcttgctccgacccacggcctccggctgtgtgcaggggtcgagcttcgcgaggcgcatcgatgccccctggtggccggtcattcccctcgcagtcggttcggcgcgcgcccaggcgaccatcggccgtgactgggtgcggtcagtgcggtccgagatcgcgagttctgttgtgtgaggctgagttatgtgcctcgaggaggcagagaggatgcgccactcactcagccgctgaacgttccactcagttccgaggcagggcaattagtacacacaaggctgttgatcgatcggtggatgaaaactctagaggcgactcatactttctaccagatgaagctgcgatgatggacatccctagggatgcatcaccgttgctgggctgaaccgcatggcaccccactgtggaaatccg

SEQ ID NO: 553723 - DNA, 959 bp, Homo sapiens
agcgttggggagtggatgttgctagaacccacgcggaggaagcgaagagacgcaggcagtgctgcggttacccaagcggccacccgggcctcagggaccccttccccgagagacggcaccattgacccaggcaaagctctccgtggctaacaaggcccctggagaccgaggggcagcagcaggtgcatggcgagaagaaggaggctccagcagtgccctctagccccaccctcctatgaggaagccacctctgcgggcaggggatgaacggcacggtgccttccccctaagcccccacctgcggtgcctctcctccctagctgggcctatgtgtgaccccagcaggcagctcgagctatgacaacggtttccccaccggagatctatgagctcttcaccactttctagctggtgagtgacctgaacagttcgtcgagtctttgtcagatagcggtcctacaccatcctgcgtgattcagctcgctggtgaccttggcttgtcgtggctctctttcctttctgtgaccctgtctatgactatgtccaggccagcccaggctggtactgggcatcctatgctgtgttctttgcaacctacctgaccctggcttgctgttctggtacccaggagggcgttcccctggtaccctgattctcctgtaccgtctttacccctgtccatgggcctacctcactgggatgctgtccagctagctacaataacacctccgggctgctgtgcctgggcatcacggccttgtctgcctctcagtcaccgtcttcagcttcccggaaccagttcgactttctcctcctggcagggcgtgcccctttcgcgcttcccatgactcttttcttcagggactcatgcctggccatcctcctaccttccatatgttgcccgggtccctgcgttatgccgcctggagcggggggtttcttgtcctgggctgaacccg

SEQ ID NO: 553724 - DNA, 324 bp, Homo sapiens
gaggtagtgggccaacggatcttgcccctgcgaaggaccacgggtctcggcaatctgcccctgtaccaggcgggagaacgttcgggcctgcaacttaacgaagtcgacctcccaactccgctcgggccagggaagccttcgagaacaggtagtcgcccaccatgatggccaccgagttgccccaccgcaggttcgctgaaggggcaccgcgacgcctagacgcctcgtccataacgtcatcgtgatacagcgaggcaacgtgggtgggttccatgacaacagcggcacgcaccaggtcggcgtgtcgacgcggccgcgaattta

SEQ ID NO: 553725 - DNA, 497 bp, Homo sapiens
  misc_feature (497)..(497): n is a, c, g, or t
aggctaggtacgaggccgggtgttaatcggccgagggtgaaacccgtctctactaaaaatagaaattagccgggtgtggtggcacgcacctgtagtcccagctacttgggagcctgaggcaggagaatcgcattgaacctgggaagtggaggttgagtgagccgggaccgtgccattgtactccagcctgggtgacagagcgagattccgtctcaaaaaaaaaaaaaaaaagcccacctgaaagcctgtctcttcccactttgtgtgggccctcccaggtggggattatcagcgcattagttggtttttcctcataggttgccttttccccttattttcaaggggttggcttcttgacgtggcgtggttttattttattcttataaattttcggtttgggtttacaacaattagcagttataaaagagaccaaggcccagagaggctattccagcgccaaatttttggtcccactaactctggggtacaattatttn

SEQ ID NO: 553726 - DNA, 537 bp, Homo sapiens
ctatgcgtccccagtgtctcttgtacacatttttatggacatgtgtacccaatgtttagctcccacttttaagtgagaacatgtggtatgtggttttctgtttgtgcactagttcccttaggataatggtttccagctgcactcatgtggctgcaaaggacatgatttccctccttttcacggctgcgtagtattccgtagtatatatacaccacatttctttatccaagtcaccattgatgagcactagggttgattctgtgtctttgctattgcagatagtgcggtaatgaacatacgggcgcagtgccgtagaacgatttattttcctttgggtatacacccagcagtgggattgctgggtcaaatgctagttgctttctcagttctttgagaaatctacaaagtgtgccccacagtgggtgaactcgtttacattcccaccaacagcgcataagcgttcctaagcgttccctttactccatagccttgccaacatgggtttatttttattttttatttattttttttgggtgg

SEQ ID NO: 553727 - DNA, 124 bp, Homo sapiens
cgtaggtgatcctccgatctcggctccaagtagcggggactaccggcatgcaacactgtgcctggctcattttgtatttttagtagatacggggtttggccatgttgcccaggcgggtctcgaa

SEQ ID NO: 553728 - DNA, 1310 bp, Homo sapiens
  misc_feature (1040)..(1040): n is a, c, g, or t
  misc_feature (1310)..(1310): n is a, c, g, or t
cgtgacgcgtgggttcttgtttattgtgtaacataaaatagaaactaactttatttctctggaggaagcagagtactgaactgccggagcagcaacttcgaccaacaggacgtggtgtggaaaaccatggaaccgcgtggggtgaatggggtggaagaggaagcacatgatgtccgctccagtggcggctgcccctgtggtctccttccagcccgtggaggccatggggacccgtgggtccccgccagagaaagtgggtcgtggcacccgttatcatccgacatgccgtgagccacgcatcagggctaatatccaggcacaagaatccgtgaggccagccaagtcccagttctaagtccagggtaaggcgacacaagtcacattctgcgccgaaacgcccaagctgctgccaggggccccctggtgaaaaagggccagatccatagagaggtcccacacgggtagccaggtccaaccatctccacaggatggccatacaacattcccaggcagtggcacaggtccacgccagggatattccatcaccaaggtcatgggacaacccaagggcaagggcctgagaggggtacatacgtcacagacacaaaagggccacgaccatggagcacaggggccaagacggcagggaccatacaccaagacgacctgcatggggagcagagcactcaaagccatgtacatatcacccgggaccactatccacaatctagggcaggggcgcaccagggagagtgagaccaaacgctgttggccgggacacggccgcatgcgctgcaaagggaggcgagatggggaccacgcgagaagaggactccccaaagagctcaccagcaaaccatgggtacctttgcgagcacatccccaaggaggaggcagaagagaaagaagcggagagaccaaccacgacatcgggatcgagagggattttcccccgaaacctgggtgggaagaagggacaggagcacagggaaacacatcaagagaaggcgcccacctagagacatccaaaagaaggacanatccaacagacacggagcaagcggaaatggacacagaagaagccaagaaaagggcagacagatggccgtagcaccaaggacacacagcgaagaacgtaccaacgacacaataaggaagaccaccaggaggggaaaaaccacaccagaaaaagtgaggctagcaagaatctggcgaaacaacagcaagaaagagaagaagacgcacataccacacagcacgcgcaaccagcgaatacaaacgaaggagaaagaaaaacagccaacctacgn

SEQ ID NO: 553729 - DNA, 937 bp, Homo sapiens
  misc_feature (911)..(911): n is a, c, g, or t
cgtccagcttaggttcctttcttttctgggaacgttcaagcgattctcctgcctcagccccctgagtagctgggattacaggcacgcgccaccactcccagtttacaccccgccactcctgagcaccgcacaccggcttcctcccagtccctcatctgagaactcatgaagccacttggaatccctctctgctttgcctggctcattccatgtcaatttcagatcttcacttcaggtcagctccaaggaggctatccttgcccatcttcctaaaatagagctctcaaaacctggctgttttccttcagagacactggcctccaattgctccggtagattgcaaatgacctgctttctttctgttcccgggcgtttggacccctgtcttggaccgctgtcggatagtaaatcccaagtaaggtacctgccgtcggcagatttgagctttcttcttggacacctaatacccagagtcctccaggctccggtagattgcaaatgacctgctttctttctgttcccgggcggcatcggacccgtcggagagtaaatcccaagtaaggtacctgccgttggcagatttgagctttcttcttggacacctaatacccacagtcctccaggctccggtagattgcaaatgacctgctttctttctgttcccgggtggcatcgacccgtcggagagtaaatcccaagtaaggtacctgccgttggcagatttgagctttcttcttggacacctaatacccacagtcctccagtaaatcccaagcaaggtacctgccgtcagcagatttgagctttcttcttggacacctaatacccacagtcctccaggctccggtagattgcaaatgacctgctttctttctgttcccgggctgcgttcggacccctgtcggatagtnactcccaagtaaggtacctgccgtcg

SEQ ID NO: 553730 - DNA, 345 bp, Homo sapiens
ttatccaataaggcacaaaacaaactcagcaatgaaacgaatgcctaccgaacgcgataattctgcagctatgtccgtagtcttcttttcctcgtgcaaattctgtgtccagactaagtcttcgaacacggcgcgcgagcgcttaaagccggtcgtgtagacgttcgccaggatgttcgagatgacatccagctgcgattgctgggcgtccatcccggtcttggaaatccacagggagcgaatcatgttcgagtccttggttgattcaaatcaggccagccttcaggcgtggcgcagcagttcattggccgactgggcgttcgtgtcgctggcctacagcacatg

SEQ ID NO: 553731 - DNA, 415 bp, Homo sapiens
  misc_feature (188)..(188): n is a, c, g, or t
atcgtctctagaagtggtataaatgtggtatctcactcagtacaacgtgccactgggcggttcatctcccccaggtgctctgcaaactccgttcttcatagcgctggctttctacatcacaggtgcttagctgaagtaatgacgggttaacgaagtcaactatccacggtttatagtccatttccatnctaaactccttgtgcttctgaagaagatgtttaacttgagaatgaggattgggtgaatgcgcgggagtctccattggaagttggatgctccacatggtccatccagctaatcatttcggtgatggcttaacgagacggcaatttctccattggaagcgggtgaagtttttctggaatatcgggaagttgagttatgagcattgtccatttttgttcaaactgtgcat

SEQ ID NO: 553732 - DNA, 519 bp, Homo sapiens
agccaaactcatctatttatcaggaacccttcttatgatagaaacccactcccatgaaaacaggattaatctgtttatgaggacagagtcctcattacctcatcacttcttaaaggtctcacttctcagtactgctgcattggggattaggtttccaacacatgaacttcggaggacacattcaagccgtagcattcttccttgactcccaaaatccatgtccttctcatgtctaaaatagattaattccatcccaatagccccaaagtcttgactcgttccagcaccaactcaaaattccaaagtccagagtcccatttgaatcagacaggagagactccaggtgcaattcatcctgaggcaaatttctctccagatgttagcctaagaaaatagcaaattactttcttccaaaatacaatggtgggacaggcataggatagacattcccattccaaaagggagaaataagcaagaagaaaggggtaactggtcccaagtaagtccaaaatccaacag

SEQ ID NO: 553733 - DNA, 695 bp, Homo sapiens
gcacgagtccaggtcctcaaatgctcatgacagatagttcagttgatggcatagcctccgagaaacagaagggcactctgaatctactttctgtaaaatatcagttcaaaaccatcagctcagggcttgtatatgcaggctgcttgtctggtattctactaaacacctatcttttctgcaaagttgaccagctttgctttgtgggcaaaaggtattcatttcaaagagctaagacacaaattgatgccatctaaagtgaattccttagagaaatccagtagtgatagcagctcccattccaggcatctagggtgatggtaagtagctcaatccacaggaaacacttagcattattaaaaactggtgatcagagacttccttccagagtattatttaagcctgctgttgttccaaaaattgtcctgcttctaaaatccttaactgccccttttttttgtatgaccaatatttaaaacacatctggtcttgtacaaaattaaattgtgcagacaccttgcttaggaaaaaagaaccttaaagttggggaagccaagaacgacttcctgttttcccctgggaactggtgtaaacatcacctagggagtggtgttaagtctggggcaaaaggcttttttatcccaccccgaatttaaaaattgactggacaaaggtttatttttttttccgtccttaat

SEQ ID NO: 553734 - DNA, 573 bp, Homo sapiens
  misc_feature (412)..(412): n is a, c, g, or t
tttgattgctgagtagtattccatggtatggatgtaccacagtttgcttaaccattcacccactaaaggacataagagttgttttcagttttttgccctaataaagctgctgtgaacattcatgtacaggtttttatgtgaacatacattttcattttctgggataaatgctcaaaagggcaactgttgggttgtatggtaaacacatatatttttgtaagaaactaccctactctttttccagagtggctctactttttacatacagccactcatacaattcagacagcaatgtatgattgatccagtttcttcacatcctcaccagcatttggtattactactattttttatcttaaccattcacatagatgtgtgtaatgataccacatgtggttttaatttgcatttncaatggctaatgatgttgagtatctttttgtgtgctaaattgccatctatgtatcctcttccggggaaagacttcatggctttttggctattttcttatttaaggcaattgttcctttttcctattgaattttgagaggtttttttatttttcctaaataa

SEQ ID NO: 553735 - DNA, 1101 bp, Homo sapiens
ggagagaactagtctcgagttttgtttttttgttttttcccctggggtaacgtggtcccgggggctcaggtttagtgggatcaattggagttatagtagtttgcgctatggatgggtgagagttctatagcgagtgttacggctctcgggaggtgtggggttctcgtgctctccggaggttcgccaccaacgcgaaattttaaagtgcggggtgtggggatagtgttgtagcgagacactggggggtgttgggtacaggggatacgtggtggggcgatttaattacgagtttaaaaggcctccaaatagggggtactacgaacggcacttggggctggtggctcatggcgcccgcgccttctcttccgcgggcgcggtcgtcacaagttacacacggctggtgtgtaaaagtgtacaagaagacacggtctggaacccctctcgcgtgggaggcactattgctatacacaggggtccctcttattataaaggggatacgcaatgtggacttttatggctaacctctttggcacgcggtataggggggatacccgggggcgcgcgtgataaacacttggtgtgtccacgcgggggccaggggggcgggggctctccatacaaatacgcgggaggagatgcggcctaaagaggggtgagaatgggaaaggggggaaaaaaacagggggcagggggataaagagaatttacgagcccacgacagatcacccagtataaacacactgttatgcaaagaccagcctgtggccacatcaaagtgagaaacgccattagcccagagagagatcgcgcggcattgcagaacaaaggagaaacgcggggacaaaataaaacgggaaagtgggatcgagggaaaagaaagggaagaaacactgagagagagccgtgatacaacaggggagcacagaacccgacgttgctattcaaccaccacagagcaccacagcgccgacaatagcacggaaagggaaaacaacgacgccacacgagtagtaaccaatacatatatcaaaacacgcgtgaggcacccaccaaccatacaagagcgagcgaaacacaaaaccggaggccacaaccacgagg

SEQ ID NO: 553736 - DNA, 476 bp, Homo sapiens
  misc_feature (52)..(52): n is a, c, g, or t
  misc_feature (120)..(120): n is a, c, g, or t
  misc_feature (184)..(184): n is a, c, g, or t
  misc_feature (189)..(189): n is a, c, g, or t
  misc_feature (213)..(213): n is a, c, g, or t
  misc_feature (282)..(282): n is a, c, g, or t
  misc_feature (365)..(365): n is a, c, g, or t
ggctgcgacatctgtcaccccattgatcgccagggttgattcggctgatctnggctggctaggcgggtgtccccttcctccctcacccgctccatgtgcgtccctccccgaagctgcgcnctcggtcgaagaggacgaccatcccccgatagagaaggaccggtcttcggtcaagggtgtcccncagancaggtgattgctggcttcaacctncttcggaggaacagcgaggcctggcatccaaagcagctgagttggagatggagttgaatgaagcacagnctaagtgatcgatacactgaaggaaggtaagatgaaactccgtaagtgctaccgcatggtttggaaggagttcttggtggaancgaacttgtcaaaagaggttgcttgccccgcttttggaagaacaacaaaggagcaagatacagaagatcatttgagacactgacacagcagcttcaggcaaagggaaaaga

SEQ ID NO: 553737 - DNA, 505 bp, Homo sapiens
atgaggctccctccctccctgcctactcccccgactctcactaccagctgttcctccccctgctcccaggcagtgtatcggcgatggttgaactgggctggttgctccatcattgtcctgctgggccagagcgtcgtttgacctgttcgacttctgttaccacctgctaaaagtgcagaggcaggacgggaaggctgaaatcattaagaatgtgcccctgaagaagatggcgaccggatcaggaagtatcagatacttgaaccaaatgaggttaagaccatcatgaacaaatacatgaagtccgctggagaccagacagtaccactgtggagcatgtgcgcatgctataccagccacccatccaccagtccttggacaacactatgcataagcagaagatcctgcaagaccctaatctgggaggaggacagagaagccaggagagagaaagccacagcaccgcctgacatcaggctacaccctggacaacgagtgcgatggacca

SEQ ID NO: 553738 - DNA, 593 bp, Homo sapiens
tggactcccaaatctcttttatggggggaaatgggcctctgtgggggtctcactgcccggtttgttcattggcactgtttcccgagttcctggggcttcatcacttcgggcagttctggcgggctggaaaacggttcgatgcacagggcctcaaaggttgtcatctgcccgaaaggccaggattgttgggttgttgttggtaaagctgcgggaccgtcaccgccaccctgagttgttattgttgtgcactgactgtggcaccaacctgaaacagaagggccatttcttgtggtggaggactcaattctacgtggtgagaagcttgcccgggagcgagttcacaccaccgtgagggtttatgaaggtggctcacgtcgtgtttccccaagttgagccagcagattctgaccacgtgttctccagcaggcctcgtgcgtgcagtctttttctctcagggttctgggccctctcctctcttgaaagttctctgctaaacttgggttatccctctgtttgtaaacactttgagtcccgctccctgcctgggttaattggactcacaccagttgtgcgatgcccgtttttacaattag

SEQ ID NO: 553739 - DNA, 171 bp, Homo sapiens
gcgctgtctttaaggcagggaacattcggcaagatgggatcgaccgcaggcgtgaaacgtttcagtttgttgcggcaaggataaagcgccttctcattttgagaaagcgtaattagagagatgcatcatttcagatctggtaacagtgacagaacgtcgctgcaggaatgc

SEQ ID NO: 553740 - DNA, 215 bp, Homo sapiens
ctagaggatcctcgacagacaccgactctgagggtgacagacgcgcgtaggttgcaagtaacggtcgttgcgtatcaccgacagacattagtacgaggcactgcaggcacgtaccgaaaggtattcgcgcgatgtccttggatcgagtgcatgcacaactgggacacgcgtattgttgggcaaccgggtggtgacaacgggtacctgagctcgta

SEQ ID NO: 553741 - DNA, 680 bp, Homo sapiens
  misc_feature (28)..(28): n is a, c, g, or t
  misc_feature (55)..(55): n is a, c, g, or t
  misc_feature (118)..(118): n is a, c, g, or t
  misc_feature (152)..(153): n is a, c, g, or t
  misc_feature (174)..(175): n is a, c, g, or t
  misc_feature (204)..(204): n is a, c, g, or t
  misc_feature (290)..(290): n is a, c, g, or t
  misc_feature (309)..(309): n is a, c, g, or t
  misc_feature (316)..(316): n is a, c, g, or t
  misc_feature (324)..(324): n is a, c, g, or t
  misc_feature (331)..(331): n is a, c, g, or t
  misc_feature (334)..(334): n is a, c, g, or t
  misc_feature (350)..(350): n is a, c, g, or t
  misc_feature (363)..(363): n is a, c, g, or t
  misc_feature (390)..(390): n is a, c, g, or t
aacttgaaattatagggaactatgaganacaatcactttgccaagccacctatanatactatgaataattacttgaaatcaggttgtgtagaatctatagttctcttaaaaccaagtngtgattctcaatattgcatgtgtataccatatannaggatgtagatctaacgtatnntagtagcatacttactacctgcagattanattcatttctcaagtactctaaagaacttcatatagaacatactgtatgagatgctataacttatcacaaaagagatattagcatntatagaattaagataatanaatgtangagctaanaaccatnatntgccattcatatatanatataacataganacagttatgtggataatatgaaaatanaattgtataggtgaactattcacttgaagacactcactgtttctccttctgagtaactaaccattatagctttttattgatgaaacatcattatctcacatctgaaattctttggctggaatgttttagtaacataagacactcctgtatataacaactctgacagaacagaggagttgcaaaataaaaaaagtaggagtcatattttaaagcatttgataaatttttaaataaattttttaaaatgtagagccaatctatcaccataaatgctcgtgccgaattcctgc

SEQ ID NO: 553742 - DNA, 118 bp, Homo sapiens
cacgaggcgggcttgtcctgagcctgtactgtcctcgcctgcacactcacctgtgcacgcatccccgcacactcttgactggcagggcggtcacgtcacctgcgggctggctccgagt

SEQ ID NO: 553743 - DNA, 738 bp, Homo sapiens
tccggcgagcccccgagcccggcggcaggcgagccaggcagcagcggcgcggacgcggccgccggctccagtgcagaccccgcgtgaaccaggaatccgtgccgcaagagcgagccgtctgccccggggcgcagacggagctattccagcaccagcagcaggtatctcgaggtaacgaagagagacacgtacatctcatgattgaaattattccagtgccagatctgtggagactagtcatcaggagatccattatggtgtcattacatgtgaaggctgcaagggctttttcaggagaagtcagcaagagcaaggccgacctactcctgtcctcgctcagaagaactgtttgattgatcgaaccaggtagaagaccgtggccaacactggtcgagttacagaacgatgccttgccgtagggatgtctcgtagatgctgtagacatttggccgaagtgtcgaagggagccgagagacgagcttgtatgcagagagtacagaaacgccggagtgcagcagcagtagcggcgagcaccagtagcagcctggagaggctgagccgatgacgcgcaactacaacgatctcggcaacgggggtgacggaacttcgcgacgacctcaggaactacgtgacgggcacaccctggggggagtaaggccgactcgccgcaggagttctccggggcatgggcctgccagacggcaggctggatcaggaataagcgaccattgggatgcc

SEQ ID NO: 553744 - DNA, 184 bp, Homo sapiens
aggaagctagggttagaggcaaccgtgagctagaacccgaacgtggtcggttggagcaatatgtccctccgagcacattgggaacctgagtatctgatgaaagggtaccacagaacccagataccagcatatcaatcaagactggacactggtaacagtatgactaaatatactcggaggctcg

SEQ ID NO: 553745 - DNA, 408 bp, Homo sapiens
cacgtgcatcatataggaatcattgtcttatgcgccgaattgagacctttggaatgagtggctctgttatttccttttcttcccccttgtctgtcctccatatcccattcagtctaagccatttattttattttttttagaccgagttttgctcttgttgcccaggctggagtgcaatggcgtaatctcggctcactgcaacttccacctcccaggttcaagtgattctcctgcgtcagcctcccaagtagctgggattacaggcacctgccaccatgcccagctaattttgcgcatttttagtagagacggggtttcaccatgttggacaggatggtctcgaactcctgacctcaggtgattccaaccgcctcagcctcgcaaagtgctggtattacaggcatgagc

SEQ ID NO: 553746 - DNA, 948 bp, Homo sapiens
  misc_feature (160)..(160): n is a, c, g, or t
  misc_feature (190)..(190): n is a, c, g, or t
  misc_feature (230)..(230): n is a, c, g, or t
  misc_feature (235)..(235): n is a, c, g, or t
  misc_feature (250)..(250): n is a, c, g, or t
  misc_feature (277)..(277): n is a, c, g, or t
  misc_feature (369)..(369): n is a, c, g, or t
  misc_feature (631)..(631): n is a, c, g, or t
  misc_feature (697)..(697): n is a, c, g, or t
  misc_feature (756)..(756): n is a, c, g, or t
  misc_feature (776)..(776): n is a, c, g, or t
  misc_feature (790)..(790): n is a, c, g, or t
  misc_feature (850)..(850): n is a, c, g, or t
  misc_feature (863)..(863): n is a, c, g, or t
  misc_feature (879)..(879): n is a, c, g, or t
  misc_feature (893)..(893): n is a, c, g, or t
gcgcgcgaggttcccctcgtttggcggcggcggcggcttctttgtttcgtgaagagaagcgagacgcccattctgcccccggccccgcgcggaggggcgggggaggcgccgggaagtcgacggcgccggcggctcctgaggtggccactgtctgcatgcntcccgtggaagatgtccactccagacccancccctgggcggaactcctctggccaggtccttccccgggnccctnggcccttcccctggnagccgatgctgggcccttagccctggngtccctcgccgggctccgcccacagcatgatggggcccagcccagggccgccctcagcaggacaccccgatccccacccaggggcctggagnggtaccctcaggacaacatgcaccagatgcacaagcccatggagtccatgcatgagaagggcatgtcggacgacccgcgctacaaccagatgaaaggaatggggatgcggtcagggggccatgctgggatggggcccccgcccagccccatggaccagcactcccaaggttacccctcgcccctgggtggctctgagcatgcctctagtccagttccagccagtggccgtcttcggggccccagatgtcttccgggcaggangtgccccgctgggatggtgctgtacccccaggccttgggggcagcagaaccgggggcccaaccccnattttaaccagaaaccagctgcaaccagctccagagctacagatcatgggccttacaanatgctgggccaagggggcancccccttccccgcnccactagccaataggcggtgcaaggcaaacggccgctagcccggggtagcaaccacaaanagccaaagctaantaccacactacggtcntccgccaaaaagtnaccggccctgggccctgggcccttggccccggccccggttccccggccccggccc

SEQ ID NO: 553747 - DNA, 411 bp, Homo sapiens
  misc_feature (40)..(40): n is a, c, g, or t
  misc_feature (279)..(279): n is a, c, g, or t
  misc_feature (376)..(376): n is a, c, g, or t
gagactgggtctcactctgtcacctagactgcagcccaanggcacaaacatgactgactgcggcctcaaactcctgggcacaatcaatcctcccacctcagcctcctgagaagctaggactacaggtgtataccaccatacgcagctaattttaaaaaaacttttttagagacagggtctcactatgttggccatgctggttcttgaactcctgggccttaagcgattctcccacctcagtctcccaaagtgctgggattacaaacgtgaggacactgncacccagccaaatggctatctttatagtgggatagtctttcatacatttattaaacttcttggaggaggcccttcattattattaaatgactctttncacctgaccatttaaaatggcctttaattttggaa

SEQ ID NO: 553748 - DNA, 410 bp, Homo sapiens
  misc_feature (17)..(17): n is a, c, g, or t
  misc_feature (29)..(29): n is a, c, g, or t
  misc_feature (85)..(85): n is a, c, g, or t
aacggaaaacttcggcntccccaaggttnaaagctattctcctgcctaagcctcccctagtaagctggaattgcaggcatgtgcnacaatgcttggctaattttgtatttttaagtagagacagggtttctccatgttggtcaggctggtctcgaactcccaacctcaggtgatccgcccacctcggcctcccaaagtgctcggattacaggcgtgagccaccgcgcccagccattcccatgattttaaatagcatctatagctgacaactcccaaatcagatgtctggccctgcagcttccccttttgccaactgactgctctccatctccacctagatatctgggaatctgggaagcatctcagactaagcatgcataaagctatgtactactcctctagcagccttc

SEQ ID NO: 553749 - DNA, 267 bp, Homo sapiens
aaaaagcccttttttcccttttcccccctgggaaaaaaatgggggggaaagggtttttttttaataaataatccaacctggtccccttttccggaaaagggccaccttttggtgttcccggggaaccccttttgggcctccccttttacccggtttgggggcccccccctttttggggtgtttttgcccccggttttgtttttgccaaaacgttttcccctttttaattagggttcccctttttttaattttaaattaattgggcca

SEQ ID NO: 553750 - DNA, 976 bp, Homo sapiens
ggtcgccatcatcccgccaatcagtggaggataatgcatctgagccttctgggaaagatgtggacgatgtccaggagaaacctaaagacataatacagttcactgccgagaagctctctgtgggggaagtgtcacagttggtggtgtcccctctgtgtggtgcagtgtctctcttgtagggactacaagaaataactttgaaggcaagaaagtcattagcttagaatatgaagcgtatgtaccgatggcagaaaatgaaatcagaaaaattgtaatgacattagacagaaatggcccgtgagacacatagcagtattccatcggcttggttggttccagtgtcagaagcaagcacagttatgctgtgtcttcagctcacagagccgcgtccctcgaagccgtgagctacgccattgattctttaaaagccaaggtgcccatatggaaaaaggaaatatatgaagaatcaacctcatcttggaaaagaaacaaagagtgcttctgggcagctggtgactagtcaagtgtggtgcgctaagtctaaaatttgataatctcatagctaacacaaacggagaatagccaagtgcatgagtgtgtgagatgaggggctgctaggacttaaagatggggagaaagggcttgactttaacctgtgataagatgtctgcaattagactcagcttctgtgactaactccttaataaccagctcgcaggtgcgctgcagccttcctttacttcagctgtctcaggagaacttgctgtccagagtgtactgggagcatcatatcagctgtgttccaaagatgggatcgaaatccttctaggacgggactcatatctggttaacgttaattaaaaaaaggggcgcaaatacccgggacattcacactctgtaaaggcataggaataaagaggggcacaggggaagacggtgtgtgactctcgtgtgaacacacacggaaaatagggcg

SEQ ID NO: 553751 - DNA, 262 bp, Homo sapiens
tttttcatgcgtcatgagatacgtgccgacacgctgcccttcggcctcgaagcgtttcgcgaggcgtttgcgccgatcgctgaagagttttcgatgacctggcatatcaccgacaccgagcagaaaaaacgtgtcgtgctgatggccagccgtgaatcccactgcctggccgacttgctgcaccgttggcacagcgatgagctggactgtgagatcgcctgtgtgatttccaaccatgatgacctgcgcagcatggtcgaat

SEQ ID NO: 553752 - DNA, 216 bp, Homo sapiens
gtcgctctagacggtccccggcgggtctcttctaccttccgggcgtgtctggaggagattcagagcaaactccagattctggcagcctcggtctggtggatgggcataaacttcagtgaactgggcggcaagtgcggcttcctcttccttcacttgggtggcaggagatgggagccgggctctctggctcacgtggctgctccttccattctccaa

SEQ ID NO: 553753 - DNA, 341 bp, Homo sapiens
  misc_feature (333)..(333): n is a, c, g, or t
tggaggtcaaaaggacatgttgcattaagcacatgatttacagctgtgatggtttagcgtttatatggaacatgttttgctacttgagataatgggagtaggagcctaggaaggctagaagcaaggagccagcaaggctagacacattccagaggacattatgtcagatatgcaagccctgcctcagtttctcccaacactcagctttttcctaacatgccccccttcttcttttttgttaaaaggaggaaagtatttatttactaggctattcattaggcaagggtgatttgcagggctgtgcaggcccctttaatttgcccggtttgggtngatcccag

SEQ ID NO: 553754 - DNA, 100 bp, Homo sapiens
gaagcgctagcagtatgagaccgagaaggtgctggctgctgtctacaaggctctgagtgaccaccacatctacctggaccagaaccccactttggaccga

SEQ ID NO: 553755 - DNA, 487 bp, Homo sapiens
  misc_feature (19)..(19): n is a, c, g, or t
caagagaagaaagtagaanaatgccagcactgtctttggaccctgtgtatctggagtgtgggaggacaggcagacacaaatagagaggctctagggaaaacagcattctcatagaagatccttctccacaaaaagccctccaaatgtcctccaggagggtagaagctggttttaaagctcctcagggtcaggaagatccttctcttatttttctttgcatcgtgcagtttaatttagcacagtactttgctcacagcacttaaaaaattattctgggccttgctttttaattttaggcccaaatacctgaaaaaatgttcaggaggaattctgataagaaagagctaacttaggcaattccatttctttttttggttcactgtttcctcatctgaaaagtgttgggctccatgacgtggtttctatgacactcagtacctttgttgaagagaaaacatttttctaaaactaggatttccaaaaaaac

SEQ ID NO: 553756 - DNA, 140 bp, Homo sapiens
ctcgtggtaccgggcgactgacgtgtggggacggaactggggtgggtttcgtactgttcacacctgtacttttactttttaccgtctgttacgactactggtggacgtacgtgatgacttgacggatggacgtacgactt

SEQ ID NO: 553757 - DNA, 473 bp, Homo sapiens
gctgaggaggagaatcgtttgaacccaggaggtggaggatcgtttgaacccaggaggtggaggttacaatgaaccaagatcgcgccactgcactccagcctgggcgacagagagatatcctttctcaaaaaaagaaaaaagaaagaaaagttccatgtcaccaaactgaaactaagttgttatctgaccttaggagaaatcagaaaagagacataacagccaatttcccaaggagaatcgcttgaacgcaggagttcaggactagcctggccaatgtggtgacactccatctctactaaaaatacaaaaaaaaaaaaaaaagaaaaagccaggcgtggtggcacacgcctgtaatcccagcttcttgggagactgaggcaggagatgcgctagagcccaggaggtggaggttgcagtgagccaagattgtgccagtgcactccagcctgggtgacagagtgagactctgtgtc

SEQ ID NO: 553758 - DNA, 3142 bp, Homo sapiens
agcgggtcctcacccgacggctcggccttggtcagcccgcagcctccgcccggcgctgagtcagcgcggccccgagggcccgaggggcgcggaccggccgccctgcccgcctctccccggcccgctgtcctcccgggttcggagccgccgatcctggaccctcggcgcggccgtgtgggtcggcgtccgtcgggcgttggcaaatggggctctgcgagggtccgcgcagggcgccagggcgcgcggcgacctcgctcctccgcgggcccggggcattcggccgattgcctcttgaccgacgatgcagcccggccgagtgggccacaaggcctgagtcatgaagacaaggcgaccagccagctcctgttggagacagattgggagtccattttgcagatctgcgacctgatccgccaaggggacacacaagcaaaatatgctgtgaattccatcaagaagaaagtcaacgacaagaacccacacgtcgccttgtatgccctggaggtcatggaatctgtggtaaagaactgtggccagacagttcatgatgaggtggccaacaagcagaccatggaggagctgaaggacctgctgaagagacaagtggaggtaaacgtccgtaacaagatcctgtacctgatccaggcctgggcgcatgccttccggaacgagcccaagtacaaggtggtccaggacacctaccagatcatgaaggtggaggggcacgtctttccagaattcaaagagagcgatgccatgtttgctgccgagagagccccagactgggtggacgctgaggaatgccaccgctgcagggtgcagttcggggtgatgacccgtaagcaccactgccgggcgtgtgggcagatattctgtggaaagtgttcttccaagtactccaccatccccaagtttggcatcgagaaggaggtgcgcgtgtgtgagccctgctacgagcagctgaacaggaaagcggagggaaaggccacttccaccactgagctgccccccgagtacctgaccagccccctgtctcagcagtcccagctgccccccaagagggacgagacggccctgcaggaggaggaggagctgcagctggccctggcgctgtcacagtcagaggcggaggagaaggagaggctgagacagaagtccacgtacacttcgtaccccaaggcggagcccatgccctcggcctcctcagcgccccccgccagcagcctgtactcttcacctgtgaactcgtcggcgcctctggctgaggacatcgaccctgagctcgcacggtatctcaaccggaactactgggagaagaagcaggaggaggctcgcaagagccccacgccatctgcgcccgtgcccctgacggagccggctgcacagcctggggaagggcacgcagcccccaccaacgtggtggagaaccccctcccggagacagactctcagcccattcctccctctggtggcccctttagtgagccacagttccacaatggcgagtctgaggagagccacgagcagttcctgaaggcgctgcagaacgccgtcaccaccttcgtgaaccgcatgaagagtaaccacatgcggggccgcagcatcaccaatgactcggccgtgctctcactcttccagtccatcaacggcatgcacccgcagctgctggagctgctcaaccagctggacgagcgcaggctgtactatgaggggctgcaggacaagctggcacagatccgcgatgcccggggggcgctgagtgccctgcgcgaagagcaccgggagaagcttcgccgggcagccgaggaggcagagcgccagcgccagatccagctggcccagaagctggagataatgcggcagaagaagcaggagtacctggaggtgcagaggcagctggccatccagcgcctgcaggagcaggagaaggagcggcagatgcggctggagcagcagaagcagacggtccagatgcgcgcgcagatgcccgccttccccctgccctacgcccagctccaggccatgcccgcagccggaggtgtgctctaccagccctcgggaccagccagcttccccagcaccttcagccctgccggctcggtggagggctccccaatgcacggcgtgtacatgagccagccggcccctgccgctggcccctaccccagcatgcccagcactgcggctgatcccagcatggtgagtgcctacatgtacccagcaggggccactggggcgcaggcggccccccaggcccaggccggaccaccgccagccccgcttactcatcctaccagcctactcccacagcgggctaccagaacgtggcctcccaggccccacagagcctcccggccatctctcagcctccgcagtccagcaccatgggctacatggggagccagtcagtctccatgggctaccagccttacaacatgcagaatctcatgaccaccctcccaagccaggatgcgtctctgccaccccagcagccctacatcgcggggcagcagcccatgtaccagcagatggcaccctctggcggtcccccccagcagcagccccccgtggcccagcaaccgcaggcacaggggccgccggcacagggcagcgaggcccagctcatttcattcgactgacccaggccatgctcacgtccggagtaacactacatacagttcacctgaaacgcctcgtctctaactgccgtcgtcctgcctccctgtcctctactgccggtagtgtcccttctctgcgagtgagggggggccttcaccccaagcccacctcccttgtcctcagcctactgcagtccctgagttagtctctgctttctttccccagggctgggccatggggagggaaggactttctcccaggggaagcccccagccctgtgggtcatggtctgtgagaggtggcaggaatggggaccctcaccccccaagcagcctgtgccctctggccgcactgtgagctggctgtggtgtctgggtgtggcctggggctccctctgcaggggcctctctcggcagccacagccaagggtggaggcttcaggtctccagcttctctgcttctcagctgccatctccagtgccccagaatggtacagcgataataaaatgtatttcagaaagca

SEQ ID NO: 553759 - DNA, 1029 bp, Homo sapiens
  misc_feature (142)..(142): n is a, c, g, or t
  misc_feature (149)..(149): n is a, c, g, or t
  misc_feature (211)..(211): n is a, c, g, or t
  misc_feature (214)..(214): n is a, c, g, or t
  misc_feature (218)..(218): n is a, c, g, or t
  misc_feature (231)..(231): n is a, c, g, or t
  misc_feature (240)..(240): n is a, c, g, or t
  misc_feature (263)..(263): n is a, c, g, or t
  misc_feature (309)..(309): n is a, c, g, or t
  misc_feature (330)..(330): n is a, c, g, or t
  misc_feature (359)..(359): n is a, c, g, or t
  misc_feature (370)..(370): n is a, c, g, or t
  misc_feature (435)..(435): n is a, c, g, or t
  misc_feature (455)..(456): n is a, c, g, or t
  misc_feature (459)..(460): n is a, c, g, or t
  misc_feature (463)..(463): n is a, c, g, or t
agcggccggcggctgcattacagagagcctgagctctggagcctcagcgagcggaggaggaggcgcagcggccgacggccgagtactgcggtgagagccagcgggccagcgccagcctcaacagccgccagaagtacacganggaaccnggcggcggcgtgtgcgtgtaggcccgtgtgcgggcggcggcgcgggagcagcgcggagcggnagnccgngcttggggcgggntggcatcantggacgagaaggtgttcaccaanggagctggacccagtggatccgagcagctgaacgatgtgcaagcangctgtccgagtcccaggtcanagagcctcttgcgagcaaggctaaagaantcctgacaaanaggaatccaacgtgcaagaggttcgatgtccagttactgtctgtggagatgtgcatgggcaattncatgatctcatggaactgtnnagnnatnggtggcaaatcaccagatacaaattacttggtatagtgggagcattattgtcgaccagaggatattatccagttgaaacagtttactgctgcttgtagcctcttaaggtccgtcaccgtgaaccgcatcaccattcttcgagggaatcatgagagcagacagatcacacaagtttagtggtccctatgatgcgctgttcacgaaaatttggacactgccactgtttgccaatttttcaccagatcttttggactatcttcctctcactgccttggggggatgggccagatcttctgtctacggtgggtggtctcctcgaccattttatagattcggctgggtccatattcggagccttggatcgcctacagggaagttccccatgagggtccactgttttacttgcgtggcgcgatcccaatacggcgggggggggggaatttccctcaggggggggttacacctttgtgggcgcgaatttttcgcggcttaatcactgcggggccccgtgtgcgttacaccaccccacgggggggtacatggcggcgcggggttagatggcgcca

SEQ ID NO: 553760 - DNA, 4606 bp, Homo sapiens
  misc_feature (2299)..(2299): n is a, c, g, or t
agcggaaaaaggcggaagcggaagtcggggggcgcgccagctcgtagcaggggagcgcccgcggcgtcgggtttgggctggaggtcgccatggggcgaggcagcggcaccttcgagcgtctcctagacaaggcgaccagccagctcctgttggagacagattgggagtccattttgcagatctgcgacctgatccgccaaggggacacacaagcaaaatatgctgtgaattccatcaagaagaaagtcaacgacaagaacccacacgtcgccttgtatgccctggaggtcatggaatctgtggtaaagaactgtggccagacagttcatgatgaggtggccaacaagcagaccatggaggagctgaaggacctgctgaagagacaagtggaggtaaacgtccgtaacaagatcctgtacctgatccaggcctgggcgcatgccttccggaacgagcccaagtacaaggtggtccaggacacctaccagatcatgaaggtggaggggcacgtctttccagaattcaaagagagcgatgccatgtttgctgccgagagagccccagactgggtggacgctgaggaatgccaccgctgcagggtgcagttcggggtgatgacccgtaagcaccactgccgggcgtgtgggcagatattctgtggaaagtgttcttccaagtactccaccatccccaagtttggcatcgagaaggaggtgcgcgtgtgtgagccctgctacgagcagctgaacaggaaagcggagggaaaggccacttccaccactgagctgccccccgagtacctgaccagccccctgtctcagcagtcccagctgccccccaagagggacgagacggccctgcaggaggaggaggagctgcagctggccctggcgctgtcacagtcagaggcggaggagaaggagaggctgagacagaagtccacgtacacttcgtaccccaaggcggagcccatgccctcggcctcctcagcgccccccgccagcagcctgtactcttcacctgtgaactcgtcggcgcctctggctgaggacatcgaccctgagctcgcacggtatctcaaccggaactactgggagaagaagcaggaggaggctcgcaagagccccacgccatctgcgcccgtgcccctgacggagccggctgcacagcctggggaagggcacgcagcccccaccaacgtggtggagaaccccctcccggagacagactctcagcccattcctccctctggtggcccctttagtgagccacagttccacaatggcgagtctgaggagagccacgagcagttcctgaaggcgctgcagaacgccgtcaccaccttcgtgaaccgcatgaagagtaaccacatgcggggccgcagcatcaccaatgactcggccgtgctctcactcttccagtccatcaacggcatgcacccgcagctgctggagctgctcaaccagctggacgagcgcaggctgtactatgaggggctgcaggacaagctggcacagatccgcgatgcccggggggcgctgagtgccctgcgcgaagagcaccgggagaagcttcgccgggcagccgaggaggcagagcgccagcgccagatccagctggcccagaagctggagataatgcggcagaagaagcaggagtacctggaggtgcagaggcagctggccatccagcgcctgcaggagcaggagaaggagcggcagatgcggctggagcagcagaagcagacggtccagatgcgcgcgcagatgcccgccttccccctgccctacgcccagctccaggccatgcccgcagccggaggtgtgctctaccagccctcgggaccagccagcttccccagcaccttcagccctgccggctcggtggagggctccccaatgcacggcgtgtacatgagccagccggcccctgccgctggcccctaccccagcatgcccagcactgcggctgatcccagcatggtgagtgcctacatgtacccagcaggggccactggggcgcaggcggccccccaggcccaggccggaccaccgccagccccgcttactcatcctaccagcctactcccacagcgggctaccagaacgtggcctcccaggccccacagagcctcccggccatctctcagcctccgcagtccagcaccatgggctacatggggagccagtcagtctccatgggctaccagccttacaacatgcagaatctcatgaccaccctcccaagccaggatgcgtctctgccaccccagcagccctacatcgcggggcagcagcantggtaccagcagggggagacgcatacccgaggccccttctcagcagacagaacgaggacacaagtctcagggcagatacgcgcatccgcaagtgtagacaggaaaaaccgtgaatttacttgaaaggcaaaggccgcatgagctggctgcatgagctgcagtccgtggacatggattacaagcacttgtgggtctgtggctctgctgggacaaaagccttcctccctgggctggggaagggaggaccagggccatgcctgctttcctcctgcaccatgtaccagcagatggcaccctctggcggtcccccccagcagcagccccccgtggcccagcaaccgcaggcacaggggccgccggcacagggcagcgaggcccagctcatttcattcgactgacccaggccatgctcacgtccggagtaacactacatacagttcacctgaaacgcctcgtctctaactgccgtcgtcctgcctccctgtcctctactgccggtagtgtcccttctctgcgagtgagggggggccttcaccccaagcccacctcccttgtcctcagcctactgcagtccctgagttagtctctgctttctttccccagggctgggccatggggagggaaggactttctcccaggggaagcccccagccctgtgggtcatggtctgtgagaggtggcaggaatggggaccctcaccccccaagcagcctgtgccctctggccgcactgtgagctggctgtggtgtctgggtgtggcctggggctccctctgcaggggcctctctcggcagccacagccaagggtggaggcttcaggtctccagcttctctgcttctcagctgccatctccagtgccccagaatggtacagcgataataaaatgtatttcagaaagcatcagcgttttttctttaattaatttttttgagatggagtctcactctgtcacccaggctggagtggtgatctccgctcactgcaagctccgcctcctgggttcaagcgattctcgggcctcagcctcccgagtagctggactacaggtgcaccccattaccatgcctggctagtttttgtatttttagtagcgacggtgtttcaccatgttggccaggctggtcgtgaacgcctaacctcaggtgatccacctgcctcgggctcctaaagtgctgggattacaggcatgagccaccgcgcccgacctgcatcaacgtttgctcagggggcaggtggtcaggctgatggcccagctgcaggcagggtcatttccagcctgcccctccctgaggctgcgtgccagggttcatgtgtgccctccgcggctctgcactgaccccgccggtagctggggaggagtttgggcttggcgcctccttcgtgtagtggctgaagcttcccgggtgctcctcattcctgggaagggagtcgggtgatgggaacggtgggagctcagcgctccgagtctgcggccgggggccagcggggctgaaacgcgcctcctgagtgttgaaagcggcaggcgccggcctttgcacccagaggccagggcgtctcactcaccttcacatccaggcctcttaggggagcgcggctttggcttttccaggaaggaatggactccaacggacagggaaagaagaagtgtggagagacgggcaggataagcaggcactgggcccaagccgcccttggaggctctgcctgttctgatctgaaggcggaggctcagccgtgctctcccaggaagccacctgggcgtttggggctttagctaggaaagaggatgtcgcctgcggctgcgaaggcgccaaagcccagacctcgcgcctccgcccgcgacggcggcactgggggcccggagcgggcgggagacgtggattactgcgggcttcggggccctagcctcgaccgcgacgttcgctcgcatcgcgtacggacagaaacccgtgagcgctgaagaaagaacacctgaatccggagccccagcccccgtcgctcgtttgcgcgaccccaaaacctggcgggacgagggtcgcccgatgtctagctgccgccacagacgacgcttttgcgtctgcgcagcgcgccgccttgtgggtaatctcagggtgagacgaggctagcgcgaggtacggctagagcgtcatttccggctcgaatgcccggcagccgtggcggctagagcgttcctccccagctcgaatgcccggcggccgaggcggctagagcgtcgcctcctcccggggaaccgcgtgtgaccttccagcccgcggaccgatgctgccggcggccgcaagcttatc

SEQ ID NO: 553761 - DNA, 3218 bp, Homo sapiens
agcggaaaaaggcggaagcggaagtcggggggcgcgccagctcgtagcaggggagcgcccgcggcgtcgggtttgggctggaggtcgccatggggcgaggcagcggcaccttcgagcgtctcctagacaaggcgaccagccagctcctgttggagacagattgggagtccattttgcagatctgcgacctgatccgccaaggggacacacaagcaaaatatgctgtgaattccatcaagaagaaagtcaacgacaagaacccacacgtcgccttgtatgccctggaggtcatggaatctgtggtaaagaactgtggccagacagttcatgatgaggtggccaacaagcagaccatggaggagctgaaggacctgctgaagagacaagtggaggtaaacgtccgtaacaagatcctgtacctgatccaggcctgggcgcatgccttccggaacgagcccaagtacaaggtggtccaggacacctaccagatcatgaaggtggaggggcacgtctttccagaattcaaagagagcgatgccatgtttgctgccgagagagccccagactgggtggacgctgaggaatgccaccgctgcagggtgcagttcggggtgatgacccgtaagcaccactgccgggcgtgtgggcagatattctgtggaaagtgttcttccaagtactccaccatccccaagtttggcatcgagaaggaggtgcgcgtgtgtgagccctgctacgagcagctgaacaggaaagcggagggaaaggccacttccaccactgagctgccccccgagtacctgaccagccccctgtctcagcagtcccagctgccccccaagagggacgagacggccctgcaggaggaggaggagctgcagctggccctggcgctgtcacagtcagaggcggaggagaaggagaggctgagacagaagtccacgtacacttcgtaccccaaggcggagcccatgccctcggcctcctcagcgccccccgccagcagcctgtactcttcacctgtgaactcgtcggcgcctctggctgaggacatcgaccctgagctcgcacggtatctcaaccggaactactgggagaagaagcaggaggaggctcgcaagagccccacgccatctgcgcccgtgcccctgacggagccggctgcacagcctggggaagggcacgcagcccccaccaacgtggtggagaaccccctcccggagacagactctcagcccattcctccctctggtggcccctttagtgagccacagttccacaatggcgagtctgaggagagccacgagcagttcctgaaggcgctgcagaacgccgtcaccaccttcgtgaaccgcatgaagagtaaccacatgcggggccgcagcatcaccaatgactcggccgtgctctcactcttccagtccatcaacggcatgcacccgcagctgctggagctgctcaaccagctggacgagcgcaggctgtactatgaggggctgcaggacaagctggcacagatccgcgatgcccggggggcgctgagtgccctgcgcgaagagcaccgggagaagcttcgccgggcagccgaggaggcagagcgccagcgccagatccagctggcccagaagctggagataatgcggcagaagaagcaggagtacctggaggtgcagaggcagctggccatccagcgcctgcaggagcaggagaaggagcggcagatgcggctggagcagcagaagcagacggtccagatgcgcgcgcagatgcccgccttccccctgccctacgcccagctccaggccatgcccgcagccggaggtgtgctctaccagccctcgggaccagccagcttccccagcaccttcagccctgccggctcggtggagggctccccaatgcacggcgtgtacatgagccagccggcccctgccgctggcccctaccccagcatgcccagcactgcggctgatcccagcatggtgagtgcctacatgtacccagcaggggccactggggcgcaggcggccccccaggcccaggccggaccaccgccagccccgcttactcatcctaccagcctactcccacagcgggctaccagaacgtggcctcccaggccccacagagcctcccggccatctctcagcctccgcagtccagcaccatgggctacatggggagccagtcagtctccatgggctaccagccttacaacatgcagaatctcatgaccaccctcccaagccaggatgcgtctctgccaccccagcagccctacatcgcggggcagcagcccatgtaccagcagatggcaccctctggcggtcccccccagcagcagccccccgtggcccagcaaccgcaggcacaggggccgccggcacagggcagcgaggcccagctcatttcattcgactgacccaggccatgctcacgtccggagtaacactacatacagttcacctgaaacgcctcgtctctaactgccgtcgtcctgcctccctgtcctctactgccggaaggaatggactccaacggacagggaaagaagaagtgtggagagacgggcaggataagcaggcactgggcccaagccgcccttggaggctctgcctgttctgatctgaaggcggaggctcagccgtgctctcccaggaagccacctgggcgtttggggctttagctaggaaagaggatgtcgcctgcggctgcgaaggcgccaaagcccagacctcgcgcctccgcccgcgacggcggcactgggggcccggagcgggcgggagacgtggattactgcgggcttcggggccctagcctcgaccgcgacgttcgctcgcatcgcgtacggacagaaacccgtgagcgctgaagaaagaacacctgaatccggagccccagcccccgtcgctcgtttgcgcgaccccaaaacctggcgggacgagggtcgcccgatgtctagctgccgccacagacgacgcttttgcgtctgcgcagcgcgccgccttgtgggtaatctcagggtgagacgaggctagcgcgaggtacggctagagcgtcatttccggctcgaatgcccggcagccgtggcggctagagcgttcctccccagctcgaatgcccggcggccgaggcggctagagcgtcgcctcctcccggggaaccgcgtgtgaccttccagcccgcggaccgatgctgccggcggccgcaagcttatc

SEQ ID NO: 553762 - DNA, 272 bp, Homo sapiens
ccccccggggggttgggcccctccctggggttccttccccgggccgggggggggggttttttaaaaaaaaattcccccccttcccccttttccccctggggttggaaaaggggtttcccctcccaaggttttggccccccggggggttccccttgggggagcccccccgcccccccccccttttttgggttttgggggggttaacccccaggggggattttttccccttttttttgggccgggggggggtttttaaccccccccttttttta

SEQ ID NO: 553763 - DNA, 2241 bp, Homo sapiens
cgggcagatcacgaggccaagagatcaagacaatcctggccaacatggtgaaatcccgtctgaacaggaaagcggagggaaaggccacttccaccactgagctgccccccgagtacctgaccagccccctgtctcagcagtcccagctgccccccaagagggacgagacggccctgcaggaggaggaggagctgcagctggccctggcgctgtcacagtcagaggcggaggagaaggagaggctgagacagaagtccacgtacacttcgtaccccaaggcggagcccatgccctcggcctcctcagcgccccccgccagcagcctgtactcttcacctgtgaactcgtcggcgcctctggctgaggacatcgaccctgagctcgcacggtatctcaaccggaactactgggagaagaagcaggaggaggctcgcaagagccccacgccatctgcgcccgtgcccctgacggagccggctgcacagcctggggaagggcacgcagcccccaccaacgtggtggagaaccccctcccggagacagactctcagcccattcctccctctggtggcccctttagtgagccacagttccacaatggcgagtctgaggagagccacgagcagttcctgaaggcgctgcagaacgccgtcaccaccttcgtgaaccgcatgaagagtaaccacatgcggggccgcagcatcaccaatgactcggccgtgctctcactcttccagtccatcaacggcatgcacccgcagctgctggagctgctcaaccagctggacgagcgcaggctgtactatgaggggctgcaggacaagctggcacagatccgcgatgcccggggggcgctgagtgccctgcgcgaagagcaccgggagaagcttcgccgggcagccgaggaggcagagcgccagcgccagatccagctggcccagaagctggagataatgcggcagaagaagcaggagtacctggaggtgcagaggcagctggccatccagcgcctgcaggagcaggagaaggagcggcagatgcggctggagcagcagaagcagacggtccagatgcgcgcgcagatgcccgccttccccctgccctacgcccagctccaggccatgcccgcagccggaggtgtgctctaccagccctcgggaccagccagcttccccagcaccttcagccctgccggctcggtggagggctccccaatgcacggcgtgtacatgagccagccggcccctgccgctggcccctaccccagcatgcccagcactgcggctgatcccagcatggtgagtgcctacatgtacccagcaggggccactggggcgcaggcggccccccaggcccaggccggaccaccgccagccccgcttactcatcctaccagcctactcccacagcgggctaccagaacgtggcctcccaggccccacagagcctcccggccatctctcagcctccgcagtccagcaccatgggctacatggggagccagtcagtctccatgggctaccagccttacaacatgcagaatctcatgaccaccctcccaagccaggatgcgtctctgccaccccagcagccctacatcgcggggcagcagcccatgtaccagcagatggcaccctctggcggtcccccccagcagcagccccccgtggcccagcaaccgcaggcacaggggccgccggcacagggcagcgaggcccagctcatttcattcgactgacccaggccatgctcacgtccggagtaacactacatacagttcacctgaaacgcctcgtctctaactgccgtcgtcctgcctccctgtcctctactgccggtagtgtcccttctctgcgagtgagggggggccttcaccccaagcccacctcccttgtcctcagcctactgcagtccctgagttagtctctgctttctttccccagggctgggccatggggagggaaggactttctcccaggggaagcccccagccctgtgggtcatggtctgtgagaggtggcaggaatggggaccctcaccccccaagcagcctgtgccctctggccgcactgtgagctggctgtggtgtctgggtgtggcctggggctccctctgcaggggcctctctcggcagccacagccaagggtggaggcttcaggtctccagcttctctgcttctcagctgccatctccagtgccccagaatggtacagcgataataaaatgtatttcagaaagca

SEQ ID NO: 553764 - DNA, 2374 bp, Homo sapiens
agcggaaaaaggcggaagcggaagtcggggggcgcgccagctcgtagcaggggagcgcccgcggcgtcgggtttgggctggaggtcgccatggggcgaggcagcggcaccttcgagcgtctcctagacaaggcgaccagccagctcctgttggagacagattgggagtccattttgcagatctgcgacctgatccgccaaggggacacacaagcaaaatatgctgtgaattccatcaagaagaaagtcaacgacaagaacccacacgtcgccttgtatgccctggaggtcatggaatctgtggtaaagaactgtggccagacagttcatgatgaggtggccaacaagcagaccatggaggagctgaaggacctgctgaagagacaagtggaggtaaacgtccgtaacaagatcctgtacctgatccaggcctgggcgcatgccttccggaacgagcccaagtacaaggtggtccaggacacctaccagatcatgaaggtggaggggcacgtctttccagaattcaaagagagcgatgccatgtttgctgccgagagagccccagactgggtggacgctgaggaatgccaccgctgcagggtgcagttcggggtgatgacccgtaagcaccactgccgggcgtgtgggcagatattctgtggaaagtgttcttccaagtactccaccatccccaagtttggcatcgagaaggaggtgcgcgtgtgtgagccctgctacgagcagctgaacaggaaagcggagggaaaggccacttccaccactgagctgccccccgagtacctgaccagccccctgtctcagcagtcccagctgccccccaagagggacgagacggccctgcaggaggaggaggagctgcagctggccctggcgctgtcacagtcagaggcggaggagaaggagaggctgagacagaagtccacgtacacttcgtaccccaaggcggagcccatgccctcggcctcctcagcgccccccgccagcagcctgtactcttcacctgtgaactcgtcggcgcctctggctgaggacatcgaccctgagctcgcacggtatctcaaccggaactactgggagaagaagcaggaggaggctcgcaagagccccacgccatctgcgcccgtgcccctgacggagccggctgcacagcctggggaagggcacgcagcccccaccaacgtggtggagaaccccctcccggagacagactctcagcccattcctccctctggtggcccctttagtgagccacagttccacaatggcgagtctgaggagagccacgagcagttcctgaaggcgctgcagaacgccgtcaccaccttcgtgaaccgcatgaagagtaaccacatgcggggccgcagcatcaccaatgactcggccgtgctctcactcttccagtccatcaacggcatgcacccgcagctgctggagctgctcaaccagctggacgagcgcaggctgtactatgaggggctgcaggacaagctggcacagatccgcgatgcccggggggcgctgagtgccctgcgcgaagagcaccgggagaagcttcgccgggcagccgaggaggcagagcgccagcgccagatccagctggcccagaagctggagataatgcggcagaagaagcaggagtacctggaggtgcagaggcagctggccatccagcgcctgcaggagcaggagaaggagcggcagatgcggctggagcagcagaagcagacggtccagatgcgcgcgcagatgcccgccttccccctgccctacgcccagctccaggccatgcccgcagccggaggtgtgctctaccagccctcgggaccagccagcttccccagcaccttcagccctgccggctcggtggagggctccccaatgcacggcgtgtacatgagccagccggcccctgccgctggcccctaccccagcatgcccagcactgcggctgatcccagcatggtgagtgcctacatgtacccagcaggggccactggggcgcaggcggccccccaggcccaggccggaccaccgccagccccgcttactcatcctaccagcctactcccacagcgggctaccagaacgtggcctcccaggccccacagagcctcccggccatctctcagcctccgcagtccagcaccatgggctacatggggagccagtcagtctccatgggctaccagccttacaacatgcagaatctcatgaccaccctccctctgcaggggcctctctcggcagccacagccaagggtggaggcttcaggtctccagcttctctgcttctcagctgccatctccagtgccccagaatggtacagcgataataaaatgtatttcagaaagca

SEQ ID NO: 553765 - DNA, 2025 bp, Homo sapiens
agcggaaaaaggcggaagcggaagtcggggggcgcgccagctcgtagcaggggagcgcccgcggcgtcgggtttgggctggaggtcgccatggggcgaggcagcagcctgtactcttcacctgtgaactcgtcggcgcctctggctgaggacatcgaccctgagctcgcacggtatctcaaccggaactactgggagaagaagcaggaggaggctcgcaagagccccacgccatctgcgcccgtgcccctgacggagccggctgcacagcctggggaagggcacgcagcccccaccaacgtggtggagaaccccctcccggagacagactctcagcccattcctccctctggtggcccctttagtgagccacagttccacaatggcgagtctgaggagagccacgagcagttcctgaaggcgctgcagaacgccgtcaccaccttcgtgaaccgcatgaagagtaaccacatgcggggccgcagcatcaccaatgactcggccgtgctctcactcttccagtccatcaacggcatgcacccgcagctgctggagctgctcaaccagctggacgagcgcaggctgtactatgaggggctgcaggacaagctggcacagatccgcgatgcccggggggcgctgagtgccctgcgcgaagagcaccgggagaagcttcgccgggcagccgaggaggcagagcgccagcgccagatccagctggcccagaagctggagataatgcggcagaagaagcaggagtacctggaggtgcagaggcagctggccatccagcgcctgcaggagcaggagaaggagcggcagatgcggctggagcagcagaagcagacggtccagatgcgcgcgcagatgcccgccttccccctgccctacgcccagctccaggccatgcccgcagccggaggtgtgctctaccagccctcgggaccagccagcttccccagcaccttcagccctgccggctcggtggagggctccccaatgcacggcgtgtacatgagccagccggcccctgccgctggcccctaccccagcatgcccagcactgcggctgatcccagcatggtgagtgcctacatgtacccagcaggggccactggggcgcaggcggccccccaggcccaggccggaccaccgccagccccgcttactcatcctaccagcctactcccacagcgggctaccagaacgtggcctcccaggccccacagagcctcccggccatctctcagcctccgcagtccagcaccatgggctacatggggagccagtcagtctccatgggctaccagccttacaacatgcagaatctcatgaccaccctcccaagccaggatgcgtctctgccaccccagcagccctacatcgcggggcagcagcccatgtaccagcagatggcaccctctggcggtcccccccagcagcagccccccgtggcccagcaaccgcaggcacaggggccgccggcacagggcagcgaggcccagctcatttcattcgactgacccaggccatgctcacgtccggagtaacactacatacagttcacctgaaacgcctcgtctctaactgccgtcgtcctgcctccctgtcctctactgccggtagtgtcccttctctgcgagtgagggggggccttcaccccaagcccacctcccttgtcctcagcctactgcagtccctgagttagtctctgctttctttccccagggctgggccatggggagggaaggactttctcccaggggaagcccccagccctgtgggtcatggtctgtgagaggtggcaggaatggggaccctcaccccccaagcagcctgtgccctctggccgcactgtgagctggctgtggtgtctgggtgtggcctggggctccctctgcaggggcctctctcggcagccacagccaagggtggaggcttcaggtctccagcttctctgcttctcagctgccatctccagtgccccagaatggtacagcgataataaaatgtatttcagaaagca

SEQ ID NO: 553766 - DNA, 1571 bp, Homo sapiens
agcggaaaaaggcggaagcggaagtcggggggcgcgccagctcgtagcaggggagcgcccgcggcgtcgggtttgggctggaggtcgccatggggcgaggcagcggcaccttcgagcgtctcctagacaaggcgaccagccagctcctgttggagacagattgggagtccattttgcagatctgcgacctgatccgccaaggggacacacaagcaaaatatgctgtgaattccatcaagaagaaagtcaacgacaagaacccacacgtcgccttgtatgccctggaggtcatggaatctgtggtaaagaactgtggccagacagttcatgatgaggtggccaacaagcagaccatggaggagctgaaggacctgctgaagagacaagtggaggtaaacgtccgtaacaagatcctgtacctgatccaggcctgggcgcatgccttccggaacgagcccaagtacaaggtggtccaggacacctaccagatcatgaaggtggaggggcacgtctttccagaattcaaagagagcgatgccatgtttgctgccgagagagccccagactgggtggacgctgaggaatgccaccgctgcagggtgcagttcggggtgatgacccgtaagcaccactgccgggcgtgtgggcagatattctgtggaaagtgttcttccaagtactccaccatccccaagtttggcatcgagaaggaggtgcgcgtgtgtgagccctgctacgagcagctgaacaggaaagcggagggaaaggccacttccaccactgagctgccccccgagtacctgaccagccccctgtctcagcagtcccagctgccccccaagagggacgagacggccctgcaggaggaggaggagctgcagctggccctggcgctgtcacagtcagaggcggaggagaaggagaggctgagacagaagtccacgtacacttcgtaccccaaggcggagcccatgccctcggcctcctcagcgccccccgccagcagcctgtactcttcacctgtgaactcgtcggcgcctctggctgaggacatcgaccctgagctcgcacggtatctcaaccggaactactgggagaagaagcaggaggaggctcgcaagagccccacgccatctgcgcccgtgcccctgacggagccggctgcacagcctggggaagggcacgcagcccccaccaacgtggtggagaaccccctcccggagacagactctcagcccattcctccctctggtggcccctttagtgagccacagttccacaatggcgagtctgaggagagccacgagcagttcctgaaggcgctgcagaacgccgtcaccaccttcgtgaaccgcatgaagagtaaccacatgcggggccgcagcatcaccaatgactcggccgtgctctcactcttccagtccatcaacggcatgcacccgcagctgctggagctgctcaaccagctggacgagcgccagggccgataagggggttggcccccgcgaccacggggcctcggctcaggggcagccaggtgttgagtacctggaggtgcagaggcagtggcc

SEQ ID NO: 553767 - DNA, 319 bp, Homo sapiens
agacaaatgtctttgttctttatatttagattaagtcctcagaaaacctgagattgcttccactgagatatttgctcaacgaaaaatcctatttgacttcacactcaattaactgatagtttcatttagatttaaagttttcacaggtaaccaccagaataaatttttagaactgtgcattgaacacaaaatgagctggttttatcatgtcagcaaaatgagagtaacagagtagtatattttaattggctaccatagaaattttgtaaatctttatccaaacctatatgttcgggtttgtcgtaaaactgaagtgaag

SEQ ID NO: 553768 - DNA, 255 bp, Homo sapiens
ctggtggtgatctattcagcaggtacacaactactatataaagggtatattatatatacatactcattatgattcaacaatactatccagtaccaataattatgcccatataattggatcaggaaacacacaattaaaagcctggtaacttgatctagggaaactacctaataaactattgttccaggattctcaacctagaataattccaaaccttttatcccttctgtcctgtcagctaacatttgatataac

SEQ ID NO: 553769 - DNA, 1154 bp, Homo sapiens
agcggaaaaaggcggaagcggaagtcggggggcgcgccagctcgtagcaggggagcgcccgcggcgtcgggtttgggctggaggtcgccatggggcgaggcagcggcaccttcgagcgtctcctagacaaggcgaccagccagctcctgttggagacagattgggagtccattttgcagatctgcgacctgatccgccaaggggacacacaagcaaaatatgctgtgaattccatcaagaagaaagtcaacgacaagaacccacacgtcgccttgtatgccctggaggtcatggaatctgtggtaaagaactgtggccagacagttcatgatgaggtggccaacaagcagaccatggaggagctgaaggacctgctgaagagacaagtggaggtaaacgtccgtaacaagatcctgtacctgatccaggcctgggcgcatgccttccggaacgagcccaagtacaaggtggtccaggacacctaccagatcatgaaggtggaggggcacgtctttccagaattcaaagagagcgatgccatgtttgctgccgagagagccccagactgggtggacgctgaggaatgccaccgctgcagggtgcagttcggggtgatgacccgtaagcaccactgccgggcgtgtgggcagatattctgtggaaagtgttcttccaagtactccaccatccccaagtttggcatcgagaaggaggtgcgcgtgtgtgagccctgctacgagcagctgaacaggaaagcggagggaaaggccacttccaccactgagctgccccccgagtacctgaccagccccctgtctcagcagtccctgagttagtctctgctttctttccccagggctgggccatggggagggaaggactttctcccaggggaagcccccagccctgtgggtcatggtctgtgagaggtggcaggaatggggaccctcaccccccaagcagcctgtgccctctggccgcactgtgagctggctgtggtgtctgggtgtggcctggggctccctctgcaggggcctctctcggcagccacagccaagggtggaggcttcaggtctccagcttctctgcttctcagctgccatctccagtgccccagaatggtacagcgataataaaatgtatttcagaaagca

SEQ ID NO: 553770 - DNA, 132 bp, Homo sapiens
gaggatcccctcattatgcaattcctcgtgactataaccatgtctgtctgtctgtccatctgtactccctcgtttactattaaccatgtctagtccgtccatcggtactccctcgttaactatcaaccatgt

SEQ ID NO: 553771 - DNA, 841 bp, Homo sapiens
agcggaaaaaggcggaagcggaagtcggggggcgcgccagctcgtagcaggggagcgcccgcggcgtcgggtttgggctggaggtcgccatggggcgaggcagcggcaccttcgagcgtctcctagacaaggcgaccagccagctcctgttggagacagattgggagtccattttgcagatctgcgacctgatccgccaaggggacacacaagcaaaatatgctgtgaattccatcaagaagaaagtcaacgacaagaacccacacgtcgccttgtatgccctggaggtcatggaatctgtggtaaagaactgtggccagacagttcatgatgaggtggccaacaagcagaccatggaggagctgaaggacctgctgaagagacaagtggaggtaaacgtccgtaacaagatcctgcctccctgtcctctactgccggtagtgtcccttctctgcgagtgagggggggccttcaccccaagcccacctcccttgtcctcagcctactgcagtccctgagttagtctctgctttctttccccagggctgggccatggggagggaaggactttctcccaggggaagcccccagccctgtgggtcatggtctgtgagaggtggcaggaatggggaccctcaccccccaagcagcctgtgccctctggccgcactgtgagctggctgtggtgtctgggtgtggcctggggctccctctgcaggggcctctctcggcagccacagccaagggtggaggcttcaggtctccagcttctctgcttctcagctgccatctccagtgccccagaatggtacagcgataataaaatgtatttcagaaagca

SEQ ID NO: 553772 - DNA, 314 bp, Homo sapiens
  misc_feature (204)..(204): n is a, c, g, or t
  misc_feature (310)..(310): n is a, c, g, or t
gaggcgccggcttcccttgatccgccggccgttgtcgccgagtcggtgtcgttctttaacatcggcgacgggttcaattcaggccgccaggacttaagttccaaccccgcggggccccgcctttccaaggaggttaattttttccttccctaattgacagcgccatttacagacaaagcctgggaaggttaacgcgcacctttnacaagcacacggggggagagaccatttgtttttgactattgagggtgtggcaggccttcatcaggctctaccatctgagccgccaacattctgactcacacagagnagag

SEQ ID NO: 553773 - DNA, 767 bp, Homo sapiens
ggtgcttgccggttaccccttttcagaacgcggttccttccttaaagaaacgacaaggcgaccagccagctcctgttggagacagattgggagtccattttgcagatctgcgacctgatccgccaaggggacacacaagcaaaatatgctgtgaattccatcaagaagaaagtcaacgacaagaacccacacgtcgccttgtatgccctggaggtcatggaatctgtggtaaagaactgtggccagacagttcatgatgaggtggccaacaagcagaccatggaggagctgaaggacctgctgaagagacaagtggaggtaaacgtccgtaacaagatcctgcctccctgtcctctactgccggtagtgtcccttctctgcgagtgagggggggccttcaccccaagcccacctcccttgtcctcagcctactgcagtccctgagttagtctctgctttctttccccagggctgggccatggggagggaaggactttctcccaggggaagcccccagccctgtgggtcatggtctgtgagaggtggcaggaatggggaccctcaccccccaagcagcctgtgccctctggccgcactgtgagctggctgtggtgtctgggtgtggcctggggctccctctgcaggggcctctctcggcagccacagccaagggtggaggcttcaggtctccagcttctctgcttctcagctgccatctccagtgccccagaatggtacagcgataataaaatgtatttcagaaagca

SEQ ID NO: 553774 - DNA, 609 bp, Homo sapiens
  misc_feature (7)..(7): n is a, c, g, or t
  misc_feature (72)..(72): n is a, c, g, or t
  misc_feature (87)..(87): n is a, c, g, or t
  misc_feature (90)..(90): n is a, c, g, or t
  misc_feature (98)..(98): n is a, c, g, or t
  misc_feature (107)..(107): n is a, c, g, or t
  misc_feature (119)..(119): n is a, c, g, or t
  misc_feature (132)..(133): n is a, c, g, or t
  misc_feature (138)..(138): n is a, c, g, or t
  misc_feature (140)..(140): n is a, c, g, or t
  misc_feature (152)..(152): n is a, c, g, or t
  misc_feature (156)..(157): n is a, c, g, or t
  misc_feature (159)..(159): n is a, c, g, or t
  misc_feature (161)..(161): n is a, c, g, or t
  misc_feature (164)..(164): n is a, c, g, or t
  misc_feature (204)..(204): n is a, c, g, or t
  misc_feature (226)..(226): n is a, c, g, or t
  misc_feature (228)..(229): n is a, c, g, or t
  misc_feature (231)..(231): n is a, c, g, or t
  misc_feature (280)..(280): n is a, c, g, or t
  misc_feature (325)..(325): n is a, c, g, or t
  misc_feature (327)..(327): n is a, c, g, or t
  misc_feature (329)..(329): n is a, c, g, or t
  misc_feature (331)..(331): n is a, c, g, or t
  misc_feature (349)..(349): n is a, c, g, or t
  misc_feature (352)..(353): n is a, c, g, or t
  misc_feature (600)..(600): n is a, c, g, or t
gcaggtntcacccttgatggtgcaaggccctgcgtggctattcgggttctcccccttaatggagttgctgtnaggagatgaaccttnttnggggaccngcagaggcnggctcagaaganactgctcttaagnngtttngnggactaacaggntatnntntnttntggtggcctcagcacagtctgtcagcttggggcctaagtnaagttcacaggctgatagggcntnntngagcaggccattcaccttccggggccactggctgggctgatcatcagancccctctggctggtcttggggctgttattcaccttgtcagcagcngntntnagctcagcaaggtgctgnttnngaggctgggtgggcacaccaagggctgggtgggagcaggtacagggcgctgtgggcaggaccctttggactcctcaagtttccgactcgtctgtttcttcagtggagccatcactctctccatccacttttcgggaatgatggagaggtctccagggagagccaacccggggaggggtccgggaaggcaggcaactggcctctggactggctgtgaccgagttgaccaggcctgggacctgggccancagccgttc

SEQ ID NO: 553775 - DNA, 234 bp, Homo sapiens
ggtgttatgtgtcttgttgtgataactaaccgtcgggagttttgaataccagccgggccaacgtggtgaaaccccgtctctacaaaagaaaatacaaaaattggccaagctgtggtggtgcatgcctgtagtcccagctactcaaacacctgtagtctcagccaccctgaggcaggaggatcgcttgggccagggaggtcaaggcagcagtgagccagaattgctccactccag

SEQ ID NO: 553776 - DNA, 520 bp, Homo sapiens
  misc_feature (520)..(520): n is a, c, g, or t
gggccccggagctgctgcagtccttcgcgcctcctcgcctccccagcgaatcatgctccagttcctgctgggatttacactgggcaacgtgtgggaaggtatctggctcagaactatgatataccaaacggtggttaaaaaaaaaaaaaaaaagaaaaaaaaaaaatatttttttgggcgcggcttaggcgcccaaagaaaaaaggtttttaagacacaatttgtttttggggggcggggggcccaatgttggtataggtgtcaaaccggggcgacacacggcggtggtcccaaggaaggagacaccggggggtccactggaacaagaggttgcgtggggacttcccaccacccaaaattaaaaaaacgcgcgagggggaacacaccgccgaggaggtgttttgacgaaaacaaccaccgaaagatgggactccgagaggcaacccagagggggacctcacacaaagggggagtcacacgagagggcacgaatttataaattaagcccccgacgtgggan

SEQ ID NO: 553777 - DNA, 950 bp, Homo sapiens
ggaggatggggcggctgagtcactcaggctgttcatggtaaacccctcgtccaatgaatagggtcctactcctaagactgatggggtgtcgatctctctacgacatcaatggtctgattcaagtcggacccgccaaacacgagcagatattctgctcctctaagtgactgtagcagttgatccttgaagtctctcctggtgtcatgtcagaatacaagcctgtgtgactctggtggttcactgtgattggtctaatgtgagctcttcgaatcagacagatctgactagatgaaatgatctctcgcgccatggtttcgtaggctataatctgcttagcctctgtcgtagtgtccaagcatcttagcatgttcaagaggagagggctagcataacttcctgaccaccggttgtcagatatcaggagcattctggactcctgagaggacagtggcctcttgcagttgaacagggagagggcagtagatgccccaaaatccagagccgagggctgaaatccagcaggactaaggaggggacaaacacagaactcctcatccgatgtgtcattaccaagggtttgcctagatgtctcagctcattctgggcagaggtttgtcttctgtcctagagatttggagcgactcggggactctggtgaatgggtgccttgacttggccttacaaccagttgggtagacttatacctgcggccaacccggcttagtcagttgtgttatccagaagaagtcctaggtaactaagcacgagaggccagtccaataactagcaatggctcttttgagtcgtaccacactggaactcatgaaggatagccccaagaagacgcgatgtgtttcaggaagcacaaggagcctatgaatacgtctctttgtcgtccgtctctcacacgttttcactttaacaaaatagttaaaacaaataacaaactt

SEQ ID NO: 553778 - DNA, 183 bp, Homo sapiens
cgcccgtctgtgtgatctcctcccttgagaggatctgtccctagtatcgagaggacgggattgacacacctctgttgacctgtatggcgccagctgtgcagcaggtagctaagtgtggaatagataaccgctgaaaccatctaagcgggaaactaacctcaaaacaaggcttcgccgagagcc

SEQ ID NO: 553779 - DNA, 994 bp, Homo sapiens
gatggaggcgtgatggcagaggcagaggcagagccctggtgcctgagaccaagcgacagacctgtgcggggctgtggcctcgcaaatgccggctcggcgagcgtctcaccgacaacaccgatgcctgtgggatgtgaaaatgcatgcgacatccttcgctctgcatcccctggtgatgcctgcacgtccatgacttggccctggtaagtcgagggtgctcatgtgatgcatgatccctgaaggcagggcattttgctcaggccatcctgactgaggtgcttggcccattatggaatgtgctgccattcaaacatgcactggtaccatgacatggccaaccaatgacctgacgaacttccacagttcctgaccccttgtcgtgccaatgaccacaaagcaggagcacaatggctctcgcaaggcaacgttccaacagtaaccagcacccaagtgtatttcaagcacagttgaatcatgctagggccttagcctaattctcaagtggcactgcagacacgaacaccctgactgctttggcgccttctcataccagcagcacaatgttcccaagtgtccaacgacaagtcataattcgaacatgaacgcccgaacttaaccacactgggataggcgagactggaggaacatcggcccatgaacctatccggacaagagaagttccaaagcgtttagagttcccaaattcaataaggcagacacgttgcggtttcaaccctaaccacggaagcatagattccccatacaaaacatgccaagaaacccccgaaaaaacgacgggacagcgattggccgagcggagagacacctatcccggagtgccgatacgcactattacaccaaggaggaccacataagcacccactaacaagggcaaggtacgaaacaccggcaacaagtccgccagtaaaagggcaacaaggatttccacaaggtctgtggatgacacatttatacaacaacagcggacaacgga

SEQ ID NO: 553780 - DNA, 528 bp, Homo sapiens
ctgcagcgcacttgagtaaagtattctacacttcatgcttgcatcttcttatacctccccagctaaaggacacaaatgagattcttttttagggctcagattttgcccctaaacagttaaacagactcatatgattctaatctacacaaaagggaaaaaaccaaagcatttcaaaagtttctgcagattttcctcaaggtttggattgccaattcatgaccaccatgaccagatgttagaatccatcaagacaaccaccaaaatggctgctgaacttgaagatggcacacagaaaacaaatgtaaagtgttaccctggagaaaactatctctaaccagactctccaaaggcaaaaaatgggcttttgttgtcctctggatcggtttgggttagcagtacaagggtaaaaataacccgcttaacggcctcaacaagtcatgcctattccaactcttttgtttaaaggacataaaaattatgaggctataggaagaaaaatttttaatgaaaaacaaggtaaaattattt

SEQ ID NO: 553781 - DNA, 251 bp, Homo sapiens
ttatgtatatagcgaacaacccagagataacacaaactaagcatacatttggctacagattggttctcctagtttaaaaaaaaaaaaaaaagtcttcttacccctgatgctgtctcccgaccatagattagggaagcaagagggggggatacggaatcaacttacttaacttacctcagaagtaacagggtctacggggctatgaacaaaggaactagagggaaacattggtgcaaaaacaaggtcggata

SEQ ID NO: 553782 - DNA, 323 bp, Homo sapiens
gcaagctttcttcctggtggcagaagccataatggattcatcccttacccgccggggacagatttgttggtatcaaaacccgggggtgggtttggatcccatcaatgatgctaccctcctggaagcatgtatctcccccctgctgaagctttattgccgggagcagccctattacctgaacctgatcgagcttttcctgcaaagttcctatcagactgagattgggcagcccctggccctcctcccagccccccagggcaatgtggatcttgtcagattccctgaaaaaaggtccaaatttattgtcaagtccaagaccccca

SEQ ID NO: 553783 - DNA, 119 bp, Homo sapiens
gcggccgcctactactactactactgctcgaattcaagcttctaacgatgtacggggacatgaggtcaggagttcgagaccagactggccagcttggtaaaaccccgtctctacaaaaa

SEQ ID NO: 553784 - DNA, 721 bp, Homo sapiens
actcctcttggctacactcatgtgctcagactatatttcaaataaaaaatcttctcaccacaaaaaaaaaaaaaaaaaaacaaaaaaaacctggtggaccgccacgcgggcgccacgaacaacgtctctcaagcaccatcgccgtgggcgaccacgcgggcccccaccaagggacacggacgacacggggtcacacagcgagtccccaaacgcgaacacccggagacacgagaaccaacgagccatggagactacactaacccaaattaaacaaacgcccgggcgaaaaccgcagacggcgattctgcgaaacaccaaattccgcaaagagggaaccactcaggaacggcacaaaagagcggggactactcaaacccacgagggacacatccccaagacgacacacccaaccaatcaaaaattgcagccgcccacccccgcgggccctcacacacgaagcacagagcacgaaaagacacacaaaagacaacaaaacacacacagaagacacaaacacagaaagcgaaacacacacccaaccgcagggacgcggcgccggcgaacaagagacagcgccagaggacgggaccaaagaccgacgaagacagcacaagaagaacagaaagaaccgaaggaaaccgccagcgggaacaacaaaaagccgaaacgaaaccagcaaagagcaacaggcaggagccgaccgcagcgcgacacgcaccca

SEQ ID NO: 553785 - DNA, 165 bp, Homo sapiens
ggtcctgcgactttcaactgcggtagggatatctgacctggaaggctatagtcatttacagaagagaaaatcaatggccctgagcttcacaggcctcggcttcaacaccttgtgtccactactttgcatttctctccaacaagtagcccatagttgtgtggatgc

SEQ ID NO: 553786 - DNA, 314 bp, Homo sapiens
ccaggacttgcagaatgagtcctagaaatcatgtcttctcatgtatctacaacaagcgtgtgtctctgaacaactaaaatcagactttaggattcctctgaaaacagttcgtggttcccacagcatccgcaccatggatacccagcacatgctccaaagatgtgctttcccgttatctttacaaaacccaccaccaggacaaccaaaacggaccccactctgagagtaccatgaggaaggtgtataagaatcacattaaccccaggtaaagggcagtagatgacattctccatttctttactactttcattaat

SEQ ID NO: 553787 - DNA, 434 bp, Homo sapiens
gaggacccttttatagcacgctggagtggaatgggtgatctcggctcactgcagcctccacctcccgggttcaagcaactctcctgcctctgcaaatctgtagtttacattagggttcactctttgtgctatgcattctattgtgtttgtttgtttgtttagaggcagggtctcactctattgcccaggctggagtgcagtggcgcagtcatggtctacttcagcctcaagctcctgagcctaagtgatccttccacctcggcctgccaagtagctgagactacagcatgtgccaccatgcctggctcattctatgggttttgacaaatgtaaaatttacatgtagctaccattaaagtatcatacagaatagttgcactatcctaaaaatcccctgtactccagcgtgctgatacaagggtaacgagctcgaa

SEQ ID NO: 553788 - DNA, 401 bp, Homo sapiens
ggtgcacattataactttgggtttggagtaatgcacctcgtatgaactgttaagtcaaaatatagagagaaacaaatctctaagtaaaaaaggttttatttagaacgaatatataagtaggattgcaatccaggacatacatacatacacatactagggtagcctcctagtgtgtccaaagcacacacaaagcaaggttgggagtttcattcagcacacaagcacatgtgcacctcattgttttgcaaagcaacaactcactggcacctcactaaagcttttgggagctggtcagctctgcattggtgcagtgaccacggttggtaccactagcacttagagtcacaagcagtcatctcaacagctagtaggtaaaactggatttaaggttccagcatgtc

SEQ ID NO: 553789 - DNA, 141 bp, Homo sapiens
tagaatgttagtgagcctgggtgttgtagtgtaactagtgcgatgagtaaggaacgggagcctactggggtgtacgaatacggacagtactgtgcctcagtccacggcgtactggctggattgcctcactacgggtgatga

SEQ ID NO: 553790 - DNA, 226 bp, Homo sapiens
  misc_feature (39)..(40): n is a, c, g, or t
  misc_feature (133)..(133): n is a, c, g, or t
  misc_feature (217)..(217): n is a, c, g, or t
cgccaggttgttcagacacttcaccttcaactgcagganntgtgcctcctcctcgaacgtcatgtccactttggcgctggaggtgatagccttgatggcgaggtcgtaggagttggcggccaggacgaacgcncacagcatggtagtggggtctgcgcactcccgcttccggttggccagggcacgcgctcctgccccgtgagcatctccaggtcangcccgtccc

SEQ ID NO: 553791 - DNA, 248 bp, Homo sapiens
taggctaagccagtggtgcgacctatctctgtgttagaatctagcatgccacctagtctgtcctcaggtacctgagcacaggtgtgctgtgctccctctggagttgagtgagcaaagaggatagcagtcagtcgggtgacccacccggtgagcgggcacccccagtcagcgtgcaccaccgtcctccatcctcatcctcgtcctcattactggaggagggagtgcatgtccagggcagggcccgcgag

SEQ ID NO: 553792 - DNA, 165 bp, Homo sapiens
aaagtataatagatatatgcatgacaggagcagcataaggttagtcctggaccattattccatgcatctggcaaggaagcagagaaggtgaacttggttgttcaaaaacattctttgcaagatgctgtctggctgagaaatgtgttttgggcattgtcttaattg

SEQ ID NO: 553793 - DNA, 685 bp, Homo sapiens
  misc_feature (10)..(10): n is a, c, g, or t
  misc_feature (70)..(70): n is a, c, g, or t
  misc_feature (80)..(80): n is a, c, g, or t
  misc_feature (90)..(90): n is a, c, g, or t
  misc_feature (94)..(94): n is a, c, g, or t
  misc_feature (100)..(100): n is a, c, g, or t
  misc_feature (109)..(109): n is a, c, g, or t
  misc_feature (132)..(132): n is a, c, g, or t
  misc_feature (147)..(148): n is a, c, g, or t
  misc_feature (151)..(151): n is a, c, g, or t
  misc_feature (162)..(164): n is a, c, g, or t
  misc_feature (174)..(174): n is a, c, g, or t
  misc_feature (182)..(182): n is a, c, g, or t
  misc_feature (184)..(184): n is a, c, g, or t
  misc_feature (209)..(209): n is a, c, g, or t
  misc_feature (211)..(211): n is a, c, g, or t
  misc_feature (237)..(237): n is a, c, g, or t
  misc_feature (272)..(272): n is a, c, g, or t
  misc_feature (408)..(408): n is a, c, g, or t
  misc_feature (471)..(471): n is a, c, g, or t
  misc_feature (578)..(578): n is a, c, g, or t
  misc_feature (601)..(601): n is a, c, g, or t
  misc_feature (645)..(645): n is a, c, g, or t
catttctctncaattcctgaatagctccaaattatgctaactctgggcattgatgtttactctgggtttngggtttggtntttgggaatnatgngttctnggcctttgngatcgccatctatgtgtccaacntcaacactgtgatgnngtngttcctgtttnnnttttttttcngttttctntngatcagccattaacacgcatgtttntntttttgtttactcccactcaactgtntgttctatgtagggcctgatacagatgttacttgntgttatttaatagctactggggtcagacaatccaagaccatcattatactaaaattaaagttatttatggaagttcatagacacttccagaattggttttacctcctacacgggaacatgttcaaggaacccaggncgggcttactggttgtgtctcaactcttcccattcatcaatccctattcaccagtggcacggnaagggggttctttaacaaagcattatacataacacctctaccaaactaaacataaactttttttgtagttaaatgcgagaaagtcggtttttttccacccctttccnccttttacacggcaagtaaagcncactggcctgggagttgcctctatctgccaacctttggccagtnaagaggattcagagaaaataatacaaccatcaatcagaaa

SEQ ID NO: 553794 - DNA, 355 bp, Homo sapiens
  misc_feature (27)..(27): n is a, c, g, or t
  misc_feature (62)..(62): n is a, c, g, or t
  misc_feature (75)..(75): n is a, c, g, or t
  misc_feature (111)..(111): n is a, c, g, or t
  misc_feature (116)..(117): n is a, c, g, or t
  misc_feature (147)..(150): n is a, c, g, or t
  misc_feature (157)..(157): n is a, c, g, or t
  misc_feature (171)..(171): n is a, c, g, or t
  misc_feature (254)..(254): n is a, c, g, or t
  misc_feature (276)..(276): n is a, c, g, or t
  misc_feature (351)..(351): n is a, c, g, or t
ggggtgtccacgttcatgttcacgggngtggtgatggtggcagcggctccttccgacatggngggctcgctcggnggtggctgtgcgactcctgatgcaatagagtcaggncaaannctctgggctggccggttctgagcggttttnnnntttgtgnggggggtctctgancaacttgaatccaacattggctgaagaattcgtcttctggcattgatgaaccagttgttgacttggggtggtgtcaaatttgngtgggcggcaatctgttttttntcatcctctgttgggtagggatgcccgatgtgctggaagagccaggaccgcatcacgttcgtggcatgctttggnagga

SEQ ID NO: 553795 - DNA, 104 bp, Homo sapiens
gggaacattcacttggagttatagcataatggaaagatattagaagaatacagcagggtacagacatacttaaacggggatcataacctcatagtcgattttgc

SEQ ID NO: 553796 - DNA, 563 bp, Homo sapiens
ggcattcctctgcctaccagaattttagggacgcccgccgggccatttgaaattaagattgggcagccccctgtttccttcttcctgaaggcagcaggtgggattaaaaagggggcccggcaaacagggaaaaaggtggcgggcctggtgcccttaaggcatgggtatgaaattgcccgcatcaaagctcaggatggggcatttgccccgcaggaggcacccctgtggtttgtggtccgccccatcatggggttggcccgttttttgggcattgggggggggaaggcccccagttcaaaaggggttgcggctttccaaaaggaacgagccttttttcgggggggtcagaagggggcagatttgggggcccaaaaaaaaggggccaaaaagggccccttgcccccccccctccccagattttaagggggggggttgcaaaagcggggcccaagggggggagggggggccccccaaaatgagggggggtttcatgcctttgaaggaaaaattttgggacatctagggggatggggggaccgggccggaaaaaaccccctttttta

SEQ ID NO: 553797 - DNA, 181 bp, Homo sapiens
gtcgcaaccatcatgccttcttctctccatcagagccgaatcagggtgttgaacttgtgcccatcaatgtcatacagcttcttcacagcctgtataatcttgagtgctctgtggctttaacatccacaatgaacacaagtgtgttgttatcatctatacttacttcatggcagaaacagtg

SEQ ID NO: 553798 - DNA, 206 bp, Homo sapiens
tctcgtgcgcgtcccagattcacaatgtcgttcctcgacccacctcgcatgcacatgcgacgacacacccacacaaacacacacacacacacatccgaggccctcacagaacagagaggtccacagctttatgacaccagaagagtcagaaagttgcaactcttctatgcagtgccggcctcaataaaacggtgttagactttggg

SEQ ID NO: 553799 - DNA, 379 bp, Homo sapiens
  misc_feature (5)..(5): n is a, c, g, or t
  misc_feature (124)..(124): n is a, c, g, or t
  misc_feature (152)..(152): n is a, c, g, or t
  misc_feature (158)..(158): n is a, c, g, or t
  misc_feature (168)..(168): n is a, c, g, or t
gcagnaacagacctgtctgaccgatcagggagaatgatgatatgagtagtcgcttgatgactggaaagatatcgcggacctcatgacacggctggggtggagaatggaagtgaaaacagatacngccacgcaaagagttgaggttgctatanttatanggaactggcnccagccagagaagatcgaatggctttttgcagctaactactatgtgtagacaggttttatattataaagtatgcattcttatcacctagtatatagttagtttgtagagtgatttccccccagtttcttgaacatggtatcttcacatcttggaccttggtcagttgtgctattcattattaaacactaaaactttggcggttcttgcatc

SEQ ID NO: 553800 - DNA, 880 bp, Homo sapiens
agcggaaaaaggcggaagcggaagtcggggggcgcgccagctcgtagcaggggagcgcccgcggcgtcgggtttgggctggaggtcgccatggggcgaggcagcggcaccttcgagcgtctcctagacaaggcgaccagccagctcctgttggagacagattgggagtccattttgcagatctgcgacctgatccgccaaggggacacacaagcaaaatatgctgtgaattccatcaagaagaaagtcaacgacaagaacccacacgtcgccttgtatgccctggaggtcatggaatctgtggtaaagaactgtggccagacagttcatgatgaggtggccaacaagcagaccatggaggagctgaaggacctgctgaagagacaagtggaggtaaacgtccgtaacaagatcctgtacctgatccaggcctgggcgcatgccttccggaacgagcccaagtacaaggtggtccaggacacctaccagatcatgaaggtggaggggcacgtctttccagaattcaaagagagcgatgccatgtttgctgccgagagagccccagactgggtggacgctgaggaatgccaccgctgcagggtgcagttcggggtgatgacccgtaagcaccactgccgggcgtgtgggcagatattctgtggaaagtgttcttccaagtactccaccatccccaagtttggcatcgagaaggaggtgcgcgtgtgtgagccctgctacgagcagctgaacaggaaagcggagggaaaggccacttccacagaatatctgcccacacgcccggcagtggtgcttacgggtcatcaccccgaactgcaccctgcagcggtggcattcctcagcgtccaccccgtcgggtggag

SEQ ID NO: 553801 - DNA, 235 bp, Homo sapiens
gtctctacaggatccccgtgcgccactagcttctcttcactacagccctgtgacgtatgtaatgagccctacttcccacatcagacactgaagcgctcaacatctcccctaggcctcagggttcctgcggggtgggcagggcctcttccgcagtttctatccgcagttcttcacccgacccagccgggccacggcccacgtgtcctttgtgagcgttcttccaacggagcttgat

SEQ ID NO: 553802 - DNA, 817 bp, Homo sapiens
agcggaaaaaggcggaagcggaagtcggggggcgcgccagctcgtagcaggggagcgcccgcggcgtcgggtttgggctggaggtcgccatggggcgaggcagcggcaccttcgagcgtctcctagacaaggcgaccagccagctcctgttggagacagattgggagtccattttgcagatctgcgacctgatccgccaaggggacacacaagcaaaatatgctgtgaattccatcaagaagaaagtcaacgacaagaacccacacgtcgccttgtatgccctggaggtcatggaatctgtggtaaagaactgtggccagacagttcatgatgaggtggccaacaagcagaccatggaggagctgaaggacctgctgaagagacaagtggaggtaaacgtccgtaacaagatcctgtacctgatccaggcctgggcgcatgccttccggaacgagcccaagtacaaggtggtccaggacacctaccagatcatgaaggtggaggggcacgtctttccagaattcaaagagagcgatgccatgtttgctgccgagagagccccagactgggtggacgctgaggaatgccaccgctgcagggtgcagttcggggtgatgacccgtaagcaccactgccgggcgtgtgggcagatattctgtggaaagtgttcttccaagtactccaccatccccaagtttggcatcgagaaggaggtgcgcgtgtgtgagccctgctacgagcagcttctctgcttctcagctgccatctccagtgccccagaatggtacagcgataataaaatgtatttcagaaagca

SEQ ID NO: 553803 - DNA, 351 bp, Homo sapiens
gtcgttcagatgcgcacaggtgcgcgtcatctcttggcggtagatcatcgtatgagagagggatctgtcgggcgcgcgtgtcggcaatggaacagagcccagaacgcaagcgcagacggcaatgtcgcggtgtgagtgtcggggcaagcgtgcatgcgcgattcacagtgatagaaagacttgagcgtcacacgcgaggttacacgggtaaattcaggcttgatgaagtttggttgcagtttggctaaacattctgtctggaggagcgagcttgctcgcgaagatcgttaacgataacgcgggtgcctggttcacagcggcgcacacagctttttcgcgagcaagctcgtt

SEQ ID NO: 553804 - DNA, 428 bp, Homo sapiens
  misc_feature (415)..(415): n is a, c, g, or t
acttattcatcatcattgcctctgagcagttcagctcgaatcatgtgaagctgtccaaaattatccagagcatgggaaagaggttctatattgtctggaccaagctggacagggacctcagcaccagtgtcctatcagaggtccggctcctacagaatatccaggagaatatccgagagaatctgcagaaggagaaagtgaagtacccccccgtgttcctggtatccagtctagaccctttactatatgacttcccgaagcttagggacacacttcataaagatctctccaacatcaggtgctgtgaacccttaaagaccctttatggcacttatgagaagatcgttggtgataaagtagcagtctggaaacagagaatagccacgagtccttgaagaattctctcggtgtcagngatgatgacaaca

SEQ ID NO: 553805 - DNA, 859 bp, Homo sapiens
agcgggtcctcacccgacggctcggccttggtcagcccgcagcctccgcccggcgctgagtcagcgcggccccgagggcccgaggggcgcggaccggccgccctgcccgcctctccccggcccgctgtcctcccgggttcggagccgccgatcctggaccctcggcgcggccgtgtgggtcggcgtccgtcgggcgttggcaaatggggctctgcgagggtccgcgcagggcgccagggcgcgcggcgacctcgctcctccgcgggcccggggcattcggccgattgcctcttgaccgacgatgcagcccggccgagtgggccacaaggcctgagtcatgaagacaaggcgaccagccagctcctgttggagacagattgggagtccattttgcagatctgcgacctgatccgccaaggggacacacaagcaaaatatgctgtgaattccatcaagaagaaagtcaacgacaagaacccacacgtcgccttgtatgccctggaggtcatggaatctgtggtaaagaactgtggccagacagttcatgatgaggtggccaacaagcagaccatggaggagctgaaggacctgctgaagagacaagtggaggtaaacgtccgtaacaagatcctgtacctgatccaggcctgggcgcatgccttccggaacgagcccaagtacaaggtggtccaggacacctaccagatcatgaaggtggaggggcacgtctttccagaattcaaagagagcagccacagccaagggtggaggcttcaggtctccagcttctctgcttctcagctgccatctccagtgccccagaatggtacagcgataataaaatgtatttcagaaagca

SEQ ID NO: 553806 - DNA, 375 bp, Homo sapiens
  misc_feature (43)..(43): n is a, c, g, or t
  misc_feature (61)..(61): n is a, c, g, or t
  misc_feature (63)..(63): n is a, c, g, or t
  misc_feature (135)..(135): n is a, c, g, or t
  misc_feature (152)..(152): n is a, c, g, or t
  misc_feature (159)..(159): n is a, c, g, or t
  misc_feature (252)..(252): n is a, c, g, or t
  misc_feature (282)..(282): n is a, c, g, or t
  misc_feature (289)..(289): n is a, c, g, or t
  misc_feature (303)..(303): n is a, c, g, or t
agtgaccatttcaagcatccggcctatttcagaaaaagccccnaaccggagggaagtggananccggagctcaggcctttgcatcattttgggcttggcctggacagcacccgccagttaaaactgtgggcctcnccctttggcaagttaanccaagcnctgtcatttttggtgccatcttcccctgccgcaccggcagtttcagcccagcccccccctttgggttgtaggttgggctcccaaacaacacanaccccttttccccttgcccctcccccaaanggacttnactttctttttggnctgtttgtatttaaacaaaatggtgtcaaaataaagcccctgcagggcctggctccctgttggtttgagtta

SEQ ID NO: 553807 - DNA, 321 bp, Homo sapiens
  misc_feature (84)..(84): n is a, c, g, or t
  misc_feature (236)..(236): n is a, c, g, or t
  misc_feature (258)..(258): n is a, c, g, or t
cccaaattcatgtgttgagtttctaatccctaccacctcagaatgtcaccttatttgaaaataagatcattgcaaaagcaattnctagttatgatgaggtcatagtggagtaaagtgggcccctaaaccaatatgactgatgtccttatgaaaaggagatatttggacatagacatatacacagggacaaggctgtgtgaacctgatggttgatattgagtgtcaacttgattganttgaaggatgcacagtattgtncctgtgtgtatctgtaagggtgttgccagaggagattcacatttgagtcagtgggctgggaga

SEQ ID NO: 553808 - DNA, 632 bp, Homo sapiens
ccggtgggagccggagtcccgccgaggggggctggaggtggaggggcccggcgaggcctggatgaagccgatgcgggaggaccaggcggcgctgtgctgggcgagcccctgggatgagtgcttccaggcggctgtgcagctgtctgctgcgggcaggactaggatcatcagaaaagcccttactgaggaacaaacgtgtctcaaacaaaaaacatcagcttgcagatctttgtgacacgataacagtattcaccctttggtgggaacgaattttacactttactttcgtgaggttttgcgggaacgaaggaggggtatatccttttgcacaacagttgtttcaattttgccagtaaagaagggcccgtcgtgccttatcctgggtgtgcccaaatgttgtttggtggcgtcaaacacacaacctaaggtccctcggaagcggttgtggaattcctatttccgggaagtcacccacaatatactggaacctgtgtgtcctaacctccttgggtccacaatgttttatatgggattggccccaccagtagtcaaatttatcctcccctgggaacatttgtgtttggcgcacgtgtgtttctacacggcgcgacttttgtgtggggcaccatttt

SEQ ID NO: 553809 - DNA, 544 bp, Homo sapiens
  misc_feature (538)..(538): n is a, c, g, or t
agcggaaaaaggcggaagcggaagtcggggggcgcgccagctcgtagcaggggagcgcccgcggcgtcgggtttgggctggaggtcgccatggggcgaggcagcggcaccttcgagcgtctcctagacaaggcgaccagccagctcctgttggagacagattgggagtccattttgcagatctgcgacctgatccgccaaggggacacacaagcaaaatatgctgtgaattccatcaagaagaaagtcaacgacaagaacccacacgtcgccttgtatgccctggaggtaagcagacccccgtgcctcagtggcccccagggtccctaccccctactagtcacgacagcatgagaagagtttgtcctgtggccttgcccacctccctgggcatacatcaagcaggagagtttccactcagccttgagtgcctgtgtgaacagtgccccctaggagagggtcacgctgagggagagacaggagataggggagggagtgggcaccacttcttcagccggtcctgcgtgagtaacaccagntaactc

SEQ ID NO: 553810 - DNA, 496 bp, Homo sapiens
  misc_feature (457)..(457): n is a, c, g, or t
  misc_feature (483)..(483): n is a, c, g, or t
  misc_feature (496)..(496): n is a, c, g, or t
tgcctgcagagagactctataggagcccccgcgatccgctgtcatatctatgactattttttaaaaaagatgccactcttatggcagcgtcattcactaagtttgccacggctaatcattcatgtactatccgaatggcataggctgtccaatacgaccctccccccaaagattacagctgtcttatttaatttttgtttttttaaaagtcatattctaatgcatctaatgttcttgctgcatggctcaaaaaaactataaaaacatgcaaattacaacctacctgtatgcatcacttaatgcagtgctagcatgacaagacactcagccatttttatgtaaagcgatggagaccaactgattttcctgtcttcttgctcacaagttttagaatcaattgtcacatacacacaaaaaccatacgcagaacagcctgaatgaactgtgatcacagaanctgattatcaacaggaaaacaggatngaaaaaagaagtn

SEQ ID NO: 553811 - DNA, 234 bp, Homo sapiens
  misc_feature (230)..(230): n is a, c, g, or t
cggctgacctgaggatccagaagatactcatatgaggaggctaggagtcgaggtcagctggccagcatagcgaaaactgtctctactaaaaatacaaaaattagtcaggcatggtggtgcacgtctgtaataccagcttctcaggaggctgaggcacgaggatcacttgaacccaggaggaggaggttgcagtgagctgagatcatgccagggcaacagaatgagacttngttt

SEQ ID NO: 553812 - DNA, 776 bp, Homo sapiens
ccccctatgtggcggactcaaccgcctgtatcgtttgaggcggttaactgggagcgaaccactgtctgatgcgcctcgcgcgtttgtcgtgggtgcattcctccccggaacaaagttcgtgcccgttggctacgaaggagtatcgctcgacgttatagaaatgtgtagtttccgcggcgtgtagagagaccacatatacatgtgtatacacagcagtgtgtgaatagggtgcaagagacacaccccacgttggcaatagttgttgctccccaaaaataccttcgggaacacaagcacaaggagtaatatattacgtccatcaatcggtgccggtgctcgccgcaattgttcgcgtctcaagctccaacgccggcgcttgtgattaaaaacatattttggggggtgaaaacatggagagcatagagataatggaagatagatgtatttagggcggggttatggcgggacaaccctccatgagattgcttctctcaaaaagagatgccacagtcacacttgttggagacacacaacacgggcgcgggatagacaacaactgatgcgcggaatttccgtcatcatcatgtttctctaatgtaaacatagaggtctgtggttcttctacaagggagtaatacaccgacaggtgttcatctcttggacagcactgttcaggacaggaattgggccgttccccgatctagtgagcgactcactgtgttggagcatggtcgactaaataacaaaacggtttaggatgccccccccacatggac

SEQ ID NO: 553813 - DNA, 497 bp, Homo sapiens
cagtcttctcccatcagccttccaaagtgtgggattacaggcatgatccaccacacttggcttttttttattatccctttccttaattttttctgtagagacaggctctctaatgtggcccaggtgggtcttgaagtccgggtctcaaggcgatcttctggctctgacctcccaaagtgtttttttggttggttggtattaggaaacgagtctcattccattcacccaggctgtattgcagtggcgtgatcccagctcaccacaagcctcttcctctccagttcaagcaaatttccggcctcagcctcccaagttagcgtgggattacaggtgactgctaccacgccgggctaattttggtattttaagtggagatggggttcacggtatgggccaggcggtcctcgaactccggacctcatgatcggccggcctcggcctcccagagggcggggattacaggtgtgagcccaccgttcccggatggggagcaagat

SEQ ID NO: 553814 - DNA, 249 bp, Homo sapiens
ctgatgcgtgtcgccgggggctcatcctctgggtggggacacacagcccagccgtctgctatcctaccccgccagtctcctgctgtccgcactccttcgtgacttccctatgccacaaggagctttaaagtcctctaccaacacgccggcacacatgtgcacgcacacgcacatacacatccacacacacacacacacacacacaccctggatctgctctccatgcctcagaattatctcagtatacac

SEQ ID NO: 553815 - DNA, 127 bp, Homo sapiens
gcatttctgcgagccaatctctgcatttgcaatgatttgagttaaggagaatacacataggcttacaagacagaagtcaatatacagtactgtttaaccaaaggtaggtgttgtactgatagggtag

SEQ ID NO: 553816 - DNA, 188 bp, Homo sapiens
aattgtggaaaggcatgacggggaatatggaaatggacattacaaccagtgatgtgtacagtcctgtgctggattctggcacatggaatgtaggaatataaagcagctctcactgtggtcacttccaggcacgtggatgcctgccgggacttggagggctttctgtaccacaacttcgtaaggttaag

SEQ ID NO: 553817 - DNA, 324 bp, Homo sapiens
catttacttccgagcgaatatccatttgaaaaattcgacttattttagtcattgaatggctcgggacattaaacttaggtatttgttggtagtctgtttcccccattattggctggatagtgttgggcttcgtttttaaaggtcgctgattctcgttgtaagcacgtaccccatcatttctcttgaggccggacacgttgaaatcaaccagcttatgatgttttttcacgttatctagcatttcctcaagtgatgaaacatctatcgtatttgatgcattaaattgacgatatagaccactaagcaagacgctttctaagatct

SEQ ID NO: 553818 - DNA, 580 bp, Homo sapiens
tcttcagcttacatctcaagtttgaggccaacctgggctgtatgataccttgtctatatgaatgccttgtctctaagtaagttaaataaatacatgaatgaatgaatgaatgaatgaatgaatgaatgaagcaagcaagcaagcaaacaagtaagtgcatgtacttggcactgcagctttaatcatgtggtagtaggtactttctcctgtcttcaagtttatagccttataaagttgctccttagcagaggtcagccagggctacacagagaaaccctgtctcaaaaactagaaacaaaaccaagaaggaatatatagaactagtgttgggaaaataggtcagagataaagtgtatacataggactctcagttcagatctcagcatccacagaaaactggctcagaagcactcatgtggaaccccattctagcaggcgtgggaagcttcagggtcagtcaagagaccctacctgaaaaaataaggtgaagaacaacataggaagacaacccctaatcccacaggcgagaacatgtgcatacacaaatacagtatgtgtgcaccccaaattatagagtgct

SEQ ID NO: 553819 - DNA, 166 bp, Homo sapiens
tgtagagtatcccctccccgtacgcccaaaataaatatggatggcgagctactaggcctctgtcttcctggtagagggcggcatgccgaagggggtgctgggtgtggattggatgctgcggtgtgggggttggaagctgtctgtggcccacttgggcgtacgggga

SEQ ID NO: 553820 - DNA, 859 bp, Homo sapiens
  misc_feature (370)..(370): n is a, c, g, or t
tcacccagctgggagtaaacaagatcaaagagattgctgtgaccgtgaacaaggcatgataaagtggagcagagcgaagctgctgggaaaagtgtgccatgaccgctctgagtctccaagctgatctcccagcagaaagcttcactttgctaagatggtggtgtggcatgcacggtgatgagtgctcgatgattagctgcagcttaaaattgattggcatcaagaaggtacagggtggagccctcgaggattctcagctggtaggctggtgtggcattcaagaagatgtttctcttacgcgtggcgtttgaattgcaacccaaaaaaagtaccaaatcccaagattgcccttttgaatgtcgagctcgangttgaaagctgagaaagacaatgctgagataagagtccacacagttgaggattatcaggcaattgttgatgctgagtggaacattctctatgacaagttagagaagatccatcattctggagccaaagttgtcttgtcgaaaatccccattggggattgggccacccagtactttgctagacagggacgatgttctgtgctgggccgaagtagctgaaggaggatctggaagaggacaaatgatgggctgtttgagtggtcaaatgcaagaaccagtgttgaaatgcgtctgtacaggagattgtgctggggacgatggccagttgtttgagaagaaccgagattggacgggagaggtaaaaaatattaatgggtggccgcaagggcaagagaagacgttaataacaggggggggcgaacacattttggtaaaaaagggccgtaatgagcataaagtgagggcgcaaaaaaaagggggggggggggtaa

SEQ ID NO: 553821 - DNA, 170 bp, Homo sapiens
tgtggagacggggttactggtgtcagataggcagggtgcagtagctcatgcctgtaatcccaggacttggggaggctgaggcaggaggactgcttgagcccaggagtctgacaccagcttgggcaatatagtgagaacctcaactccacaaaaaattttaaaaagataat

SEQ ID NO: 553822 - DNA, 566 bp, Homo sapiens
  misc_feature (370)..(370): n is a, c, g, or t
tcacccagctgggagtaaacaagatcaaagagattgctgtgaccgtgaacaaggcatgataaagtggagcagagcgaagctgctgggaaaagtgtgccatgaccgctctgagtctccaagctgatctcccagcagaaagcttcactttgctaagatggtggtgtggcatgcacggtgatgagtgctcgatgattagctgcagcttaaaattgattggcatcaagaaggtacagggtggagccctcgaggattctcagctggtaggctggtgtggcattcaagaagatgtttctcttacgcgtggcgtttgaattgcaacccaaaaaaagtaccaaatcccaagattgcccttttgaatgtcgagctcgangttgaaagctgagaaagacaatgctgagataagagtccacacagttgaggattatcaggcaattgttgatgctgagtggaacattctctatgacaagttagagaagatccatcattctggagctcgacattcaaaagggcaatcttgggattgtggtactttttgggttgcatttcaaacccagcgtaagagaaag

SEQ ID NO: 553823 - DNA, 714 bp, Homo sapiens
  misc_feature (56)..(56): n is a, c, g, or t
  misc_feature (87)..(88): n is a, c, g, or t
  misc_feature (705)..(705): n is a, c, g, or t
tacccgcacgcccactactttaaaaatgttagaaggaaacctagagtaaactcttntggacattgatctaggcaccaaattaatgannaagagctcaaaagcacaggcaacagaagaaaaaatagacaaatgggactcaattaaactaaaaagcttcttcgcagcaaaggaaacaatcaacatagagaagagacaacctgttatatgggagaaaatattttcaaactatcaatccaacagaggactaatatccagaatatacaaggaactcaaacaataaaatcaaataatcccatgtgggacaaaagacatgaacagacatttttcaaaagagacatacaaatggccaacaggtatatgaaaaaatgctcatcattaatcatcagggaaatgcaaatcaaaaccacaatgatatttcattttaccccagctagaatggccattattaaaaagacaaaaaagagcagatgttggtgaggatatggagaaaagagaactcatatactgttgctcggaatggatattagtacagcctttacggaaaacagtatggtttttcaaagaactaaaagaactatcattcaatccagcaataccactgctaggtatctactgaaaggaaaaaaatcaatatatcaaaaacatacttgctcttgcatgtttatcacaccactattcatagcaaaagggaatcaaccctaaggngtctatcaa

SEQ ID NO: 553824 - DNA, 184 bp, Homo sapiens
ctaattcatttgatgaaaccagtacacctgataccacaaccaggacaggacataacaaaaaaaaagcgaaaagtctacagacaaatatcacctgatgaacacagatgcaaaaatcttcaacaaaatactagctaattgaatccaacagcacatcaaaagataatacaccaatagtttatgctgt

SEQ ID NO: 553825 - DNA, 551 bp, Homo sapiens
  misc_feature (370)..(370): n is a, c, g, or t
  misc_feature (526)..(526): n is a, c, g, or t
tcacccagctgggagtaaacaagatcaaagagattgctgtgaccgtgaacaaggcatgataaagtggagcagagcgaagctgctgggaaaagtgtgccatgaccgctctgagtctccaagctgatctcccagcagaaagcttcactttgctaagatggtggtgtggcatgcacggtgatgagtgctcgatgattagctgcagcttaaaattgattggcatcaagaaggtacagggtggagccctcgaggattctcagctggtaggctggtgtggcattcaagaagatgtttctcttacgcgtggcgtttgaattgcaacccaaaaaaagtaccaaatcccaagattgcccttttgaatgtcgagctcgangttgaaagctgagaaagacaatgctgagataagagtccacacagttgaggattatcaggcaattgttgatgctgagtggaacattctctatgacaagttagagaagatccatcattctggagccaaatgttgtcttgtccaagactcccacatggngatatgtggccaccgcagtactttg

SEQ ID NO: 553826 - DNA, 119 bp, Homo sapiens
atctagaggatcccatcaggcgaatatgtgtgctacgaggaccacacgggtaagccgtggggccggacagactacccccatcttccgggggcatcaaccctctcagatggcattgtgtg

SEQ ID NO: 553827 - DNA, 454 bp, Homo sapiens
  misc_feature (45)..(45): n is a, c, g, or t
  misc_feature (65)..(65): n is a, c, g, or t
  misc_feature (74)..(74): n is a, c, g, or t
gggccaaacgaagtcgtggaggtggcgaaacgaggaggagataancgctggcccttttggtgggncctcctgtngtgtctcccccagtctgctaaagccctaaggccatcacaggacttccagcatgcccggggcagacgggacggggcgggctcctcctccgagagcaaccgtgacgaggagcgcctccggcagcggccggagaccatcgaacatcaacaaggacccgtactttccaattgcaaaagggaaaaaaccgcaacgcgtgggggctcccgtatgaaagtgcaaactctgcctgacattcaaacagaggggcactggccatacgcaggggaagaaagcaccagaccaacctggcccggcgagcagcaagaggcaggaggcccctgcccagcccgcgcctgagaaggtcaaggtggaagggtggacaagcgaaaacgttaaaaaaagg

SEQ ID NO: 553828 - DNA, 106 bp, Homo sapiens
aaggacgaacagctaaagcaggaaaataaaactcttagaaaagatgtgggtcagctgaccaggtagaggattcaagactcactgtggaaaaaatattttaatacta

SEQ ID NO: 553829 - DNA, 193 bp, Homo sapiens
tgctcctgaacccggcgagcatggtcccacacacctttgtcattactgttaccggtggtgaggatcttcggcacatcgatatagccgtacaactcaaaggggcccttgcgcccgaagtactcgtattccaggtagacgtcatcttgaggcttggggccgaaactgatgtctttgctgccaatcagcgtgaggt

SEQ ID NO: 553830 - DNA, 1641 bp, Homo sapiens
  misc_feature (775)..(775): n is a, c, g, or t
cgcgctcggggttgtatgacattgtcgcgcggaggtgatattgcttgtttcttccccagtgagctgcgtgtgtccccacttgtggctcctagttttgggagcccctatagatggacaccctggtggtgacgcacaaaacacccaccgcgctgtgtggtgcccaccgcgtccctcgggtatgtctctcccccgggatatatttgtctgtgtagggaatccacatcaagcgtgggtttgttcgctcccacatcctggcggttcctccggaagaggtatgcacaccacccgctcgtctcgttcgtgttgacacccacgggcagcccccctcctttttcccgatgggtatagaacgtggcccccaccatggggaagggaccccaccctcctccttcctcaagaacccctgcgttggaaaaaaacggggctgcaccacccttgggtgaaaggggggaaactcctcctctatatgaggtgtcgacgacgcggttgaactaaaccccccacatgtagatgggtggggggtggcgacaacagtgaagaaatcgaccccccagaggataaaaagcggcgggtgtatagacagaagagcccccctccccaaaaaggggtctcccccctcttatattccccccaattttcccccagcaaacagagttgttttatagatggcccccccatatattataaatttgggcgccaaatcccccccctctcccacaagagaagagctttgcagagaggtaaaaccttctccccctcgttgtttcttgccaancaacaacattcgccaccacatgtgttttctgtgtcttcctttcgtagaaacaccctataatataaaatatggggtatattatagggaaagagaaattcttttgtcttctatcccacagcagaagaaaataagaagaaatttcttctcggagagagcgttatgatgagagagagcccccccccatcaaaaaggagagacagatgcattgactatgagacaccacccccacacatatatttatgaaagagcgccacggagatgttctccccctcatagttgtccccctccgacacacaggtggtctacacaagaggttttataaagagagagagaagtattacaccccggcgaataaatacgatatatagagatggagatctccctacatagtagagatagagagagagaagagaagagaggtttttggagaagagacactcccacacacaggcgggttgtgagacccccgcacccacttgagagagaactatagagaaatccacacggtgtcgcaaaaggaccacaccttttctcataatatatgagaggagtgtagactctctcgaaagagaggaggccacacaagggcacgcctcgttggttctgagaagaacaccctcttttgataactttgtgtggaactcttctaagtatgagggaagagagttcccagaaagttgacccgagaaaaggccacaaagctaaatttataattggttggtaaacctggatcccacaaatatgtttatacttccacaaatttactaaacccacggtaccaccttaaggaataatatagaactaaagcttttgcttcctttctactgtggtggagtagggaaagttactcccccctgatttcccca

SEQ ID NO: 553831 - DNA, 321 bp, Homo sapiens
  misc_feature (283)..(283): n is a, c, g, or t
acccaaaaataccaagtaaaacactacatcatcttcagctttgtcctcttcagcaagcagcactgtaacaacacaatcaccatataagggagcttgctgtggattaagtttcatgacccaggacactcttaataagccagagaaacagtgtgtctccttaggacagacgcggtgcacacgcctgtaatcccagaattttgggaggtcaaggcaggctgatcacttcagataaggagtttcagaccatcctggccaacatggtgaaactatacatgtcccgtgnggctcccggggctcccccgcgggccgagctgggacaac

SEQ ID NO: 553832 - DNA, 428 bp, Homo sapiens
tgctcgctgactattagttgcagaaagaagcacggatcaaaatcattattacctaaactatcttgtggagtaaaaaacagactgcacattcgaaggaaacgaattgtagggaggagagcgagcacaactaggaatgactccaatggcaggtggcaattaaggatgccagtagaatcaccctgtgggaaaacataatcattggtggctgttggattctgactgctgcacattgtctcagagccagtaaaactcatcgtaaccaaatatggacaacagtagtagactggatacaccccgaccttaaacgtatagtaattgaatacgtggataagaattattttcccatgaaacactcacaatgcaggcacttaccatcaatgacatcgcattatgaattgaaatgcaaaaaagccggcagaacataacac

SEQ ID NO: 553833 - DNA, 168 bp, Homo sapiens
  misc_feature (130)..(130): n is a, c, g, or t
acccaaaaataccaagtaaaacactacatcatcttcagctttgtcctcttcagcaagcagcactgtaacaacacaatcaccatataagggagcttgctgtggattaagtttcatgacccaggacacgtgnggctcccggggctcccccgcgggccgagctgggacaac

SEQ ID NO: 553834 - DNA, 860 bp, Homo sapiens
gtttcaaacacaaatgcagggatgctgccactttttaactattaagaggcagaaaatgcacaatattgaactttttccactgaagtagtgtgcagttctaggtgtgcattcctgatatgatttaaaacatgtaaatataaagatgttaaaaaacaaaaaccaaaactgtgcagagtctacgaagtggttggtcatcttcagcttatgcacaacttctgttttaggttaacaaaaggcattgttcgagctgtcccatctccacggtttatcccttgggggtttctctcaacttataacttattagttcacatcatttcgtatctacatctttttcacaacaacttggtcatgtgccttttattaacgttcctgtaaccaaatataccttcacatggcaaacacaatgaatgttttcattcagatggaaacaacttttctccagactggacttgcctaaatgggcttcaatcctggctgtcacatactgacgacaggtgcctcacagacattttgcatgccggggacttaggcttcaccacagggatcctaaattccttcggtgactaaaccttgcctgtgttacccaaggacaccatatgcaccaacgaaacaaactgggtcaactaccaggaaacatcctttagaacactggtgactaaaggtcccttattgccccggtcaacgtctccatggtgctcccctataccacacttaacctgtagtcctctcataaccggtacaatggcttcaagcactgtacgtcacttggacaggcacggacaactgggcatggcaatccactaaaggataatgcaacatgcctggagataaacgctatcagtgtgggtgtaactaataca

SEQ ID NO: 553835 - DNA, 457 bp, Homo sapiens
tttgaaatagcgtaactagattttctgtagaagctttaactccccctcttcttaagagaattttaatgaagctgagataagaagcatatttactttcagtttgccccattgttatcctggattcctcccagcacacaagctaaccgcaaggctgactgtggacgtactcgggaatctctcatcggctgtcctcaatgctcacgttcttagcgtaccttcaccctagagaagggccccacgctgggctccagatgaaggggtggtctgcccctccacacctgtgggtatttctagtcaggtgggatgagagacggagaaaagaaataagacacagagacaaagtatagagaaacatcagtgggtccaggggaccagcacttagcacaccaaggacatgcacaggcaccggcctatgagttccctcagtttttattgattatgattttcattatttcag

SEQ ID NO: 553836 - DNA, 232 bp, Homo sapiens
gagtcttactctgccaccaggcgggagtcagtggtgtggtggtctcggctcactggaaaccttcacctccggggttcaagcaattctcatgcctcagcctccccagtagctggggattacagagcacgtaccaccaggcccgcgctaatttttggtaattttgagtgcagatgggggtttcgcgcatgtgggccgaggcgtggtctcaaatctccgtgacctcagggtgatc

SEQ ID NO: 553837 - DNA, 128 bp, Homo sapiens
gcggccgcctactactactactgctcgaattcaagcttctaacgatgtacggggacatgaaacagtgtatttggatgaatgctgtgggaggatgtaaatatcttgtttctcctcaaactgccaaaaaa

SEQ ID NO: 553838 - DNA, 173 bp, Homo sapiens
gtcccattccacatcaacccctgatattgggacgtctacaaatggatagggcaaaacagacctgggagcatcgtccccagcacagccggtcttcaagagcccagagccatagtcacacaccaaggcagagctgtcctacttcttcacacatagctggagctgcttcacaggat

SEQ ID NO: 553839 - DNA, 538 bp, Homo sapiens
cggggcgttggggagtggcgcgtcttgacctgcggggctacaagaatggcatgcctggacccccgcacctgcatgcccggatctgacagtgacctgcgagcctgcatgctccgcgtcttcccttgtaacagtgtagccgtttcggcttgctgatgcgacgcttgccgctagttctaaccactaagcaacataatcacacacagacacctatacatcgcagatagacaaatcagcatgtaaagctattaaaagcatcggtcataatacaatcacattgagagtgcatcgacatgtcccagtaccacatcatgtcgaacacaaatacagatgcacaatcacaccatagaaagcaaatatcactaaagactacacaacagcagatgtaaaacgacacaacaaaacgcatatccagaagttaattccgagcaatagatgagaagtatatcaaaaccaaagaaaacaaaccagttcgaatagcacattcatagacaaacttagatatcaaacagcgaaataaaaacggacaacaaatcattag

SEQ ID NO: 553840 - DNA, 118 bp, Homo sapiens
gatcccctggccccacacagtgggttaaggatccagtgttgctgcagctgtagcttacgttcacaactgcagctcagatctgatccctggcccaggactgccatatgccatggggtat

SEQ ID NO: 553841 - DNA, 169 bp, Homo sapiens
ggctgatggagtggcggtgggagatcaggaccttttccagttaggttgccttacctgtgtggggtcgcgtgtgtctgttaacctgacacggttgcagacctcgctctttggcaaggaaccgactcttgttgcgggcagggacacgtcctgacttttctccttggtactc

SEQ ID NO: 553842 - DNA, 295 bp, Homo sapiens
  misc_feature (283)..(283): n is a, c, g, or t
tgcgtggtggcttgtgatctaggatgcttatcttctatcagtgtttgatgtgtgtttttgagatggagtttcactcttttgccaggctggagtaaagtggcacaatcttggctcgctgaggctccgccccctggggttcatgccattctcctgctcagcctcccgagtagctgggactacaggcgcccgccacctcgcccgggtaattttttgtatttttagtagagacggggtttcaccgtgttagccaggatggtctcgatctcctgagctcgtgatccgnccaccactgcct

SEQ ID NO: 553843 - DNA, 775 bp, Homo sapiens
ggtgctgggcgctggagctcttggaacagtgctgccgtggggccctgccccggactcgctgcagtgtgtcggctgcagcctggcggagcagtgagctgctgtgctgtgctgctgtggagtgagaactgatgctgcctccgcagggagctgcgctgctggtggccacatgtgatgtgatgctgctgctgctgcatgcgtgcatgctcaatggagtgtcactggacctgacatgcgtggacgcaactccgtgtgcgcacaacctgctgacactgctggcagctgcgtgccagtgagacccgagtgcgtttgcagtgagcatgctagcagctgccatcctgcttgggtgaacggctagagctgctgtgcacaatgcttggcgtgcacatgcaggaccacatgctgcagcgcctgccgcatggacccgcgacgagggaggctgccaggcaggccctggcggaaggcctgcgaactccgcatggctaagagagctgagctgctgggggcagtgcctgggctgtgcccggagcaccgagcaccggacagtgagcccagaatgggctgacagccggccgcagtgcgcccccagggaaccctgaaggacccggcggaggccgcgcagacagctcggggcgcccctcgagaggcagggcagtgccgcttcagtcggggaggagtttgagcaagatccttcaggacgcggaatgaactcaaagccaaagtgttcctgctcaaggagaaactgggctaattccagcgggagctgtcacaaaccacg

SEQ ID NO: 553844 - DNA, 512 bp, Homo sapiens
  misc_feature (129)..(129): n is a, c, g, or t
gtaatcataaacatggggcagtgctaaggtttggatgtttgtcaccttccaaaattcatgttgaaatttagtccccagtgcaacagtactaagaggcgggaccattaggaggtgatctgaccgtgaggntcccacctcgtggatgggattagtgccctcattaaagggcttgagggaatgtttgtcccttttccaccttccaccatgtgaggacatagcaacaaggcatcatgcttgaagcagagagggcaagcccacaacagccactaaatctgctggcatcttgatcttggacttcccagcctccagaactgtgagaaataaatctctatttacaaattacccagtctgtggtatttgtaacagcagccagatggactaagacagggagctcccaggagctttccttaaaggagacatgatacatgcctctgttagttggcaggggtgggggaattatgaacctttatttaaagatttatttttaaaaataaaataagtaaaacaaaaaa

SEQ ID NO: 553845 - DNA, 1038 bp, Homo sapiens
ggaggcttccattctggctgtggctaccggggtcgtggtcggggaggatgaatgaggaaaccagtcggggtaagaaattgtgatggtggagccgtatcggcttgagggtgtcttcatttgtcgaggaaaggaagatgctactggtcatctacgaacgctggtccctggggaatcagtttgatggaagtagaagagagtctcgaatctctcaggaacgtgaagaatgacaataactatgacgtaacgaagtctggaacctcattccagctccagatgcatagacagcaagcaactctctgggtgagtgtggaccgagatccacatcgtaatcggggggctaaggttctctaccttcggggcgtgtctcgggcaccacggtctctacatgtctctgaaattcgtagagtccggatgagtctagtatatgctagtcgagttctaccaacggatctggccggtgacacctcaattaacttgggcactagaaagatggacctaaaaatcaattccttgtgaatctgcagggaatgcctcgaccacccaataacagataccgaatggatcgatcagtaactcgggtaggaatgttgaatcctttgcctagattgtggccgcatacccagaccaggaggcctggtattgtggcctgagatgtcgcacatcctgtgcgtgcgttaactggaggacaactgtgtgatgtccatttaatgggactactgtttgaatcctatgagactcaggcgaggatcgtgtttgtcatccgaaggtgataaagatgctagagggcgaacatgaagccgcaggagcagttgagccttgaggcatatgaaagagagcgtggcggggttcgtggactggtaggcaaccccaggtgagaatgatttagggctgtccggatggagagatgtgtgtggacggggggggggtttaattaaagatgtcggaaagaaaaggggggggaaatttcgggggcaggaacacgtttggaaggcaaagaggttaggaggggtaaggagaaaattttaaattggtgcaaga

SEQ ID NO: 553846 - DNA, 100 bp, Homo sapiens
cggctgaccggtgtggatctgaggtactccagccgcaagctctggtacgccatcttccccaccgtcgcctgccgcggcgttggatgcagtcgggtaccga

SEQ ID NO: 553847 - DNA, 376 bp, Homo sapiens
ggtcgtcacaggatcttctttggtcagctctattctgtgcgacctgaatgtgtgatatatagccaaacaactggtttgtttgttacattttgagacagggtctcgcttagtcgccgagattggagtgcagtagtgcgaacacagctcaccacagccttgacttcctgtgctcaaatgattctcctgcctcatcccctcatcctgtgtaactgggatcacaggaggatgccaccatgcctagctaattttttttgatcttttggtagagacacgatttcactttgttgcccaggccggtctcaaatttctgggctcatgcaatcctgccttggcctcccaaaatgctgggattacaggcatgagtcactgtgcctga

SEQ ID NO: 553848 - DNA, 282 bp, Homo sapiens
ccgatgtcagatcccctaattgcatgagtgcacgattgtagcccggggaccttgtgctgaacggtggttcgagtagccaacttttagtgctcagatggcgatcttgatctgaacgcaggtccagggctcacacgttgtgccgtcctcttggtcgagccgcggctcctcatccatcgatctggatctttaccgtgcttctagtaagccaggatgtctccaggccacttggtgattgtctgcttctcacagacccaaatttcctgtgcaacctgctgaatgagt

SEQ ID NO: 553849 - DNA, 124 bp, Homo sapiens
tgcaaggaaattgtcgacagattcgatcatggcagacatctcaccgaagagtttggacttattggtttttcaagaatgttcaaggaaccaatcgccccgaatagggcgagatgtcgtttttcga

SEQ ID NO: 553850 - DNA, 902 bp, Homo sapiens
  misc_feature (5)..(5): n is a, c, g, or t
  misc_feature (20)..(21): n is a, c, g, or t
  misc_feature (205)..(205): n is a, c, g, or t
  misc_feature (418)..(418): n is a, c, g, or t
  misc_feature (494)..(494): n is a, c, g, or t
caggnaagcgcgcactttgnngtggggtaactccgggggatgtctggcccattaatgtgctcagagggtccataaggaatctagcacaagggagaacacaacagggaccagacgcctggtcatattgctgtctccgacaacgtcctaccaccaacgtcactcacaaatataatgatcttagtattaaacaagaccttgatagctnctaacatctctgtaactccctgcgaatctcgaacactacatagacgatgcgaacaagtacataaccgccctacccgccacacacatctttctttctctacatattaatcacatgtacatgtgtttctgtgttgtcgggattggcgtttgtagacaaataggaggaagaaaggtgagtggagcaagggaagggccgagtagagatatacaatantacaccacaccccacaccgcccacccaccatcatccaaagacgcacgccgtcacatacataaacaaacgataaganaaagaacgagaagaacttatgtagcgagaggaagagaggatgcagataaattaagataggccggggagggtcatgcgcgttgagggggtttgtgcggtgaatgtcatagatgttagagtgtgggagttcggttgtattcgagagaagcaagcgtagcaaacgcatacgcccgtggacaaatatagcaggaggaacgaacaacgaaatggtgtaggtgaggatggatcgtatttactagataaattgcgcatccacctccacagcatcacacggacaaggacaccgtcaacatgatacatcctagaagttaggagaatgatcttctaatccgtgcactaccgccatcattatgtgagctagtcaataaacaatcttcgcactatcctacgtcacgactgtaccattctg

SEQ ID NO: 553851 - DNA, 887 bp, Homo sapiens
ctgcaaccgctgaaattccgcgcccacagacgtgactttcagcatgacacgtgaatgacacgtgcataccaatattatatgactgcctgccactgcactgcctccgacccgacatcattgccgataatacatcccaccaatactcaaccaccatacccacacaccccacaactcacctcacatccatgacaccccctcgcactcgccatcccctctgcaacgccaccacccctcacacacacctcgcacagcaacactgtgccgcattatgtagatggcgcccttctttctacacacagcacatggcacactcatttgcagccatttcgtgatcaactttggcttatttgtatgtcaatgcgatttgctacaagactggtgtaaaaatagtagtggcaatgacactaaaaaaaatgattgggtgataatatcaagatagagctatagtattggttgtgtgaccaaagcaatggatctttgccaaagcgcaacaatgtagtgagtggaactgtggacaaggatttatggttatttataaatagacaaatgagagtgctacagaaataaatggaattggacattgagtaggaaaacataagcatagccgttggattataattcaccatggtgattgaccagcaaattttatgaaaaaaatccatatggatgaatacaatttgaatccatatggagcaggaaaacatattgttatagaagacacacaattatattggaaacgtaaaataataattttggtaaaccagattaaagatagaaaaattgtgatggaacggagatctaacatacagatatgacatgaattagattctttcgatagttaaattaatagaaacaaggaagtgtacatgagtgtgtgtgattgtgtt

SEQ ID NO: 553852 - DNA, 596 bp, Homo sapiens
accacctcgtatactattgtcccacagttgctgcgctagtaccttctagccacctttcccagtcccaggacgggccgtggagggagaaaggagcctgtgccccgctgatggctctggctgtcctgatcctgtcttccactcccctgaaggaaagtttgcactggatataataggagcctcatctaccccagcgggcatgcgggctggagcctgtatatatctatatactcagtgctctcagttcagcttcctccacctcgcttccatctgcataggctcaggaaggagaatggcccaagccaaagtgggccccaaccctgcccccgtcgtgcctcatacttcccttgccgggtcctgctggcccctgtaaaggtcccgcccccaaagaccctggggccagcggggccgaagcggagttgggtttgccttatttgctccttggttccgttctttgcatagtttcttctacccctgttggagtccgggctggagaaaggccgattatgcgctatttcatcattccctgtcagagtggggaggggtctcggcgttccgatcattctccccacctcggggtggtggctgctgtcccacgg

SEQ ID NO: 553853 - DNA, 123 bp, Homo sapiens
  misc_feature (13)..(13): n is a, c, g, or t
  misc_feature (16)..(16): n is a, c, g, or t
  misc_feature (20)..(20): n is a, c, g, or t
gtgttctagaggntcncgtnctggatgaggataagcggatcatggcacccgtcagaccccagcggcccggaacaagacccgtgtggtcagctaccgcgtgcccacaaccaagcgctatctctt

SEQ ID NO: 553854 - DNA, 385 bp, Homo sapiens
tatagagctgctcaggggagtgggctgctcttagtccccgcctcgcatggggtgcctcctctccctgcgatgggggccgaagagcgagaggtgaacgaggggctggctctcagtccctgcctcacggggggtacctcccccactgcgatggctgtcctaagacacgggggggaagaggagctggctctcagtacctgcctcgcgtgggagtgccaagcgcctgcgatgggggtcctaagcagccacggggggaagaggggcaggctctccgtccctgcctcgcggggggtgcctctccccgctgtgatgggggtccttaatagccagggggcgcagaaggggctggctctcagtccccgcctcgtgtggagtgctccccccccgg

SEQ ID NO: 553855 - DNA, 382 bp, Homo sapiens
tagctgccaccatctgtgctgggcccagccgagacgcagaacctcgtggacatgacctaggaagacccagacagtgtgccccacggatgtcctggatcaaagggacccaggttggtgattacttctactcctttggcggctgttattggcacgcaagctaccggtagctgcagcaagggccatcctggacaagcttgtgcagtccaccctctcggacctcagggtgtacctgggggcatccacgccagacttgtaggagcagtccccatggcaccgactgacacttctaagagcccagaagatacatctggcccccgtaggctgggctggcagaagggatagctgagatgcgttctctttgcacttggtggggagggtctga

SEQ ID NO: 553856 - DNA, 234 bp, Homo sapiens
atccgcaagaaaattctattcaccaaaaatttcatctaccatttcattcatgttaaaggcttcagcatcacttaggtttacaaagaatacaccgtcttctgttaaaagggttataagccagtttccaatctagggtacatcatattaaaccaatctgtatgatagcgtccacttgtttcagaattgacattcagtttgtaaccgtcgttgtctacttgaccagtttgatgaagg

SEQ ID NO: 553857 - DNA, 364 bp, Homo sapiens
agtattcgttccgggccctgttctaccccattgagggatacttgtagcacgatccatatgcattattaaaccagaaccagacctggtgcttgaataccgtacacatggacacagtagcactccaagaatactcattctcatcccgacttccctctgaatttatgccgcgatccgtcattaaagccgacacggagcgacatgcttgttatggatcacttctaccaaactaaagtctaccacagtcagcttaccacgcacatacctctatgcgggacgtctgggctaagctcccactatccgcatcgatctctacggctacgacggcatattaacctaggcgtatccgactattgaccctatgggt

SEQ ID NO: 553858 - DNA, 443 bp, Homo sapiens
  misc_feature (82)..(82): n is a, c, g, or t
  misc_feature (90)..(90): n is a, c, g, or t
taggagtagcgttcctggaggaaaggagggaggatggggtgagacaaagatagggagggaatcaacacagatcctgctgccntcccatcnccaccttctcccacacctacttccagtttgttccctcacttttagtagaatttgagcttaaaaagacaggattagagtgacttactgtaattttcagtgtcatacatacacacatattactattttttcctctagaggaggggaaaaaaagaacatcataaagaataagtgctatgttagccgggcatggtggcactgcctgtagtcttggcctcacacctcagcctccccgagtagctggggaggctgaggcaggagaatcacttgagcccaggagcgagaggttgcagtgagccatgattgcactactgtactccacctggaagacagagcaagactcttgtctcaaaaaa

SEQ ID NO: 553859 - DNA, 1237 bp, Homo sapiens
ccgcctttttttttttgttttatacaaaaggatttattaaaaaaccagtaagtacactactacatcatgcacactgctcacacgtgggcttttaaccacagagaacgttgctctcacaatactgggggaaagggcataataacgacaaatgtgattctgaagcatagcgaagttaagaaataaacacaagtgaagagcaaattttcttttctaagtgagaaacctcgagaaattaaactttcagacagggcacccaagcgttcatactttcacattcgagggacacgttgcatcaccaaacaatatttaggtgtgtgacacgtggctatatagccacggtgtggcaccgagcccaacctttcaaatgtgaatctctttcaacattgtggaacacatacgtggctctcagccacccgtgtgtggcgggatataacgctgtgcacaatgtggaaactacacttctacgctacgtcggttgtggtaaggcatattcttggaggtgaccacctgtcgcccgtgggaataccctttgcccattataccaacctcgtggcgtgggtgtgctacataacatcaccatatattctcactagatagctgtggtttgataaccccaggtgttagggtcattaatcctacacatacaccacgcggtaacctgtggacgtgtaatattccataagttgccattagccttggattcgcaatagttcactatatcccgtggtctcccagttttggcactcggggccaccaacctcttcccaccgacgctcttcctgccaaactcctcctctagatccccagtgttgcctgtcgccgactctggtgtcctctcgcacgtggctaacttttacttccccactttcactaagaccacccttgcggccacttcctttcccatcatcttctccctggatcaatcttccttaacagggtcatcaagccgaaaccaacggccctttattgggcctgcgtcgccccagaggacgcccaatggggttcacacgccacctaaaaccagaaaagacgatcccctaacatgcccctcacggcgacttgcgagacacagggccccaccaaaactatctaacacgcgcccatcgatcacgaccatgcccctgggaacacacgcccgcacagcagctgtccgaccaccactactacacccgcgtatccagaccaacaccggccgcgcaacaaacaaacgccagcacgacacccccttgctcgcaac

SEQ ID NO: 553860 - DNA, 140 bp, Homo sapiens
aagacaggtttcagagtgagagagtgggaagggagccagctcagaaaggaaatctggcgtgtgtttggggttgggaccccacaaaggggtccttgttggccctggctgcctgaggagtctctgaagaagcatcaggaatg

SEQ ID NO: 553861 - DNA, 135 bp, Homo sapiens
tcttgcgtacgttggccagtgtccagtgcctgtagcctggacttgatctccaccgtggtcacgccgtcacgcagccacactgcgccggcgcttttcagcgctcacgcccagctcatcttcgctcgccgcacgggt

SEQ ID NO: 553862 - DNA, 256 bp, Homo sapiens
  misc_feature (8)..(8): n is a, c, g, or t
  misc_feature (247)..(247): n is a, c, g, or t
  misc_feature (255)..(255): n is a, c, g, or t
gaacccgnaagcggacttgacagttagccgagatcatgccactgcactccagcctacatgacaatgtgacactccatctcaaaaaataataataataacaatataagaactagctgggcatggtggcgcatgcatgtagtcccagctactcctgaggctcagtcaggagaatcgcttgaacttgggaggcggaggttgcagtgagctgagctcataccgctggcactccagcctgaacagagtgagnttcctgtnc

SEQ ID NO: 553863 - DNA, 123 bp, Homo sapiens
gcggccgcctactactactactgctcgaattcaagcttctaacgatgtacggggacatgcatttagatttatatttttgccagaaaatacaaggttataataaaactaagaactaccaaaaaa

SEQ ID NO: 553864 - DNA, 206 bp, Homo sapiens
gtcgaccgagcatttattaggtatttaaaaaagtgttctgacggccgggcgctgtggctgacgcctgtaaccccagcacttggggaggccaaggcagatgggtcacctgaggtcaagatttggagaccagcctggccaacatggtgaaaccctgactctattaaaaatacagaaattagctgggcgtggtggtacgcgcctgtaat

SEQ ID NO: 553865 - DNA, 359 bp, Homo sapiens
ccctggagtgcgttgaatttgccgtgttccccttcaaccatcgtggacaagctcatgtctgtggaagcacagccgcctaccgtggctgggccatcatgcgcgccattcccacggtcctgctcctgacggtgctggtggccctcacctacatagtgggtctcctatacaaagagcccttcaccgctgagatctaccggcagaaagcctccgggtcccacaagaggagctgattgagctgcgacagctttgctgaaggcctggccagtctcctggcctgccccaagtggcaggccctgcgcagggcgagactggtgcctgttgctcagggctcgcccccggcgtgtgctgccccagtgcct

SEQ ID NO: 553866 - DNA, 104 bp, Homo sapiens
tggtgactctagaggactccgggactggagattgtctgagggactggagactgtctgacgggacccggagatgtctgagggaccgaggaggccgccgcggggta

SEQ ID NO: 553867 - DNA, 991 bp, Homo sapiens
gggctctgtgtgctgtagtggcgctgcttgggcccgtggcggatcgtacaactctgtgtggctttgtgtggctgggaatagcggaggagagggttcgggattccctcgtacgggatcgcccgccaaggtatgaagtgctgccgagaggatgtcttcaacctcgccatgtgggtttggaagaacgtacagtcctcctccagacagacagatctgggatctcatctagattgggaaggtagcagcaccttgggttaaatggataggagaggaaaccacatgagttcttgaagacttatgggtgctggtctagagaagagcatactggatcggtcttggttataggagaatcacacaatcgatcatctcagctttgactgatggcgggggagagtaagacacagggaataattagatgaggagacctgagaagatcttcaattgattcagcggagctatggagcaggtaagactgtagcaaggaagaataatctgggtgacatggtgtggacttttggggtgaagtgaggttagtaagaaccatgatggaagagctgtgagggtggcggggacgtagtgatgagtcgagtgactggttgtattaattccaccgtgtatctctgtaacatgttccgggatgcatggttgaagagtcgacttccagtagtcagtaggagaagaaagaatctgatgaagaagttccgaaaggcgtgttgaagataatgttgtattgaagttggagggattccggagtggtgttggctatggcaaaagaggcaacttattacattgatgttgtggtaattgccagtggatgtataatttctcaaagtgattaggcggttgtttttacaggcaagagctgtattgttccattgcccaagttgggtgggtgcttatagggacagaggctgggtatagtagttcgtagaccggccctgttaatacatacctaagggttggttcaaaggccgggtccttaattggatgacat

SEQ ID NO: 553868 - DNA, 285 bp, Homo sapiens
  misc_feature (1)..(1): n is a, c, g, or t
  misc_feature (142)..(142): n is a, c, g, or t
  misc_feature (185)..(185): n is a, c, g, or t
  misc_feature (212)..(212): n is a, c, g, or t
  misc_feature (237)..(237): n is a, c, g, or t
ncgacctatgatgggaaaggtttccgcgggagccgcacagaacaggatgcggctgagagggcatattcgccgaccgctttcacctgatgcgggtcatgccgccggagggaggacatgctgtgggcactgctgccacacgacnagagttcgctggatccactgtcgtgggtcacgtcgatacgaanagccacaatcacgccgccgagacttcnactattccaccgtcggagctgtggncggtccctcctctgtcgtcatcgccggagccggaattatcggtctgac

SEQ ID NO: 553869 - DNA, 601 bp, Homo sapiens
ccgtctgatagtccccgggttcatcactcctaacggtgcctcatgatcctcgctccatcttctcccgaccatcactgctgcctgtaatgaaccttccttcactattccacaaaccaccttgccaagtcaaaagactcctccttggtgaagctccccaggatctttcccattcccgtggcaccctttacttaccatgccagatgccaccgctgccccacggtgtcccccgctgcattgggacctctttgagagcaaggatgtgcctgatccttctgctctctctgcaggcttggagcagagggagagcaagaatttaccgaacaaggctgggtgcagtggctcacgcctgtaatcccaacacttggggaagctgaggtgggcagatcacttaaggccaggagttagagaccagcctggatcaagactgcgaaaccccgtctctactaaaatacagaaaacttagccaggcatggtggtgtgtgcctgtgatctcagctactcgggagtctgaggcacaagaatctcttgaacccagtaggtggaggttgcaatgagccgagattgtgccactgcactccatcctgggcaacaaagtgagact

SEQ ID NO: 553870 - DNA, 156 bp, Homo sapiens
tatcttgcccttgatatcagtgagccatcagaaggccaggaagcagccaggcatggtggcttatacctgtaatcccagctactcaggaggctgaagctggaggatcatttgtagtcaggagtttgagaccagcctgggcaacatagcaagatctca

SEQ ID NO: 553871 - DNA, 122 bp, Homo sapiens
tgtgtcgctactttacgctacaggagcagattgagatcgttgcgagtggagatcatctggcgcacaaagcctatactatttaactgtctgctgtctgcgcctattcttatcccgaactgatc

SEQ ID NO: 553872 - DNA, 472 bp, Homo sapiens
aactacagtcagaagggtaaagttctaatgttagctccagtactggctggcacttacattcactacactgtacctactaaatcaacagaaccaattactaactttaaaaaatactttcagaaaaaaaaaaaaaaaaaaacgaaagctttttgatttattactttctaggaatttttttattcaatgaaaacctctcattcaccttcattttatacagcacttttaaccaaattactttacctttaataggttgatagttgtattaattaccacgaaaaagttattataaatttttctagaagaacacttgcccaaagttacttatgaattattggcctcttaccttattccccaaccgcccaacaaatttagttgaaaaattacacttacaaatttattgtggttttcttcactattcacttcgaagaaccccgggggaattccttcttagaagttcgaaccttgcgaggcc

SEQ ID NO: 553873 - DNA, 239 bp, Homo sapiens
ctctagtgaaccaagtccaggagattattaaatgacttatacttgccttccaaaaacataaacaagtagggagggggaactccactagcaactgtgatatgccagcattacacagtatttattggtgaacactcgtgaaagagcggaaggtatgtgctcgtgtttttttctagtcttattgtatcgtagacatgggaacgcaatttaggcaataaaacaaggcagatagatgagttttc

SEQ ID NO: 553874 - DNA, 256 bp, Homo sapiens
caagtgggctacggcatttttaatcttagagcgatagcctatactcactgcgcccgactcatcaggggatgccatgctatgtttatagatgttaggtggttggtgtaaatcagtgaagcaggagtccgaggagtgttagttgtggccctaaaaatcatttaaggatactcgtatgcgatcatcaggctcgtcctttgctgttgtgtttggttttcatttgttttgaggttagtttgattccgtctcagctcccgag

SEQ ID NO: 553875 - DNA, 957 bp, Homo sapiens
gtccactatgcaacaatgataagcggcggagataattctatgggtttggtattaggttcctcctttgtctgtcttcacgctagtttctgctccaacacccttggggccgccccgattggttcccgccgttaggatgtctcccacacaagggtatctctgtacctcgtgatgacgccgatttttgctgtcaactcagtgggtgtgcgcacaatcgtcgttgacagggtcatcacttctcggaaccctgccgcgtgctcacctccctgtagtgtggcgcccgtagccccgttgcaagtggttggctcccttgctcgcgatttttgctctccttcgcgcccccctgtggcaattcttgttccggtctacattgtgagttgcgcccacatttgttgtcgctacccatcttcccgaggggggtgtcgtcgcgcaactctggtgttcgtgctgctttaaaagcgcgcttcgttcccgatatcttttcgtgatcatccctcgtggcgcgtcccgtaccgctcccactctggaagtggggcggggcccccggtgccccgcttcgcctgatatgtctgtgtgcgccctccgttccccccaattatttggtagtgcctcttccccccgcggccccttctgggcgttctttcttccctggcaaacatctgtcggtaattttgcccccacactcttttttcgcgttgcccataagtctctcgatgacgtgtgccgggccaccgtcagcccccggtgtctgtcgcctcgtgggggtcggcgctgctgatctgtatgcatcgcactggggctttgcgcctctggtccccgctgggaggggccattcttggcccgatagacgccattgcccgccctcaccttactgtctagcaattcaccacagcttccctgaaaaacggcacccggtccaaaattaaaaaacagggttccctgcccggggaaaacataaca

SEQ ID NO: 553876 - DNA, 102 bp, Homo sapiens
tttcacaggatcttactcgatccgctgatcagcagctaaacggaactaaatacatgtacagcactcagcacaaagcctggcacacagcaggctctcacccag

SEQ ID NO: 553877 - DNA, 707 bp, Homo sapiens
  misc_feature (8)..(8): n is a, c, g, or t
  misc_feature (12)..(12): n is a, c, g, or t
  misc_feature (18)..(19): n is a, c, g, or t
  misc_feature (39)..(39): n is a, c, g, or t
  misc_feature (42)..(42): n is a, c, g, or t
  misc_feature (44)..(44): n is a, c, g, or t
  misc_feature (48)..(48): n is a, c, g, or t
  misc_feature (50)..(50): n is a, c, g, or t
  misc_feature (54)..(55): n is a, c, g, or t
  misc_feature (60)..(60): n is a, c, g, or t
  misc_feature (88)..(88): n is a, c, g, or t
  misc_feature (93)..(93): n is a, c, g, or t
  misc_feature (97)..(97): n is a, c, g, or t
  misc_feature (104)..(104): n is a, c, g, or t
  misc_feature (108)..(108): n is a, c, g, or t
  misc_feature (117)..(117): n is a, c, g, or t
  misc_feature (120)..(120): n is a, c, g, or t
  misc_feature (124)..(124): n is a, c, g, or t
  misc_feature (132)..(132): n is a, c, g, or t
  misc_feature (138)..(138): n is a, c, g, or t
  misc_feature (142)..(142): n is a, c, g, or t
  misc_feature (145)..(145): n is a, c, g, or t
  misc_feature (157)..(157): n is a, c, g, or t
  misc_feature (160)..(162): n is a, c, g, or t
  misc_feature (166)..(166): n is a, c, g, or t
  misc_feature (168)..(168): n is a, c, g, or t
  misc_feature (170)..(171): n is a, c, g, or t
  misc_feature (174)..(174): n is a, c, g, or t
  misc_feature (188)..(188): n is a, c, g, or t
  misc_feature (280)..(280): n is a, c, g, or t
  misc_feature (345)..(345): n is a, c, g, or t
  misc_feature (453)..(454): n is a, c, g, or t
  misc_feature (482)..(482): n is a, c, g, or t
  misc_feature (495)..(495): n is a, c, g, or t
  misc_feature (523)..(523): n is a, c, g, or t
  misc_feature (547)..(548): n is a, c, g, or t
  misc_feature (563)..(563): n is a, c, g, or t
  misc_feature (576)..(576): n is a, c, g, or t
  misc_feature (579)..(580): n is a, c, g, or t
  misc_feature (606)..(606): n is a, c, g, or t
  misc_feature (636)..(638): n is a, c, g, or t
  misc_feature (641)..(641): n is a, c, g, or t
  misc_feature (643)..(643): n is a, c, g, or t
  misc_feature (647)..(647): n is a, c, g, or t
  misc_feature (655)..(655): n is a, c, g, or t
  misc_feature (659)..(660): n is a, c, g, or t
  misc_feature (664)..(664): n is a, c, g, or t
  misc_feature (667)..(667): n is a, c, g, or t
  misc_feature (671)..(671): n is a, c, g, or t
  misc_feature (677)..(677): n is a, c, g, or t
aaaatgtngacntgtgcnnacaacatcatggctcttggnagntnaaantngggnnttttnatttagtgaacagaattgagaagaacgngccanatgngaatcanttangcggatttntgnctgncatttcanatgcgnaatnaanttattaatttantannnctanangnnatncttagattctttgngcttgatcacagctgatttttctacattagaaataagatgccacacaaggaactacattccagatttaaagaaatgaaaggataccattagngagtataacagattattgttcatacttgtaaagcatcctatgtcattgagaatataaagaacagngccttagaagacagtgaaaggtaagctctagcttaatgtctatgatttgttctttgacattaaggaaggtaaggattgctcagaggatgtaacttgatgtgagcagtnncatacctgttgtagatatcatactgttnatattttattganaatttatttgagagcggagaaactcatnctaaagtctgttatacagaatttnnagccttccatcttgnacctcccaacatnttnnttatggctgttggtatagcagctaantgatttaattacactgtcctttgactttannngtngngacntctttggncggnnaganggntatncattantttagactctttactattttgcgaccctcg

SEQ ID NO: 553878 - DNA, 218 bp, Homo sapiens
tgcgagtccagggtatagtccaagtgtaaatctatggtgaacatggatgcctaaaggaatggaccacagaccccagaaagaaatgggatgccagagcataccgactgacttctaccagcaaatcttcttccagttaactctgctcctcattgggcgcagggtctcaccatttctttgcctcatgcaagagataatgacgacataaacatgcaaactgc

SEQ ID NO: 553879 - DNA, 119 bp, Homo sapiens
ggaaaaaaaatgcccccccgggggtcccccccccccggggaaataaattttccccggggtccggccaagggatttttttttaagggggtgggtaaaaaaaattctgccctttggaaaga

SEQ ID NO: 553880 - DNA, 599 bp, Homo sapiens
  misc_feature (237)..(237): n is a, c, g, or t
  misc_feature (345)..(346): n is a, c, g, or t
  misc_feature (374)..(374): n is a, c, g, or t
  misc_feature (387)..(387): n is a, c, g, or t
  misc_feature (415)..(415): n is a, c, g, or t
  misc_feature (439)..(440): n is a, c, g, or t
  misc_feature (455)..(455): n is a, c, g, or t
  misc_feature (468)..(468): n is a, c, g, or t
  misc_feature (471)..(472): n is a, c, g, or t
  misc_feature (498)..(498): n is a, c, g, or t
  misc_feature (528)..(530): n is a, c, g, or t
  misc_feature (533)..(533): n is a, c, g, or t
  misc_feature (535)..(535): n is a, c, g, or t
  misc_feature (539)..(539): n is a, c, g, or t
  misc_feature (547)..(547): n is a, c, g, or t
  misc_feature (551)..(552): n is a, c, g, or t
  misc_feature (556)..(556): n is a, c, g, or t
  misc_feature (559)..(559): n is a, c, g, or t
  misc_feature (563)..(563): n is a, c, g, or t
  misc_feature (569)..(569): n is a, c, g, or t
tctctagtggcatctaccctttcttacttggttacctcatagatatatttcccatgattactataacgtgcataataaccgccgttaagggatcgtcatcagataagataggtcaactgtgcacccatgtcctagaatcttcatgagacgaactgccggcgtatctgtgtatgatcagaattgtagttcatgacatatgctggagcatgtcatgtcattgagaatataaagaacagngccttagaagacagtgaaaggtaagctctagcttaatgtctatgatttgttctttgacattaaggaaggtaaggattgctcagaggatgtaacttgatgtgagcagtnncatacctgttgtagatatcatactgttnatattttattganaatttatttgagagcggagaaactcatnctaaagtctgttatacagaatttnnagccttccatcttgnacctcccaacatnttnnttatggctgttggtatagcagctaantgatttaattacactgtcctttgactttannngtngngacntctttggncggnnaganggntatncattantttagactctttactattttgcgaccctcg

SEQ ID NO: 553881 - DNA, 175 bp, Homo sapiens
  misc_feature (26)..(26): n is a, c, g, or t
  misc_feature (163)..(163): n is a, c, g, or t
gggaaagcacgcggcagcccggctgncaggctgcaggctcgtcccattcttcagtttcctcccctggaaagctgcattaccaggcgacctcttgctggctttgagagatgtccaaatgggaactattaacaaaggcacgctcccctttttatcttcgtcacanagtgctttgccg

SEQ ID NO: 553882 - DNA, 714 bp, Homo sapiens
caagatggtgagaccccatctctaccaaaaaaaaaatgtaaaaaatattatttttttattattattatcattattggtattttttagacagagtctcactctgttgcccaggctggagtccagtggtgtgatctcagcgcactgcaacctctgcctccctggttcaagcgattcacctgcctcagcctcccaagtagctgggattacaggcgcctgccaccacgcctggctaattttggtattttagtagagacggcgtttcgccatgctagccaggctggtctcaaactcttgacctcggatgattcacctgccttggcctcccgaagtgctgcgattacaggtatgagccactgtgcccaaccaaaaaatttaaaaattaagatggttgcagtggtgtgtctctgtggtcccagctattcgggaggctgtggcaggggatcccttgagcctgggagtttgaggtggcagtgggctgtgatagcacccatgcactccagccgtgggttgacagtgtgggaccctgtctctaaaaaatgaaggacagacgggaggccgaggtgcagtggctcacactgtgaatcccggcactttggggggctgaggtgggcaggatcgttgagccccaggatttgagactagcggggcacatttgagacccactctaaaaaaaaaacaaacacaacaaaaactctacaacagggggcacaggca

SEQ ID NO: 553883 - DNA, 765 bp, Homo sapiens
cgccggcgggcgcgaccgctccggggacagtgccagggggagagaaaatagagacccggttgttgacagcctgtgatgccgcttgattcatgtgtgggtggcctggtttagaaatgtaccacccttcctttctaggttcctccccggagggcggggtgacgggtgcggcgccgaatcgcaacaggaaaacgctgctcgagggatgtcagtaactgtctcagcttaagttgctggcttttagcttacagttagtatcgtaactgtaatggtggatcttagttaaatcccttcagtgtgttggaaacatatttgttaagtgtatttttggaaacatacttagagcatttggaaatgcttttatgagagcgtttattaaatcttctgtgacactttatttttgtcagtcgtgcagatgaacttgactcactcaaggttaatgattttagttttttatttatgttagtagaggcggggttttgtcatgtagctaggtaggagttgaactcctgagctcgagcgatcgcactgccactgccttccgtgctggacttagaggcgtgagccacggcgcccggtggccgacgttcatactactcacaagttcctaagtccattgttcagttattgaactggtgtaaggcgcacttccaagtcgatgagtggggtacatacctccccaatattgtttcctgtgggaacttccagttagcgaacgggttaacaggcgccacctcagaaccgcactcatttttcacatgcgggtcc

SEQ ID NO: 553884 - DNA, 802 bp, Homo sapiens
ggttcagtaacaggacactagaatatatttaatttattcttttatttcgtagctgtttattgagcatctactcagtgcttgacacatagactcaatgagattctgtcaaggactggtgccatgtttttaagaacatggaatgctgtgagctaagagcttacttttttttttttcttaggaatttatccacacatttttagatattggtacccatgactctataatttggtcttcccacttctctaatatcaaaatttttttaaactgtcaattaaacaaaaagtttaggtcctactaaggcttctagctttggcccttgaaaccaggcctaagtacaggctaatacgttggcccttggcaacttccttaagttctctggaaaaggctctaggtgcagtatgacctgaaaaaaccaaaaacacgtgggttcaaagaggaaaaatcagcaaaagcaagactacttggcttaccccttatattggctacttaagtatttaagatagtgctataaatagcaaagattataattcttaagtcctttttaagggaaccagattacgctcataagtactcagagcaaaattaaactacacctctatggcatactggccatactttataggaatttccccttgtgtaaaacatggtgttgcgcggacacaaatgtttacagaacagccttcaacggacttttccagcccaaacacaacccagcgatacaccttacgacactgggaaacccaaggcacacacaatgtcgacgcccaacaacgtggcgcgcctgggtattccattcccgtga

SEQ ID NO: 553885 - DNA, 138 bp, Homo sapiens
taaccctatttatttgtgacagtaaatcttaaaaatcattgtctctattatgaacatttcctcagtttcttctctgctgaacaatgtaagccatgctactttttaatgtatttagaattttagtgctcattggaaatt

SEQ ID NO: 553886 - DNA, 200 bp, Homo sapiens
tctctgtgactacctctttgaagactcctcccagctcaacacgagtgaagaaataaatgactatgtaatgagaagaggcagcggaaaccagagcctgccgtttcccacattaaagaggcacagaaattccaggaattagtgaaaatggtgtcatctcttgcaggaagggcaccagctgacactggttgggtagtcacaga

SEQ ID NO: 553887 - DNA, 177 bp, Homo sapiens
  misc_feature (121)..(121): n is a, c, g, or t
  misc_feature (129)..(129): n is a, c, g, or t
ctggcgtgagatctctcagttttcctttcctgtgggccactttaaacttcgttgatcttgtaaattttctcatggcatgacctcttgtggagaagtatttggaaagacataccgtgtcctngactttcntctggactctcccacttatttctacctgttcagacccgcgggcgtggg

SEQ ID NO: 553888 - DNA, 467 bp, Homo sapiens
  misc_feature (454)..(454): n is a, c, g, or t
gcgacctagattatcccgtgatgtatcgccccacaccctgtttcaaaacgtaaaaagtaaataggtgaaattaattttaacgttttatttaacctaacatatccaaaatactatcatttcaacaggtaatcaatatagaagttattgagacattttatggctctttttaatattttaattattattatttgttaatagagacagggtctctcttacccaggctgcagtgcagtggcatgatcatagctcagtacagcctctaactcctgggctcaagcaatacttcacctcagcctcctcgagtagctgggactacaggtatgcaccaccatgtctggctaattttaattttatttatttattttttttgtagaggagatctcaccatcttgcccaggctggtctcaaactcccgggctcaagccatccttctgcattggcctcccaaagtgtnggggataacatca

SEQ ID NO: 553889 - DNA, 100 bp, Homo sapiens
cgacactcagcaggatccccccaatttccttcagagatttaaacatctatgatgcggattgcatcatcgccttcaatagcacagcaagattcaagtagtt

SEQ ID NO: 553890 - DNA, 180 bp, Homo sapiens
cacttcttccttcttttgctttgtcagagcacttcttctttattgaacagtatatgaggcctttgagactaaactaatgaagagtaaaggggagagaacctagtgtgtagcttaccctgtggaggacttatagactaacgtccaggggaaactggtgatcttaacatacctggtgtgtcc

SEQ ID NO: 553891 - DNA, 325 bp, Homo sapiens
cccggggcccccgggtgtgttagggttttttgggccttttttttggaccaacaaccctgcaaacagggccctttgagcccccccgcagtcctttgaggccccttaagtttttttgggccccttaagtttttttaaccccccgcagcccttttgggccccccaaagccctttggggccccccaaagcccttttaaccccctgttgccctgtggggcccccaaaacccttttaaatgcctgttttccttttaaccccccgctccccttttaggggtgggggcccctatgctcccgtgtgatgtttccataaaggggggtttccctta

SEQ ID NO: 553892 - DNA, 543 bp, Homo sapiens
aaagagtttagcaggatacccgtcttgactagtgataggtataatctcaggaaggaatggtaccagtacctccttgttactcgtggataaattctggctgtgaatccatctggtcctggactctttttggttggtaaactattgattattgccacaatttcagctcctgtaattggtctattcagagattcaacttcttcctggtttagtcttgggagagtgtcacacattttcttaatccagtctatcgttgtaggacatttgggttggtatccaagtctttgctatagtgaatagtgccgcaataaacatacgtgtgcatgtgtctttatagtagaatgatttatattccttggggtatatatccaggaatggtattgctgagtcaaatggtatttctggttctagatccttggggaatcaccatactgtcttccacaatgtttgaactaatttacattcccaccaacaatgtaaacacgttcctacttctccacagcctcactagcctctactgtttcttgattttttaataatcgccat

SEQ ID NO: 553893 - DNA, 394 bp, Homo sapiens
caattccattccagcgtaagcgtcctgagtagctgggattacaggcacctgccaccatgctcagctaatttttaaaaaatatttttagtagagacagggtttcgccatgttggccaggctggtctcgaactgctgacctcgtgatccacccacctcggtctcccaaagtgctgcgattacaggcgtgagccaccgcacccggctttacttatttgagtatgtaaatcacgaacatgtttttaaaagtcagaaccctgtagaaacttaaattcagatgtattactcccccccgccatctttttttttgttgttgttgttgagacagggtctgattctgtcacccaggctggagtgcagggttgccatctcagctcgtagtggcatccacctccca

SEQ ID NO: 553894 - DNA, 166 bp, Homo sapiens
  misc_feature (110)..(110): n is a, c, g, or t
atagccgtcacacgccacggagaagggtggctgtggtgtaggctggcagctactgctctgattcagccatagcctgtaacttccatatgccatgggtgaggctcttaaanaaaaaggaaagaggagttcccgttgtggcgcagtggtccttctccggtggcgtggt

SEQ ID NO: 553895 - DNA, 375 bp, Homo sapiens
cccacagggggggaatcaagtttcccgttatttttccccccacgggttttaaggccccccccttttccccccccttttccttttcccccttttccttttccccccccttttttccccggggcagcatcattggggtgtttgccgggattgggtaacccctttaacccccccccgtcccttgagaaaattttttccagattttgggccccgatttttttttggtttaaacccccaaagcaaagatttaattttccacccaagtttggggttccggggggggggcccatgaaaaaattcctgctaggaatttgggtttggtgttggaccccccccccccccctggggggtacccggagcccataaacttttttttta

SEQ ID NO: 553896 - DNA, 781 bp, Homo sapiens
  misc_feature (188)..(188): n is a, c, g, or t
  misc_feature (196)..(196): n is a, c, g, or t
  misc_feature (208)..(209): n is a, c, g, or t
  misc_feature (214)..(216): n is a, c, g, or t
  misc_feature (219)..(220): n is a, c, g, or t
  misc_feature (238)..(238): n is a, c, g, or t
  misc_feature (248)..(249): n is a, c, g, or t
  misc_feature (272)..(273): n is a, c, g, or t
  misc_feature (286)..(286): n is a, c, g, or t
  misc_feature (310)..(311): n is a, c, g, or t
  misc_feature (314)..(314): n is a, c, g, or t
  misc_feature (322)..(322): n is a, c, g, or t
  misc_feature (328)..(328): n is a, c, g, or t
  misc_feature (340)..(340): n is a, c, g, or t
  misc_feature (342)..(342): n is a, c, g, or t
  misc_feature (348)..(349): n is a, c, g, or t
  misc_feature (352)..(352): n is a, c, g, or t
  misc_feature (354)..(354): n is a, c, g, or t
  misc_feature (373)..(373): n is a, c, g, or t
  misc_feature (375)..(375): n is a, c, g, or t
  misc_feature (380)..(380): n is a, c, g, or t
  misc_feature (382)..(382): n is a, c, g, or t
  misc_feature (390)..(390): n is a, c, g, or t
  misc_feature (399)..(399): n is a, c, g, or t
  misc_feature (434)..(434): n is a, c, g, or t
  misc_feature (437)..(437): n is a, c, g, or t
  misc_feature (459)..(459): n is a, c, g, or t
  misc_feature (462)..(463): n is a, c, g, or t
  misc_feature (470)..(470): n is a, c, g, or t
  misc_feature (502)..(502): n is a, c, g, or t
  misc_feature (510)..(510): n is a, c, g, or t
  misc_feature (516)..(516): n is a, c, g, or t
  misc_feature (518)..(518): n is a, c, g, or t
  misc_feature (524)..(525): n is a, c, g, or t
  misc_feature (534)..(534): n is a, c, g, or t
  misc_feature (576)..(576): n is a, c, g, or t
  misc_feature (579)..(579): n is a, c, g, or t
  misc_feature (589)..(589): n is a, c, g, or t
  misc_feature (593)..(593): n is a, c, g, or t
  misc_feature (599)..(599): n is a, c, g, or t
gtgcccgcactaccatacatcagtatttttattattattatgttattcctttttaatttaatgtgctcgcactacaatgcatcagtattatgattcctctgtactttcctttcgctattcatcaatttcccattttttttttcagcttaagtaaccacacaattttaggcctcaattttttttttttnctggtaanggaacttgaagnngatgnnntgnngtgaatttaagataccgnaagtcttaanngtgaccgggacgtgagggaaaanngtaagatgagaantaaagaaagccttggtaagggggnnttnaaaagccnttattngcaaacctttanantcgggnnttncnggcaagtgccatcctggtncngggtnangagggtancatggggtnaccttggcaccagcttcagggttaagctcaccctngtncttggaagcacccatgtcagtntannaagaatnggcagcagtcccttagttcacatatgtttggngcaattantttccngnactttnnggccataantttggtcagttttacaccaaacggtttggcaacaaaaaaatnttntgtggattcnattnaatttnagggtcaaattaagctttcgagtccagtgggggcctccatttaatatttcccctaattcacattcaacttcacaatacgtggtcgctggttcccggcactacatgcagttctcccagtattctgcgcatcttattgtacgcctaacacggcggaacgtgcccgcttgaccacttgggggcca

SEQ ID NO: 553897 - DNA, 381 bp, Homo sapiens
  misc_feature (4)..(4): n is a, c, g, or t
aaantcagttataaccctttggttgatgttagcttctccctatgctgtcctcctctaccggagccccataggcttgtgaatggacaggttcaaggcggcgcccagggcctaagcattgagaagtgtattctccatctcctgccaaactatggctggtgtcaagggatgacagtaactgccctgtggccctctgaagaggtactgtggatcagagaaactgggtagatgtccacaaagctgggagcctcattaaagcatacaagatgggaatgggcctggaaggggaggctggtgcccagtagaggcaggtttccctcctcctccaaagcaggaaacctgagagctagagtccctgcttaattaaatgtctaaatggtctca

SEQ ID NO: 553898 - DNA, 352 bp, Homo sapiens
agactctacattactatcagagaccactatagagaccatttacccacatatagtgtatgcgagatgagatagaaaactgtggcaattatatattaccgccaggggaagaggaaaaattgttaccaagcgttatattgccaggacttacccctatacctcttggctatatggattaacctggaataactctggaaggggaggcaaagcttagaaccccgaaaccaggcgaggtcccttaggacaagttaaagagcgcacccggctatgtgagaatagagggaagagttatatggagaggccacctaccgaggctggcgatatatggttgtgcaagatagaatcttagtccctt

SEQ ID NO: 553899 - DNA, 107 bp, Homo sapiens
gatccacccgcctcagcctcccaaagtgctgggattacaggtgggagccacaacacccggccatgaattaactccgttaaaaaataaactgtatacattctgtgagc

SEQ ID NO: 553900 - DNA, 829 bp, Homo sapiens
gagaggggaacaagatggccggcgccgaaggggcagcctctggggtgaggacccatctggggtctcccgccgtctgctgctgtctgatccatggccttgtgtcggaggttcgggagaccggttcggctgaaggcatttgagctcggtcttgggtgatacggcgtcttgctcagccgggtcctgtcagttgacctagccctcttgcatcagcctaccctaaggaagaggagtcgtacgcatgtcagagaggtggcaggctgtttgcgatctgtcagattcgtggcatgatggaattgacttacatcgaactaagatgggaactgtgcatctgctatgtacgagaaagctatattcccaatcggatgagctacagtgcttgccatctgtggatgccagaatcgagctgccattcgctgaactgagactaagaagcaaagttatgtccctgatgccggaaaatgcacgctactctgtgcgctctaactctggtgaggtcattcgtggagtgaccatgatggactccgtacagagcttcattaacctcttcatggacttttaatcttcaaagccgatgacggaaaaatagtatatgccagtctaagccagaaatccagtatgcaccacatgtgggagcaggagcctacagatggagagaatcatcttctaagcaacaatgtcctcagaatctgcacactggacaacatccacaaagcgcacagggaattgtcttgaagcatggacaacagtggatgagctttaaagaatggctctctcttaatcctggtggattcattaccagcctggcctccccgggcggaatgctcgccat

SEQ ID NO: 553901 - DNA, 153 bp, Homo sapiens
ttacatttttactttcagagggcattcagcactcttaaggtgggtgatatggctgtcaattttaagcttgagggtttagatcaagtgcaagctaagcttgatctgttggccaatcctaaaaaagcaaaatctattgcgcgaaaggctgcacgt

SEQ ID NO: 553902 - DNA, 104 bp, Homo sapiens
tgtcgctctacaggatcccccgggcatacggatagtgcgggggatagggatcagctctggtgctgcgatgtgtggtgatcagcctaagcagagcttcccatatc

SEQ ID NO: 553903 - DNA, 484 bp, Homo sapiens
aggttttccccctggaaaaggggcagtgaggcccacccaattaatgtgggttgggtccctccttaggcccccccggcttttccctttatggttccgggttgtattttggggggaaatgttaggggataaccattttccccagggaacagctttggccctgatttcccccagcttgaaattaaccccccctaaaaggaacaaaaagtgggggtcccccccggggggggccgctttaaaaaaaaggggtccccccgggggcaggaatttggcccgaggttttctcccttggcccttagaaacagggggctggtcccccccgcccccaggatgggccaaaaggggcaggatgttgatcctccccctgggttccaaaaaaacctggggcttggcagtcaacccgggggaaggggttcctggggaaaccccccgttgtcctattccttcccaggttccccccaaaaaaaacaaaagggttttgttggga

SEQ ID NO: 553904 - DNA, 1449 bp, Homo sapiens
  misc_feature (309)..(309): n is a, c, g, or t
  misc_feature (474)..(474): n is a, c, g, or t
  misc_feature (551)..(551): n is a, c, g, or t
gggtcgttgccgagtccagagtattatagcctccgttatgcagatggtcctcagtctgtagcatcatggaagcagagctcggcgagctgagcattaacgagatgtggatcgatctctgtatcaacgtgggcttatgcttcgcgccgttccctgggccatggaacgccagacgtagtagtggaggagggacccagttacataccaaagctatggcatgtatgcacggactgggaagtgcgcaagtgaatagcgatgccttgtgcgcagaggctacatctgtcacgcagcgatgacctctctcagtcctancttcgtaggctttcgagtcagaacactgtgactggggcaatgcatcttggtgctgagcaagggcgtgcgatgggaatagatggcaagccacaccgctgtctatgctgcgcacaactaacacatgcatgacgacttggctcggcacgagtttgcaacatcctgcanactggcttctttcgctagtgaggtcgtgcagtgtgcaggccactgtgcgcattctgtactgcactgggaaccatggntattccaaagtcaaccgttgtacttacagccaaggattctgcaagggctcagtggtgcacgacacgagagcgcgccactgggtaggcaactgctgtccaagtcgcatatcaagcagggttcccctgggcccaattccttgggcatgcacgccatgggggttcttaatgtagaacacagtcctgggagggttctggttaactccgaggtaacggagttacgcctccggagggggacatacatttcacctccgatgaggagaccgaagtttcacttctttccatcagcccttcgcgaggggttcttcgcgaaatcctagggggacgatctctccaggaacacctttaacctcgtcccgaatttatgggcggagcattgtggtactgtcataactcgccaaactttaatgattcttggggcaactggggctttcgcgattggaatggcgacaccgtaaatagctcgaacacagggggaattcagttttgtggcacgagaaattaggccagtttctgtgggcgcgaccaagggaaaagcggcaatttgcttcacccaggggtgcgtgatttgaaattcctcttgtgggaaactgctcacatcgggtctaggattcccccggacaggtggaaaaacccagaggcatcgacgaattgggatagaacactttggtacggattgtggggccgcaattgccaacgcgtaaataattggttacacttttccaaaggttcaccgtagaaccctttttaaaaccctcttcactaggcgataacgcacagacaggataggaattggaacgcatcggattggggatacccccaataatggacaccaaggggcttccaaccagggggcagtctcgacgattattggagacttggagacgactagatttcggca

SEQ ID NO: 553905 - DNA, 181 bp, Homo sapiens
atccatgcgtgtagacgttattgatagtcagtctggtgtcacatccatgtgattgttttgggtatgctgttcccatttctgactgcccaaggggttcagaaccccagcaatcccttcctttcactaccttctttttggggggtagttggaagggactgaaattggtggggggaagggaagg

SEQ ID NO: 553906 - DNA, 152 bp, Homo sapiens
tatacgactgtctggaataccatggatgagctgcgtggtggcatgtgcctattatcccagctactcaaggcagtgagagttgcttgaaccctgggctgagatagcaccactgcactccagcctgggtgacagggcaagactccgtctcaaac

SEQ ID NO: 553907 - DNA, 366 bp, Homo sapiens
acgcctggctaatttttgtatattcttttagtacagacggggcttcattatgttggctaggctggtctcgaactcctggcctcaagtgatccactggcctcggcctcccgtgctgggattacaggcatgagccaccaagcctggcttcataattctctttatgagacagaattttgccctgttgcccaggctggagtgcagtgtcacaatcatagctcactgcagcctcaaccttctttggttacgccatccttccacctcaactacctgggcggctcgatgcagcctgatcactttgtcccccccaccggagctcctactttgccgtcatcgtctctctgccgcccctcctcccgcctcctccct

SEQ ID NO: 553908 - DNA, 732 bp, Homo sapiens
  misc_feature (326)..(326): n is a, c, g, or t
tcccagctctcagggaggctaagaggcgggaggatagcttgagcccaggagttcgagacctgcctgggcaaatatagcgagaccccgttctccaggaaaaaggtaaaaaaaaaaaaaaaaaaaaaaaaaaaaactgtgttgggccgccctgggcccccgaaaagcttttaaaaccatcggttgtggggcgcggggccccagagggttaggggaccgcgggccaaagcggttcccaaggaaacccgggccaggactggggtcgggtttccccccaataaaaacgccccggggggcacccggagcgctgttctggaaacaactctcangaggggaggtcaggagagccactaccgcgggctatatcacagggggctccaagggagagccgattattaaattaaccgcccagacgggggggagcacacaagcggagacaaaacacagacgagaagagagcagcggaaagaagcagaagagacacgacagaccaagagacaacacaagagagaggacgagcaagaaagaagggagagaagaaccaagcaagcacgaacacaagcaaccaaagaggaaggaacgagcgacaccagaacggagagaagaacaaagcaacacaagaagcagtaaacagagaaacgaaaaagaggagacaagacaagagcagagaaaggaaacaagcgaaggaggagaagcaaacctacaaggaggagaaagagaaaagagaaaaaggaa

SEQ ID NO: 553909 - DNA, 537 bp, Homo sapiens
caagaattcggcacgaggttttcccattcaataaaaatagctcggtgggacaacatattatagcattcgtggaaataaaaactaggaaccacatcataggatgttctgctccaaacttggcgctgatcccccaggcagctccaagttccctctgattcaggcagcagcgacggaggccctcccctgtcccaggtgggacccggccttcagagaggaagggaggtggtggtatgaggcatcagctgtttcctttgcctgtgggccaagatccttgccatggcagaaatacaactttgtccccagtgtctgccttctgcactgtaaaaagcaagtttccatcacaaagggttgcgattcaggaaaccagggttagaggcaaacgggtcttatttgaaaatggtaaaacctggccaggccttggacttcctgcattggttgctctcctgggacctgggaccagcccagcagggtggggtggggcagcaatgcaggttacaggatgtgaaagtggggactgaggttaggaaaaaaaaaaaa

SEQ ID NO: 553910 - DNA, 414 bp, Homo sapiens
atataaataagcaaagttgtgaacatcgtcttcactatacatctctaggtgcattatgtgtgtctattgatatgccctcttcatttatatccccaccgaactgactgtggtttatcccccagaaagctgttcgttggattctatctcgtgattgcccagcccctctcgcaggatctctcttggcaatgacattttggccagctgttcgtgaggataaccgacgcgttgcattggccacaattgtgacaattgtgttgctccatatgctgctttctgtgggctgcttggcatacttttttgatgcaccagagatggaccatctcccaacaactacagctactccaaaccaaacagttgctgcagccaagtccagctaatgaggaaattctcttttgttttttggagcatggttct

SEQ ID NO: 553911 - DNA, 892 bp, Homo sapiens
cccaaggttgtggtcggtcaaaagagacgtgtgacgtgggaaccattgtgaactcccaaccgagggttgtggattacgaccttgggaggccaattcgcaacccctgttgatgtcccttgcaagaagcctgggtgatgcttcccagcgcccccaggtgtccctggtgtctcgctggcaagcccggcgacattaaaggcttcttttcttgaagcccagagtttggacaaacaccagaatgtcgccctgtgcatacaagacaccccttcgggtttggaaagaaggtgcttacgccacctatgggccgtacagagacgatcaggctacgaaaaccaggggttggcgccccgtagtcctagggacagcctgggtgtaccatgacggctaacactcttggggggagactttttttaatgcagttcaaaaagcgggcgcgcgctatgacttggactgtgaccgttgcctgtcgtggacgcctgagccaagaggagggaagtaagtcactcctcatctcgacgcctccagaggcattgtgtctgcgcgagtgcatttcccacggcccctcctcgccctacgcccccggggagcccaagccgcgcttcggagttacttgatagataacgttcccccggggatctatggacactataactcccgcactgggggactcagggattggtcttgaaaaatatcctctgacaaagggggcaccccttttttaggctctggccagatccagtctgatttttgtctcctgttatcgcacgccgcaagattattatccgtctttttaccgatgcgtcgacgacgaccacgccccctgggtttaagttataggggaaacgcctcggagatcaaaaggttaaacccagaagcaaggcaccccccccaaaat

SEQ ID NO: 553912 - DNA, 196 bp, Homo sapiens
cgccctatgagttaacttggctgtgtaagcttagacaatttactatcacctccgtgattcgtcagcatcctcatctgtcgaaatgaggcataaaagcaacttcagcagttgttattgagattcaaacgggatgcattcatgtaaaatggcttagaataacgcactgcttggattaccaaggagggtaccgagctcg

SEQ ID NO: 553913 - DNA, 125 bp, Homo sapiens
gtgaagatcgacatcatagaggatccccttctgctgtacgatattgtacatgtaggcataggggtgcactgagctgagagagcacgcagccctgcgcaccaggaacagacagaccagagcaccga

SEQ ID NO: 553914 - DNA, 139 bp, Homo sapiens
ccccgtcaatttcagcaagttccaatcagccagcatgcatggccagggcaaatcaggcaacacatcacagcacagcagcccagcagcaatggctcagagtttcatcagccaagtcagcatccatcaatggaggtcttca

SEQ ID NO: 553915 - DNA, 144 bp, Homo sapiens
  misc_feature (71)..(71): n is a, c, g, or t
ggcagtgcaaatatccaaggaagagggaggtttgtcgctgattggcatcttcaggctgagctgaatgagtnctttactcggggaggcttggctgaagatgggctactcttgaggttgagggtgcgaggttacaaccaaccaggg

SEQ ID NO: 553916 - DNA, 117 bp, Homo sapiens
ggggtccagaagggagtcccttatgtgccacccagtcttcgatagtagttatatataagacctttgttagtaaccccactacaatttccatactactgatacctggggaggcatccg

SEQ ID NO: 553917 - DNA, 302 bp, Homo sapiens
attctagactgaacagaaggctgtgtagggcgtgatgttatcgcccaacactaaccatagctgatgagctacaaaaaaaacaaaaaaaaaaacaaggggggagccttcgcactcaattgccaacttttggtaacagattaatttttcccataaaaaccatttttggaaccaatcagtaatttaaaggtttggttggtcctaaatgtaagagttcagactcacattctattaaaatttagccctaaaatgacaagcctttcttaaagcctttttttttacaaaagcgccccccccatttctgg

SEQ ID NO: 553918 - DNA, 298 bp, Homo sapiens
  misc_feature (182)..(182): n is a, c, g, or t
  misc_feature (216)..(216): n is a, c, g, or t
tagtgatctagaggatcttatttagcaggcagtgttggaacagttcacgtgcggtccgtgcaggctggtctggggagtattctgcggaccggtcacgggcttggttagtcatgcgtacatgtgtgccttggggtgtctgcactccaggccttctcagcacacttccaccccagggttgcccncaggctgatctcatttctgatgttgagggctgtntggctctgtctgtatagcttgtaacaggagccttgggctaaggggctggggaaggaaagccgagcttggcatccgttctctg

SEQ ID NO: 553919 - DNA, 1105 bp, Homo sapiens
ggtcggccgattctagtttagaatagaaggggttggggaactagctgcacggctctctgattttccaccgctacagatagcaagacaaatctctcctctgccttctccttatcagactactcaacattgaaggcaatatagaatgacagacctattattgtatatataatttcgagcttagtatcttcactcagatgcgcttgaactagatagtatagagcacatagcctgattccaccttacatatatatcccccgagacgaattccatcatcgcactaatacatgttttcattctattctgtttgtcatatttatcatgcgaacgcgtgataatgattggcctcgttatgaccctaatatagcacttattatatagagtatttcagcaatgtgtcgtcccgcctcactggatagtgagtgttgatacaaatatgccggcgttgaccaccgagtgcgccctacgtgatgagataagtaaactaacgggtcacttggccactctctttccagatctgcctcgacgatctatgccgcgattggaagatacatacgtcagtgcgaatccgttgactctcgcccgctgctcgatcattcatatacagtataagctagttcggtctactctagagtcgttcactcctcagtctgccgcggtattttatttactagtgtcgtaccaccgcatgtgtagtctagtagaatgacgatacacctctatactcattatctcttacgccgaccacacattatatttagactcctcagtttcacgtcgcgagaattataatatttgacaccttgacacgcgctcgctattcaatacaatattatgtctctatacaccataagtacaagattgtgatagttatatagccagtatcgcagcgtgtataatttatgtcctgcgcacctacagcccgcgctgtattcgcccttatatattgtttgcgccatatataatggcaggcgaagatataaagctgatcgccaaatacactgtgttaccggacgtgctccgctatgtaataatgcgcatgatcgtatctgagcccgtatcttatttgctcacaggcgccatttatcatcaccacatagtatacatg

SEQ ID NO: 553920 - DNA, 206 bp, Homo sapiens
tgcagggaaaagcattggcccccaacccagcatggggcttcattgaggcagttgatggaaataaaccatttgcttttttgctacttcaacattttttagcttttccggggatttaaacccaatttgctacccaagtccctgtttttttttccatgccctgggggtaatttaaaaattaaatggccctcttttcccagattttccca

SEQ ID NO: 553921 - DNA, 190 bp, Homo sapiens
atgcatcgttggcaggacccgtgtctgccacagagaggtgatcacaggccttagctcagagcccgtcacatcgaaccctgagttccgctatgttgcagaccttcagggatgcattttgcgattctcgaacaaacttacggcgctttacccatatcctaccgaggacaccgatttggttaaccttatttcg

SEQ ID NO: 553922 - DNA, 485 bp, Homo sapiens
atgcttggggcgactggagtgactgctcccggacctgtggggaggagcatcatattctctgcggagatgtttgactggaaggaattgtgaagggcagaacattcggtacaagacatgcagcaatcatgactgccctccagatgcagaagatttcagagcccagcagtgctcagcctacaatgatgtccagtatcaggggcattactatgaatggcttccacgatataatgatcctgctgccccgtgtgcactcaagtgtcatgcacaaggacaaaacttggtggtggagctggcacctaaggtactggatggaactcgttgcaacacggactccttggacatgtgtatcagtggcatctgtcaggcagtgggctgcgatcggcaactgggaagcaatgccaaggaggacaactgtggagtctgtgccggcgatggctccacctgcaggcttgtacggggacaatcaaagtcacacgtttctcctg

SEQ ID NO: 553923 - DNA, 863 bp, Homo sapiens
gtgaggacgaggagatgaagcgcatgcgtgagagcgtgaagctattcgatagcatctgaaacagcgaaggtggttacaccgacacgtccatcatcctcttcctcaacaggcaaggaccgtggttcccgaggagaagaatgcgtcgaacagcaggtcccctggatcggcagttctggcattaccctgagctacacaggcggagccatcgtagatactagatggagggcagcgcaggcgtgacatccatcagtaaggtttggaggaccatgaagtaaggcgcagagagagcaacctataggaggaatctagcactgctacttcgaccgtcgcgccagctgactgcaatgtaacgtcgcacgttcgggtgttctgacggccgacaccagatgtcgagtcatcgcagaacagacctgagaggactgcggggctcattctgaggggcaggcggagggctggcgggaatgagggcagcgcgtcgactgtggaacgccgcccagaagccgctgaaggaagagtggtggcaagaaggaatcgacgctctcgccggtcgtggtttctcacccggcagcgtttctcatcactcctttcctctcgttctgtgcttcagcttcacccactgatacccgtctagttccattgaccgtgagggggaaggggagtttgccaagatggcgtgccttggttttgaggggaattgtgataaggtgtgagaatgagtgagtgggacggggcatgataagctcacattgtgggcagtatagtcaaagggttaataaaagggacttgtccttgtacattgagaattggggtggagggggagaggagaatgctgaagtctccagaggggaatggggtactggagg

SEQ ID NO: 553924 - DNA, 248 bp, Homo sapiens
atcgtatgaaggctaatcacctgtgttgctgataggaacagtcccttaaccagtctctaactgccagtcttgcctgccccccaagctctcctctacactgccagcagttcttttctttatttgatatttttcagattacaaaactggtacatgcttgttatcaccagtgaaacaatacaagaatatgtaaagaatatgagacttttaaaaatacaattttgataattttactgcttcttagcttaaag

SEQ ID NO: 553925 - DNA, 603 bp, Homo sapiens
  misc_feature (69)..(69): n is a, c, g, or t
  misc_feature (410)..(410): n is a, c, g, or t
  misc_feature (412)..(412): n is a, c, g, or t
  misc_feature (421)..(421): n is a, c, g, or t
  misc_feature (449)..(449): n is a, c, g, or t
  misc_feature (469)..(469): n is a, c, g, or t
  misc_feature (487)..(487): n is a, c, g, or t
  misc_feature (489)..(489): n is a, c, g, or t
  misc_feature (504)..(504): n is a, c, g, or t
  misc_feature (539)..(539): n is a, c, g, or t
  misc_feature (541)..(541): n is a, c, g, or t
  misc_feature (571)..(571): n is a, c, g, or t
  misc_feature (586)..(586): n is a, c, g, or t
cttgactatcaagaacgcatccatgttcacatcattacgacatgcaatacaagcacatgcgcgtcttangtcccaatcccgccagcgccatcaacaacgccaaaccctgttattacaattagtcgtgttccggcaccgtgtaaccgtattcgcataacacaaccgaccgtgttgtttgaaagttgcatatccgcccatgcatgcccattcgtcatcgtgccaagttcaacattacccgcacgcgaggcaagtgcacaataaagtactcaatatccgagtgagtgttaagccataacgcatgtatgtcaaacctcatgtacccatgcacccgttagtgccgcgagtttccttacacccccagcagggcccccccatacgctgcggaccgggctttatctaaccgcaaccgngncgtccacgnttcgcgaacccaggccctcatgaggcgntttgagcaagttttgacctnattaacacacacaatggngngggaggttcaaaagnacttcaaaagaagacttttccgagtcgtgggtcgntnacggttgacgttcctaaagaaggcaggatnaatttagacatgggngtagggttacggggccg

SEQ ID NO: 553926 - DNA, 599 bp, Homo sapiens
gcatcccgtaccagactaccgtacacactcgccactgttcacgagatcacgcgagtggaaccattgaacttttgggttaattcatgaaacaattcagccacaacatcaacatggatcgcacattcctcagggaactgtggtcatgccaaacttcactgcaattctcagcaataaggagaactggaagcatcccgacacatttaacccagagaattttctggatgagaacggacacttcagcaagccggagtctttcattccattttccctgggtccaaggtcctgtctgggtgagacactggcaaagacggagctcttcttgttcatcacgtctctcctacagaggattcatttctcttggccgcctgatgcacagcccatagacatggatggcattatgggtatagtccgctatcctcaaccctttagcatcatttgctgcagtagagacaccaaaaagtgacttgaaacatgatatatagagggaaaccaataacagcacagctgttgagtgcagaagagcactttggctcatctatatcatatataaacaactgttgtcaggtcattctgataataaaggtcccaaggatatgata

SEQ ID NO: 553927 - DNA, 167 bp, Homo sapiens
ttcccgtgtacaaggagacgagaagtaggggaatggcttaggtatttggctgggggtgtttcccaaggacgggcttaaagaagataaagaggtgtcatgacactgatggacttacgaggccaagagaacagacaggaacaaagaggcctctaaagatggctaggtct

SEQ ID NO: 553928 - DNA, 969 bp, Homo sapiens
  misc_feature (33)..(33): n is a, c, g, or t
  misc_feature (248)..(248): n is a, c, g, or t
  misc_feature (291)..(291): n is a, c, g, or t
  misc_feature (299)..(299): n is a, c, g, or t
  misc_feature (331)..(331): n is a, c, g, or t
  misc_feature (379)..(379): n is a, c, g, or t
  misc_feature (408)..(408): n is a, c, g, or t
  misc_feature (415)..(415): n is a, c, g, or t
  misc_feature (429)..(430): n is a, c, g, or t
  misc_feature (448)..(448): n is a, c, g, or t
  misc_feature (471)..(471): n is a, c, g, or t
  misc_feature (489)..(490): n is a, c, g, or t
  misc_feature (494)..(494): n is a, c, g, or t
  misc_feature (497)..(497): n is a, c, g, or t
  misc_feature (500)..(500): n is a, c, g, or t
  misc_feature (607)..(607): n is a, c, g, or t
ccagagacttcacagtttctgctctgcatggtnacatggaccagaaggagagagatgttatcatgagggaattccggtcagggtcaagtcgtgttctgatcactactgacttgttggctcgcgggattgatgtgcaacaagtgtctttggttataaattatgatctacctaccaatcgtgaaaactatattcacagaattggcagagggggtcgatttgggaggaaaggtgtggctataaactttgtnactgaagaagacaagaggattctccgtcacactgacactctcnacaatacnacagtggaggagatgcccatgaatgtggctgnccttatttaatccctgggatgagagttttggatgcagtgctcgctgtngctgaataggcgatcacaacgcgcattgngcccctncctttgggaatatnngaatcttgtcccaaagcncataacggaccagaaatacagantccgatagcaaagcgacnnaagncgnganctcttgtgaggaaagtcattggctttatcctctttagagttagactgttggggtgggtataaaagatggggtctgtaaaatctttctttcttagaaatttatttccnagttctgtagaaatggttgtattagatgttctctatcatttaataatatacttgtggactaaaagatataagtgctgtataaaatcagccaattatgttaaactagcatatctgcctttattgtgtttgtcattagcctgagtagaaaggcctttaaaatttttttagaaagcatttgaatgcattttgtttggtattgtatttattcaataaagtatttaattagtgctaagtgtgaactggaccctgttgctaagccccagcaagcaatcctaggtagggtttaatccccagtaaaattgccatattgcacatgtcttaatgaagtttgaatgttaaataaattgtatattcactttaaa

SEQ ID NO: 553929 - DNA, 341 bp, Homo sapiens
tttttttttccccaggggaacccccggttttttatttaggcccttccactggttgggtggccccccccccgattttcaaagaaacccccctttattaggcttttttggctatagggggtttcccccctcccgaaaactttccccgcccccttttgattcccggtttattgggaactgggggcggtagcccagcccaattttcccataaaacccggcctccccggggtcccgggggggaggggccaaaagggggggaattttcttttccttttggggttttaatggcccggaagaggggccggggaaaaaaaaggggggaacccttcctggttattttttta

SEQ ID NO: 553930 - DNA, 969 bp, Homo sapiens
  misc_feature (33)..(33): n is a, c, g, or t
  misc_feature (248)..(248): n is a, c, g, or t
  misc_feature (291)..(291): n is a, c, g, or t
  misc_feature (299)..(299): n is a, c, g, or t
  misc_feature (355)..(355): n is a, c, g, or t
  misc_feature (361)..(361): n is a, c, g, or t
  misc_feature (384)..(384): n is a, c, g, or t
  misc_feature (392)..(392): n is a, c, g, or t
  misc_feature (397)..(397): n is a, c, g, or t
  misc_feature (406)..(406): n is a, c, g, or t
  misc_feature (424)..(424): n is a, c, g, or t
  misc_feature (427)..(428): n is a, c, g, or t
  misc_feature (443)..(443): n is a, c, g, or t
  misc_feature (450)..(450): n is a, c, g, or t
  misc_feature (464)..(464): n is a, c, g, or t
  misc_feature (470)..(470): n is a, c, g, or t
  misc_feature (482)..(482): n is a, c, g, or t
  misc_feature (512)..(512): n is a, c, g, or t
  misc_feature (514)..(514): n is a, c, g, or t
  misc_feature (518)..(518): n is a, c, g, or t
  misc_feature (550)..(550): n is a, c, g, or t
  misc_feature (552)..(552): n is a, c, g, or t
  misc_feature (554)..(554): n is a, c, g, or t
  misc_feature (556)..(557): n is a, c, g, or t
  misc_feature (559)..(561): n is a, c, g, or t
  misc_feature (563)..(565): n is a, c, g, or t
  misc_feature (570)..(570): n is a, c, g, or t
  misc_feature (577)..(577): n is a, c, g, or t
  misc_feature (593)..(596): n is a, c, g, or t
  misc_feature (607)..(607): n is a, c, g, or t
ccagagacttcacagtttctgctctgcatggtnacatggaccagaaggagagagatgttatcatgagggaattccggtcagggtcaagtcgtgttctgatcactactgacttgttggctcgcgggattgatgtgcaacaagtgtctttggttataaattatgatctacctaccaatcgtgaaaactatattcacagaattggcagagggggtcgatttgggaggaaaggtgtggctataaactttgtnactgaagaagacaagaggattctccgtcacactgacactctcnacaatacnacagtggaggagatgcccccccatgccgcccccccccccccacccctgggctcacnccttcngacgcagcgctcgctgtcgcccnataccccnccacnacccccacncccccccccccccccccnccnncccacccccctcccnacccccncccccccccccccncccccncccccacccccncccccccccccccccccccccccccccccnancccncccccccccccccccccacacccacaccgctngngngnncnnnannnatggnccccccnaacccccccccccccnnnnatttatttccnagttctgtagaaatggttgtattagatgttctctatcatttaataatatacttgtggactaaaagatataagtgctgtataaaatcagccaattatgttaaactagcatatctgcctttattgtgtttgtcattagcctgagtagaaaggcctttaaaatttttttagaaagcatttgaatgcattttgtttggtattgtatttattcaataaagtatttaattagtgctaagtgtgaactggaccctgttgctaagccccagcaagcaatcctaggtagggtttaatccccagtaaaattgccatattgcacatgtcttaatgaagtttgaatgttaaataaattgtatattcactttaaa

SEQ ID NO: 553931 - DNA, 91 bp, Homo sapiens
aacaagaaaaggcccggacgccgtatcagtttgctgtggaacgtgctgcgccgcgcccgcaagcacaacaaactgcgttttctctttgcct

SEQ ID NO: 553932 - DNA, 681 bp, Homo sapiens
cgacgccaccacttgagcccccggctgtttctgaaggcccgacgggaaaagaccacgatcgtgcttgacgagatatgcttgttaaaatggtgcaatcatctaagcggctatcttctctcccaccgagtctacactagaggatcgaggcttgtgatgccttgacagaaataagggccttaatttgaactggctgccccattatgtataatatggtatatagcgactgacaaatattgtattactgtacatagagcgacagcagaccatttttgggctacctggttcgtttttataagattatgctgggtttggtattttgatattggtattaagaggatgggcatcgtttaacagagttataaacataatttgaaccttatttcagactcctcactcatttctttcttttctactcttcctttccctctctacctcctactctctacgcgtcttattccctctcttccaaaatactttttttgctcctgtaccttcttcttttgtctctatcaacttctttcttgtgcgctccttcttactaatgggggcaatctccttacgtgagcgtgtttaaaacattgtgttggggaaactcctgcctctttcactttggcactcatccttttctgttgggcgtattcctctttggccccgcgtcgttctctttctattctccgtcct

SEQ ID NO: 553933 - DNA, 137 bp, Homo sapiens
agagagaagtgccctacccccagtgagccccctgaaggcggctctctctaggaggagttagagaagaaatccaaggctatcattgaggaatatttccatgatcaattgtctggaatcagactgcgagcttgtgaaca

SEQ ID NO: 553934 - DNA, 229 bp, Homo sapiens
tgtgcaaactacttttattaaaaaggaaaggttctttattttgattataaacattaaaccagagctgtgtgaaggcccttaattggggagaggtggggcagggatcctggtagagaccaatgtttgccacccagaccccaagactgctgggagagagggtgtcagcacctactcccaggaatattccgcggtgaggtggcccatcccctgccccggtgaccaggtggat

SEQ ID NO: 553935 - DNA, 1362 bp, Homo sapiens
gcccaccgtttttggtggagattttttcttttggtggtcagtttggggtttgttctggggccgtgtagtgtggacattgatgtacgcatacgttgctggccgttctttctgacctgtcagggggcggctggctctttgattgctggtgtgtgtggtagcggccgcctctcgtcctccgcctcttataaattggttgataccccccgggttgatggggggggattttacggttagctcttgctggtattccattcctcctcgccggggcgactttagtgtgtgtgcgaccccgcttccctccgtccgtggtccccctctttagaggttcatcctcctgggtgtagtttttccgcctcccccacacggggggctggttcccgtcgaagtgttaatgttttgtttgtgctgtgaggctttctcgtcggcatcccaacactgttttctccgcgtggtgacgcgcccacataccttggtggtatttgagttctctggcccgcccagtggtgtgcgtttctttgaggccgcccctttttgggagattcttctcggttgttcctgtgtttgtctgcccccctggttatagtggtggggccccctgagcccctggggccccctgtgttgatatttttcgccgccccatctttctcaggtcttctctctttgggagccctttctggtgtacttgttaccacccggaccaacagttgtacctttaccgctgtggtgagaggtccacatttccccccacatttatagttcgctctatccccaatataggggagactttgtgtatcatctggcccccatctcacatatagaggaggcgctttctcatatccaacctgggattttctccccctgaatttgtctcaggcgttaccactccctgaggacgccacatacacgtgactcgcgccacaaatatctcctagtattctcacgttatctcgataatatctccatctcgtgcgcgtgataatatttgaacatttcttttctgcccaccaggacaacactcttctctctcggcgcctattctccggagaatgcgctcccgagcgcggttatctctctcggagcctatccgcccgaggtgcgagatacacaccgcacccactgtgtaccaatctcctattctattcttgtagtggcgctccattttcaatttggtcttctgacacgcccgtgaataatattaataaatattttcatgcatttgagaacacctttcgctttcgaagcgcaaaagattcctcaattagtagaaagagaacccccctctataacctcgggagtgactataatggaagccccccaccctaccacacatttgaaggacccgtatacattaaatttagacca

SEQ ID NO: 553936 - DNA, 143 bp, Homo sapiens
ttaattcaatcatcaacagactgctccactcgtcctccacagaagcagtaccagtgtatgtacccacctacaaaacaacaatgtatgaagatacccatatatactgttatgttaggtagcccaaacatgtcataatacaacat

SEQ ID NO: 553937 - DNA, 412 bp, Homo sapiens
  misc_feature (12)..(12): n is a, c, g, or t
cttcgacttccnagacactcgttttacatatgctataaaaaagtatgtatcagtaatgtatcaataatcccagcccagtcaaagccccgcccccactgttagctctgtctcatggtaattactggggctggcctctgtaagcctgtgtatgttatcaaaactgtttctctcctgtgagttccattatttctatttcttatgggcaaagcattgtgggtaattggtgctggctaacattgcatggtcggataaaaaagtccagctgtgagtttttccccaaagcagccccccagtggagcctttggctggaagtccatgggcccccctgtttttgtccatggaggactccgagggttccaagtatatttttaagacccactctgtttaaaaaaatatattttatgtatgggta

SEQ ID NO: 553938 - DNA, 391 bp, Homo sapiens
  misc_feature (354)..(354): n is a, c, g, or t
  misc_feature (384)..(385): n is a, c, g, or t
ttcttaaccacaggcactagatacgaatctaaaattaaaacaaaaccaatttattaaacacgcaattttttgagagtttgatcctagctcaggatgaacgctcgctgtgtgcctaatacatgcatgttgaacgggatgtagcaatacattcagtagcgaatgggtgagtaacacgtacctaacctacctttaagactgggataactattggaaacaatagctaataccggatatagttatttatcgcatgatgagtaatagaaaggagcttcacagcttcacttaaaaatgggggtgcggaacattagttagttggtagggtaatggcctaccaagacgatgatgtttagccgngccgagaggctgtacggcctacactagtgnngtaccg

SEQ ID NO: 553939 - DNA, 186 bp, Homo sapiens
gtgccagggcaaggcgggtcacgctgtagaatccctagcactttgggagttttaccacgagaccaggagttcaatgagcagcctgtgggacatagcaagaccttgtttctacaacaaatttaaaaattaggggcgggcatggtggctcacgcctgtaatcccagcactgcacgggcgaggctagga

SEQ ID NO: 553940 - DNA, 358 bp, Homo sapiens
gggaaaggaaattagtatctttagtttcagtcattccttgtaggatatggtttagctgtgcccccacctaaaatatcatcttgaattgtaatccctataatccccacatcaagggagagatcaggtggaggtaattggatcttgggggcggttcccccatgctgttcttgtgatagttctcacgagatctgatgattttataagtttgatagttcctcctgtgttcattctccttcctgccaccttgtgaagatgccttggttcctcttcactgtctgccatgattgtaagtttcctgaggcctccccagccatgtggaacagtgagtcaattaaacctctttcctttataaattaaa

SEQ ID NO: 553941 - DNA, 630 bp, Homo sapiens
ggattactgcgcggttaagctacagggggtttggttacaatgctggttgttcaaggaatatgaggttattgagcagtacccaatgacgattcttaggtctgttagtcgtagcaagacgatgcttgtcatcattatgcgtcataggtatagtacaagatatgggtagacagtgtcattagtcagtgggtagactagatgtctcacacgtataataccatagctgtcgagtttacagagtactgcgtctagctctcttgaccatgcgattctggctacgacatgggctctaggtagacataagttatgtccgtatggaggtatcttttctataaaagctattgtgatagctagtcatctttggttgatggcgcaggagcttgatagttgtgtggctttatgagtgaatagtagaatgtttagtatagcatagggtggtgcaagtgtagattagccagataagtaggggaagggagctatgtagcgtgtagaataataagtatgtgcctgcgatcatgtgttgtggctgttagcctcatcgggtgataatagtcaagttgggaatcagtgtggcttcgagtaagatatctcatctccttattctgtgagtgtgtatgttatcctgcatcaatg

SEQ ID NO: 553942 - DNA, 760 bp, Homo sapiens
  misc_feature (737)..(737): n is a, c, g, or t
ccggtgtagctctgggactgagccacggccgccgtggcgccccgtccgcgacctagctcaagagcagccagctggagcctggctaggcgagggacacgacacaggggatcgactggccccgtgggaacacggtgccggtgacaccaaagacccgttcctgaactagagtggcaacctcgagagggaaatgggacgactcgaggcgtcgggagcctgtgtatgggtctcgattcccagtacgctgtaggtagccgtggagttctcgatgcccctggccaaactgctttcgtgtccctactggaccagacgggtccaggctcgggaacaccttgcccgaaagacggcggatcgggtcgggaaaccttgcctgaaagacggcgcgcacagccagtctatgcatagctcagccgccatgctgacttccttacttgagcagcacggaagggagcaggaaccggcaagcgtgcaacttagccgaggagctacccgtctggagtcgcaggccatggggctgtgtcccacagcagtctacggcctctcttgctcctggacacacgaggaggactcccactaggatccgagcgtctgtgaactcacttgaactttggaaggttggcaccttgcggggccgcatcccctgggaaatgaccgtaagcggggtttcagtgggtcccgcgtgggtctaaggacccagtttcttctgtgagcaacgggcagtgggaggccggtggaaaagnttaccggcccggctacgacgtat

SEQ ID NO: 553943 - DNA, 355 bp, Homo sapiens
cgttattctctgcattaagctttgtaatggtgtaagtcagtgtctcctccagctctggcctgttggtgggtatatctctgggccagcccacgcaattcttggtaggtggttgtacaaactccttccctgtataaatgtcacagttctgtgagaaggaacgcaattggtagctgaatatcaatgtatgcattatctgtccattcaccggtatcaccattccaaagggacttccagtctgaagttaagacacagaaaattctctttggacacaattcgtttgcacaattacttcattaagcatgaagagggaggtatgttgagtggtggtgttagagttctgaatgccgtgtctcag

SEQ ID NO: 553944 - DNA, 1095 bp, Homo sapiens
ggcaactagattttgctacgcgcaagggtacaggatgaaaagattatagccaagcataatatagcaacggactaaccccgtatacctttctgcataatgaattaactatgaaataactttgcaaggagagccagaggctaagacccccgaaaccagacgatgctacctaagaacagctaaaatgagcacacccgtctatgtagcaaaatagtgcggaacgatttataggtagaggcgacaaacctaccgagcctggtgactagcatggttgtccaacgatagaatcttagttcaaacttctaaattatgcccaccagaacacctctagaatcccacttggtaacagtttacactgtatagtccaaagaggaacagactctaatggacactagcgacaaaaaccttgtagcagcagagtacaaaaacttataacaacaccattagctaggcctaagaagcagccaccaaattaagaacagcgttcaagctcaagacccactaccgtaaaagaatcccaaacatataactgaactcctcacaaccaattggaccaatcatatcagcctatagaagaactaatggtaagtataagtaacatgaaaacattctcctccggaataagcctgcgtccagattaaaacactgaactgacaataaacagcccaaatatctacaatcaaacaacaagtcataattagcctcactgtcaaagcccaacacagggcatgctcataaaggcaaacgttcagcaacaggacacgaaacaacctggagagaaacaaatgccgagaggcagacaaacacaaaactcgacatggccacacggacaaaaacacaaacccaggagacacagaccacgacaccacaacggacaaaacacaccagaacaccacaacagagaagcccagtaaaaaatataaaaaaaaacaagataaactgaataaaaaccaagctcaaacaaataacacaaaactaaacaacataaactatccatacaacaaataaaaatcaaacaacacataaaacaacaaaacaatacaacacaaaacacaacaaaacactaaacaaacaaaaaaaaacaaccaaaacaataac

SEQ ID NO: 553945 - DNA, 300 bp, Homo sapiens
gtggggttcacggtagtttggtacagcagccccttcaacactagtgggggttccctggggcgggtggttagcgtacagtagtcctctcaacattctgtgggttccctgtcggggcagacagttcggttacatctgcccctcaacatcagtgttccagtgcagatgatagcacagcatgcatcgcgcaggaggaaacagggaccctcgcgtgcacacgcactgctgttttaagggctcctggagaccgggtgacgttgaatcacctgcagtcacacagtcaggtaaacccccccgcactgc

SEQ ID NO: 553946 - DNA, 825 bp, Homo sapiens
ggcctactaaagcctcagtaatggcagatgcccctccccccaccaagctcaattgtcccaggttgacttcagactggtgtgctggcagtgagaatttcaagccagtggttcttagctttctgggctccgtgggagtgggacccacttagcaagacacacttgactccctggcttcagcctcctttccaggggagtgaacagttctgtctcactggggttccaggcgccactggggtatgaaaaaactgtagctagctcagtgcctgcccaaacagcctcctggtttgtgcttgaaacccagggccctggtggtgtaggctcacgaaggactctcctgatctccggcttgcaaataccgtgggaaaagcatagtatccaggctgggtagcacagtccctcacggcttcccttggctaggggagggaggtcccccagctccttgcacttccgtggtgaagcaatgccccacccttctgcttgctctccatgggttgcacccactgtctaaccagtcccaatggaatgaactgggtaccttagttggaaatgaagaaatcacctgcttctgcattggtctcgctgggagctgagactggagctgtttctattcgggcatcttggcccttctcgaaaagtgtgtaagaactccatagtcaaaagccagtttcattaaaaacagattcacgcagggatggtggtgatgtttgtaatccagccattggggaggccacagtgggaggtttggttgaggtcggctggtcaatgtatgagtcctgttttagaaagtaaggaatttttgggtgggggtgggcgtgccaatttaga

SEQ ID NO: 553947 - DNA, 195 bp, Homo sapiens
gtatatgagcagatgtctgtaagtcgattgtcataggtgaaacctgggtgaaattcaaagattttaggggaatataattctagtgacgatgggcatgaaactgtggttttgctccacagatttcagagcattgacctgtagtataccccctggtcgtgtagctggtgaaatgtggtttgggttctagacagtcct

SEQ ID NO: 553948 - DNA, 419 bp, Homo sapiens
aacaagaactccaaataccaataacaatttctctctactttaagacatgctaccttacaaggaaaatctgtactggagcaaggctaagtggactagtccctaaaacatgcaatcaacatttgcttgaaattccagctggcatcctgtatctagcaaactatcttactttccacatacttatttataccttgtagagacagcttaacactcaatggctagtgccatgtgtattgacaattgattgtgtactgcccaatggcacacctgactttagagcattgagattatatatgtacatgtgtgtctctgctgtacatgattaggatcatgtgacactgatcagttccacagggtcattaggcaggagtcccaaacttgctctttatttcataggatgacatcaatcatagtttgaggag

SEQ ID NO: 553949 - DNA, 158 bp, Homo sapiens
tccttcattgaatatacctactcaactcggccactggccataaaaaactaagtattcaattaagtgggaataccctggagagatggtcagctatgaagtactagagttcgcttaatcataagtaattcaaacatgctattgaaacttctaaaactagg

SEQ ID NO: 553950 - DNA, 1102 bp, Homo sapiens
cgctgtcggttcgcctcccttccctcttttcctctgcttcggctcgttgtggtctgtctgtctgcctgtcctgtgcgtgtgtctctggtgcgtcgctgccgtggcgcttgttgtttctttgccctcgtgtcccctgctacgcagttttgttctcgtgtgttctccccttatgtccgtcgattctgtgctagggcctggctttttccctgttgttctctgtccctcttgtttgggctgtcgtcttactttaggcctctgcgcttgcgtctgtcggtccgttcgttgctcttctgttgcgtggttgtccgcattgcgttctgcttatcctctcgttctgtcattcaccttactcctctgtgttgtcactgttccttgtcctctgttcttttgtccctggggatgtgcgggccttgtactgtccctgtttggtttctttcgttttttcatcttgtgttagtattacccacttcggcttgttatgtcctcgtgtatagttgttgatcattggcatcctttctggcctttttccttggtccctgtcctggttgtgtgttctatgtgggttacgttttggactttttgctgatagtaatttgctcgctagtctgggttctggtaggtcttttcttttgtcatactatatttgctttttttttttgtaatgaaggctcatttacttgaaatgtttcactttctactgatatacaatatagtatacagtgatgtgttttatatcatattgctgggttgtccatctgttgtggtttagtgttatgttactcacttcatgtttttcacctataaaattgtcatagctatgcaatatataactcttgtttttttaattgggtagagatagagacctgcctagattatctagacctcttcatgttaaaagaccatctcctgtaaaactgacctagtggacaagctgaatttgaaatagactgtgaagtaagctgtaacttgtcattttaattttgtttacacggttactgacttagatgatgtattaaataccaagataaagaaaaatgctacctaaatctaaattagaattcatcatggataacaagtcaaggtatactcggggtcgtaatca

SEQ ID NO: 553951 - DNA, 326 bp, Homo sapiens
tatagggggagctaataaggtggaatcattatgtatcgagggagtcgtggaataataggtggacatcagacttaactgggtagtgagtagatgatgaggtaatttgtaaaagggtaaccagcgatctcagcgtcaccataacttccggcgtctcgggctcaagagattctcccacctcaacctcccgagtagccgggactacaggcgttcaccaccacaccaggctaatttttgcatttttagtagaaacggggtttcgccatgttagccaggctggtctccaactcctaacctcaagtgatccgcccgcctcggcctcccaaagt

SEQ ID NO: 553952 - DNA, 478 bp, Homo sapiens
gcactatgagcatatactgttagaagcagccaggtcacttcttgaatgctttgctgctttgaaatttcttccaccagatactctaaataatctctctcaagttcaaagtttcacagatccctagagcaggggcacaatgccaccagtctctttgctgaagcatagcaagaatgacctttactccagttcccaataagttcctcatctccctctaagacctccttggcctggacttcattgtccatatctcactatcagtattttggtcaaagccattcaacaagtctctaggaagttccaaactttcccttatcttcttgtcttcttctgagccttccaaactgttccaacctctgcccatccaaagctgcttccacattttcaggtatcttttgtagcaatgccccacttctctggataccaatttcctatattagtccattctcacactggctataaagaactatctgagactggg

SEQ ID NO: 553953 - DNA, 1686 bp, Homo sapiens
aattcaggcagtactcagcaaggtacaactattcttcagtatgcacagacctctgatgcatatgaagaatagttgtacctggcagagaagacacggcgaactggcgcgaggcacgacaactctccggtgggactttaacaccactcacaggccaaccttacgacaggaatggaccccccaaactggacaacgcagacaatacaggggtcaaatggcacaaacaccagcagacagcttgcctcgcacgaaattgctcgcacggcaaacgcacgcaccgcgccctatcgtcgacaaatggcctgggaaaacccggagttggccagctcctgggcaacaacatccacaaataacagacttcgtacgtagcaaacgcacgtttcacacaacaacctctgggacacgcgactcctcttattcccaaattaaacacacgctggcttcgcatttcctcgcacggacacacgccacatcatacttctactcgggctgggcgaaaccaatgtggccaattaaaaacatcacgttcatacacgatggggcaatttctcaccttatcaagctggggacgagcttttataaataatcaccgttcaacagaacgggcgctcacaacacaggccaaaacgcccactactcacacagttcacaaggcgcagcttatcgcaccaaaaaaacatcaccgagcgccccacaacacgactacgccttatgagcccagcacagcacagtacaatatctcaccaatcggccagcctcaagccggctgggcacaaaccaggcgcgggagcacctcaaagcgcaccgcccaacaccgagacgagcagaccaacgaactgcgggctcacaccctagcgggacgccacacccgacggggcgagaaacgatccagaccactaacatgaccccacaggagcacgcagaaaaaagggatccgatcgcacgcaaccgcacgatagaaccaaaggtgtcgagcaacaccagccagaacatagacgatgcgcgacacaactaaaaggacgggaaagaacacacaagaacacactaacagagagcacgatagtcagtatacactaacacgtcacagccaacacaacatcgagcgattgatagacgagcgcaagtcacatccataaacggacacacgtaactactcgtatcgccaggtcggtgcaatctcgtcagccacaccaccattcctgaatcagacagaagaaaatacagacaatagaccacacatcaaccactagcgtggcattgttgagcactcaacaccaacaaacaagcggtggacagacgagacatacaggcacacgaggccagcaaccgagctccgcgactacaacgtacgctcctcagcttacgcatgacatgccatgctcatcacgctgatcacgcacaacacaagatcagcacaacagagaacatcgacgcactaccgatggtgcagagacagaacgcaaccatacacgcagacagacgacgagcgaacaggcgaagatcgcacacatcgcatcacgtaaaaacagcaagctcgacaaaccagatgcagacagcaagcagagtcaacaacgtacaaccgaacatagaaactcccactacgacaacgcaacgacaaagcaggcgacagaccgcacgcagcaggcaagagacaacgagcaggactagacacaaaccaagacgatgttg

SEQ ID NO: 553954 - DNA, 151 bp, Homo sapiens
  misc_feature (36)..(36): n is a, c, g, or t
  misc_feature (71)..(71): n is a, c, g, or t
  misc_feature (112)..(112): n is a, c, g, or t
  misc_feature (120)..(120): n is a, c, g, or t
cccctcttaggacaggcactgcccagcagcaagggncaagaagggacttgcctaaagccacccagcaactnagcagcagaaccaagatgggccccaggctcctccatatgtnccagtggnttaccaccctatcacacgtggccttgtctag

SEQ ID NO: 553955 - DNA, 147 bp, Homo sapiens
gtgcgatcgaatcgagccggtacccagagcaacagaaaaccacggctggcaccttcaatggtcttacaggcggcttcagatagcaggttgccataagaatatacattccaccacatgagggggatgtttttcaagcataaaaatgct

SEQ ID NO: 553956 - DNA, 225 bp, Homo sapiens
gctggagtgtagtggcacaatcccggctcgctgcaacctccgcctcacatgctcaagtgcccgcacctcagcctctcaagtagctgggactgcagcacatgccaccacaccagcctggccaacatggtgaaaccctgtctctgctaagaatagaaaaatttgctgggcgtggtggcgggtgcctgtggttccagctacttgggaggatgaggtaggagaattgcc

SEQ ID NO: 553957 - DNA, 341 bp, Homo sapiens
ttctatgtctaggctcttatcaatagccgtcatatctctcatttcactacattcattgcacttcagctatgtagttctctggtctgtcattccctactattgctataaacgtgttcttaattatgcttggcatcttggattgtcacacataatcttattttctaattgttttatactaaacctgtaactgctgaaaactcctatctcatgcttcctctcttccatgggccatacaccacatccttctccttcctttatcatctgtccctatcagatcttcagtcacattagtcaactacgctttaaatgtacgcaattctccctgacaggagaacgcggcc

SEQ ID NO: 553958 - DNA, 345 bp, Homo sapiens
tcagaatccacctctcggagtatccacatttgcatactgagtactgcacattaaatctgcatccacatcgtgttacatccgaacaactaacactatgctgtggggaggagaagggcagacaaaggaaggcttcacatccaaaatgtcaagccctgctgaaagaatgatagaaggcactctgtggaagagcagaaaccaacttctgggcttaaaatggagttctaccaccgcctgctggaccaaacgagcaatacagaagaggctaaaaatgcttagaactgaatatcttggggatattttaacttgtcttgtcatttattatattatattaaaaaaccaatttca

SEQ ID NO: 553959 - DNA, 110 bp, Homo sapiens
agacgtgttgcatggctcaaattatagacctgccctgtgtactggaaagcttgaaaaccattgataaaaaaactttttacacagacagctgatatctgtcagatgcttgt

SEQ ID NO: 553960 - DNA, 706 bp, Homo sapiens
  misc_feature (472)..(472): n is a, c, g, or t
  misc_feature (530)..(530): n is a, c, g, or t
  misc_feature (556)..(556): n is a, c, g, or t
  misc_feature (603)..(603): n is a, c, g, or t
  misc_feature (612)..(612): n is a, c, g, or t
ctaaattctaacctcaagaatcttactctagagctgttggtttcctcagatcagctcatctcagtgcacaatcttatggactaggatgtaaaaacacaacatgcaactctgtcactcctgccttctactgctgtcatactctgctgcttagcgcttgtcaccctctgaaatatgcacctgtttactttgttgtctgtcttgcctcctagaatgcaagcacttatgagaccatggactttgcctgcctccttcatcactatatccccagtgtctagaacagagcatggcacagttagagcgtgaaaggaagaggcgacgtggagtcagaccccacattgactccttctccctcacttaccagcagcctagctggacaggtacctaaacatctccaagcctcaatctcctcataattaaaatccaaagaatgggccaggcacagtggctcaggcctgtaatcccagcactttgngaggccgaggcgggcaggtcacctgaggtcaggagctcgagaccaacctagccaacanagcaaaatgcctgctctactatacanaaattagctgggcatggtggcatgtgcccttagtcccagctacttgngaagcttangcagtagaaatgcttgacccaggaagcaaaggttgcaatgagctgagattgtgccacactgacattagcttggccggagcagactcaccacacc

SEQ ID NO: 553961 - DNA, 1514 bp, Homo sapiens
  misc_feature (198)..(198): n is a, c, g, or t
tcccttcaggggctattaattccccggtcaaaaaaaaaccaggaacaggctccctctgctctgagcctggcaaacacaacacaaaaaccgggaatggggcgggggaggcacaggaaacggcttcctcagcaagtgtgtgtgtgcacttgtggctccctgttggttgtggtccccgatggcagtggagtctacagtggnacagtgcgcgtgacgcgggggtgtggtgtggcacgtgaaagccgtggggaaacaggcgccaggccagtgtggcccagggaacggaacgaacaggaggcaaataaaatacggagtggccaggcggggcctccgtggcgtgggcccagggtgggggtggggagaggcgtgcaccactcgaagggcctcagggggggagtggtgggcctcgtgggcacacgtgcccggtgatgaaacagaaaagaggcagaaggcaaggaacaaacacaccacagccctcccgtggaagtggaacacgtggaggtgtacacatgcggagctagtggagcaacattggcgtatataccccacaagccgcgcggaaaacacttctatcacaccgagcccagtggctcacaggggaaaacgagggagacagggctgtgagccacgcgccaccggagtgtggatgcatggggagaagccacacaaagacaagcaacaaccccacagaggtgatccctgtgaggcccacagggggatcacgacccaccgaggaaaaagcgacacgagtgagaggccccactagtgctccatggcaaagaacaacgaggcgggagtaagaaagcgctacagtggaaagcgccccccagagcgtaacacattacaacaccagcgtacagcggcgacattcctagggtgtcaacagaacggggacacccagaacaggcgaccaagaggaggggttcgacactagagagcacgcaacaaggcggggcttagaaaagagaaagcggccccggagccaccacaaagaaggcacagtagaaattcacccacacaaccccacaggatcacaacctcaggaacgacaggcaaaaagacgcaaacagtaccccagaggggcaacacccaagagtgcacctggaacaaaatcggaaagaaccacgtgacacctctcctggaaagaccagagccaccgggagtacacacgggagaaacaacaaccacgggtgtggggcaccaaaaaagtggggacgaaaaagccgagggggcggaggctattcaccaacaaacaacgacgatgaaaacaacacaaacaccgagaaccaggagtacaaggaccaaaagagtaagaagaagaaggagagaggagaaagagccacacggcgagcagaatgacgacaagtagatagagcagaggagagataaaacaatagagagagaaagaaaggaaacacaagaaaggagagaaacaaaacacaagacagatgcacaacgatgcaacacagaagcgacaacagcaacagcagcgacacagaacagaaccaagagcacaa

SEQ ID NO: 553962 - DNA, 398 bp, Homo sapiens
tgctgggattataggtgtgagccaccatgcctggcggacccatttatttttagacatggaaaaacaaaggcccagggaggtgctgtgtagcttcatgtgacttacccttagtcagcagctggttcatggtacagccaatattaagtctaagttgtcagtctttcaatcagtccaggcttctttgcaatgaattttaccaccttactttcattataaagatgagagtctcaagctaatgattgcgttcatgtgaaagtctcatactcagacagaaccaagtatatggatttttttttccaagtttcacagctaatttgacaaattcctaggggcagcagttaagcagttctcatctattttggggtgcctaagatccagggcttgtggatcactttttt

SEQ ID NO: 553963 - DNA, 874 bp, Homo sapiens
tgcgaagctgtgccatcgagaggcacctgcgtccactatgcgctccgccacattgctgctgactgcctgtacacctgccacactgcatctgactgccctgctgagtgttgctggttgtgactgggcccgcaccctgtgtgtggtgctgcttacttcacgcacctgcacagtcctgaccagtggcccctgagtggaccctcgcaaccgctgtcggtcttcctgtgtggcctgctggttctaccgcggtgacgacggacggttggcgggtagacctgccttgggcccttcgcctgccgcgactacccgcttgactgcggtagacccacgacaccgcacacaatcgacaccgggatgctacgcgaactggtggctgagcaaaatgacccaatgtaaagccactccatcttgtccgggtgcgcacaatttccctgtagctgtcaccatttggaaacctggaaacccccagcacttgcacagtgggcaaggtggcaagtgctccgtgcccgttgtgcgcacggtcccggtcagtggcaaccccttctatcggcaacccacggtgcctatttcacaaccttttggactgacagcgacccccaaccactattagaccccaagatacttattccagatgaccccagtgcagcttattaccacagcccccaatttggtacttggagtgcggcggacatcaatagggtcgacgtcacaccgccgaacagttgcaccccattgggactaccacctggcgcgacactctggccacacgacacacacgcttgcctcggactatgttgagtgtgccccatttctaataacgcctttagtagcagtcccctccaacatgtccccattatagtgagacagtggttcagag

SEQ ID NO: 553964 - DNA, 472 bp, Homo sapiens
cgcggtggctcacgcctgtaatcccagctctcagggaggctaagaggcgggaggatagcttgagcccaggagttcgagacctgcctgggcaatatagcgagaccccgttctcctgaaaaaaaaaaaaaaaaaaaaaaaaaaaaacatttgtgtgcggcgcgcggcttgggccttggaaaaagttttttaaacaccaatgggttggggggcgggggcccaagtaggcgtaagggagacctggggcacaaagcgcgggttccctaaggagagaacccggggaaaagagaaaaggggcggggagattctcttcaccattataaaaacgcgcccgggggggaacccggagggtgttttggaaaaaattcacaagaggggaggttcgaggagggaacattaaggggagatttattaaaaggggaggccaaaggggaggtaggaatttaaaattaagccccgggttgggggggggagc

SEQ ID NO: 553965 - DNA, 1455 bp, Homo sapiens
gcttcttttgcgtcgccagccgagccacatcgctcagacaccatggagaaggtgaaggtcggagtcaacggattggtcgtattgggcgcctggtcaccagcggctgacattttaactctggtaaagtggatattgttgccatcaatgaccccttcattgacctcaactacatggttatacatgttaccaatatgattccacccataggacaaataccatggaaccgtacaaaggctagagaacgggaagcttgttcatcaatggaaatcccataacaacatcttccaggagcgagatccctccaaaatcaagtggggcgacagatggccgctgagtacagtcgtggagtccactgaagtcttcaaacacccatggaagaaggcatggggctcactatgcaggggggagccaacaaagggtaccatcatcctctgcaccactactgctgatgaccccatgtacgtccatggagtgatgaacccatcgagcaagaaatgacacacagggctcacaagatacaatacaagcacaaggcctacctgcaacaaacaaaagtggcatataagcacccctaggaccacagagaacatagcatgaacaacaaggaggtatacggagagaaaggactcatagagccacagggccaaggccatacactagacagccaagaaagaaatgaagggcatagggcccaacacggagacaactgtaggaagatgaatgagacagagagaggaaacatcacagaaaacactacagccacctggagaagcatacaaggagaagactagcgcaagagacaaaacggggagcaaagagacgagacccattgaaggcatgtgaaacgagcacacagaccaacatggacaaatggaccataaccagaggatcacaacacgatgacacaaagagtgaatacggagtggagtggaaagcccgaaaccccaggcgcgaacacaagaaacaacacaccggagcaaaaacatggaatgcaccacacaacaagaggaggagcaacacagagcaatagaaagagacccacaccaaagagaacatacacagagaaaaaacaagagacacacaggaggacaccccacgataagcatcaaaaaaagaaacaaacaagaaggaacagacatacgaaggctggagagggagaccatgagacagtacacggaaaaacagataggacagacacacaaacagacacgcaaggaacacacaatgtgagggacaagaacaagagagagaagaccaaaagcaccaagcagcatcaacaggcaataagcaccagggaacaccacgcaaaaaaaaacacaaaaggcaaacaacaaaccacacgcagaggagacagagcacagagaaaccagagaacacaaaacaccaccagaaagaacgtgaacaacagaaaagaaggagccagacaacgaaaacacaaaaaaagtagaacaacaa

SEQ ID NO: 553966 - DNA, 778 bp, Homo sapiens
ggcttcccgggtggtaagatggtggcgcgcatgaggaagtgcgccgcgcgggacccggtaggacacgttgatcccatgcccattgggcctagccgcagactgttccaatcaatgttctctgtaaaagctaacaggcttctctacgtacctctatggtgttagagcagctacgaggttcgacaaggcaccaattccagctgggctcagcaagaggactctttttgtcctcgaatgtgcccccataactgcacagaggagacgcctgtcccgtctcctgtccgacctgtggcctcggtccagtcatgtaggagtttgcagagagatagtcggtgatccttggttgagcatgccctacagagcgagtacagatggttcgcagaagatttcttcgatccgcataagccagtattccaggcgatttccagggatagaccatagttgtggttgttccctaggatagtcgcgaagggtggggggtgctcgaagccaggctccgttgggcccctgcaatggtgccgcccccgttggctggtgtccaacagtaggagccaccctccgtgttgcaatgtagtggcattcactaagtggatcagtgactacgcaagaactctgttgtcgccgaccctgaggacctgagggtggaagtggacacgttcatggaggcatttgaccagaagatcgctgaggaagaagctaaggccaaggaggaggaggggggtcccttgacgagggagggctgggtgaaggtgacccgccggggcgggcggcctgtgttccc

SEQ ID NO: 553967 - DNA, 132 bp, Homo sapiens
ccgatggagcgatgaaccagtgcgagcccatggtagcgatgcaataatgagactggtcgcagaacaaatgctgaatctaaagaagaggacaactttgagacaaattatactagcttcttatataatttgagg

SEQ ID NO: 553968 - DNA, 467 bp, Homo sapiens
ggctgtacgaattctgcacgcggagagagagagagagagttagagagagagagagagagagagagagagagagagatatagagagagtgagagatagacccatatagatagtgttagatgttgatcgatagaccactttcttttctttttagacggtcgttttcttctgtcgtgagccttgtttgttccttttcccttttttctgtgtttctccctatttttctttcttttaattattttcttttacctttttccttacttctctttatttccttgtcccctttttttccttattttttttctttcccagcccctttctttgtttttctttttttttttcacttttttctgttttcttatgtccttttttttgccctccacttctctggccccttctttttttcttttttttccctcctttttttttttctcccctcttttttggcctttttttccttcctctcttt

SEQ ID NO: 553969 - DNA, 129 bp, Homo sapiens
agattccagcgcagatatgcaactgtgagcgagaagttgagccaataatgatctgaattgcgagaaacccttgtggctacaaaaaatgttgagccgtagatgccgtcggaaatggtcttatctgcgcat

SEQ ID NO: 553970 - DNA, 841 bp, Homo sapiens
  misc_feature (251)..(251): n is a, c, g, or t
ggggcggaggctgggccgtgaggggtggggaccggcgaggaggtggaggcggcgctccgctccgtccagctcggtttcatgtcccgccaggcgaaggatgacttcctgcggcactacacagtgtcggaccccaggactcaccccaagggctacaccgagtacaaagtaaccgcgcagttcatctcaaatgaaatggacccaagaggatgtcaaaggagggtggtggtctggaaggctggtacagcggagcnttccggcaaggcttgcaattggaagaccttggcctacaacccaccggaaagcctcattccggccggcctcggagggaggttcccttgctttcccccgtgggccccagggtgttttggccggtttgaaaggccctcaggttgaatcggagggaagccgggcgaaagggggggcagaaggtgacctgctttcgctttcactgtgccacatacctgctgctcaacaaccagcccccagctcaaggagttcttccggggtggggagggtgaccctgacccttggaggtgtccagggacctacacatctttgccaaccgcgtcattagatcccgaaccggaaagattaaatagaggtacggggaaatcgccagaggggggcggcagtagggaagtaggaatgtggctagagggaattgtgtgagttgggagggggaccgcgcgaacaaataaaagacgagcatgatgaaggccgtggaatatcattcgtttaagtggtgagagagaaggagagggagtggggttccacgttaagaggggcataacggaggatgagttaacagttgtagacagaatattcaatgaataagtgaggc

SEQ ID NO: 553971 - DNA, 439 bp, Homo sapiens
acgctatgacattgtgggatcacagctttatcagacactacctctaatccttataagatatataactatctggtatattgcttcatatcctcttatctttggcttttatacgaaggactttgactttcctttttatctcggaccactaggcgggtgccaccacaccaagctaatcttttaagttcttgttgatgcccagtatccttctgttgtgctggctggaacacccctcctgggctaaaagtgattctcccacctgggcctctcaaagaactaggattacagacgtaagccactgcactcagcactttttattacaaaaaagagtgtcttgcactgtcacccaggctagagcacagtggcaggattttggctcacgccagcatagtaattcctaacctcaagcaatcctcccatctcagctttccaaaatgctgac

SEQ ID NO: 553972 - DNA, 730 bp, Homo sapiens
ctagtactacagtcgcgagtgttggtcgctgttgtgttgactactgtgcattatatagaacagctggtcccagattcgctgccggagtgctggactggaggcgtttcgtcttgcgcgtctgtgacatttccaagtttcacgataatgccgtcgacatctctgtcccccacgggacccccgtgagagcgccccgagtgatcccgtagaggaagacagcttgaacctaggaatcatcactccgccatggattgttgacgagaaggcgtggctttggaggcggccgttggacactgcgttgggcccttgatatgatgaggactacaccagacttgtgctgtcgatgaatgttaccctgtcacttggtgtggggctatcctgaaaagtcttcatgtgacccataatttgttggcctgaggaatcaagggggagccagaacaattttgagcgtaattcttcaacaccgtccgatgcattgtcgtaccagataaagcctcaatgtccacatttggccttgtgggtgcccaccaaagggagagttcccttcacatgcattcccttcaactgggtctttgcacacataacattggtcccaaggacaaatgaatcatccactcctcatataagatgggtggtcccatgatggttcggggtaggtcacatatataagcacccaaggatggcgcattccacattgggcaagaagaattttgtttggcgctgtgaacttcct

SEQ ID NO: 553973 - DNA, 619 bp, Homo sapiens
  misc_feature (8)..(8): n is a, c, g, or t
  misc_feature (73)..(75): n is a, c, g, or t
  misc_feature (82)..(82): n is a, c, g, or t
  misc_feature (97)..(97): n is a, c, g, or t
  misc_feature (103)..(103): n is a, c, g, or t
  misc_feature (105)..(106): n is a, c, g, or t
  misc_feature (113)..(113): n is a, c, g, or t
  misc_feature (166)..(166): n is a, c, g, or t
  misc_feature (168)..(168): n is a, c, g, or t
  misc_feature (178)..(178): n is a, c, g, or t
  misc_feature (188)..(188): n is a, c, g, or t
  misc_feature (198)..(198): n is a, c, g, or t
  misc_feature (208)..(208): n is a, c, g, or t
  misc_feature (218)..(218): n is a, c, g, or t
  misc_feature (221)..(221): n is a, c, g, or t
  misc_feature (229)..(229): n is a, c, g, or t
  misc_feature (231)..(231): n is a, c, g, or t
  misc_feature (239)..(239): n is a, c, g, or t
  misc_feature (241)..(241): n is a, c, g, or t
  misc_feature (257)..(257): n is a, c, g, or t
  misc_feature (267)..(268): n is a, c, g, or t
  misc_feature (282)..(282): n is a, c, g, or t
  misc_feature (292)..(292): n is a, c, g, or t
  misc_feature (582)..(582): n is a, c, g, or t
ggtatttntcttcagcctctccctcagagtccctgggagtgtttctgttattgtggagggaataggggatctnnngacacgntgggacgtaccatgncgacangnngtctcanaacacacacacacacacacacacgtgcacacacacatccccccacaactacanangccaaaatanccagcatggngttgtaacanccccccagtnggggctaganttncccatggngncctgtgancngctccctgggagaggngggggcaggnnggtcacggtggggncgcagcagancattatttctccatcttgctgttttctagccttgagttggggacatgagtgagaactgggggttttgaggagtaacccttgtgaacacatgtactccagcagccaggcatcccagatctcctgtcctggagggtgctggggcccctggctccccagagtgtgcaggcagacccccagagccctagctcatccatttatccattcctcataatccagtgtccaaagagcacccccagcagggtagggaaggtccctcccggggtttacatgactgattccttctcagaggngaccgtggcatcccctgggggcccccgatagtgtttg

SEQ ID NO: 553974 - DNA, 290 bp, Homo sapiens
tagatgctccccgaacgggtgatgcggttggggtggccaggaacataaactatgtataggggccgggggcttctgcccagggctccccgcggccattacgccagggctgtcaggcagcctaactgggacggcagccagccattctcagagatgaatgcgtcaataacctccttcatagccaagttggggatgagctgttcctgggtcagggggctccgggtcacggggtcaaaatgacccacacgctgcaggtgctcctcgatgtccttgcggtcgtaggtgatgccact

SEQ ID NO: 553975 - DNA, 379 bp, Homo sapiens
ttgtctaggtgcacacaaaacaatacatacagaaagactacactgcagccatgtttagagtggcccgagacaggatcaaatgtcagctaccaggggcaggtttaacgctggcatatccttacagcaatgagctctttgcagcccttcacaaggaggaagcaaagtttatgtactgataagttctgatcttccttttttggagacagtctcactctgttgcccaggcgggagtgcaggggcgtgatctctactcactataacctccacctccggggttcaagcgattcgtccggtgtcagccttccgagtaggtgggactacaggcacatgccaccagggcctggctaatttttgtatttttagtagacaaagggaaaca

SEQ ID NO: 553976 - DNA, 308 bp, Homo sapiens
cttatctgttaaaacgtaagatgaattggtatttgcatcataggcagtttgactgcatatattagagaatgaaaagagaatatatgtagtaatacctggaaactaggagctttaaattaaggtaataatctgctaatgtagaatggaattcacacagtggatagctatgggtgaatcagaatattatgtttagaatcccattagataagtatataaatattgtggggaattatgaaattaatatgtactacctgcaattgtgctgtgtgaaaaataaaaacaaggatacgtttaaataattcaactta

SEQ ID NO: 553977 - DNA, 451 bp, Homo sapiens
cacagggaatatatagatttataagtagacacgtggcctatactgagactacactcgtaggtcacacactaaagacagacataacatgattcgcaataggagtaaacttgcatatagacattcctgtcctcaaatgatttaaacaccaaatttttctccgaacctcatagaaacctccagagaacaacttgtattagttactgtttatatctcatcattttagaggctccaaccactagaaaagtctcagggtattgtaaaaactatgacaccttcaagtggtctctggaagcttgtttagcaaattgattgtctcactttgatcaggctactgtcagttttaaaatacaggaaatcacccaatgggtcacaggctgagctgatgtctgcctgacctatggcttcagtctcctaactgacaaaatctatacagagccagatctcataaaag

SEQ ID NO: 553978 - DNA, 333 bp, Homo sapiens
  misc_feature (122)..(122): n is a, c, g, or t
  misc_feature (156)..(156): n is a, c, g, or t
ggcttctggatttgggggtgcttccttttctgttaaccatgtgctttggtgtctgaatcccggtgggtgagggtccctgccctacctagtagctgtctcaaggagtgtacatgcccctgggnctgagggctgctttgtgtgcacgcgcgtgaaacnacactcacacacatgcacacacgcgcacgcacacacgcgcacacgctcatacacactcacgcacacatgcgcacacacgcacacgcgcacacacactttcatacacacgctcacacgttcacacacacgctcacacacacatgcacacatggtcacgggcactcatgttcttcaggt

SEQ ID NO: 553979 - DNA, 99 bp, Homo sapiens
tctgtgttatggaaatcaaagaaacaaatcgctcctctaggtatggctggagactggactgctccattgtctacaggtgtgtatgtggttggggtgaga

SEQ ID NO: 553980 - DNA, 468 bp, Homo sapiens
catgcgagtttgggacgggcggtcgaattacaaggtcgtgtgtgggagagaggcagagtctcactctgtgcccaggcgggagtacaggggccatgatctatgactcagtgcagccttggacttcggagttcaagctattcctccacctaggtctcgcgagtagctggtgctatgggtgtgtgccaccacgcctggataatttttgtctttgggggccgagccggggtttcagcatgtgggccaagctggtctccggctcctgcactcaggtgatctggcatcctcagcctcccaaggtgctaggattacaggtatgagctacttgccctggccttcttctacttttattgtgaaaatatacaagacaacaggccaagaacagtctggttagcgaccatattttcctcacttaatttaacatggactcttgttgccatattggctccttctaatcccatgcacatttca

SEQ ID NO: 553981 - DNA, 542 bp, Homo sapiens
aaatcaaaaatcccagtgagatggatacttttattatccctactttacacaggaggaaacggagacaaagagaggctaaagaacctgccctaaagctacagagctatgaagtgatgaagtctagacttgaattctgaaactttcccttagtagttcactgccgtggttttcaagctacattctgcagactatttcagctccaaaagttctacttctaaaatacattttatccggtataaaaactgcaatgaaaaacatcacaatcaaaactttaatagactgaatataatacaccaaagggaaccaacacattaactttttgttgccaggttaagtggcttttgtgcagctcttgaaataagctagacctgtcaccactgagatcttacttgaacttcttgtaaatgtttcattgatttggaaggtgtaactctgcactttttttttttttttttttaaactcaggactacttctgcctgctcaggtgagacggtccagcatacgagctcaagcacaagggtaaaccaagcaaccccttggt

SEQ ID NO: 553982 - DNA, 443 bp, Homo sapiens
caacagtgctatagtattcagtccaataacatgctacgcatgttatagacgagaaacaatatgctatactatatagcataggcgtgtagcaggctataccatctaggtgtgtgttgggtacacgctatgatgttcacacaatgatgaaatcacctaactacgtaattctcagaacatatccatatcattaagtaatgtatgactgcataacctgaccatccaaatcacatttcctaaacttttgccaaaagttccttttaaatctgtgtcaaattcactggcgaaaggaagcagaggaggtggctaagctgagagtcagtctaattgatatgttggggctaattatctacaaaaataacgcaaagggggtcatataacttaacacttaacgggagtggggagaatggtgaaatgagtgacacagacaaacatctgtaccatat

SEQ ID NO: 553983 - DNA, 378 bp, Homo sapiens
gtaccatctgggtagactgtacgtctcagctcacaagcatagtctcctgcacctctcagagcactctggggaagggctggtgctggcagatattcacgaacgtacgtgcgtgactcagggcctgacagcgggtgcacactcccggctgcctacagtcctcaggactctactccctcagatttgtggtgaccgtgccctccagcagcttgggcaaccagatctacatctgcaacgtgaatcacaagcccagcaaacatcaaggtggacaagagagttgagcccaaatcttgtgacaaaactcacaaatgcccaccgtgccaagcacctgaactcctggggggaccgtcagtcttcctctttcccccaaaagccaaggaa

SEQ ID NO: 553984 - DNA, 485 bp, Homo sapiens
ggcctccccagccctgcagaactgtgggtcaattacacctctttcctttataaattacccgtcttaagtatgtccttacagcaacatgagaacagactaatacagaccctttccccaatcccaggcccagacagttttctactccattcctctcaatgtcatccgcttctctccttttttactgtcactacttctattctggctcactcatctgtcgtcttgatcactgcagatgcggatttccaagatgtgaatctgatcctgttacttccttgcttgaatcttcaatggctccctactgccctcgggataaggtatttgctcttagcttggcttgtaaggagaggcttggcctggctcctgcttcctgcctctctctgtcccctccaggctctctctgcctctctcaccccatggtctagccacacatgtggtctagcaagggtgagcctgactttgggctggagccacaaacaggcagaaga

SEQ ID NO: 553985 - DNA, 551 bp, Homo sapiens
gaaaaaattgatcccgttttggttaaaaggggaagaaggccctaaatttttaaagtttgggaagccgccctggttaaaatgggtcctggccagcccaattgggttgagagcttttcaaactatcccccttgggttgcttttctggtttgtatttagacaaacagttcgggtgggggtcatcaaaccagtggacaaaaaggttgctggagctggcaaggtccccaagtttgcccagaaagctcagaagggtaaatgaatattattcctaatacctgcccccccccttttaatcagtggtggaagaacggtctcagaactgtttgtttcaattggccctttaagtttaggagtaaaagactggtttatgataacaatgccttgttaaaccttcagaaggaaaggagaatgttttgtgggcccctttggttttttttttttggggggggcagttttaagttattagttttttaaaacaggactttttaatgggaacaacttggcccaaaatttgtcccagaatttttgggcccctttaaaaagtttaatgggga

SEQ ID NO: 553986 - DNA, 1978 bp, Homo sapiens
cttttcctaaccctgctgctaagctagacacctcacttactgagagccagcatggcagctgttgtcctggagaacggagtcctgagcagaaaactctcagactttgggcaggaaacaagttacatcgaagacaactccaatcaaaatggtgctgtatctctgatattctcactcaaagaggaagttggtgccctggccaaggtcctgcgcttatttgaggagaatgagatcaacctgacacacattgaatccagaccttctcgtttaaacaaagatgagtatgagtttttcacctatctggataagcgtagcaagcccgtcctgggcagcatcatcaagagcctgaggaacgacattggtgccactgtccatgagctttcccgagacaaggaaaagaacacagtgccctggttcccaaggaccattcaggagctggacagattcgccaatcagattctcagctatggagccgaactggatgcagaccacccaggctttaaagatcctgtgtaccgggcgagacgaaagcagtttgctgacattgcctacaactaccgccatgggcagcccattcctcgggtggaatacacagaggaggagaggaagacctggggaacggtgttcaggactctgaaggccttgtataaaacacatgcctgctacgagcacaaccacatcttccctcttctggaaaagtactgcggtttccgtgaagacaacatcccgcagctggaagatgtttctcagtttctgcagacttgtactggtttccgcctccgtcctgttgctggcttactgtcgtctcgagatttcttgggtggcctggccttccgagtcttccactgcacacagtacattaggcatggatctaagcccatgtacacacctgaacctgatatctgtcatgaactcttgggacatgtgcccttgttttcagatagaagctttgcccagttttctcaggaaattgggcttgcatcgctgggggcacctgatgagtacattgagaaactggccacaatttactggtttactgtggagtttgggctttgcaaggaaggagattctataaaggcatatggtgctgggctcttgtcatcctttggagaattacagtactgtttatcagacaagccaaagctcctgcccctggagctagagaagacagcctgccaggagtatactgtcacagagttccagcctctgtactatgtggccgagagtttcaatgatgccaaggagaaagtgaggacttttgctgccacaatcccccggcccttctccgttcgctatgacccctacactcaaagggttgaggtcctggacaatactcagcagttgaagattttagctgactccattaatagtgaggttggaatcctttgccatgccctgcagaaaataaagtcatgaacagaaagtgacgtcatagacagaacttaggaggtcaaccaaaaaaatctgctgatagaagtatagtaactgcttcttttccctgaagaagaaaagttttatttgcaatgtcagcttttaatatattttcctaacatagtggaggatcaccaaataaatcaatttctctgaaatgaaagtatattaaaacccatcagtggtagatccttcagagtcacatttgatttagatatctcagaccttcaatttggtttaaaatgtaatttctcagttctcatcaacattcatcaaatttgggactcatatcatttgggctctgtctgttcatttttaacctctcaggtaagctctgatggaatacatattgcttagtgtaaaatgtgagactgtcatcgggaacaaattattccattcagtacagattgtaatctacaaagcttagtttctacattcattcattatggctctgagaactactttgttagcctgcttacataaatgtcctctgatctaagactctattaagatagttacaagcaataaagcattatataaaaaaaaaaaa

SEQ ID NO: 553987 - DNA, 943 bp, Homo sapiens
ggggctgtctccctggaacagaagctgtcccgcctggaagcaacagctgaagcaggagaacctgggaggcccggcggaggatcgacctcaacctggatatcatgcccccagcgtgcccagtgcccaccctgcagagtccctggtgtgacaactgatgtggggcagacgcgtcgccatcctcagagagctcgaccgaaagaaaacaccaaagaaacaaccagcaccggacacagccacaatgctgggagcgtcacacagatcaaacacgtgatatcaaaccccagccgcctggagcagcattgagatttgaagagaagctgacaggcagaatccatgaagcaagcacagggcatccgtgaccaatcagagggaccagcgcctaaccacgtggcaacagacacattcacaaccgacacattgggaagaaactatgcgacgcagacagattgcgcgcaacacagacagcaacctcgcgagcccatggattgtcggacacgcatgcacgccaatcacaggaccacacccagcacacaccagatacaaataggccagaagagagccaaacaatggccgaggcgacatcccggagagcaaaccagagggcagcgaaggacacaaaggagcgaccaatccctccaattgcgaccatggcaatgatcgcgaccgccgcgacacgccgcgccaacgaactaggccacactcaacaatcagaggacacagaccagcacgggacagcagcgcgagtcacacccaaagaaaccagagaacagacaaagacaagcccaggcacactgagagcaaaggatcaacagcggccacacccctgggacacacggaacaaccgccacaacagcaacgagccacggactcggcaaggcggaccccccaagccccccacaacgcaccaattcctcggcggacaagcggacacaccccagagacg

SEQ ID NO: 553988 - DNA, 882 bp, Homo sapiens
cttacggtgcctcttagggagtagtttcttgggtgccccggacgacgcggcttcctggcttcctccctagtgaactcctacccgcccgcggttgtgtcccgctgtcttctcgcccgggggggttagcacccacttgtgccgtgctttgttgtaatagctccgctcgcgcgggcgctgtgccacaccgccccccacttgtggctttctttcacagtggtggattctctcccggtcgatgtgacacgcccccccccgggtggtgggtccccccgagtcgggttggtgctacactagtttcctcctccgcccagacattttgtggtcgtatctcctctccctggttcacactgccgtctcgcgtcagactggtttaatttccctcttcggggaaaacacgtagtgtggggtcgcgcaagtctctcatactctaaaaaggggcggccccccatcacagtagataagacagattctttctctcacacactgaagaaaacgggggacgcacactagtctcgtgagatgacccccgatcgcacacacgcacactctttgagagggagactcacgctttcacgcacagggaaagaacggccccttctcctgcgtgggttcagagacgtgctttccatatcaacagactgggagtcgtcgttttccacggaacaggagaatgctctcccacaggagacttcctctgagtgtcgcccccgctgctcttctctgagggacgtgctgtaaagcccagacagtgaacgttgtccgctccactattcgggtgaccccagaggattgagagtgggggaagtcgcacccactcacgacaagcggctaatgcaacgctacggcgtgataaaaacggagaggcccccggaccacaagaca

SEQ ID NO: 553989 - DNA, 267 bp, Homo sapiens
  misc_feature (12)..(13): n is a, c, g, or t
ggggttttttgnngggggggtttttttttttgccccccttttttggtttgggtaccccgttttcccccttttttggggggttttttcccccccgggaaccccgggttccccccggttttaggggttttttttaaacaaccccccgggggggtggggggtttttttttggggccttaaaattccccccccccttaaaaggccagtttttttttttttttgggtttgggggatttccttaaaattttttaccctttttttttgggggga

SEQ ID NO: 553990 - DNA, 786 bp, Homo sapiens
  misc_feature (786)..(786): n is a, c, g, or t
agcgggaaagcgtaggagacggtgtcaccggaacggcggcgacaagggtgttcccgaactagagtggcgcgcatacataatcttgctgctatgcttcgaagctgtagtctgaagtcaaccgtaagtttgtaaacagaaggtgaagcctcgtgagcatacaggaaaggatcaagtctatgaaggattcatttagtaaacatttattaagatgcctgctatgaactaagccttgggatacgaaaattacgaagaaaccatgccctggttatgtgagtcactggattcttgaacagggcttgtgtatcagtgttggaagtaaagtacaaagatattagacttatagaagaatcaacgtatattgttaacaagaagggatgtgggatctaaggaggacagccgttggcagtcagtggcccttgaaccagctaacaatggatgcagttcattccagcaccaacaggatccaagccagattgattgggctgcattggctccaagcttggattgcccatatgagaagcttcaggacacgcaaagcatggtagaactaaccatccatgaatgatgccaaatggacaagatatgtctacaatggaatctggttcaaatgatcatgggaatttccaaggggatttcaatacttctacacgaattgtggaaatcagaatggggcaatgcatctgcaaagccccaaaacgcacctctccagaattagccatggatgcctacaaaatcaggcccaatggacattgttcctccttctgaacgacagcacagttcaggaan

SEQ ID NO: 553991 - DNA, 93 bp, Homo sapiens
ggatttgctggtgcagtacaactaggcttaatagggactcgaattcgacgcctcgaattcgacgcctcgaattcgagccgagaccacatctca

SEQ ID NO: 553992 - DNA, 1902 bp, Homo sapiens
cttgtgcatgcctctgcccccccgggccgcggaactctcctggggcgaccccgagtcccaccccgctgctccgtgccgtcctcgcagctcgagccctcctccagcccagcagtgctcccgcagcgtctggccgctggtcgtcggcagacgaaagggcttgaaccgcggctgaccttagcctttgtccctcggcctagttccgcagctgccgtcgaggccgccagcccctcccccagcatgtttgggctaagccgcctcctttccgcctgcgttggagagagaggtaccagaaggaatgaaaggactggggcttgtctccatggcaactgaaagaaagaggtgggttataaatccttcgccaccctcctgtggcgaaggaggggaagtgggagccgggaagtagagttggccttttgcaggagagtctggagcccctttctgggtgatgcattgggggccatagaaggatttggctgccgctttggagcatggaagtagagttggccttttgcaggagagtctggagcccctttctgggtgatgcattgggggccatagaaggatttggctgccgctttggagcatggattttttttttaatcatcttcctttctcttttggagagaaaaattggtcacctccaggactgagaccctgacccttccaagcatccccactaccaaaggctgcccaagcccggaaggatcccatcccgttctggactctgaggtcacttcctcactccgtcaaatttcactggaccgtgggctaattaaaagtgcctccgtattagcggggcgtggtggcccatgcctataatcccagctacttgggaagctgaggcaggaaaattgcttgaacccgggtggcggaggctgcagtgacccaacattgtgcaacaagagcgaaactccgtctcaaaaaaaataaaaaataaaaaagagtgcctccctggggagactgtaatgcccactgggcagtgatcctaatgccccttgggcagtgatccttattcccctctcccataatgattggttgtagcaggctgaacaaaaaggttgagcttcacttgtgcttgctgaatagaattctcacgcccactccacgttagctcccctcactgtaggactagctctgaaaattctagctcctgtaggaagccaacacagacggatctacaagaaccaaaaacagctatagctactcttctaaatctcagtgcctgacattgcctctctttctgcctcctctctccaccccccaaaaaatgtggtcctccttgacctgagggagcttccgtccaagtctgagctctgatcatcctgaagaatcaaagtatcatcatcccttggctggcaagatgaactccaacgtcaaaacacttgaaacagtagtatttttacacaatttgcccactgcctctacatctcacttagtccttgcagtaacatttggatgatgaggtaacttatccagaagcacaaagcctaaagaatgacagagcttggactcctgagaagttcagctactgcccgccttatgataaccaaaagaaagcggcccggcgcagtggctcaactcctgtaatcccagcactttgggaggccgaggcgtgcgaatcacaaggtcaggagtccgagaccagcctggccaacacagtgaaaccccgtctctactaaaaaaaacaaacacaaaaattagttgggcgtggtggtgggcacctgtaatcccagctacttgggaggctgaggcaggagagtcacttgaatccggtaggcggaggttgcagtgagccgagatcgtgccactgcactccagcctgggagacagtgagactccgtctctaaaaaaaaatgaataaataaataagaaggcacaccacaagttcgagaccacttctac

SEQ ID NO: 553993 - DNA, 199 bp, Homo sapiens
caggcgctcgttcgttatacggcggctttttcggggccggcatgggcaatggcacgatctcggctcactgcaacttccgcctcccgggttcaagtgattctcctgcctcagcctcctgagtagctgggattacaggcacccgccaccacgcatggctaatttttttgtatttttagtagagatgggattccaccaggtg

SEQ ID NO: 553994 - DNA, 1134 bp, Homo sapiens
ggagagagagagagagaactagtctcgagttatttttttatttttttcagggggtaccccagccaagctgttccccgggggggccgcacagcagcccgagcgccccctttccgggagctcccctccggagctggggatccaggcgcgtacgcggagatcccagtgatcctggcgtgctgtctggggccctgttccccaccatgacctcctcggggcctggaccccggttcctgctgctgtagccgctgctgttgccccctgtggcctcagcactccgacacgtgcccgcggggccagaaggacccggtcaacccaagaagaacgctgcctgagatagacacacatggtggccacaagttagaaaccagagggtgtacctagcggttaacctgcagctcatgggaaaagtacttacaattacaatctgtgcggagacccctggggagcccctgggccaaacacgggaatgtcggccacagggctggatgtagcaacggtcgggctacagaaaccagtagtgcgcgcgaatgaaacacaagataggtgtccccggaggagggacacaacaaagaaacgagacacaccggaacaaacaacaacagcaagcacgccggaacaaggaaaatcatgacaaccaaacaccaaaggacaagcgagaggcaaactaacgaccagacacaccgaagaccgaatcccggcgccaccgagcaagaacccccaaaaaaggagagagatagcgacgcagacaaacaagaagcgagacgccaagcaggaagagacaacccacagacccagagcgcaaataccacagacgggcaggaaaagaacacaaaccagcggagaaccaccagaaaaaggggagagagaaagccacagaaacaagcaagaaccacagaagaaacagatgaacaacacgcgaggaaagagagcaaacccacaacaagtcagggggaggaaacaacaccgaggacaaaaagggacagcacaacaaacgacccacaaaagtggtagcagccaacaacgacacagtaacacaggagagtcaaacagcgagccaaacaaccaagaccgcattcacaaacccgcgtagccacaacatggacaccacaagaaacataggtagggaaaacacaa

SEQ ID NO: 553995 - DNA, 1161 bp, Homo sapiens
agttcgaaaacctgaagatccagaagaatgtcagaggaggtttatgaccctcgatctctatatgaacaggctacaggcaacagcacaggcacaggcaagccagcaggagtacgaggcaacagttccaacattcgaacaaaccatggtcaagcaggcttagcatgacagatgcagacccacacttccttgcatgcagcgtttctccgacccagccaggcacactcacatcagcaacacagccaacagcacacgagcacagacagcacacgtgcaacagcacactgcacaggcacatcaccagcacacatcacaccgtccaccgcacacggtatgcgcacattttcctcccacagcagcacaccaagcacaggccacagctgcgcacacacagcacaacttggacttggtgccacagccatcaatcagcacacaccgcacagcaaaccacaggtatcttcccaagcgccgcacacgcttcgttctgcgaccagggcaggcatgttgcaaagccccatcacacgccagcatccacgaagcacgcgtggcccaaccacgctggtgacacacaagagcaatgcaacacgcgcgcagccacatgaaggcacagtacgtgcaccaacggaaacctcacatgcatgtcccctctcaactctcgtggcacacggtcctcctccgcgaacacaaaccatccacatgcacgatggccaccataccaatccacagtgcccactactgctacccagtactagtactacgagctaatccttcctcagagcacctggaggtgccctaacatcatgcggactgcacagcgacctcccggagctcccaagcctccagcatcacgcgacagcgcacgccatcacatgcgcacccggcaacagcctcgtacgtcctccagtcttccgcacaccaacaccattcctcgacggccacctagtatctccgttccgctacacagggcagctcctccccaaagggctagactcggaccggctcattgctaggcttactagcgactttatggtccctcccaaccaacaaaaactcctctggaccggcatcctgctgcaccacattgaacattctcacccaccaccactttcaacacgtgcccacacttccacaacacacataaaccacgccctcaggcacaaacac

SEQ ID NO: 553996 - DNA, 581 bp, Homo sapiens
  misc_feature (132)..(132): n is a, c, g, or t
  misc_feature (204)..(204): n is a, c, g, or t
  misc_feature (208)..(208): n is a, c, g, or t
  misc_feature (238)..(238): n is a, c, g, or t
  misc_feature (293)..(293): n is a, c, g, or t
  misc_feature (333)..(334): n is a, c, g, or t
ccccccccagaaaaaaaaaagagggggtttctcaccccccccctttctctcccccaataagagagggggggcagaaaaaatagagagggggggggggggccctctctcccccccccccccaaagagaaaatnttctctttctttaaaaaaaaaaaaaaaaaatttttttttttatataaataaaaaaaaaacaaacccccttcncggnccttatttgtgtggcccccccccccccttnaaaaaaccaaagaggggggcgggccccccccccccccaaaaaaaaaaaaccccangggggggccccaaaaaaaaggagggggggggccccccccnnggggggggtaaaaaggggcgcataaaaaccccgccgccgcggataatatcccccccccccgcgggggggtgcccccccacccccccaaaaaaaaaggcccccaaaaagaaaacccaaagggggggccccccccaaaaggggccggggctccaagaaaccccccttggggacccaagcttcatttttttccccaaaaaaaaacccggccccccctccaattaaagttcaggcctgcccccagtgtcca

SEQ ID NO: 553997 - DNA, 270 bp, Homo sapiens
gttgaatgcatacatcataaagaagtatctcagaatgctttggtgaagttttacgtgaagatatttccttttccacaacagtcctgaaggccctccaagtatccacttgcagattctacaaagagagtgtttcaaatgtactcaatcataagatatgttcaaatctatgagatgaatgcacacatcacaaagaagtttctcagaatgcttctgtctggtttgcatgggaacatatttcccttttcaccatagttcagaaagccctccaaa

SEQ ID NO: 553998 - DNA, 106 bp, Homo sapiens
acggtacagccacactgagctctggctccaagggctgcctcctctgtgctgtccacctcctctgtgcctcctctgtgcctcctctgtgctgtccacctcctctgtg

SEQ ID NO: 553999 - DNA, 120 bp, Homo sapiens
cttagctgcccaggtattcttcttctctacagctaaaccatcactggcctacagataagcaatattaaaacaactgtagctcaccagcagacacgcgaccagcttgagaccagcttgaga

SEQ ID NO: 554000 - DNA, 600 bp, Homo sapiens
ctcgtgtcgaaaaaaaaaaaaaaaaaaaaaaaaaaaaaaaaaaaaaaaaaaaaaaaaaaaaacaaaacgaaaaaagaaaggaccatttacctgcccggccttttccatgccttgggcctgggaaacccctggcgttccccaatttaatggcttggctgcacatccccttttcgcgagcttgccggaattgccattgggcccgttccgatggcttttccaagcagtggtgcagcctggatggcgaatggcaaattgtagtgggttttttgtttaatttcgcgttaacttttggtaaagtgagcccattttttacccaatgggccgaaatcgggaaactccctggtaaagcatgagattggcccgcgttagggttgagggttgtcccggttggaaccgggagtccccttttaaggaacgtgaactcctccgtcagggggtgagcaccttattttaagggcgttggcccattgggggatccgtggccctagtcaagttttccggcgttgcggtcctctaagcccctaattcgtacccttaaggggagccccggttttgaactgtgcgggaaggggccgtccgtgccatcgttgtgttttttgt

SEQ ID NO: 554001 - DNA, 561 bp, Homo sapiens
cagaggggaaattaaaataatggagtcctggttagcctttcagggataagggataggggttttttttttttctcttttaaataactagaatatctcagtttaataaaaggtaagtttaaaatgtttatggtgccataatttaacctggcatcttgaaagaacagtaggtttcctccatgataaacggatcccagtaagaattttcagtacataccaggtacctggaaaggtctccagataagttaatagatccaaggagatacatgcctcagtgagataaactgaccttttaactagctaaactatttagccagagcaatactctgtagaactgtgcttttctaaagtaaagattatctgttcctcaatttaatgtgcataatactttcccgggtgctagcttggataggcaaaatatttggaaatgtgggccccgtaatgatggtgctagtccataagcttggtggtaatgagtgtaatcataaaaatattcccaagcagttttggaccttaattctacattccggggcattggtaatatggtattctactgatatataa

SEQ ID NO: 554002 - DNA, 300 bp, Homo sapiens
  misc_feature (25)..(25): n is a, c, g, or t
  misc_feature (32)..(32): n is a, c, g, or t
  misc_feature (178)..(178): n is a, c, g, or t
  misc_feature (226)..(226): n is a, c, g, or t
taattgggtttatcactgttgatgnctaaatnaaatttgggattacaagtgcttttctcctcaccctcataacattttataagaaaagagctcccaatttggggtttgagcatgttcctctaaaagcatcggaaatacttgctttattagttcagttaaaaatttaaagatttatggnaggacacatccataggtgacttcatagaagaccaccatgggactcagngagtacccctccagctgggaaaagcttgacaaactacataaacctgagctgagggagaaaatacacatgccatt

SEQ ID NO: 554003 - DNA, 168 bp, Homo sapiens
ctagtccctgatgggcttcagatgacgggatagtacacttcactcagaggcattgcagtcgtttaaataatttcttacaagcctctacagtgatcagtgccttgatgccaactaaggaaatttgtttcgcatagaatctctgaaggctctatgacaggaatagcatga

SEQ ID NO: 554004 - DNA, 399 bp, Homo sapiens
  misc_feature (2)..(2): n is a, c, g, or t
  misc_feature (93)..(93): n is a, c, g, or t
  misc_feature (114)..(114): n is a, c, g, or t
  misc_feature (150)..(150): n is a, c, g, or t
  misc_feature (192)..(193): n is a, c, g, or t
  misc_feature (195)..(195): n is a, c, g, or t
  misc_feature (216)..(216): n is a, c, g, or t
  misc_feature (311)..(311): n is a, c, g, or t
  misc_feature (343)..(343): n is a, c, g, or t
cncccccgccacaaatgggaaaacgtgattcttttgttttaaataaatacttagaacacgacttagctcctacaaacatctaaaactctaagnctcagaacaggaagtagtctnacccaaaggccccacgcaaggacgccacagttcccncccaccccgtgatcaaaacacgaaatcggctgccgatagatnnancgcaatgcacaccctatttcnagagccttccccggccatctacaagcaagatgcggctgggaaaaaaacaactggaatttctcgaaggttgaaggtccgcacagttagaggattcnacgtggttctcttggttccccatggtgtgtgngtatgtgaagaggaggccgcggcccttaaaatcaccattcttgagctcatcgaaca

SEQ ID NO: 554005 - DNA, 236 bp, Homo sapiens
ggacctgaatacgcatgttggggtttgtgggtcgggtggcgctgtccggctccggggcttgcggaagactcacccttcagtgtcgctgccccagctcagctcttactgcgggccgtccgacggcggtccatcctgtcagggactatgctggcgcaaacatctccttcgccaaaatgcaggcgcctgccaccgggtcggcattcgtggcgtgtcatttggcgcatgtggtggacgtc

SEQ ID NO: 554006 - DNA, 430 bp, Homo sapiens
ctgattgacaaaaagggagtgttgaggaaccttctttgcacatgaaatatttctgtgatcatttcatagatcttgaaggaactgctggtagctacagatcgtccgtgagcttaaaaactttggagacacgaagaagccacatatgatgagggccctgggaagaagtttccatccacagggcgaatacacttggccaggcttatgctaagaggcgtaagtactgctgatttgcacattctacacctattgctagccgtaagacacttactggttcataaagaactttcagtctgtccaaacacagatatgccgagcatattaagatgggcagactttgtaatttgggcaaattagatcttatatgacatactcgatatgatcgtcactccaaacaggacgttaacctgaatggccaatggttccgcgctcg

SEQ ID NO: 554007 - DNA, 820 bp, Homo sapiens
  misc_feature (820)..(820): n is a, c, g, or t
gagtccgatgtggacagagcgagctgagtggtagtgtggtcgcgctctcggtaaaccggtatcagtcttgctagtcatggatgacgcaacttgatctgtaagagcagattgtcatgaattcataagacagcgttttgcaactattctgacacagatggtgatggaactataacaacaaaggaattgggaactgtaatgagatctcttgggcagaaatctcatagaagcagagttacatggatcatgattaatgaagtagatgctagatggtaatggcacttaattgacttacgctgaatttctgacaatgatggtaagaataaatgagagagacacagagcagtgtagagaacgaaattagagaagcattcacgtgtgtttgataaggatggccaattggttatattagtgctgctagaacttcgccaaggtgatgacaaatcttggagagaagttaacagatgaatgaagttgatgagaatgatcagggaagcatgatatttgatggttgatggtcagagtaggactatgaagagttgtgtacaaatgatgactagcaaagtgaatgaccattgtacgagaagtgtgttacactttccttgtaccacaagtttgttatatggctgtgttactttgattggtcaacttgtatctgtaactagggtgttctcccctaactggtcaaaaaaatagatactgcgtgtataggacattagggaccttcaataccttccaggtgatcctggccccttaattttacctgtttattgtcctaataaccttatttttagaagcttgatccaggttacatgttggctgn

SEQ ID NO: 554008 - DNA, 811 bp, Homo sapiens
  misc_feature (3)..(3): n is a, c, g, or t
  misc_feature (17)..(17): n is a, c, g, or t
  misc_feature (24)..(24): n is a, c, g, or t
  misc_feature (28)..(28): n is a, c, g, or t
  misc_feature (77)..(77): n is a, c, g, or t
  misc_feature (132)..(133): n is a, c, g, or t
  misc_feature (160)..(160): n is a, c, g, or t
  misc_feature (163)..(163): n is a, c, g, or t
  misc_feature (179)..(179): n is a, c, g, or t
ggngcctttgcagtganattttcnggcnaccgaaggccctgcagtcgctagtagaccccagcacgtcagaatgcttnatgtagctagctagcttctaccctgactactcgtattagatcagttaatggaaannagaagtaacatggattcttgacaattnagnccacggttgaaaatcncctttacttattaagggctccccccttcccttccctatgggctaaaataaaccgaaacttaggctttaaaatttgtccggagggaaaatcctctaacctggggaatattaaaaaggggccccgcctttgttgtttcccccccctttaaaaaaaatttgccttttaaaggggttggggttaaaaaaaagaaccctaaaaaaactctttgtttaacacactttcccaaaaaattctgaaaaaaaaaaaaaatttaaaggtggggggggggggggcccccccccccttattttttttttttagagccccttttttctttttttttcctttttggggggaagtccttcaaattttctcccaaattttttttttttatcccccctttttttccccaaaaaaagtcttttttatttttaaaaaaattttttccccctaaaagaaaaaattttttttggcccttggaaaaaaaaaaaactttttccaggaaaaaaaaaaaaaaaaaaaattttttttttttttgggggggtgaaaaaacaatttttttttttaaaaaacccccggaaaaaaaattttttgcgattttttttagggggggggggggcccccccttatttttttttttgtggggggaaaaa

SEQ ID NO: 554009 - DNA, 393 bp, Homo sapiens
agtaccccagatacattttagtacatttatcgtcatcatctgctctgagtggtaaggccgttcagagaggctagaggttcttattctggctataaattatgtgagtaaaattgtgctaaccatgtaaaagtactgtacacccacgctcaatagatagtccttgaaatagcaatggaaacatgtcttctcacaagagaaaatgacagttgtaatgatgtatttgatgaatttaaactttaaggcaggtgcttcaaagtggaaagaagacttgtgttttgtgaaggtgctgtggacactttgaggaaacgtagaactcatggtgcgcttgggtttcgccattcaagtgacagggttgattgagtgttttgttagggtaaagtattagaagagaaa

SEQ ID NO: 554010 - DNA, 108 bp, Homo sapiens
attcttattgcaatgccaatgtcagaagataaccacgtgactgaaatagaaaaatgctacctatgtgagttgtgcccctacgcttgtgccttgcccatatgcaatggt

SEQ ID NO: 554011 - DNA, 859 bp, Homo sapiens
acaattaagaatctataaataaacccatacctctatagttgatattttgacaatgggaaacacaaatcctttccataacatggtgctctgacaacttgaactagccacgctagaagaacgaagtcagatctctcttccatactcatactatgaacaacttaactcaaaatggatcacaagacctaactgctaaggagactactacctatacaacactctctaaaactctagtcgctaaacataccccaataaccccctggcaaccaagggcccaccacagccaacccaaacagaacaacacggtaccgccccggcgcacctcacccacaccaacgcggctcaccaaacgggacacaattcacaatgcgcacaaaaaacgctggcaaccctggactctccagcaagatcccgctgctgcaccgggaacattccacacattggccctggaacaaccaactcccagcctcctaaaagttacaaggaaccatctccttgacacggcacaataccgcttcaacccaaccttcccaaagtattagggatcaccacaatcactcacctaccacgcaacgacaaatataccaaatggacggcaaacaacatgcaacgacaggcaaacacatcatgagaccccaaacgaccaaacgacagaaaggccacaactcacgcaaaaaacaccccaccccccccccccattctacaaacatctttaggccacaggataaccaatacaaaaccaacttcacccactctacagactaacaaacaataacaaaaaacctatcttccaacaacactcattaaccgtaaacacagcccatatcacaacaactacaacaaccgcactcccccaaaaacg

SEQ ID NO: 554012 - DNA, 596 bp, Homo sapiens
gagcctgcagtgagctatgatcacaccactgcactccagctgggagacagagtgacacccaaaaaaaaaaaaaaaaaaaaaaaaaaaaactggggggcggccggggccccggaaaagagcttttataggaaccatctgcgcgttggggcggcgcgggggccccgagaggaggtaagcgtggaacacgtgggcccaaagagcgggttccccaagaggagaaactcggggtccgaggaccagaggcggcggggaattctcctcacaaataaaaaagagcgccgcggggggaacaaagcggagagcggttggctggaaacaaatatcccaagagagggagagttccgggaggggcccaattagaggggggactcttacccaaaggaggaggtcccccgaagagaggagagaggcccgcggaactctatctccacatatttaacgcgccccccggcttgccgggtgtgataaagagacaataatacatggtgaacgatcacaacacaaactaaacgagaacgcacagacagcagagcaaaaaacacaacaaactcattacataaacaagaccaacagcaccaccaaccagacgaaaaaca

SEQ ID NO: 554013 - DNA, 149 bp, Homo sapiens
cccgatgggttcaaatcttatactaaacaatgaatgcccaaacataccattaatcggcctactcctagcacagcacaagctcaggcagctgtccaaggacctgttggtacagatttcaaacccattaaatagtacccactcggcgtgtg

SEQ ID NO: 554014 - DNA, 361 bp, Homo sapiens
gactgagaatccgaactatttgagacaggtgtcaatcagttagaaagcttattttgccaaggttaaggacatgtctgtgcaacagcctcaggaggtcctgacaacatgtacccaaggtggttgggcacagcttgctttatacattttagggagacgtgagatataaatgaatatgtgtaagatggtcacaggtagagacaaatgattgctttctttgagtcttggtacgcctttcacagaatacacgattatatggggtacagggcaggtagaggatagtcattatgcctcagtccgactcatcaatctgaggttgtcttgttgttatttagagtagagctcgctcgtcgacccaggctga

SEQ ID NO: 554015 - DNA, 639 bp, Homo sapiens
  misc_feature (594)..(594): n is a, c, g, or t
taggaggatttaaaatgctggtggggacagtcattttcatcactggggtcctcctgtttctcccctgtggtatcccattaaaactcttgttgaaactacagttaacctcctgacaatccagatgatgctcctgctacagcggcacgatggataccaacccgtctctcaagaataccccaaaaattaagtttttctttttccaaggtgcccacgccacccctatgtcacgcctgaagtagttattgagaaagtcgtccctttccccttttctataaccaaatagacaggaatggaagattctcctcggggcctgaaagcttgcgggatgaataactcctcctcctcaggcccagtcccaaggtacaaacttgcaccagcagcaagatagcagaggcaggaagagagctggctggaagacacgtaccccctgaagatcaagagggaggtcgccctggtactacatagcagtcacgttaggctgggacaattcctgtttacagaggactataaaaccctgccccatcctcacttggggctgatgccattttaggcctcagcctgtctgcatgcaggcgctcattaaaacagcatgtnggcttcgaaacaacaacaacacacacacgcacacaaaaacacaac

SEQ ID NO: 554016 - DNA, 317 bp, Homo sapiens
cgacagccgagtggtcaaattactactgcatcagactgcccttcgctgacactataaattctgtctgcttggttaacgctactcgtatgaagataactagtcataatcgattttacggccccaataactgatagatagtctgcaaaaatctcttcaccatctttcctgggcactggacttgcttgggcgctctcttgtgccttgagcgccagttgtaatcacccagtgagattgtcgaaatctttgagacgtaggatcatactatcctccacgaagtaccttcattatcgaatttgcatgcatttgctggccattaa

SEQ ID NO: 554017 - DNA, 1049 bp, Homo sapiens
ggttggaacaaatgtcaaatatgtttcagagctctggagtccagacagcatcctccagaagcaacaagcccaaatcggacgggaatgaagattcagagggcaaagagcaacgttgggaaatggtgatggataagaaacactttaagctgtggcggcgcccaatgtacaggcacccagctttaggcagtagcgagtttctggaatgctacaacagatgtgacacctcggcagttcttcaagtgttcagctggacacagagtatagaagaaataatgggatgcccgtggataatcaagctggaggtgagttgagagggatgtggattagtggttcgcacggtttgcttcagctgggatacacccagtgctcgttatccagatgtactcacctgggattatgtgctgctacggaggtgatagacgtcgcgatccaggaaaagagacctgataggtagtcggtggtctcggtggctgtgcatcctctggcagtgttggcaccaagttcaccgagaatgggcgcaagcacatgatcttgtcgatgtcccctaggggaatggcgtcacccaaaagtgatcccgatcgtacagaggggtttacgactcatcttcacctagcatgacagtggactcatgcaccaagagcggggcaggcctcgtcgacgactagcgtcaggatgatccccagcgaactgccgagtaaagcctggacaccgacgcacgagggcgacaatagtgcgccacgaacacggaagatctggcatacgacgcccgtggcaagcgagcatcgtgacggcgaccagcgaggctcggcactaggcagacgacgaggagaagaacgagggcacggtggacagccggacgagaggacgcggcccgagacaacacaggccggccagacggcctgcgacacgagctgcgaaggacatacggacggagccagggcctaccagcagtggggggccgtcggacgccaccacacacacgcgggcgcaaacaacccaagacagcggggcagcggcaagaccgagaaaaaccacaaggagtggaagaa

SEQ ID NO: 554018 - DNA, 145 bp, Homo sapiens
tttgtactgcatcgtgaagatgtggctgcctacatcaccaggaggatggcggcgtgctgcagacccagacaacattatacctgaccaccggcgctagtgacggcatttcgtgtactgtgagacggcgtggctcctcatttgccca

SEQ ID NO: 554019 - DNA, 265 bp, Homo sapiens
ggccatcataacccctgtgatctgcatgtatatcatccatgatgacctgaagcaagtgaagaaccacaagaagaagcaaaataggcagttcctgccttagctgctgtcattccacccttgtgatttgttcctgctccagcctaactgcacaactgtccgcgtgtctttacatctcctggcctgagtctcaggagctcacgaccaagcatgtggtgacccctgtgcctgtgcacatgagaaaaatcccctttaactgtcatttacc

SEQ ID NO: 554020 - DNA, 526 bp, Homo sapiens
caaagactgtgccactgcacttaagcctgggcaacagaacaagaccctgtctcaaaatagatataaatagagaatgagagagcacgagcctgtctgatctggagcttcaactagaagaatttttttgatgttcaaagagttattactggccaaatgcagtggttcacacctgtaatcctagtactttgggaggccaagatgggtggatcgcttgagctcaggagttcaagaccagcctgggcaacatagcgagacccccatctgtgttttttatctactcaaaacaggaaaagaaaagaaaatgggggccaagtgtggcgacttacacctataatctcagcactttgggaggctgaggcaggcagattgcctgaggtcaggagttcgagactagcctggccaacatggtgaaacctcatctctactaaaaatacaaaaacactcccgcagcgttgtggtgtgcacccagtaatccagctacctgggaggctgaggcgggagaatcccttgaatccaaaaggcacaa

SEQ ID NO: 554021 - DNA, 139 bp, Homo sapiens
acgccggacctgttcctgtgacttggtggggccatggaggagaccggaagcgtcatgttcagtgcagagatctacttctctgagatcagctgaccccctccccccaatccctcaaaccttgaggtggaggtgatcttct

SEQ ID NO: 554022 - DNA, 170 bp, Homo sapiens
  misc_feature (134)..(134): n is a, c, g, or t
tcagccgacgcctgaagtaatgttaatagagagacggggagaaaagtgcctgattttaaggatatttcagaggtaagttccataggatttggcgattgactggtcaggaggaatccagatgaaatagaggtganaacaagctagcctcgcggacaacagggcgacacaca

SEQ ID NO: 554023 - DNA, 937 bp, Homo sapiens
  misc_feature (58)..(60): n is a, c, g, or t
  misc_feature (68)..(68): n is a, c, g, or t
  misc_feature (76)..(76): n is a, c, g, or t
  misc_feature (79)..(80): n is a, c, g, or t
  misc_feature (82)..(82): n is a, c, g, or t
  misc_feature (97)..(97): n is a, c, g, or t
  misc_feature (102)..(102): n is a, c, g, or t
  misc_feature (109)..(109): n is a, c, g, or t
  misc_feature (112)..(112): n is a, c, g, or t
  misc_feature (146)..(146): n is a, c, g, or t
  misc_feature (152)..(153): n is a, c, g, or t
  misc_feature (156)..(157): n is a, c, g, or t
  misc_feature (159)..(159): n is a, c, g, or t
  misc_feature (167)..(167): n is a, c, g, or t
  misc_feature (169)..(169): n is a, c, g, or t
  misc_feature (174)..(174): n is a, c, g, or t
  misc_feature (184)..(184): n is a, c, g, or t
  misc_feature (221)..(222): n is a, c, g, or t
  misc_feature (225)..(225): n is a, c, g, or t
  misc_feature (229)..(229): n is a, c, g, or t
  misc_feature (237)..(239): n is a, c, g, or t
  misc_feature (250)..(250): n is a, c, g, or t
  misc_feature (269)..(270): n is a, c, g, or t
  misc_feature (276)..(277): n is a, c, g, or t
  misc_feature (293)..(293): n is a, c, g, or t
  misc_feature (311)..(311): n is a, c, g, or t
  misc_feature (316)..(316): n is a, c, g, or t
  misc_feature (322)..(322): n is a, c, g, or t
  misc_feature (350)..(350): n is a, c, g, or t
  misc_feature (366)..(366): n is a, c, g, or t
  misc_feature (369)..(371): n is a, c, g, or t
  misc_feature (421)..(421): n is a, c, g, or t
  misc_feature (423)..(423): n is a, c, g, or t
  misc_feature (426)..(426): n is a, c, g, or t
  misc_feature (442)..(442): n is a, c, g, or t
  misc_feature (451)..(451): n is a, c, g, or t
  misc_feature (582)..(582): n is a, c, g, or t
  misc_feature (589)..(589): n is a, c, g, or t
  misc_feature (790)..(790): n is a, c, g, or t
  misc_feature (824)..(824): n is a, c, g, or t
  misc_feature (850)..(850): n is a, c, g, or t
  misc_feature (855)..(856): n is a, c, g, or t
  misc_feature (861)..(861): n is a, c, g, or t
  misc_feature (867)..(867): n is a, c, g, or t
  misc_feature (871)..(871): n is a, c, g, or t
  misc_feature (875)..(875): n is a, c, g, or t
  misc_feature (901)..(901): n is a, c, g, or t
cgctccccttgcgaagaactggggcctcccgggaggagagagggctttgacttgaaannngggacgcnaggggcgntcnngnaagtgggggtcctcnggganttggaangcnccggcagggtggtgtccgggcgtcctttccccgnttcttnncanntnggctggtnangtttnctcctgcgcncagtgcggacctgtctcggcgcccgctgccctctcanngcnccangcaggatnnnggcctggtcancgggcagtgtgatgcttcnngaatgnngcggggaaagagaggnaaaaaaagggcttgggcngcgcnggaggnaaaaggcctggctgagttgctcctggtntcccgcctctccaggngannnggaggtagatttccagaggaaggtaacaaaacagggggatgggcacagcnangcnagatggaagagaagancaagaaagnagaggaaatggccctgagcctcacccgagcagtggcgggcggggatgaacaggtggcaatgaagtgtgccatctggctggcagagcaacgggtgcccctgagtgtgcactgaagcctgaggtctccccaangcagganatcaggctgtgggtgagcgtggaggatgctcagatgcacaccgtcaccatctggctcacagtgcgccctgatatgacagtggcgtctctcaaggacatggtttttctggactatggcttcccaccagtcttgcagcagtggggtgattgggcagcggctggcacgagaccaggagacctgcactcccatggggtgcggcanaatgggggaagtgcctacctctatctgctgtcanccgcaaaacatccctcaacctcaggngtgcnngggcngggcantgcngatntggaaaatctggcttcaagactcagntgcacgcggggcctctggagcagcccccaaaccggg

SEQ ID NO: 554024 - DNA, 367 bp, Homo sapiens
  misc_feature (77)..(77): n is a, c, g, or t
tgcacctgtagatcgctctgcacctgtagatcgctctgcacctgtagatcgctctgcacctgtagatcgctctgcanctgtagatcgctctgcacctgtagatcgctccaacacgggaaacctcacccggcccggcacaggacaggcatggcacagatggatcagctcttactcgcattccgtgggtggtggtgccatagccgttcttcagtgggtggcagcgattggtctggttaattccgataacgcaacgcacatctggcatgctcaactagttacgcgcaccccctgagcggtcggcgtcccccaatttcttagcagggcaccagtggcgttcagccacccgagatggagcgatctagaggtg

SEQ ID NO: 554025 - DNA, 127 bp, Homo sapiens
tgcacctgtagatcgctctgcacctgtagatcgctctgcacctgtagatcgctctgcacctgtagatcgctcaatctcggataactagaccacacaggacactctaaggaccaggaggtacgacgtc

SEQ ID NO: 554026 - DNA, 522 bp, Homo sapiens
ggagcttcagcaagctatctcttgccccttatatcgtctctgttgctaataggaggctctggcttacgtcctagtagctctgtgaccttgaattggtggcgcaactagcaagggttgtgctcctcagctttctcagtgcggttgggacgtgttatcactctatctagttccctaagtgtgtggtccttgatggattgtggtagaatgcactgctgtcttggactgtcttgagtattttttgtttttcagagagagcaggagattcggatgggtcagatggctatgggaggtgctatgggcataaacaacagaggtgccatgccccctgctcctgtgccagctggtaccccagctcctccaggacctgccactatgatgccggatggaactttgggattgaccccaccaacaactgaacgctttggtcaggctgctacaatggaaggaattggggcaattggtggaactcctcctgcattcaaccgtgcagctcctggagctgaatttgcccaaacaaagtcg

SEQ ID NO: 554027 - DNA, 329 bp, Homo sapiens
tcacccggacgacgttacccggacacaataacccggagacaataagcccggacgacactaacccggacgaacctaccccacgacgacaatcacccgaacgacaataacccggacgacaataacccgaacgacactaacccggacgacactaacccggacgaccaataacccggacgacaataacccggacacatataaccctggacacaataacccggacgacaataacccggacgacaataacccagacgacaataacccgaacggacaataacccggacggacaataaccctggacgtcaaatcacccgtgacgacaataaccacgg

SEQ ID NO: 554028 - DNA, 272 bp, Homo sapiens
tttgagctcggtaccctgaaagatgaaggctggaatgaggaaaaacttgcaaaaaagaaaactggctgggcgaggtggctcacgcctgtaatcccagcacttttggaggccggcgtggggggggggcggataatcttatgtcgggagttctagaccaccctgaccaacatggagaaaccccctctttactaataaaacaaaattagcctggaatagtgacgcctgcctccaattccatctacttgggaggcttatgggatactctataagat

SEQ ID NO: 554029 - DNA, 458 bp, Homo sapiens
  misc_feature (199)..(199): n is a, c, g, or t
  misc_feature (401)..(401): n is a, c, g, or t
  misc_feature (444)..(444): n is a, c, g, or t
tcaagaccagtctggccaacatggtgaaatgccgtctctactaaaaatacaaaaattagctgggcatgatggcgagtgtctgtaatcccagctactcaggaggctgaggcgggagaatcacttgaacctgggaggcagaggttgcagtgagctgagatcgcgctactgcattccagcctgggcgcccgagatagcgcanttgcactccagcctgggcgacctgaataaaactctgtctcaaaaaaaaacaaaaacggtaagcttttatatttaattaactgatacctttcactgtggcaatctccaagagggaagattttctaaattaggacattggtctttaccttaaaggaaggaaaattggtctatttccagtggcctttttttaggcaagatttggnccaaaacgggtgggtaggtggtggaattttttaactgtcctgnaatactggtaattt

SEQ ID NO: 554030 - DNA, 879 bp, Homo sapiens
ctggtgtgattccgtcctgcgcgttgttctctggagcagcgtctttaatctccgtccgccttctctcctacctaatgtgctgtgccgccacccgatgaaagattcgatggacatggacatgagccccctgaggcccagaactatcttttcggtgtgtgaactaaaggccgacaaagattatcacttaagggtggatactgctgaaactgagcacccagttatcttaaagaacggtcagtaaaggggcttgtgcaccaggatggagttgcacattgttgaagcagaggcaatgaatacgaaggccagtccaaataaaagtaccactgcaatttgaaaattgtcttgtacagccaatgtttccccttgtgggggcttggaaataacaccaccaggtgtctaaggttgacgttgtgcttcagggcccagtgcatattagtgcgcccagcacttagtagctgtggaggaagatgcagagtcagaagcatgacagaggcaggcggatgtgaacttctaagtatatcttgaacgcggtctgcccctgatgtgttcgcagggttccaccagaacacacgtaaaaactttgttgtgatgacgatgatgacggatgatgatgacgaggtgctggttaacgattgcggctgatgatgattttgtgatgaggagtgaaaaaaagcgcagtgagaattaaagagaattccaggcaaatgcaaagtactcgagggaagctcaactttctaaaccggtaaagggagatttagaaaaggaaattctaacaggctttttgaaatagcatgcggtaaaagggttgccagggaccaatgtgaaggcggggcaggaacatcgggggccaaaaaaggacagtttcgtgttggcagggta

SEQ ID NO: 554031 - DNA, 495 bp, Homo sapiens
caatccaatccaggttcccaaatcgcccgcacatccacctcctatatacgtccggacctaaaaaggacgagggtgtgcggagaaacgcgcccgccttttactgggaacgtagaccgaggttaacgaactcgcctctactaacctctcgttaactaaagctcgatcgcgtaaccgcggacgactactggaaggcctaaaggatatgatcttcgacaaaaccaccgtatacctaacctcgccttaaagattgtcttgttagtaagaagaggagaggtaagtgtaaaaagccgatgacgtctctaaagagaaaaagaaagacgacggtggctcgatcatcaagtccgactctcgttatcgagatttccaaggcgacttactcctatttccctcgctatacgacccgaaactaaaaacgatagaagacttacgactctataaaggaaaagggcgccccctcccctcaacccctcgagcactgcccggtagtaccaattt

SEQ ID NO: 554032 - DNA, 410 bp, Homo sapiens
gaagaggaggcgcagatgaacggaaggggcacacgatgggaagggggccctggacaggtctcggctctgcttctgtaaaagcggacggagttttcagagcagaaggattgcagtctgcaggctgggatcccccctaatttgcaagccggcttgctctgtgcccaggccccagcctggtgtcctccctctgccctttcctccgctactctcagttttcctggggttagcaccgtggtgctgggtgcctatgacctgaggcggcgggagaggcagtcccgccagacgttttccatcagcagcatgagcgagaatggctacgacccccagcagaacctgaacgacctgatgctgcttcaggtgagaggatggtgccgcctgtgatcccagcacctcgggaggccgacgttaga

SEQ ID NO: 554033 - DNA, 130 bp, Homo sapiens
  misc_feature (26)..(26): n is a, c, g, or t
aggtgactctaccgatgctttgaatncgacggtttctcacactagatctgtatacagaaaagagagatgggcaacaacaagctaggcctaaattcacgaggaggtgaaaacaacaaagaatgcagagacc

SEQ ID NO: 554034 - DNA, 444 bp, Homo sapiens
agatcctctcctcataccaaaataaacaagtggattaagacttaaatctgaaacctcaaactatgaaactactacaagaaaagactgggagaaatatccaggacattggtctgggcaaaaatttcttgagcataccccacaagcacaggcaaccaaagctaaaatggacaaatgcgatcacatcaggttaaaaagcttctgtgcagcaaaataataatcatcagagtaaacagacaaccaacagatgggagaaaatcatttgcgaaatatgtatcccgacaaagaagtaatatccagaatctacaaggaatgcaaataaatcagcaagaccaaaaagccaataattccatcaaaaagtggccaaggacatgaatagacaattctcaagagaagatatacaaatggccaacaaacatatgagaaaatgctcaatatcactaatta

SEQ ID NO: 554035 - DNA, 112 bp, Homo sapiens
ccgatatcgcgccactgcactccagccagggcgacagagtgagactccgtctcaccaaaacaacaaaagggatcctataggccgggcttgtggccccccgcttgtaccccca

SEQ ID NO: 554036 - DNA, 248 bp, Homo sapiens
catggctgatttcaccaggcctggctgacttctggcacttccagcttgacagctcgatcatgaattcctggggcggcgcggctgatgaacaactgcgggcacgcggtccgaacggacttcggccaggtagccgcgcacgcggtcaccagcgcgcagcatgttgcgcggaaggcccttgtccttcggaatgaagccttcggcgttgccacctgatgtcgacatagatgttgccgcgctcggcggcgctt

SEQ ID NO: 554037 - DNA, 263 bp, Homo sapiens
tgtgtttaccccccccccccccccttttataaaagaatgggggggggggggtttgggggggggggggctttttttttaaaccccccctctttttattcccccggggtggtctgcctggggccgcccctccccgttttttcgccccccataaaaacctggggggccgatcccccctccgttttttagcgtgggcgggggggcggttttttttttcccccgggcaacaattatccccgttcggccttttttggcccccttttaca

SEQ ID NO: 554038 - DNA, 1328 bp, Homo sapiens
  misc_feature (341)..(341): n is a, c, g, or t
  misc_feature (373)..(373): n is a, c, g, or t
  misc_feature (444)..(444): n is a, c, g, or t
  misc_feature (1225)..(1225): n is a, c, g, or t
agcgggttttggtgtgtctactgcgacaatgaacactattctcatgctaatgtcagactgtcgacattccaggacatccatgttcgatcgttactctgaagggactcacagttagtcgtgaagggactcctcagaggaaacccatgtcgtgagtggagctgtcgagagtgcatcatcgaggtgtgagaactctagcctttccttgcgtagagagcaaaacaacaaggaggctccggagggcttgactgaatggtggggtaacagaaaggaactggctaccggttcgcactatttgtagtcctgttcagtcacagaatggagtcaatgggtggttacgaacntgtggtcctatcccggtgtactagagtactgnaggggtctgggtgattccatgcatcatgggtgtctccccactctaacaggctatgcgtatagtccgtaggngaagcacaatggtgtgtctcatgtgctatggacaagtccgtaacattgtcccgtctggggtagattgaaataatatcctcgcagaaggttcgagaatcgaagacccaaggggctgtttgccttgtgctgacgaggctagtcgtcgataagcacccaagccaaagagtcgatattcaattctcgttggaaaggaaaaaattgacactgtgatcgcctatgtatactatcagtttctagggccgggctgtgtgagttatcatgcgggagagcccactgagacacagtttatccaggcgagggatatcatagatgcaatttttcggggactgggctatcattactcgtcgctctgtgaaaatgcaaaggacacatgtttcatagcgagaggcgctgattgaagctaatgatctcggtaaggaaagagttagcccggtggggctacattgaaacacgaaaggagttgccccatgtaatgaccacgtttaaaagaaaacctaacttttgctagaagtaatcttaaaccttgaccttgccacagatgcactataggagacctacttcgaagtcttgtgggaccccttgcgtctcccttttaacaaaaggacattcacattcacgaatacctcctgtcaagaggtttggtagaaattgcccgggtctctaaaaggaggcccttgtgaagtacctctataccaggggggtggtggacccccgggggaacccaagaacttgtttttggcttgccgcaattttataatgaggggggttttcaccatttggnaacagctttggggggggaaaaaccatgttgtggcattataggacttggtttgccccgtggtgttgaaaagtcgtgtttagtccgtgtcccaaagttcccacac

SEQ ID NO: 554039 - DNA, 256 bp, Homo sapiens
caacagagaggagattggaagctgaccttccacccatacgatagaactataaagcagaagagtttagaaagaatgaccatatactaagtgacgaaacctcatactccataagtgataaatagcacaaaggctaaaaaaacttatttttgaccaaaagctctgttgacattctattacacaaacaccgacctatataattaacataatgtaaatggcagacattttcataattcttatgctaataaatcatttccct

SEQ ID NO: 554040 - DNA, 395 bp, Homo sapiens
gataccccctccatagtggtacctccaaagagagtgttacatagcaggacaccaaggtcaacccctcatgcctctcctgcccccttctgtgaggcaaaacaggttacgataaaccaaaagttttcgcctgtaaagtccccccaaagggcctgagcttgcccgtcccaaaaagtttccacaaggaagagttttagagggaaaagggccccccctgtttcccagggttaagcgggacccccccccaacctttggcctatgaccctttttccacaggggacatacccctattggggtcctaaaggtaatttttccccccccccccccccccccccttggctttaattatggtaatgttgggggaaaaaaaaaaaaaaaaatgaatttttgcccccgta

SEQ ID NO: 554041 - DNA, 123 bp, Homo sapiens
ttggcattgtttggtgagttagtcatatcctaaggtcactactggctagctcttctcagcccaggcatattgctcctaattgctcctagtatgagctaaacattccttacacaacagggagca

SEQ ID NO: 554042 - DNA, 254 bp, Homo sapiens
tggcccaaggaaaaacctaggagggtccagcccagcccaggccctttccccctaccctggggcccagattttccatcaggggcggaggaaaaccctaagggcctcaaatgccctttccctgggaaccattttgtcccctttattcctttagggagccctgggccccctctttttgggttttccaaaggaaagggctttcagaaagaagggtttgtaaaatccccaggaaaaaaaactggggttgggccccggga

SEQ ID NO: 554043 - DNA, 964 bp, Homo sapiens
ggccgaacctgatctggatcctatatattgagtctgacgtggttgggagctgtgcagtgcggtccgtgtgtctggtgtgactaatctcgcgcgtacgcatggactggtgatggagcgtgtcctgggttctgtgattgtcaggagctagggccgagaacgtactggacaatgagagtttgaaaacgcttcagcggcctgtagactcaccggcaggtgtgctcgagaggactcgcaacgtaacggcattgcatgcagaatacactaagacccttgcaggaggtacgcgtagcagagcattcaaggacacgtgccgcgacagcggtggccatgtgggtggagttgcactcagcgtgcgccttgaatgacgcgagtcgcattagcgcgcgaatgactactaggatgagaattcgaaagtcactagacgaagtcgatattcgaatagtgcagggcaggtggtacacgatggttagaggttacccacaagtgacgttggactatgggacgatgaactgttgtccatatgaaagtgggaccgatggagaattggacagtatgtggcaggctgtgaacacatgggcagtgggggaatgttggatggagtacgacaatggtgaaagaggattggaaagttccccgaaaggtagtaatgttaaatttgagacttggaatatggttcattaaaacgcccactgacggggcgcgaacacaacgacggtgtcgaacggcacttctgggcaacggttcttcgcaccaagtatacaccacgcaaattctaccaaagcaaaagacacagcggcaccagggaaacggggagccaccacaatggcgcgccagtgcacactataagatgagttggggacagacagccgttggggataccacagattggcgcgagacgcctgggagtcagagaacagcgagaaagaggaccaaaacaaagaggtgacagataggcaatattccc

SEQ ID NO: 554044 - DNA, 770 bp, Homo sapiens
gcagatgcgtatcatatgctggatggtgttacttgagattagaattttgccccgtggtcatatgcacagcacctcatgctagtcctcacggaaactggaataagcctgcgaaaagaaattgtccttgatagcttgtatctgatatcagcactggtattgtagaacttgtgctgattatgaccttgttattgaacgttaactgttccccttgggtatttgtttagataccctgcttcagtatcttcgagcttcaacctttagttcacggtgtggcttggtcacttcggtggctaaggtacgaacgtgcttgtgcgagagcacaaagtctgtgctcttgagttgagtctgtgtggccagcagacctctggatctgtgtccggggtattaacgtgtcaggggctgcagtgttctgcggtagtttctctacaggctggtcagtaaccgagttgttttgtccttgcggggtctgtccaggctctggaaagtccaagcccgtgaggacccatgtttccctctctcttagctgatgtctttcggccaagcacacccgtgggctgttgactttgctttgagttgggagcgggctttgcatttaccgccctgtaaatgtcttccttctttaagttgcatgtgaggtccttcctttgtacgcagtctcgattcttttgcgacctgaccaccttgggtctcttcctggttttgttggaactctggcccagcaccgtcttgtgtaccgaagaatccagtgctgcgtaccgacaatgaaacag

SEQ ID NO: 554045 - DNA, 1106 bp, Homo sapiens
ggaagagcgttagtgtgtgaacagtactgaggtctcctctcctctcctatcctcgctctcgtgacctagctttacccgcccgcctgctcggcgaccagaacaccttccacctatgaccacctcagcaagttcccacgttaacagtaacaggctactcacagcagtgtgttacatgtacctgatcctcaattgggtgagaaatgtcccatggcctatgtatatctcgagtatctgaatgcgtactgcgtagagagcgacttgcagctagtaagaccctcggaacctggagccacctcgcagccctgagtgtgtgcgcacaggagttagcactgcagatgggaatttctcggcactgcgttcatcagtctcactctttcactcacgtcactgtcctgcttccgaactcagttggaacattggttgtcatctgtctgcccatgccattgcacaacctaggtattcgggagagcacgcccctgattcccgtctcacatgtacgccatgagagcaacatgccattgtcgctcgtaccactgtgtgaacaggtcttatcacgccaaagtaaccataatccgacaaatgcgtcccttgcccatgtaagcaaccccataagtactacgaggatgactaccaaccactttggattaataccatctgagagttacgactcgcggaccccacattgtgtactgaatgcccaaaacaccccaagaagtatcacctccccattggtgtatttagctagagaaccccttgggaatgggccaccgaggtaaaggtctcttcagcaccttcattcactacattgagcgggcacaccccgtacatggtgagtctacctgccaacttactcgtgtatgctcctggaagaataccttatcacagaaaagagtgaccttttacctacacagtgcggactaccattacaatacgtgatccccgagttaaatcttaaacttgtatggcgtgtgagatgaggtgccaagcctcaagttaaccatgacagctgacactctcattggagacccgagggggaaacaccattatccagacggaccagaagacctctcactattgtaccgccaggcacgcaccctagtgcggta

SEQ ID NO: 554046 - DNA, 1337 bp, Homo sapiens
ttgtgggtcctccacgggctccccctgggggggataataagcccccgggtggagacacccactgtgggtgtggtgtctaccctgcggggttttttcataaccacccagagaccgtcggggtgggatgctttgttaaaggagatatgctttttgatgggccggctctcctcacactgtttgtcacttgatgtggtcccctctaactgcgtgtgggtgtatattttgtcgctcttgtggtttcttattaggtcgagtaagatacagaaagcgcgtcttcctctttaatatggtccacaccgcggaggagcgttggtggcgttggtccttcccacacagagaaaatatagacagtttggtgtcccccctatcacgcaggtttatatacctcgagaaataaatatttttctcccggcgagccccctctggtagagttgtggattattatggggagatatttcctcttttacgtgggcgcgtgtgtcgcgtcgagcctctttttggcacagcaaaaaagggcgtctcatattgtgagagcggtacacatgtgcacacgtgtttacacacgcgtatagccttgttgacaaaattgtttctcgcgccctcttgagaagattccccaacatgtgtgtgtacacacgcgtttacacacgcacatttttatatagagaatacccgcggcacacatttcttcctcccagcgggagagatatatataatttctttgctcacagggccacattataatgtgtctccagaaatgagggtgggtatatgttctcacacacacatttgttgtgagaggggaaacttgtgcgttgtgctccacgcgcctctctctttgtgtgtgattcacaagctccacagtgggctctctagagactttctttgctcacacactcgagaacactcgttttcgcgagagccacatgttctgagaaaatatagagatagagatagtgggggataacacacctctcgcagatataatttctcggagatataactcgagactaagcacccacattatatgagatcacccacgctagcttgtgtgggcgtggagaatggagaagaaagagatcaccctcgtggtgggttccctctgtgtgttgtgagaagaattaatttccgtctctgaaatttttctggggtgtggttttccacgcgttggcactcttgccctcgagaagttgtatttgaaaccacacatttataatgagaaaatatttaaatatatttgggttccaaaaggcacagagatttatttttttcccccaccttttgttaattttgaaaccttttgaaaaacttattaaaacttattaaagaagcgttta

SEQ ID NO: 554047 - DNA, 644 bp, Homo sapiens
  misc_feature (26)..(26): n is a, c, g, or t
  misc_feature (71)..(72): n is a, c, g, or t
  misc_feature (110)..(110): n is a, c, g, or t
  misc_feature (507)..(507): n is a, c, g, or t
gtgtgagtgcggggcgctttctcgcngatggtcaaggtgccgttgctttcccaggcaacccgcacgccgcnngtggaagccttcgatacggaaggcttcgccattctcangatagcgttcaccgtcgcggggaatcatttcgtccagtaccagcgtcttgctgtcccggtcgatgtccaccaggtagctctggaagcgctggctacgttcgtggaaggtgatgatcagcgggtcatggctttcttgcagcatccgcaacgtgctggcgatttccagaggcgtggtgagcaccttgggtggctgcggtgcatcttccgcattaagggcgttgaacacggttcttccatctccaggcaaaatacgactacacgcaagaaccggcattttgccagtatgtagcgcgccttggataggtcgcgctgtaaaccggcgtcaggcttggctgcgggtgcttggtttgatcaggctcaagaacagtaatgctcatttattctcagcataagcatngcttcagtgatcatgctgttcatggccgtggtggtgtgctttcttcattacaggattgtccttgtattctcactcttgatggttcgcactgtttcagcgaggtgtgccggtggatgcggctctacggggggatcctc

SEQ ID NO: 554048 - DNA, 476 bp, Homo sapiens
  misc_feature (19)..(19): n is a, c, g, or t
  misc_feature (247)..(247): n is a, c, g, or t
cggcagggaaaggcttttnatttttaggccccaaagaatttgctcctgctcctccaaagaaaatggctggggcaggctgttgaggaataattttgcagggaaaagtggaaaatggctgtgaaaaactgggaggaggctggctgtgttttcaggggtttttcctgcacagtcggtaaaaatttaacttctggggaaaggggtggaaaaaagccccccccccagggatcagtagcaaattcaaaaactncagaatcagctccaaagggctttgtttacaaaaaaaaaaaaatttaaaacagccctgggggttccccaactcaaaagctcccaggcaaaatgggattctgggccccccatttttcctaccccatcctcagtggggacttccccaggccccgtttgttttggcatgggggtagttcaaccctggggcccccctcatccttataaataccaactgtttttggtgaggggca

SEQ ID NO: 554049 - DNA, 86 bp, Homo sapiens
aaagagaacaggtagggtcgggctgaggcagtcccacggctcttgccggtgcatcttcatatacgggtgctcataaactttgctcc

SEQ ID NO: 554050 - DNA, 200 bp, Homo sapiens
  misc_feature (48)..(48): n is a, c, g, or t
  misc_feature (54)..(54): n is a, c, g, or t
  misc_feature (132)..(132): n is a, c, g, or t
  misc_feature (180)..(180): n is a, c, g, or t
  misc_feature (189)..(189): n is a, c, g, or t
tcttcattgccgcctccggagtccactgcagaggggcagagtgaatgncggcgnccaaggtggcctccgggacaggtcctggagccctgctggactcagggtggggtggagggctgttgcctgttggacggnccgggggtgggccaaggacgggcaaaggggcttggggagggcacggtncccccaagncccagaaaaaa

SEQ ID NO: 554051 - DNA, 134 bp, Homo sapiens
cggaacaagcgcttctactgagtggcgcctccggcggggcctgtacctgggcccaggagccaatgtgaacttttttttaaccgggattataaaagacaacagatacctattctagtgcttccaaatataaatcc

SEQ ID NO: 554052 - DNA, 614 bp, Homo sapiens
cgagtctaccaccattgttaaatagtacctgcctttctggcgttgcttgtggtctatagtggtactcaagatcatgactaagtttgaggtcgggttcaggtgaaggtctgctgctcagtgtgtcgatccgctagtgttaatcaaagccacatcttctttaagtcatagagtttagaactatgttacgaaagtaccgggcagagcaagtgagacgtatccgtttgaagcatgacgaagtctatgcccgttgtcctttcagatggagattattgtgtttaagtacatgcacagtttcgagggtctgggaggcgtaatggtaaaatagatggtctttcatctgcctcttcttccccccatcgcttactctccctccccagtggcagctacttaggatagtttactgtttctcctgcgtttttcactggggccatatgtagggtcttcttgggctggtcagagagtggtcttccagtaaagtttggcactgaggaaagagtgtaggttccagtgttcatggaggaatctggctggggttccagcatcctctgtgtagagtcatgtcggagaaggttcaccatacagacttacctgtttacctactcttccaagaacaa

SEQ ID NO: 554053 - DNA, 324 bp, Homo sapiens
aactacctatcctcgggggaaaagctgagtgagtgaaaaagcaaaaaatggctaagctgccatactccaacgcagactaatcaaagcatgtaaatattatttaaaatatccgtctaggctgagtgcggtggctcacacctcgttatctcagcactttgggaggccgatgtgggcggatcacctgaggtcaagagttcgagaccagcctggccaacatggcgaaacctcgtctctactaaaaatacaaaaattagctgcgtgtggtggcggacacctgtaatcccagctatttgggaggcaggagaattgcttgaacctgcgagg

SEQ ID NO: 554054 - DNA, 422 bp, Homo sapiens
tagctgctccctcttcagatgccctgaagaatcttcagaatcacactcttactgtccctttatatatttcttagtccttcttaatgaaggagaaacaatgttagaattttgtggtacgattataggtttctgaacatgaattcaacaattcagtcttactaccttaatgcttgcagggccttcggagagaactctctcaatcaatgaagaagaaccggagggaggtttcagcaagtggaacgctacaaataaggaccctgaagaattatttaaacaagaggtactgtgtttccatccatgacgtagggtttcagcaggtcctccgagcttgccctgagcttgagggaggatctagtcagacacgtgtcaggtgcacatcttggcaggtgaatacttaaattaataaagtgcccctcaggctg

SEQ ID NO: 554055 - DNA, 152 bp, Homo sapiens
ctcgtctgctgatactatcctgacagatctctcacacgaatcgtcatgaaatcatcatttcttgccctgttcggcgctcggcttaaagttctggaacttggccatcttcttctcatcatagtacaagaacttgtggtgatcttctgcacgat

SEQ ID NO: 554056 - DNA, 259 bp, Homo sapiens
  misc_feature (9)..(9): n is a, c, g, or t
  misc_feature (27)..(27): n is a, c, g, or t
  misc_feature (35)..(35): n is a, c, g, or t
  misc_feature (75)..(75): n is a, c, g, or t
  misc_feature (219)..(219): n is a, c, g, or t
  misc_feature (226)..(226): n is a, c, g, or t
  misc_feature (235)..(235): n is a, c, g, or t
  misc_feature (251)..(251): n is a, c, g, or t
  misc_feature (254)..(254): n is a, c, g, or t
agaagaagncgctggcgtcagccggcnaggaaatnaggccgttgcgcatcaccttttcgtcaaggatgtccaagncggcctcgatgacttggccggcgctgccagttgaaactggccgttgtcgtcaatggtgaaaaggtcgatgtgcgaagcagtcatgtcatggactccaggaagtgggcgggattgcctacttcctctggatcggttcgcagcgcnagcggtncaagggtgnagatagccagcggggnggnaaggg

SEQ ID NO: 554057 - DNA, 2007 bp, Homo sapiens
cgcgttgcttgcgctgcgtgcgtggttgtgatcaaatagagtcgacgacacgttgggttgggggtgttgtttgtccttggtgtcggtcgtgtcggcagtgttgtgtcggtggtgtgttgtgtttgcgctcgggtcggcgcgcgtgcgacggtagggcggtgagatcgtgtgcgtgctttcccgccgttcttggggatgacgattgtgggtggtggtcctactgtggggggagggcgcccccccgtttgggggggttttttgtgatatgtgggggccgaggggttgatatgctgtgggtggtcgatggatgggagtacggttggtgggataatataggtggggcaggtgatagcgtgtgtggggttgagtagtacgggctgttgtggaggagatgaggcgtctgccggtgtgtctttttgcgggtgctatcaccggggcgcgtctttgtgattgcgtttggggtggggttgccctacttgtgcgtgtggttctgctgctggttgcgtgatggttgggctgctcgagcgggggcttgtgggttttgtgtgcgctcgcgcctgcttgtaggggggtcgaattggttgttgagttatgttgtttgtgtatgtagaaaggtggcgctccgcgctcctggtggtgcttattgttgtgaggtgcccggctgcgctggcctcgttgtggtctccgtggtgtcgcctgggtgaggattgtttgttatttgcgtggggtggtcgacacctccgtcttcgggggtgtggttagtagtgaggggggtggctccttccgccggcgcgcgcgccgcaccctccgcgcagtggggggcggcgagggggtctcctcatcccgccgctgctgctaggttgggggtgttactactccgcgaccgcgggctgttgttgctccgcacagcacagcgtcgcctctcgtgctctcgcctgctggcgcctcgtcgtgtgggggaatattgttgtgcggcctactatcaacacgaggcggggagaggagatgttatattaggaaggctgcgctcgctcgtctgcacgtaggtggtggtctgtcgcacgagggagcccccctcgtggcaggggtggtttgttggtttgttgtggtcgtggatagtaggagtggcggcgtgtgtagttagaagatgtgggggggatgttgttgttgtgtgttttggttgattgtcgtgtgtgtaggatcgtgtacttccacgcgggggtggtagtgatagtgatgtggtgtgggtggggaaaacacatcagcagtgtggtggtgtgttgggtggggttccaccgcccccccacgtcggtgttgttgtatatggtggagtcgtgcgctggcgcgtgtggaggccccacacagcactcaccgcgcgcctcgtgctgggtggtcgcgcctcgttgtcgtggtgtgggtgttctcgaatacttgttttgtgtgagagtacgtgatgactacttctgtgtgtgtgtggttgagaccacacactgctggtctcgactgattagatatagtttgtgctcacaagagagagagatatatagataaacaccgctgtgtgatgatgaataattagacgcacacagaaatagtgtcgactcacacacactagatatacacacactgtgtgtgtgtttgtctctgagagctctgttgtctcgcacgcggacgctgtgtgtgtgtgttggttgattgagtacatgtatgacgcgggtgacagcagacaagagtgagagtgtgggggtggtggtagatgaagagagagagggtgtgttaatagagacccccaagagatgtataaagaggtgtgttgttgtgtgtgttgtctccctgttgttggtggttgagtaaaggtgctgtttgttatattttttgtggcgccgtggtgtgtagagagaagagcgggcggacacacacaagaggggccccaccacagtagtcacatcacgagatatgttgatgttgtgtgtggtgagagagtgggtttgcacccaaaaaataaaa

SEQ ID NO: 554058 - DNA, 907 bp, Homo sapiens
  misc_feature (3)..(3): n is a, c, g, or t
tantcttgatttgtagagaaactgaaacagagaggcggtcttcgcacagcaaggagcgataacctgtgcgacgacgtgtatggcgccttttgtcatatatagtccgccgcacaattgtgatcctatcccggaccacaagacgtcgtgttcacaagggaacccttctgggcccgcatggggaaattgtacgcgccggggcaatttccgcccagccctttgctcttgatacgtacaacgcccgggctaaaaatattcacgacagcacgtctagccccccgtggtgcataaaatagacgcacagggttcccgtggtcttccccaaggacccccggctcaagtctgctggccgtatggtctcgaaaaacgtcttttagaaccaaaaagacttgggcgagggggatgccccgctgctcgcccccatatttggttggcttctcccgcgtgtacgcctgtgctttaccttccccccttacccgcatgagggagtccctctccaggaagagcatccccattaatttgagggacaaaaatccgcatgcgacggtcccaactggtcccctttaaagaacattttctgtaaaagcaatgggcacagcaagacgatgttgttcaaagctcactctatatgggcgcccgcgggatatgtaaattttgaaaaacggagtcccgcgcaaactcaactggggtgcccttgaggcagaaatcatcaccctatgccggatggaaaaccacatacgcaacactaaatttgggaagatgaccctggaacaatagtggtttccccagggggccaaagaggggacacactaaatcatttcatatcaaaggcatcattggtataaaagcccacctagcaaaattcctttttcatcccccataggggataaaccaaagcccaacaaaaaca

SEQ ID NO: 554059 - DNA, 1431 bp, Homo sapiens
ctctcctgtctccccacctccacagagacaatgaccatgtttgaaaatgtcacccgggccctggccagacagctaaaccctcgaggggacctgacaccacttgacagcctcatcgacttcaagcgcttccatcccttctgcctggtgctgaggaagaggaagagcacgctcttctggggggcccggtacgtccgcaccgactacacgctgctggatgtgcttgagcccggcagctcaccttcagacccaacagacactgggaattttggctttaagaatatgctggacacccgagtggagggagatgtggatgtaccaaagacggtgaaggtgaagggaacggcagggctctcgcagaacagcactctggaggtccagacactcagtgtggctcccaaggccctggagaccgtgcaggagaggaggaagctggcagcagaccacccattcctgaaggagatgcaagatcaaggggagaacctgtatgtggtgatggaggtggtggagacggtgcaggaggtcacactggagcgagccggcaaggcagaggcctgcttctccctccccttctttctccccattggggctacaggatccataaatcacaaggaggctgtaaccatccccaagggctgcgtcctggcctttcgagtgagacagctgatggtcaaaggcaaagatgagtgggatattccacatatctgcaatgataacatgcaaaccttccctcctggaggtaagccaggagaagggaagttcatattgatccaggcatctgatgttggggagatgcacgaaggcttcaggacactaaaagaagaagttcagagagagacccaacaagtggagaagctgagccgagtagggcaaagctccctgctcagctccctcagcaaacttctagggaagaaaaaggagctacaagaccttgagctcgcacttgaaggggctctagacaagggacatgaagtgaccctggaggcactcccaaaagatgtcctgctatcaaaggaggccgtgggcgccatcctctatttcgttggagccctaacagagctaagtgaagcccaacagaagctgctggtgaaatccatggagaaaaagatcctacccgtgcagctaaagctggtgaggggcacgatggaacagaacttcctgctggataaagagggtgttttccccctgcaacctgagctgctctcctcccttggggacgaggagctgaccctcacggaggctctagtcgggctgagtggcctggaagtgcagagatcgggcccccaatatatgtgggacccagacaccctccctcgcctctgtgctctttatgcaggcctctctctccttcagcagcttaccaaggcctcctaatttgccttttacgtctgcttcatgactccctaatgccttcccaacctcgtggtgctgtgt

SEQ ID NO: 554060 - DNA, 1065 bp, Homo sapiens
  misc_feature (814)..(814): n is a, c, g, or t
cgtggtcctcgatctcggggatttttcacgccgcctcgaaccgctttcccattaatcggttgttgaggaagctttgtgctgctccccccccccgattatattttttaatctcgcggcagtttttcgtgggacagcagaagagcggggtcctcattttgtgtttgttgattggagccctggttgagtggtctcctctcttgaagatttgttttcctcctgggggtagttggcgacccaccgccgggggttaatatgttggcaccagtgcccccgttggcctgtgtgctccccccactagaagtttttttttgtccccgcgaactatgcttcctgggggcctaccttcttattaacttgggtcgccctgcctgagcaccttttcttctccccggttgataccaccgcgcggcgccccctctgtttttgatctcctgatgaaatatcctctctgttgcacctctcgccgccttccttcattcttttttcgaatgattagtggtcgcctctcttgttgcttcataatattgagtgcgccccgcgcgcctcctctttatcattcatccacgcgcgcccgctgttcttgtgggggaccctcctctaataggggaaataaatcaccaacccggcgtgtgttcttgtggctccgatatatattgttggaaccctcctctgcttaatatatagcagatagattatcacgccactactatttaatatctcctccgtccattagtagtgcgagtattattgcaagcaaccactatacaaccatgtgtccacaaaagcactccgggcgtgttttgtttttggtcgntccagcagaagtagatattaacagccactccgtcctccctctcgtttggtgccaccacatagaattattgacacacacacaactaaagtcgggggagggggtaaaaactcccccctcccgaaaaacaacacctttttataaaaaatttgtgggatttttaaatgggtttttttgacacacaatctctccccccgcggaaatttttttaaatgtgtggtttctctcaaaaaagggtttttggaattttttta

SEQ ID NO: 554061 - DNA, 981 bp, Homo sapiens
  misc_feature (622)..(622): n is a, c, g, or t
  misc_feature (633)..(633): n is a, c, g, or t
  misc_feature (649)..(649): n is a, c, g, or t
atcgccgaggaccgagtgcgccccgggagcacttagagctgtctgtccattgggcagatccggctgtccagtcacaacaactccagccaaggtccaagactcaactcaatggaatgaatgatatcagccgcgcatcggtcgtcgacaaggagttccggcgatgtgcaaggcacggcttcggctgggtcgacgaatgcctcctccggggtccgtcttccccacgtccgatcagtggggcggggtccataggcgttctcaatgggccgtgagttgagtggggcagtggggtgccaaaaggggatttcctaatggtagcggcagaactagatagtactcatgaagctatttgaagaaaggcacatccttcatttcacatgataagtatcccctctatatcgatgccaatctggtcacttcagtttcatcacgaaacatggcgtagtcggacactggtggggaccaacattctgggccaacgctaggaccttttcttgtccaattgtacgctcgccagttgttgtgattccttcgcatgtgaagtctacccatcggtcgacttgcttagacgtcgaagttggctccatgctaggatatcccacaatggtccggaagccgtgaggancgtgatcgtcnccagcatttcaatgtnttctgcagtaaccttgtacgagaagcatctccgaagtaaggttgaccggtaagtgtatcgcgaggtcgtggctgttaaatcccgttgttgacggcactcttagagtgcgataacgccaggtggagcatccgtcgaaggacatggttcctgagttgagtcagtgcatcgatcaaccacttggaggacccagtcttagcgaagccaagtatggccacttacctcaaaatgtgcgatccctgaagtactggaagctggttgtggcctggtaccttgacttgagtaccttccttgaagtactctgtcaacgaatcgcggtaaaaggtttttccagc

SEQ ID NO: 554062 - DNA, 826 bp, Homo sapiens
  misc_feature (510)..(510): n is a, c, g, or t
agcgggtcgaggagaacgcagatggtgtggacgctgtgtatgaaatgtctttcctccaggacccaagattgtcttcaccatggggactgtgtgctccatcggttgcacggagccctggtggggctgctagccttgagcattcgctggccttgcgcatactatcatgacgtgatttactgttccaagtccccagacagcggccctggcagtacctggaggatatagacctgaagaacactggaagaaggaaccaaggactttcagatgcaaagagagcctatgcggaatatgacaactggacgtcgtgtgagttagtcggccgtgtcgcgaggccgaggctggtttcactctggtcgcagagtgaacgctgctggactctgtcctccctgtaaaagcatgttggacccagattgggcgtccccctctatgcagctgtgtataccggagcacatcaggactgacagtgaaggatttgccatggccttacttgtcagcacggacgaagatctntcctaggtatgtaagaaggcaaagaatgtactatggtccacaaaggcggcagatgatgtttatgggatttatccgctctgggagtgctggtaccaacttcttccgagcctggcacacggaggcttctctgggaaagcctgggaaggcacaaggcttcgtccttgaggggaggtgcacgtggctgggatcaggactagcagggcattcttcttgagctaccgaagaagactgacctttggagactaaggtagacctacttccttgtcctggaagctgctaagatcgatcagaccagagagtttggcctcacgtagaa

SEQ ID NO: 554063 - DNA, 111 bp, Homo sapiens
tatttggggtactctcagatactatttggccaaccatgccatctaaactgcctaactgtctctcgtttcaaggacctatcaagatggaggccccttcaccaagggttggtg

SEQ ID NO: 554064 - DNA, 151 bp, Homo sapiens
tgcgtcatcactcacgacatctattatccatccactcagacatactatccatctatccacccatccacttatctatctatccatccatccatccatgcatcaatccatccatctacctactcatccacctacccatctacctacttatccg

SEQ ID NO: 554065 - DNA, 125 bp, Homo sapiens
cgagatcgacctttcaaagagctctaaagaaagtactaaatattgaacgcaaagctgtatcaggcactacaaaacttgatatcacagaccgtacaattaagcaacacataacagtttggaaataa

SEQ ID NO: 554066 - DNA, 197 bp, Homo sapiens
  misc_feature (113)..(113): n is a, c, g, or t
tcggatagggccaaatggatgtggggtagaagaagaaaacttcgaaggcttaactctgaaacatcacacatctaagattcaagagttgccgacctacctcaggttgaaacttntggcttccggggggaagctctgagctcacttagtgcactgaggtgataaaatatttttatccattcacttggccccttatcgag

SEQ ID NO: 554067 - DNA, 371 bp, Homo sapiens
agtgcacactctacactatcgagtacgccgtggagcgcgtacctcgcccgggagctgccacaaaagagcaagatcctgtccacggcaagaacagaaagtaggtatgcgtatcatagagtcgggccacgcctatggtgggctggatagctggagcacacggaggccgtgatgaaggtactaccataaacccctcggacaaacgccgccctgggctatgctacagatagctccccagagaccagcacctctatcaccaaggagcagctataaagagcggatgtgcatagccctgggaggacgggcctcggaagcactgtccttcaacgaggtcacttctggggcacaggacgacctgaggaaggtcacccgca

SEQ ID NO: 554068 - DNA, 259 bp, Homo sapiens
gcatgagtccaccgtgccttccacctcaggtaattctgtgcccttaagggctccattgggaatcactcatccttgggtagtattaaaattcatctgttccacagtgagcaggtctatatagacctatccccaaagtcttagggagctgagaggctgaagacagaggctggcaaatccagttggtcagaaagaaacatttaatagggactgaggaacagaagccatttatcgggcagctgcaagatgatgggttcctgca

SEQ ID NO: 554069 - DNA, 922 bp, Homo sapiens
  misc_feature (104)..(104): n is a, c, g, or t
  misc_feature (517)..(517): n is a, c, g, or t
  misc_feature (522)..(522): n is a, c, g, or t
  misc_feature (579)..(579): n is a, c, g, or t
  misc_feature (625)..(625): n is a, c, g, or t
  misc_feature (722)..(723): n is a, c, g, or t
  misc_feature (814)..(815): n is a, c, g, or t
  misc_feature (834)..(834): n is a, c, g, or t
  misc_feature (842)..(842): n is a, c, g, or t
  misc_feature (891)..(892): n is a, c, g, or t
  misc_feature (907)..(908): n is a, c, g, or t
gtgcacatgctgatgctgctcactattttgacacagaggtacaggtgcatccctgtttcattctaagcaaatgaccctgacagtaaatgatcaacaactggatntgcatcctggtcacactctcaatctattatgttgatgaaaacgcacctgaattctcgatgcagggtctaacagctggtgttatcgctgttattgtggttgtggtgatagcagatgttgctggaattgctgtctgcgttatttccagaaagaagagaatggcaaagtatgagaaggctgagataaaggagatgggtgagatgcatagggaactccatgcataactatataatttgaagattatagaagaagggaaatagcaaatggacacaaattacaaatgtgtgtgcgtgggacgaagacatctttgaaggtcatgagtttgttagtttaacatcatatatttgtaatagtgaaacctgtactcaaaatataagcaggcttgaaactggctcttaccaattcttgacatttngaccnacaagtgttctctatataatgcacgattctaatggtaaaatcccagcaacttggacnatcccatcggttaaaatctcattctagtgtgtcaaccattcaaatncgtggtgccattacaaatatagccttcccacaggtaaaactcctgaaaaacctgcatcttggtgatctgaaacgcgtcgcccttttcatatttaccnnttgatgttctgtgtgacaatacactactctctctttactgcacgctaatagaaaaataaacaccattttttaacacctgaaaataaaaaannaacaaagggcgggggccgnctctatgnagtattcccctccgaggggccccccaacgctctacggcggtacccagcnnttttcttggtacaannagtggggtccccta

SEQ ID NO: 554070 - DNA, 270 bp, Homo sapiens
cttcacagatgagtcttccttgttcagtcaagataaatgttaagggccatgtatggtggcacacctgtattttcagtagagacagggtttcgccatgttggtcaggcgggtctcgaactcctgatctcaggtgatccgcctgcctcggccttccaaagtgctgggattacaggcgtgagccaccacgcccagccataaattttgtatttttagtagagacagggtttcgtcacgttggccgggctggtctcgaactcccgacctcaggtg

SEQ ID NO: 554071 - DNA, 242 bp, Homo sapiens
  misc_feature (55)..(55): n is a, c, g, or t
  misc_feature (143)..(143): n is a, c, g, or t
ctcttatcaattatacgggccgaactcgcccgaagcgcagaaatttattgggaanctcatgcctttttctggatagaactacttcgatgcagaaaagaattctatcagcttgtgtggtcagctcttcccttcatcacatactntggagaacaaaggacaccgttacccatgctttttcaacacattacagtgtgggaggtacaataagaactgtcacaagttcctaattcagtccaacagga

SEQ ID NO: 554072 - DNA, 288 bp, Homo sapiens
ttcgacggtgtctgggtgacactggggtctgcagtatctagctacgtggagagaaggatgggagggtaactcagttcggcttggtctcttgcgacagtgtgtgccctgatcaagtcctccctgcagggtggaacggtgccgttcgaataacatatataggacaaaagaggccgagaacgggttccctggggcctgagcagcgttagtgtcagatggggggtgtctagtgctagtggatgtgcagaatggccaggtggctaatgtaacgaggacgactgatggggctag

SEQ ID NO: 554073 - DNA, 979 bp, Homo sapiens
ggagaaacgcaggcaaggctggggtcctcagaatggtcgggcacaggttaggtggctgatagaggttgtggtggatgcgctgccagtattgtagatcaaggttatgaagccccatggatgtggggggaagcggctgcggcacgtggatgcggaggaggataatgtcgcatgataccgaccatacgtaagaacctacgctgagactatactgactaggcccccggaattatgtctgccttggtagagcactgatataatgagacaatgaattagaaatatgacatggtcgtgctcggatgaccaaatgaatggctcaggtatgaaaggatatggagcttccagtccccgtcagtctggttccagaacaaatgacagttacctgccatggtcgagagaactgtgtcaagcaaattggctaatggcgccgagtgtagagcatcgaagccggttaggcatattgagaaatcgtggaaactgttggcacagtccttggatgtactgcctggaaggtactacaaggagaattctgaggtgcataatgcattgagctcgcaacaggaaggaagcattcagaagtgaggaaaacagtgttccatgattgacgacctggggtgcagtatagagacattgcaactcgcagcgtggtatctaaattgcgagatagggacgtccaaaatgggtatccctgttccgtactgatgtcatgaagatgtgcggactatggtccgctacgaaaacgtgatttatcaatgacgcaagcacgtggagaggaaccaaccaagacatcggcagacattgagagacaattaccgggtgaggacaagtgtggcttccccacgtctacttatgcctgggggccggcatccccgccatgtggtttgtaatataaagggctcgcgggaatcacgtgtccaaagaaagtgccgggtctccacaaataccgtccagcgccacaggacataagagaaatgccccaaag

SEQ ID NO: 554074 - DNA, 218 bp, Homo sapiens
  misc_feature (141)..(141): n is a, c, g, or t
cagaagcgagatgacgagggaacgtcatcgtttggaagcgtcggaataaggcggacacgttgtgccgccgctgtggctctaagggctaccaccttcagaagtcgacctgtggcaatgtggctaccctgccaagcgcaagangaagtataactcggagtcgccaaggctaaaaagacgaaataccaccggaacttggtcgattgaggcacctaaaaatt

SEQ ID NO: 554075 - DNA, 854 bp, Homo sapiens
agtataggtagaaatagaatctagggatctgattctcatattagaggataatatctccccaaaggggaaagaataaagattatttcttggggtagataacattgataaatcattgttgagaatgatataatatgaatttccttgaaaatcttggcatgtctgagagtcttgtaggctgaggtttttaggtattttttgccgcaaaaaatatataaagttaggggagctagctttaaaagttaaacaacaaaaatattaatattaattgtgcaaaatgacctgagttcatttgcgatttttgatagtataatcgaattgtacgacttgagtactctgaaacataagaaggccaccacactgcacttcatagagttcacacacatgcattctacatattgatatgaccagaacttagtttcacatttacgataaagtataaaataagaatgtcgtagtcaaatttttcagtaagcccaagctattgaagatagtcagtgtatacagtgggatgattaagttcatatgacaggatagagtctcagagtcaagtattataatattcaccccaggtgaaggtcgcttgtgactggctaagatgtgagctggaaatgtatatggctcagtgttggtatgtttccctacgtgtatgtttgccatcacaggacttctgtctcacaattctgtaccttgtaagagctcaggtaggtttatgtacggcctaaggcaagtaggcgaagagaaacctgtgagggttcacgatacaggtgctccaggtctctgtgttcaagtgggcccaggcggttttgtcaccttgagggttgaaacactgcgagggaagtttccacaataccgga

SEQ ID NO: 554076 - DNA, 381 bp, Homo sapiens
agttggatattgcgtatcaaagaagataataaacatgtgactgacgtattggtaatatttgtggagtttgaaaggtgtgaacaattagcttagtattctgcatcagtaagattctatgaaactgaaattactgttttaattttttatttttaaagtatgatttcagaactatgggatttataataattaaaatattgactatgaagaaatcatttttcagctttatttatgggatggggatgcaaaagcttattaaataagtctgcatggccaaaaaatacaagcaatagaatctgccattaagcaatagaatctgccattccttagtttaatgttggaagttaatttgtctgtgcttttttttttgaccacatcttcgtc

SEQ ID NO: 554077 - DNA, 326 bp, Homo sapiens
ctctgatgcagtgcaaaggaggtagtgaggcgaattcttgggctgagggatgcttactatgaagacgaggacttttcggggggggcgaacgagtgacatgggatgacatcacagtggtcggcaccctgttgtggctctataagcaggttctagagctagcactatttctcacttagtcctggttggacacaggttccctggaacagtgctgtcgtggttatcttctcgacgtgtctttgtttctgaacttgaaacgcttttgagttttttatggtttttgttcttcctcattagttagagtcccttgcagatagttgtaaatggcg

SEQ ID NO: 554078 - DNA, 123 bp, Homo sapiens
tcgatctagaggatccttgggagccttaaccctacctggagggtcttttaccatttgaggcaatgagatatgtatgtagaggcttatgacttgtctttttttttttcatttggagacagagtc

SEQ ID NO: 554079 - DNA, 708 bp, Homo sapiens
  misc_feature (19)..(19): n is a, c, g, or t
  misc_feature (396)..(396): n is a, c, g, or t
gctaggtacgaggctgggngttaatcggccgagggaagatctggcatgtctgggggctcacattctcacctagcaacaactggctggagctgggcaccagctctgcctttagaaggggtgtccacttcaccaggtcaccacagcccacactacgccctatcacttcccacaatgaggctaagtgtttgtttttaacttggatcaatgcccctgcaggttgcatttattgtaatgaaaaagaaagactgggattaatctctaatcaggtgagtagaccatgagaccaatgtgtgctcacattaccctttttcttttttttctttttctttttctttttttttttaatgtgagacaggatctcattctgtggcctaggctggagtgcaggggcgcaantctcggctcacgtcaacctcggcctccggggcctcaagcaatttctccacacctatcaaagaccctttacccccaaaatataaggcgtggagatcacgggcacaaaccaccagtgcccagcataatttggtatttttggtagagacagggtttcaccagtgttgcccaggcgggtctcaacctccggggctcaagcaatcctccggccctcggcctcccaaagtgcggggattacagatgtgagccacgcatccagacccaaccctcatttataccaattacctgtgcccagtaactggtggactttggctc

SEQ ID NO: 554080 - DNA, 229 bp, Homo sapiens
ctactaaagtttacctcaaaatcattgatagtcaaaaagagtatacagcaaatgcaaactatacctatgtaggtacatgacactggtctcactcaaaaataactgaaacagaactcaaagaattctcttatgggaaaattctacatctaaggccgggcacgatggcccacacctgtaatcccagcactttgggaggcttaggcggcataatggcatgaacctgggagtt

SEQ ID NO: 554081 - DNA, 252 bp, Homo sapiens
cgtgccggacacttcagctgcccggctgcgttttggagacccacagcccatctgggcacggaccgtcttaccttggcttccttcggctgaacagagctcactgcatgccacgtggagcggcggcacgactgcacttgtatgctggattgggtctctggtatcacaactctggaagctcagcaggcatgctggtaccacccctatcgaccattgggcacctctgctcgtccgacgcggaccgggtaccgatcc

SEQ ID NO: 554082 - DNA, 422 bp, Homo sapiens
gggactgaaaacccatggaaagggcgtgcaatacaggtaggaacagtcttagcaggagccaaaataaatgtggacatacctgttgcagagatcaaagagttaaagacttgaatagcacacatatatgaaaaagaacagttgagcaagaagatatctagtggggatacattcaagtgcagagagtgaaaagtgatgtggagaccagtgatttccagtcatggaaagctactaatctctcttatgaagtgcaatataagagcagagaacgaggccagaaatttggagatacagagtaacagaacagaagtctaacaatatgaaatatatcagtctatatctcgcgtctctctctctctactctctatctctctcgctctctctctctctctctctctctctctctctctctctctctctctctc

SEQ ID NO: 554083 - DNA, 146 bp, Homo sapiens
cacgagggggatagggagcttgattcatcgcctctcacccctccccacatttccacgtgctatgccctcagctcaagaatcgtagagtagttgtctcaatctctggtactctcctgcatcaattatgactgtgtaactatgatatg

SEQ ID NO: 554084 - DNA, 425 bp, Homo sapiens
tctgtcccaaagtggtacaaccggtaggaccagagcttgaggactggggttcactaagtgggtggaaccggagggttttacgaccctaatgtccgaaactcggtgacacgggttggtgttcgtgcattctaagacttcctcctaggttgtaaatgtacttaaaaattcggtcttaacccgaaggttctctaaaacaggaaggactccgaaccaggaccgatgaaggggtcgagtgtctctcaccacacacggagacggaggtggtaatcctcgtcccaaacccttcgtgggtaccatcgttctcgtctcacgaccccggttttcggaaccagactttgggtcacggctgtaggggtcgactcaccggaacccattcagtgcgttgttgtggaaacaagtgtctttacctgtaggagcaagaatga

SEQ ID NO: 554085 - DNA, 594 bp, Homo sapiens
tgccaggcatggttgaagttgctggtaataaagcagtttttaaaaggcccttattctctggaagttaacattctaggggggtaaggggaatcaaaggatgttggtaggagaagtgagagaggaaggctattttttaatagcttggcctacgaaggcctctttaattttgggacattggagcaaagacctgagggtattaccatcattggctccaaactgaccaaactgtcctaattactaataggtttcaggagatgtgttacagggctaatctagctattcgacagcatgccaatctcttcataaatcttttcccaaggatgctgggttctggaatgccagacctacaatctttggatgacattgcatacattcgaaggaccttagccttagatctgagcaggaggctttgaagtatttcatgaaccaaatgattgatgcacatcatgggggctggccaccaacttgagaaattgaaggctaactctggattccacactgaactgttaatactctcagcaggcaaagaccgatggctaggaattgcacatccatgacagctttagatttacagcaggaccagttactatattt

SEQ ID NO: 554086 - DNA, 361 bp, Homo sapiens
tgcagttgattgccggagttccgttcgaagtcagcgaagctgtctgatcgtagagtacggtgcctgtgccgcgattgctgtgagcgatgccgtggttggcgagcgagatgcggcctcccgccgagtggcgcatctgcgaatagttgcttgcggttttttccgattgtgggtgtcggtgaatctgtgcgatttttgctttagagccgccggtctgtggtccatagtgagtcttggccgcattggcgttgttggcgttcgagtctgaggcagcgagtgccatcagaactgcggcggagagtaaagagagcttgctgtagatcctgctttcgatcatgtgatccccatggaaggcggggtaccg

SEQ ID NO: 554087 - DNA, 564 bp, Homo sapiens
  misc_feature (70)..(70): n is a, c, g, or t
  misc_feature (119)..(119): n is a, c, g, or t
  misc_feature (172)..(172): n is a, c, g, or t
  misc_feature (178)..(178): n is a, c, g, or t
  misc_feature (181)..(181): n is a, c, g, or t
  misc_feature (190)..(190): n is a, c, g, or t
  misc_feature (203)..(203): n is a, c, g, or t
  misc_feature (209)..(209): n is a, c, g, or t
  misc_feature (226)..(226): n is a, c, g, or t
  misc_feature (228)..(228): n is a, c, g, or t
  misc_feature (230)..(230): n is a, c, g, or t
  misc_feature (237)..(237): n is a, c, g, or t
  misc_feature (240)..(240): n is a, c, g, or t
  misc_feature (243)..(243): n is a, c, g, or t
  misc_feature (246)..(246): n is a, c, g, or t
  misc_feature (250)..(250): n is a, c, g, or t
  misc_feature (253)..(253): n is a, c, g, or t
  misc_feature (258)..(258): n is a, c, g, or t
  misc_feature (265)..(265): n is a, c, g, or t
  misc_feature (269)..(269): n is a, c, g, or t
  misc_feature (283)..(283): n is a, c, g, or t
  misc_feature (302)..(302): n is a, c, g, or t
  misc_feature (313)..(313): n is a, c, g, or t
  misc_feature (317)..(317): n is a, c, g, or t
  misc_feature (329)..(330): n is a, c, g, or t
  misc_feature (338)..(338): n is a, c, g, or t
  misc_feature (340)..(340): n is a, c, g, or t
  misc_feature (344)..(344): n is a, c, g, or t
  misc_feature (358)..(358): n is a, c, g, or t
  misc_feature (360)..(361): n is a, c, g, or t
  misc_feature (370)..(370): n is a, c, g, or t
  misc_feature (374)..(374): n is a, c, g, or t
  misc_feature (421)..(421): n is a, c, g, or t
  misc_feature (446)..(446): n is a, c, g, or t
  misc_feature (453)..(453): n is a, c, g, or t
  misc_feature (462)..(462): n is a, c, g, or t
  misc_feature (472)..(472): n is a, c, g, or t
  misc_feature (484)..(484): n is a, c, g, or t
  misc_feature (490)..(490): n is a, c, g, or t
  misc_feature (500)..(500): n is a, c, g, or t
  misc_feature (563)..(563): n is a, c, g, or t
cgccgccgccgctgccgccgtgctctcgctttgcccgccgccgcctaaggggggctggggccggggccanccatcactgccgttgccgggatgccgcgggtgtacatcggccgcctganctaccaggcccgggagcgcgatgtggagcgcttctttaagggctactgggaanatcctngangtggatctnaagaacggatatngttttntggagtttgattatctncntnatgtcanatnatnctntttnttntctgnatgtgcnaatnccttttttgttatntatttattttttatcattnccgcggcccantgcnatattgcatttnntgttcttntnctcntttttttttttatntnntattttttntttntttatatttccctccttttctcacattttttttttttttttttgtantttttcaattcgtttcatctttttntacctanttttttatnttctttttgnttttttattttntttttnattttctctnaagggacgcaaaaatgaaggggtgattgaatttgtatcttattctgatatgaaaagagctttng

SEQ ID NO: 554088 - DNA, 323 bp, Homo sapiens
  misc_feature (285)..(285): n is a, c, g, or t
  misc_feature (300)..(300): n is a, c, g, or t
  misc_feature (314)..(314): n is a, c, g, or t
gtctagttaaaaataattcaacttatcgtggaaatgctataaattgctgtgaagtgagttgctggctatggcttgtcagagcaaatatattgtacaaatcttaggggagaattagtgcttatgcattcaaatcaaatcatcttgcagcacactgagaaaaaggttagatttttaagataatttcaaagtcatgaaaagagcaaatatgctccacaaagagcctagcaaccctcaatgacccaattccccttttatatagtttggtatctgaattagaatcccagnatctacaaatcctcngggttgtgggtgcngcattttta

SEQ ID NO: 554089 - DNA, 80 bp, Homo sapiens
tcaagcttctaacgatgtacggggacatgttataaaagaggtttagtcaaaaagaccaaagcccatgactctaagaaaaa

SEQ ID NO: 554090 - DNA, 1589 bp, Homo sapiens
  misc_feature (1)..(2): n is a, c, g, or t
  misc_feature (4)..(4): n is a, c, g, or t
  misc_feature (1116)..(1116): n is a, c, g, or t
nnantatgcggcatgctggtgtgtgatagctttcgctgtgctttgtggtcagttcttctgttcgtgcggtgcacgtgctcgtgctcggtagcgtctggtcttgtcgtcttcgttggatgttgtaggttcagcagtcgtgttgagaacgcgggtgggtcattttctcggcgccccggtggtgaagacgcgtggttgcctcgcgccgtttttttcgttatattgtctggccttttggtggtttcgccacgggtgttgttgcccgctttgttctgtcccgccgatgtgtgtaggtggcgcggcgtcatcattgtgtctctctagggtggtgtttcgccgggttggtgtttcgctactctggttgtgcaccaccaggggctctgtccaccgggccaccatgtgtttctgggggaactgtgggtcttgttcttagtgtctgttgtgtcctccctcggttgttgtttctcactcccttttgataccctttttgtgggcccactcctggggcccacatgttcctgcatgtgcctctcctctcgtttgtgtgtgccataggcacgtgagtgtgtcggccccgtctttcttctgtcggtaattattttgtgtggggagagggaccgtgcgtgagtgttgatgcacacggggggtttgttgttttggtttgtagtgattatgttggtgtgtccattgttggtcgttttgttttctgttccccacgcggtagtggggtgttaatacccccctcgtgcgctttttttggtgggtgtttcgcccgtctcaggctctcttgtgtgtttttgcgccccactgttgtcgccccctttgttcgcacgttttttcgccccccggcgttttttttgccgctcgtgcgtcaggttttcctctctctgtttgttttcgcgcgggtgttttcgcgcccgcttgagtagtatctactcctctctctgtgtgagctacttgtttttctctcttgttcttctctctccgtgtgatctctcccccgctctcccgcggtgttttgtgtgtgctgtgtgagccgctctgtgtgtgcccccgcccctgctctcttgtgtgtgagattctccagcagagcgtgtgtgtttgtgtgaccgtggggtntttttgaggagggcgagagagggccgacatagatctgtgttgtagagacacacacaggttgtggggacacactcgtgagagagggtgagagggcgcgcacacacacagagaagcgcgctctcacacgtgtgtgccccacgctctctcttggtgcgctctcacagcagagagtctctctttgcctccacacacccctcttctctcacctgccgcgggccccccgtgggcatgtattcccctctctgtgatcctctcttcgccctcttccccagcaccctctcatgggccccgtgcggagaggtgtccccgaggaggagagaggggcccctttcacccctcggtgaattctctcgcgggtgtttttccctcttcccttttttttggttttttttttgtgaaattaaaaaaagactttttcctcccccgaaataataatattttttccccaaaaaatggggccctcgccccccgga

SEQ ID NO: 554091 - DNA, 752 bp, Homo sapiens
ttcatggaactcagccctgtggcaagtgcttagggcccttaagggaagaaaatcgtccccagaaggcatccatcatgttcgctgtaatggtcgttcgtgcagcttcctttccctaggagctttccctgtgttgctaagagctgaaaatggcatcttcgtgatcaccgacagtgagcttggctcgcctcggccggcccgggagtgcgactcgttacgaacagtgtgtgactcttgaacctggagttcatcagattacgtcagcagcttcccatctggttgctttcctgagtcagctacgtgtcacacttgtcaaggctgttttaccccaaagagtcagacaggacgtttctgatgcatggttgttccctcctccccccaattcccccccccgattgaccttatggtcccaggacacacttgagaaggtgagctttgtattcctagtggtgtacatttaattttacaaaggtggcaggtatcatgctgtgtgccggaacggcggatgggctactgtggcaggccttcttttcttccaatggtacttagacgtgttcgtatgccgggtacacctataatggtctgccgatgggttcttaggaataactttgatagttcatttacacaatgtctcaaaccatggggaggcaggagaagacgcgcgctgggccgggggcccattggcccacaacgggcaccaatgtggggcacagtcgggccagggtaaacccggggccacagggggaaatataagc

SEQ ID NO: 554092 - DNA, 1238 bp, Homo sapiens
gtgtctccgtcgcaggctccggcgggggcgcgaggaggtcgcccggcgcgtccactgtcgggtcggcgagccacgggggccgctgcagcaccatggacgaccaccgtcagacactcagcgcgggccggtgtacatcggtgagctcccgacaggacttcctccgcatcacgcccagacatgcagcagcggcaaggtccagctgtgacgcccagtgccgggcccagcagcctgcagtacggaggcgcagtgcggccaccgtggggacccgactggacacattcacggtggtaaccacaggcacaagtttgagccaaagaattaccggcatggacccgacattgggaacacccttactggccgtcgactggcgccttgtgcgcctaccggcaggttggtcacgaagaacctaccccgactgggtgaccaaccaaaagtggtcggaccaaagtaaattccccccggctgtgacacatacaacgggttacaagtccaaccgtggccaccaggtggcacccacaccatgtgcgtgtgtgacacaatcatttttgccttaagtgtctccggaactgaacttcgttatccggaaattgcacggccacgacagaccccgtttcatggtcccacttgtggacacggaacacctgggacaatatgtggcccagtggagcaccctccacgacagtacagccccaaattcacgcacgtgacaagtagatagcccccattggaacggggacaacagacggcaccaaacaaggggatatggagggaccacgaggcgaccacacaacagggagtgggagataacaccaagggacacccctggcggaaccccagagcgcaacaaggaggcccacaggagcagcggcgcgaaccacaggacaccaaaacagcgggcagcaatgcgcgggcgccgccagattgggaacgtacaaaagaggcaccaacatcgaggcaaaaccaacaatgagggattacacactggatacaaccagggcgacggtgacagcacaggagcgccaagtcaccaccagaagagggacaagcaggcgagccgccaaaatgggggcgaccagggaacaagaaagggacccacaaagcgccacaccagagaaaggcggacacccgggatcatggggagagaaccgcgcagtgggagaaatcatagagcccccacaaagcaaagcgaaaagggaactaggagacaacaccaacaacacaagagcaacacacagggg

SEQ ID NO: 554093 - DNA, 280 bp, Homo sapiens
aggtctctggctttaacgcagagcttatattcagcttattagttttaaaagtgtgtaaaataatgcacgtatttggccgggcgcggtggctcacgcctgtaatcccaacactttgggaggccaaggcgggcggatcacgaggtcaggagatcgagaccatcctgactaacacggtgaaaccccgtctctactaaaaattcaaaaattagctgagcacggttgcaggcagctgtaatcccagctactcgggaggctgaggcaggagaacgcgtcaaaatcg

SEQ ID NO: 554094 - DNA, 101 bp, Homo sapiens
agtcacacttgctgaggtgactgatttatatgggcaagagaagtacactctggcctctcagaattcacttgaggttcacattaaatacatgtcacacctgc

SEQ ID NO: 554095 - DNA, 433 bp, Homo sapiens
  misc_feature (40)..(40): n is a, c, g, or t
agggtttctccccggggttttccattcttccccccccttncgggcaagggggtgtttttttggcccccaaaaccacggggcttttcaaaattttgttaccccccccccccctttcccacaatggggggggggggtgtccggtggggggttttttttacccaggcttttttttttacccccccattcccccgggacccccccccccctttttttttccccctttaaaacccccggggcccttcccccccccgggttttttctttggcccggggggggtttccttttttcccccgggaaccctttttcccctttggccttttttggggccccctttaaccccgttttttccaaaaaacccgggggggcccggcccggattttcccggttttttttccccccccggcccccgggggggggggggggggggggggga

SEQ ID NO: 554096 - DNA, 403 bp, Homo sapiens
  misc_feature (105)..(105): n is a, c, g, or t
tcgttttggggtctttgctttggtccgatcagaagggatcacagaggaaagctgtgtttggtggctcacgcatgtgaatcgtcagcacgtgtgggaggccaaggngggcagatcacgaggtcaggagatcgagaccatcctggctaacacggtgaaacgcctgctctacttaaaaagcaaaaaattggccgggcatggtggcacgcacctgtagtcacagttacttgggaggctgaggcaggagaatcacccgaaccagagaggcggaggttgcagtgagccaaaatcgcgccattgcactccaggctggatgacagagcgagacttcgtctcaaaaaaaagaaaacaaaactagatgtttttaatcagcagggtctcataaggcatgcgaaattgcttaagg

SEQ ID NO: 554097 - DNA, 195 bp, Homo sapiens
ctgtctcagcactccccgtttatactggggtggcacacaggcggctgaagactcctgtgggtttactccctgtcgtggtgtctgccttggtcctcggcgccgaggcgtgcaaacacagacgtcctatggagatcttattgcagcctgctgctgctccatggatcttgcggagtgcggggtgtggttgcctttggg

SEQ ID NO: 554098 - DNA, 236 bp, Homo sapiens
gaaaaaaaaaaaaaagcccgaaaaaaaaaaaaaaaacccctgttttggggaaagggtcgggtcccgtttagccttttggtcttaaggaaaaaaaaaacccccaaagggtttccccttttttttaaaaaggaagaatgggggaaactattttttccccctaaaaattatgggaccccctgatttttgttttttgtcaaggcaaagccttttttttaaaaagttatgccttccgttta

SEQ ID NO: 554099 - DNA, 130 bp, Homo sapiens
tcaaaattttccgggaaaaccctccccccctgggtggggttaaccccccaaaaaaatgcccatttggcccttttttaaagaaatttggagttgtgtttaatctactctgcttttcttcctttttaaaaaa

SEQ ID NO: 554100 - DNA, 418 bp, Homo sapiens
cccaaagggccaaaagagccccccccgcgggtaccccccaaaagtcctttccccccctaaacaagggttagttcataaagggcccccaggttctgtttgggtctttgggtcccagggtctgtttcaacaccccgggggaacccaaatgctcccccctgaaaaaaggccccggtagttaaaacctgaggtttcaggcaaacagccaccaaggaccaccaccctcttgttaacagttggccaaatgaccttgtaaagtagaccctctagccccagtaaagcgttcgggtaactccaggcctggccaacatgtaaacggcattttcataaaacccctaagttggcccccccagttaaacggcttttaaaatcctgacttgcaaataagccaaaaaatgttgttttaatttgttccataccc

SEQ ID NO: 554101 - DNA, 251 bp, Homo sapiens
gcagctcctgcagctaaaataacagcgtgaagttgctcaatttgagaatccatttcctgtgcttacaacagatgcagggcttgttcaatgtatcataggccgtggaaatatcggaaagaactgaccaggtcaaagcaacaccaaactgatgtcattgagtggagtttgcctttttaagagacataaaaatataaacaccagattccttaatttatagaaatctaaacctaaatatgattccatatatctga

SEQ ID NO: 554102 - DNA, 143 bp, Homo sapiens
tacataacacatgctggatctcaggcagatatttctgggctttaattacttgtactatctagcctaagtggtgtgggcaagaccggtcctcagttaacccacctgcaaaactgggaagatcaggcaacgtatctcactacgaa

SEQ ID NO: 554103 - DNA, 918 bp, Homo sapiens
gatatgtagcgaggaggaacgcgctagggcatagcacctggctaggcagctggaagagaaagaccgagtgcttaaagaagtcaggatgcattctacaaagatacagactggttagactggaggagaggagctcagagttctacagagtcacacactgaacaatatctagaaagctgctgaggaggtgtgatagctatagttcatgcgatatgagtctcatccagtctgtgctgatctgcaggccaaaattcttcatgatgttaccgtgagaacacccaccagtaccctcaaatgctccggctctggcctacccaggtatatgcacgtgtgtcgaatcgatgcccaaacagagcatgcttgagaagggaggatcaataactttgcaggaatgagcaaaagaccatcaagggttaattccagagatggaagccattttttatatcctagtgagaaaacaaggcagtttgaagagaagaccactaatgagaagatcgactaaagagagaccatcaagaatggattcagcagaattcatttcacgtttttgaacatgagcagttttgaagggccaaagtgctgatcagggatcagtcgttaaaggacactcgttgaagtattagtaaaccctcttatgatgattaacagagaagggcagtcctcttcaaccttttggtactttctatttcaaagttggaatgatcattaaaatgtttctcttctgaacgagtcccatcatttggtgaacctccatcctaacaaaagtagaggggttgggggataaatatggagtgggggagagaaaggggaaaacttgattcgaggagggcggggtgggaaagccgaaaacgatctggggcggatggtggaagaatggtaggggggaaatggagaggggaccttgaaatgtagagaataaaa

SEQ ID NO: 554104 - DNA, 356 bp, Homo sapiens
  misc_feature (210)..(210): n is a, c, g, or t
ttcgatctaaggatcccttggggctcattcaggcagggggttgaagcgtccttggtagtcggcgtgggtgggagagttgactaccaccttctggtgagggatcacgggcagaggggtctggactgggaggtgctgtcgtggagatgggaaggggacgctttgatttctgcagggtgaggctcaagttgtagctggcagacttgatctggntctgggcttccaggtgggtcatggggtctgtgtggacgccgtcaatggccaccacgaggtcacccgggctgagctgggactgggctgccttgctgccgggtgtgatccgggagatagtgaggggcatgttgaagtccttgccccct

SEQ ID NO: 554105 - DNA, 154 bp, Homo sapiens
ggaggggatgacgtaggtatgtcaaaaggtgagtaaaagaaagcccaggaaagggaaacaagacggaaccattgtacaagagcacttcccagaactgagaaccctgcataacaatccaggataaaaaagacgaaattaaatatggactctaaga

SEQ ID NO: 554106 - DNA, 1855 bp, Homo sapiens
gagtaatagagggaaataaatgaaaatagctttcagtctcaattcctcaatagatacacacttcgtcgacaacagacacacactgcttgtaaacacgtgacactgctcaagttgcccgtagcatatatagatgaagacatacacatcattcgcagaacaccactctaagagctagaccaccacgcatcgggatacagcacatatagcacaacgagcgacacccagtcagaaggcgccactccaacctcaccacgccgcgaacagctgacaatcaaacacacaacaaccacaatgacaacacgctacccacaacgaacagcctcacacccgacacgcacagaccagatgacacgaacgacaaacgaacacacgacagcgaacccacccacacgaccaggacacacacaatccacacagcaccacacaccagagagaacaaccgacaagagacacacaaaacagcaagagagcaaaagaagaacacaaacgcaccagactaaaaaaagcaacaacaagcaacgcaggcaacacaaacaacacaagacacgaaccacaccaggcgacacacgacacacacaacacaaaacaacacaaggcgacgcaaacaacaacaacccaaacaaaaagaagcagagaaccacaaggacaaagcgacacgaagaaaccaccaaagaccagaacaccacgaccacgacgaacccacagcaacgagccgcagagaagaccacaacacaagcccacaacaagaagcagacgaagcaagcagacgacacacaccagacacgcggacagcaaacaacgaaaaccgaaaacgaggcataagcacagcgctaaacaacgacgggcaaccgatcaacgaacgacgagcccacacacaacaaccgcgaataaagaggacagaaggcaaacaaaaccgccccacacccaccaccgcagtgcgaaaaaccacactcacaccagccagacacaacacagccccggaacaccgacacacacacaacacacacaaacaaccaaagaaaccgaaccaacacagaagccaacaacacgacacaagcacgcacgcgcgtacaaccacacgggacacaacaacgccggcacacgacgtaaacatacacacataccatatccaaccctctcacacacgactaacccatcaacaacaccccaccctctccaccacaacatactcaacaaaaccaccacaacaacatacgtcctcgacctacccatactaactatcaccctacaaacccacaacaacccacacgcccaccacacaaagataacccccactcaaaccttacaacaacacacacaacacacaaccaacacataatcaaaccacatcaaataacaataagaatcaccaccaaccacacaccaaacacaccaccaccaggcagcatgcggagggagctaagctagcggcacgagcaaactaactaactcagccacagagaagcaagagagccagaaggagtgtgaagaaagtctagagacgatgacgtcacgcacaagaccaacgactcaagtatccaccgacaacagcagacatataagctaagccaagaacgaggctcaggcacaccacgaacaggagtcaaagcacaacacacgaccaccacacagccacaacacagcagatcaccacccaaagcgcacgcactgacgaactagcaagcacgccagcaacaccgacagcgcagccaccgcctaggagacgcgaagccaggcacataggacgcgatagcagacacagtacgtcgaaagcaagcataccaacgacacacacacaccgacgcactcaggtaacacacaagggggacaagaacacagaaagaccaagaagaca

SEQ ID NO: 554107 - DNA, 689 bp, Homo sapiens
gatttcttgagcaatacaggtgctaggagaatctttgatcctggtcctgactcagagctcctaaatcccttggaatttcttgggtgataggagagtctcttttgttccttggtgggaccctggatagcctcaggatggggggctggttgccagggggaaccaaccatgtgatcagagggttgctgtcagccccaacccccatgccgcctccagggagggagagagcctgaaaatagagcgaataaaccaatggtcgatgatttaatcaatcgcaactgtgtaatggtgcttccacaaaaacctaaaacaggccaggtatgatggctcacgcctgtaatcccagcattttgggaggcccaggtgggtggatcgcttgagcctaagagtttgagactagcttgggcaacatggtaaaaccctgtcactacacaaaatacaaaaaaaaaaaaaaaagaaaaaaaaagagaaacaaaaaaagaaaaaaaaaaaaaaaaaaaagccgggggggccttaataggggggggcgacaaaaagaagggtgaacaaaaggggaagcacaggagacataagagggagccgaacacaacaatctggagagacacgagggaaaaacacgggagacaaccacaaaaagagagggcacaaaaggcgaaacagagcgagacacgcgaaaaaaaggaacgaaaagg

SEQ ID NO: 554108 - DNA, 139 bp, Homo sapiens
cagctgcccatgacggcactctgtccagaccttccttcctgggcatggagtcctgtggcatccacgaaactaccttcaactccatcatgaacgtgtgcacgtggacatccgtgatagacctcgtacgccaaccacacgt

SEQ ID NO: 554109 - DNA, 1612 bp, Homo sapiens
  misc_feature (655)..(656): n is a, c, g, or t
  misc_feature (660)..(661): n is a, c, g, or t
  misc_feature (677)..(677): n is a, c, g, or t
  misc_feature (682)..(682): n is a, c, g, or t
  misc_feature (688)..(688): n is a, c, g, or t
  misc_feature (705)..(705): n is a, c, g, or t
  misc_feature (708)..(709): n is a, c, g, or t
  misc_feature (728)..(728): n is a, c, g, or t
  misc_feature (735)..(735): n is a, c, g, or t
  misc_feature (763)..(763): n is a, c, g, or t
  misc_feature (768)..(768): n is a, c, g, or t
  misc_feature (1044)..(1044): n is a, c, g, or t
  misc_feature (1092)..(1092): n is a, c, g, or t
  misc_feature (1096)..(1096): n is a, c, g, or t
  misc_feature (1131)..(1131): n is a, c, g, or t
  misc_feature (1152)..(1152): n is a, c, g, or t
ggcagtgctgcccagaagcagaaaatttccttcttggagaataacctggagcagctcaccaaagttcacaagcagctggtccgggacaacgcagacctgcgctgtgaactgcccaagctggagaagcggctgcgtgccacggcggacgcgtcaaggctctggagagcgcgctgaaggaggccaaggagaacgccatgcgggaccgtaagcgctaccagcaggaggtggatcgtatcaaggaggccgtgcgggccaagaacatggccagaagggcccattcagcccagatcgccaagcccatccgccccggacactacccggcctcatctccaacggccgtccatgccattcgagggggaggaggcagctcttcaaattccactcactaccagaaataaatacaaaatatgactccacgtagcatgtcaaggactacattaatcaccaattcctttatttttccccccctacagtttccattttttttttatacttgcttactccagccatctgcagtacaccagtttcaggtcttttgagctgtgtagagtttctgtgtgtacagatgtgtgctcggacttttctctttttgagaaatctgaaggagatggttgcagaagatccacttactactgagaaccattaccaccgactnngccnncggggtgttgggtggnttctnggtggntcctggagcctctctgngcnntgcactgtccatctgtacnccctaangtgcattccctagaggggaacaaccaantgccntggaggcagatgatcatggtctgcctcaactgtctggtttcctgtaaaataaacacattgttttatatttttagggaacaaaaagtgctgctatagggttcaaagttttccttctgaacacttttccgaaacaaattaccccaaagacacattttgaatatcctggtcacatctttggatctgtaaaatataccttttagtatggcacctgttaaaatgcaaagcaaatttctttggggcagaaaaacaatctgacagtagcagtgtagaatttgntcattcaaatacatctgtgtaaatgcaaaaagtcataaaattcacctncganctgcttgcttttgaacctgcagcaactagtcttanccggcccggtttgaacatcgntctttagaagtgctgaaaatctgcaaagttggataagtggaaatgtggctgcccctctcctcactacttcctctctgatcgttctgaagcttgcattgggaatggctgctttctctaccattttcagcttgagtgggtattgctgaagaaatccaacatcattccagcagttgaaaaaggaagccttcgggagaaagtgcttgtcaaaattttgttctttgtgctagagtatgagtaagttgccatgaataagttattattttaacccataattggcgactgtttatatgaattctttcttttgcaccaaataggtttcatcttcttaggcacaatttagtatcacatagatggatattttacattcagttatgcttatcaaatacatgaattaaagcttgatcacccttactttccagtgtgttaataagagatcaatttcaagtgtgtttcgtgctgg

SEQ ID NO: 554110 - DNA, 175 bp, Homo sapiens
acggctagcttgttcttgtgtgaaattgtatccagcaatggatacctaatggacctgccatgaggaacagtgcataccagcccagatacaatgcttttcccacagtcttcacaacccgcagaccaggagattccctcgggtgcctacaccaccagggtacaagcacaaaactggg

SEQ ID NO: 554111 - DNA, 521 bp, Homo sapiens
ggatttcttaacactcatctacatgggtgaatgtggaaaaattaatattaagtgtggatgtcagtcagggtttaccatcttcaatccaaggggacggaaataagggaaatttcatagaacattttaagaagttggtgacaatacactccggatgtgactacggatcatggatgaacttactagtctggggtgtacacctctattttctggccttcctggaatacccggtgagctctctacctaatctggtacactttactggcatagttggtacatttcacagcccatcgtgactaaaggtgcggaatcagcacattaagtccaacaaacaaggtccaaccagtaactactactattcaaggcccatattcataacaaaggccccggcaccactaggatcctcccggaatcaacccggacccctctccttcataaattattcagcttcctacactattaaggttaccacaacaaccaccccatcatactctttcacccacagcaccaatcctacctccatc

SEQ ID NO: 554112 - DNA, 132 bp, Homo sapiens
agcagtactgcgtgtcgttatgcaactcacgcaggcgaagacagtactatctgcggctcacacgttgcttccacactatctgactcggacgtccttccggtgtcactgaggtggtcgtgaagctctttgact

SEQ ID NO: 554113 - DNA, 131 bp, Homo sapiens
acaggaggacaggatgggaggcatgggagggtttgcgcaggctctgatgttgactgaatctaagtataacaaggcatcagtggctcttggtggacaactggctgtagagggacagaacggagtgggaggtg

SEQ ID NO: 554114 - DNA, 123 bp, Homo sapiens
tgaggctgaagatatgtgcaggcatgggtgacgatgacgagcatgaacagggaggtgagcatgccccatccagatgccgggggagaagaagctggcacagtcgcatggctgtaggagaactgc

SEQ ID NO: 554115 - DNA, 120 bp, Homo sapiens
gcgccccgcgttgccgggagcctgctctctggcttctcactatcagccagtttgaaaggcagtgggcaaaacgtactgttgtaggtcagcccagaccagaaactgaaaagagatcatggg

SEQ ID NO: 554116 - DNA, 132 bp, Homo sapiens
aaataagctgagtagggtggtggggccctgaagtaaggaggttaaggtgggaggatcacttgagcttgggaggtcgaagttgcagtgttcccccccgggcatttcagcctggatgacaaagcccctgtttca

SEQ ID NO: 554117 - DNA, 924 bp, Homo sapiens
gtcccccagtctgaggaatttagatgctccattgaccctgtgggatgcccaggattgaaggatgtcctcctgacagcattttgcctaccgacataggtctccaggaggctgatcacagggaaccacagacaaggcactaagcatgccttcatgaacgcggcctcaggcctgtgtccacggcctgtgtttgcgtccaaggtgtacacagcactgggagtcctgtcaccgtaagatgggcaaatccacagagacgcacgtgttgtactatgcgttgcacgccctgaaaggagggatcagcctgtggggtcctccaccttctggaggcctctaggctctatcaggctaacgtggggggacacaacagcagatgttggagagtcgtggagctgcttagttgagggccgttgattgtcccattgcagttccgaaaggcccctgcaagtctgctcagttcgaggtagcaattacctacgtgtgcaatcgagcctgaaccttatgccgtcatccccattcagttgtggctactcagatgccagaccaagcatatacatagcaagcaggtgcctacatgacgggagagggcaggagacgctgcgagagcattaatcgttggaccatgctgggccctgttgctggatagctcggaggcaaagcttcgtccgccaacgcccagtctccctccaagtgcccctgtatgcctgaggtgttccggacggcaagcggtagcactgatccaggcaggcagagcccaagatgccttgactctatgtgaggaagttgctcagccgcacattcatctctggtaccaaggatgtcgcgagtgtgggaagatgccagataaggaaccaaggaactgccatactgccactcttgggtctctggcaaccaactgcttcaggccaggcctgggtcaacttgggtgac

SEQ ID NO: 554118 - DNA, 150 bp, Homo sapiens
  misc_feature (92)..(92): n is a, c, g, or t
gcggatcttgcgcggatctcgcggcggacgtcggacgtgcagtggagttgatgggcgtcacttcaacggtagcagttctagcgagtcagganacagaaactccgtgagcaaagggaaagtcgctgatttgatttcagtacgatacagacg

SEQ ID NO: 554119 - DNA, 108 bp, Homo sapiens
gcaggcctagcagttgtgtaaggccgcggccatagtgcaggatatctagcttgtgtccatgacatcccttaagataaaccacgatcacgaactagaatacgctaccta

SEQ ID NO: 554120 - DNA, 584 bp, Homo sapiens
ttgccaaagccaggactggctgtgggtgaagagttgatcctgcctgctgctaaggacatttgtcatgcgcttttaggagaggctgtggttcaaaaggtggcacatgttgctctttcggccagcaccgtaactaggcagattgatgaaacagcagcagatattgaggcacaattgttagagaggattaacgagtcactctggtactcaatccaggttgacgagtctaccgatgttgacaacaagacaacaatgcttgttcttctgtgacatatttttcagggggatgttcatgaggatatgttatgtgtgctttagttgccaaccaacaccacggctgctatactagtctttgaattattacatatcagggaaactgaactgtatggtaacgtggtgttatctgcatggatggagcggctgccgtgactggacagctttctggtttcactactcaggtcaaagaggtcacttctaaatgtgagtctatgcagtatgtcatccatagagaagtgctggctagccaaaaagtgtcactgaacttaacaactttattcaggtgcgatgggaccccataggcgaatcca

SEQ ID NO: 554121 - DNA, 507 bp, Homo sapiens
cggctggtgaaggggcccgcctcaggaactaaaccgcctgggttcccatcctggctttggggcttgctaaatatgtgcccttgagcaaattccccccctttaacaaaagtttttttccttggaaaaaacatccgtcagggttttttggggggcccccttggatccccgggtttttcatttattgggcccccccaacatgcaaggccctgttctaggggtgaaaagcaaaaaaaggcaaaaaaaagatccccaaatcccctttgtgttctggttaacaaagctggcccagggggcccttggagggataacccccctgcagctgggggggggggttgacttatgggcccccccagccagggtcaggccaagggcccccttttttttcccccccctgattttttggtttttccctgaagttttcctgaaaaggaaaggggcctggtgccccttttggcccctttatttgctcccaatgtttataaaaaaaaaggccccccggagggggga

SEQ ID NO: 554122 - DNA, 1246 bp, Homo sapiens
  misc_feature (366)..(366): n is a, c, g, or t
  misc_feature (373)..(373): n is a, c, g, or t
  misc_feature (400)..(400): n is a, c, g, or t
  misc_feature (412)..(412): n is a, c, g, or t
  misc_feature (434)..(434): n is a, c, g, or t
  misc_feature (983)..(983): n is a, c, g, or t
gctcaatctccaattactggcatgaactgaacccacaatcagtcgcttaattaaagtctatgccctaactatagcaatgggactcaatcgctataataccgtctagacacttcaacaccctatatcaacctggctcccaagtctaactgtgcatctggccagcctctcagtagtctaacatggcacgaggaaaactcgcccgctggcagagttatccgtacagactagagttagctagcagcaaatagtcgtccacgatattcacactaataagaatacaataaaactaccatccgggacattattgagtaacacatgaacgtagaggaacgaaatcaccatctggcggttgtttatatggatgtngtttaanacagtttgcactatgttgacattcaanatcttcatagcnccattgtatgtagtcgatacanctcggcctcaagcatggaagtgggcttgcgggtgcgaaacgcgcttgggcaaacgttattttaccatcaatattcgatatattctacccaacaaagcatcctatttgggagaaactactttgaatttaccccctcagtattaattctttggcgctcagacaaatgctacgcccgttggatagttgctctataagagactagcttatgtgttcttaacgacgccatccagcatatattgtggctgcatgacacggacgtcgttgtgatgcgcccagaactcgagccgcttagagcgcatttcgttagagtttacacgaatccctatctaatcttactaacccgagttatcggtgtaacacgcgcgcattgccactttttgtaaggtaatgtccctttcgttcagttatctaccctagccccagtccatcagagttcgtgaaggcttttgagtacactctagagccataaggtggtcccccttaagtaaactccagggttgctcccgctctgatgagtggtagtaaacgcgccgtcttttacacaagctgnacagcttactgtaacttcttaccatccacgctcctctcctactcgctgctgcgtatgctgactctagtgtgcggggccggtgtcccggaccccgggtttgcgcgagtctacctctgcctgagcagtggaactgactacccagcctgggagctggctgttaaaccttattcattctcttcttgacaccttacaggtggttctctatcttacggggccatcatttcctcgccatgacttgtttcatttaacccctgggcatgatc

SEQ ID NO: 554123 - DNA, 616 bp, Homo sapiens
tgcagaagtgtcatccgcaggatttttataagtgatgagaaattagaaataacctaaatgcctcccagtatggaaagatgttaaaattagagcctattcaaaaagtgaagtgttctgcacctgctgaaatgaatatgccgaatctaagcacagcatgcaatgaacaggtacactgcacacgacagcgtgggccgccacatatgtacatgttaaacccacacgcgtgtggtaaaggtgcagctacacggctctgcagacgacaacgtgggccgccacgtatgtacacgttaaacccacacacgtgtggtaaaggtgcagctacacggctctgcagaccacagcatgggaggccacgtatgtgcacgttaaacccacacgcatgtggtaaaggtgcagctacacggctctgcagaccacagcatgggaggccacgtatgtagacgttaaattcacatgcgtgtggtaaaggtgcggctacacggctctgcagaccacagcatgggaggccacatatgtgcatgttaaactcacacgcgtgtggtaaaggtgcagctacacggctctgcagaccacagcgtgggaggccacgtatgtgcctgttaaacccacacgcgtg

SEQ ID NO: 554124 - DNA, 238 bp, Homo sapiens
ccacaaccaggaacactagtcccagccttggagagagcaggggtaccaaggatcttcctccagtgaaggaccctggagccctatccagggaagggctgctggccccactgggtctgcttgccattctggacctttgcaattaccaacactttattgactttcccttgccaaaacttgggaattagcccaagaaggaaaatctgacgaataaagacccccgctgccccataaaaaaaaa

SEQ ID NO: 554125 - DNA, 138 bp, Homo sapiens
tcggctatccttcctagtgtaaggacactagacactggatttagagcccaccctaacacagtatgacctcatttgaactaattccatctacaaagaccctgtttccaaagtaaggtcacattctgaggtcccagtgga

SEQ ID NO: 554126 - DNA, 165 bp, Homo sapiens
cagtcacttttcctgatggggacaggcgctggatctgggatcagcaggtggacgtttatcagctcatggcaaaactggcagcaggcgctggaatccaactgccaagcactgctgctgctgctgctgccgccgccgccgcccaggctgctgccttgcaactgaatg

SEQ ID NO: 554127 - DNA, 419 bp, Homo sapiens
ttcacgatggcctgcggggtggtgctgcggttggcctcggtgtcgatgggtcccggcgcgatcgcgttgatgcggatgttgcgccaccccagctcacgggacagttgctgcgtcagaccgttgatcccgaccttcgccaaaccgtagaagttggcgtaaacccatgctgccgtagacgactggttgacgatcgacccgccgccgcgctcctccatgtgcggaaaaaccgcgcgggtacacaccagcgcaccgtcgaggttgacgctcatgaacttgcggtagtagccccagtccacggtcaacaggccgtcgagtttcatgccgccgaagatcgcggcgttgttcaccaggtagccgatgccgccgaactcggccacggcttgcgctgccatgtcattggccgaatcgatgtcgggggc

SEQ ID NO: 554128 - DNA, 788 bp, Homo sapiens
  misc_feature (36)..(36): n is a, c, g, or t
  misc_feature (69)..(69): n is a, c, g, or t
  misc_feature (111)..(111): n is a, c, g, or t
  misc_feature (120)..(120): n is a, c, g, or t
  misc_feature (137)..(137): n is a, c, g, or t
  misc_feature (139)..(139): n is a, c, g, or t
  misc_feature (144)..(144): n is a, c, g, or t
  misc_feature (155)..(155): n is a, c, g, or t
  misc_feature (159)..(159): n is a, c, g, or t
  misc_feature (163)..(163): n is a, c, g, or t
  misc_feature (191)..(191): n is a, c, g, or t
  misc_feature (238)..(238): n is a, c, g, or t
  misc_feature (241)..(241): n is a, c, g, or t
  misc_feature (283)..(283): n is a, c, g, or t
  misc_feature (288)..(288): n is a, c, g, or t
  misc_feature (386)..(386): n is a, c, g, or t
  misc_feature (418)..(418): n is a, c, g, or t
  misc_feature (442)..(442): n is a, c, g, or t
  misc_feature (458)..(458): n is a, c, g, or t
  misc_feature (502)..(502): n is a, c, g, or t
  misc_feature (513)..(513): n is a, c, g, or t
  misc_feature (539)..(539): n is a, c, g, or t
  misc_feature (595)..(595): n is a, c, g, or t
  misc_feature (613)..(613): n is a, c, g, or t
  misc_feature (627)..(627): n is a, c, g, or t
  misc_feature (692)..(692): n is a, c, g, or t
  misc_feature (720)..(720): n is a, c, g, or t
  misc_feature (781)..(781): n is a, c, g, or t
gtctcattcctttggggctggtcttccacagcaggncctgaatgaacgtagacttcatcagcaggacanaaatgaaatctctcagagccctcctgaactcgggaggaagangttgcagtnagccgagatcgtgccantncactncagcctgagtnacanagtnagtctcttatttttcaggccagccacancagcagtactcatccttaaagtatcaagatgagaacttttgtatgtngtntgtctccccagcttgaatataagccttccaaaagcatcagcnctgtntgtctaatgtcggatccttatctcccagcatggtgcctcggcctctcaaagtgctgggattacaggcatgaaccaccacgtctagccttttctaagtnaaagcactattttatagcttgcaaacactgtnagaaaaatcttctggaagcacggnatcagttatctgcttnaggaatgttaggcaaacagccaatgttaaacggccacacccttnctagagccgangacagccaactcgtcccaaatgtggnagttcagcgaaaaatcagcagagccacctacccaacccacagttgacttagaaganaattccagaagagctgtncaactaatgcaganacttctgaggatcaccaacttgagagctttgtttgctcaaaatctgagttagttgcatagttganccacaggaatgtatgagctttaactggntagggttcctgtgaaggaatgggatcccgaggtgctttccaggaccgtagcaaggggaacngctggca

SEQ ID NO: 554129 - DNA, 301 bp, Homo sapiens
ttgatcaggccggcggtgtacgggtgctgtggatgggcccgcacgtcgtgcttgctgccgtgttcacagaggcgcccggcatacatcaccgcgatcgagtcacaggtttgcgccacgacgccgaggtcgtgggtgatcatgatcatcgacaggccacgctggtcgcgcaggtccagcaacaggcgcaggatttgcgcctgcacggtcacatccagcgcggtggtcggctcgtcggcaatcagcactttcgggttgcagccaagggccacttctatcattgcccgctgacgcatgccgccgg

SEQ ID NO: 554130 - DNA, 213 bp, Homo sapiens
atcagtcaacagtggatgtggattgtgtgagcatatcacatgaaggaatatgacgatgccatagaaagggaattaattaatagtgttagcagcgtcctgcgtgatatagttgtccaccaatatgaagtgatgtaacgtcatggcatggaaccagcatagatcgtatgttctcactgatatgtgggagctaagctatgaggacacgaatgtaca

SEQ ID NO: 554131 - DNA, 157 bp, Homo sapiens
  misc_feature (18)..(18): n is a, c, g, or t
  misc_feature (23)..(23): n is a, c, g, or t
  misc_feature (67)..(67): n is a, c, g, or t
gggtattattaccaaagngcggnttccaccaggatatttaggaactagacttagaatatgcgagttntacaatggggccaatgtaggtgatctggtgaaggaacacctggaacccatgtcttgtctgttgtcttcaaaaggaatattactgctgtta

SEQ ID NO: 554132 - DNA, 105 bp, Homo sapiens
aaaaaaaaaacccacggtttttccccaggaagggcccggggggaaggttttccccgggaaaaccccccacggctttttttttaaaaaaaaaattttcttggccca

SEQ ID NO: 554133 - DNA, 337 bp, Homo sapiens
ctagaaccaggacttgcgtagtaagtccagggcctcgggcacagctggatccaggagttaaatgaagtcatcgtgatccctccatgggtgcatatggctgactctccccattctcggtggccacggtctgcagcgtcaccaccgcgcgggcagatgctgagcctctggtccttagggaacaagatcaggttcctttgagcctctggtcaccacattttcaccacccatcagtctgtcactttggtctgtttctgcttaaagacactgtatttagtgtatagagttgattcattaacgttgaactcacggccaacagcacctacacaggcctgagcga

SEQ ID NO: 554134 - DNA, 268 bp, Homo sapiens
caagggctgtctctggtgtgggccccagacctccggtcagagaagacacagaaacacataaagaggcccctgctctcggggatctgagtccctgctcggaagttcaggcaggaacacccttgtgattttcctggtgtctttgacaaggcagtcactaaacaacccttgccaccggcacgggcccttggcggataggagccccaaagcccggcctcccgtgctggctctgactcctcactcagcccccctgccacgtccaggctgggcc

SEQ ID NO: 554135 - DNA, 625 bp, Homo sapiens
  misc_feature (563)..(563): n is a, c, g, or t
gctgtgtggtgtggtcttcgcgtagcatctcatcatggccttgtgggaggtccccttcctctccctcactgccttctaccccaggccgtgatctcctggtggtacctcaggcactgggggagctgggctgctgtgggccctgtcctacctgtgcctcacccaggccggctctcccctcagcagaccctgctgtccatgctgggatatcccttgtgctctagctgctggccagctgattgctatgtggcgtcacatctcgcttgagtgcccacggacacctggagagggagagacagaacggcacggagagcgcacgtaccggaggaatgacgccgtccataagagaactcgagcgaccctggcagtctagaatgctcaagggcatccacgacctctcagacaactacgtcccttgtcgtggggaaatagcgtggtacgatggtgctgtcacagagggtctcgtcgtagtaggcctaatcaatgtgaatcaccctatgggcatcttggtagggtcctaccatttagccccgtagcttactctctcgaggtataacaccaagggnaagccttacttagtgaagacctctcgttgctattactctcttgagaaatcgatctttcccgc

SEQ ID NO: 554136 - DNA, 156 bp, Homo sapiens
gtggtgtggtactcggctccgacacacactcctgtgatcacacaaaccgttctgacggtactaatctacggacttactcccgtactcgacacggcttttatgggtgccacgtgggaaaccggggaccacgtttgactgccctactttactgactgt

SEQ ID NO: 554137 - DNA, 235 bp, Homo sapiens
catataactagatcaggacttcctgagaaaggggggaaggtaaggtcagacaaacacaaactgggtgccgtattgtcctatcatgccgcgatgtcaacgagtcctgccatcgtaataaccagtagaactgaaagcagaggcaagacaagaaaatagtaacatagaacaattcagatttcaaatactgaaggacgccctcaataatcatggtgtgtaactataagggctgctcaat

SEQ ID NO: 554138 - DNA, 354 bp, Homo sapiens
cggggcttcaggcaggttcttaggagagggaatgtctgtgctgaggcctgaaggagagttggccagggaactgagagcagcgtgtgcagaggcccagtggtcagcaccacctaccatacagaacgcagccagccgcctggtgtgggagatggggggcactgaggcagggggcttgggtgcgtggcacatggggccgcaccacctggtctagcctcagaagaagtctagacatcaccctgagagagatgggacccctcagagggttttaagcagaagatagtgtaggagtggaaaaggaatatctcactactgtgttcatggctgaggcacctataataaaagactaacgcgaaa

SEQ ID NO: 554139 - DNA, 130 bp, Homo sapiens
aatcgcaaaattattaacacgcataatatagcaaggactaacccctataccttcgtggataatagaattaagtagcaataagattgagagagagagccaaagactaagacccccgaacaacagacgagct

SEQ ID NO: 554140 - DNA, 129 bp, Homo sapiens
cggggggggccccaaaccccccttttttaaaaagggggggggggcccaaggggggggggccaaaaggggggggcccccccctgggggggcgggggggggggttttttccctctttttttccctccccca

SEQ ID NO: 554141 - DNA, 247 bp, Homo sapiens
tggctgcttcaacctctattctcgctgagtataccggtctgtggttcccgcatgtattaagaactggatctatgctcggcaagctgacttccagggtagaggcctcctggcgattatcattgaagtccttccctttcttctctagggcctcctcaaatagcatggcctctgaggcttgaccattcctccatctcatcccgacacagcaccgggccacccttgagaactgctctgcaaggaacccacg

SEQ ID NO: 554142 - DNA, 254 bp, Homo sapiens
ggggggggcccttcccaaattttttttttccttccccccccctgtttttttttttaaggggggggttttttatcccccttgttttaaccccccccgggggggggggggtttttttttggcccccccttgttttttttttttggggggccccgttttttctttttttttttttcaccccctttttttttttggccccccttcccccaaaatttttccccggtttttggggcccccctaaaaattttttgggggga

SEQ ID NO: 554143 - DNA, 123 bp, Homo sapiens
ccagggctctgtgtcagggaaaaccttctgggtggactttgtaaggaatccagtttcccaaggtaggattcacatccctaaatcttgcagagactaggattttcacagctccggtttgggacc

SEQ ID NO: 554144 - DNA, 204 bp, Homo sapiens
  misc_feature (20)..(20): n is a, c, g, or t
  misc_feature (22)..(23): n is a, c, g, or t
  misc_feature (100)..(100): n is a, c, g, or t
  misc_feature (102)..(102): n is a, c, g, or t
  misc_feature (196)..(196): n is a, c, g, or t
tgcagtcagagcgggcagcnannacgtcctcctcgctgtccaggtcggcctgcgcacgagcttcgtcgcgctcgaaacggaacgctcgctcgacttcgancncacgtgcaccggacgcaggcagcgctggcactccatcccgagcaccgtgcggcgtgcagatgcagccacacctgcggttcgcgctgggcgggcnagttccct

SEQ ID NO: 554145 - DNA, 257 bp, Homo sapiens
ttactggctagctgccaggctctcctacaaggttagtgccctccaccttgtgtgaagcctgaaccacagggtccctgagtggccttcgacaaaagtgtgtatttgtcccgcgggagggtagcagtcgggccatggggcttcttgtgccctaaaggggactggccgctgtgatctcactagcgcgggcccatggcaaagcctgtaggcttcccctcgtgctggggactacgtacattgcttatactcactacctgatg

SEQ ID NO: 554146 - DNA, 294 bp, Homo sapiens
ggcacgaggctttcttataaacagtcttttaatagtatagtacattctgaatttttgcagagtctcaattttaaaggttccatcccactgttgattttgttgtatttttgatttggaaaattatagtattttgggctatataattgagggtagaggtcgcgcaacacaatattgcatctgggatatagtgacctctctcagggccgagatccacggggaggcaaactctgagataaagattaagggtgtgaaaagcttaattagggagtggtaatggagtccaatactcctcga

SEQ ID NO: 554147 - DNA, 604 bp, Homo sapiens
gcctcactctggagcgtgtctgggtcctgtccactaagtccagaacatgcagaatccagctcattgcagttgggcatgccatagatctaactcgtcccacattttcttaagaatttctatgagcttactcaatatttaagctttactgctgcaacatcttttcaacattatgaagcccattgttaatttcttctatttttctcctcattgcatacgatggtgagctttataagacttcattgctaatcttctcatctatgtcttctaaagcttttctgcattcttccacctgggattcaatctctgcagggactatggtgtacatttcggaatacttgattcgcagtttttccataatattctcaaaagttagtttccctttcttaaggatgctttgaagctcctcaaattattctgacttttctgggtgatcctggaatgccatattttggcatgaagttgtggtctgttgaaagaaattcttctaagcaattatctcttttgtgaaggaatgtctttcttggatttcagtctgcaccaattctttatatttctgaactttctgaagaagcttgttgcctcgtgacttcatagaagtcattct

SEQ ID NO: 554148 - DNA, 1001 bp, Homo sapiens
  misc_feature (1000)..(1000): n is a, c, g, or t
ggttgcggtgagctgacatcatgccatagcactccagcctgggctacaagagcgaaactccgacttaaaacaaaaacaaaaacaaaaacaaaaacaaaaacaaaaaaaacgagttaatgggtgcagcacactaacatggcacatgtatacatatgtaacaaacctgcacgttgtgcacatgtaccctagaacttaaagtataatataaataaacaataaaataaaaaagaaaggatgtggaacacaaatgtttattgaggacctggtgtgcgttgtctctcttaaagtcagtttccaaaaacctgtcgatgattttaactgagggcacactgtataaaaagtccgaaaatcagacaatcagtattactataaacagtaaacaaattgagcagaatttgagatttatttgcttcaatgcttaaatatttcccagtgtgaagcttccaccgttcttcgagcatatctgtgtaaccaattgggcatacaattacttactatctctatctattctatattactgggatttactctacatcttcagagacagggtttcactctgtcacccaggctagcagtgcaagggcacagacatgactcactgagcctgactccttcggatcagccacatctctcatttcacgcttctgagtagccagaactaccaggtggcaccacaatgcccgggtactacattgtgaacactgagatacgcgtggtttgccaggtacgttcaaaacccaatggactcaacacaatactcctgaatgacaacaaaacgctaaaattaagaataacagcaggcttgcaaactacacacggcatagacactaaaccaacatgggccacatccacagtccacaaaatcctccaacagccggacgaacacaacacatcacagagaaccaaaaagaaccaattagcacagggaatacacatacacccagcgacatccacgtccacacaaatcaagcgcacgcacatttgcctgagatcattcccnt

SEQ ID NO: 554149 - DNA, 175 bp, Homo sapiens
cgcactggtggtcctgtattttcacattcttagtggtcctgtccatatactttgtgactacatcatatagtagagggtcctgttcggtttatgcccgctgcagactgtgagtcatagggaggctctgagcattcatccagcactggtagcttgggggtggatgtcgcagggatca

SEQ ID NO: 554150 - DNA, 192 bp, Homo sapiens
ttttttcttttgagacagagtctaccctgtcacccaggcaggagtgcagtggcacagtcacagctcactgcaacctctgcttcccaggttcaagtgattcttgtgcctcatcctacctagtagctgggattgtcagtgtgtaccactcacgtctggctaatctttatatttttaatagattcggggtcgacg

SEQ ID NO: 554151 - DNA, 541 bp, Homo sapiens
  misc_feature (3)..(4): n is a, c, g, or t
  misc_feature (22)..(22): n is a, c, g, or t
  misc_feature (91)..(91): n is a, c, g, or t
  misc_feature (117)..(117): n is a, c, g, or t
  misc_feature (160)..(160): n is a, c, g, or t
  misc_feature (164)..(164): n is a, c, g, or t
  misc_feature (183)..(183): n is a, c, g, or t
  misc_feature (192)..(193): n is a, c, g, or t
  misc_feature (197)..(197): n is a, c, g, or t
  misc_feature (213)..(213): n is a, c, g, or t
  misc_feature (218)..(218): n is a, c, g, or t
  misc_feature (224)..(224): n is a, c, g, or t
  misc_feature (244)..(244): n is a, c, g, or t
  misc_feature (257)..(257): n is a, c, g, or t
  misc_feature (259)..(259): n is a, c, g, or t
  misc_feature (264)..(264): n is a, c, g, or t
  misc_feature (296)..(296): n is a, c, g, or t
  misc_feature (324)..(324): n is a, c, g, or t
  misc_feature (354)..(354): n is a, c, g, or t
  misc_feature (397)..(397): n is a, c, g, or t
  misc_feature (436)..(436): n is a, c, g, or t
  misc_feature (446)..(446): n is a, c, g, or t
  misc_feature (449)..(451): n is a, c, g, or t
  misc_feature (467)..(467): n is a, c, g, or t
gtnngactggactcgcggcganttacctttcagtcgtgcgctcctgatccggcgctcggaatttgtccccggttcaggctgcggggcctgnaaggaggcgaaaacgatccagggagncgaggcgctcctcttgtcatcccactcagcgccatgtcctggntgtncaagagggatccagttggnagtacttgnngacngtccagtatggagttnatggnaatttnccacgcctctcatatccaantttctttccacgntngaatnccaagatgttatccctccagatgatttctaantagtgatgaagaagtagattccgtttanttggaagtttgagaggtcatgtggttggantacgctattacacgggagtagttaataataatgaaatggttgnttacaacgagatcctaataacccttatgataagaatgcnattaaagtanacnnntgtgaatggaaatcangttggcatttaaagaaggagcttgcggtgcttggactatatcatggacaacaaattggcgaaattgaaggggta

SEQ ID NO: 554152 - DNA, 829 bp, Homo sapiens
gctattaggttttatcacattcagtcacagtgagatgtgaaattaacaatgcctctaagaaatggaaaattgtgctgctgacagacatggtgatgcgctgcaggtatgtagctgtggccctggggacacacccttctcctgtgtgtgtcaaagctagaactaaggcccttttcctggaaccttgatctctggagaacaaggattaagggcaactgactcagcactctgtctgccactgatagctacaaggaatttgcttacatatgtatcaagtatgccagcatgtacatacaagtatgtctatttcagcattaaaacattattttaaaatacacataaatgtaaaataaatcaacaatataagtgaaagctttctaccatccctgactcccattcaccacccagcaagatgcagccagtttcttgattatgttctcagagagatatttttggatacaatggcattctcttctgtgccttgcctttgtcacttatcgatactaccttaagagttaacaggaagaacatggactttgaagccagaatacctggtctggaacccagcaacacacatactagctttgaccttgagcaagttacttaaatggggataataagtactatccactaaaacatatgtaaaggcatttcaagcagtgcctcgcccagagttaccaataaaatagtattagccattgtggcttgacgcatgtccccctgtcagtacattacagaaaaccctcattcttattaattggctgggtgatattccattactcatcagatgtaccacaatgtattaagccagccttcaaaaaggacaatagtg

SEQ ID NO: 554153 - DNA, 315 bp, Homo sapiens
  misc_feature (305)..(305): n is a, c, g, or t
tgagacaaggtcttgctctgtaccccaggctggagtgcagtggtgctttcttggctctctgcaatctctgctgcccaggctcaactgatcctgccacagcctccccagtagctgggattatgggcatgcacccagctgatttttgtatttttttgcagagacaggatttcgccatgttgcccaggctggtctcgaacttctgagctcaagcgatctacctgcctcgtcctcccaaagtgttggaattgcaggtgtgagccactgcacccggcccttgcctcatgtttgaatgataatttacctgngcataaaatt

SEQ ID NO: 554154 - DNA, 580 bp, Homo sapiens
  misc_feature (3)..(4): n is a, c, g, or t
  misc_feature (22)..(22): n is a, c, g, or t
  misc_feature (91)..(91): n is a, c, g, or t
  misc_feature (156)..(156): n is a, c, g, or t
  misc_feature (199)..(199): n is a, c, g, or t
  misc_feature (203)..(203): n is a, c, g, or t
  misc_feature (222)..(222): n is a, c, g, or t
  misc_feature (231)..(232): n is a, c, g, or t
  misc_feature (236)..(236): n is a, c, g, or t
  misc_feature (252)..(252): n is a, c, g, or t
  misc_feature (257)..(257): n is a, c, g, or t
  misc_feature (263)..(263): n is a, c, g, or t
  misc_feature (283)..(283): n is a, c, g, or t
  misc_feature (296)..(296): n is a, c, g, or t
  misc_feature (298)..(298): n is a, c, g, or t
  misc_feature (303)..(303): n is a, c, g, or t
  misc_feature (335)..(335): n is a, c, g, or t
  misc_feature (363)..(363): n is a, c, g, or t
  misc_feature (393)..(393): n is a, c, g, or t
  misc_feature (436)..(436): n is a, c, g, or t
  misc_feature (475)..(475): n is a, c, g, or t
  misc_feature (485)..(485): n is a, c, g, or t
  misc_feature (488)..(490): n is a, c, g, or t
  misc_feature (506)..(506): n is a, c, g, or t
gtnngactggactcgcggcganttacctttcagtcgtgcgctcctgatccggcgctcggaatttgtccccggttcaggctgcggggcctgnaaggaggcgataatccggaaggggcgggggggccctttcccgggaaaaaaaacgatccagggagncgaggcgctcctcttgtcatcccactcagcgccatgtcctggntgtncaagagggatccagttggnagtacttgnngacngtccagtatggagttnatggnaatttnccacgcctctcatatccaantttctttccacgntngaatnccaagatgttatccctccagatgatttctaantagtgatgaagaagtagattccgtttanttggaagtttgagaggtcatgtggttggantacgctattacacgggagtagttaataataatgaaatggttgnttacaacgagatcctaataacccttatgataagaatgcnattaaagtanacnnntgtgaatggaaatcangttggcatttaaagaaggagcttgcggtgcttggactatatcatggacaacaaattggcgaaattgaaggggta

SEQ ID NO: 554155 - DNA, 583 bp, Homo sapiens
actcagtccgagactattttagtaagcccaagtatttggctggcaggtacacactctacattaacagagttaggtgcttttaagaacgatattctgagtggcatttattggattcacgggtaatgaaggagactgaccaaattacctactaatatgttaaagccgacaccattgctctcctttgcatcatgaggagtattagtccagccatctctgttacgattcacgttttgctgcgcattcagcctcgaacgacgcagcaaggacccggcatgatcacaacatctgcccattttatagttgttcctaatacaacgctgtatacatactgctctgccaaggaatggcactctagtccgggaatgtatgggttgaataacatgcattcttactgaaacccccttttgcccttggctgctcatgattcactgactgcgaggcccaagcgccgcatgtctgactgcttgatgatgcatgtggtgcggccttgggtatatcgctaaagatggcttaagcagcggagagacctacactttctttagagcgaggctcgctggcacccacagctattcgtttagcacag

SEQ ID NO: 554156 - DNA, 526 bp, Homo sapiens
tcaagatgggcggttgggtccttcgatcgggcatgaaagatataggacatgatcaacaggctgtggggtgacatgttcttcgacccagacaatggtgagttcatgacagatgtccgccaccagccccgacgggaagatagctgccacgcaccttctgccatctgatcgtgtaccccatcttcaaggtgtgtgatgcgatcatgaatctcacgagagaggagctggcaaacactgatagagaaacgtggaccatcgaacgggacagcgaagtgcactaggtacacctcaaggcatatccctgctgatggctgtgatgcgccgatggttgactgccggagacgccttgttgccgatgatcaccatccacctgccctcccctgtgacggaccaaaattcatcgctgcgggctccgtgtacgaggggcccccggaggacgaggctgccatgggccttagaaggtgtgaacccaaaggtcgctcttatgatgtatatctcgcaagagtggtgcctagcgtacatcttctga

SEQ ID NO: 554157 - DNA, 161 bp, Homo sapiens
gatgtgcgaggtgatctagaggatcccaggaaagatgggaaggggaaaatattttcagacatcctggctataaaatttcctttagttttatgcctggccttgcaaagctcagtgaaatgtgaaaggaataaattaatcatgtttctactaaaaaaaaaaag

SEQ ID NO: 554158 - DNA, 1280 bp, Homo sapiens
tgggcacaaggtctgttgggttggtctgccttaaaaaaaaaaaaaaaaaaaaaaaaaaaaaaaaaaaaaaaaaaaaaaaaaaaaaaaaaaaaaaaaacaacaaaaaaaaaaaaaaaaaaaaaaaacaaagaataaacaacagaaaacacaagagaggacgaacaaacacaacacgagaacgagggagagaccacacaaacaacaacaacgcgagaaaccatacaacacagacacaagaaaagaagaagtagaacagaacagacgagcaacaaacacaaacaaaaaaacaacaaaaacccagacacgcgacgctgcagacacaaacgcagaggagacaaacgaaaaaaaaacaaagagaaaaatagagaagcagaacaagagaaggaccaaaacgacaaaggacacgcagcgcaccagaggcaaaaaacaaagagacacacgaccaaaagaaagaacaagagagcacagtagaaaaggagaggaggagcaacgcggaacagcgaggggcgtaagcgaggacgaaaggaggagcaaagcaggaagaacaaggaagaacaagagagaggagcgaaaaaaatagagagaggagagcgtgaacgaaaagacaacagaacacacaacagaagagaaagagaacacacacaaaacaaaaagaaaacaaaaaacaccaacagaccacagagaaaaaaacagaaaagcaaacaacaaaaagagaaagaagaaaaaacaagacacacaaaacagcaaataacaaaccaggacgacaaagaagagacaaaggacgagacacacagagagagaacgagaagaagaaaggcagaaagagacaaggaaggccacaacgaacaagaacacaccgacaccaggacgaaagaggggccggaagaggacgcgagaacgacgaagcaaaaacgaaagcgaacgagagacagaagagaaccagcagaacacgaaacaagaaaacaaagagcgcagaccgagccgcaacagacgaaaagaccaacaagacgagcgacagcagccgacgaggagggagacaagaacagggcgacagccaagcaaagcagaccggagaggcggaacacggcagaagcagacgcagacgagaacgatgccgacggcgcgaggcagagcgagcgacgagaagcgaacaagtagaagcagaagcgagcagacaagggaggtagaaggacacagtaaggaccaacgaccgcaacgaaacagagcaacaggaacaaacaagagagaagaagaccaaaagagaacagaagagcaagagg

SEQ ID NO: 554159 - DNA, 727 bp, Homo sapiens
  misc_feature (496)..(496): n is a, c, g, or t
gccatagctcgaggatcttcgggatgaagggaaggcttcatcttccacactgtgactgaagtgtgctaccttacgaacattggcctgcagagcttacacagatggtcggtagctcgctcgaccagaggactccaaagctgagaagcctgaagttggctacgttagtgacagatcttaccaaaggacacgcgaaatgcggccatggagatctgcttgaattgtgcttgatgacgaggactggacactcgccaacatctatcctgcgaagatcatgatagacatctcctgtggacttgacgcctgctgtggagacctctgttgctagcatgcgactgccctgactcacagaatcatgataagcaggctgtgactatgtcttattactgctgattttgttgtacgtcaggctggctgcacgggaaggcatcctgataactctgtgaggctgctgctcgtgcttgccatgacatatgtgacctctctactacagtgctgngacgctgcatatactcataaatgatgtgccagagtgtcataggacaatatacctctagaggaaggacctctgagtttatcacacttacatgtgtgctctgtgccagcttgatcgtacaggtggcgtatgactcttggtctttacacgagaagttcctcggtgttactccaactatcgtgagcttcaagactattataaggggccacaaaggtacgctctggagtccccgtc

SEQ ID NO: 554160 - DNA, 115 bp, Homo sapiens
ttttatgcatttggagtttcatctgattttgctgctgctacacatcctcgatgctttttacctcagtaaaccagattaaactccaaatgcactaaacaaatgcattaaacatatg

SEQ ID NO: 554161 - DNA, 2432 bp, Homo sapiens
tgtacaaagagaaatacatcattatttaaaagcatcatcttttttttttatattgtaagataaataccattctgatgtatttctcttggaaagggatgctggtatcctgggaggtttatgatttttgatgtttttactcaggtgattggcttgtatagctgaaatgctgatgaaaaggagttttcccttctccctttttcttttcttttccttttttttttttttttgagatggagtctcgcactgttgcaggggctggtgtgcagtggcacagtctcggctcactgcaacctccgcctctcgggttcaagtgatgctcctgcctcagcctcctgaatagctaggattacaggtgcccaccaccacgcccagctaattttttgtatttttagtagagatggggtttcactatgttgggcagtctggtcttgaactcctgacctggtgatcctcctgcctcagcctcccaaagtgctgggattataggcgtgagccactgcgcccagcctgtccctttttcttaaatgacctttttggtgaggaccattataggtttgtaccaggataaggttgtagagttaatcataatattctcttatataaattctaaaaattgatgttctaagaagagaggtagaatttgaatgactgggttacttcctagactcttcctccttctcttaagtacagtatagttctttctctgaaaatcttcagtctcttagttccagatgggttctctatggtaagaatacaggacatgtagaaggccctaggggaatgctttcttccccagatctttgccctgtagtaggtttcagctgagcaaggacgagtagtttttctggtgtttggcctcctctgttgggtggaaaaagactttcttctctattttcctagttatatatgctatcatatgtctgtttttctcctcttgaagtttccctgaaacctgggctcttgaagacgcatcactggagcagatggataatggagactggggctatatgatgactgacccagtcacattaaatgtaggtggacacttgtatacaacgtctctcaccacattgacgcgttacccggattccatgcttggagctatgtttgggggggacttccccacagctcgagaccctcaaggcaattactttattgatcgagatggacctcttttccgatatgtcctcaacttcttaagaacttcagaattgaccttaccgttggattttaaggaatttgatctgcttcggaaagaagcagatttttaccagattgagcccttgattcagtgtctcaatgatcctaagcctttgtatcccatggatacttttgaagaagttgtggagctgtctagtactcggaagctttctaagtactccaacccagtggctgtcatcataacgcaactaaccatcaccactaaggtccattccttactagaaggcatctcaaattattttaccaagtggaataagcacatgatggacaccagagactgccaggtttcctttacttttggaccctgtgattatcaccaggaagtttctcttagggtccacctgatggaatacattacaaaacaaggtttcacgatccgcaacacccgggtgcatcacatgagtgagcgggccaatgaaaacacagtggagcacaactggactttctgtaggctagcccggaagacagacgactgatctccgaccctgccacaggttcctggaaagactctccaggaaatggaagatactgatttttttttttaaatcacagtgtgagatattttttttcttttaaatagttgtatttatttgaaggcagtgaggaccagaaggaagttttgtgctttggcagactcctccatgttttgttcccttccccctgagtatgcatgtgcctgttcagagtctccagataccttttttataaaaagaagtctgaaaatcattatggtatataatctacccttaacagagcttttcttattacagtgctaaaatgatttctgataaaatggtccctaactcaactagaaggctaaaaatacaagaatgaaagaataagcagagtactcatgatgcctttgagaaaaatcaaaacatcatgtagggtgacctagtttccaaaccaataaataagtagtattgtaatattaaaggaaaactgttccaatcatttaaaagtacttattaagtactgctttttacagttatgacaactgtttctttctatgcatataaatcaaggaaccaaatatctgtagccatggaaatgtctgactagaaatatttatattgaattctgaatacaaaatgtccctgtggtagaaaacttactctttatgcctggtgcagtataattcccaagtgtactgtctaccagaaaaaaaaaacaaaactaataaaaaatgaaatatgaaaattaaaaaaaaa

SEQ ID NO: 554162 - DNA, 1556 bp, Homo sapiens
gcgctcgcgctctccggccgcgggcatctcccggcccggccgcagcagccgccgccgccgcgcatttccctgaaacctgggctcttgaagacgcatcactggagcagatggataatggagactggggctatatgatgactgacccagtcacattaaatgtaggtggacacttgtatacaacgtctctcaccacattgacgcgttacccggattccatgcttggagctatgtttgggggggacttccccacagctcgagaccctcaaggcaattactttattgatcgagatggacctcttttccgatatgtcctcaacttcttaagaacttcagaattgaccttaccgttggattttaaggaatttgatctgcttcggaaagaagcagatttttaccagattgagcccttgattcagtgtctcaatgatcctaagcctttgtatcccatggatacttttgaagaagttgtggagctgtctagtactcggaagctttctaagtactccaacccagtggctgtcatcataacgcaactaaccatcaccactaaggtccattccttactagaaggcatctcaaattattttaccaagtggaataagcacatgatggacaccagagactgccaggtttcctttacttttggaccctgtgattatcaccaggaagtttctcttagggtccacctgatggaatacattacaaaacaaggtttcacgatccgcaacacccgggtgcatcacatgagtgagcgggccaatgaaaacacagtggagcacaactggactttctgtaggctagcccggaagacagacgactgatctccgaccctgccacaggttcctggaaagactctccaggaaatggaagatactgatttttttttttaaatcacagtgtgagatattttttttcttttaaatagttgtatttatttgaaggcagtgaggaccagaaggaagttttgtgctttggcagactcctccatgttttgttcccttccccctgagtatgcatgtgcctgttcagagtctccagataccttttttataaaaagaagtctgaaaatcattatggtatataatctacccttaacagagcttttcttattacagtgctaaaatgatttctgataaaatggtccctaactcaactagaaggctaaaaatacaagaatgaaagaataagcagagtactcatgatgcctttgagaaaaatcaaaacatcatgtagggtgacctagtttccaaaccaataaataagtagtattgtaatattaaaggaaaactgttccaatcatttaaaagtacttattaagtactgctttttacagttatgacaactgtttctttctatgcatataaatcaaggaaccaaatatctgtagccatggaaatgtctgactagaaatatttatattgaattctgaatacaaaatgtccctgtggtagaaaacttactctttatgcctggtgcagtataattcccaagtgtactgtctaccagaaaaaaaaaacaaaactaataaaaaatgaaatatgaaaattaaaaaaaaa

SEQ ID NO: 554163 - DNA, 1762 bp, Homo sapiens
ggccgccgcgcgcaaccacatggttgagaaaggagaaagagaaaatgattacttgtagagaaaaatccatttctgcagtggtatggttaaggataatctaaccataatcacattatccttgtatgcctggctacttgtgctggcctgtatgtgaatgttaaccccaaagactcctttagatgtcgctgaactagttactataaaaagtatttcgctttcaaactcccacatttcaagaagagcaaaactcaatacaaggcaattttgaagtttccctgaaacctgggctcttgaagacgcatcactggagcagatggataatggagactggggctatatgatgactgacccagtcacattaaatgtaggtggacacttgtatacaacgtctctcaccacattgacgcgttacccggattccatgcttggagctatgtttgggggggacttccccacagctcgagaccctcaaggcaattactttattgatcgagatggacctcttttccgatatgtcctcaacttcttaagaacttcagaattgaccttaccgttggattttaaggaatttgatctgcttcggaaagaagcagatttttaccagattgagcccttgattcagtgtctcaatgatcctaagcctttgtatcccatggatacttttgaagaagttgtggagctgtctagtactcggaagctttctaagtactccaacccagtggctgtcatcataacgcaactaaccatcaccactaaggtccattccttactagaaggcatctcaaattattttaccaagtggaataagcacatgatggacaccagagactgccaggtttcctttacttttggaccctgtgattatcaccaggaagtttctcttagggtccacctgatggaatacattacaaaacaaggtttcacgatccgcaacacccgggtgcatcacatgagtgagcgggccaatgaaaacacagtggagcacaactggactttctgtaggctagcccggaagacagacgactgatctccgaccctgccacaggttcctggaaagactctccaggaaatggaagatactgatttttttttttaaatcacagtgtgagatattttttttcttttaaatagttgtatttatttgaaggcagtgaggaccagaaggaagttttgtgctttggcagactcctccatgttttgttcccttccccctgagtatgcatgtgcctgttcagagtctccagataccttttttataaaaagaagtctgaaaatcattatggtatataatctacccttaacagagcttttcttattacagtgctaaaatgatttctgataaaatggtccctaactcaactagaaggctaaaaatacaagaatgaaagaataagcagagtactcatgatgcctttgagaaaaatcaaaacatcatgtagggtgacctagtttccaaaccaataaataagtagtattgtaatattaaaggaaaactgttccaatcatttaaaagtacttattaagtactgctttttacagttatgacaactgtttctttctatgcatataaatcaaggaaccaaatatctgtagccatggaaatgtctgactagaaatatttatattgaattctgaatacaaaatgtccctgtggtagaaaacttactctttatgcctggtgcagtataattcccaagtgtactgtctaccagaaaaaaaaaacaaaactaataaaaaatgaaatatgaaaattaaaaaaaaa

SEQ ID NO: 554164 - DNA, 1649 bp, Homo sapiens
  misc_feature (189)..(189): n is a, c, g, or t
  misc_feature (221)..(221): n is a, c, g, or t
gcgctcgcgctctccggccgcgggcatctcccggcccggccgcagcagccgccgccgccgcgcatttccctgaaacctgggctcttgaagacgcatcactggagcagatggataatggagactggggctatatgagatggggtcttgccatgttgcccaggctggtcttgaactcctgagctcaggcantctgcctgccccggcctcccaaagtgctaggnttacagatgactgacccagtcacattaaatgtaggtggacacttgtatacaacgtctctcaccacattgacgcgttacccggattccatgcttggagctatgtttgggggggacttccccacagctcgagaccctcaaggcaattactttattgatcgagatggacctcttttccgatatgtcctcaacttcttaagaacttcagaattgaccttaccgttggattttaaggaatttgatctgcttcggaaagaagcagatttttaccagattgagcccttgattcagtgtctcaatgatcctaagcctttgtatcccatggatacttttgaagaagttgtggagctgtctagtactcggaagctttctaagtactccaacccagtggctgtcatcataacgcaactaaccatcaccactaaggtccattccttactagaaggcatctcaaattattttaccaagtggaataagcacatgatggacaccagagactgccaggtttcctttacttttggaccctgtgattatcaccaggaagtttctcttagggtccacctgatggaatacattacaaaacaaggtttcacgatccgcaacacccgggtgcatcacatgagtgagcgggccaatgaaaacacagtggagcacaactggactttctgtaggctagcccggaagacagacgactgatctccgaccctgccacaggttcctggaaagactctccaggaaatggaagatactgatttttttttttaaatcacagtgtgagatattttttttcttttaaatagttgtatttatttgaaggcagtgaggaccagaaggaagttttgtgctttggcagactcctccatgttttgttcccttccccctgagtatgcatgtgcctgttcagagtctccagataccttttttataaaaagaagtctgaaaatcattatggtatataatctacccttaacagagcttttcttattacagtgctaaaatgatttctgataaaatggtccctaactcaactagaaggctaaaaatacaagaatgaaagaataagcagagtactcatgatgcctttgagaaaaatcaaaacatcatgtagggtgacctagtttccaaaccaataaataagtagtattgtaatattaaaggaaaactgttccaatcatttaaaagtacttattaagtactgctttttacagttatgacaactgtttctttctatgcatataaatcaaggaaccaaatatctgtagccatggaaatgtctgactagaaatatttatattgaattctgaatacaaaatgtccctgtggtagaaaacttactctttatgcctggtgcagtataattcccaagtgtactgtctaccagaaaaaaaaaacaaaactaataaaaaatgaaatatgaaaattaaaaaaaaa

SEQ ID NO: 554165 - DNA, 855 bp, Homo sapiens
gcgctcgcgctctccggccgcgggcatctcccggcccggccgcagcagccgccgccgccgcgcatttccctgaaacctgggctcttgaagacgcatcactggagcagatggataatggagactggggctatatgatgactgacccagtcacattaaatgtaggtggacacttgtatacaacgtctctcaccacattgacgcgttacccggattccatgcttggagctatgtttgggggggacttccccacagctcgagaccctcaaggcaattactttattgatcgagatggacctcttttccgatatgtcctcaacttcttaagaacttcagaattgaccttaccgttggattttaaggaatttgatctgcttcggaaagaagcagatttttaccagattgagcccttgattcagtgtctcaatgatcctaagcctttgtatcccatggatacttttgaagaagttgtggagctgtctagtactcggaagctttctaagtactccaacccagtggctgtcatcataacgcaactaaccatcaccactaaggtccattccttactagaaggcatctcaaattattttaccaagtggaataagcacatgatggacaccagagactgccaggtttcctttacttttggaccctgtgattatcaccaggaagtttctcttagggtccacctgatggaatacattacaaaacaaggtttcacgatccgcaacacccgggtgcatcacatgagtgagcgggccaatgaaaacacagtggagcacaactggactttctgtaggctagtaccggcatgagctactcgcgatttccagattactgggatcctcagatacagct

SEQ ID NO: 554166 - DNA, 793 bp, Homo sapiens
gcgctcgcgctctccggccgcgggcatctcccggcccggccgcagcagccgccgccgccgcgcatttccctgaaacctgggctcttgaagacgcatcactggagcagatggataatggagactggggctatatgatgactgacccagtcacattaaatgtaggtggacacttgtatacaacgtctctcaccacattgacgcgttacccggattccatgcttggagctatgtttgggggggacttccccacagctcgagaccctcaaggcaattactttattgatcgagatggacctcttttccgatatgtcctcaacttcttaagaacttcagaattgaccttaccgttggattttaaggaatttgatctgcttcggaaagaagcagatttttaccagattgagcccttgattcagtgtctcaatgatcctaagcctttgtatcccatggatacttttgaagaagttgtggagctgtctagtactcggaagctttctaagtactccaacccagtggctgtcatcataacgcaactaaccatcaccactaaggtccattccttactagaaggcatctcaaattattttaccaagtggaataagcacatgatggacaccagagactgccaggtttcctttacttttggaccctgtgattatcaccaggaagtttctcttagggtccacctgatggaatacattacaaaacaaggtttcacgatccgcaacacccgcagcaatcttagatgtgatgctgcctatacgacacactgatcatgttatactgtctgccc

SEQ ID NO: 554167 - DNA, 1645 bp, Homo sapiens
  misc_feature (531)..(531): n is a, c, g, or t
  misc_feature (1645)..(1645): n is a, c, g, or t
tgctagggtcgagtggtccgcgcgtccagggaagtccttcagtgtgagtgcataacgtgtgaagataaacgtggcaggatgaacggaggtctggaagcgagcagtctccatgggggacatctcgatcgcggcctcatggatggcggccgaaggactggcaggctggatctagctgcagtgctgcgctttagtgccttctactacttgaatgtctcgtactctcggacgaaacggtcacgagtccacaagcattagcatgctgcgaagtgatggccatgatgcgtgtgtcaccaagagatagtagttaactggggagtcgtacttaacattggggcatatatcaacgtgcgcgtggagcatggcatccactaggactggcgagtcaaccgacactggcggtgggctcactggtgggctgcgtcaccaggacggaacgggtccatgatgcatgtagaggggcatgttccgtattggaggcatgatccacgagcgtgcagcacatgcgcctggggcgccagtgacatgctgggncaccaagggggaacatgcggcaagatcggtacgctcgggaagcataaggtgcggaagcagtgagcactagagaggtggaagaaaggggcataggcacttgggaacacgttgcgaactggacgtgagaggagaattgatctgtagcgaaaggcgccatggactcaaaagcggatgcacctgcgaccagagagtgtatcgcgtgcgaacggggacttatggcggatgcggaacaaggtaccttgtgggcatggcgggcacgagtacttgtaaccctcggtggtcgttttagtgggcccgcaccttggttgtgttacgtggggcgccaataatgcgacgttaagctagggggaccacccgcaaattagcggaggagccacccaacggcggaaaagtatacggacccgaagggaaacgcggtccccgcacgagataagggcttcgcagagttcgcattggcgcgttccgaactggtgacctagccgcggttgtggctttcgaattaagcggagtcgcgcggtaacatcgaaatgcccacacctcgggacgctgccattcttttgatgggacgcggcgcgtgccaagatcgcgatcgctcgggggggcaaagcatctcgtggggcaaaggcggaaggccctgtgggacttgttggcgaaattccgcacgtgatacctgtggggtatgggggttgtgaccgttagtacgccgcgatatagagggcgcccggaacccttcgcagtggggccccgactcaaattccgaaggggaccccattccagatcgagggggggcgccccaaattcacagagattgtccccgataccatttatcttgggcaaaagaccgatacggtgcccataagcacggggcaacaaaaaggccaacggcacaacagaggcccgatagtacagggagcaatcatgcccccgggaagagaggcaacgcagcggccgcagaccatgggggcgccacacacgaagagggcgactacaccacaaggagcgggttcaatacttgcgcagcgaaaatgaggccgggaaccaggggtgagcgaccagacgcgaacaacaccatagagagacgaaaacgggcgaacaagaggagacacagggccgn

SEQ ID NO: 554168 - DNA, 369 bp, Homo sapiens
  misc_feature (139)..(139): n is a, c, g, or t
ttatgacaggtgtttaagaatgagtgtgactgaaaaggcagatgtttcctatcatgaccaggtaaaaatatccagcttggctgggtacagtggctaatgcctgtaatcccagcactttgggaggccgtgaagatctcanagatctcttgaggccagaagttcgagaccagcctggccaacatggcaaaacccccatctctactaaaaatacaaaaaattagccggacatggtggtgcacaccagtactaccagctactcaggaggctgaggcacgagaatctcttcaacccaggaggcggaggttgtagtgagccaagatcataccactgcactccagcctgagcaacagagtgagactctgtcccaca

SEQ ID NO: 554169 - DNA, 249 bp, Homo sapiens
accgtcaacccaatcaggtatgagctaactaggccctaaagcagcacattaccactccctagaaacacccagtaagacccctcccagtgctggacactctgcctctagtcaatgccatttggagctctttgaggaagactttccctgaataggaaaatggagaaatgactccctgtatcttccaaactcagattccaagtggactgtggttcctcaggtaatcttattgcatatgtctcctaagtaagc

SEQ ID NO: 554170 - DNA, 151 bp, Homo sapiens
gacatcagtgagtgagctacagaattagctggataggtagcaggtcggcgttcgcctatattagaacacagtttgaacacttagcagcctatgggtggtaataagtatagaccccgtagggtatggccaagaactcagactatggtataca

SEQ ID NO: 554171 - DNA, 182 bp, Homo sapiens
gtcccagagagttgcataaataatttgtggcttgggtgtatacatgtgtaagttacattttagttatggaaatggatattagtgaaattgacagctttctatggttaagagcttatccgtgtatggtgagccagaggttctctggtttttctagatttctctatattcattcgcctataatt

SEQ ID NO: 554172 - DNA, 685 bp, Homo sapiens
  misc_feature (170)..(170): n is a, c, g, or t
aatgtgtaatccagccgtataggtgtttgctatacagtcagtactctacactcggcggagtaaccgcttagaccgagcgcattcctgtttcacctgatctgtctcatgtctcatcttcctagatagcttctgttaaggtccaatctctgaatatgtacatctctgagcancatgtcctcactattatgatctcaagcacagtcttgtctgtgacattgttctcacatattgagtgtagctccagagacctagtacgcgacaaatgaatatgaacaaaacatatatgctagtctgagaggccctcccagaataagtgaagtctggtcttgtggagtcacgctcctggactgggtaagctcttgccacacactcaggcgtctctgtaccagctcagccgtatcaacggggtcttggtacacacgatgagtcttgtgacgctagtttgccagctaggtgcacgcgccatctgactctgggcatcaaggcactgactctcagtcataatgcggggatagccggttcttccctatgtacacggggctcaccacacaggagtgctgactgcattttatcagcagttaattgtgcaacgtttgtgactttacattttacgcaacgggctccccagcgtgtagcattgtcttctttccagtctggtcgatttttccaatcgggaataatgtag

SEQ ID NO: 554173 - DNA, 265 bp, Homo sapiens
gatgcaacaacccgtcatggcctgaagacatgatgtggcgagccacgccatgtacaacatcacgagcttcttgccgtcgcccttgctgacggggtgatgcagtctccagggcatcggcagggagtcggcccaactccgcaggtcgtacttgcccacatggatgccatcctcgaagcaagtctggccgctcccctcatcggcggtgccatggggctggtacttcaagcgcttgagcccgtaccgcttcagccagcttcttggtatc

SEQ ID NO: 554174 - DNA, 690 bp, Homo sapiens
ggcagctggaatcgcggtggaacgaaggagtaggtggtgggatctcacgcgtgggtccgattagccttttctcatgccttgtttgcattgagcgtgtcagactggaatttcgataattggcatgtgcggtaaggctggactaggactccggaaaggccaagacgaaggcggtattcgcgttcgcagagagcgcggcgttgcagttatcccagtgggaccgtgattcagtcgatcgaccgtagataggatctggggagacgagtctaagtggatgtgtgggggcgagtgtcgttgtgtaaacgtgcagtaatccgtggagtatctcaacgtaggaggtacgtgtgaggagctggcagggaaatggatcagtaagagcttaatatggtaaatgacgtataaactcacctgagtaacgtatgcgacttgctagttcgtggagattgagtgatatggatctcgtggtcgtcaggggctaagaatggctggtggtggtggtcgattcgacgaatcgcgagaagatctcttgatggggtaggaacaggacgagagaagaagtgtttaaaggatgctgtggataacggttgttcatgctcaggatctgaatactctaccagagtgccagtgttggtgattcagtggatgtatcttctgggaaaaacaaattttgcttttgtatctatttgagaagtg

SEQ ID NO: 554175 - DNA, 252 bp, Homo sapiens
  misc_feature (24)..(24): n is a, c, g, or t
ctgtgctcaagtgatccaccctcnggctcccaagtagctaggaccacaaataatgtgccactgtgaggctaaatttatttttaaagttttgttttagtagagatgaggtcttgctatgttgcccaggctggtctcgaactcctgctcaagtgatccgcccacctcagcctcccaaagtgccaggcccagcccacaaatcctccttcagactcttcctcggggtctgaatccccacccttctgtcgtcttctc

SEQ ID NO: 554176 - DNA, 188 bp, Homo sapiens
ttagccctcacttctgtgaaaccccgcttgtgtgagcacgtgcagaccaatgagcaaactagaaccagaggagctacaggaaaatgaggcagagtgggcaggcttgggggacaggcagcattctctgagtacccacctaccccgtgcccagggactcagcaagcctttagcctgtggtccaacaggcc

SEQ ID NO: 554177 - DNA, 1011 bp, Homo sapiens
gctcgtgcgaggattcttgcattctgtccatccggccggtcccccgtcgagtctgtctaagccgagttgcgatggtcgagaagatcaacccgactggtccttgaccatggcttcggcgtgtgcccccctggcctgtgctcggggcgctacgctcatccgagcgcgatgatctgcttcacaatcgctgcgcggcgcgccgcgagatcacgcaagggccgtcttgtcctggtgacaatgttgtcaataaatgacatccatacgtgggagctgacagcaggcacagaggccaaggtctgtgagtctaccgtgggccccatgcatagtacctccattgatccaatgtgcgagtcgatgcgacccatactgggcggacagtaccctggtatcaatgaatcgtagggcatactacactctatcgtatgaacgtaagctgctcgtggtcccgggaagggatgcaccccaggtgctagcttgatcgaggcccgctctgaaacccaaaggaccaaatagagagaagatgacgtcagattatgtttgagaccttcaacaccccggcatgttcgtggccatccaggccgtgctgtccctctacgcctctgtggcgcaccagtggcattgtcatggactctggagacgggggtcacccacacggtgccatctacgagggctacgccctcccccatgccatcctgcgtctggaccgtgggtggccgggactgacgacgttacctcatgaaagaattctccactgaggaggctacagttcacaccacggccgagccggaaatcgtgcgcgacatcaaggagaagctgtgctacgttcgcccggacttcgagcagagattgcaccgcggattctcctcttctttggagaagaacttacactgccgtggccaggtcattcaccctggcatgacgggtccgtgccggggcctgccaccttcttctgggtagacttgggtccgagaacccttatcacatactgtcggatcccaacttcccggttggggg

SEQ ID NO: 554178 - DNA, 1042 bp, Homo sapiens
  misc_feature (1042)..(1042): n is a, c, g, or t
tataaaatatttaaaataaaaggggggccccccccaaaaaaaaaaaccccccgggcctcctttttttttacccccctttacccgccggtccacccctctgggggggggaggcactacaacggtaaaaaatagccgccatactgggaggaccggggcaagcccggttgccccaaaaaatttcttatatttagatagttccccctgaagccatacttttataattatctcacacattacataataaaaggggggtcttttaaacctttctctcaacctttaattaaacaacaaaagagaaacacctttttgaatatctcctggggacaaataatgacccctgttggggcaaatattttgtttttctttctcccacaatgtagagaagaagacacaacggaaaccccctttgtcagacttgtgtgcagagaaggggggagattccaaacattatgtctagcgtgcgtcaccaaatctaagaatatacgcgcggagggggcacccttgtcgccccataatttttataatggcgccgaatatactcagaattgtttgttttttaaaataaaaccccctcagtcaaataaaattttccttgagaaaatactattgttaaggacgtctctcgcggtggagttctaaatcacaatattttgcgtgcccaaagccccttattattaacccgccgcgcgttttagaatttgtacgaggttacacggttttgcggttgagaaaacaaattatactgtctttgaaaaaaaatttctaccctccccccaattttttttttgattgtctcccaaccatgaaaatttcgggattcccccaagttagaaaaaaagaaacatcaacacaaacacaagacaaaaaaggggcgggtcgataatcactggggccatacacacccttatggaagaggcccagatggtaaaaagggggggtacgacagagagacatcactgtgtgagacctcgctgtgtgacacccacacgccgaaaaatttgtcctctgccggtatacatacaagctgggtgtacaagacacn

SEQ ID NO: 554179 - DNA, 221 bp, Homo sapiens
taacaaacccacggtccccgcaagaaacaattcagtaatttccacaggcttggagatgactcaacagttccactcttacacgaccacccgagagttaccctgatagccgtccatttgggcgttcatcacagcatttgcttcttacatgaattcttaattttggaataatttcagattcacagagaagttacaaatccaatacagcgaattcttgttttcta

SEQ ID NO: 554180 - DNA, 116 bp, Homo sapiens
ctaggtggaggaggatttggatctgggacacctccatttgggtcagacacatagctgagatctgctgcagaaacagcgggggtatcaaaatatgcatagttgattggtccacaccc

SEQ ID NO: 554181 - DNA, 552 bp, Homo sapiens
agcctcttgagtagttaggactacgggatgtgtactactgtatccagataatttttttttttattttgagacagagtcatcgctctgtggcccaggctggagtgcagtgggtcgcgattcataggctacactagaaagactaccgccatacccgggcttaccacaccatattctaccatagcctacagaccatcccaagtagagatacggactaaccaggttgcatgccacacatgaccacggatagtatactctaggatactttaacacgatagacgatagggcgtttacaacaccatagtatggcacaggcatgggtacatactataacataccatgaactcactagactccagacacagacatacgagcctatcccaacggctgctggagcatatcacagtggcatgaagccccacgcggggaccacaacaacactaccaatcagcggacaactctatccctcaaaccctctcactattacatcgacattgcatctccaccgctactttatacaatccaaccaccacacaacccaggctcggcgccaca

SEQ ID NO: 554182 - DNA, 633 bp, Homo sapiens
ggcttttggcttaagtattcgtgatttctgctgtcgatgcccaagttctgtgtttggctttggtcgcatctctggtgctccgtgctatgtgtcctactatttccagctccctggtgttggcagtcactggagttcttgtgtttgtcactgtcgtctgtctgtagttagcgcttcagttgtgtttcctctgttgtccagcggccatgcacactgtaatgcatcacttcttttttatgttgtgggtatctttgcaagttagttgttgcatctgatttttcaggtgtacacttttattttttgatctggtcttattttaggggattttttttttgtaccatgtccgattcacacgctacacacccagcatgaacacattcgaacttcgaaggccacacagctacctggcattgcataggcgcgccacggtaagtagagttcacacctagaacactgtcctagaccgcaggacgcgtgccttggacttggtattgctacatgtgactggcatttcttgccctcgtctcatgaatgtgttagactcatgtaagaatcatatcctgccccagaatttcgaaagtaatgaaatgaagatatttcaaacagatctgtgaaacttcagacttcggtggtgcc

SEQ ID NO: 554183 - DNA, 329 bp, Homo sapiens
gcacgagctgggatttgctttaaaatgttccaggctgggcacagtggctcatgcctgtaatcctaacacgttgggaggcccaggtgggaggatcgcttgagcccaggagtttgaaaccagcctggcaacatagcaagaccctatctctacaaaaaaaaaaaaaaaaaaaaaacccctaaaaagttacccaggcagttagcttcgtacctgaggtcccagcttcttgggaagctgagctgggaggatcagttgggcatgggagttcgaggctgcagtgagccatgatcatgcctgcactccagcctgggtgacagagtgagaccctatct

SEQ ID NO: 554184 - DNA, 300 bp, Homo sapiens
  misc_feature (18)..(18): n is a, c, g, or t
ttagacaccgcatggcancgatacagcttttgtaagatcgcttcgccttcttttgcgactgagtccgttacaactggtttcgcatttttcattttttcaacccattgatcgaactcttttctaggaagcggcttcactttgaagtccattaacgcatgggacgggccgcaaagctctgcacactttccgtagaaaataccgcctgccttgtctgttgccttttgatcaaactctaaccaaaactggtttttgttatcaacgttcgtatccattttcccaccaacagtctaaatgcaatca

SEQ ID NO: 554185 - DNA, 422 bp, Homo sapiens
ttaaaggaggtagtgagggggcggaagcacttcagagtcagaatccatattagactctggggagtgaaaaattaacttaaatcagtaagatgggagagccattcatgtgagaggtgcatgcagataggcgtagtttaatctctgacctggggaagggagagatggaagttgagacgaaatgtctgggcatccgtggtccgtaaggtcatgtgctttgtagctgaatatcatagaagtagcaatgttcaaagagtgggaagaagtataacataatgacatacttcaggccacataccaatcgttaatgaatttaataaaagtttaagaaattccacagagttataagtattggattatgaactcataaaaaatagatataagaaggaataagaaaaatacgagagagaaaggaaggaggtgaa

SEQ ID NO: 554186 - DNA, 159 bp, Homo sapiens
ggggggggttttttttggggggaaaaaccccccccggggggggttttttttggggggggttttccccttttgggggggggtttaaaaaaaaacccccccccccccccccctttccccccctgggggtttttttttttaaggggggttggttccccccca

SEQ ID NO: 554187 - DNA, 374 bp, Homo sapiens
gccgatggctgcgttgcgtgaggcgctggtgaaggtgcgcaaggtggtggcgtggtgagcgatcttcagtacttgtaagcctggcgaccaatcagcagccattggccgtgctgtttttgccaaacctgaaagttgtcgatatcggttggtgtgtccacaccgctgttcaccgccagggcatggaagtggttgcgcaccagggcggtatcgccgttgagggtgatggtctggttttgcatctccagggttttgaatgcgctggtatgggtttccaggtcggcaatgaattgcgccttgttttgcaccttgccgctggagtggccgtaggtgagcttgtcggacgtcagtgcatgaagctgcttgaggtccagatg

SEQ ID NO: 554188 - DNA, 978 bp, Homo sapiens
  misc_feature (863)..(863): n is a, c, g, or t
  misc_feature (885)..(885): n is a, c, g, or t
gagtctcttcagcaaaagctcagtccccagctttgagtcagagtagggaccatgctgtcccagcgttcaaggataaaaaccatcaggcccaagtgccatccgatagtccatctccagagtcttcctccacaaactgggattcatccccgctgaaaaagcacaatctaacagcaagggaacaaaaaaaccatgctatcacataatactatgatgaagcagagaaaacagcaagcaacagccatcatgaaggaagtccatggaaatgatgttgatggcatggacctgggcaaaaaggtcagcatccccagagacatcatgttggaagaattatcccatctcagtaaccgtggtgccaggctatttaagatgcgtcaaagaagatctgacaaatacacatttgaaaatttccagtatcaatctagagcacaaataaatcacagtattgctatgcagaatgggaaagtggatggaagtaacttggaaggtggttcgcagcaagcccccttgactcctcccaacaccccagatccacgaagccctccaaatccagacaacattgctccaggatattctggaccactgaaggaaattcctcctgaaaaattcaacaccacagctgtccctaagtactatcaatctccctgggaacaagccattagcaatgatccggagcttttagaggctttatatcctaaacttttcaagcctgaaggaaaggcagaactgcctgattacaggagctttaacagggtgcacaccattggggtttgaaaagctcagaatggtaattaagtccgatttgagctactatgctacagatcccggtttgtcttgtaacccttttggaaggcttataggaccangaggattggaaatctttgtaancgccatgttcgtccacaaacattacagatgtggccccattatgtgcgtacaggcggcttaaaattgtctctccaataaaagccagaggggcga

SEQ ID NO: 554189 - DNA, 967 bp, Homo sapiens
  misc_feature (772)..(772): n is a, c, g, or t
  misc_feature (776)..(776): n is a, c, g, or t
gagtctcttcagcaaaagctcagtccccagctttgagtcagagtagggaccatgctgtcccagcgttcaaggataaaaaccatcaggcccaagtgccatccgatagtccatctccagagtcttcctccacaaactgggattcatccccgctgaaaaagcacaatctaacagcaagggaacaaaaaaaccatgctatcacataatactatgatgaagcagagaaaacagcaagcaacagccatcatgaaggaagtccatggaaatgatgttgatggcatggacctgggcaaaaaggtcagcatccccagagacatcatgttggaagaattatcccatctcagtaaccgtggtgccaggctatttaagatgcgtcaaagaagatctgacaaatacacatttgaaaatttccagtatcaatctagagcacaaataaatcacagtattgctatgcagaatgggaaagtggatggaagtaacttggaaggtggttcgcagcaagcccccttgactcctcccaacaccccagatccacgaagccctccaaatccagacaacattgctccaggatattctggaccactgaaggaaattcctcctgaaaaattcaacaccacagctgtccctaagtactatcaatctccctgggaacaagccattagcaatgatccggagcttttagaggctttatatcctaaacttttcaagcctgaaggaaaggcagaactgcctgattacaggagctttaacagggtaattcaatggtccgggtganactngtggctgcatacaaatttttcatccatggtcaggataatgattcctggtaaaagcaattttttttggaagaaattaatggaatgatttttaggtaggaagaacctttgggttacattattcactgggtttgttaaggggggcgcgacattggtgcacaaatcgtgtaaaggttaaatacccagggggttag

SEQ ID NO: 554190 - DNA, 276 bp, Homo sapiens
  misc_feature (1)..(1): n is a, c, g, or t
  misc_feature (15)..(15): n is a, c, g, or t
  misc_feature (17)..(17): n is a, c, g, or t
  misc_feature (43)..(43): n is a, c, g, or t
  misc_feature (45)..(45): n is a, c, g, or t
ncttgtcgttaccgngnttattaccctttttggttaaacaagnangatagagaaaggaaaatgttatgaagaaattcctaaggaagagaaaatctactgactattcattaggtgggagtggggcacgatcaaggtctccatcctcgtcgtcttcacgtcaagtgggctgaggaggagcagaaggaggaggaactggtcttgctgtctcaggaacggccgaggaggaagaaaacctcgtattagtggaggaacatgggttcagttggaaacatggaa

SEQ ID NO: 554191 - DNA, 91 bp, Homo sapiens
gactatgtgtattgagcactaagtggaagcccctacagaatggacattagtgattaatgcaagggtccttaacagcagaaacggggccaag

SEQ ID NO: 554192 - DNA, 887 bp, Homo sapiens
ggggtcagtgtcacctccaggatacagacagccccccttcagcccagcccagccagatccacgaagccctccaaatccagacaacattgctccaggatattctggaccactgaaggaaattcctcctgaaaaattcaacaccacagctgtccctaagtactatcaatctccctgggaacaagccattagcaatgatccggagcttttagaggctttatatcctaaacttttcaagcctgaaggaaaggcagaactgcctgattacaggagctttaacagggttcaagacttcattggaggaagtaaataaagatctggtggaaatagcaagacaactaaagctggaagtggagtgtggagatgtgactgaatggctgcaaatctaaaaaaaacaacaacaaaacaacaacaacaacaacaacaacaacaaaaaaccacctgagcagatcaggagttgcttcttatgaataagccaagaaagtggtttcttgagatggtatctacccctgctgaggatgctgtgaatatggttgacatgacaacaaatatggagaatattccctaaacttagtggataaggcagtagcaggatggagaggattggctccaatttggacataagttctactgtgggttacaaatgctacccacacagtatcatatgctaccaacgaatttttcattgacggacgaatccatggagccgcaaaatcactgtgcttattttaataatggccatcatcaaattcgcatcttaccgatccgcgcggttttcacattggatcactccccacaaattacttgaggcaagactagattttgcaaaattgacacagggctgttgcacattgtttcgcccgttttgtgtgaagcgcactttgggagaa

SEQ ID NO: 554193 - DNA, 584 bp, Homo sapiens
ggcgccatcttttggcggaaattgcagagaaatcgtgcccccccgggtgtgtccggtccatttcttcggcgggttccgccgactttgttgggggattgaccacgcgcccgcggctgtctttctccttgggtgtgggccctttcccccccaggtggctcagggggatgccccgcgtcaacggctctagctggtgtgcgggtctcggcgcaccggtgtagatgtggggtgagtgctgacaagctccccccttgggtgggaattcctagggcctttcccactagggagcacatgttggatgtgtcccacgctacctcgctctaccctgaaacagacgggttaaccccgatgctcatctatagttgcagcagtaagtaatagcggcactgaacgattgaatggggccccaataccagacatgtccaacacactgatggagccaaacaaaccaacaacttttgggttaggaggtggtttgaagatgatcttagagggcccccattgtcatcaagtgtgcccagtatcaggagctgcactagagctttcggggtccctccccaaattaaaccccaaaaggcccacataaa

SEQ ID NO: 554194 - DNA, 475 bp, Homo sapiens
attcggccataagggccggggataaaggtttcggccatccggttccaggcaatcctttaactgggctaagtttccaaataatgcttaatggcggattaaccatggggataatatccatctactaagaaatggtttaattttaaaataaattggctaacctgttggtttggaggctaaaataatgtccggtaaagggaaattaaccatattaaggaacccattattaaaaaggtgggcctaggttttttcccttaccatatattaccaggcttaacggaatttaattcagcctaaaaggtaataaaattttgggataccggttataaatccttggaaaccttggaatagcctataaaaggtatggaaaaggttggaatttaaggggattaaaagcaccattatcagaaccttcgggttaatacggaacctgggtggtggatgtcaaggaaaaaaaagatggtttggtaccacataa

SEQ ID NO: 554195 - DNA, 1108 bp, Homo sapiens
  misc_feature (833)..(834): n is a, c, g, or t
  misc_feature (878)..(878): n is a, c, g, or t
  misc_feature (976)..(976): n is a, c, g, or t
  misc_feature (987)..(988): n is a, c, g, or t
  misc_feature (996)..(996): n is a, c, g, or t
  misc_feature (1004)..(1005): n is a, c, g, or t
  misc_feature (1011)..(1011): n is a, c, g, or t
  misc_feature (1021)..(1021): n is a, c, g, or t
  misc_feature (1024)..(1025): n is a, c, g, or t
  misc_feature (1027)..(1027): n is a, c, g, or t
  misc_feature (1041)..(1042): n is a, c, g, or t
  misc_feature (1044)..(1044): n is a, c, g, or t
gagtctcttcagcaaaagctcagtccccagctttgagtcagagtagggaccatgctgtcccagcgttcaaggataaaaaccatcaggcccaagtgccatccgatagtccatctccagagtcttcctccacaaactgggattcatccccgctgaaaaagcacaatctaacagcaagggaacaaaaaaaccatgctatcacataatactatgatgaagcagagaaaacagcaagcaacagccatcatgaaggaagtccatggaaatgatgttgatggcatggacctgggcaaaaaggtcagcatccccagagacatcatgttggaagaattatcccatctcagtaaccgtggtgccaggctatttaagatgcgtcaaagaagatctgacaaatacacatttgaaaatttccagtatcaatctagagcacaaataaatcacagtattgctatgcagaatgggaaagtggatggaagtaacttggaaggtggttcgcagcaagcccccttgactcctcccaacaccccagatccacgaagccctccaaatccagacaacattgctccaggatattctggaccactgaaggaaattcctcctgaaaaattcaacaccacagctgtccctaagtactatcaatctccctgggaacaagccattagcaatgatccggagcttttagaggctttatatcctaaacttttcaagcctgaaggaaaggcagaactgcctgattacaggagctttaacagggttgccacaccatttggaggttttgaaaaagcatcaagaatggttaaatgttaaagttccagattttgagctactattgctannagagtcccaggttatgtcctttgtcaatcccctttctggcaganggtccatttaataggactcctaagggatggatatctgagaatattcctatagtgattacaaccgaacctacagatgataccactgtaccagtatcagnagacctatgtnnagaaagtngtatgtgnnacattnactctggatntannanttgctgttctatannantcactatccggcttatcctcttgcatctgttattactagccatcattgtaaatcaggattctcg

SEQ ID NO: 554196 - DNA, 983 bp, Homo sapiens
gagtctcttcagcaaaagctcagtccccagctttgagtcagagtagggaccatgctgtcccagcgttcaaggataaaaaccatcaggcccaagtgccatccgatagtccatctccagagtcttcctccacaaactgggattcatccccgctgaaaaagcacaatctaacagcaagggaacaaaaaaaccatgctatcacataatactatgatgaagcagagaaaacagcaagcaacagccatcatgaaggaagtccatggaaatgatgttgatggcatggacctgggcaaaaaggtcagcatccccagagacatcatgttggaagaattatcccatctcagtaaccgtggtgccaggctatttaagatgcgtcaaagaagatctgacaaatacacatttgaaaatttccagtatcaatctagagcacaaataaatcacagtattgctatgcagaatgggaaagtggatggaagtaacttggaaggtggttcgcagcaagcccccttgactcctcccaacaccccagatccacgaagccctccaaatccagacaacattgctccaggatattctggaccactgaaggaaattcctcctgaaaaattcaacaccacagctgtccctaagtactatcaatctccctgggaacaagccattagcaatgatccggagcttttagaggctttatatcctaaacttttcaagcctgaaggaaaggcagaactgcctgattacaggagctttaacagggttgccacaccatttggaggttttgaaaaagcatcaagaatggttaaatgttaaagttcctgtaatcaggcagttctgcctttccttcaggcttgaaaagtttaggatataaagcctctaaaagctccggatcattgctaagtgattgttccccgctagcggggaacaatcactttgtaaacttaccactattacatgaacacttaaaatgagttttactaccaagttaatga

SEQ ID NO: 554197 - DNA, 101 bp, Homo sapiens
gctgcagctgctgggcggcgccggcggttctttgttccggtggctaaggtcttcatctgcgccggcccggaccgcagccggggcccacagcagcggaacca

SEQ ID NO: 554198 - DNA, 1578 bp, Homo sapiens
  misc_feature (1303)..(1304): n is a, c, g, or t
  misc_feature (1348)..(1348): n is a, c, g, or t
  misc_feature (1446)..(1446): n is a, c, g, or t
  misc_feature (1457)..(1458): n is a, c, g, or t
  misc_feature (1466)..(1466): n is a, c, g, or t
  misc_feature (1474)..(1475): n is a, c, g, or t
  misc_feature (1481)..(1481): n is a, c, g, or t
  misc_feature (1491)..(1491): n is a, c, g, or t
  misc_feature (1494)..(1495): n is a, c, g, or t
  misc_feature (1497)..(1497): n is a, c, g, or t
  misc_feature (1511)..(1512): n is a, c, g, or t
  misc_feature (1514)..(1514): n is a, c, g, or t
cttttttatttttttttggccttgaatttttttaatttttcatccagttgagaattctcaagttcttggaataggggatttcataataaatataagggatttcaatttaagcttggaccattccccattatgttttaagaaggcttcttcctttaaataacctttctttttcatctgttcctaatctgaccctgctccaacaagggtgcccactccattactgccagggtgaatgtagaagttttgggttccctaattggctccacttaaacttgaggggagcctctttgttattgctggaaaaggacaggagttcagcctccccccgtagtcttcactaagactgcggagacaaggagctagttactggccaaaaggaatgaaagtcccaacttcccactcggtctctctgacaccaccctagtgggagtattggagaaacttgttacagcctcacagggtgaaattctgggctccccacaagatcttaacgtgggtgagagcgaagtcaaagtgttttctgtggtggttggctaaagtagcgcggccattgtctaaacattttctgtcttgcagaggcagctcctttcctggtcctttagctggagagaacagcctttcgttggagctttgtctgtctggacctcttggtgtttctgggttgccatcatcttcagcttcaagtctgagatttaggggcttgggatttttactcatatgaatattgttttacagatgttgatggcatggacctgggcaaaaaggtcagcatccccagagacatcatgttggaagaattatcccatctcagtaaccgtggtgccaggctatttaagatgcgtcaaagaagatctgacaaatacacatttgaaaatttccagtatcaatctagagcacaaataaatcacagtattgctatgcagaatgggaaagtggatggaagtaacttggaaggtggttcgcagcaagcccccttgactcctcccaacaccccagatccacgaagccctccaaatccagacaacattgctccaggatattctggaccactgaaggaaattcctcctgaaaaattcaacaccacagctgtccctaagtactatcaatctccctgggaacaagccattagcaatgatccggagcttttagaggctttatatcctaaacttttcaagcctgaaggaaaggcagaactgcctgattacaggagctttaacagggttgccacaccatttggaggttttgaaaaagcatcaagaatggttaaatgttaaagttccagattttgagctactattgctannagagtcccaggttatgtcctttgtcaatcccctttctggcaganggtccatttaataggactcctaagggatggatatctgagaatattcctatagtgattacaaccgaacctacagatgataccactgtaccagtatcagnagacctatgtnnagaaagtngtatgtgnnacattnactctggatntannanttgctgttctatannantcactatccggcttatcctcttgcatctgttattactagccatcattgtaaatcaggattctcg

SEQ ID NO: 554199 - DNA, 838 bp, Homo sapiens
gacaggactcgctaagtgttcgctacgcgggctacccggatcggtcggaaatggcagaggtggaggagacactgaagcgatgagagccagaagggagtgcagggaatcatcgtcgtgaacacagagaggcattcccatcaagagcacatggacaacccacacaccacccagtatgccagcctcatgcacagtttcatcctgaagggcacggagcaccgtgcggtgacattcggacccaagaaggatctccaccttccttcgaattccggttccaagaaaaattgaactttatggtgtgccccagataaaagacttattcccgtgatggtggattcaagaaatccaaagcgattaaaggcacactctctgtggctccccgtgttgctcattcccttaattaaagtgccccccgcgaggaattggttaagtgttcaactccagtgtcaggcggcgacttaggcacactattggcaagtcgggttgtggaacccccatttcaagcaccaattccagtggaccgtgttgttgagaactgggagggactctttcgtccccccaacaaaagggaacccccccgttgtggttggcaccagaactttcccccagaagacttccgtgagaggcggccctacttccttcaatatcccaagggtttggggaggcaaaggaagcattggagtgaaagcccaggcaaccccaagatttccttttcgttggacgcttgcaagttccactttgtgtccgcccttgtgcgagaaacagctggttttctttaacctaaaattaaccaaagtggcaccacagaacactaacaaatatacacacaaaaacttttctg

SEQ ID NO: 554200 - DNA, 330 bp, Homo sapiens
aaagggctgggattacaggcctgagctaccatgcctggctttgtttctgtttaaagacaccttatttaatatatattcggttggttcattaacattgaactttactgacagcagcactattaactcatgcctgaactaagcttctctaacatgtattttctctgtgaggcatatcactatcttctgcactgaggaactctagacagcacttcagcactactgtgggggacattttatacagcaaatcatcatgaaagcatgacactaaatatactgcagaaggataacttgtttacagtatgccagctgaaacagaaggcagggtgttgc

SEQ ID NO: 554201 - DNA, 493 bp, Homo sapiens
  misc_feature (86)..(86): n is a, c, g, or t
  misc_feature (127)..(128): n is a, c, g, or t
  misc_feature (493)..(493): n is a, c, g, or t
ctcccctcaactcaccgcctcaccctacccaggacctgctgaaacacacacctgtggaccaccccaactacccgatgctgtagacnccctccatatctcccataactttctgtccaacatgaacgannagcctgaaactatccttcaaccatgatgataagaagtagggggattacaggtgtgcaccaacacgcgcagctaattcttgcatttttggtagagacgtggtttcaccatgttggccaggcccatcttgaactcctgagctgaggcaatccgcccggctgagtctaccacagtgctgtgattacaggcgtgagccgccgtggttggccccatatcactgctttaaacgaattagactacaaaatattacaaataaatttgtaactacaatacaggatagcaccataatagggacactaaattagggaataccaaggttccttgaaggtcttctactttaaaaaaaaaggtataataatttcaatan

SEQ ID NO: 554202 - DNA, 332 bp, Homo sapiens
tgtagattttccatgtagaaagaaccctagcatatacagtcatggcctctagcgggtagatgggcactgggccattgataactcacatttgatatggacacacattattttcctgagaaactcacaatgcacagtctccactcactgcccagccccaccctggccaattgtgctaagttcttcagagcatctgagtgtcaaaggtcttgtctggcgtaaggattgtttccagcaggcagctggagccccaatgtgccctctgtgttaccctctccgctctcctgtttctgtataggtatagctaagaatgctttttccatttttcagtggtt

SEQ ID NO: 554203 - DNA, 164 bp, Homo sapiens
ctgaccaggtgatgacagtttatttactttgatctattttactggtaggggagacaggttgagtgttgtggtgaaagcccatagtatatcagtaatggggatgatacaatcgtgccatgcagagagagaggttggcagagtcggtcagcatgcatcaacttcac

SEQ ID NO: 554204 - DNA, 384 bp, Homo sapiens
  misc_feature (148)..(148): n is a, c, g, or t
atttcttcctcctccccttggtgactcaaaagccttgggcatttctttttgcaaaggcccctgaatgggtttgggttcctgttagcataatgtgaggaggtggaaaaaaagcccacccttgggtccactgtgaccccggttcccaagntgacctgtgtttcctccccagtaatttttcttgttccaaaaaggggggggggggaggtccccatttctgtctcaactttatgggcactgagcgggaactttttacttcccccctgaaaaaaagaatttgaaaaaacatttgttttctcaaaaatttgctatgaaagggtgaggggttaattaaaaaaggcaattcctggaatgggaaaaagcaaaaaaagccctgagacccttcca

SEQ ID NO: 554205 - DNA, 225 bp, Homo sapiens
ccagtgatagatgttctacacataaacaggctaaaaccagatgactcaaaagaatcatataattgtataaatagacagccgtatttctcaatgctggtgtttaacaagatctgtgttccttgatcaaggtacctgtgaacacagacagcctgaagtgattcgcataatttctttctgttgcacacataccactggtggttctccttcctgccgaccgcggccgct

SEQ ID NO: 554206 - DNA, 390 bp, Homo sapiens
taatggccgttaaaactgctttccaaagggttttgaaggcggccctcttccccgatggcctagcaggtggaatttgcgaagctgccaaagccttaggcaagggccaagcccttttttgtgggcttgcatccccctgtattgggcctatgtttgcacagttgggggaggccctttgggctgagcgccttatcccccttattaaggttggggcaccaaaaaactaggagaatgggggggcctttgttaaattgccaaaaaggggaaaccccgtaaagtggttggttgcagttgggtggtagttaaggactatggcaaggggtcccaggcccaggatgtcattttagggtttttaaaaagcaaaaaataaaaaaataaatttttggcccccca

SEQ ID NO: 554207 - DNA, 452 bp, Homo sapiens
tgataagtgaatagactaaatttcaaatgtgttcctttttatatttctatgagagtcatgattttactttttttctgaaaattagcttttaacacacatatctccttatggatctgtgtagaaatttacttggagaaatttatcagagaatagcattgctggatgtgctgggcattactgatgttcatcaatattcaatccttgcctccttctggaaactcagagcgtacttccagcaatgtggctcattctgtccccaggctgggaatagccgtgacagtgtcattagtgggccaaagcaatgataagctatggtgagatccttatgccacacactctcttcccttgccacagtgactgccagtgttttagctcagggctggcaaactggcccgggggccacatcccactcaccacctgtttttgtaaataaaactttattggaaaaaaaa

SEQ ID NO: 554208 - DNA, 100 bp, Homo sapiens
caagtagctgtgagtacaggtatgtgccaccacacccggctaattctgtttattttttctgtagagacgaagtctcagtatgtgtccaggtggtctcaaa

SEQ ID NO: 554209 - DNA, 756 bp, Homo sapiens
gaaatcgctaggtaggttactatctggctaatccatgtcttatccttgacgaatttaattcatatttgggaaactttgtagggaaatgaagaaataaaagtcactgagtctgggtgagatgtcgttaagaatgaatgatgaagattccaggtttcaaacgtcttctcacgattaaaattgtggctgtgaactcttactgaaaatgagtttgtaggttcgtgtaagtggtaaaaatgtgctgtctatttgatggggccatttgtaccacaactaatcttgcctgtggtttactaagcatctgcctgcgatcccacagaggtactgtggtgtgccacaggagcttgaatagtcgagaagagtgggatttgatgccacggtagtggacgtggtacgtcatgtcctcagatgtgtacctcctgccgctgtatggaggggatgggggcaaacgccattcgtgacttacatcttgggtgtgtgacctatgtatggaacttacttgtactttttgccttactatttttaatgaagatgcaagattttctgtgatggggttctctctctcttttttcggggggtggagtcactaaataaagtttgcaaaaatagtttaagacaaggcaacatctggttatggtatatgatacttcatttaaagaagaaaggcaaagcgaatgccttgcaagttttgaggttcaggaaaaatgggattgggtctcttcgaaggtgaatattccagggatttttattaatctaagg

SEQ ID NO: 554210 - DNA, 934 bp, Homo sapiens
  misc_feature (51)..(51): n is a, c, g, or t
  misc_feature (62)..(62): n is a, c, g, or t
  misc_feature (68)..(68): n is a, c, g, or t
  misc_feature (95)..(95): n is a, c, g, or t
  misc_feature (103)..(103): n is a, c, g, or t
  misc_feature (106)..(106): n is a, c, g, or t
  misc_feature (132)..(132): n is a, c, g, or t
  misc_feature (138)..(138): n is a, c, g, or t
  misc_feature (166)..(167): n is a, c, g, or t
  misc_feature (170)..(170): n is a, c, g, or t
  misc_feature (181)..(181): n is a, c, g, or t
  misc_feature (185)..(185): n is a, c, g, or t
  misc_feature (196)..(197): n is a, c, g, or t
  misc_feature (203)..(203): n is a, c, g, or t
  misc_feature (206)..(206): n is a, c, g, or t
  misc_feature (232)..(232): n is a, c, g, or t
  misc_feature (250)..(250): n is a, c, g, or t
  misc_feature (293)..(294): n is a, c, g, or t
  misc_feature (303)..(305): n is a, c, g, or t
  misc_feature (311)..(311): n is a, c, g, or t
  misc_feature (313)..(313): n is a, c, g, or t
  misc_feature (319)..(319): n is a, c, g, or t
  misc_feature (325)..(325): n is a, c, g, or t
  misc_feature (330)..(330): n is a, c, g, or t
  misc_feature (335)..(335): n is a, c, g, or t
  misc_feature (344)..(344): n is a, c, g, or t
  misc_feature (352)..(353): n is a, c, g, or t
  misc_feature (359)..(359): n is a, c, g, or t
  misc_feature (373)..(373): n is a, c, g, or t
  misc_feature (379)..(379): n is a, c, g, or t
  misc_feature (385)..(385): n is a, c, g, or t
  misc_feature (392)..(393): n is a, c, g, or t
  misc_feature (469)..(469): n is a, c, g, or t
  misc_feature (487)..(487): n is a, c, g, or t
  misc_feature (580)..(580): n is a, c, g, or t
  misc_feature (636)..(636): n is a, c, g, or t
  misc_feature (768)..(768): n is a, c, g, or t
  misc_feature (800)..(800): n is a, c, g, or t
  misc_feature (812)..(812): n is a, c, g, or t
  misc_feature (821)..(821): n is a, c, g, or t
  misc_feature (852)..(852): n is a, c, g, or t
  misc_feature (923)..(923): n is a, c, g, or t
ttctaaaaccccccaaaataaaaaaaaaaaaacaaaataaaagaagcaaanaaaaattctanaaaaanaagaaaggaacagtttattaaaaagtntaaaaaanctntaaaatcctttaagtatatggaaatnttcttnaaacttcctcgtcaaacgtcgtaccganntcntcctcctcttntgcngtggcatcctnntacttntgntactcatagacgagtgttcgttcatnttgctctcaccctcggtnaactccatctcgtccatgccctcccctgtctaccagtcgaggnnggccttccnnnggttcntngcagtnaactgntccgngttgngctttatgntctcctgnnttgctnttctatttccaatnaaggtnacttcnatctttnngccacgagatgggatttcacagacggctgtcttgacatttttggggatccattccacaaagtagctgctgttcttnttctgcacgttaagcatntgctcatcgacctccttcatggacatccgaccacggaagacagcagccacggtgaggtatcggccgtggcgggggtcacaggcagccatcatnttcttggcatcgaagacctgctgggtgagttccggcactgtgagagctcgatactnctggcttccacggctggtgagaggggcaaagccaggcataaagaaatggagacttgggaaggggaccatgttgactgccaacttgcggaggtcagcattgagctggccagggaaacggaggcaggtggtganacactcatggtggctgagacaaggtggttcanatccccgtagtntggtgtggncagcttcagagtgcggaacagtatatcatanagggcctcgttgtcaatgcaataggtctcatcagtattctctaccaactgatggacggagagggtggcatngtagggctcga

SEQ ID NO: 554211 - DNA, 592 bp, Homo sapiens
aagggatagtcaaccatcctcaatcaagactgagatccaaaacagcagcgtgctttcctacaaggaaagacatcaaggaactacgtgagtctgaagggtgacataatcaaccacaagaaacatgttacggtttagcctggcacagaggtgtcatgcctgcggtcccaactactggagaggctgaggtgggaggacgtgtttgggcccaggagttcagggaacagtcgcggaaatataatgagactctgtcgtctaagaatcgaaaattagagaaatataaaaattataaagattaaaacacagaaaagtgtcatgatagctcaggttgtcagagaggatgctgcagtagtctgggaaaaaagtgaagtgacagtcaggcctgacagaggactaaagggtgatgatgaagaggctgagctgtagagctcagcctggaccacaggaggggtagttgagttcacagagggatactgccatataagctggttgtgaatggggtggtatgaagaccgatgactagtatcctctccaggttacaaataacatgaaccaaactgtgtaatgtgatactaatatgcagaataaagtatat

SEQ ID NO: 554212 - DNA, 108 bp, Homo sapiens
tgggtatcacatacagtttaatattatactcctaaaatttaacaacagaaagacaaaaaacccagttaaaaaaaatcaaaatactcaaaacagacattacttcaaaga

SEQ ID NO: 554213 - DNA, 112 bp, Homo sapiens
acgtctcacgcttatacttctcacgcttatacttctcaacgctttatacttctcaacgctggatacttctcaacgctttatacttcctcaacggtgcgccgtcgcctacgca

SEQ ID NO: 554214 - DNA, 123 bp, Homo sapiens
cagaggaggtggacagcacagaggaggtggacagcacagagggagggcacagacctgggccacgggtaggaaaatcagcatcctactctctcctcaattccatctgttaatccacctcctctg

SEQ ID NO: 554215 - DNA, 272 bp, Homo sapiens
ggcaaataatgtatgaggcgattagaaagtgtaccctggcgcaatagtatatagtaccgcaggggaaatgatgaagaaattataaccaagcatcatatagcaaggactaaccccatataccttctgcatcatgaattaactagaattaactttgcaaggatagtcaaagctaatacccccgaatccagacgagctagctaagaactgcttagagagcacacccgtctatgttgcacaatagtgtgaagattcataggtagaggcgacgaacc

SEQ ID NO: 554216 - DNA, 211 bp, Homo sapiens
ttttgggggtccccccgggggcgccggtttttttaaaagggcacctccggagatttttttcttttttctccccggccaggggggatttaatccccccccttggggtccccctttggggggtttttaaaaccgctttttttttagccaatttgggggttcttttaaaaacggggaatgggaaaaaaaattatttttttccccatccttccca

SEQ ID NO: 554217 - DNA, 755 bp, Homo sapiens
gatagacctaacaccaaacccactccagcttaataccagtacaagcttaggcgaaccatttacccaaataaagtataggcgatagaaattgaaagctggcgcaatagatatagtaccgcatagggactagatgatcaactgatatacgccgagcataatatagcaagggactaacctcacgaataccttctgccgagtaatgacttatctagagaaataacttgcataggagaaccaacaggtatgagccgccgaaaccagacgagctacctaagaacagctaaaagagcacacccgtctggtgtgagcaaaatagtgggaacgattggtaggtagaggacgagcgaacccgtaccgagcctgggtgttaagcctgggtatgtccacaggataagagatcttcagattcaacctcttgaatttgcccacaagaatcctgctacaagtccccttgtacagtcttaactggtgcagtccactgaggaacaggctctttgacactaggataacccaccgttgtagagatgagtgaacaaaagtggaaccacccatagttaggcctaaaaagcaggccacaatttcatgaccacgcgttcaagctcatagccataagctaaattaaattcgcagacatgtgactgagctcctcacacgcaattggaccgtctatcaccctggggcacgaactagggtaagaatcgggcagatggaaacattcgctccgaaaagccaggttaggattaaaccctgactga

SEQ ID NO: 554218 - DNA, 150 bp, Homo sapiens
actcaagaggatacccaccaacgaacggtgacccaaccccaacaccaaccggcacaccgagtacaaccctgacacccatacaccaccaccactatggtgaccccaaccccaacacccaccggtgcaggtagtagtgacgggtaccgagct

SEQ ID NO: 554219 - DNA, 1009 bp, Homo sapiens
tggactagtcttttttaacagtcattaatattatataggaatatgggtgtacatataggaagagaacaggttctggtattatagtcttttaagataaacttgacaaagttaactgaaatttatctggtccattttattcatgctactacgatgggaatcatttaaacacaagggtcagcaagcttggacccatggactggccacctgattacgtaaataaagtttactttgaaacaagcctacagctcattcatttatgatttgtcatgtggttgcattatccacaacatgacagagttgtatggcttgcaagatctaaaaacagttatactatttggccctctcaagacaaagcttaagacaccatagatctaatggacctatgtagggaaaaaacaaatacacataacctcagtaatcaatttatatccagttatgagctgcataactgtaatgctataggtcacagggttaaggtagaaataaatattcagcactgactaaactgttctaacatcctcaaaagaaagtaacccaaacaacatgcctcctaacaaacatttacctatctataacaagaggtatgaaacaataagataggggataacacagtgtgaaatctagaaaattccaaatggatacatttagaaatgtaaattaagaatagaaaagaatggacaggaatgaacattaagatgtaacaatgaaatgtacagcaaaatagtaataaagaaccatagaaaaatgaaatgggaaaaaagcaacaggtaaaacgacatcacaacatccaaaataacataacacataacattaagggaacaccaaaaggggcagaaaacaacactaagcaagggcaaaaggagaccaacaagtacgcaaagcagggagatcagaaagaataagaggggaatgaaaagagaagaagacaagaagacacacagaagacaacaagggaacatgagacacaaaaaaacacaaacaagaaagataacagaaagacaaaagacaa

SEQ ID NO: 554220 - DNA, 774 bp, Homo sapiens
ctactttatgtaacattacagaacagctagaggtcctggggtaagagaaaaaaagcacatcacaacaaatgtgaaagccttcattattacacgttccagttgtctcgctgtgtaggcataagctaatggtttattttcagaaagctgcctgaaacgttgcttggtattcttctaggaagaactttaattcctcctgaggaactctactttctgagccaaactgctaattttctgcggaactgtctagaagatcattcaagagaccctgcagtgcactttctcgtaaaagttaaaaaaaaaaaaaaaaaaaaggggttttcccggggccttgggaacatttgggcctatgaagaagtttgggcatatattttatactggagttgagaacaactttagataatccatatttatactatccgcagaaagccattggggcaaagcgttcagcccattagcactcatttaacccggggttagcaataattctttgtgaaaacagggtgccagtccttatgtggtgataaactaagaaagccccatgggaattttaaaagtgtggtgtaggatgtgaaaccaggtggaccttatattatggccgagagggaatttgcagcattaacgttcctaacgggggccaaaaccaagagaaagggttccagcaactttcgatgacacgtagttgggccacatggtcaggccaatttggtgtggactatttatggtacctttttcataactgggattggcaaattaagctggggagatctaaatgag

SEQ ID NO: 554221 - DNA, 358 bp, Homo sapiens
cttccagagttgggaaccagccggctggccgcatccagaatctcctgcgttctgatgtcgtgcccagtacagcatcagaatttccgctgcctgtgcactcctgaaaagggctttggcttttagggaagcagcttccaccgcattatcccccagttcatgtgcccagacggtgatttcacaaaccacaatggcactgggggctagtccatctataggaagaagttcgatgatgaaaacttttatcctcatagcatactggaccaggtcctactatccatggccaactcttgccctaaaaccaattgctctcaattctttctgacatttgacaagacatactggcttgataacaagcctt

SEQ ID NO: 554222 - DNA, 162 bp, Homo sapiens
tacgacacaggactattaagagaagtataaactgagatggctgttatactacgtgcctcctctttgctgccagaatacgaatgaacgactgaaactcaagtagcaatttcggacaggaagtaagattaacactgggagctatggaccaatggtggagcaata

SEQ ID NO: 554223 - DNA, 468 bp, Homo sapiens
  misc_feature (59)..(59): n is a, c, g, or t
  misc_feature (70)..(70): n is a, c, g, or t
  misc_feature (72)..(73): n is a, c, g, or t
  misc_feature (78)..(79): n is a, c, g, or t
  misc_feature (83)..(83): n is a, c, g, or t
  misc_feature (101)..(101): n is a, c, g, or t
  misc_feature (111)..(111): n is a, c, g, or t
  misc_feature (113)..(113): n is a, c, g, or t
  misc_feature (117)..(117): n is a, c, g, or t
  misc_feature (124)..(124): n is a, c, g, or t
  misc_feature (133)..(133): n is a, c, g, or t
  misc_feature (145)..(146): n is a, c, g, or t
  misc_feature (151)..(152): n is a, c, g, or t
  misc_feature (155)..(155): n is a, c, g, or t
  misc_feature (168)..(168): n is a, c, g, or t
  misc_feature (193)..(193): n is a, c, g, or t
  misc_feature (213)..(214): n is a, c, g, or t
  misc_feature (218)..(218): n is a, c, g, or t
  misc_feature (221)..(221): n is a, c, g, or t
  misc_feature (229)..(229): n is a, c, g, or t
  misc_feature (242)..(242): n is a, c, g, or t
  misc_feature (254)..(254): n is a, c, g, or t
  misc_feature (259)..(259): n is a, c, g, or t
  misc_feature (262)..(262): n is a, c, g, or t
  misc_feature (284)..(284): n is a, c, g, or t
  misc_feature (297)..(297): n is a, c, g, or t
  misc_feature (303)..(303): n is a, c, g, or t
  misc_feature (329)..(329): n is a, c, g, or t
  misc_feature (334)..(334): n is a, c, g, or t
  misc_feature (405)..(405): n is a, c, g, or t
  misc_feature (423)..(423): n is a, c, g, or t
tgctgacagaaatagttgctgtatggtcgtacttttaactctagtatcctttgcttctncttaccccctntnntaggnnaatnctcccacagtggtctgtntctcaacatntncttnttaaagnaaaaaatanatatatatagtnnctttnnatngatcaggtctgtnaatgtgtactaaaaaaatcagagtntatttataaacagaatagtnnattnaanggagaagntctcttccttatngatatcatggtntgcantanttccatttgttactattgtgcncaaaagccctgtncacagnggaatggtgtaaacatttatactgtnttgtncactgtatttagtagacataactgtcatctagtagacataactgttgaatagttactgaatcatgatgtanagaatatgtgaccatctncaggtatgggatttctgaacgtttcaaatttcaatcaatgagcac

SEQ ID NO: 554224 - DNA, 212 bp, Homo sapiens
tctagaggatcccgaaaatgcatagaggcaggggctgggaggaggggaaaatagagagatgtcaacagatgtagagtttcagtcatgcaagatgaaaacattcttttttgtttgtttgtttgaaatgaagtctcactctgtcacccaggctggagtgctgtggcatgatattggttcaccacaacctcagcctcctgggttcaagcgattct

SEQ ID NO: 554225 - DNA, 529 bp, Homo sapiens
  misc_feature (20)..(20): n is a, c, g, or t
  misc_feature (51)..(51): n is a, c, g, or t
  misc_feature (61)..(61): n is a, c, g, or t
  misc_feature (93)..(93): n is a, c, g, or t
  misc_feature (110)..(111): n is a, c, g, or t
  misc_feature (181)..(181): n is a, c, g, or t
  misc_feature (291)..(291): n is a, c, g, or t
gggtaaactggcggtatgangaaataaagggattcattatgggcacctgtngggaaaagcntgccggattctaatgatctgaattaaatcggncaactccaaattatggnnagttatctagtcctacaggtaccttttaatgggatgtttcagctgcttaaggctatattcctttaaattnggaaaaacaagttatgtgatgcttattactttcttattactttcataacctaaaaactgtgttattagtaaccgcacactagtctctacactgagtgtacatattcaagngcttgatcttgttgtcttgttcaaagtaattggtaaagaggaagtcaaactgttgctgtttgctgatgatatgactctatacctagaaaacactaaaggctactccaaaaagctcctggaactgataaaagaattcagcaaatttccagatacaaaattaatcagtagcacttctatacaccaaaagcaaccaagcagagaatcaaatcaagaacttaactccttttacaataactgc

SEQ ID NO: 554226 - DNA, 448 bp, Homo sapiens
  misc_feature (59)..(59): n is a, c, g, or t
  misc_feature (70)..(70): n is a, c, g, or t
  misc_feature (72)..(73): n is a, c, g, or t
  misc_feature (78)..(79): n is a, c, g, or t
  misc_feature (83)..(83): n is a, c, g, or t
  misc_feature (101)..(101): n is a, c, g, or t
  misc_feature (111)..(111): n is a, c, g, or t
  misc_feature (113)..(113): n is a, c, g, or t
  misc_feature (117)..(117): n is a, c, g, or t
  misc_feature (124)..(124): n is a, c, g, or t
  misc_feature (133)..(133): n is a, c, g, or t
  misc_feature (145)..(146): n is a, c, g, or t
  misc_feature (151)..(152): n is a, c, g, or t
  misc_feature (155)..(155): n is a, c, g, or t
  misc_feature (168)..(168): n is a, c, g, or t
  misc_feature (193)..(193): n is a, c, g, or t
  misc_feature (213)..(214): n is a, c, g, or t
  misc_feature (218)..(218): n is a, c, g, or t
  misc_feature (221)..(221): n is a, c, g, or t
  misc_feature (229)..(229): n is a, c, g, or t
  misc_feature (242)..(242): n is a, c, g, or t
  misc_feature (254)..(254): n is a, c, g, or t
  misc_feature (259)..(259): n is a, c, g, or t
  misc_feature (262)..(262): n is a, c, g, or t
  misc_feature (284)..(284): n is a, c, g, or t
  misc_feature (297)..(297): n is a, c, g, or t
  misc_feature (303)..(303): n is a, c, g, or t
  misc_feature (329)..(329): n is a, c, g, or t
  misc_feature (334)..(334): n is a, c, g, or t
  misc_feature (385)..(385): n is a, c, g, or t
  misc_feature (403)..(403): n is a, c, g, or t
tgctgacagaaatagttgctgtatggtcgtacttttaactctagtatcctttgcttctncttaccccctntnntaggnnaatnctcccacagtggtctgtntctcaacatntncttnttaaagnaaaaaatanatatatatagtnnctttnnatngatcaggtctgtnaatgtgtactaaaaaaatcagagtntatttataaacagaatagtnnattnaanggagaagntctcttccttatngatatcatggtntgcantanttccatttgttactattgtgcncaaaagccctgtncacagnggaatggtgtaaacatttatactgtnttgtncactgtatttagtagacataactgttgaatagttactgaatcatgatgtanagaatatgtgaccatctncaggtatgggatttctgaacgtttcaaatttcaatcaatgagcac

SEQ ID NO: 554227 - DNA, 111 bp, Homo sapiens
tacagcagacacagcagccaactgatgattaattataaaagccaaccagtcaaccaatcatcgagtagcaaaccacgtatgcggtctactaatcaatctatctaggttact

SEQ ID NO: 554228 - DNA, 529 bp, Homo sapiens
atctattgcacgaaaatacataagtagcaaaaataagagtgagaactcccactgataaaaagtgagagtctcaaagaggggaaatgagggaagagagagaccctctcatattgttttatattgttttatactcagtacctcttttaagaaaaaaacaacaaggaagtagaaccaaagacaagcagcccagcgccaggcccaaaaccaggcctgggcctgcctggcctaaacccagtagttaaaaatcaactcataacttagaaactgatgttattcatagattccagacattgtatagaagaacattgtgaaactccctgccctgttctgtttctctctgaccaccggtgcatgcagcccctgtcacataccgcctgcttgctcaaatcaatcatgaccctttcatgtgaaatctttagtattgtgagcccttaaaagggacggaaattgtgcattcggggagctcggattttaaggcagtagcctgctgatgctcccagctgaataaagcccttccttctacaaaaaa

SEQ ID NO: 554229 - DNA, 930 bp, Homo sapiens
gtgagtcttctgcatatggctagacagctgttccagcaccatttattgaattagggaatcctttctctgttgcttattttgttaacttgtcaaaggtcagatggctgtaggtgtgtagctttatttctgtctgttccattccattggtctatgggtctgtttttatatctgtaccatgctgtttggttactgtagcttccttatagtatagtttaactcaggtaatgtgatacctcagctttgttttatttgcttaggattgattttttggttccatatgaattttagaatggattttttcttttttttttttttggaaagggagctctgtgatgtgtcttcccaggctctgagtgcagcggttgcaatctctcagctcacgtgaacctctttgcctccgtgagttcaagcaattctccgtgcctcaagcctcccaaatagctggggattacagggagcccgccaaccagtgcccagctaatttatgtaatttcagtagagagggggttcaatcatcttagccaggcgggtcttgaactcctgacgttgtgatccacccgcttaagctcccaaagtgctggggatcacaggcgtgagccatgggacccgggcagggattttctaatcctgtgaacaactgactgttggtacgtttgataggaatagccttggaatctggggatggcttggggacaggtggggccatttaaggatatgggaagtcttcaagctcaatgacctgggaatgttttcacatttgttgcgtcaacctaggattctcaccaggaggtaagaagttctggcccaagatcacatttatatcttcacaaattggagtaggccccttccagaatggatcacccaggggcggccttaggtctcctataagattttgggtttggcctcaaaacaattcattttttaagataa

SEQ ID NO: 554230 - DNA, 119 bp, Homo sapiens
cctcttttcccacaactgatagttttcaggcaaaggtcactttggaataggatgaccctgggaagacattgacagaagaggtgtggcttgggctgaaccctgaagaaaagagtgcttgg

SEQ ID NO: 554231 - DNA, 666 bp, Homo sapiens
gtcccctgtctgaggagggaggaggcctctgtctgaggggggaggatgccgctgtctgagagggtaggaggaggcctctgtctgttgcaagaggaggcccatgcctgatgatgatgccgatgacctgatgccctgccagcgtcagccagagaagacccagtcctgactagtcttaggatctccctagacccttctcaactgcatcaccagtcatggacgctgctcctgcccgatgccagtctacgaccttctctgacccctgcgctatccttcccatcccctctggtataacgcaccctagcccatcacctcgttcataccaccttattacctcccctcttactgttcactctcctcattccgcactcttccattcccttcctcctgactcttcaaccttatctctctactacatcctaccccttctcctttctcaccccgctcccctcccctctcctcaattccttcccctcgcaccacttctctcaatctcctgacctctcacccctctcctctacacacgcctcctacccccccccttctcactacctccctgttattcatctccccctccctctctccttcctttccccctcttctacccatctcattcctctcttaccccccgccaccccactttcctcctacctctctccctctattccg

SEQ ID NO: 554232 - DNA, 644 bp, Homo sapiens
  misc_feature (1)..(1): n is a, c, g, or t
naacaaactgtcctttgcccgcttgcaatttagccatggcccgtttcataaacgcctcgtgggtgccctctgtgtttacagctttcacaccacagacacccagtgcttgcgcttacagggccggtccataagagaaacttagttcacagggctttgatagagcgcaaaggttgatagcattgaggttaagagtggcatcctcttcactcatgccaccagacaaaacgcaaatgccaggaacagttgcaggcacagtacggtgaagagctgttacggtggccatagctacttgttctgaagtatacttcttggtgcaggcatgtccagcagtcaccatgttgggcttaagcagggtgccctccaggtaaacatgatggtcattcaggcccttgtagacagcagccagcaccttctcagtaacatactgacagtgttccaggtcatggtctccatcaggaattacctgtggttcaacaataggtacgtgaatagcgaggctgaatggacactggtcggcaatcctcagcacagcacgccacttcccaaagtcaacaccatctttcttgtactgagcacagcgctctgagaggccatcaagcccttgaatggtggtttctgtgtgtgctcctgcaagaggagcacct

SEQ ID NO: 554233 - DNA, 394 bp, Homo sapiens
  misc_feature (211)..(211): n is a, c, g, or t
  misc_feature (346)..(346): n is a, c, g, or t
  misc_feature (354)..(354): n is a, c, g, or t
  misc_feature (374)..(374): n is a, c, g, or t
aacaacaaaagcactggaggggctcaatagttagttagtttgtcccagacccttctagaatattgagatcctggacagtgcttctgagaaacctgcagtctctgtccaaggagcccttaaggaagaaaggcaggagtgtggggcaggaagaccggcttcccctttccattccacacggctggctcgcaatattctgtttctcctgcgacanctgggttcctccctgctccccagctcgcctttgccaccattcttccctcagtccagatcaagagttcaaggggacgggggacagatgatcagaaaggcccagttcagggcaagggaagggggagaaaaggggaantcgtattntggcggttgggttgggattnggaaagttagttaccattca

SEQ ID NO: 554234 - DNA, 109 bp, Homo sapiens
  misc_feature (24)..(25): n is a, c, g, or t
  misc_feature (28)..(28): n is a, c, g, or t
  misc_feature (39)..(39): n is a, c, g, or t
  misc_feature (42)..(42): n is a, c, g, or t
  misc_feature (60)..(60): n is a, c, g, or t
  misc_feature (68)..(68): n is a, c, g, or t
  misc_feature (88)..(88): n is a, c, g, or t
  misc_feature (94)..(94): n is a, c, g, or t
  misc_feature (100)..(100): n is a, c, g, or t
gggcataacagggagagtggaaannttnaaagacaaagnggngcattgagaaagaccatntggcaagnaaaatcccatccaaaacatnaccganttttancaagcccaa

SEQ ID NO: 554235 - DNA, 152 bp, Homo sapiens
ggagtacgacttgactactcgcatcgcactttttggatcgtccatctagtctatccgcgttcttgaatgttctctcgtgtaaaggagcatatataatgaaaaaggaattattacaaggtgaaattcggaccttctttagtcgataccaacaa

SEQ ID NO: 554236 - DNA, 184 bp, Homo sapiens
cattcggctatatgcgggttcagaaagcttcccaatagctgaacatgtggaggttcctgggagagtggtgtgcccatggtagggcatggaagcttcaagcctcttcccctcataccttgaccctagcgtatcttctgtctagtatttttatccatgtataagagcaataaactaggtgaactaa

SEQ ID NO: 554237 - DNA, 276 bp, Homo sapiens
gcccacgcgtccgctgagccgccgccgaggattcaagcagcctccctgagcctcgcttccgacgtcgttccctgccgctctccgcacgcgcgcgcttcgaggcgttcacgagaacgaatcgtatcgatgtcgctatcagaacttcatcttcgaccctttgcctgatgcagtaggtgaatgactgctctgctgatgggaatatatccatatagaatccagaaaggagagagaccttacatgtccaagggatccgatgatacgataaactagtggagc

SEQ ID NO: 554238 - DNA, 131 bp, Homo sapiens
ggtcgacggggattcaaaggaagagtaggtttgaaaacgagttcagttttaaacataatgaaagtctgaagtaacgcatgagataccccaggtggttgaacctagtggggtttgggtgctcagcccagcta

SEQ ID NO: 554239 - DNA, 381 bp, Homo sapiens
taaaatttccaaaacccggattccttttttccttccaagggtccacactccctcgccagcagggggaacaaaactggatggagaatgaattgacagaagtaggcttcagagggtgggtcgttacagactcctccaagctaaaggagcaggttctaacccaatgcaaggaagctaagaaccttgaaaaagggttacaggaactgctaactagaataaccagtttagagaagaacatatatgacctgatggagctgaaaaacacagcacgagaacttcgtgatgcatacataagtatcagtagccgaattgatcaagcagaaaaaaggatatcagagattgaagatcaacttaatgaaataaagcgtgaagacaagattagag

SEQ ID NO: 554240 - DNA, 404 bp, Homo sapiens
ctcccacgcggttacgaagactcctgttgtggtgatgatggatctagactgtattaacacctgttgccaaaataccagcaggaaggttatattttatatagctgctgtaagagtctcagagtttaccttaatgtaacaacacttggacaaactccgccatattaacactatgtattagattgtagtaggtttagtagaattagccaattcactgtggttaaagtgctgtccagaggcctgtctttacaggtgccacatttgagctgccctgagatttcagctgtgaagatggcagcacaccctggggtgtgtaggttctgctgtcatccaagcccagagacaagtccttcctgggggctttaattgtggaaacatcatcagtcatgcacatctgcttctgtggg

SEQ ID NO: 554241 - DNA, 306 bp, Homo sapiens
  misc_feature (4)..(4): n is a, c, g, or t
cggnttgctgtgagtaagcaggagataaaggtacatagtatataatcccacttataagtaccaaagcaggaaaaactagtccatattgtcaagaaagtgattacccttggaagacagtggcagcaagcaagcatgagggggcttcagatggtgctagcagatattttttttgtttttttgagacagagtctcagctctttccccaggtctgagagtacagttggcgcatatctcgtgctcacctgcaatcctctgccctcccaaggttcaaggtgattctcctcgcctcagcatggctgcaaacga

SEQ ID NO: 554242 - DNA, 677 bp, Homo sapiens
ccaatgacgcagacctgattacggcgagaattgcgataatcagcggatcaccgtcagcaagctgtaccgattgcacaatgtcatcaggatcaagttactgatggataactggatctggtccgtgtctatcaatgaacacacgagcattggtaacattctagtcgactctgtgcatagccggctgatgatcatgccagagcatgatcagacacgttactatgagcgaaccaggatcatgtcatcacgttgctatcagatacaacaatgttcacgtgactcgtggtaacaatggctccttgcatgtaggacgtcatcatctgtctagacagtgacctgcgcacgctgtacattatcatgctcgcataggttactagagcatccagagtcgtcatgctgacactaggccttgtagcaggctgagatgctacggatattgcctgctaggcatcagccgttcataacaagcagctgcaagttgatccgcagatttgcctagtatgctgatcagacagtcagatactgacgagtgatgatctatcatgcacatactgtgatccgtgcaactttgcatagtcacgttgtagtattgttgagactaatgtaccagaccctaggcacttaagaataccgtataaccattgtcatactactattactgacgaccgcatcgagacccc

SEQ ID NO: 554243 - DNA, 116 bp, Homo sapiens
caccatggtgatcaaggtgctcctggctccgttggtgctgctggtcctaggggccctgctggtccttctggccctgctggagaagatggtcgcactggacatcctggtacagttgg

SEQ ID NO: 554244 - DNA, 254 bp, Homo sapiens
ccgagagtcagagacagctccggagagcagagggggattccagccatttgtgtgctacctgggggcttccacttctcatttggtgttggtgcttttcgcctttggctttttcaccacctgtcttcaattgcccatgcagcctttccgcctggggtacatggtgtcggatcgtgggccatgggtcaccgcacgcctccacggtggcacggcttccctcattccgtgtggctcgccaatcttcttcattttgtggg

SEQ ID NO: 554245 - DNA, 117 bp, Homo sapiens
attttctagtactctaaggatccgagtactgttctcgtgtgcctgagtgcatgaagcttttgcagagctgcagacggacatcaatgagctgactaaccacatagacgaggtgcagat

SEQ ID NO: 554246 - DNA, 242 bp, Homo sapiens
cgcggtaatacggaggattcgagcgttatccggatttattgggtttaaagggtgcgtaggtggctgattaagtcagtggtgaaaagctatggctcaaccatagtcttgccgttgatactggttagcttgagtgtagatgatgtaggcggaacgcgtagtgtagcggtgaaatgcatagatattacgcagaactccgattgcgacgccagcttacttcgtacacacgtgtaaccggagctcga

SEQ ID NO: 554247 - DNA, 151 bp, Homo sapiens
gagtgttgcgaggtgatctagagatccccgatttcaggtctggttggtcgaggcagatggagctggtataattatgcctcatagggatagtacaaggaaggggtaggctatgtgtttggtcaggggggttgagaaatgagttgtagaggcg

SEQ ID NO: 554248 - DNA, 164 bp, Homo sapiens
cctttgcccagacacccggcctggaggtgccgggacctttgaacgacaagattttggtggcaaaagctgccctcggtggtgggtgggggacctgggtttgggtgggggtgggccggcttattttgctctcattaaatatttgaaattttcccaaaaaaaaaaaa

SEQ ID NO: 554249 - DNA, 383 bp, Homo sapiens
tgattctgtgttcacatccacagtgtaagctgtgatatggtttggatgtttgtcccctccaaatctcatgttgaaatgtgatccccagcattggaggtggggcctgatgggaggtgattgggtgatgggggaagttgcctcatgaatgacttggtgccctcctggaagtgatgagtgagttctcgctgagctcactcaagatgtggttgtttaaaagagtgtggcacgtccctcccccaactctccctctcactcccgctctcaccatgtgacacacctgctcccccttcgccttccaccatgattggaagcttcctgaagcccttaccagaagcagatgccagccccacacttcctgtaccacctgcagaaccataaaccaa

SEQ ID NO: 554250 - DNA, 106 bp, Homo sapiens
cctgcatatcaggaactttaatatctaatgttttgaaagtatttgaacctctttgaatttgtaaacgcctttctagtaatacctgtttgatatagtaattggattg

SEQ ID NO: 554251 - DNA, 91 bp, Homo sapiens
ggggtttttcccccccccccccgggggggcctttttttggggggattttaagggggttcaaaggggccaaattaatttttttttccgggga

SEQ ID NO: 554252 - DNA, 269 bp, Homo sapiens
  misc_feature (8)..(8): n is a, c, g, or t
ggtgcacngcaggtagttaccacagtttagctttgtattgtctcttggtacttttctttttctttcctttcctttttttccttgcggagatggcagctttgtttgcggcccaggctgttttggaattcttggcctccagcaatcctcccacctcggcctcccagggtgctgagatcccgggcttgaccctaccacacccagcctagatgttatttccctaaaggttagtctccatgtgacgagacctgctgtgccggggttaccgagct

SEQ ID NO: 554253 - DNA, 263 bp, Homo sapiens
  misc_feature (240)..(240): n is a, c, g, or t
ggtcaaccgaatggggttccatcaaggcgactgggcccaaataaccgggggtccccgtagctttaccacatttcttggggcgctttcgggtcttggcccgtcgctcctatcttggcatatcccttgcttcgcgcttaaatcacacggtgtggacccccccgttctatggggtggaaacaggtttaaacgccgttactctttggacaccgggcggatcttttttttgagatttttctcacnacacccgttaagggagaccccgg

SEQ ID NO: 554254 - DNA, 403 bp, Homo sapiens
tgcccattatggccggggggggacaaaaaaaaaaaaaaaaaaaaaaaaaaaaaaacacgtgggcgcggcgcgcgccgcgcgcggccccgcgaaaaacgcctttacaaaacacacccgcgcggggggcgcggcgggggccccagtggggaaaggggaaaacggtgggccaaaaggcgggtgttcccataggggacacccgcggggccaagagaaaagggggggggagatttctccacccacaaaaaaaaaccgcccgggggagaaacccgaagggtgttttgagaacaaattccacaaagggggagatttgagagagggttctttgaggggaatttttattaaaggaggaaccccaaagggaaactgcgaaatttaaatttaacccccggtcgtgtgggtggat

SEQ ID NO: 554255 - DNA, 438 bp, Homo sapiens
  misc_feature (391)..(391): n is a, c, g, or t
tgaaatccaggctgagctggtctcagatggagatgaggaacttgttgggaactataaaagttgttcttactatgctctaaccaagagactggcagcattttgcccttgccctagagatagtgaaactttgaacttgagagagatcatttagggtgtctggtggaagacatttctaagcagcaaagtattcgagaggaaacagagcatgaaagtttggaaaatttgcagcctgacaatgtgatagaaaaggaaaaacccattttctggggagaaattcaagccagctgcagaaatttgcataagtaatgaggggccgaatgttaatcaccaagagacaatggggaaaatgtctctagggcacggcagagacctttgtggcagcacctcccantaccctagaggcctggggggagaaatggtttagtgccgcggcccagg

SEQ ID NO: 554256 - DNA, 293 bp, Homo sapiens
  misc_feature (67)..(67): n is a, c, g, or t
tgacgctgatagcctcccagcttcaagaaatgtacaatcaccaattccaaattgcatgaagaggaancacctcagaatatgacacaccatcaggaaacgataagccattatccaaaacagctcttaaaaatccaaggaagcctgaagcttattaaagctgcaaagcaggaagcaagaagtgaccagcagtcagatttggcacctactcctggcccacagagcacaccacgaaacactgtctctcagtcaatttctggggaccctgagatacacaggagggctatcagcgagtt

SEQ ID NO: 554257 - DNA, 173 bp, Homo sapiens
gcaagtgtcataggagatggaggatagagctataccagaggagaagggcaggatggagctgtatcagaggagaagggagtgatggagctatacataggagacagggaggctggagctatgtcagaggagacgggcggctggcgctgtgtcataggagacgggcgtatggagct

SEQ ID NO: 554258 - DNA, 1454 bp, Homo sapiens
  misc_feature (251)..(251): n is a, c, g, or t
ttgtgtggcgtcactacgttggttgttattcatatcccggtggggggggggcccacacgaggttgtcgccctcatttaataggggggtcactcgtgcgcgcctcctgtttgtctccctgtcatattctactctgcgggcgaagcatcttgtcaccactttatgatagtgtctaataaatagtttgttgtcgttgttttcttgtgttgcggggggaatcattcctctttgtctgttgtacctagcgggaatnagttttgttgtctctacacacccaccatccttggctgctcggccatattttccggcttttgtatcctccacaatgggggggtgtggaactccacatcccccccgcggaggaggtttgaatttttcactaaccgaaaaccctcgcttggggagcgcgcgcgaagggggcgtttaacacgcacgcacacttgggtcgtggcgcgggccctcgtgtgaatacaaacatctcggttccacacaggaggggaaagcctgtggtgagacgccacacgcgatgactcatgtggagggggccgtcgtttgcgtctgggggagagaggggagtgcccgtcccctcaacagaggggtcacccgggcgcccaccacacctgttgtgggatggctgaaacctcttcgcgcgccacacagtgtgtgtccttcgggaggggaacctgttctttatcacacgggcgcacacacacagagggggcgccacacgagttatccccacgcgctgctttcacgcgccctcttgaaggaagggccccctcctgtaggaagggcccccctctgcgtggtgtctttccccaccccgcgtgtgcttcgtctccacgccctcctgatactcctgtggggagagaatgtggagaggttcttctgtgtgcccaacataaggtacacacacatggggcccatatatggcacacacatatatgtgagactcttcgacacacacatgagaatcccgcacaccgcacacacatgtgggagacacacacagaagggcacacaactctggtggtgtcctgcgggagacacacgctgggtgtgcctgcgtgaagtgtgggcgcctgtgggagactcttctcgacacacactacgtgtctgtgggagacacacagtgggtgagggacctcgtggacacacgtgaagtgtctgtggggagacacctcgggacacacacaggtatcccctgttttggctcttcccacatttctctgaggagccaccacgaagaagaaggggaagaaagccctgggagttgacacacagaaagcttcttgcccaccctaacttttcttttccctcaccagagtcaatccacagaaagttcctcaagaggcccgagacatttatttaataacactctgtgtgctcctccttggtgcctggcctggcacaacatcaggagattccaataaaagtctgttgatgacctggttta

SEQ ID NO: 554259 - DNA, 621 bp, Homo sapiens
  misc_feature (12)..(12): n is a, c, g, or t
  misc_feature (238)..(239): n is a, c, g, or t
  misc_feature (248)..(250): n is a, c, g, or t
  misc_feature (252)..(253): n is a, c, g, or t
  misc_feature (256)..(258): n is a, c, g, or t
  misc_feature (261)..(262): n is a, c, g, or t
  misc_feature (266)..(267): n is a, c, g, or t
  misc_feature (269)..(269): n is a, c, g, or t
  misc_feature (271)..(272): n is a, c, g, or t
  misc_feature (277)..(277): n is a, c, g, or t
  misc_feature (282)..(282): n is a, c, g, or t
  misc_feature (285)..(285): n is a, c, g, or t
  misc_feature (287)..(287): n is a, c, g, or t
  misc_feature (290)..(290): n is a, c, g, or t
  misc_feature (293)..(293): n is a, c, g, or t
  misc_feature (295)..(295): n is a, c, g, or t
  misc_feature (303)..(303): n is a, c, g, or t
  misc_feature (327)..(327): n is a, c, g, or t
  misc_feature (329)..(329): n is a, c, g, or t
  misc_feature (334)..(334): n is a, c, g, or t
  misc_feature (339)..(339): n is a, c, g, or t
  misc_feature (342)..(342): n is a, c, g, or t
  misc_feature (350)..(350): n is a, c, g, or t
  misc_feature (371)..(371): n is a, c, g, or t
  misc_feature (377)..(377): n is a, c, g, or t
  misc_feature (382)..(383): n is a, c, g, or t
  misc_feature (385)..(385): n is a, c, g, or t
  misc_feature (387)..(387): n is a, c, g, or t
  misc_feature (391)..(391): n is a, c, g, or t
  misc_feature (393)..(393): n is a, c, g, or t
  misc_feature (406)..(407): n is a, c, g, or t
  misc_feature (412)..(412): n is a, c, g, or t
  misc_feature (414)..(414): n is a, c, g, or t
  misc_feature (452)..(452): n is a, c, g, or t
  misc_feature (612)..(612): n is a, c, g, or t
cgtcttctttgngggcttccattgcctaggtggcctttttcttgttgttaggcattcttagagctctgggcatgggcttgtcttggccaaaatgtcttttagcaaagtaatcatatatgccaataggcaaatagtgagccaggcagatccacaagtcagcgcctttccctggcgtgttataggcaaaagggctcttcgccaagatagcatgctggatgtcccgcagcaccggagaganntcctttctnnntnncannnttnntacnntngnnggcanttccnctntnctncantntcgtcctngccgtcgtcattcctgtccactcnanggggnggtgntcncgcctgtnctatactcacagcttttcccncttgtncactnntncntgcnanatttgtatcaggnngcctncnggttggctggacagcccctttccttccccacttggccngctccagtctcctaactgatgagaacatggtcacagccgcctttgatgagccataagatagccagcctttccattggggcccctcctcccctgctgctgcccttcccccgcctccctttggattttctaagaagaggcaaaaacgtctttgtgacctccncagttccca

SEQ ID NO: 554260 - DNA, 113 bp, Homo sapiens
ctctcagatcccatcatagttcctgaagactgtaagaccagatatacgcggttcagaactctctataaaggtgcgctgctaatcaatacgtttaagaggagctgaatcggctg

SEQ ID NO: 554261 - DNA, 474 bp, Homo sapiens
  misc_feature (1)..(2): n is a, c, g, or t
  misc_feature (24)..(24): n is a, c, g, or t
  misc_feature (26)..(27): n is a, c, g, or t
  misc_feature (31)..(31): n is a, c, g, or t
nnaaaaaagaaaatattttttggnannaaanaaaaaaaaaaattccaagttgcagattagattaggatgaaggcataaacattactatcataaaattataaaaagaacatattaaaaattttatttgaatcattaatgaatgaaggaacagcaatatcaaaaaaagaagaaaacttaaaaatataacacatttaaagttaaagaaagcagaagtaaatttataaaaaaaaacaaaagtggccaaaatccacaagggtgaaaaaaaaatggatttcaaaaagaaaaaatttttgaaacaaaaaataatttgaacttacaaaaaatttttaaaaagtaaaaaaaagtccaattctgcaatggttgaaaaaaaccccaaaaaaaaaaacgaagggaatgtacaaacccaaaaagaaggttaaaaaaaggaaaaaaaaaatttaaaaccttcaaaagtttttcctaaaaagggaaaga

SEQ ID NO: 554262 - DNA, 735 bp, Homo sapiens
ttccgagtgaacttcttgatgctggctgtttctctcaccgttcccctgcttgggagccatgatgctgctggaatctcctatagatccacagactctcactcttctaagaacccccgctcttgcttggtgttctgcagtccaagatacgatagctgtcgacaggcatgaaaggctgtttgagaaatcaacttgttgcgcaccgtgactccatagcgacatattgggcgcatgtgagttgttctactgcggagcaagcagatggcgcgggtctgtaaacacttgaaacatggtgcaacatagagaccattgcccggtttggttcggggcccttgcgaaaaccgagatgatgagcctgtgtgtgtggagacccctggtgtatccgtgcaggacccaagtgtggactctctttgtggccgatgcagtacaagggactatttgaatgtaaatccctggaaacgtgaagtgaaagtgcgtgatgtcctccgagacaccattgaggggaagaacatgtcctttgtgaatgatcttacaggtcactcaggcatgggacggacagattcatttcagcgattctagcagcaaatggcaaagacgagactacctgcttctggtgatggagggcacagactgacgggcgcctgctggtagtatgatactgtgaccaggaaagtaaacaccgtttcttggaccacgctgcggttcccgaatgggagtccaggctgtctcctgcagaag

SEQ ID NO: 554263 - DNA, 309 bp, Homo sapiens
atcagcaaatgaacagataaaatgtggtatatataccccgtggaatactatttggccattaaaaaaacaaaattctgttattctcagcaacatgtatgatcttagaagacattatgttaagtaagccaggcacagaaagataaatactccatgtactgtacttatgtggaaggtaaaaaagatctcatagaagtagagagtggctcatgcctctaatctcggtgctttgggagtctaaggtgggaggatcacttgaggcctggagtttgagaccagcctgagcaacatctctcaaaattaaaaaaaaaa

SEQ ID NO: 554264 - DNA, 1146 bp, Homo sapiens
taacgggtgaatatttacttttaatttagtcattttggtttacaattgaaactcttgggaattcaaaattaacatccttgcccgtgagcttctttatagaccaccagaaaaagtttcaaccttgtgtcccacattggttctgctgtgcttggtccaaatgacacctttatgacccggctgccatcatagttttggacgcgcggagatttctctttgcccacaaatttctccgctgggagaagagacccaaggctccctcaagggattgcgcatctctgtgcacaggcttgtcaagaagtacgggcctcctgggagaccgctttgcgctataatattttggatacacgggctttttattcgagagggtggggcttatagcgcaaagaaatttctctcctctctgtggagcgagatataaaagaggacagacaaatgtgcttctccccaactgtgaaacccttttttcctccaaattctccgcggatacatacgcccgggactttgggaatttctccgtggagaacgagaatttccgagttgtgaagcgacacacgcgtgacacaacaaaagatattatagtgaaataaagatcttatccgcgaaaaccaacccgaacgcaaaatctttaccaaattgtcccctatgaaagcgtgcccgggtaacactatatctcccgaggtctccccccgtgaagcgcgtgaagaagccgctttgagagggttccccgagaaggttaacaatctctgcccgaggtctcccccagaagaaaacagcctcttgtgggaagataataggccccgggaatcttttcgaaaaatatcgcggtaccgcgggagtatattccttccgcccccaattgtggaggggctcttctaccagcaaaaatctttgtgggggcggggctctccgaaacctttggaaacccaatttggcgcattatatccactcccccgtgagggagaaaaaacctgttgtggccgcccccccagaaaatgtttgctggggacaggcttggctccctctttattaagcaccggacgcgcccgcggagaaaaaaaaaaacaccgggggggaaacccccacgcaactccatgtgggcaagacccccagcgcctgcttgcgaaaacaacggaccctctttatggg

SEQ ID NO: 554265 - DNA, 949 bp, Homo sapiens
  misc_feature (917)..(917): n is a, c, g, or t
tcccgactctgatcttttttatttggtaactcaaaaaatctttatttctggacgggtatccaaacttaaaagtaaaacctcgcaaagaggaaagtctgcgtctcttcgcaattggtcccgtggcgctttcctccttatagccctcctttcattctctcgtgggcccaaaaggtatagcattattcgtgcagccctcttcagttgtatttttctcgtgggaaacgcgtgcatctctctcagagcaaatacgccgccgttgggtgcgtgacaaggacacggtggtagttaacaaggcacgcgtgaactcgggggagcgcttgggggctccatgaggttcctataacctatcctttataatatacagagggcctatctcttaacacaacaatagcgtgggcggaacattcatctctcttagtagaagcagcaattgcaaaaaggtttgggcgagaaatccgtggaaataaccctccttgtggggggcccccaggggcggcggaggacacctggtttagtaatcagtcacagctcacggggacatatccattcgtcctccctttttgtcacaattaacccacgggctttgtagcacccgcctccaagattttgtgccttccccacttagggtcgaccccgacggaaacggatttttcctccttatcatatccgcccacgatcctccctggggccctttgataccagcgagaatgcccccataacactcaagtcgtcgcggggtggacacctggtccacgtgtctacaggcctagtgtgccaaacgggggcgcggttaacaagggaggaggaagcccctctgttgtcccgcgggcgcctgtggaatcccggacgaaagggtctctgggcgcgcagtactcccccatagtgggtggacacggcgttaagcctgttgctcctgntgtgcacgcacggccgagttatgtcgcgcaga

SEQ ID NO: 554266 - DNA, 107 bp, Homo sapiens
gccccccccccccccgggggccttggggaaaatttaattgtttccaacccccgcccggggccggttaaacaaaggccacccttccttaataaagccttgggggccca

SEQ ID NO: 554267 - DNA, 199 bp, Homo sapiens
acgtgtgggtacggtgacgagcagcgtagcctctccggcagaagggaattgcctgggctccactagtgcgtgggtgaagcctgctgctgggttttcctccgggagaggggacgagcaatcctgtgggtagaagacagagagaaacatagcagcttctctccactgaaagacggggacttcccgacgcctgaagcctgcg

SEQ ID NO: 554268 - DNA, 253 bp, Homo sapiens
agatgcttaacttcgacggacgcattcactacctgttggaacaccaggatgcattgccctgagaaacatgacttactgagtgaattgctgtggtcgctgggagaggtgcaaccgtggaatcttttcttggggaaggagcagttgaccccaatgaccctatcaaggcaaatacactaagtcagctttcaaagaccgagatatctcttgtccttgaccaagcaacatatgacatagaggacggagaagctctaga

SEQ ID NO: 554269 - DNA, 208 bp, Homo sapiens
ctatttcaggtgaagtgcttatggcttaaggaactcttggccattcaaaggacttttcattttgattaacaggactgagcttatgcatgagagccctgcaggggaaagggtttaagaaaaacaactgcctgctgttcccatgagtgcagagttggaatgttgtgcaggcacgcctgaaaatgtgctgcatacgccaaaacattttact

SEQ ID NO: 554270 - DNA, 416 bp, Homo sapiens
  misc_feature (372)..(372): n is a, c, g, or t
  misc_feature (384)..(385): n is a, c, g, or t
gtttttgatttctagtttaatttcattgaggtctaagagcatacttcgtataatttctattcttttacaattgttaagttgtgttttatggcccagaatgtggtctgtcttggtcgttgttccatgtgagtttgagaagaatgcatcttctgctactgttggatgaagtattttgtaaatatgaattagatccaggtgattagtagtggtgttcatttcagctgtgttctgcctgctggatctgtcagttgctgatggaagggtattgaattctccaactataaaagtggatttgtcaattttactttgcagttctatcggtttttgcgtctcatatgttttataccagttaaaatgcatactagggtagcnttaaaaaaaagnnaaatcagtcagttaatagagtaactaaaaaa

SEQ ID NO: 554271 - DNA, 303 bp, Homo sapiens
acatctttatatgtacctggctacctaggcggggaattgactaagtaacgaagccaggagtcagatctagatagcagagaagtccgtctcatactaaaacattgcacctactgtaagcgtccaccccatgacgctgcaacagatagagtatcttagactgcctcctctaagtatatataggtacagactaaaacaaatgttgctacgctaggtgggctagtgctgactcagtagtacatggacagactccagcataccccctctggagaccttggacctaagtgccaaatgcataatgcgacc

SEQ ID NO: 554272 - DNA, 1042 bp, Homo sapiens
tggcctccctctagttgtcccgggcccctgcggctggtgtgcttgccccggtgggggcagtcagttgatgctggtgggagctcggcttggagtggctgggccagtgtgactggtcccgggccatgcctgaggaagaagccattcagctgtgaagcagaagaagaagcagtttgcagtgacaaactgggagcggaagagagggcttcaagatttggctgctgctccagttccaacatgcctgcagctgtggagccgggagcgggcgagatgtgaacatgacctgacacctcggacgtgggagtctcgtgacccatcatatcctgcaggcttaaccagcagccttctcagtggggctgggtccacgaggctacgaccaaatctgatacccgactgcatttttgagagagacatgcaggggagtgaggtacgagaggcgaaaggagaagcagccccggggagcaagttcatacaagccgggtcagtgctgagttgtataggagcttggacatccggggaggtgtatcagccttggctcaagttcttggacattttcctcgaaggtacttcattgtggggctatgagatgtccaagggagcaattaatgagcgaagaggaacggagcttacaaggactaatttgggaagattcatggggttactcttttggagaaatcagtactttgagcacaatctgaagacattgaggtagttgtggcgggtgttaggagatggtatggacagtcgtagcgtggtagtaagtgagattcagagattcagggttgtggagttatctggcaggagttaatgaggttgtactgaggaatttggtggcgtggtgtggtttgatcatggtggtgatggccggaggtatggggtgtttgaagattatgcatcaggagtcaagtagcagtggcataggttttataggcccgagacagactttgtgttaaggttggggtaagttatgcatagaagggatgggtaagtggagaaagggagaggagtggtaagagggggaggagaggaatgtgtggggaggaga

SEQ ID NO: 554273 - DNA, 639 bp, Homo sapiens
  misc_feature (536)..(536): n is a, c, g, or t
cccttgggaaaaaattttttttcaagaatcaacagaaatcatttctgctttttctaataaaaaacaacatttgatgggctcaccaccaacgtgtttactaaaaataaaaattaggttgataggttgaaaggccggccgtggtggctcagcaaaaattgaattttaattttccaaaataattttttttgactaaaagccccaccttccaaacacactgggaggggggtggggctccccaggctccaggtagccctgcttttaatggctttgaggggcacagccaatggggcagtttttatgggttgaagttgcatgcctgcaactttcccaggcaggagttgcacactgatggctctactggggggaggtctttgccctgggggggctttgcccttatggctttgctaggcactgccttagggggggctctttgggatgatgctggcctcacagccctagtggacattgccctagggggggttttctttggtgggcccacctctgttcttttttttggccccaaggccccacacggngttctttgaaatttaggggggaaaagccatgtccttacctggttgtgcaccctggggattggtgtagtggcaccttgtaaaatctgccaagttttactaccct

SEQ ID NO: 554274 - DNA, 523 bp, Homo sapiens
gggggttataatagagctgaaatattattatagccaagtgatgtcttgatgatcctgagcctatgtaggcctaggttaatgtgtatgtttgtgtcttaatttttaacaaaaaaaagttttaaaaggaaaaaactaaatatacaaaaagattacggaataaggatataaagaaaatattttagtacagctgtacagtgtatttgtgtttaagctgtgttatcacaagagtcagagttaaaaaattaaaaagtttataaagtagaaaggttacagtaagccaatgttaatttattactaaagaatgaaaatttatttttataaatttaatgtaggctaattatacagtgtttataaagtctatagtagtgtacagtaatgtcttaggccttcactcactcgttgactcacccagacctgacttctagtcctataggttccatttctgttaagtgcctaatacaaatataccattttttatctcttatgccatatttttactgtaccttttctatgtttagatatg

SEQ ID NO: 554275 - DNA, 267 bp, Homo sapiens
gagctataaccgaaaaacagatgttgacagcggcgatcacctgacaccatcatcacctcaagccacaaaggcactaattaacacctctacttcctctctttcttcttcccactcatcctgaccctactcctactcacataacctattcccccgagcaatctcaattacaccatatacaccaacaaacaatgttcaaccagtaactactactactcaacgcccataatcatacaaagcccccgcaccaataggatccttgagctccag

SEQ ID NO: 554276 - DNA, 357 bp, Homo sapiens
tagattgtagtttagccataactgatgttttttaaaaagggatatattttcttgcacagttgttcaaaaaaaagccaagtttcagtcctcaatgctgtcctttgttttacaggcacaagttttctagctcagccaaactatgaaaaactgtagactattctcaaggtattaactcccagaccctctgggggtaggggctgttttctaagttacagccaaagtgggactaaaatggtccagtgtgcccaaccaggtacttagctcacaccctgggattttttgtactaaaatgttcctttgtatcaaaagttaaccaggctttagtccaccaaataaaggtcaatttttgtaaggcta

SEQ ID NO: 554277 - DNA, 312 bp, Homo sapiens
ggtttgcaggagagttagaacagaatccacacataaaagaaacacgtaggctccaaaaaattcccctctcctcttccaaacaaaacatacattgatctctcacatccagctgccaaaagaaaaccccatcaaacacagttaccacccatatatcactcacacacacatacatacgcaaacacacacaagaatgagatgaggttcaaacaaccagccttgcctggtgcgtggctccctccgtgggggggcttggctgccccgccatggatccacgccgctatgtgtggcaggcaggaccccgccggtgggtgg

SEQ ID NO: 554278 - DNA, 787 bp, Homo sapiens
atggttggctgtgactatgagatcgattccaatgccaccgaggatcgctgcggtgtgtgcctgggagatggctcttcctgccagactgtgagaaagatgtttaagcagaaggaaggatctggttatgttgacattgggctcactccaaaaggagcaagggacataagagtgatggaaattgagggagctggaaacttcctggccatgaggagtgaagatcctgaaaaatattacctgaatggagggtttattatccagtggaacgggaactataagctggcagggactgtctttcagtatgacaggaaaggagacctggaaaagctgatggccacaggtcccaccaatgagtctgtgtggatccagcttctattccaggtgactaaccctggcatcaagtatgagtacacaatccagaaagatggccttgacaatgatgttgagcaccagatgtacttctggcagtacggccactggacagagtgcagtgtgacctgcgggacagatcagagatccatgtgaaaaaatggcaagacaatagtctaaactgagctcactggtatgagagccagccgactttccacaggttagtgcttagaggtaaagggactctcagagaccacccgtgacagttttgtctccaaaccagttgttgtttttttcctcccctaagcggatttgcttttacttttgccttacaatgaaaagtgacgctctgacttttagggaattaagactgacttctcctcaggaacttgaaaaaaaattccatgctttacggagggtt

SEQ ID NO: 554279 - DNA, 169 bp, Homo sapiens
gctaccaggactcctggacacctacagagtgtggaggagtggtctccccaacttacctagcaatcgccttggccctagggtagagctagggctacctgagacagtgggcgtgaggctggacagtggtgaccagctactagcaggactcatggagatcctgcaaaggtct

SEQ ID NO: 554280 - DNA, 880 bp, Homo sapiens
gcccggagagcgtatggaagatggccgatgaggcgagtatggactagctggcgtgtgcgccctgagacgctcagcgggctatatactcgatcggtgggagccggcggtcagtctgcggcagcggacagcaaagacggtgcagtgaaggagagtgggcgtctggcggggtccgcagttatcagccagagccgctgacagccatggccccaatcaaggtgggagatgccatccccagacagatgtgcaggtgtttgacaggggagccagggaacaaggtagaacctggcagacaagctgttcaagggcaaagaagggtgatgctagtttggagattcctggggccttcacccctggcatgttccaagacacaccatgccaggggctattgttggcagcagagcatgagagctctgaacaggaccaaagggaagatccgagagatgagatggacctgatcatgcgatgattaagtgaatgcactttgtgacatggcagagatggaggacgagacaccacaaggacagagaacggcaacggattcaggcatccttgagctgaatcccaacatggaggaacatattggagaaagcgacgaaccagaaacttcattactcagatagattacgactgggtgtccactcttcagggagaaatcgaacgatcttcaggcgcgttctcccataggtggataccacgcttggaatatcgtgcagggccctaaaatgtggaaacaagatggaacagagcttcacctagcaggcactagaaccccagactactactcaaacaatctaggccctgggaccaacattaaattcttcaaccatacattttcactgacaacggtgctgaggcctggagatgaagttggccaattcgc

SEQ ID NO: 554281 - DNA, 683 bp, Homo sapiens
  misc_feature (36)..(36): n is a, c, g, or t
  misc_feature (56)..(56): n is a, c, g, or t
  misc_feature (221)..(221): n is a, c, g, or t
  misc_feature (298)..(298): n is a, c, g, or t
  misc_feature (557)..(557): n is a, c, g, or t
aaaaatgtctcccccaataaaaaaaggaatgtttgnaaagctgcccagctcccgcngttagttaagtagcgtgggtaaaaaaaaaaaactgctgttgccattcaaaccatgaaggagcatcctgcatcttttgactgagcttcttttaagcaaatgggatttgaagtatcatttctgaagtttcttgaggagtctgcagtgaagcagaagaaaaatactgncaaaggccatccgaattctggaaacaaaaaagggtcccattcaaattcaagaaaaaatattgataaggctgctgtgnctagtggaaatcatgtatgtccttgtaaaaaaaacgaaacgtttgtacagtttgccaatccctcccaggttcagggcagggataatgtaaaaattgttttaaacaagaattttaaaaattgccctgagcttgttttaaagcaacttcaggaaatgaaaccccccgtcagtttgaaaaaacttgaaggacattcaaatggtccaaaaatgtttgttatgaaaaatatcagtataggtaaagccccaggcaaaggtcaggncttataattaatgtaggataaaaacctcctttcccctttttttttaaataggaagccctcaagcatgctaaaattgtgaaactttcattaaatttttttgttggtgacaagaattaacctggccca

SEQ ID NO: 554282 - DNA, 589 bp, Homo sapiens
tagtcagtgctaaacaagtattttaagagtgtgtgttattttgtgcctaactgagatggagattggcaagctgaagaaattgggatttggccaagaaccagtgcttgttgtttagtagagaggtgatagggaactatgatcctgccagtttggagggacgtaacatgaaatgacttcttggtccaagctggctacagctgttccaaaaaagatgacaaaggctgctgattcagagggggatactcacccaggctgtcacgtctgtctctccaccaagcaagacttttttaatcctctaacacaacagcaacacaaaatttactgtctgcaggcacaatgctaaggcactttgtgcacactaaatcgttaggcactgaaaacaaccctgtaagggagtactctgattcatctgcactttatgggttaaagtaaccgaaacctaaagaggttaagttaatctgccccaagccacagaactggcaagtggcagaacaggaattcaaactggcttcagagcccacccagtctttgcaagcctactttctaatgcctgaattccttctctttaggaagaattatctgtgtaaag

SEQ ID NO: 554283 - DNA, 164 bp, Homo sapiens
cataagcgaggcctgtcctccgggagagaccctggagcggggtgtgggacgaacggtctggaggaagggctccgagcacttcgaaagtataaccgcggtcccaaagaggcgtgctgtgtctgcgattttcctgggagtgcacggtttacattctgtaaagcagt

SEQ ID NO: 554284 - DNA, 237 bp, Homo sapiens
  misc_feature (193)..(193): n is a, c, g, or t
  misc_feature (202)..(202): n is a, c, g, or t
agaatggagggccgctgcgaggggataccaagtttttgagggtttgcattcctcctgcaggcacacagcctgcgggcacacggcctgcagacacatggcctgtggacacacggcctgcagcccaggcgccaggtggacgggtcagcagaggcgtttcttggatttaatttcccgactgggaatgggttgagcnccgtctgtncctctgtgtattggccacacccgtttctttcctgt

SEQ ID NO: 554285 - DNA, 925 bp, Homo sapiens
gtattttccagcgttcagttcacatcaaggatgggtatgcactggcggaaaaggccctcaggaggaagcactcatctttaagcaagacctgctttctcaggactgcaaacaagagaaaagcccaataagaggaaagtgaagtgtgaaaatccatttcaaagaactttactgagaactcaccatgtcagagagcttccattaatacagtggcttcaagaaccaataggcagaacccaaagtaatggagtgactcaccaggacttttagcagctaatggagtactctgagaaatgctgtaaatccaatatttttgctgaaaaattaatgtgttatgggagggagcctcttttctaatcacgttacccacccccaccctctacgttctagattcaccatcagcatctttagctcttctaattgtgtgccaaagctgaatgcagttctttcccaattttcttatatcattttaagtattatatatgctatcttaccaggcccactcagagaaacagcacttatctttaaaattatttattaactacatccccaaagcctacggccaataaaaactctgtaaactatgttacatataccaaagtaaagtttccagaattcacagagagatcgataaatatttactaagtgccttctacagacaaagccctgggaagtataaaggagcaaaacatgcacagttctagtctctaaacatggcttacaatgtccattaggcatatgaacaaagctaataataatccaaggcaaaaaattgggagatcatataccaaacaaatggtataggagttcaaagtagggaaaggatggtggcaggtagtggtccaaggacagacagttggcacataagctgaaaaatgaaagatgtatggagacatttaacaaaaaagaaattacaataaagagaaaa

SEQ ID NO: 554286 - DNA, 239 bp, Homo sapiens
gtgttgtccccccggtgttcttcatcgaggactctgctgtctgccctcgagatcatagaccttgtttacttgtcagttgcactgcgcatgctgggcctcccgggtcttggggtcgcatccatcttggtcctatcggagcgtgtcctgagcaactagcagcgctgcctcccccttgcatccctttcccccttgtgtacggaaaattggcatatggttctttttgtggggttattttccta

SEQ ID NO: 554287 - DNA, 238 bp, Homo sapiens
tgtgtgtgtgtgtgtgtgtgtgtgtgtgtgtgtgtagccgtcaatctcctgggctcctgggttccgtttgccctgttcatagagatggaatgagggcgtccccaggtggtgagctcagggacgggcgtggtggtgggtgcctgtggtcccagctgctcgggacgctgaggtgggaggattgcttgagcccaggagtttgacaccagcatgggcaatatggtaagaccccattatctac

SEQ ID NO: 554288 - DNA, 444 bp, Homo sapiens
aagcgttgtagtccaggattgctgggtttggtatcccagagttacctaaaagtgctaggcaagttctgaattctcagtcaacagactgtaaaataggtcaaataacggctattatcaaaaattgtgataagcattaaatcaaataatgtaagtaaaagagctggtccagagcctacaacacaattgtctctgaacaaatattagtatctcttgtttcttccatccttgaaattctgctagaataagcttaatttatattgaattgtacatttaaaacaaaggaggaagaagctctaccagattttgattttgaaagctgagaaagccagggaagtagcttaatgctaacataacctccaacctcctcttccttgaggctttttttttgggaggaaggggtacaggcatacctcgttttactgtgctttgcagatactgctttta

SEQ ID NO: 554289 - DNA, 500 bp, Homo sapiens
tggtgatctacgatctagggagggttacatgtggagtagtctcgattcttgactcatgatcaccgctcgactccaagtgtgtgattcggtgtgagcactgggcggctgaaatttttttaaggtgaaaatgtttgcaagttcctttttcagaataggttttggagcagaactctttcagctagtaagacccaactttgcttaggtttagcttcacagcatagctgaaagtaggcaaattggacatggtgcactaaagtagaattctatgtggataagcaacctatttccaaactagaaaggtgatagataaaagtgtgatcactcaattgatatgatcagagtaaagaagtttgccatttggatcctttgacttggtttaagccacctatagtgtaaccaaccatctttatccttgtgtgcagggataataatgacctaaggtagtgttctaagataatttaatgatactatctttccaaactttgttcgatttcacatgt

SEQ ID NO: 554290 - DNA, 705 bp, Homo sapiens
agcggggaggtctgctcagatacagagccggaagtcctcagtccccttaccctcgtgaataccagtggggaggttggcaggaagctaatgtgatttctaggacatttcagcgtagaaacgccatggaatccaggttctgtcagctttaacgtctatctagcgactgaattcagctgaataaccagctccctttccatcagttatgcaatagagcacctgactgcgtggtacagcaggttaaggaatgtctgtgaatctctcatcggttcacagccaacctactgaactcttacgtgttgatatttcgaggtttataccgtgtaagggtcatattcttaatgctgaaacacaaactattgtccaactattttaacatttttttttccgtagaaattccattttactctttttcacattatgatgcattttccctaacactacccattaaatcattctccattttcactccttcttgggccatttctatacaagcttcctttgtgtttgtgattattctgtataatcagccatatttcattttcctgcactaatttggcagatttactactattactattactgttaatgatatcttcctttcagaatgtttttctaaataattattgcgtgatcatcttgtacttgaaaaaattgtgaatctataatttgttttaaaagtgtatctaatgattgtctttaataatg

SEQ ID NO: 554291 - DNA, 268 bp, Homo sapiens
ttttctctctccacccatacacacttcagagttatgcagaaaggccaggtgcggtggctcacgcctgtaatcccggcactttggttaggccaaggcaggcagattatatgaggtcggaagttcgagaccagcctggcccacatggtgaaactccctctctactaaaaatacgaaaattagccaggcgtggtggtgcacgcctgtaactccatctgctcgggaggctgaggcaggataatggcgtgaacccggggtgggtggagagcgg

SEQ ID NO: 554292 - DNA, 430 bp, Homo sapiens
  misc_feature (44)..(44): n is a, c, g, or t
  misc_feature (160)..(160): n is a, c, g, or t
  misc_feature (354)..(354): n is a, c, g, or t
  misc_feature (367)..(367): n is a, c, g, or t
attcggcacagggatggagtttcactgttgcccaggctggggtncaatggtgtgatcttggctcactgcagcctccacctcccgagttcaaatgattctcctgcctcagcttcctgagtagctgggattacaggtgcatgccaccatgcccggctaattnttatatttttattagagacaggaattcgccatgttaaccaggctggtctcgaactcctgtacctcaggtgatctgcccgccttggcctcccaaagtgctgggattacaggcatgagccaccgtgcctggccttattggcttagtttttaaattatcctccaaaaattttgggccttttatctgtggggaaacangtgaaagctgctntttcagcatgagacacttaccttttattcccattcatttttagttaaaaacttaggttttgtt

SEQ ID NO: 554293 - DNA, 241 bp, Homo sapiens
gcaagtccatcgctgttgaacatcctgcctatatgggagctgtacgacctttcctgtgatggccaatggtctccttggcttggaaaccacttatataacttagaccttcaaagagttgggaatcataaaaatgctatctgaaatacagtcatctggatcttgggaagtttgcaaatagctctaagatgtcaaacaagcaaaataaaagcctgtggatatttaaacttcagttgtccaagac

SEQ ID NO: 554294 - DNA, 142 bp, Homo sapiens
aaggatccggctccactgggttgcatttacacatgcaacagtaatacagccagattcccaattatctgtgaaatccatgtaatactggcaccttaaaagtaatcacccttattggcagagaatgcagtaaagtggggtaact

SEQ ID NO: 554295 - DNA, 146 bp, Homo sapiens
aaaaaatttaacaggtcaatttcaataaggcctcgccttatggatgaatggtattccctggctagatttattcaaaccatgaggcaaccctatttttatttaaatatggaaataaaaacaaacatgaaataaaaacctccaaatta

SEQ ID NO: 554296 - DNA, 402 bp, Homo sapiens
agaaataagtcaccaatcaaggtgcccttgttgactgtgcggagcgaatctgatggggttcaagcatgcaaatctatggatctcgtggatccgtgcctcgatgtaggctgtcttgcccgagtccccaaactgtggtcggacggttctacaagagctctctgtcaatctgtgcatggacattgacctcctcttctggtggcttcataggcagcaggtagccatagcccaggtgtgatcttgacggtaccggtggcgccaatcacagaggtacaacgtgtgtcatctacgggtctaccaagtagaactgcgggttggggctagtctgtctcttcgtgcatggatatgagaaggtagtcaaataagtcccgtgggatattgatatccagtgtgcacaggttgtgt

SEQ ID NO: 554297 - DNA, 146 bp, Homo sapiens
acctacttatcgccaacaccccttcccatctgcactgtgtgtgttggattgcgtttgggggaaagagatgttattcttagttgtctactttgtatgaacacttttgttgtggttcaagtgctgttttgtgtgttggggatcacata

SEQ ID NO: 554298 - DNA, 374 bp, Homo sapiens
  misc_feature (227)..(227): n is a, c, g, or t
ccccatgagcgatgaatgtcacatctatcccactgtcaacaggtggtgtgcgtcattggcattctttgcaatactgcttaattgctgatacatatgaatgaaaccttggctggtattacctggcattcactgtgctatcggcaatgatgctttggaagatgcgaagcataataaagtacttgactacctactggtgtaatctcagtggcagccccactttcttatcncactttttcaatagtaagtgcgaagactgagcccaattggcccattaaaaacgaaaacctgactaggttctgttgagcccaattagacttggaatacgtttgtgtctctagaatcacagctccagcattctgttccttcgctccctg

SEQ ID NO: 554299 - DNA, 207 bp, Homo sapiens
  misc_feature (79)..(79): n is a, c, g, or t
tccttcttacttgctccgccttccagagcacagcgcgctctgagctgcccccaggtccctcccccgcgcagcagcccanttggagggaggaagtaagggaagaggagaggaaggggagccggaccgactacccagacagagccggtgaatgggtttgtggtgaccccgcccacaaacggcacataagatggtggacagaaggacgcg

SEQ ID NO: 554300 - DNA, 372 bp, Homo sapiens
ataccagggaacttttggaagggtcaggttccttaggctggggaattaatccagaggtggatttatattttaaattctttacggattttcccgaaaggaagttttggggaatttattggaaaatggggtttttaagggttacgttttccagatggagatgatggttgggccaggacagttgaataatactatgggcaaggtttgcaactgaggttaaatagggggcaaggttcctggtaaaggagcagtagggtttagaattttaatattaaaaggttaaactttaataactgttaaatggtggaggccttttagtggttaagattattaatgcccaaggggtattcttttttaaatatttaaaggttccgg

SEQ ID NO: 554301 - DNA, 164 bp, Homo sapiens
cccccgggctgctgttagtaccacttaaaaacaatactaaaaaaacctatgaaggtgcatgctatttccccagagctaaaaagatagtgaaattgtgtttgaactcttaagtggaggtgaagcagaatttattagccaccaaccacataagtgattgttccgct

SEQ ID NO: 554302 - DNA, 762 bp, Homo sapiens
gctaggtagagctgcgtgggtgaatggcagaggttgtagtgcgcggttcccgggcttctctgcaaatgggctcgtgtgctacgcccccgtcccgccaccgtgatcgtgcgccgattgccggagtgggtcgctgccatgattccaccagccagcaagctagagcatggggcatcccctccagcggctcgctcgtggcatccacgatactacgggccgctgtgttccacttccagcaacagctcctgcagcagtaccgagtgccccgggaagccattccccaccccccagtgtctccccaaggctgatccgggtcattggtgggccagcttcttgttcgggaagtccaccctcccgttcatggccacggtgttggagtccgcagagcactcggaagctccccaggcctccagcagcgtgaccggctgtggcctggttcgggacgcccgagtaagcagcccggcggtcagtaccagcatagcagcgctgggccctgtcctgacctgagccggttaccaccagccgcaaggcctgcggaggcggctagtcgaccagagactcgtggacgaggtgtagagccagtagaaggacgaagctgttgcacaatgctacagactctcccaccttcttccttttgcgctggtcatccacgcaggtgttcgaactggagatcttccaccctgaagggcttgtcatcgcggaggaactctgcatctcgcttccgccaggtgtcgactgtgcaggttgctgcgatggtaccaatgc

SEQ ID NO: 554303 - DNA, 386 bp, Homo sapiens
  misc_feature (144)..(144): n is a, c, g, or t
actcagaggatcccaggggggaacaatcacttggtgatggtttccttggctgtacataagctttttcacttcatgtaatcctattggttcactttggctaggtggcctagcaaaagtgattgttccccgctctaagtgattgtnccccgctaagtgattgttccccgctaagtgattgttccccgctaagtgattgttccccgctaagtgattgttccccgctaagtgattgttccccgctaagtgattgttccccgctaagtgattgttccccgctaagtgattgttccccgctatagtgattgttccccgctaagtgattgttccccgctaagtgattgttccccgctaagtgattgttccccgctaagtgattgttccccgct

SEQ ID NO: 554304 - DNA, 638 bp, Homo sapiens
  misc_feature (327)..(327): n is a, c, g, or t
  misc_feature (333)..(333): n is a, c, g, or t
  misc_feature (352)..(352): n is a, c, g, or t
  misc_feature (400)..(400): n is a, c, g, or t
  misc_feature (438)..(438): n is a, c, g, or t
  misc_feature (446)..(446): n is a, c, g, or t
  misc_feature (486)..(487): n is a, c, g, or t
  misc_feature (494)..(494): n is a, c, g, or t
  misc_feature (504)..(504): n is a, c, g, or t
ctctaaatgctagtatatggcacaaaccagaaaatattttcagccaagttaaggagattcctatttctctaagcaagtccctagaaacatcatcaatctgtctctggcaggcgtttttctatttaatgactctaaagagacagaaaagctttaatcaatgcccggaagtgaaatgctaagaaattatatgcacggttacgaaaaaaaaatcaaagatgtttcccacacattgtccagcagacaaaaacatatttgacatgctgttcctgcaaggaaagtggactgagttttctagataatgtttgagcaattcatccttcccgcaantgtccnccactttccaggcaaatantacctccagccaaataaggggttcactccctcaagttcctaccatggntccctgggaaggaaacacagaatctctgaacctactcntgcaggcnacttccttgcactttgagattgtggtctcactaaatcttnncaacaanccaataaagngtctatcatttctgccattctacagttgtggaaattgacacttaaagaggctaggaaatttggagtcatcgggacttgaactaaggactcatgaatgatgactcctgctcaggatcatgatggcctgctcaggc

SEQ ID NO: 554305 - DNA, 403 bp, Homo sapiens
gacttgactcaggaggcagaggttgcagtgagccgagatcatgccactgcactccagcctaggcgagagtgagacttcctctccagaataaacaaacaaacaaaacaaacaaaccattgcctacaaccaacctagccaagtattttccccaggaagattacacattctaatccccattatcagaaataatcacttctactgttgttattctagcatcagtagaagtgattgttccccgctaagtgattgttccccgctaagtgattgttccccgctaagtgattgttccccgctaagtgattgttccccgctatagtgattgttccccgctaagtgattgttccccgctaagtgattgttccccgctaagtgattgttccccgctaagtgattgttccccgct

SEQ ID NO: 554306 - DNA, 353 bp, Homo sapiens
gcttttctgttgcatgacacacatacattatctggtgagaggagaagactcggcgtgacttcctataacgtatatcacttagatcctatttcctccactcactctgaatgaccacagccaacaggacttgaaattgccagtcctgttggctgtggtcgccagactgagtggcaagtgattgttccccgctaagtgattgttccccgctaagtgattgttccccgctaagtgattgttccccgctaagtgattgttccccgctatagtgattgttccccgctaagtgattgttccccgctaagtgattgttccccgctaagtgattgttccccgctaagtgattgttccccgct

SEQ ID NO: 554307 - DNA, 116 bp, Homo sapiens
gaggttcccgatgaccaaattaccagttctgaggtttccccaagataaatttaacagctccagcttcagtgtttatcagaatacaatagaactaagtagaggttgtctttgttcga

SEQ ID NO: 554308 - DNA, 318 bp, Homo sapiens
acttttactctagcgttaggagggggcctccttaaggaaagcatgctgggtaaactgtgcgatgttacagagcgcattgagtctgtggtcatcgtggttgggaacaatcacttaggaacaatcacttaggaacaatcaagtgattgttccccgctaagtgattgttccccgctaagtgattgttccccgctaagtgattgttccccgctaagtgattgttccccgctatagtgattgttccccgctaagtgattgttccccgctaagtgattgttccccgctaagtgattgttccccgctaagtgattgttccccgct

SEQ ID NO: 554309 - DNA, 1311 bp, Homo sapiens
  misc_feature (374)..(375): n is a, c, g, or t
  misc_feature (377)..(377): n is a, c, g, or t
  misc_feature (1311)..(1311): n is a, c, g, or t
ccgaacacgcccaatacgagatcgatgtctagcaagcctgatcacttctcagctgtgacgagtagcgctatctgtctccgatggcagtatgcggtatcaagtgtcgatccgcttgcgaagctgcggacatctacatatcagccatggtcatttagtaacgagattcacccagccgtagcaacactgttagtagtagaaaagtgctagcgagaccgtcactcgcacagcttggaagccgtcatctacatcatctcgtaacaccgactatccttcgaacacaactgacacactcccgtggttcgagactgaggatcggtccttgctgtggcactatgtgccgccggccgttgtccacgcacgtgaagaggcgctgnngntgacgctaagtacaggcttggagttcgttcgtaccaatactcggtgtgctacgtctgcgtgaacgcgtaggccgacgcagtactgctagaccactcctgctagggcaggacgactggcttgggaggtgcttgctccgcaccagaggcctaacacatgcggaataatgcgtacgcacaacggcaacatgcaacaccgagttgcagagaatgcgcatataccggcagccaatcgtgtctgccgctggaactccaagggcgaaacggttgggccactgtgaaagcgagtgtcctagatgtgcgtactgacaaaccatacagagcggatgggaagtagatcctgactggatcctgcgcgtgacacgttcacaagagaatctggagcggaccaacgtgacagcggagtaaacagcggacactttggtgagcgtcactgcagtttcttttagcccgcacgttactctgtgggtgggctggaagaacccggtatcgagggtcaaattccgttattctccctcgtgaacagaggaggcgacaccatctgtttgcgccaggtgcccaaataggacgtgtaagccggtggccaggatcacggggcctcggtgtaccctgtgccccgggacttatattcgggactgcaccaacgacaggcccgcccgcaagtgtgttcgagacactttacctgggattagtcgcccgtccccgggagtatgagaaattgatagagccatacacaaattgtcgaacaggggctttgcaagggtggattggccaccatcggtggcggaaaccagccgcgggttccatttcgcctgtggggcccctgtgttacctaaccgacatatgtggagcgctccaatcttcggagaagcaaagaacaccgtgtttgggcgctagcagtaaatcattgcactggacaataggttggccccccagn

SEQ ID NO: 554310 - DNA, 178 bp, Homo sapiens
ttacttcttgtaagcatctatccctctctccttgttgcataacatcccacgccagcacgcatctatctacagtgtatacctgtgcaccgatccccaccccaattcaatcccggaagggatcctccttaggaaacccttactatatagctagatatccaggaccccgtgggcttgtgaa

SEQ ID NO: 554311 - DNA, 292 bp, Homo sapiens
tgaacctggggacggatacaggcgtgtgcaccttgcctagctaatttttgtatttttaatagagatggcgtttcaccatcttggcaaggctggtcgtgaactcctaacctcaagtgattgttccccgctaagtgattgttccccgctaagtgattgttccccgctaagtgattgttccccgctaagtgattgttccccgctatagtgattgttccccgctaagtgattgttccccgctaagtgattgttccccgctaagtgattgttccccgctaagtgattgttccccgct

SEQ ID NO: 554312 - DNA, 747 bp, Homo sapiens
  misc_feature (401)..(401): n is a, c, g, or t
  misc_feature (452)..(452): n is a, c, g, or t
  misc_feature (459)..(459): n is a, c, g, or t
  misc_feature (471)..(471): n is a, c, g, or t
  misc_feature (485)..(485): n is a, c, g, or t
  misc_feature (505)..(505): n is a, c, g, or t
  misc_feature (511)..(511): n is a, c, g, or t
  misc_feature (538)..(538): n is a, c, g, or t
  misc_feature (554)..(555): n is a, c, g, or t
  misc_feature (578)..(578): n is a, c, g, or t
  misc_feature (584)..(584): n is a, c, g, or t
  misc_feature (676)..(676): n is a, c, g, or t
  misc_feature (681)..(681): n is a, c, g, or t
gaccagctcgtgctgcctaagaaggtctgtctggatgtttataggcagcacctctgaagtggcctaaattcaccctgatctgatagttttcctgcttagaaagtgtgccttggccagatcagtatcccacatgggagtgttccctatgttgtagctgtgattgtttccagatgaccagattgtttttctgaaaatgagcatatttttagtcatgtcgattagctgttcttctacatcacattgttactctttctgatgatgattctagggttaacattggaaccatctcaaaataattacacagttttagatgggtttacaatgtcttctaaacaatgtgatctaaaaataattgagtcagatgctaacgagatactgcaggcataactgctgtttttctnacaactgattgtgaaaccttaaaacctgcatacctcttcttacagtgaggngtatgcnaaatctggaaanatattctatttttntatataggtagataggatcnccattnatttcctatttagatatactgacattnatccatatgtatgcgnncattagcttactataatttactnttgacntaatggggcataaatgggctttctgtgggttagatgtaaagccacatattttatattcactattttaatgagcactgctgagggaatgcagngtcanaacctggctatttttaactagggtataccctagtatccattcagatggtggttttaaatgacactt

SEQ ID NO: 554313 - DNA, 86 bp, Homo sapiens
gttacaatcgttctgtgtttgatatttgtgtaaagtgtgcatgcgtcttgtactaggactaagaacaaaactgtaactgcatagaa

SEQ ID NO: 554314 - DNA, 247 bp, Homo sapiens
gcaaaaccttctgatctatctatagcgtccaatctggatagttttttatgatctgactcgcctggcaagtgattgttccccgctaagtgattgttccccgctaagtgattgttccccgctaagtgattgttccccgctaagtgattgttccccgctatagtgattgttccccgctaagtgattgttccccgctaagtgattgttccccgctaagtgattgttccccgctaagtgattgttccccgct

SEQ ID NO: 554315 - DNA, 663 bp, Homo sapiens
  misc_feature (401)..(401): n is a, c, g, or t
  misc_feature (452)..(452): n is a, c, g, or t
  misc_feature (459)..(459): n is a, c, g, or t
  misc_feature (471)..(471): n is a, c, g, or t
  misc_feature (485)..(485): n is a, c, g, or t
  misc_feature (505)..(505): n is a, c, g, or t
  misc_feature (511)..(511): n is a, c, g, or t
  misc_feature (538)..(538): n is a, c, g, or t
  misc_feature (554)..(555): n is a, c, g, or t
  misc_feature (578)..(578): n is a, c, g, or t
  misc_feature (584)..(584): n is a, c, g, or t
gaccagctcgtgctgcctaagaaggtctgtctggatgtttataggcagcacctctgaagtggcctaaattcaccctgatctgatagttttcctgcttagaaagtgtgccttggccagatcagtatcccacatgggagtgttccctatgttgtagctgtgattgtttccagatgaccagattgtttttctgaaaatgagcatatttttagtcatgtcgattagctgttcttctacatcacattgttactctttctgatgatgattctagggttaacattggaaccatctcaaaataattacacagttttagatgggtttacaatgtcttctaaacaatgtgatctaaaaataattgagtcagatgctaacgagatactgcaggcataactgctgtttttctnacaactgattgtgaaaccttaaaacctgcatacctcttcttacagtgaggngtatgcnaaatctggaaanatattctatttttntatataggtagataggatcnccattnatttcctatttagatatactgacattnatccatatgtatgcgnncattagcttactataatttactnttgacntaatggggcatataataaaactttcatagtacacatgaggtgatattgatacacaggggatccgtctagagcgacctac

SEQ ID NO: 554316 - DNA, 243 bp, Homo sapiens
agtcagagcggtcaaattaagttgaaatctcctaagtgtaagttgggtgctttgtgttaagcaagtgattgttccccgctaagtgattgttccccgctaagtgattgttccccgctaagtgattgttccccgctaagtgattgttccccgctatagtgattgttccccgctaagtgattgttccccgctaagtgattgttccccgctaagtgattgttccccgctaagtgattgttccccgct

SEQ ID NO: 554317 - DNA, 242 bp, Homo sapiens
cgcgggaaccatcaccttgaaccatcaccttgaaccatcaccttgaaccatcacttgaactaagtgattgttccccgctaagtgattgttccccgctaagtgattgttccccgctaagtgattgttccccgctaagtgattgttccccgctatagtgattgttccccgctaagtgattgttccccgctaagtgattgttccccgctaagtgattgttccccgctaagtgattgttccccgct

SEQ ID NO: 554318 - DNA, 373 bp, Homo sapiens
tacttctgtcgcgcgggctctgcctcaataggtagcccgccctgggggccaaactcggtggcggtgaggcctgatctgcttcatctcggtgaggactcgctccggcgtcatctggtagccccagttcggaacctcgcagacgccccagctgatgggcgctccggcaatcttcatcgatgtgctcctcgtgtcttggaggcctgagctcctgtgcatcaggccgctctcggtagtatatgtcctgtcaaatagcggggcaatagctgtcgctggcgtgggaatcagtattgatggcgggctttgtgctaacattatggagtcttgccgttactggtgagaatccagctttgtcagaacacagacgctcttaccg

SEQ ID NO: 554319 - DNA, 650 bp, Homo sapiens
atccctgagaatccaaaattctccgggccaccctatcagcaaccccatcctaagagataaaaaaaacaaaaaaaaaaaaaaacaaaaaaaaacaagttgttgtgcgcggcgcgcgcgccccggggcccccggaagaaagagttttcaaagaaacaccatgcgcgtgtgggggcgcgcgccgcgcggggcccccagatgggggtaaagggggacaacgtgtgggccaatagcgcggtttcccataggaagaaaactcgcggggggatccaagcgaaacgaaagaaggcggacgggggaattctcccacaccccacatatatcaacaacagagcgcgcgcggggggggaagcacccccgcggaagagcgttgtctcgtgagaacacacacaaatcacgccagagaggggagagatgcccgggagaggggtcccaactatcgcggggggggcactctctataatcacaccgaggggggagttccccccaagaagggggaaagacctgcgaaatatactccaaaatatgatagagcgccccgcgacgacgaggggggaaccatcgacgacaacgacaaatcaatctcaagcacacaagacaacaacacaaagagccagcagcgaccgaccgaacaacaacagaacaacagcaaa

SEQ ID NO: 554320 - DNA, 2044 bp, Homo sapiens
  misc_feature (1067)..(1067): n is a, c, g, or t
acacagcgcagctgcatgacttccactgtggcgtgcgttcctccagtctcctgctcgctcggtcgcctcgctctcgtgctgactactggcgtggtggtcgtcggggtctgtgattgttgtgacttctgtcataatgacagctgcacgactcgagtatcgcctgttcagccgtgtcgtcttgcttcattgctagcgtggtgctgtgagtgcgcagatcttcgtccactcgtcgttggctcgcgagccgtgaggcctgcgatggttgagctaggtggatggcgaggatctcggacgtccgcacaacagggtgtctgcactcagtgctggagtgccggtccgtcccttttgcacaatacgatgcaatacacacgtcgtgccaatcagcgcatacatagagacccagcatacggcgtacactcacagagctagaggactatcctctcgcacagtctactacctacgcgcggcatcgtcatctgtttgtgcgacagaacagaggacgaagcagagaggcgctataagtagagcagggcagcaggtagcgcagggtgcataatatcatacaatacatgtagtcaggcaattcacagtcagcacagtcactctatataatgcactgtcacttctcgcgtaggggagacggactacggccagctggtgtcagtatcagcagctagcatgcgctagcgcagtaggatgtagtgtagtgagtaatcgtacggtggtgctgtgtgtctatagactgatcggcagtgtgtgtccactgtcagtgccgtggacgcatggcgctgccagagcggggatagactagacggcgcgtcgccgtacatgtacaccgtacctaggtagggtagtacgcagatcctctgctctagcacagtatagtgtcagcacgacgttgaggctacagtgggagcatggagtgatgtacgaccgtgaccgctatcggatgcgctcagtatagaaccgtctatggatcaacgcgtggctgtgttaacattagtcagattgacagactggatatgacgatagtatacactagtgcgttggtgatgaagatagtgagnatagtatgaagactagttgaagactgtggtaggattgcaggtattcgcactatgtagtgtagcactgtacagaatgagacactgtactacagaactatagccattttgtcacagtacgaacctacatgtccgatgtacacctttgtcacctactcttcgtcgctacttcgacatacgatgacgttgatgagggatcattccagtcgtccgatgtcgttggcggctactgtatcgacgttgggcccaggagacccatgaccacgacgctaagtactgcacgcgagtgtgtcgcatgcctaataatacactacactactgtgacagagacagtttgaacaacacacacacgagcccatacgcgcagtgaccagttgtatgtggcgatgttgcgactgtctccattgacgcactgtccgcctatcctagacgtcacgcctaacgtatcagcactgttgggcttcttgggctctattcgattgcgatatcacttgcagcgagacgactgaccgagtggctgcgcgtagaatgctagtacccgcgataccataattatcagaacatacatcatacaacacgtcctacatctagcgtagacatcatcagacgaagagtgttgacggatatatgcgatgcgaggatgcaggagtacgaacaattgtgctatgtgtcaatcgcgacggtaacgtcgttcttgtgtgtagcgccgtaactgggcaacctgcttcccggctgctcgaccaggccagcgcacggcttcagtgtctgactgcgggtgcgcgcgctgtggcatagtctctggtgtactcgactcgctgtcatgactatgtcacagtagcatgacttactgcgtagtctatcatgtgatgtacttctagttgatccggaccccttatgtctggatagtagatgtcaggttgtgtgagttgtggtggatagcggttgattctactatctcgcagattccgtatgttagtatg

SEQ ID NO: 554321 - DNA, 255 bp, Homo sapiens
tcgatagactgggcctaagtttttttagcggatgtgatgtttacagagtgtcaccacaattacaggtatttcccaagtgattgttccccgctaagtgattgttccccgctaagtgattgttccccgctaagtgattgttccccgctaagtgattgttccccgctatagtgattgttccccgctaagtgattgttccccgctaagtgattgttccccgctaagtgattgttccccgctaagtgattgttccccgct

SEQ ID NO: 554322 - DNA, 301 bp, Homo sapiens
ccccagcccagggggccccaaaggtttccagtgccttggataaactgaaggagtttggaaaccccctggaggacaaggctcgggaactcttcagccgcatcaaacaaagtgaactttttgccaaaatgcgggggtggtttttaaagaccttttagaaagtgaaggagaaactcaagatttactttttggggccttaagggtgacatcccaggaggggccttttaaattttcccccccccagggcctgtgttgagggctccctccatgtggcccccggggccccccataaaaatccttcaga

SEQ ID NO: 554323 - DNA, 104 bp, Homo sapiens
tgaccatgtaggaggtagacaaaacagtccaacctcacatgaatcattagaggtgatcattgcactcccagacaccaagacactgagggctccacgggttgaaa

SEQ ID NO: 554324 - DNA, 606 bp, Homo sapiens
  misc_feature (201)..(201): n is a, c, g, or t
  misc_feature (208)..(208): n is a, c, g, or t
  misc_feature (227)..(227): n is a, c, g, or t
caccaccccatctctgacataggccaacctgaagtgctgggcctgggattctacctcgagaccacgctgactgtcagctgcatgggatggaacagcccaggacacaaagcttttgagccaggccgcagggattgaaccttccaaaagtgggccctttggttggtgccttcgaagagaacagagaacacatccatggcagcncgagggnctgccccagcccctcatcntgagatgggagcagtctccccagcccaccatccccatcgtgggcatcgttgctggccttgttgtccttggagctgtggtcactggagctgtggtcgctgctgtgatgtggaggaagaagagctcagaaagaccaaaggagctacttctcaggctgcaggaaagttgactcatactggtgtccagtgaagaaacccaggcgcataagagggacagttggatctcagggaggactgtcttcttctcacctccccggacgatgcttcttgacacaggaaagaggatgtgctgctagggtcatcatgtcctggtttattgtgttgtcagtagaatgaaatcaaaatacatacttcataaataataaaataacccataataaga

SEQ ID NO: 554325 - DNA, 325 bp, Homo sapiens
aatcatttgtcatcacactgcacacttacaaagaatgatatttggctggtgcgatgactcacgcctgtaatcccagcactttgggaggccgaggtgggtggatcacctgaggtcaggagttcgagaccagcctagccaacgtggcaaaaccctgtctctacgaaaaatacaaaagttagctgggtatagtggcgcatgtaatccagctatttgggaagctgaggcaggagaatcgcttgaacctgggaggtggcggttgcagtgagctgaggtggcgccactgcaccccagcctgggtaacagaatgagactccatctcaaaaaa

SEQ ID NO: 554326 - DNA, 364 bp, Homo sapiens
tatagcgcctaggtacccactgggggcttcctgttaacctggggactggtgtcattctggggcctaatgaccacctgggttgtattattcacctagggcctggtgtccacttggggcttgagtgtaaccttggacctggcacccacataggattgggtatcaaactggccccttggtgtccagttaagacatcatgtgaacctggctcctgagtgtccacttggggccaaatgactactgggggcctgaatgtcaacctagaatctgaggtttactaggggcctaggtatccacctggggcctaatgtccacccgagcctgggtgtcaacctggggcctgatgtaaacctctagttcagtatcc

SEQ ID NO: 554327 - DNA, 95 bp, Homo sapiens
accatggcggctaggaaccctatacaaggatcctgaaaactcgagggccttcaaggtcctcatcgctgcgcagtacagcggagggtcaggtactc

SEQ ID NO: 554328 - DNA, 322 bp, Homo sapiens
caaagccttatggattgaacattgcataaaataggccttgtgtgtggcgcagtggctcacgcctgtaatcccagcactttgggaggcccaggtgggtggaccacctgaggtcaggagttcaagaccagcctggccaacaaggagaaaccccatccccactaaaaatacaaaattagccaggtatggtggcgcatgcctgtaatcccagctacttgggaggctgaggcaggagagtcgcttgaacccaggaggcagaggttgtggtgagccgagatcacgccattgcactccagcctgggcaacaagagcaaaactccatctc

SEQ ID NO: 554329 - DNA, 247 bp, Homo sapiens
taatcaaccctaaatttattatcgggcttcatacggcagctggccaatgaaggctgtgacatccatgctatcatctattcacacaaagaaaaaagttgtctgtgtgcgcaaatccaaaacagacttgggcgaaatatattagtgcgtctcctcagataaaaaagtcaagaacatgtaacaactgtggcttttctgggaatggaattcggacatagacccaaagaacagacaagaaccttgctagggg

SEQ ID NO: 554330 - DNA, 396 bp, Homo sapiens
gagctcggtaccccgctggccagtggcagagcagattgcagagcagatgtaacagatttgttacagagccttctattctgggccccctcaaaactagcagcttttctggtcacttggtgattgggccggagtaacactcaaatgaggaatgtgttgcctccaaaatctagataaaggagttaagtgttatgcctttttcttggtagtaggaggagccagatgcaacaagtttatcctttaccctagaagagatagcatgacatgcctcacaccagtagatccctagacattacactgaggtagaaggcccttgaattttagtcagatttatttcccaagcccggctggcccaatggcatgttctcactcatgagcatctctcactctatttggagt

SEQ ID NO: 554331 - DNA, 417 bp, Homo sapiens
  misc_feature (285)..(285): n is a, c, g, or t
  misc_feature (289)..(289): n is a, c, g, or t
  misc_feature (309)..(309): n is a, c, g, or t
  misc_feature (342)..(342): n is a, c, g, or t
  misc_feature (374)..(375): n is a, c, g, or t
  misc_feature (390)..(390): n is a, c, g, or t
gctgacccagagtggagtctgagtctgagtcctgtctctgcctgcggcccagaagtttccctcaaatgcgcgtgtgcacgtgtgcgtgtgcgtgcgtgtgtgtgtgtttgtgagcatgggtgtgcccttggggtaagccagagcctggggtgttctctttggtgttacacagcccaagaggactgagactggcacttagcccaagaggtctgagccctggtgtgtttccagatcgatcctggattcactcactcactcattccttcactcatcccgccagggttntacntctcgagactatgtaatacntgccagctctaggtttcaaccctggcaggtttnattctgacttatctctcattttggcatgtggnnacactctaataaggngagtaccccgcgaactgcggatcctta

SEQ ID NO: 554332 - DNA, 100 bp, Homo sapiens
  misc_feature (85)..(87): n is a, c, g, or t
aattcaagcttctaacgatgtacggggacatgatgtcttttcttctttttcttttttttaacaaaacagaacaaaaccaaaaaannnccagaaaaaaaaa

SEQ ID NO: 554333 - DNA, 1104 bp, Homo sapiens
  misc_feature (298)..(298): n is a, c, g, or t
  misc_feature (306)..(306): n is a, c, g, or t
  misc_feature (342)..(342): n is a, c, g, or t
  misc_feature (643)..(643): n is a, c, g, or t
  misc_feature (654)..(655): n is a, c, g, or t
  misc_feature (665)..(665): n is a, c, g, or t
  misc_feature (681)..(681): n is a, c, g, or t
  misc_feature (683)..(683): n is a, c, g, or t
  misc_feature (1089)..(1091): n is a, c, g, or t
gctgacccagagtggagtctgagtctgagtcctgtctctgcctgcggcccagaagtttccctcaaatgcgcgtgtgcacgtgtgcgtgtgcgtgcgtgtgtgtgtgtttgtgagcatgggtgtgcccttggggtaagccagagcctggggtgttctctttggtgttacacagcccaagaggactgagactggcacttagcccaagaggtctgagccctggtgtgtttccagatcgatcctggattcactcactcactcattccttcactcagtccagcgcaccgtaagagagacattnactgaccnatgtactacgtgccagctctagtttcagccttgggnaggtttattcgtggcttcctctgatttcggcatgtggagacactcctataaggagagtcaagcctgtgggagtagaataatctcattcccagagtcagaggagaagagacatgtaccttgaccatcgtccttcctctcaagctagccagagggtgggagcctaaggaagcgtggggtagcagatggagtaatggtcacgaggtccagacccactcccaaagctcagacttgccaggctccctttctcttcttccccaggtccttcctttaggtctggttgttgcaccatctgcttggttgngctggcagctnnagagccctgntgtgggacgagcgaangngggtcaaaggaagacttgaagcacaagagggctagggaggtggggtacatttctctgagcagtcagggtgggaagaaagaatgcaagagtggactgaatgtgcctaatggagaagacccacgtgctaggggatgaggggcttcctgggtcctgttccctaccccatttgtggtcacagccatgaagtcaccgggatgaacctatccttccagtggctcgcttccctgtagctcttgcctccctctccatatctccttccctatacacctccctccccacacctccatactcccctgggcatcttctggcttgactggatggaaggagacttaggaacctaccagttggccatgatgtcttttcttctttttcttttttttaacaaaacagaacaaaaccaaaaaannnccagaaaaaaaaa

SEQ ID NO: 554334 - DNA, 668 bp, Homo sapiens
gaagctgggaggtaggcgcggggcggtcggctgcggtggcggcgtgggatgatggtctctcggcggcggagtcggaaacactgtgggtgacaactatctctgtacatgcatcaaatcttataaaatgtggctgggcatggtggtgcatgcctgtaatcccagctacttggaaaggctgaggctggagaatcacttgaatccaggagacggaggtggcatgtgagccagcagatttgcaccattgcactccagagttggcaacacggcaaagacctccgtctccatagaaacaagaaaacaccaaaaactttacatatgtgtataaagcctgtgtcagggattctggtactttcccttttaatctacagttggcaatatagaataattttcttacagcacatatatgctgtttccaagtactaccagcttttaataattaaagcctttatggtctggatagaacaacagagttttccacattcttacaaaaagtttttcctataacctaataacttttcctccatttccatgtggacaattgacaagaagtatggctaatacaaggctctctatggaaaaaaattaccatttggtacgtttggcatgcgaaattgtatgtagacacttttggcgtgttaacatttgaggaaaaacaaattggacattcg

SEQ ID NO: 554335 - DNA, 1057 bp, Homo sapiens
tagcggagagacgaacgaatatcgtcccgatggaccccgtccggggttgaggaccaaccgcgcctttgaacacggccaggccccaggccgtctgcgacagggagaggacccccggaggctgccttgcccaccgccaaagaagggaaacctcccggcgtgtagcgataggctccgaacccgccgtcccgaggcggacaaacccctagcgcgtggccaccaaggatcgccacgactggcccgccgggatcagtacgcaccttcatctgagcagttgcgaacaccaccgaagtaccagccatgtcctaggcgtgggaggcgcatcgtgcgtaagtagtaggcagctggagtgccaccgcatgcgtaggagctgacctcccagagagacctcattggcaggcggcaggtgccacagtgaggaggatgagcgtcgtcacaccggtggcagcggagatgaagcccccaacgccttcctcagaggcaaccccagagccatacacaagcccactcaggcacgctggagcaccagctcaccccagaagcccccaacacctgaagagagcaaagcagccgtcaccagtgctccaggaagatatatacattgtagggggtacagtcagaaggacaggacaatggggcggaagattctgccggacacagagtatgagctgagtatggggaagacacgtatacaggctcccagatttcttccagggcaagcacttctttctctatcggggagttccctgtggacgagcggcggaaactcatccgatatgtcacagccttctatggggagctcgaggactatatgagtgaccgggttcagtttgtgatcacagcacaggaatgggatcccagctttgaggagggcctgatggacaacccctccctggcattcgttcgtccccgatggatctacagttgcaatgtgaagcagaaatacttcctcaccagctctatgtggtgtgccacaggcctgaagatgtggctaacacacacaagacacacacacacacaaacacattaaaccagcagcgatgcatttaatattagtttt

SEQ ID NO: 554336 - DNA, 1203 bp, Homo sapiens
ggagagtcggagccacagacagagccctgcccaggccgagccggagctgcagcccgagctgctgtgtggtgccctcagcccctgtcctcttgtcctcctcagcctcgatctgccggaggctgctgggcaatgaccccgggactccaggccagcaggggtctgaagctgtttgggaaatgcagcgggactccattgaggaacgattggacatggcacccaagccacttccctgagtgcacggtagtacacacatgccaccagctggctgctgagcagtgtagggaataggcaggaccgggctagggcacctggacacccctacatgtgaccacacgtctgacagacattcatcagagcagcacgttcgtccagacagaacggtgccaacgttattcgggcattgggagcctggacccacagccataccccttgtggccagagcagcaacccctcgcatggccccgttacaattattagacactccacacacgctggaacccagattcctggcagagacaccaggacaaccatgcgaggctgtgccggaagacaacttatacaccaccagacactcagaccctggccgaggtagatcgactgggcagtggcttgagcgaccgatgcgactccctgaactcgctatgacagcccagcgtctgtgactatctggagccaacacgtggcagggccaaccagctccggacttggcgcccctgcggtacaaattaaacctgtcaacctacatcaacacaacagcagaacaaacaggactaccagccaatatgccgcaccgtagcgcgcgccaagaatcagccgccttaaccggtgacacccatcatcgctcgacccggccacaactgcgtcgcctgcactgcccccaatgccccatggcgagcaaaaactgtgaccccacgataggacacaccgcacaacaggatcacaccccagaagatgccgggccagcatgccacccaagcagaacgcgcaaggcgctgggtcacaacaggcgtcagccgagaagaaacacagctccgacccgctggccctgcgaacacacgcagagccgagcacccacagtaggacggcacggcaacaacagaagacacagcggacaagcgaacgcccaagccaccaaagacaacaacaacaccagagggcagtccgagtcacaagtagtagaagaacaaacacgacgagtagaac

SEQ ID NO: 554337 - DNA, 891 bp, Homo sapiens
tatgatggtgtgctcccaagactgaaggctctggagcaaggctgtgccgttgcttgggttgctgaagtgagaggaggctgttctcagccctttgccttttctgaaagctgtcctggccgggatcccagggaagaatggaggggactgagtagtatcatccatccagacatcatcccatttgcatccccctagttccagtccctgggcaacacccacaacgccctgggaagagtaatgaaggcaagccacttcgttgctcagacctgcttacaagacctttctcatgaggcctttgcaggggaatcttggaaagacttccttggaggggctacacgcgacaagatgcacacagaaggacactacggaaatgacacagtggagttattggaagtatcacatggacgacccatttattagagtattttggaaacatacatagcgcaaattttcctctcatgaccaccactctacaccaaaagcaattaatagatatggggaaatcatcaagcccataattttgacagagaaattagagcacattgggtccaaaaggaattcttcaacaaacagggaaataaaatttgtgtctgaagacagaaagaatgaagatgggtggagttatggagcaaggggggacaggcaaactttggaggatgaatgcattgaatgccaatggaaaagaaagacaatatatagggaattgatggatgagggaggaacaatagaatacacccagaggtggggtagaggacagggaaagttaacttgaataatcaattatcaacccaaaaataatactagcacgtggatggaataattctaattgaaatatcaggtatcatgataacgaagcatgtcttacatacaaggctcccatgtgagatcacaaac

SEQ ID NO: 554338 - DNA, 209 bp, Homo sapiens
catactatacaatcgagctggtaccgctcacctcggaaatcagcatttgaactatcagcatcttgcctgggaaacgagtgtctgtgatgcttcactagtatatttagttttgcagttggttgtttatttctgccctttttttgtgttgaagaattttggcacctggcgaagaagataatttggaatttgaagaagatttgccgaggtgg

SEQ ID NO: 554339 - DNA, 925 bp, Homo sapiens
  misc_feature (44)..(44): n is a, c, g, or t
  misc_feature (69)..(69): n is a, c, g, or t
  misc_feature (72)..(72): n is a, c, g, or t
  misc_feature (82)..(82): n is a, c, g, or t
  misc_feature (125)..(125): n is a, c, g, or t
  misc_feature (133)..(134): n is a, c, g, or t
  misc_feature (136)..(138): n is a, c, g, or t
  misc_feature (140)..(142): n is a, c, g, or t
  misc_feature (144)..(144): n is a, c, g, or t
  misc_feature (148)..(148): n is a, c, g, or t
  misc_feature (169)..(169): n is a, c, g, or t
  misc_feature (172)..(172): n is a, c, g, or t
  misc_feature (175)..(175): n is a, c, g, or t
  misc_feature (179)..(179): n is a, c, g, or t
  misc_feature (181)..(181): n is a, c, g, or t
  misc_feature (184)..(184): n is a, c, g, or t
  misc_feature (205)..(205): n is a, c, g, or t
  misc_feature (212)..(212): n is a, c, g, or t
  misc_feature (216)..(216): n is a, c, g, or t
  misc_feature (236)..(236): n is a, c, g, or t
  misc_feature (263)..(263): n is a, c, g, or t
  misc_feature (294)..(295): n is a, c, g, or t
  misc_feature (301)..(301): n is a, c, g, or t
  misc_feature (323)..(323): n is a, c, g, or t
  misc_feature (332)..(332): n is a, c, g, or t
  misc_feature (344)..(344): n is a, c, g, or t
  misc_feature (349)..(350): n is a, c, g, or t
  misc_feature (364)..(364): n is a, c, g, or t
  misc_feature (366)..(366): n is a, c, g, or t
  misc_feature (369)..(369): n is a, c, g, or t
  misc_feature (395)..(395): n is a, c, g, or t
  misc_feature (398)..(398): n is a, c, g, or t
  misc_feature (417)..(417): n is a, c, g, or t
  misc_feature (421)..(421): n is a, c, g, or t
  misc_feature (436)..(436): n is a, c, g, or t
  misc_feature (446)..(446): n is a, c, g, or t
  misc_feature (450)..(450): n is a, c, g, or t
  misc_feature (458)..(458): n is a, c, g, or t
  misc_feature (468)..(468): n is a, c, g, or t
  misc_feature (475)..(475): n is a, c, g, or t
  misc_feature (477)..(477): n is a, c, g, or t
  misc_feature (488)..(488): n is a, c, g, or t
  misc_feature (491)..(491): n is a, c, g, or t
  misc_feature (507)..(507): n is a, c, g, or t
  misc_feature (510)..(510): n is a, c, g, or t
  misc_feature (524)..(525): n is a, c, g, or t
  misc_feature (540)..(540): n is a, c, g, or t
  misc_feature (544)..(545): n is a, c, g, or t
  misc_feature (549)..(550): n is a, c, g, or t
  misc_feature (553)..(553): n is a, c, g, or t
  misc_feature (555)..(556): n is a, c, g, or t
  misc_feature (903)..(903): n is a, c, g, or t
tagtatagctatgcctctagtagccatggtggtgatgtggtgtncagggctgctattgcgtcgagagcnctnagacaccganatctgaggatgcgtcaagtccctgatgggcaatggcatagggngtgcgggnngnnnannngnggcntgcctgtataatttaaatcancgncgnagantncgntataatacgcaaatacaatanaaatgcnatgnaaagtagtgcgtgacaccanattgtttagggaataatggcgagaganaaaaaggtctgtgcgtgttcagtaccaatgnnattgcntttttcaaatatttcctatccnaggctggtnggatctaaatgnggggnncacagttatagagngnggngtgtgctggggaaatgctttagcggnagngacatttcttagagatggnttanatcagcagccactgnagagagagcnatanagggatanctcattctantatggcntngtgaatgctgngtntttttgtttttaaatnggngggttgtaggaggnngggatcaggcgagtntatnngggnncantnnccagacagcatgtgctcactttgcgtttctgtgtcagcattttgaacagtaaatatttttaaattaaggtttgtatatttgttagacataatgctattgcacatttagtggactgcaatatgcagtaaacatgacttagatgcactgggaaactaaaacaatgcgcttccttgctttattgtgatgttggctttaccgaggtggtctggaactgaacccacaatatctccgagatatacctgtactttttactaaaaatatttcatttgagaagtaaacctcaagaactaccaggacttttcagatgggaagagcgaggccctggcagggcgagtctaggtgtgcanctagtgggggcggggtcaagtc

SEQ ID NO: 554340 - DNA, 646 bp, Homo sapiens
agcggattggtgtggcggcggcagggcctgggcctgagcgggtccccggggctgagcgccgggctccgcgccgccctcccgcgccacctgaccaagcgggcgcatatcctctccgagacaagatggcaaccccggcggcggtcaaccctccggaaatggcttcagacataccgtggatctgtgacagttgcccgttggcccctatggcaggcgcaccggacgaggtgaccgatggcgggggccatgccatgcccgtggaggaaagcggcgttccggaatggacgttcgatgatgaagatggatgaaggccccagtaaatgctcacgagagaatcatagtgaaatcgaacggctgcaggacggaacacagatgactcagtacatcacggagctctccgacatggtcccctacatgcagcagcaactgagctcggaagccgagacaagctcaccagtcctccgcatggccagtctcgcacatgaagtccatgaagggtacagggaacaagtccaccgattggtgcgtacaagccttccgtttcctcacagagcaggaactgaaagcatctcatccttgaagcagctgatggatttctgtacgtaggtggctgctgagacgtgggcgagtgacttatgtgtctgactcc

SEQ ID NO: 554341 - DNA, 242 bp, Homo sapiens
tttttttttttgaggtattgatgctttattattctgcaggttacgtgtccaggtgcccaggctcggggcccagtaactcagcgtactcttggtggcttacttcagggcttttatggggggcggccacgcccatcttaatcaccagaatgaggaactccgggaagttaactgcaccatccagtgtggatatccaacctcttggaacgcgacgggaccatggcttttatttcacaacactatat

SEQ ID NO: 554342 - DNA, 422 bp, Homo sapiens
tcagcaccactgtgaggactggtgcaactaactctgccttggcaaaatcatggtaaggctcgccatcacacagtgccagtttgatgtcagcgttgaaccacggaggcaagaaacaagaatccaaaccatgtttctagcctgggtcaaaatgcggcaagagttactctcgaacgtcccaggcagagactggcccagtccgcctctttggactaagagctgagtgatgtgacaagggcgacacaccaggtgccgtgaaggcagggccatctcctccagctgagcgaagctcctccctggcaaccgtaacggcactgaacaagctgtttcacctggagggggttgactgaccccgcatgtcaggccggggtttggctttcccaacagttaccatctttccccgctgtcgcccttgtcttctgacc

SEQ ID NO: 554343 - DNA, 367 bp, Homo sapiens
  misc_feature (14)..(14): n is a, c, g, or t
  misc_feature (22)..(22): n is a, c, g, or t
  misc_feature (48)..(48): n is a, c, g, or t
  misc_feature (50)..(50): n is a, c, g, or t
  misc_feature (54)..(54): n is a, c, g, or t
  misc_feature (66)..(66): n is a, c, g, or t
  misc_feature (69)..(69): n is a, c, g, or t
  misc_feature (76)..(76): n is a, c, g, or t
  misc_feature (105)..(105): n is a, c, g, or t
  misc_feature (111)..(111): n is a, c, g, or t
  misc_feature (147)..(147): n is a, c, g, or t
  misc_feature (208)..(208): n is a, c, g, or t
  misc_feature (255)..(255): n is a, c, g, or t
  misc_feature (279)..(279): n is a, c, g, or t
  misc_feature (290)..(290): n is a, c, g, or t
  misc_feature (294)..(294): n is a, c, g, or t
  misc_feature (312)..(312): n is a, c, g, or t
gggcgaccgccgcnagtccgcngtagttcggggccaaggaggcggacngngcgnctcacccagcanggngggggcngcggggccgcaggcgacgaggcacctgcncggggncccggacgggccctaggcgccccgctgtgagcgacnctggtggcgcgcgctagcgcccaagcataccaagcgacgcgtaggcgcacggtatggacgncaggcacgctactaccgccgcatagccgccctgggcgtgcgcgaacnatatcgtgctggctcgccagacgnacggggtgcantgcncaccactacccggcagtntacctgggacctcctagcacgagtgcaccgactcgaatccttagcacctaccgac

SEQ ID NO: 554344 - DNA, 430 bp, Homo sapiens
ggtgccctcagctcaaagggaaagccttacgtgaccaatggagtgagctctaccaaaacctgacccgggaacaagccgactacggggtctcccacatgaagccctacgttgacgtgaaggtgccgcgagcccccccccgggttcgactacttggagttcacccgctcgcttaaggagaactgagccaatccctgggatcacccaccccatcgctgcttgccctgcgtcgccttgctgcatgtccgctcctctgtgtgctcatcacttatccactgtacaccttaagccggcattagctgggaataagacttaggaaaaaagggtgcttcaataacccgctatcggggtccggtcaacaatcatcatgtcactggggggacccagatcggtgtctatgaagcagaatgccctctttccgactatacagaaa

SEQ ID NO: 554345 - DNA, 951 bp, Homo sapiens
atgctctctctggaccgatcccactgaagatgatgagaagcttattgaggaaatccagaaggaggctgaagaggaacagacaagaaagaatggagagaacaccttcaaagcgcacttgtgactcctccgactgtgagaaggcctgtggagtaaggtgctagaggtgtggaggccctcccgaggatccgtatacctgcagtagacctgaccagcagccagcagatgctcaccctatgcctttcgcggcacccgagctcctttcgctccctgatccttcgccgatggcggctctgtgatttcaacatagaattctcgcacctgcgaacgatggaggaaccgtgatccgcagagcctccgtgaacgttgtcgccgcacttctgtccacagacgatggccgtgggtgcagaactaaattgacatctctagggttccccaatgcccagaagtagaaccccttgtggatgacagctaactcgtgtgcacaatagaccactatatgcgaaaccacgcagagatccggccgggagagtacgagcatttccttgaattagtgaccacctctgagagtacgccaccactgtggaagctagtagaacaaaacagaaccaagggataatatggagagataagtggatggttgatagggattggaggagaagacgtcgtaaacccacaaaagcagattagggtgattcgtggtaagccaaaagccgattacataaagagtacaagactgtgcatatgcgggtaggagcattgggttataacctattccgcactcgccccttttcacgtaaaacagtgggacgtatccagtcgcaccatggcgaaagcagtcgggactggcattccaaataagtaataaaacccatccacaaaactgcaacgcgaagtaacatgagaagaaacattgcgacatgtgtcactaggccggcttgcacttccgcaata

SEQ ID NO: 554346 - DNA, 200 bp, Homo sapiens
  misc_feature (190)..(190): n is a, c, g, or t
ggtcggaggctgcgtcctgcgttgggctccaggtggtgctctgaatgtcttcctctgctgctctgcaatccagttgctgccttgcttgcactagtcgacccggtctgggatgacctgatctaaaacacatagtctctccggtattatccggcttacataattgggctaggatttccctatattagcttanagaaagtagg

SEQ ID NO: 554347 - DNA, 522 bp, Homo sapiens
  misc_feature (139)..(139): n is a, c, g, or t
  misc_feature (314)..(314): n is a, c, g, or t
  misc_feature (350)..(350): n is a, c, g, or t
  misc_feature (404)..(404): n is a, c, g, or t
  misc_feature (406)..(406): n is a, c, g, or t
  misc_feature (486)..(486): n is a, c, g, or t
  misc_feature (494)..(494): n is a, c, g, or t
gcggtcaaggcagccatctcgccgtgagacagcaagtgtcggatccgcagcgcacgtggcgatgttgtcctctacagccatgtattcggctgctggcagagacttggggatggaaccgcacagagccgcggccctttgnagctgcgatttcgccctacgttttcaacggaggtactatactggcaatgctggagaagatttgcaatgttgcttctgatactcgattgagtgaaggttttcaatcatacgcggatagccccaaatgttacaattaacagacaaaacatcattggatgcagcgttttcatggagangtctacgctgacaaagattattgaagcagactaagngtatagcattccatataagccagactacggggcattgctgcatgcgtctacaancngtaatcagggcttctttccaactagtttacaacatcatcggggacttgatgggggggtgtatacactttgatccataggnctaccggnatccttcaggtggagcccacatgccagt

SEQ ID NO: 554348 - DNA, 187 bp, Homo sapiens
ccggttgacggagcttcggtcatgtgtccacaggagaaactaacattcagttagtcttaattttacgttcgttctaccctttaaggagtttgtttccatcagttgttgactttccaataatgttgcattaagttatacgttgtcactctgtttggtctcatggtgcaatatcaatacagactttcat

SEQ ID NO: 554349 - DNA, 349 bp, Homo sapiens
  misc_feature (349)..(349): n is a, c, g, or t
cgcgaccatgaccctgaccccgtccgtcgagctcattcttcttcctctctgctggccgtgtgtctcgtgtggtgcgacggatctttagcttatgtctggccttttcctgttgtctcatcccagcatactgagttatttattaattagttgatttatttttgcctttttaaattttaacttatatcagtcacttgccactcccccaccctcttgtccacaactcctttccactttaggccaatttttctctcttagatcttccagcagccccaggggtaggaagctcctcttagtactaagagacttcaagcttcttgctttaagtcctcaccctttacattatctaatn

SEQ ID NO: 554350 - DNA, 101 bp, Homo sapiens
tggtcgactactactggctgaccagcactttgggaggcgaggtgggtggattgcttgaggcagtagtgggtcagccagtagtgggtcggcagtagtgggtc

SEQ ID NO: 554351 - DNA, 123 bp, Homo sapiens
cttgcacctgcagtctcagagtagctgggactacaggcgggtacatcaggcccagacaggtaaagaaaaaaattcttggtaaatatgtggtctgctgtgttggccatactggtcttgaactcc

SEQ ID NO: 554352 - DNA, 547 bp, Homo sapiens
  misc_feature (265)..(265): n is a, c, g, or t
  misc_feature (284)..(284): n is a, c, g, or t
  misc_feature (320)..(321): n is a, c, g, or t
  misc_feature (325)..(326): n is a, c, g, or t
  misc_feature (343)..(343): n is a, c, g, or t
  misc_feature (347)..(348): n is a, c, g, or t
  misc_feature (352)..(352): n is a, c, g, or t
  misc_feature (357)..(357): n is a, c, g, or t
acaattacttaacatcccccctcccagaagaagtggatgaacccagtgctgaagatgagggtgtctctccgaggaagtttttggatggcaacgagctcaccctggctgactgcaacctgttgccaaagttacacatagtacaggtggtgtgtaagaagtaccggggattcaccatccccgaggccttccggggagtgcatcggtacttgagcaatgcctacgcccgggaagaattcgcttccacctgtccagatgatgaggagancgagctcgcctatgagcangtggcaaaggccctcaaataagcccctcctgggacnncctnnaccccctccattttctncacnnaggncctgntggtttccacattgctacccaatgaacacactacaaaatggccagtgggcagggaatcctggagatattgaaccggcgaagggtgtggtggaagaggggatgagggaaagaaatgggaggcctgggtaagatttttattgtagggtgggatgagtaggacaacatatttcagtagataaaatacagaata

SEQ ID NO: 554353 - DNA, 417 bp, Homo sapiens
  misc_feature (334)..(334): n is a, c, g, or t
  misc_feature (404)..(404): n is a, c, g, or t
  misc_feature (412)..(412): n is a, c, g, or t
ggttaccctggagaactgggcttttgagtgctgagaaatgctcaaggcatcgtggtatagtggaaagcatatgggctttggagccagcctctaattgtgagctgtatgagtgacttcatttaagctttttaaaatttcactgaattaatttccatatccaaagtgctgggattataggcatgagccactgtgcctgcaacgccaggctaaatttttgtatttttagtagagatggggtttcaccgtgttggccaggctggtgtcgaactccgggcctcaggtggtctgcccgcctcagcctcccaaagtgctggggattatagggcgtgacacnccacacctgggcaaagaggaagtatttttaaattttagtttttcaacctcacacaatttaagtaactttngggttttngggtg

SEQ ID NO: 554354 - DNA, 475 bp, Homo sapiens
  misc_feature (265)..(265): n is a, c, g, or t
  misc_feature (284)..(284): n is a, c, g, or t
  misc_feature (320)..(321): n is a, c, g, or t
  misc_feature (325)..(326): n is a, c, g, or t
  misc_feature (343)..(343): n is a, c, g, or t
  misc_feature (347)..(348): n is a, c, g, or t
  misc_feature (352)..(352): n is a, c, g, or t
  misc_feature (357)..(357): n is a, c, g, or t
acaattacttaacatcccccctcccagaagaagtggatgaacccagtgctgaagatgagggtgtctctccgaggaagtttttggatggcaacgagctcaccctggctgactgcaacctgttgccaaagttacacatagtacaggtggtgtgtaagaagtaccggggattcaccatccccgaggccttccggggagtgcatcggtacttgagcaatgcctacgcccgggaagaattcgcttccacctgtccagatgatgaggagancgagctcgcctatgagcangtggcaaaggccctcaaataagcccctcctgggacnncctnnaccccctccattttctncacnnaggncctgntggtttccacattgctacgctactggactctttactcgcacgcgcctgtgcgccgtggatcctggcgcacttgtctccgggatggtctcgtgtgatgacgcgactgccgatagaaatc

SEQ ID NO: 554355 - DNA, 226 bp, Homo sapiens
gcttcggcctcccaaagtgctgggattacaggcgtgagcccccgcgcctggcaatttttgtatttttaataaagacggggtttccccatgttggctaggatggtctccatctcctgaccttgggatttgcccgcctcggcctcccaaagtgttgggattacaggtgtgagcccccgcgctcggccgagcttattcttaaaatacagtaaaaacttttagctctcca

SEQ ID NO: 554356 - DNA, 139 bp, Homo sapiens
ttcctgcccaacacatgtttctcttttcctcaaggggtttggggcaggagcctgggcacttactccccgtttgggttgtttctccttctgaccaagctctggggtgtaatgcccccatttatttgtaaaaaaaacaaaa

SEQ ID NO: 554357 - DNA, 876 bp, Homo sapiens
  misc_feature (600)..(600): n is a, c, g, or t
agaggccttagcaatgatttggtttttttcttaagagacgggagtctggtgtgtgctcaggctggacttgaactcctgggctcaaatgttcttcctgccttagccttctaagtagctgggactacaggagtgcatccctgtacctgccttggttttttcttgtattgatacataataattgtacatattattgttatttttttttttggagaccagcgtctttactctatcgtctaggctgagtgcaggggcacaatcagtggttcatttcaagcctcaacctccggggctcaagcaaatccttctttgcctcagcctcctgagtagctgggaccataggcgcgtgccaccatgcccagtaaattttaattttttggtagagacgggatctgtatgtggcccacacttagtctcaaactccgtggtctcaagcgatcctcctgctttggcctcccaaagtgctgggattacaggcgtgagccaccacgtttaagcctgagtataatttaaatagccctatgtgacagtggctacttttatgacagtgtagatctagatatttcctcagtgttgtgcttcaaaggactacttcggatgggnaaccagcgggtggattccggcccgggtgattcaatcacgactgggtcaggaacaatctccagtaacaccaggggtctacaagctagtatgtaatctaatactgggcccttaagtacgacacacaaacaacagtgcacaacagaaaaaaaatgtggggccgcccgaatttaaactggggggccggaaagacgcgcccaacggcaaggggtccaaacggcggggaaatggttgtatcgtctcccccggacaacaaagagaatgccatcgccacgacga

SEQ ID NO: 554358 - DNA, 111 bp, Homo sapiens
gaggaattagaggaagagacagcaaaggtagaacctgctgactttcctgttgagcaacctgaagaaaattaaattataaggtattagcattttacaggagctttacaattc

SEQ ID NO: 554359 - DNA, 233 bp, Homo sapiens
cgggaggcagccagtccaggcgcccgctagcttcggcggcgcccagacggggaaagcggaaggaatgtcgcgtacaagcaggcagctggtttgaagaatgccggtgagacattcagtgaaggagacgaccatctcgtgagaacagactgagtcagtacgtacgtacagggacgtacagggacggggtaaccacgtgttggaacgtccgggagtgagagccgtgaccaaggacg

SEQ ID NO: 554360 - DNA, 163 bp, Homo sapiens
ttcagccgcaccgcaaagtagactatggcagcggaagcggttgacccctggaacatgccaggggagctaactggacgccgagctggaacaggccgccgcgaaggagaattaggcacagagagaagaagcgctgcgaggcagcctgacgggcactgaagagcca

SEQ ID NO: 554361 - DNA, 790 bp, Homo sapiens
  misc_feature (24)..(24): n is a, c, g, or t
  misc_feature (28)..(28): n is a, c, g, or t
  misc_feature (30)..(30): n is a, c, g, or t
  misc_feature (157)..(157): n is a, c, g, or t
  misc_feature (159)..(159): n is a, c, g, or t
  misc_feature (167)..(167): n is a, c, g, or t
  misc_feature (171)..(171): n is a, c, g, or t
  misc_feature (221)..(221): n is a, c, g, or t
  misc_feature (229)..(229): n is a, c, g, or t
  misc_feature (239)..(239): n is a, c, g, or t
  misc_feature (253)..(253): n is a, c, g, or t
  misc_feature (260)..(261): n is a, c, g, or t
  misc_feature (267)..(267): n is a, c, g, or t
  misc_feature (344)..(344): n is a, c, g, or t
  misc_feature (349)..(349): n is a, c, g, or t
  misc_feature (445)..(445): n is a, c, g, or t
  misc_feature (447)..(447): n is a, c, g, or t
  misc_feature (465)..(465): n is a, c, g, or t
  misc_feature (477)..(477): n is a, c, g, or t
  misc_feature (491)..(491): n is a, c, g, or t
  misc_feature (675)..(675): n is a, c, g, or t
  misc_feature (677)..(677): n is a, c, g, or t
  misc_feature (680)..(680): n is a, c, g, or t
  misc_feature (781)..(781): n is a, c, g, or t
ctcatgcaaaggaatgaaaggtgngagngnatacagcgcgctctcaagctggaatatccaggttcgtgcgctttgggactaattgggcaaacaatcttgacccacagtaagaacaaagaaaagcggggtggggtggcggtcccacctgggagcagcncngtgccaanggtncccccatcctccagccaatgggaagcgatgctggcctagtagatgctganatagaatncagcctagancctaacactatttnctgtatnntttttnctccaggatggagaggggattcttaccacaatgcaaccaccgtcaatggccccccagtgaatcgaccagcctttggngcgcntcaggttgtgggaagtcatcagccattgctagctgtgactgctgtggtaagcctgatcacctattgtgggcaatgtcttggtcatgttctccttcntngtcggcgagccagctcangacagttaacanctattacctgctcngctttgcgctgtgcagatctcatcattggaatcttctccatgaacctctacaccacctacatcctcatgggtcgctgggctctcgggagtctggcttgtgacctttggcttgcactggactatcgtgtgccagcgacgcttctgtcatgaaccttctggtgatcagttttgaccgttacttttncntcncaagacccttgacatatcgggccaagcgtactccgaaaagggctggcatcatgattggcttggcctggctgatctccttcatcctctgggccccagcaatnctctgctgg

SEQ ID NO: 554362 - DNA, 615 bp, Homo sapiens
  misc_feature (571)..(571): n is a, c, g, or t
tatgtcctcgatgcgttatctactcttagcctctctgtgaaaaaccactagaaagcatccaacccggaactttttaaacgaactactcaaccgtcttctttccctccaatcagttccattgggttcctcctcttacataacgttttcctcatggtttaatttttttttggagacagagtctggctctgtcacccaggcgggaatgccgtggcacaatctcagctcactacaagctccgcctcccgggttcacgccattctcctgcctcagcctcccaagtagtggggactacaggtgcccgaaaccaggcccagctaatttggtttggtttggttttggtattttcagtagagacggggtttcacggtgttagccagatgggtctcaatctccggacctcgtgatcggcctgcctcggcctcccaaagtgctgggattacaggcgtgagccaccaggccgggccttgggcttgtcattcttaccagtatctacggctaagttcctaaagggtcttcccaggccacctgcatcagaatcctatgggctgatcgttacccatgaagttcctgnacaccgcccaggctactgaatcaaatcccactaaatttatctat

SEQ ID NO: 554363 - DNA, 234 bp, Homo sapiens
tgatgagtcgatctaaggatccccgtctgtgataccaggctgagtgcagtggcaggatcttggctcactgcaacctcccaagctcaagccatcctcccacctcagtctcctgagtagttgggactactggcatgtgcccccattcctgattagtttttttgtatttttggtagagatggggtcttgctatattgcctaatttttgtgtttttagtagagatgggtagtcacaga

SEQ ID NO: 554364 - DNA, 126 bp, Homo sapiens
ggtgatcttttcttacaaagaacagctgtacattaaaggaagctcatatttttcaaagctgggcaccattaaaaataacaaagtccaggaaacaaccaagaggtcttaaggaaccatagggtttaa

SEQ ID NO: 554365 - DNA, 1311 bp, Homo sapiens
  misc_feature (239)..(239): n is a, c, g, or t
  misc_feature (492)..(492): n is a, c, g, or t
  misc_feature (1286)..(1286): n is a, c, g, or t
agcggattactggggctaagcagggaacctgcaaatctcatggtgaagccatcctcaagccagctgcctaccctttaatagatacatataaaatgtcgctagtgcaattcggcactgtggttcttgttcccaaagggacatgggtctccagggaatcgaacctaagggaacgactagctgataagcttctgttgacgtctctggacatgcatgacatcacatgctggtcacagctgggnacacggatgaaggtgacgaactggaggacgccatctcttcctgtggtattcatgacctatggctgcctaggacgctgaaagattacagcaccttggggcagccgatggcatggtgtcaacacgcgtccacagggcatacaagtcgtcattaccatgacgactgtctcctcaatatactgatccgtcctgaggcacacgcatactaacactacccctgtggagatgccacgcatagggaaccatgaaactcttncatattcgcttaccattccgcgctgtcgcgacgatggaggaacgcacatcactacttatcggcgtggcactacgcgttgcgctttgtacctgaacgaggcctccaggctttgaagaggaaatgaagccagttgaggaaagctttcatcataacaacatgtgggacctccaaataacactcttgccaccgtcccacaagaagagattctggctcatggcaccaaacaaggggcatacctgtgtttgaccgtccgtttgcaaatacatggaccatgggaactggccctccaagaaggcgaacggattactctcactctcacttgcgttcccgtgaagcccaagagggagacgcaatcgcgtggcaatggggcgcggcttcctgtggggccctactctgtgagctttcacaccgggacaagcccttccacccttagagaaagctcggaagcaaaaaactaatgagccaaagatttcgtcagagaccacacagcccaagggaactcccaccattccaatacggatcgtttgaaagaacctggaacctaagtgaaatagccgccacaaggaagcggagtttcttcccatgggttccctcccatggaaagttatacttcccctggtcgcgtttgtcaagaaattatcctaggccacgtaattgcccccaattcgttccccctaaggtctccttctggtttggaagcggcttccctacttagttatggcgcgcgttcccttggaaagattatacccacacatgtcgcctctatcctctgcccaaaaaaggcgtgagtcttntctcaagcaacacaatttcatatcg

SEQ ID NO: 554366 - DNA, 800 bp, Homo sapiens
  misc_feature (800)..(800): n is a, c, g, or t
ggccgggcgcggtggctcacgcctgtaatcccagctctcagggaggctaagaggcgggaggatagcttgagcccaggagttcgagacctgcctgggcaatatagcgagaccccgttctccagaaaaaggaaaaaaaaaaaaccaaaggacacaaaaaaaattaggggtaatttccccttttcccccaggccttttttcctggtggggttagcgccaaaataaattcccctcttcgggacctcaaaacttaccccaaaggcaggggtacatggtaaatattattgtcacccttattccacgggaacccattgctttgggccggtataattactttggctaaggggtacaacttttatttaccccgccaatattattgccccttacatttttttcaacaaaagggggaacaacaacacacggaacgggggttcccaggtcttaaattccatttccccgggggcagcggtgaatcaccccggaggtcgtgggcggccgagctgtggtggcccgtggtacgggcggtacgggggtaccacgcggggcagcgacagggtagccacaaagaggggcgcgggatccccccattatacttttgccccccccctctgcggctgccccatattaatttcacaacaggaccttcgtggtgtcggggggaacaagcaagcgcgaatatccggccaaacaactatgctcaaccgtttttacacctatcgttaatctcgcaagattccgagcacatctctacccacgggggcacacaaccaaaagcgggcagagcacccatagaatgtggcccn

SEQ ID NO: 554367 - DNA, 295 bp, Homo sapiens
gtgatgctcctgactgagcctcccatgtagctgggactacaggcgccaccaccacacctggtaattctttttatttttggtagggatggggtttcaccatgttagccaagatggtcttgatctcctgacctcgtgacccaccggcctcggcctcccaaagtgctaggattgcaggcgcgagctactgtgcttggccctgtctttaactttaaaagtgccagctgaggggggattttctacgttacaaatctcttccctcatatagattcatcccacttctaggttgatgactcat

SEQ ID NO: 554368 - DNA, 179 bp, Homo sapiens
  misc_feature (49)..(49): n is a, c, g, or t
  misc_feature (72)..(72): n is a, c, g, or t
  misc_feature (109)..(109): n is a, c, g, or t
  misc_feature (137)..(137): n is a, c, g, or t
  misc_feature (164)..(164): n is a, c, g, or t
gctctcgtccagaagctttcgtagattggcgtcgtcagcgttgagctcnccgtcccacggccagaagtcagnctctgcatcctcagcctccgtggactccacgcccgcngcagcagccgctcctgccgcacaggccngggcaccacgtcttccttcactgcgtntcctgctggtgctgc

SEQ ID NO: 554369 - DNA, 1372 bp, Homo sapiens
  misc_feature (493)..(493): n is a, c, g, or t
  misc_feature (501)..(501): n is a, c, g, or t
  misc_feature (503)..(503): n is a, c, g, or t
  misc_feature (546)..(546): n is a, c, g, or t
atgaaaagttaaaggaagacttagaaagggaacaacggtggttggatgaacagcaacagatcaatggaatctcttcaatgtactacacagtgaattgcacacacataaggttgaaacattttctgacatccaagcaatctttcaatgaactgaaaactaacacatgcttcaatatacaaagaatatcaaggagaaactcttgagtaccttgggcgagtttctagaagaccattttcctctgcctgatagaagtgttcaacaagaacaaaacgacaccaacattcaagaatcatctgtaaacctgataacactgcatgaacatgttcagagattcttataaatagattatttgatgttccacatgatccatatgtcaaacattagtgattccttttggccaccttatgtagagctgctgctgcgtacatggacattgccttgagacatccagaagatccaacccgaataagattagaagctttccatcagtacnaggatgtntncttttttcacacagtaacaaattcttatcattcaaggcatatnggaaccacaggactatttgcctcacgaaacgattattggcaaattcaatgcgcataggccatctatacttttattggcgaaaatggcatgtgctgccatctatcgattcatttttaacatggtcatttcttattcagtgagtgcttcacgtcgttttacaactatatggcatacgcaatgcaggtagcatccatattctaggctataacaaccatttcaatgtagccttacctcatgcacatatcgcttgggattcttggtcgatttcatgatatagctaagtatccatattttcgttaaaatatatcagcaatcatctcttatgcatttcggagtccagctggtgcttcttgcatcatcccagcacacattcattccatgcggcaaggtcattcaatttgccagcatgcggctccacacatcgcaggtaataatctggaggtggcataattttaccacacatattcacgcacatcgggtcccactaatactacttgtcctactttctacgactacggttcacaccttcggcactactgcaccaccttacatcgactacaagctaacccctacaattggatacttcaacgccggcatattcaacatactccatgtgaccgtcactatagtcgagccacatgtggaagccggctaattcatttcccaccaagcgtgggtatacgtgacctttcattcacccccttgggacaatccttggacacgaaatagatgtcgacacacttcagacaaactgggtacacatacagagcacgtgtgtcgcccacccagcacaacattgaacacgtgaagtcgccgccatcgacac

SEQ ID NO: 554370 - DNA, 1132 bp, Homo sapiens
  misc_feature (688)..(688): n is a, c, g, or t
gttttgggggtccacaagaggaccacacttgggtgaaacaggaaattctctttgtagagcaacaaagtgggatgtttcccccccgtctgggggtaaacagaggggggaaacccgcggggcacgctgttgaataggttgttccgaatataatttcttttcccgcggcgtttccccctacacgattgtgatgccttgggagtttttcgcccgcctcgtaggggagcactcttcctagataattcttcgtagcgagagaacgtgttttcaggagaccgccctctctagtgacacgtttgcccaccctgggggggccccacagaggttgttgcgagagcaataatttgtagaggcgtcgcgctctttacacatcagagggagagattgggaacatatttttttggtagattgttttttggggggcgttttatagactcgcttggttaccgcacgcctgtgtctgcacatagggtttctcgccggaggcgctccaaacagtctcacattgtgggcgcgtcctctgatgagagatatgtgtgttttgttctcaagatattttgggtgttgttttgtcgccacagagcttgtgggagatgccacatatgggcgcgccccattttttgggcgtctaacatgcgccacatctccacactttctccgggggtctaaaaagcgatttttctcaagcgcnttaagcctttcgtgaggtatagctatggagctttcacaggtgtttctccaccacacgccccgggtataattttttgtaattgtttatagtatgaagaatgtgggtttctcgccacatagttgtgcacacaggctggggtttctcggaactttcttggcctctacaggtggtggtccccgccgcctctcgcgcttcccacagcggcttaggattatcacggtgtgaggcccccgtgcccacggcgcctcagtatggttttaaaggggtctcccagccctcctcccttttgggcgccgacccgcgttatttctgcgtccctttttccccggcgctcatgcccccccccagatttcacagggggcacccccacccaggggccctgttccgtgagaaaaagtggaatacgaatttgggcccaaagccataaaccttttgtttgtacga

SEQ ID NO: 554371 - DNA, 245 bp, Homo sapiens
cgcaagattctgtgggcacctggtatctgcaccgcaggaggagagctggccgtggcccggccaggaggggcagtaaacacccagcccagccccacctgccccctatctgtgcaatagcacgagggtctctatatggcaccctcgggtctaatcagttgtgtgcgtggccacacactgcagtcccgtactcatgcacctagcctggcgcctttttggggatcctcgcagaagaggtaagagccagg

SEQ ID NO: 554372 - DNA, 1101 bp, Homo sapiens
tccttcgtgcgtaataaatcttgatgagaaggcagtaactaccaccatactctatcgtaattactggtaagaatagtggttcggaacgacatatactccacttctatgcctattaagagagtatcactgatacgattccacactctgtaaggtcaattccataaacctctttcacatctcactctgaatcaatctagtgacactggatttacgtagtcttattgttggtgtgtcaacacgagctaggaactcagctctcctcacataagtcctccagtttcactgccagcgtcactagtgcacgggatatttatagatgcctataactctcattacactcaccctgcagagcatgtcacgtcatgtgcaggtacccagcaggttcatctcttgtaccactggaagatggatgttacgcaccaatcacattaaatatgctgggctctctaaggaaagcctcgtgtgagggttcctctttcttccatgcttcaatgcccatgggcaaagtgatcatgaattcctcatttacgtgttaccaatgacatatatcttaactgaagcatataacttctcagtttccatgttcttcaaaattttaggataagaagcccgctaaggaacaaaggaaatgccctcccgtgcttaattgatggcaagcaggggctggaggagccatctgagggactctttcatttctgcagttgtctggaaagccctgggtgggcgtcatgaggcttcacaggatccatggcttttcctggtcctggcgttccagagggtcatagggctggtctggtgaaaaggttcaccgtggtcccaatgctgaacttcattgcataaccttatggatgtgcttctgggccatacagaaatgactctggtacggtccgacccctcaggaaatttgtattttacacggcaaaatgctcccgtgtttgtaacgaacactgggttcatggtctccagatcattacgggttacctcaatcagcaccaccaaactgtagctgaatatttgacaccacaagccgcgtgttattacactacttctgaaaaaaaggggggatacacgacaccaactattcatggttatacggcccac

SEQ ID NO: 554373 - DNA, 309 bp, Homo sapiens
  misc_feature (92)..(92): n is a, c, g, or t
  misc_feature (299)..(299): n is a, c, g, or t
ggccctgaacatgggctttgagtaattttccttaaccatcacactgatcccataagctgctgcttacataccaggggaaatcaataaaaatncttgatattcccaaagggccctaaagtataaggttttttggtccatccaacagccacagggcaggatatgcatcccattaccattcctacttttaaaaaactaagggccaaataaggctcttcaaaaaaattttagctttggaaacccgaggcaagaggatcactcgagagcaggagttcaagaccagtttgggcaacacagcaagnctctttctca

SEQ ID NO: 554374 - DNA, 178 bp, Homo sapiens
atgcgttatgtaggctagttctttcaataggtctaacaagtatacttatttaagccccatgtagataacagaccttaataaaaaatggtgccactcttatttgaaatgaaagaaaagagataccagtctggccaatatggggaaaccctgtctctactaaaaatacagaaattagctg

SEQ ID NO: 554375 - DNA, 223 bp, Homo sapiens
aaaccaaatgaaagagacctctgcatggacatgtccatgcttatcaacattacagatctgtgttagacattgggagtcatcagctcgatttgtatgacttatatgcttcctgggctgactaattatcaaagtactactgcaccagtgcaattcacacctacctgaccaatgactgtaagaagtcgaaggacccagagaatcatttgattgtactttcacagtg

SEQ ID NO: 554376 - DNA, 417 bp, Homo sapiens
  misc_feature (13)..(13): n is a, c, g, or t
  misc_feature (19)..(19): n is a, c, g, or t
  misc_feature (26)..(26): n is a, c, g, or t
  misc_feature (33)..(33): n is a, c, g, or t
  misc_feature (39)..(39): n is a, c, g, or t
  misc_feature (43)..(43): n is a, c, g, or t
  misc_feature (54)..(54): n is a, c, g, or t
  misc_feature (57)..(57): n is a, c, g, or t
  misc_feature (73)..(75): n is a, c, g, or t
  misc_feature (95)..(95): n is a, c, g, or t
  misc_feature (101)..(101): n is a, c, g, or t
  misc_feature (105)..(105): n is a, c, g, or t
  misc_feature (110)..(110): n is a, c, g, or t
  misc_feature (133)..(133): n is a, c, g, or t
  misc_feature (139)..(140): n is a, c, g, or t
  misc_feature (166)..(166): n is a, c, g, or t
  misc_feature (181)..(181): n is a, c, g, or t
  misc_feature (193)..(193): n is a, c, g, or t
  misc_feature (195)..(195): n is a, c, g, or t
  misc_feature (216)..(216): n is a, c, g, or t
  misc_feature (221)..(221): n is a, c, g, or t
  misc_feature (230)..(231): n is a, c, g, or t
  misc_feature (256)..(256): n is a, c, g, or t
  misc_feature (268)..(268): n is a, c, g, or t
  misc_feature (334)..(334): n is a, c, g, or t
  misc_feature (344)..(344): n is a, c, g, or t
  misc_feature (389)..(389): n is a, c, g, or t
aaagttgctattncccgtnaaaggcnctagagntagtgntttnccctcaataanttnaatttttaaaaaatgnnncttccctctccccttttttntttttnaaanaatanatttggtcataaagtgaaacccntattannaagtacgtggcaatgttcattccaancagatgcagctttcncccccgtctggncncctgtttgcaattgcttcccncatcncagtagggnnaaaattgagtgggagtactgagatntgtgggtttttnccattggacaaagaatgaggttagaagactgcagcttggagtctctctaggttttcaactatttcntcacaatttnaaccacttgacggttgtcccttttaatttatttgaagtgctaatnttttaaataaaggttcatctgtccatgc

SEQ ID NO: 554377 - DNA, 1137 bp, Homo sapiens
ggaacgtgttccctgttcctgctgactgcccggtgccgcaccggacccagtgctggaggcctggccctggtggcacactgggccactgccggtacctgctgtgtgcttggacaactgggtctgttccaatgtcctgcgctgtgctgggctgtgtccctggtgcatggacccaggtccctgagcctgctgcctgcatgttcctgctgctggtgtgctgccctgctggtctgtggctggggcactggtggctgctgtctgggccctgcaggtggggaacgctctgggcagcctggagccactgcgctggatgctgcgctcgcccttcgacctgcaacgtgcctggtcaacctggagcttcaggagttgctgctggactacagcttccagcacctgggtgtctcctcacagggctgtgttgatcatcccatagtttttgacagaagctgtgtgcaacccactgtattcacggcaaatgatgtctgagcttctttttgagtgctacgggattcccaaggttgcctatggaatagacagcctcttcagcttctagcacaataagccaaagaactcgatgtgcagtgggctaatcatttcatctggataccagtgtacgcatgtttacccatcttagaagggagattagatgctaaaaactgaaagcgcatcaatctttggaggaagccaacgcagctggttacctccagggtctcctccagcctgaagtactctgggcacctggaggccattaacctaagcgcatgtagagattctgcttgaaccaagctacatcgataaggatatgtgggaagattccacaatgggggtccagatatacgaggagtatgtccggttggtacccatttcacagcacgagacctgagaagaatctgagccttgatagacaacaaaagggggcggaacaacgagggggagagaagcaaaagccgagaggaagagaaatcatcataaaccttcctcaggagggaaaggagtctgggagacacgagtgggacgaagagcaagcctgcagagtagccaacaagcacgcagcagaggagtgagaagaccaccagcagagtagcaacacgtgtgagaactatggtcgtagtctagtacatccgacacacagagcgaagg

SEQ ID NO: 554378 - DNA, 192 bp, Homo sapiens
ccatgatacgaatgcgagcgcggtgaccgattagccagtactaccaatcaatactcatcattaatgacatcataatggctgatagcaataaaaactgaggaatagccccctttcagcttctgagtcccagaggttaacccaaggcacccctgctgacatccggcctgcttctgctcacatgacgagtacgcg

SEQ ID NO: 554379 - DNA, 1432 bp, Homo sapiens
  misc_feature (438)..(438): n is a, c, g, or t
  misc_feature (624)..(624): n is a, c, g, or t
  misc_feature (882)..(882): n is a, c, g, or t
ctggattggctgagtacgacgctggtcaggccaggagtccatgattctccacaggtcggtgtcagacggacttaccgaggatggcaatgtcgcatggtaccagaggcttcaccaaagacagctctgtgccaattgtctatcaccgtggtagaatactggagataataagtagccagactgactggtgggagaggattgcataggagcagcgtgctttggcctcgccgacatcgctacgcatgagaagtacattcaaacatgcaaacgcgcctcctcgtgaacgccattgacgtcgcacacgaagcatgggcgtgaattctcgagggaaccacacgccatgggggcttgagctaatctggcactcaaaagggatggcgatacgacttcagggaccaatggtggagcagtttaaggcgcgaacgtacccagtacgttgtntctgtctaagggtttccttgcgtgaataagctcaatcgaacactcgcgtactctgttacatacgcttactgggcacgaattttgaactcctctcagctcaggtggttaactcattcactaacgggcatcgcacttgcaagaatggaggccttgcactcggcttgttcaatcagaatgccacacttngtcacatcgagaagggcacactagaaacccatatggtgagatagatcgtgacttcgggcgacagattccgccgtgttcagacacccggagggagatacgatacctttgcgccatgaattggttgtgaggggcaccaagacaaaggtctcaatcaagagagccaccggctgacagagataacattcgagaaggaggttagattgcgcggttgcggccattgacagtcgtgccgacaggaggcgggaaggcatatacccncctagatacggatgtgcataccggaagagaaggcgtgggaggggcacaatgatagacaaaggtccaaggtcggcgaattgggttcgtacacgttggggtctgagaatagttcgaaaggccaaaagggactattgggaggatcccctggcccgcaggtcgcgaagggggcgttccggaataacacgttggcccagatgagctaagaggccaaggggtggcccccggaagggggccttaatacccagacgggtttggggtgcgagccgaggtgcccaaatggcgtggggggtgcctttcggaatccccctgtggcaacggggagaggggcaaggccttcttggggtagccgactaaaggccggtaagggcaaggtagagggtcctaagagagagcgttggtggtcaaggtggggcagaggagcggggagaggccccgtggtggggcgaccaacgtactctctgggatcgcacctcggggggtgaggcccccattttttgttaaccgaattcgttggaagaacgccttaggggggcggacggatcacaagacc

SEQ ID NO: 554380 - DNA, 298 bp, Homo sapiens
tgtttggcttgctcttcgcgctgtggtgtcgggcgtgcgcggggtcctggtgttgcggtgtttggtgcctctgggcccgtggttggtcgcgcgcgaggcgctggtggcgggctccggcgcaccaaccccattgttggcccgggcctccgtcggcccttgctggccccgcggtggccccggccgcacttcctggttgggctctcccgggggctcacggcgtcccgtgtgtcacacctgctcccggctgatcctattgccctttttgcacgttctcgactatcttgcttgatctgggcct

SEQ ID NO: 554381 - DNA, 185 bp, Homo sapiens
taagaggcagtatagctgtttcttgagttgtaaaaggagggcagtatagctgtttcctgattgtaaaacggagggcgagtatagctgtttcctgattgtaaaaggagggcgagtaatagcggttgccttgattgtaaacaggagggcgagttaaagatgttgcctgattgtaaaaggcgggcgag

SEQ ID NO: 554382 - DNA, 113 bp, Homo sapiens
  misc_feature (106)..(106): n is a, c, g, or t
cacttcatcgtggatctgcttgctggcaatggcatacgaatcttccacaaattccctgccctctatcagtggcaaagcattgccccttgtggtagtggattccatnttgggtg

SEQ ID NO: 554383 - DNA, 174 bp, Homo sapiens
ggtcgtcctgttttgtatagttatccagcgcactaattcctatctcccacatacagacccggatgcatataatttcaaactctcggaggctgcctaatgagtaatcctcaatcactacttaaacttggccagttcgctgcccacctggcgcgactttcccagttctgtgaaacc

SEQ ID NO: 554384 - DNA, 114 bp, Homo sapiens
taagaaagcctagggaaactttagtgctaaatacaaaattcacacagagaaaaggcacggactctgggtgagactgggaaggtcctcagaccatatcagcaccatgcggacgag

SEQ ID NO: 554385 - DNA, 197 bp, Homo sapiens
attggactaaatagtgattcgtgataaagtagttatcaacaatttaagacccactattggtcgtaataaagttaggatcttaatcttctttatctaacgtgaacggcgtgtggttcgtcacagtgaggtatttcgcataacatggttgctgtaactgttccaaataaggaatcgactcttggaacaacagtttatct

SEQ ID NO: 554386 - DNA, 188 bp, Homo sapiens
ccatctgtgtatatagcagcaggatagtacagtgcctaacactgcagtcagattcccctcgacaagactggatctgagcaccaccacttacttaaacttatttgtttgcagaaggagtctcatagctgtcacccgaggctgggtgacataagtacctagcaagaggagatgacactacttgactggaa

SEQ ID NO: 554387 - DNA, 256 bp, Homo sapiens
ctagaacagaggaattaggcaggtattcccgatctgccatgtaattccagaaaggacatatacaagaggaagtactcagccgctaaaaccaaggatgaaaagaaaaagaaggagaaggttctcgcaaatgtaacaaaaccagttggtggtgacacgaacggcggtccccgggtggtaaaaatacgcaaaatgcctagctataatcctactgcaagatatgcctcgaacgctgttgtaactggagctgtgtaactgg

SEQ ID NO: 554388 - DNA, 1244 bp, Homo sapiens
tcgcacaggtgtcgatgaaaactacccctaaaagccaaaagtgggaaaggaaacagactcatatcaacatagtcgtcattggacacgtcagattcgggcaagtccaccactactggccatctgatctcatacaatgcggtggcatcgacaaaagaaccattgaaacatttgagaaggcaggctgctgcagcatgggcaacagggctccttcacagtatgcctgggctcttggatcaaactgcaaagctgcagcgtgaacgtggtatcaccattgcatatctccttgtggcaacatttgcagaccagacaagtactactgtgaactatcattgactgccccaggacaaccgagacactttatcaaacaacatgatatacagggaacatctcaaggctgaactggatgctgtcctgaattgttgcatgctggtgattaggtagaattagaagctggtatctccaaagaatgggcagacccgagagcatgcccttctggatttacaaactgggtgtgcaaacaactaaattggtcggtagttaaacaaaaatggattgccacatgaagccaacccgtacagaccagaaagcagaatatgaggacacatcgtcacacgcaagctcagccactctacactccaacgcaaaattggggcatacaaaccccggacaaccagaagcagtaggagcccaaaaccagggtatgaactcggagcacacacatggcatgcgacgcccaaggctgcgcaaacaaatgccatagcggcacacagggaactgacaacggtcaaccccgaaaaggaaatggacaacgccacggggacccacacgcctgacaagacacgaaccatggacaggacccacacgaaaacagcgccacacgaacacgcccatgggcgcacaccccacacgacagacaccacacatggacgcaacaggaccacgaaccgtatgcacccacaaaggaaaacgcagaaccaaaagaaggaaaagaagggacaaaacaaccaaaacacagagacaccacgccgataacaacggagcaacaaccaagaaaacacaaaacaccaaccccgaagacaggacagaacagcgaaaaacccaaacaaacagagcgcacgacaacagacacaagaaccgaagaagacaacacacaaaacgacgcacacaaaaaacaacgtacgaacaacaagaagaacaagcaaacacacaacggccacaaacgctaccaacaaaacacagaagaa

SEQ ID NO: 554389 - DNA, 228 bp, Homo sapiens
  misc_feature (226)..(226): n is a, c, g, or t
cacattgactataacctatcaggaaaacaggtagatcaagctgatcttttacagttttatgggattagaaagaccctgaacaaaaatacttaaatctgtttggatactaggaaaaatgacacaaataaccctgggtccaattcgggttagtagaaggattactttacatacagattttaaagaagttgacatgtattctcaagtggtagagacagcatatcagggnta

SEQ ID NO: 554390 - DNA, 101 bp, Homo sapiens
tcgttttcagtaagtcattttggaaaacggtaattgtcagaaggagtaatcaataagttacaagatcttactgcaagaacggggtgaatggaacaggggaa

SEQ ID NO: 554391 - DNA, 518 bp, Homo sapiens
  misc_feature (13)..(13): n is a, c, g, or t
  misc_feature (109)..(111): n is a, c, g, or t
gaaaaaaaaaagnaaatcggtcgtgggtgccgttgggggccaatattaggggttttcccctgggtgttgttaaaaaaggggggaagggaatttcctggcttgctttttnnnccgggcccccccccctggggccccaaaaaggtaagagaaacccccaaccttttcattttttttaaaaaaaatatggccccccggtttgtggtaaaaagccccttaaataaaaaggggaaaaaccctggggccaagccccccaaattttggggtttggtttcccccggggtcccccgccccaacggggggggttttttttttaaaaaccgggggccccaaaaaaaaaaaaaaggggggcccgattttttttaccttttggcccaaaaaataaggggggttaaggggagggccccgggccaaattgggaaaaaacccggcctttccctttgggggggttttctttttaggttggaacccggcccaaaaaaaatttttttgggggccaaaaaaaaagggccggcctttga

SEQ ID NO: 554392 - DNA, 711 bp, Homo sapiens
aaccaacacactaaccatataccaagtgatggcgcgatgtagcacgagaaagcacataccaaggccaccacacaccacctgtcctaaaaaaggccttcgatatgggataatcctagtttattacctctagaagtttttttcttcgcaggatttttctgagccttttaccactccagccgtagcccctatcccccaactaggagggacactggcacccacaaggaggacatcatgctccgctaaatccctctagaagtcccactacctagagtactagtccgtgattactcgcatcaggagtatcaatcacctgagtctcaccatgagctcgtaatagaaaacagaccgaaaaccaaagtaattcatagcacgtgcttagtgtactaagttttacttgggctctcgtagtattacccttccgtacaagtcctcagagttacttctgagtctcctcttcaccattttccgacggcatctacggctcaacagtcttaagtaggccacaggcttccagctggacttcacgtcatgattggctcaactttcctcgactatctgcgttcattccgccaactaatattgcactttagatccaaacatcacttcggcttcgaacccgccgcctgatgactggcatttcgtgagatagtggtctcgactcatttctgtatgtctccatctatcgatgagggtctttagaagaactaaaga

SEQ ID NO: 554393 - DNA, 1268 bp, Homo sapiens
atgcttcgcggtccgctggacgtccagtctttggctctttctcctagctgctagtctcccgggtgcgcgcctgagccccgtggcagcctccaggccgtgaggagaggaaccggaacgatgccggagctcggcctgtggcctaggccagggctatccaagcgcctagtcacggagtcatgctcagaggcgagcgaggatgcccgtctaccaaggtcgggccacgtggcacagcgtctatcagccatgccgagagactgtggccctgacgtacgtgatgacgacggactgacggagtgctcagccacgggtgccccttgaggcctaggtcagccagttccgtcctgattggtgccaggcggcataccatgagaccctccatgaccaccgctggctacttgcacagcatctcacaaagaccatgcatgcccatagcaaggcgcgacttagcacagaaatctgccaatcacaccatgtcaagcagcggctttcaggaacgattggcgacctctgaaactgagtcgtcgcgcctgccagatgggcccagggccagttcacggatccaccccaggctgcgctacctcacaggaaccatgacgtacgcggagcctaccctccacggaacggaaacggaccgccccacgcgccaagcaaaaaaacgcggaccccccttggcatccatggactccgcaacccgcaacgtgcgactgcggctcacaggcccaccaacgcaggcaaaggaaaagccaacccgcatggcgacgagagcaaaggccactgggtgcgcaggaaaacaccctggtgaataccgggagaaccacgggcctacgcatccgagacacgaaccaaggggctccagcgacaagcaaacacatcggcccccaggatacccacgcaaaaccaacaacccccacaacaatgcggcaaccccggcaccaaagggagcccagcctaggacacacaaaacccacaaacacggcgaggaaacccccacgacaatgtgcctggccggccaccaaaccccggacgacatacttaccaccgacacccgcggacaacaacgatgacccccaacggggatgctttgaaaaactctagcagagccacacctaccaaacgcccggcccccaacgaggggccacaaggggcacagtgttcccagcggagcaataaaacagaacccaaccacccacgcggacaacagaccaaacagcgcacatccaatgacacgacacacacatccgcacgacaagacaaacaaacgaacggcg

SEQ ID NO: 554394 - DNA, 1736 bp, Homo sapiens
ccgtcggggccgtgggcgcctgcgcgggccggcgcgggagcaagcggcatggcgttccggcaggcgctgcagctggcggcctgcgggctggccgggggctcggccgccgtgctcttctcggccgtggcggtagggaagccgcgcgcaggcggggacgcggagccacgcccggctgagccgccggcctgggcggggggcgcgcggccgggccccggtgtctgggaccccaactgggacaggcgagaaccactgtctctgatcaacgtgcggaagaggaacgtggaatctggggaagaagagctggcgtccaagctggaccactacaaagccaaggccacgcggcacatcttcctcatcaggcattcccagtaccacgtggatggctccctggagaaggaccgcactctgaccccgctgggtcgggagcaggctgaactcactgggctccgcctggcaagcttggggttgaagtttaataaaatcgtccattcgtctatgacgcgcgccatagagaccaccgatatcatcagccggcacctgccaggcgtctgcaaagtcagcacagatctgctgcgggaaggcgcccccatcgagccagacccgcccgtgtctcattggaagccggaagctgtgcagtattacgaagacggagcccggatcgaggccgccttccggaactacatccaccgcgcagatgccaggcaggaggaggacagttacgagatcttcatctgtcacgccaacgtcatccgctacatcgtgtgcagagcactgcagtttcctcctgaaggctggctccggctctccctcaataatggcagcatcacccacctggtgatccgacccaacggccgagttgcgctcaggaccctcggggacacggggttcatgcctcccgacaagatcactcgatcctgagggctccggcctctccttccctctgtcctccctgcacaggccgcacacacttaacgttttgttcccaaggagaccggcggaaagtagaaacctgcaatgctgcatctgggaactgacttgtgaccaggctgagaaggggagagttgggatcagacagcctgacttctctgcagggttttatacctgaccatgaacccccaggatggcgtggggtttaaggtgaaagcgtctcacgcacaagtcaggcctgttgtggggacttgaaagaggcctgacccagaccaccatgttcgcacccacagctgacccgtgctgagggtccaggctccattggcaaagccggtcaggcacgagggcgactgaggcacgtggatgaggagggcacccaggttctgttcacaactcacttcacttcatacatccttttaatttcttaaaaccctcttgtcccttaaatatttgtcaattaaagattttctggctgggcacggtggctcacacctgtattcccagctactcaggaggccagggtgggaggatcacttgaactcccgtcgaactcctgacctcgtgatctacccacctcggcctccccaagtgctgggattacaggcgtgagctagcatgcctggccagggattaaaatattcaaacatgttgtgtgtacccagatatgctgttaatttaggaaaaacagtacaatttctatgaagtggttgtgactattttctgtagtcaatacagttgggatatctgatctatttctctgtctactttggaaatgattgcataataaataaaattttactgttttttta

SEQ ID NO: 554395 - DNA, 168 bp, Homo sapiens
tgagagctgattcatgaaattcctgctgtgactcagagtgcaaaagaaaacaaggccctctgataacagaatcctccatttatagactaccatgtatcaaaaacctagcttcacagctcttcaaacctcattaccatacagcctgagccctcatggtaagttcgtcag

SEQ ID NO: 554396 - DNA, 1951 bp, Homo sapiens
  misc_feature (1349)..(1349): n is a, c, g, or t
ccgtcggggccgtgggcgcctgcgcgggccggcgcgggagcaagcggcatggcgttccggcaggcgctgcagctggcggcctgcgggctggccgggggctcggccgccgtgctcttctcggccgtggcggtagggaagccgcgcgcaggcggggacgcggagccacgcccggctgagccgccggcctgggcggggggcgcgcggccgggccccggtgtctgggaccccaactgggacaggcgagaaccactgtctctgatcaacgtgcggaagaggaacgtggaatctggggaagaagagctggcgtccaagctggaccactacaaagccaaggccacgcggcacatcttcctcatcaggcattcccagtaccacgtggatggctccctggagaaggaccgcactctgaccccgctgggtcgggagcaggctgaactcactgggctccgcctggcaagcttggggttgaagtttaataaaatcgtccattcgtctatgacgcgcgccatagagaccaccgatatcatcagccggcacctgccaggcgtctgcaaagtcagcacagatctgctgcgggaaggcgcccccatcgagccagacccgcccgtgtctcattggaagccggaagctgtgcagtattacgaagacggagcccggatcgaggccgccttccggaactacatccaccgcgcagatgccaggcaggaggaggacagttacgagatcttcatctgtcacgccaacgtcatccgctacatcgtgtgcagagcactgcagtttcctcctgaaggctggctccggctctccctcaataatggcagcatcacccacctggtgatccgacccaacggccgagttgcgctcaggaccctcggggacacggggttcatgcctcccgacaagatcactcgatcctgagggctccggcctctccttccctctgtcctccctgcacaggccgcacacacttaacgttttgttcccaaggagaccggcggaaagtagaaacctgcaatgctgcatctgggaactgacttgtgaccaggctgagaaggggagagttgggatcagacagcctgacttctctgcagggttttatacctgaccatgaacccccaggatggcgtggggtttaaggtgaaagcgtctcacgcacaagtcaggcctgttgtggggacttgaaagaggcctgacccagaccaccatgttcgcacccacagctgacccgtgctgagggtccaggctccattggcaaagccggtcaggcacgagggcgactgaggcacgtggatgaggagggcacccaggttctgttcacaactcacttcacttcatacatccttcttaanttgcttgaaaaccctgcgttgtgccgcgttaaatgaatatttgtcaattaaagattttctggctgggcacggtggctcacacctgtattcccagctactcaggaggccagggtgggaggatcacttgaactcccgtcagcctcccaagtagctgggattataggcgcccaccaccatgcctggctaattttttatttttagtagagatggggtttcaccgtgttggccaggctggtctcgaactcctgacctcgtgatctacccacctcggcctccccaagtgctgggattacaggcgtgagctagcatgcctggccagggattaaaatattcaaacatgttgtgtgtacccagatatgctgttaatttaggaaaaacagtacaatttctatgaagtggttgtgactattttctgtagtcaatacagttgggatatctgatctatttctctgtctactttggaaatgattgcataataaataaaattttactgtttttttaaaaaaaaataagaatagattagaaaaaaaaacggcggcagcagcgtattccattaggtagggttagtttaggctgacactgcgttcgtttagcacgtcgta

SEQ ID NO: 554397 - DNA, 266 bp, Homo sapiens
gtcagtgcaccggctcacatgcctgctgggtcccaacccccagcacagacgtggtcacagccggcgatgatagctactgtttctcagccaggcacggtggctcatgcctgttatcctaacactttgggaggccaaggtgggtcgatcatgaggtcaggagttcgagaccagcctgacccacatggagaaaccctgtctctactaaaaatacaaaattagccgggcgtggtggcgcatgcctgtaatcccagctactcaggagcggg

SEQ ID NO: 554398 - DNA, 1394 bp, Homo sapiens
ccgtcggggccgtgggcgcctgcgcgggccggcgcgggagcaagcggcatggcgttccggcaggcgctgcagctggcggcctgcgggctggccgggggctcggccgccgtgctcttctcggccgtggcggtagggaagccgcgcgcaggcggggacgcggagccacgcccggctgagccgccggcctgggcggggggcgcgcggccgggccccggtgtctgggaccccaactgggacaggcgagaaccactgtctctgatcaacgtgcggaagaggaacgtggaatctggggaagaagagctggcgtccaagctggaccactacaaagccaaggccacgcggcacatcttcctcatcaggcattcccagtaccacgtggatggctccctggagaaggaccgcactctgaccccgctgggtcgggagcaggctgaactcactgggctccgcctggcaagcttggggttgaagtttaataaaatcgtccattcgtctatgacgcgcgccatagagaccaccgatatcatcagccggcacctgccaggcgtctgcaaagtcagcacagatctgctgcgggaaggcgcccccatcgagccagacccgcccgtgtctcattggaagccggaagctgtgcagtattacgaagacggagcccggatcgaggccgccttccggaactacatccaccgcgcagatgccaggcaggaggaggacagttacgagatcttcatctgtcacgccaacgtcatccgctacatcgtgtgcagcatcccgccgctgttgtccgctggggattttgtggttctggggtcctgacctctttcacttgctgatctgtgggcgctcccacccgtgtgccagcgtgacggctcggggtgtccgctcccctctgggtcgaggccacagctgagtcacgttgctgctcgggctgctccctcggggggcccttgtccctcaacctgctctggtgccccactctcagcaccacagaatgatccgggttcaggttgcgttttccctgccaccaccctgcaatcagccacttctttaaggagctccagggctgcagccacgttagagggccccttggggggcagggccagctctacggttacatgcctgaaacagtcagaagggttggccaaatctcactaaatgcaaatttgaaacaaatttgcctcttctctggatccattaggaaatgtgtgtgtgggctccgcagctgagggggccctcttgagtgtgacgagtcctgtggtgggaggacaggacggcactggtcagtgatgccgtgtgaggctgggccctggtctctgcccgtctgtcacctgggcctgtcaccagggctggggctgctgggagcaccatggtcaagagcagcagctcccagaaag

SEQ ID NO: 554399 - DNA, 407 bp, Homo sapiens
  misc_feature (81)..(81): n is a, c, g, or t
  misc_feature (155)..(155): n is a, c, g, or t
  misc_feature (160)..(160): n is a, c, g, or t
gataatatacaagttgctgttgtgaagcatgcctgcaaataaatgtgcaaagtataccgtatcattttccatataaataancctatttttcctttggggtagataccccaatgatgagatttcctgaatcaaatgatagttctggcccaggcgtnggtcncacgcctgtaatccccaacactttgggaggtagaggcgggcaggtcatgaggtcagaagtttgagaccagcctgagcgatatggtgaaaccccgtctctactgaaaatacaaaagttagccaggcgtggtggcacttgcctgcagccccagctcctcaggaggctgacacagaagaattgcttggacctgggagtcagtggttgcagtgagctgagatcgtaccactgcactccagcctggacaact

SEQ ID NO: 554400 - DNA, 398 bp, Homo sapiens
  misc_feature (32)..(32): n is a, c, g, or t
  misc_feature (329)..(329): n is a, c, g, or t
cagtccagatccggggtcaagtaataggtatntattaatcgataatcagttaaaacaaggctggggccacgcagctcggggtgaggatttggcttggaactcttaggaaaatactagttctggtaaattcatggggtggttttcaaaacatgcaataaagcacttttcctttattttctctgaaagaggagcagcgattccagggtaaggctattccaaacagatgtggaagagcaagcacctttaggcgggcggtacatcaggcaccttggccaggtcggcttatgtctaaggctaagaatgaaactctggccagctctgggtacggntactcaccagcacccagccagttacttcaggcttttcggggccacccaggaggtgggccgggggtaccg

SEQ ID NO: 554401 - DNA, 344 bp, Homo sapiens
  misc_feature (315)..(315): n is a, c, g, or t
gagaacaacctgaaaacgctcaccaggtggagtcaccacttgcattcagctgtttcagaaacattgttgaccacctcctcaatgtgaagatcaggaagatgaaagcctttatgatgatctacttccacttaataaatgtacttatccatgtgcctgcaatatattagttgatcagtaaatgttcgcagtaaatcaaggaggaatgcaaaggcccaaagcaacaaaaaaatgaatggcacgctatctggagggtacaaggaagatttcagccaaaagcataaccctgccccaaatatcaccacgtctagacttccnccattaaagatttaattattcacattaaa

SEQ ID NO: 554402 - DNA, 342 bp, Homo sapiens
gataccctttctctgatcgctcaacagagcgaggctccatctcaaaaaaaaaaaaatgtaatgaaaggaaattttcccctttacttttggggcccgtggggaaaagaaagaaaatttgctctgttgttctgcccctaaaatttattttcgtgtttttgtgggaccagacaaaggtgaaattgaagcattggattcctgtaagtaagaagttttgggatacttaagtagcctgccctgcatccaaaaaatttagattctaaattttctgggtccgtttttctgcctgaggaatactgctgggccaaggggctcctaaaggcgatagattgggtggcttctttg

SEQ ID NO: 554403 - DNA, 1082 bp, Homo sapiens
  misc_feature (252)..(252): n is a, c, g, or t
  misc_feature (261)..(261): n is a, c, g, or t
ggttctggttctggttgtcgtcggtttgttcgccccgtcccgcttcgtctctcctctcttggttgcgtggtccttccatcctggcttttgtttaggtatgctctgttgttctgttacgttgtattgggtatggtgtaggctccggatctctctccgttccgctgacttcggctagtcggatggcttcgattgttttgtcgctcgcacttcggtctagcttcgatagtcgcatgcatcgctccgcgcgtcggnggggagggntgtattaataaaagtaaagagacacgacaggagcttctgtctccttttttatgtgtggtgacccgccctctctcgctggttttctcctcgcgtggaagacacgccctcatcccacacgcctggtttgtgtgacccccccccctctagtagaagaagacccacccgcggggccgcctgatttcccgagcctctctcgcgggagattttttttaccctcttcgcgtgcccccccgcggggagcgcggatgtatacaccatgtcgtattatcacacgcagcaggaacacacagcttgtattgagacacgatcttatagggcccctctatttagaggtggacacacactattatagagagacacaacatatgtgtgttacaacacaaataagagacagcgagcgctcgggtgtgatccgcgctctccgcgggaatattctccccgcggatagacgcgggtggtggagagggcccgccgagatgtaccaccccgtcggagagatataaccaggccgcccatagacttgtggaggagtaagatcccacagggttccctgtgcgcccctgctggggaaaatagtagaaggagctcagaaatccctacaaggggcgccaccaccacaggaggaagaaaagaaaaagaaagaaccacagatccggggtaaaacacgcggggatggccaggaccaaacaccgcggcctttgttgcaacagtggggcccccctttgcacaaaaaaagagggcccccaacccaattttaagattttttgtgataatttgtgggtttttttaaaaaaaaacccccttggtgtttcggctcccca

SEQ ID NO: 554404 - DNA, 189 bp, Homo sapiens
cacactgtacacttccactgaacagtgcatccacactgctgaaggtagcagcatgccacacctcaactcctggtgaaagaagcactccattaacaaatatacttgtcgagcaccacgctgattggccacattctgaggctagcaccctttcaacaactcctgttgacaccagcagacctgtcaccacta

SEQ ID NO: 554405 - DNA, 168 bp, Homo sapiens
agtgatctaccgatgcttatgctactccacaaacaggggccagaagataaggtacagattttataggggagaaaactaagtttcagacatattgcgtcaggtactggaaacgacgatccatgtgttactatgaggagggaactatgcctatcctcccctcttacacac

SEQ ID NO: 554406 - DNA, 280 bp, Homo sapiens
cattctttggtcaggaaataaatacaacatatctcattcaagaaatctctggaaagacttgtagcacacatagtttcccatccgtactcagcctctctgccccgatccccgtcttttctactcaaggccaggaaggcctccaaggtgatgggcggcaggtaacgagtcattgcctctcacgccacctggaaggctggactacttcctcctcccaactgcggggtcccagaaatcctcgggtcccagtggctgacttacaatattcaattcactctgacca

SEQ ID NO: 554407 - DNA, 1337 bp, Homo sapiens
tttgtcctcctcgctggctggcgcatagttagtgtgcggcgtccgcagcacgcacgcctgttgttgctctccctccctgcggtgggcaccgctcgtttgtggccccccgcgctgtgctagtgttgtctccgcgcccacccgtcgctcagtttgttgggtgttatctcccccacgggcgctcggtgggataattcgcgcacccatttggtgatcggtgtgttttgttctgctcgccgacatatagaaccgcccgtttgtggatcacactagtgggtgcttgtttctctgcgctcatttgtagttctcatttgggccgttcccttaggggtgtttttccttgggtgggccgcccggccaggagtattttgaccgcgtagggttatgtgccccgttttgcgctccccggtcctattatttttctccgcctccgcggctccccaattattgccgttcgccttttttcccccccccccgggcggttcacacaggtaattttatgccgttgacttctgcccacccgcttctcctcgggtgagcgcacatatttgggaaatggagtctcgccgtccgcggtggctcttggagcccccttagggaattccatccgtgtccttgttgccacccgctaaggtgggccccggacctgcgccccttgtgatttcggcgccaactgcggatccccttaggaccattccggttgcgtaacccggacccccgtatctcacctgttgtaggcttcccaattgccccacttatggtcgcccatccaattaggaacttgttatattcgccccttcatataagaggctttccattccactcgatattcccctctaatctcccagagcttaccacacctttagaccccaactcttacccccccaaatcgccattttccactcatccataattccatccggcggtaaatactaacatttctttccccagccaacacactcttttcccggccttatacccggaatatgcccccgacagttacatccggacttacccccgatgccataccacccaccatggaaccatcctatccatctgtaggcgtccattccatttcttcttcaccacgccacgtaatatatgtaataaattttccatgatttgagaagccttctcgcttcttcgaaagcgaaaagtctctaatagtagaagaacccctcccattaacctggagtgactatatggatgcccccccaccctacccaccaccattctgaagaaccccgtataccattaaatttagcacccaaaaaggaaggaatcgaacccccccaagactggtttcacaacccaccccctggcctccctgactttttcca

SEQ ID NO: 554408 - DNA, 252 bp, Homo sapiens
ctggctcatctcgccaaatactggggggtctcttcagcctctgtctccttgactgcccatgtgctccctttgctcccctgacgccttctagatgggccgcctggtggtggacttgtcctgtgggatggagaccctccatacatggtgttcaaatggtcctgtggtattcctggatcttcaggacatctgactaccctcaggtttcccaggctttttggtggggaggcatcagatccctggccaaacatgcta

SEQ ID NO: 554409 - DNA, 336 bp, Homo sapiens
gcgttgctgctctgctctcgggagatgctgcgctgtagtccctcgtaaagttgctgctggcttgtgccgtttggccgcctgccccctgggtcgtattctctggagtgcgatctgtctctcttgccggtcttagccatggccgtggtattgaagagatcctgagtgacctccccctgcgggccaaccctggacttcccccagagctcatctgggtggcaggtgctggccacgtggagtctgccctccacgtgccgtgggtgaagcttcacctggcgcagggaaggccatcagacttccagctcgtcacccatgtcctcaaccccttaacccgagcgc

SEQ ID NO: 554410 - DNA, 162 bp, Homo sapiens
ccggaccagtgtgctatagctggctctctcttataggtgagaggtagtatttgattttctgtttaaaagttaattcacttagcacagggcctccaactatgtccacgctgctgcaaaatttcattctttatatggctgtgtagtattctacggtgtatatgt

SEQ ID NO: 554411 - DNA, 1333 bp, Homo sapiens
gctttttcttgttgtttttgtgtttgcttgttcagtgttctttttgttgtttttttctctttttattcgttcttttgtttttgtttttcttttttctttgtcttcacttattgctactttctgttgttttgatctgtggttgattcttttgtgatttctttttctgcgattactctttgtttctcctattctgttttttcgttttccttttttgatgtgttgctttgctttttagtttgtgttcctatgtggtgttttttgtttgtgtgactgtgtttttgtttgttgttggtgtgttgttttgtgttgtgttttgtttagttgttggttgtgttgttgtgtgttgttgttgtgtttatttttgttgtgttgttgttgtgtgtggtgagtgtgtctgtttgttgttgttttttgtgtgttgtgtatgtctcccccgccgcagggggtggggggggggaggggtttttaatataattattattgccccgaagggctctctcgttttttatattttgtgcacaccccgctctcatcgaagttctcgccccctgtagagagaccccgctcccttttctcgcaccgcccttggttttttgcacccctctctcccagctattgagaaggcgcaccccccggggagcccggagtccccacgcgctctcaccgagacctctctttacgctctctaagggccccgccgggggcacccgcggatattacacccacatattgcccacacccccacgagagatcactcacgcgtctatattgcacccccatttttagcgccctctcatatttttatggtggccacacacatctatatagggacacccacagtgtttggtgcacccacaaatatacaccacgggcgtgtgagtgtaccccgcgtgccccgcgagatatctcccccgcgcgagtatatctctgtctcgagcaccccacacgcgcgtctccgcagtataagagatctcccaccccctttctcacataagcgtcgtcacagagatcccgcgccgcctgggcccgctctaaatttgaggcccaccgctgtggctgcgagtggtgcgcctctcacgcgagatatgtcttctttgccacgcgctggtgtccctctgtggggaggagcccccttccctctcccccgccacggctgtgctgccctctgcaccacactgagagcacttctcacgagctgtgccaagccacatcgtagtcactccacgacccgtgtaattccccgggcttggttaaagtgctgtgtgagtaaacttgtttggagtgaggagacttaaactttaaaccccttaccataaacttggggaactaccca

SEQ ID NO: 554412 - DNA, 884 bp, Homo sapiens
gctcgtgcctccgtaacccccgcctagccgggccatggctggaacgcggagggggcgggcggtggtccctggaggcgcccgggggcggcagcggcagcggggatccggggtcgcccagtcccctcagcagcctggccgccgcagcagcagcagcagcagccgcgcagcagccgacgccccccaatgtctggcccaggccacctcgtcgtcctccgtccacctctggctgtgcgggctgcctcctcctcgtcctcgtctacctccacctccatggccgtgtgcgggtggcctcggtgctcctgatgcctcccggtgcgcctggtggccagtgccgcacccccgccccggtgcagatgaacctgtactgccacctgggaggtggaccggagctcgtccagttgcgtgcctagtgctattcagcttgatcctgaaagaaactcgtcatgctaaaagaaatggacacaagatcttaactcagtggtcatcgctgtgaagctgccagggttcaaaaagaattcttcgcgtccaacgagatcgtccttccagctagtggactggtggacacagagctccaattaacctttctcccttcagtaccctcatttccttaacgcgagatgccaacgaggctgagatcattgctgaccaaggagaaacacgttacgaagaatcgggaccatcttgggtataagaccttgcgccgtgggactcatcaacattggcagaggtgatgcgagatctaatgagcgattgtgatggctaaaagaacggaggatgtctgggctgggataataagatatactgtacaacaaacatgacgagaaggacaacagaaagagcggcgaaagaaacaggcatgcagccgtcgcaaggggagaaaaagg

SEQ ID NO: 554413 - DNA, 829 bp, Homo sapiens
  misc_feature (233)..(233): n is a, c, g, or t
  misc_feature (245)..(245): n is a, c, g, or t
  misc_feature (249)..(249): n is a, c, g, or t
  misc_feature (312)..(312): n is a, c, g, or t
  misc_feature (315)..(315): n is a, c, g, or t
  misc_feature (318)..(319): n is a, c, g, or t
  misc_feature (323)..(323): n is a, c, g, or t
  misc_feature (335)..(335): n is a, c, g, or t
  misc_feature (341)..(341): n is a, c, g, or t
  misc_feature (401)..(401): n is a, c, g, or t
  misc_feature (409)..(409): n is a, c, g, or t
  misc_feature (417)..(417): n is a, c, g, or t
  misc_feature (419)..(419): n is a, c, g, or t
  misc_feature (433)..(433): n is a, c, g, or t
  misc_feature (436)..(437): n is a, c, g, or t
  misc_feature (440)..(440): n is a, c, g, or t
  misc_feature (454)..(454): n is a, c, g, or t
  misc_feature (489)..(490): n is a, c, g, or t
  misc_feature (498)..(498): n is a, c, g, or t
  misc_feature (503)..(503): n is a, c, g, or t
  misc_feature (506)..(506): n is a, c, g, or t
  misc_feature (600)..(600): n is a, c, g, or t
ggaggctcaatgcgtatcttcgatagtgaagaaatactggcaggttataaaagggaacggattgaccccactccctattactggtatacggatcagagaaaatacggtacatgtccccattggaggatatggcttgggctggaacgattcttaacgtggattctgaataggtatcacatccgagacgtgtgcttataccctcgattgtccagcgttgcacgccataaccattntctccagaagcntggnggaagattatgaaaggaacaggctctttacaaaagaaaacaaaaagccagaatcttccttctntangtnncatnggggtttctctntctgtntatctttctactaccataaaaactatctcagatcacctgaacatcaagtgatataaggtngtcatctnaagaaacnantatccattttttcnttnngtncgggaaacaaagtncggggaaaatacctggcatgaaactgtagttaggnnatacattncagcnatnttactcacttatccaagtattcattggacttcacgttatatgtatgtagtcattcacgaattttagattatcggtgtaagataactccagaaanttatctttacctgatcgcttttctacgctgtcccctcgaatttccttggaatctattcattatcggcatcaactgccgttcacaaacaaaaatcatcggagggaaggaccttggccacaatccgtataaacttctggctcatcttacgaacccgtataattcagccgacaccctaggaatccctgattagcttttggatcaggcgtaatcttctaactcgcttagtgca

SEQ ID NO: 554414 - DNA, 341 bp, Homo sapiens
ccgcgggcatctcttatgttgtgtggtcctaaatataagccctacctccacccaaataagtacttctagtgtccttgggactagcctcatctacccccagttaccctataacaaatcctgctgtacaataaaggataaggtgctcatatagagcacacacctagaaactagacacatattgctcctatactaataacctctagcttagagtagtcctttccctatccgctatattatattagatatgtcctaggtattgatacatgtttactaaattaagatacctaaactccaatgaaggctatgcttgtcctagaacgggaggatcctctagcagtcga

SEQ ID NO: 554415 - DNA, 330 bp, Homo sapiens
gctcgtaccgttggtttgaccgtggtctttgccaccagaaggagttgggcctgtttgccattagcagctgtctgaggaggccactgtgtaccacatatgcggctcctgaggtctgaggtggaaggtccctactgcatcaccaccccgcggggcatagaaggagcccagagaaggaggggcgttccacctcgtggaacgccaggaatcaggaagaccagtgtccctgtttacgatggagctgtgcctgtggaggctgttgtgaggcagtagcctcatctgcggaggctgccgtgacgtatggtatgggcctcaataggccattgtcagtca

SEQ ID NO: 554416 - DNA, 322 bp, Homo sapiens
  misc_feature (35)..(35): n is a, c, g, or t
ccgcctcgaccacccactctcagtcagtgcctggntagggtttctcacctcctcacccagatatgtgtgtcagttccctggctcctttggcaggattgctcctggatagctcctggctagactcttacctccttaccagtctcagggaatgggccaaaacaggacagagagagagaccagatttaaatggatcacttgctgacagtgactcatagctactgtaagtgacggtctgttcaagggaatccctgtctctctttgtctgtctgtctgtctgtctgtctgtctgtctgtctgtctgtctgtctgtctgcgtcgacgc

SEQ ID NO: 554417 - DNA, 348 bp, Homo sapiens
tccctggtaggaagaaagaggttgcgctgagcacggatcactccagtctactcaagcctgggaaaggaggcgagactccgttccaaaacaataaatgaacgataaaaatagataaatataatttcgggggaaaaggttaccagttttctttaatgtggaactttcaaagcttttcacattacaattcattttgaatgtttatggggggggtaatactgataatatccaactgataattaccagtaaatctttagaaaacctattttgacaacacaggttggacaattctgtaatgagataatttttaaaatacgatcctataagacaaatgtatacttttaaaatact

SEQ ID NO: 554418 - DNA, 389 bp, Homo sapiens
ctgctgcaaatgtcaatattttggatgttgcatagatactatttgccccagttatattcaacttttgtactgcctgtattgtggactggctggctctgttataactctgtccaaaaagtgtatggaatataacttgtaaagcttcccacaattgacaatttatatgcatgtgtttaaaccaaataccagaatagctttaacaatagagctagcataatagtatttattaaagaatcacatctgtaaccctgagaattacttaaggatgctagtagagtaaaatagtatattgcaaattatatcattgctgctagatatattagaataattttcagatgtcatcttgaaacagaaatatgtatttcaagcactcacgcaaaggtgaataa

SEQ ID NO: 554419 - DNA, 237 bp, Homo sapiens
tgcatgatagtacgcacggctgggcgcgggcgacccgtatcagtgcgcaggatcgcttggacgggcgtcgcgctgggtctgatcgtggccgccgtcgtcgtcgggccggtcgtgctgctgcgccacgagatcacgggtgtctacagcaacgacccagcggtgcgtgccctggccgcttcgctcctgctgtgggcggccctgtggcagttcttcgacgcgacgcaggtctgcgccatc

SEQ ID NO: 554420 - DNA, 966 bp, Homo sapiens
gggaggagaactaggctaggtacgaggcctggtttgaattcggccgaggcaccaatggtggatgacgccggtgcagcctgggggtgccgggggcctggtggccttggattgggaaccgcggtggcttcgcggaggttcggcagtggcatccggggccggggtcgcggcgtggacggggccggggccgaggccgcggagctcgccggaggcaaggccgaggataagtgagtggatgcccgtcaccaagtatgggccgcttgtggtcaatgacatgaagatcaagtccctggaggagatctatctcttctccctgtccattaaggagatcagagatcattgatttcttcctggggggctctctcaaggatgaggtttttgaagattattgccaagttgcagaaagcatgaccctgtgcctgggtcagcgcaaccagtgttcaagtgcaattttgttggctatctgggggactacaactgtgccacgtctggtctgggtgttaagtgctccaaggagtgtggcacctgccatccgttgggggcatcatcctgggcaagctctccatccgtcccccgtgcgccaggaggctaccttgggggtgaacacagatctgtggagcccacacttggtccttttcatggttgacaagggccgctgcgggtcttgttgcttggtacggcctcattcccttgaccccagcggggcactggcatcgtcttcggacctgagttgcctaaggaaggcttgtcacataatggtggggagtcggttgaattggtgaacttcagtcccggggggtgtctggccacccttggcaatttcccatggccacgttgtgttctatctaaacctagtttcttgtacgcgactttgaggggatgtgttcacagtcctacggggccaggcccctgtaccccagatcgtgtggtcgccgtggtacctgttttcacaacgttcggtgtctacac

SEQ ID NO: 554421 - DNA, 743 bp, Homo sapiens
agggcataaatgagaaaagtgcacatgtagtcatgagcaagtattaaagtgtctccccaaaatactagcaaatagtgagctaataaatggaggtggagaaaaataaaaggcaagggacaatataagatcaaagacagcttctgtttcttggcagcatttggtgcccccactctggcaggttttctacagatgctctgatcaggaaccagctggccccagggctggctctcagtctctcctggcagtccccacgccccaagcaagatcattaaatcatcctttgttaagggacgatgggaggagcctaatctgacgaaaaacgaaaacgtacaggaagaacagggttacacctgccagtgataaacaggaacgactgtggcaactaaacaaaacacaacaaacaacaaaaccaaaaaaaaactttggggggcggcctgggccacgggaaaaaggttttcaaagacccatcccgtgtggggggcgggggggccccaagagggtaacggtaaacctggggcacaaaacgcgtggccaaagagagaactcgcgggccatgaacaagggtggggggggtttcctccaccaaaaaaaaaaaaccgccgcgggggggcaacccggggggggttttgggacacacaatcccaaaagaggggagtccgggggggcacaaacggggctgtcaccaacagcagggggcccaaggagaagtcagaaaaaaatacgagcgccggcgggggaggggc

SEQ ID NO: 554422 - DNA, 220 bp, Homo sapiens
ccgacgatgtaagcaatttttgattaaaaattttttatttaaaaagtcaaagcttggctgggcaaggtggctcatgcctgtaatcccagcactttgggaggccgaggcaggtggatcacttgaggtcaggagttcaagactagcctggtaaacatggtgaaactccacctctactaaaaaatacaaaaaattagccgggtatggatcctcggcgtgtgca

SEQ ID NO: 554423 - DNA, 450 bp, Homo sapiens
tctacaaggttgttactagtgtccaaagagctgtcctctttggactaacagttaaatttacaaggggatctagagggtactgtgggcaatttaaagttgaactaagatctatcttggacaccagctatcaccaggctcggtaggtatgtcgcctctacctataaaatcttcccactattttgctacatagacgggtgtgctcttttagctgttcttaggtatctcgtctggtttagggggtcttagctttggctctccttgcaaagttatttctagttaattcattatgcagaaggtataggggttagtccttgctatattatgcttggctataatttttcatctttcccttgcggtactataatctatttgcgccaggtttcaatttctatcgcctatactttatttggggtacatggtttggctaagggttgtctggtaagtaaggtg

SEQ ID NO: 554424 - DNA, 619 bp, Homo sapiens
tttggaagaagtcaaagtaagcagagagatggacacggaaacactctatagatgtggccagacagcatctcttcgtactaaagttcatgctgaacttgcagatgtcttaacagaggctgtagtggactccattttggccagttaaaaagcacagatgaacctattgactctcttcactgacttgagcatcatggagatgaaacataaatctgagaactgatacaagcttaatcagagggcttgttttggaccacggagcacggcatcctgactatgaagaaaagggtggaggatgcatacatcctcacttgtaacgtggtcattagagtagtgagaaaacagacagctgaagttctggctttcttgttacaagagctgcacgaagagagagcaaaaactcgtgaaagctgaaagaacattcattgaagatagggttaaaaaaataatagaactgatacacacggaaagctctgtggcgacttcagcataaacggattcgtcgcttattaactcaacaacgggaattgaccccttttccttagcatgctctttcaaacagaaggcatagtcgctctgcgcagagctcaaaggacaaactatggagaggctgactctgctg

SEQ ID NO: 554425 - DNA, 242 bp, Homo sapiens
gtctactccaggcgtgccctacggtctcgctgcacttcatccacaacctagcgaagactggctggcccgggcaccctcctgtgcttcgcccagagcatcagcttctccggcctgccctctagccgccggacctcaccagcatcaacaggcctgcctgcgccttccctgtcctccagctccttctcgccctccagttccccagcatcacctggggaccttcccactgtcaccctcttgccttc

SEQ ID NO: 554426 - DNA, 372 bp, Homo sapiens
accctgccaactctgacggttctgactggaaaaccccttccggatgaacatatatcagaccaggcgcggtggctcacgcctgtaatcccagcactttgggaggccaaggcgggcagatcacttgaggtcaggagtacaagatcagcctggccaacatggtgaaacctcatctctactaaaaatacaaaaattagctaggcatgttggtgtgtacctgtaatcccagctactagggaggctaagacaggagaatcgcttgaacccggcaggcgaaggttgcagtgagggtcgcctgaggtcagaagttcgagaccagcctggcgaacatggcgaaaccccgtctctactaaaaatacaaaaatagccgggaag

SEQ ID NO: 554427 - DNA, 564 bp, Homo sapiens
tggggccccggtgggccccggtgttgcctttaacccgccttttctgggggaggggtcctcgcgtgctttaccattttgtgcccgggtgagccccatgccaaccaattggtttttgttttcccaaaggggagtggtgttgccctccccctttcccccccctttcatgaggaccaccggagagtccttgtttccaatccaaactgggttataactgggggaggggagaaaaaccgcggtgttttccctttttaaggggggaacccttccaaaaacaagggctgggttgacccggccccctccagggtgccgtggatttttgtcccctgtttccgggccatcctcggggttaaaaaacccatttaatcccccaactgggggtttttgggggccttggccccccccggggtttttataccccgatattattttgaaggggggggtttaaaaaaaaaaaagaattttaccccttcctggggtaagggtttttttttcctggggggggaaattttttcctttttccatttccccttttttgggttttttctttattaatttttccgggga

SEQ ID NO: 554428 - DNA, 130 bp, Homo sapiens
ctgctgagatccagctcttgttttttcttgcatgagaccggtctgtgtcctcagcatttgctgtgcccaggtctgagtcactggacatgggctcctcgcaatggtctggactcttggagcccatgtcctg

SEQ ID NO: 554429 - DNA, 979 bp, Homo sapiens
  misc_feature (528)..(528): n is a, c, g, or t
  misc_feature (573)..(573): n is a, c, g, or t
ttcatatggagtgcttactctgcattactcgcgtgctcatcgcagatagcgcctgttcactactaactttccaaggaagacacgtgcgccctcacaagtgcgccattccactatatgtgtgacccggtcttgaatgtgatgcgaaactacttgatactaaaaacgtccaatggcttgagaacgacgggacatgaagtgaatcattgtagcgcgtggaacgcccattatgccaaaacgtgactgggaaactacaaggacaccagaccatatggcaaggaacgattacccaggcctacacatgtgaagcatcccggcgcagacgcgtctcccaggatagatattaattcctggttagcgcttggtgccttgagagctaccgatgcactcatctgtgccctgttgtcatgtagcttccgcccagtgaccacaggacaagacgtgactaaggaagatgtcagctggcgcatcgcgaagcgctcacagcgtaccaccttgacaagcggcgagttagtccctagtacctctacnttcatgtgagacgatgtcgtggtggtacactctgcccccccgagncagccgccacacttgttaccgctggcgtagacaagtcgagggagaccatagcgtgcgcgattgcgcctttggcgggagcacttttgccgttgagatcacctaaagaggggaacgggaggccacaagggagctggagcgagcgcagaaagcatcgcaagctttcatagcgcttcggttcgacatacctatcgggagcaggggacgcgtcatcccattcggggtccatgcatatacgcaatgccctcggcttgggcacgattggcttaccccccattggcaatgtcccttggcgcccaggggattttcacctcgattgccgattttcggtgtggggcccggctttgttggcataggttcgaggggggccgatggttcgccccttttcccccggagaaagggcggcctc

SEQ ID NO: 554430 - DNA, 124 bp, Homo sapiens
tgagtcgtccgatagccaaactaaaaaccaaaaacctgtcatatttccccatcacttcctttaatcttagtccttacatgtggtaaaaagagttttaaaaaatattattaagtatgttcccgat

SEQ ID NO: 554431 - DNA, 1213 bp, Homo sapiens
  misc_feature (320)..(320): n is a, c, g, or t
  misc_feature (323)..(323): n is a, c, g, or t
  misc_feature (341)..(341): n is a, c, g, or t
  misc_feature (496)..(496): n is a, c, g, or t
ggctccacgagggttcagcttgtctcttactttgataccagtgaacttgacctgcccgtgaacgagtgcgggcactagacacaggcacagacgagatacgtaccctatggagactcttaatttattaagtgcaatcatgtgaccctagacgaaaccctaccaggtcctaacatcgtatgcgaagacctgtctattgaatatacaattgtcggtgtgggggggcgaaccgtcgggaggctaggaacctccacagccgttcccggaggctagtacgatggctaggagacttgctagccagctcaaatagcgtagacttactnatnactgcaattgtatccaantaaccttgaccaaccgtgatatcaacgttacctcataggtgggataacaggctgccaatccatagttacgtatgcaagtccactattcataccatatagggtgtttaccggagcactcgtagtgtttggtgatctaggagaccatttcctcaganttggttgacatgcccagactaatgtatatagggtgtgcgctcttggttgcacaccgagtctacagacgtaccttagcagatagtactcttagacgtatcaaggacccgagtacgttagatccaaggatcggctttctgattcttatcttcacaagtttccttccctgttcacggaaaagcgaacagaagtatgtaacatgaatggtcctataccttcagctagatagccgtcgcttcccgccggtgaagagttgcatcagttcagtccttcagaacttttaagttgaatttaataacgccaacgatcccattcctcaagaagcaaggggggtttagagacacataattataacaccatgaaaaatacactaggctagaggaattccgctcgagggtggcgcatacctaaatcgcgaacggagtgcgagcgcgcgaacaaattcacgtgccgagtcaccatggacaaagttgtgacgacgaaaagtggtgcctgtacaatgaggggtgagggatcttgtcaatgaagacgattcccaccgaagagtctttgtttcctttgatgttttccccaaaaacgggcgggcggtcagggagaaacgtggtcccccggggggttcgtcccccccgaattgattattgcgagggtgtatgccccaagataataaatttctttacccacgtaataacaccgcggtagataacagcgggcgtcaataa

SEQ ID NO: 554432 - DNA, 380 bp, Homo sapiens
  misc_feature (276)..(276): n is a, c, g, or t
  misc_feature (317)..(317): n is a, c, g, or t
  misc_feature (320)..(320): n is a, c, g, or t
tcttcgctctagtccaaaactcacggcaccgcggctctgctcccaggcaggccgtccctcggcgtcggttgaggtatgtcgtgtagtctctccgcccgccggcgttacgcagtctctgtccgcggcgcagaaggcgggctggcactgcttaagactccggagccggcaggtccgcgtactgctccacgcgctggtcacttctgttctcaccgcagtccaccaacttctgctgcatctcctggtgcccgcttggccttgtccggctcttgcgcacgnagatgttgttgcgctcgcgccgctgccggtactcggggctnccncggtacgggcccctcttgccggcgctcttctcccgggcggggccgggcgcgggggtctgc

SEQ ID NO: 554433 - DNA, 94 bp, Homo sapiens
acctgacctgaattgcgaccccaacctgaactgctcccctgaccgcaacccctacccccgcccaccagcatggcccggcacgtgttcctaacgg

SEQ ID NO: 554434 - DNA, 753 bp, Homo sapiens
  misc_feature (731)..(731): n is a, c, g, or t
ttatggacgcaggctccgtttacagctcgatattgcataagagccgctatgagtaacattaaagggtgctacggggtatccgcgtagccctcaaacagataaccgcgtacacgtactgcacgcctatgagacgccaaacaagactcgccagatgcactaccagaactgaataatcgcacgacaagaggcatattgcgtatctgtcgccaccgtgagtagcatctcaacaccagtgttacattctaacagctttctgtcctgcaccagacagtccctgagagagttgcatcacgcggtacacgcttgatcgccccaacaaatcacaatcatgattacagttacttacagcggtatataacaagacctactattctgcatagtattatcccaactactgagattattctcaccatctgcttcgtccctgactgtcttaattggatcttattgagcctatatgcaaactcgatcttcggcttattacgccgtaccagcggctaccgacgtctatccactccactactcagatctctattgctcgacactcgcactatcggacttcaacctatactacccgataccgctcacggtcttcacttcatctgcgctcgtaacattccatgcctcgctcattcttcatgctcagcccgtagctgcaactatacggtcctctacatacagcctcacttggacgttctatactgcatacttatcacgtttatctcatcgtncggtacactgatcttttggccg

SEQ ID NO: 554435 - DNA, 353 bp, Homo sapiens
ccatcccaacactagctgcacgtaataccctgccagattagctgtgccacacagctaccagggaagcttgtttcacaagccgtcttaccttagcacgaaggccaagcaacgtactaaaggtgactaaagatatgtacaggataaacaaaccaagggaacagtacttcaatacaaggcaaaacagcacagtctacaatcaggctgaatagatacaagcttaaggacaattctttcgaagctatccagttcggagctagcatgaggggcgcattccaggcaaatttctattctaataccatgcagaaatgctcgcattgtgagccgttagaacattgcggggcgatgagggcccg

SEQ ID NO: 554436 - DNA, 1274 bp, Homo sapiens
agcggccccgaccctggcccccagatgcccacccggatcggcccggacacagcccatgatctaaggtcgtatccttaatcttcgagacgaaccacggcgaagcctccgcgcatctccaacgcttctaccattccctacagctgacagattacaacgaatagacaaactcagtacagggtagtgaacgtgtgtccacctttggatactctaccgagtagactgaaccattgctttgtaccattgttccgtatgaacgcgatggacttacttcaaagttgtgcatggactctgaccagacaaaaagcttgagtgtgtactaaggaccatattaattgcgaacagtttaatattgtgttgtctatgcatgtgtaggatttcgttcaagaaaggtcgaaacgttaggcaattcttgaggatcctaattcagaagtaatttgtcgtggaaaagcgtttatggaccacaatctgtttgtatggatacaagttgtccttgttgacaggcttggtagttagtgaagtcttttcccaattggcttagacaaaatgggattctaaccataattaatttcgttggggcacacgtataacactcggttgcatgcgcgcggcagcaaatcggctactttcgcgcaagaccacaccattatgatggcacctttgactgcagttcgctttcacacaatcccataccatatgtggcattcgccttaatccacatattattcacaagcccttcggcgtataaaacaccactacttttgtatgaaaactccttttttgaatttccttttttcaagctttcttacctcgccaagagtaaccgaagcgggagccagggggtttaaggaaaaccaaaaaggggctctggcgcccgttaaaaagtcccagcagggaaagggcccttcccccaagtccctccccgattggtccttaggttaactttcaagcccgtgggttcataacaccggaacacctccattgtgaccaatttctttctcacccatgagggaacgaacaattcctccccaaagaattgcaaaacacaacttaaattttttacacaccaattgttgggggtcttccaaaccgccactttccaacgggtcggcatttcactcacacacatggcttggggcgtcccaaccaagacaccgtgggtatcccccttcccttttctttaaaaaccttaacaacccacacttggcttttcaacttacaacagcgggtccccacccgtccccccccaagtggcttacacaccccatttcccccag

SEQ ID NO: 554437 - DNA, 156 bp, Homo sapiens
  misc_feature (156)..(156): n is a, c, g, or t
gttataggtaagaatctgtgtgagggtgagactgtctactgagtaggctcctcagattcattgaactaggtctgtcccaatgtatgggatggctggatagtaagtttgtaattactgtgtggccctcagaactgagtatttggggcttatcgaggn

SEQ ID NO: 554438 - DNA, 996 bp, Homo sapiens
gataaatataacgtatacacgggatgtaaggctcacacacggtggctattccctcccttcgggggaaatatgccatcgtctgaacggtttaggatgatcatgaggagagcggcttagtcacacagccagccttgctcatcacaaaagattgtgcagactcacgtgtaacagaatgacaaggcagatagctaatccttttttctgtgcctcaaagcccgacgtgcaagtacacacaaaccctaccggtacctctaccacgtgcgaggctaatagagtagatcagaaccaggaatgtgagctgggttccaccttaggaggggacaatgaggacagagcaagagggctccatgtttaattactaccaggctctgacttctgaccacaattacagagcatgaaagcagaattggcctttagtaaagtgaaaaggaagtaggctcctagcagcatataatagttataactacgaataacatggaaagagaaaaggacttcagtcacactacaagacgttaagcactagtacctcactaccacatggagacccacataacctatgtaaaagggcacagatggctgggaccgacgaggaaaagaggcaaagagacggcatagccagacagtgtgacatactcaccccatacaggggataataccagcgggacgtaaccatgaagaaaacgataccccaataataaacacacagaaaaaagggataggaagagaagacaaagtccaagtaaaacacaggcagaataagcaaaaacagccgagaaaaagaagcaagaaagaacaacacgaagagagacccaataacaacaaggagtgatatctgggcaaagacgaatgggcaggagacaggataacacaaacaaagcaggagcacgaaataagcaacaaagccagcaacaaaaacaaaaaagagaacagagaaaaggataaagagaaaaccgacaaataaaaaaacaagagacaacaaagctaaagacacagaaa

SEQ ID NO: 554439 - DNA, 116 bp, Homo sapiens
catgggtcccggcccacagaattacggcagcggcatgagaccaccacccaacttcctcggccccgccatgcccgggattaacatgggccccggagcttgcagaacccttggccaat

SEQ ID NO: 554440 - DNA, 1394 bp, Homo sapiens
gggcgagtcgtagctttagacaagcggccagccttgacacgtgacccaagccccagcttcgcgcagggatggagccggaagaggggacgcccttgtggcggctgcagaagctgccggccgagctgggcccgcagcttcttcacaaaataattgatggcatttgtggtcgagcttatcctgtgtaccaagattatcacactgtttgggaatcagaagaatggatgcacgttttagaagatattgccaaatttttcaaagccatagttggtaaaaacttacctgatgaagagatatttcagcagttgaatcagttgaattcacttcatcaagaaactatcatgaaatgcgtgaaaagtaggaaagatgaaatcaaacaggctctgtcaagagaaatagttgctatttcctctgcacagctacaggattttgattggcaggtaaagcttgcactttccagtgacaagattgctgcattacgaatgccacttttaagcctgcatctagatgtaaaagaaaatggtgaagtaaaaccttattctattgaaatgagtagagaggagctgcagaatctaatacagtccttggaagcagcgaataaggtggtcctgcagttgaaataactggaaatgatgaataccagtcctatcagattttattgctccaacttatatggcagagtgaatactgcgtgttcagaaaccttgtgatgtcttgactgttgcaccaggctgagaaagcagcaatattgatattataaagataaaaatttatcaacattccttaacaggaaattacatggttgagaggaaatgcataaaatgaaagatgaaaaatctatagtagcagtttatattttcatgattgttttgcctcatttattaaatatttgagaaatctttggagatacatagttttattgaaagctaaaaataggttctaaagtaatgtaaaaatataaagcacaaatatacttgaatattgcttaaagaattgtgtgaatagcaacatatattatggatatatactttgtgatatttttaaaaaataattttttcaaagaatgtataagctgcatatataactcaggagattccatgtctttctcatatttcagaggaaagattataaaatataaaatttcttagagaacacctctttgtcagagataaacaagaacaaatactctaaacttatgtgaacagttttgagtttatgaattctagaaactaaaatcaagaatacagaaaaatgaaaataacattttacttctgcgcttctatgtttgggaaacattgctctgataaaaaatagctgtcattatgcagtgtgtatattcaaatatgagataagactatgtacacatccacttttgttaataaactcaatattgaata

SEQ ID NO: 554441 - DNA, 135 bp, Homo sapiens
gtactgaaacagcttataccctagaagaagaagctgtttcagtacaacgggaagaagaatatgaggtatatgaagaatatgattataaagaattcgaggagtatgaaccaacagaagaatatgaccaatatgaag

SEQ ID NO: 554442 - DNA, 1483 bp, Homo sapiens
gggcgagtcgtagctttagacaagcggccagccttgacacgtgacccaagccccagcttcgcgcagggatggagccggaagaggggacgcccttgtggcggctgcagaagctgccggccgagctgggcccgcagcttcttcacaaaataattgatggcatttgtggtcgagcttatcctgtgtaccaagattatcacactgtttgggaatcagaagaatggatgcacgttttagaagatattgccaaatttttcaaagccatagttggtaaaaacttacctgatgaagagatatttcagcagttgaatcagttgaattcacttcatcaagaaactatcatgaaatgcgtgaaaagtaggaaagatgaaatcaaacaggctctgtcaagagaaatagttgctatttcctctgcacagctacaggattttgattggcaggtaaagcttgcactttccagtgacaagattgctgcattacgaatgccacttttaagcctgcatctagatgtaaaagaaaatggtgaagtaaaaccttattctattgaaatgagtagagaggagctgcagaatctaatacagtccttggaagcagcgaataaggtggtcctgcagttgaaataactggaaatgatgaataccagtcctatcagattttattgctccaacttatatggcagagtgaatactgcgtgttcagaaaccttgtgatgtcttgactgttgcaccaggctgagaaagcagcaatattgatattataaagataaaaatttatcaacattccttaacaggaaattacatggttgagaggaaatgcataaaatgaaagatgaaaaatctatagtagcagtttatattttcatgattgttttgcctcatttattaaatatttgagaaatctttggagatacatagttttattgaaagctaaaaataggttctaaagtaatgtaaaaatataaagcacaaatatacttgaatattgcttaaagaattgtgtgaatagcaacatatattatggatatatactttgtgatatttttaaaaaataattttttcaaagaatgtataagctgcatatataactcaggagattccatgtctttctcatatttcagaggaaagattataaaatataaaatttcttagagaacacctctttgtcagagataaacaagaacaaatactctaaacttatgtgaacagttttgagtttatgaattctagaaactaaaatcaagaatacagaaaaatgaaaataacattttacttctgcgcttctatgtttgggaaacattgctctgataaaaaatagctgtcattatgcagtgtgtatattcaaatatgagataagactatgtacacatccacttttgttaataaactcaatattgaatacttttggatgttaaattcattggaaaaacaaaccatttgtaacctcagttaactttaacaacaagcattctgagcaaatgaaaaaaaaa

SEQ ID NO: 554443 - DNA, 925 bp, Homo sapiens
  misc_feature (802)..(802): n is a, c, g, or t
  misc_feature (804)..(805): n is a, c, g, or t
  misc_feature (811)..(811): n is a, c, g, or t
  misc_feature (815)..(816): n is a, c, g, or t
  misc_feature (830)..(830): n is a, c, g, or t
  misc_feature (838)..(838): n is a, c, g, or t
  misc_feature (842)..(842): n is a, c, g, or t
  misc_feature (846)..(846): n is a, c, g, or t
  misc_feature (849)..(849): n is a, c, g, or t
  misc_feature (853)..(853): n is a, c, g, or t
  misc_feature (861)..(861): n is a, c, g, or t
gggcgagtcgtagctttagacaagcggccagccttgacacgtgacccaagccccagcttcgcgcagggatggagccggaagaggggacgcccttgtggcggctgcagaagctgccggccgagctgggcccgcagcttcttcacaaaataattgatggcatttgtggtcgagcttatcctgtgtaccaagattatcacactgtttgggaatcagaagaatggatgcacgttttagaagatattgccaaatttttcaaagccatagttggtaaaaacttacctgatgaagagatatttcagcagttgaatcagttgaattcacttcatcaagaaactatcatgaaatgcgtgaaaagtaggaaagatgaaatcaaacaggctctgtcaagagaaatagttgctatttcctctgcacagctacaggattttgattggcaggtaaagcttgcactttccagtgacaagattgctgcattacgaatgccacttttaagcctgcatctagatgtaaaagaaaatggtgaagtaaaaccttattctattgaaatgagtagagaggagctgcagaatctaatacagtccttggaagcagcgaataaggtggtcctgcagttgaaataactggaaatgatgaataccagtcctatcagattttattgctccaacttatatggcagagtgaatactgcgtgttcagaaaccttgtgatgtcttgactgttgcaccaggctgagaaagcagcaatattgatattataagataaaattttaaattccttaacaggaattactggtgggaggaangnntaaagnaggnngaaattttgtaganggtaattncgangggnggngcanattaaatntggcaccttggaacatcattggagagaaaggttcagatgtgaataggcacaattgttttgaagg

SEQ ID NO: 554444 - DNA, 224 bp, Homo sapiens
ctctttttgtagtatctggaagtggacatttggagcgctttcaggcctatgttgaaaaaggaaatatcttcccataaaaactagacggaagcattctcagaaacttatttgtgatgtgtttgctcaactaacaggattgaaccatcgttttgaaggagcagttttgaaacactgttttcgtggaatctgcaagtggatatttggctagctttgagggtcgacgc

SEQ ID NO: 554445 - DNA, 636 bp, Homo sapiens
gggcgagtcgtagctttagacaagcggccagccttgacacgtgacccaagccccagcttcgcgcagggatggagccggaagaggggacgcccttgtggcggctgcagaagctgccggccgagctgggcccgcagcttcttcacaaaataattgatggcatttgtggtcgagcttatcctgtgtaccaagattatcacactgtttgggaatcagaagaatggatgcacgttttagaagatattgccaaatttttcaaagccatagttggtaaaaacttacctgatgaagagaaatatttgtgctgaagacatgaagattcttggatgtattcttgtagaagcttgattgttttagccttcacattatgttactgatgcattttgaattaatatttgtgtatggagtggaggtcaagttcacaattttctacattaatatctagttgaccatttattgaaatgaccatccttgccccacaatattgctgtgctgcctttattgtaaatcaagtggcactatatttgtgcctctgtatctcaactcttcaatgtattccattagtctacttttgtatatttgccaatgctatactgctttaattactgtagaattaaagctaaattaaattatgtctcc

SEQ ID NO: 554446 - DNA, 199 bp, Homo sapiens
tgtggtagtatgtatgtgaatatcataataaatggtgcaagaaattgcataattctgattgatggcaatcatacttgtgcacgatagagccagtataatgccaaattttgtatacattattaaccacgtaaccatgggagcacaatgtacgctgttaaaactatgctcaccatccgaggcaccaagcaaacatatgtag

SEQ ID NO: 554447 - DNA, 1615 bp, Homo sapiens
  misc_feature (1445)..(1445): n is a, c, g, or t
  misc_feature (1451)..(1451): n is a, c, g, or t
  misc_feature (1455)..(1455): n is a, c, g, or t
  misc_feature (1462)..(1462): n is a, c, g, or t
  misc_feature (1466)..(1466): n is a, c, g, or t
  misc_feature (1468)..(1469): n is a, c, g, or t
  misc_feature (1476)..(1476): n is a, c, g, or t
  misc_feature (1559)..(1559): n is a, c, g, or t
  misc_feature (1599)..(1599): n is a, c, g, or t
gggcgagtcgtagctttagacaagcggccagccttgacacgtgacccaagccccagcttcgcgcagggatggagccggaagaggggacgcccttgtggcggctgcagaagctgccggccgagctgggcccgcagcttcttcacaaaataattgatggcatttgtggtcgagcttatcctgtgtaccaagattatcacactgtttgggaatcagaagaatggatgcacgttttagaagatattgccaaatttttcaaagccatagttggtaaaaacttacctgatgaagagatatttcagcagttgaatcagttgaattcacttcatcaagaaactatcatgaaatgcgtgaaaagtaggaaagatgaaatcaaacaggctctgtcaagagaaatagttgctatttcctctgcacagctacaggattttgattggcaggtaaagcttgcactttccagtgacaagattgctgcattacgaatgccacttttaagcctgcatctagatgtaaaagaaaatggtgaagtaaaaccttattctattgaaatgagtagagaggagctgcagaatctaatacagtccttggaagcagcgaataaggtggtcctgcagttgaaataactggaaatgatgaataccagtcctatcagattttattgctccaacttatatggcagagtgaatactgcgtgttcagaaaccttgtgatgtcttgactgttgcaccaggctgagaaagcagcaatattgatattataaagataaaaatttatcaacattccttaacaggaaattacatggttgagaggaaatgcataaaatgaaagatgaaaaatctatagtagcagtttatattttcatgattgttttgcctcatttattaaatatttgagaaatctttggagatacatagttttattgaaagctaaaaataggttctaaagtaatgtaaaaatataaagcacaaatatacttgaatattgcttaaagaattgtgtgaatagcaacatatattatggatatatactttgtgatatttttaaaaaataattttttcaaagaatgtataagctgcatatataactcaggagattccatgtctttctcatatttcagaggaaagattataaaatataaaatttcttagagaacacctctttgtcagagataaacaagaacaaatactctaaacttatgtgaacagttttgagtttatgaattctagaaactaaaatcaagaatacagaaaaatgaaaataacattttacttctgcgcttctatgtttgggaaacattgctctgataaaaaatagctgtcattatgcagtgtgtatattcaaatatgagataagactatgtacacatccacttttgttaataaactcaatattgaataaaaaaaaaaaaaaaaaaaaaaaaaaaaaaaaaaaaaaaaaaaaaaaaaaanggaganaaanaaaaaanaaanannaggaaanaaaaaaaaaaaaaaaaaaaaaagagggaagaaaaagagggaaaaagaaaggaaaaaaaaaaagggggggggggggaaaggagnaagattgggaaaaaggaagagaggagaaaaaaaatggaanagaggagaaaagggga

SEQ ID NO: 554448 - DNA, 365 bp, Homo sapiens
ttgagttttttgatccagacccagatcagtactagctctagcagactaatctggtagtactatcactgaacatacagaggtggatcctgcccctatgggagtccactgtgactgcagtccagtggggacaatgtacacactgatgccggaaagaagtcctgggagatgcggagggcatcctgtatttggcaggcagtctgggtggtccacgggtgtagagcttcagcaggtcctgcctgcgtattccccaagtcgcctcgcagatcctgggccttgggacgcgcttcctcccaccctggagtcttccggcatttaccccttggccagggctgggatggccgtagctgtttctccagactcacgta

SEQ ID NO: 554449 - DNA, 1001 bp, Homo sapiens
cggtgcggacggacccacatggggccgggacccacgcacacgctgaacccgcccctgacaaggccaggccccggcgactcggtgcttccttgaccccgggacttctccacggccatcgagggtcacgaagcccgccgcgcggctatgaggccggatgccccatgtggaacggttccagggcaacttaacgtggagctcatctgagctgacggcgagggccacatctcgccctgccccctcggcagacatgccagccttcagttgcctggaagaccgaggcctgcgagtggacatcagcactgtttccaggaaacgaggacccccagatgaggagaggcgtcagggctgccctccgggcttggcagacttcagcgggttcaccaccaaatggcagcaatggcacatggtgattcgccacacagtccggccggcatccccggacccgtcccagacagcctggctgtagccaccgacaggatactgagccaagcccggcctgagtgccaagaccctgagtggccacctgccaagactgccgaggaagggtcctgagcaggggcatcctgggaggctccggctgccttctgcatttacttgccgcctgtgtattttgtctcttagcttctgaagggctagaatggccaccactggtttagaatgacccttgggaaacagcgaatccctagagaatagttttctagcagagtttgtgactctaagtcagatgtggatcatggtggtttggcagcagggaatttttcttgttggagcttgctctgtgctcctcactccatttctctgtccctctgcctgggatatgggaagtggggatacagatgcctcaagctcccaaccctgggtattcaaaaacggcagacacaacatgttcctccacgcggctctactcagatgcatgcaggctcccagtgtgtagcctcaactgatatcggacttcaggaaaagtaacacagagtggcccttgaactgtagtgtgcccctat

SEQ ID NO: 554450 - DNA, 357 bp, Homo sapiens
  misc_feature (18)..(18): n is a, c, g, or t
  misc_feature (285)..(285): n is a, c, g, or t
  misc_feature (333)..(333): n is a, c, g, or t
  misc_feature (352)..(352): n is a, c, g, or t
cattgtagccctaaaccngtcaaccctagtcacccatccggggtattggctcaacatatactgcagacccaatgtgtgtcaggcactggatatggcccctggggacaatgtctgtcagctgtcctctctctgggcatatatttgtcaagagagatgctatggattcatttccttcagtcacgtcaaaacatggacttcatagtttcctactgaatcaacagtatgttctagaaaccctcaacggtcagtcacaccaccccacccccaacaaagtgacagagacanctttgccaagtaaacccagggctttcaatgttagtcctctcagaggantggagtagtttcaaatcangaagg

SEQ ID NO: 554451 - DNA, 1600 bp, Homo sapiens
  misc_feature (1445)..(1445): n is a, c, g, or t
  misc_feature (1451)..(1451): n is a, c, g, or t
  misc_feature (1455)..(1455): n is a, c, g, or t
  misc_feature (1462)..(1462): n is a, c, g, or t
  misc_feature (1466)..(1466): n is a, c, g, or t
  misc_feature (1468)..(1469): n is a, c, g, or t
  misc_feature (1476)..(1476): n is a, c, g, or t
gggcgagtcgtagctttagacaagcggccagccttgacacgtgacccaagccccagcttcgcgcagggatggagccggaagaggggacgcccttgtggcggctgcagaagctgccggccgagctgggcccgcagcttcttcacaaaataattgatggcatttgtggtcgagcttatcctgtgtaccaagattatcacactgtttgggaatcagaagaatggatgcacgttttagaagatattgccaaatttttcaaagccatagttggtaaaaacttacctgatgaagagatatttcagcagttgaatcagttgaattcacttcatcaagaaactatcatgaaatgcgtgaaaagtaggaaagatgaaatcaaacaggctctgtcaagagaaatagttgctatttcctctgcacagctacaggattttgattggcaggtaaagcttgcactttccagtgacaagattgctgcattacgaatgccacttttaagcctgcatctagatgtaaaagaaaatggtgaagtaaaaccttattctattgaaatgagtagagaggagctgcagaatctaatacagtccttggaagcagcgaataaggtggtcctgcagttgaaataactggaaatgatgaataccagtcctatcagattttattgctccaacttatatggcagagtgaatactgcgtgttcagaaaccttgtgatgtcttgactgttgcaccaggctgagaaagcagcaatattgatattataaagataaaaatttatcaacattccttaacaggaaattacatggttgagaggaaatgcataaaatgaaagatgaaaaatctatagtagcagtttatattttcatgattgttttgcctcatttattaaatatttgagaaatctttggagatacatagttttattgaaagctaaaaataggttctaaagtaatgtaaaaatataaagcacaaatatacttgaatattgcttaaagaattgtgtgaatagcaacatatattatggatatatactttgtgatatttttaaaaaataattttttcaaagaatgtataagctgcatatataactcaggagattccatgtctttctcatatttcagaggaaagattataaaatataaaatttcttagagaacacctctttgtcagagataaacaagaacaaatactctaaacttatgtgaacagttttgagtttatgaattctagaaactaaaatcaagaatacagaaaaatgaaaataacattttacttctgcgcttctatgtttgggaaacattgctctgataaaaaatagctgtcattatgcagtgtgtatattcaaatatgagataagactatgtacacatccacttttgttaataaactcaatattgaataaaaaaaaaaaaaaaaaaaaaaaaaaaaaaaaaaaaaaaaaaaaaaaaaaanggaganaaanaaaaaanaaanannaggaaanaaaaaaaaaaaaaatgataaaatgtgaagtttaaagttggaaaattattttaaaaataattttgaagggggggaataacaatagtataacttttattaaggtatgattcatattataagatttt

SEQ ID NO: 554452 - DNA, 1454 bp, Homo sapiens
taaaaaaaaaatgtaaaatctcagttaaatttccaagtttgtggtattagaaaagtgtatgtgccacaggttgggtatttaatataaacacaaccatatcttatttataaattacaaaaataaaaaaaaggtgatccgtaagcgttttagtgaaggggtgaaaacattatataacactctacaaagagggcgtggtttcgtgcatctgtggattctatagtgttaatttccagtggagtctcttcataccaaatttcacattaaacagaaaatataatcctcttaatagctcaaatatatgtggtcacacttcacagtggccccaaaatatgtggaacagtgtgggcataggggtgaaaatattcttggagagggaattcacacattaattgtgctcgtggtctcctctcacactctcaaaaacgttacgccgcgtggtgtgctcgtgttcacaaggtcataccctatcgagaaacatgtggctctcacaccagtgaaaaaaacgagcccgacgaattacaataagcgagcgaggagagctctctctaagacaaatctctctcttgtgttttctccccccaacaaggtctaaaaaacaaaagggttttatcacctaaaagaataatccgtgaaaaatcacagctcttgccgtgtaaaccaggaggcgataaggggaaaaaccacaacttgaccagctgaggagcttgtgcaccccacacacccaaagattatgtgtccggacaggttaaacgggagcacagacgcacagaaacacacagaaaggaaaccccctgtctctaagaagattacccggggggggaataccccccaaacaatctcagaggatacaatagaccaaaaaatcgcagtgggcacaacccaacgacagcgccaaaacacgcgtgtgcacaccaaagcgtgggacgcacgtaggagcaccaatcacacagcttaaaacacaacctgaaaatcagcccgcgagtcacaaagagctgcgcactacaaccaaagtcgcacacacacacaccacaacaatcaccagaacatgccgcaaaaatgcttggcgctccccccagagagccacgcgacaaaaacaacaacggacacgacttctgctaccacacgacaaaggtggaggaaacaggccccccaagtagtggccaaaaagaggggcacatacggacagccctgtgtaagtgcccaacaagttaccgacacaggacaactgacggagacaaaatggaggcacacccgaaacaccactaacacgggaggacggagcacaaactataggacataatagggccacgacaaaagcgcacagacgagagagagacaacaccagagcacacacgacacgtatgaacaaccaaacagatcacacgaacatatcaggaccagaacgtgcagtaggctctccctctcgctgctcctctcccgcgctgctgctggag

SEQ ID NO: 554453 - DNA, 1444 bp, Homo sapiens
  misc_feature (1261)..(1261): n is a, c, g, or t
gggcgagtcgtagctttagacaagcggccagccttgacacgtgacccaagccccagcttcgcgcagggatggagccggaagaggggacgcccttgtggcggctgcagaagctgccggccgagctgggcccgcagcttcttcacaaaataattgatggcatttgtggtcgagcttatcctgtgtaccaagattatcacactgtttgggaatcagaagaatggatgcacgttttagaagatattgccaaatttttcaaagccatagttggtaaaaacttacctgatgaagagatatttcagcagttgaatcagttgaattcacttcatcaagaaactatcatgaaatgcgtgaaaagtaggaaagatgaaatcaaacaggctctgtcaagagaaatagttgctatttcctctgcacagctacaggattttgattggcaggtaaagcttgcactttccagtgacaagattgctgcattacgaatgccacttttaagcctgcatctagatgtaaaagaaaatggtgaagtaaaaccttattctattgaaatgagtagagaggagctgcagaatctaatacagtccttggaagcagcgaataaggtggtcctgcagttgaaataactggaaatgatgaataccagtcctatcagattttattgctccaacttatatggcagagtgaatactgcgtgttcagaaaccttgtgatgtcttgactgttgcaccaggctgagaaagcagcaatattgatattataaagataaaaatttatcaacattccttaacaggaaattacatggttgagaggaaatgcataaaatgaaagatgaaaaatctatagtagcagtttatattttcatgattgttttgcctcatttattaaatatttgagaaatctttggagatacatagttttattgaaagctaaaaataggttctaaagtaatgtaaaaatataaagcacaaatatacttgaatattgcttaaagaattgtgtgaatagcaacatatattatggatatatactttcctgagatatttgattaaacgctagttacagacaaagtatttatcctcattttgttatgtttagagatatccctgtccttttcccttatatcactaggcatatatagtttgtcgttaatatatatcttcaagaaacatattttttatcatagatgataagactagctcctagttcttataaattatttattgatccctgcttgacagatattgtgaggtgctatgaacatgcnaccttccactatcccgtctattcctcgatagtaactctttacactttctaacgctctctatctcttgacgaaaaccttctttttccgttattatatttgacggcctgttgtgcaatttagttttttttttactcttttaatgatacgtcttatgtcataccgccttgattgaaacaaaaaaat

SEQ ID NO: 554454 - DNA, 176 bp, Homo sapiens
cgcactatagaaccaagctggcacagacagctctgtacagggacattaagcttggatgggcacaaaaggagcagcaggtgtatactgcgccaggcaccaagctgcagatcttcgagccggagctggcatagagcactgcgacacgctcaatgtcagcctagcattgagccaggggg

SEQ ID NO: 554455 - DNA, 1405 bp, Homo sapiens
  misc_feature (760)..(760): n is a, c, g, or t
  misc_feature (762)..(762): n is a, c, g, or t
  misc_feature (805)..(805): n is a, c, g, or t
  misc_feature (809)..(809): n is a, c, g, or t
  misc_feature (815)..(815): n is a, c, g, or t
  misc_feature (841)..(842): n is a, c, g, or t
  misc_feature (844)..(844): n is a, c, g, or t
  misc_feature (850)..(850): n is a, c, g, or t
  misc_feature (853)..(853): n is a, c, g, or t
  misc_feature (856)..(857): n is a, c, g, or t
  misc_feature (871)..(871): n is a, c, g, or t
  misc_feature (885)..(885): n is a, c, g, or t
  misc_feature (889)..(889): n is a, c, g, or t
  misc_feature (901)..(901): n is a, c, g, or t
  misc_feature (905)..(905): n is a, c, g, or t
gggcgagtcgtagctttagacaagcggccagccttgacacgtgacccaagccccagcttcgcgcagggatggagccggaagaggggacgcccttgtggcggctgcagaagctgccggccgagctgggcccgcagcttcttcacaaaataattgatggcatttgtggtcgagcttatcctgtgtaccaagattatcacactgtttgggaatcagaagaatggatgcacgttttagaagatattgccaaatttttcaaagccatagttggtaaaaacttacctgatgaagagatatttcagcagttgaatcagttgaattcacttcatcaagaaactatcatgaaatgcgtgaaaagtaggaaagatgaaatcaaacaggctctgtcaagagaaatagttgctatttcctctgcacagctacaggattttgattggcaggtaaagcttgcactttccagtgacaagattgctgcattacgaatgccacttttaagcctgcatctagatgtaaaagaaaatggtgaagtaaaaccttattctattgaaatgagtagagaggagctgcagaatctaatacagtccttggaagcagcgaataaggtggtcctgcagttgaaataactggaaatgatgaataccagtcctatcagattttattgctccaacttatatggcagagtgaatactgcgtgttcagaaaccttgtgatgtcttgactgttgcaccaggctgagaaagcagcaatattgatattataacgntnccccacccccccccccccctccccaccccctcccccccccccncccngcccanccccaacccccccccccccccccccnnancccacngtngcnncctacactcccacnacccctcccccccncccnccaaacatcccncaanccctcgcagatacatagttttattgaaagctaaaaataggttctaaagtaatgtaaaaatataaagcacaaatatacttgaatattgcttaaagaattgtgtgaatagcaacatatattatggatatatactttgtgatatttttaaaaaataattttttcaaagaatgtataagctgcatatataactcaggagattccatgtctttctcatatttcagaggaaagattataaaatataaaatttcttagagaacacctctttgtcagagataaacaagaacaaatactctaaacttatgtgaacagttttgagtttatgaattctagaaactaaaatcaagaatacagaaaaatgaaaataacattttacttctgcgcttctatgtttgggaaacattgctctgataaaaaatagctgtcattatgcagtgtgtatattcaaatatgagataagactatgtacacatccacttttgttaataaactcaatattgaata

SEQ ID NO: 554456 - DNA, 272 bp, Homo sapiens
gggacagggggaggctgtctggtcagcactgtgtatatcgaaagaacaaggactagcctaaactacaagcctatgaaggaccacaggaaaagagaacaaaccagactctaaccaggccatgcgctagaaatgattgagtatacaacagaaaataggtttctgatgtctgacgggtgcatggaaccaggctgtagaagaaaagattgaatggctggaaagccaccacgatgctgacatcgaagacttcaaagctaagaagaaggaggaggagg

SEQ ID NO: 554457 - DNA, 191 bp, Homo sapiens
  misc_feature (35)..(35): n is a, c, g, or t
  misc_feature (75)..(75): n is a, c, g, or t
gcaggccacgcaggcggggggggggggggggagcnggggtccgccccgggggggccagggggccccgaccctgcnccaggaaacgaacaacggccagcagggggcggcagagccagcaggagcacgggacatgcgggcagaaagccggtttctttgtcagtgtaaggccggggtaggacaggcggagggcc

SEQ ID NO: 554458 - DNA, 883 bp, Homo sapiens
ggaggagaactagtttcgagtttttttgtggtttcttttttttaaaaaccctcatcactaaatggaaacatacaaaaatagtcaacccacttctacaaaatgccagtataaggcgggggctctcaaacccaaagtgatgttgggattgttaagggtgaaatttttagttgggcgggattgaagcgccaaatattgagcgacaagtttgcagccactctaatctgcctgtgcaacgctccggtgaacaccacgtgatggactacaacagatactttctgacccgctacgactgccgctcgaacaattgcttaaagcgcagactccaaattatcacctcctggacaggcttctgcacaaccgacagcgcgtcctacacatcttacaacactacatcgcttgattcattcgtcgtctcacatacactcacagtgagctcgtatgaacacacaatattgtgactattctcacaggtatgtattactactatatataaacacactactcgtggcataaacacccactaacgcaatacactcacacataactatacgtctatatatatcgacctcgcatacgtatattcatacgaggaaataaaatgagtgtatgctcatacggacacataccctagcgaataaaccttcataagacggagagctatatcacaactcacgcgacgagttgatgaataacaactccccaatcgcaattcgagtcacgttaccaacaatagccccacctgtactcgacacaacttcgctcgcggcacctataaactgagtactcactaactggcaaccctgaccgcaccacgatccaaccacacacgatcctcaacgcaaccaaacatctaccagctcgacgagaaacaacccaccaacac

SEQ ID NO: 554459 - DNA, 160 bp, Homo sapiens
gagctatatctgagtaacatctcagacgcgcaggaaatataaaccgtctgaactatcctgcccgccatcatcctaatcctcatcgccctcccatccctacgcatcctttacatctcagaggaggtcaatgactccctcccttaccatcaacatcaaattt

SEQ ID NO: 554460 - DNA, 370 bp, Homo sapiens
ggacgagggtacaggcaggagctacccagtacaggaagggaaggagcagggagcctggactgggaagcgatgttggtcagtgcctggaaacaatgcttttggcagaatacatgaaaaggttgttacatctctgggtgcccgtctaccgtgatgcagtgtcacttggctgggcgggatggagaggagacagtggcatcacagtggcctctggtgcgacgtatttacaacagatgctcgatgttagaggaggggtggacagcaggtcactaacagccaggaaacacacactggaatccaccgatgggttctgcaaacctgtgccggatcaggaaagtggcaacagctacagttaccttgtcaggggctcccg

SEQ ID NO: 554461 - DNA, 145 bp, Homo sapiens
acgtgcttctcacaacactctgctcatttcccaaacaggaccctgacagtgacagctataatttctatgcaattaaaagtaacaccagccagacacagttagctcatgcctgtaatcccaacacttgaggaggctgaggtggatg

SEQ ID NO: 554462 - DNA, 102 bp, Homo sapiens
ctggctctgccctgtcctttttagctggcaagtgggcaaataacctttctaagaaataattaatcagcagcacagagccataaggttttactcatatattct

SEQ ID NO: 554463 - DNA, 221 bp, Homo sapiens
ggtaactcccgatcccagggcctagccctgacacaggtggcttcccgtatcccggtgggaaaaacggccccattgcccaatcgcagggccgggtgggcttttgaacgggcctttggtggccgttgggattgggttcacacgtttccccaatccgttggagccccattgagccaatccccaatccaccaccaaagcccattccccaaaggaaggttgggcaa

SEQ ID NO: 554464 - DNA, 439 bp, Homo sapiens
ccccgaagcacactgcaacacatatatttttaatgcaacactgtgattgctttctcttagttatgtagtcacagtgacaaatttgcaagatgacaaattttatgcaagagtttggctgtttctccaatattctgagaaattctgggagtatgcaatgcacttgctgaatggagacaaacctagagcttttcagacttctttagctatttcttgggtcagaacatgcagtgtttctgaacactggaattactctgtagcattattggccatataaaaacattgaggtcaaacagatccatcctgaaactcagccaattggacttctagtttaatacctaaactagcaaagaattttagacagcaatattatctaaaaaatgactttccggaatgtattctaagggggaaaagataagagagtgcttccgatagtctcaca

SEQ ID NO: 554465 - DNA, 512 bp, Homo sapiens
taggctcggacctgaaattggcacagaaattaatattaatcaaagatctgattcttcgaggcattatatataaagatccctgcttgtttttggatcttaacacagcagagggctggtttcactggcacgatccagctatttctagatactttaatagatcttgcaagcggtaatcatattttataactaaactggaaagttagaaatgagcttttacaatatcctcatacttcaaggcagaggttccaaagttacctattccaaaaatattccttgctttctgtagccagaagtatcctttctggctcctgtgtttagtccctgcctttttttttttttttttttttgatacctatagccttctgccttgtaatatggttacttacaaataactcttctttggaatggtaaactgccttcctaagggatgagactgtatttggaattacttctcttcaccatgtctccctcttggctaacgcacagaaaacgttcaacaaaacatgtgctga

SEQ ID NO: 554466 - DNA, 554 bp, Homo sapiens
caaggtgaaggagcaagagctcacatagaagctgcagcaagttatccagagatctagctaagatcactggtaaaggcggctgcactcaacaagagattttcaatgtagatgaaaaagctttgtattggaagaagatgccatgtaggactttcatagctagagaggagaagtcaatgcctggcttcaaaacttcaaagaacaggctgactctcttgttaggggctaatgcagctggtgaccacaagttgaagccatttgtcattctgaaagtcctaggacccttaagatttatgctaaatctactctgcccgtgctctacaaatggaacaacagagcctggatgacagcacatctgtttacagtacgattgactgcatattttgaacccacagttgagacttgctactcagaaaaaaagattcacttcaaattatcactgttctttgacaatctacccaagagctcttgtggagatgtacaaggagaggaatattgttttatgcctgttaacaaacacccaatcttgctgccataaaaaagaaatgctcttatga

SEQ ID NO: 554467 - DNA, 89 bp, Homo sapiens
tcgacccacgcgtccggtcttaagctgttcttgcataggctcttaagcagcatggaaaaatggttgatggaaaataaacatcagtttct

SEQ ID NO: 554468 - DNA, 1058 bp, Homo sapiens
  misc_feature (168)..(168): n is a, c, g, or t
  misc_feature (239)..(239): n is a, c, g, or t
  misc_feature (369)..(369): n is a, c, g, or t
  misc_feature (482)..(482): n is a, c, g, or t
gcgccattggtgttgggtaccccgggtgaattctggcccatttatgggcccgggcgacggctaacggtcgtctctcctaccctaggttgaagatagggcttcctaagagcacaatgtgaggatgtacatacaacgaggggaggggactagacccaacagtgcactggnccactgcgttcattcgttataaagaatccacataatgactcatcacagtgccgaaatccgctgtgccgtgnatctccagatctttgctcctccctacgggcgaggccgccccggcatgggccctgcatgtgcgttacctttttccatttagtcacacgtccccctcctcctgcctccacacacagcctaaggaggggtcgnccgccgccggccgcgtcgcgacgggctcagcctcagcgcggccctctgcccacatacctcacaacattaatctgcctcttcttggcttactcttcgtaactcccctaacgagnatatatccgatatattatatatggtggttaccttataatatatatctgctggtctccgtttgctctatggttgttctgtgtgcgcgcattcccgacgtaattccttatatgcgagctctccgacggccgcttacggcgcctccgtctatcgtaagtccttcccttatcgtctatctctcccctcatcttctccactgctgacccagtcaattctattgccgcacccagcatctttaccgctgactcccagattccctcctccctcctcaccaccgcgccgtgcccaccgtgacgtactgcacacccaccccccgcggcgggtgatgctgtgctctcgttcaacaccttacccacaggccaatcgtcacacgagcatcgttacgaaggcttattcgttcctccacacacctcttctctttccacttctcacatacgatatctaccactccccatcgcgtgctccccctcatccctgccgccatattccttgttcgtcactctctccttcttctaccttcctccgcatctctagcccatcctatctcgaccgactcatctatcaatccattccctcat

SEQ ID NO: 554469 - DNA, 889 bp, Homo sapiens
taagagaccagacttggaagagtcagagtggccagtttcttttggggaatggtggtggtagaggtgagatccagggtaactgtgaagaagccggtcctgagctctggaaatgcgagagtaggaggggtgtcctcacatggggtgcacagtgagggacacgcagtaagacgcagagggagccagccatggttccggggaagttgaaagtgctgtcctagctggctggcccagtcctgcgtgctcctgtgtgtgtgcaggtccagcggaagggggcagcagtgctctttaacatcccccttcaggcctgcctgcatgcagaccctttgctggggcttagactggtcaaagttaaggcacactttcgttgggagcccttctagtgcccaggctggccactgagccatgggtaagggtacaggctggattaagggcggatagatggataccagcaatgttagcatagttctcctacatagacaagcagcactgtgacttctgtaagccgagggacagaggcgggagtgagcgagtcgcagcctgggttcacgtggtgggcttgttctgaggtcactttctccatagaaacccaggtttcctaggtcaacccatctttcctagggttaaccatctttccccggagaaaggggacccaggttggtgaagggggttgaaggcctgtacaactttctagcttaaaggccggacaagggaaagtgggccgtcctttctcagtaccacagctggtcggggtcccaactataattatcttcgtttttaggggcgacagatttatccctaaagaagtgccacacaaagtagatcctggagaggaaagagggtcagaagatacacacagcggggacgtgtaatagcgagaggcacggaaacg

SEQ ID NO: 554470 - DNA, 1323 bp, Homo sapiens
acagggtattttcctcagcgagccaccagaaggcacattcaccgggtggcgcgtccgtggttgggccttccgggttgccgtcaccaggcagcagccgcccctccctcccgccacagtaggtctgtgcggcctgtccggccccgctgcgttggcgcaggcaattctcccaaacgggttccactggggctgcctgggtggtggtggggcgggacgccatggttgaccacggggaggggcggggaccttcgcccgggggccccagggaccccttgatacaacaatgtcctccggaggctgggagggcatactccaggaaccacgggttgccggcccaatcggcgcatccagggggccgccttgtgatcgttcttccggccttcagagcttgggcagacattttgggctttggagttcccctggggcgcagggggggcctttcaacgcgagtctatcttttgggcctgtggacagacgcgtttgactgccatgtgggactggtacgttcgtgtggaatctccccttgtgattcaacgggttccacttttggccccacggggggcttagccgcccctaccgagccacagtgcgctcgagcacgcggttagacactctgtgtgtgtccccaggctcgtttagccggcgtaatggggggagcattactcctttgtcttctcgcaaccgggcactccctggggaggttttgcttcggcacgccatggggcaaaacatgcccccacgatgaaccattttctaaagcagccagagcccaaaattctgtggccaacaaggtgcccgctggacatttccgtggggggagttcttatcaaaaacacgggtttaacccttcacaagggggaagcctctctgtatgaaggggcctttagagaacatttttccccaaagcaagagacgttgaacgcagacttgggcgcgagatctgttcccgtgtggcaccccaacgcgtgggcgaggaacaatccatggcagaggggaggagtaaaccaccacgatgagggggaggacacataatactcacaagccggctctgcccccacagccgcgagaggcaccctacaaacacccgcttgtgtaatgggcccgcagagaaacaccatagaatatatgtttggccactggggcacaaaaacaccctttgtgcagccttgatcatgaccctgtggcaacagggcgtgaaaaacgcagagcgggccccgctgaagaccccatgatcagtggcccccccccaaatagtgggacgtaaaccaggccagccattaaaaaggattcccctcccgcagggggaccccaacgatcacactcaat

SEQ ID NO: 554471 - DNA, 454 bp, Homo sapiens
ccatgaagctatgcgtgactgtcctgtctctcctcatgctagtagctgccttctggtctccagcgctctcagcaccaatgggctaaaaccctcccaccgcctgctgctttttttacaccgggaggaagcttcctcgcaactttgtggtagattactatgaaaccagcaacctgtggtcccacccggctggggtattccaaaccagacgaagcacgcaggtctgggctgatccaaaaggaagctccatccacaagcacttgattaaccgggaactgaactgacatccgcataaacccgaaatcttcacggaaggtcccctgagcccgagcccacgccactgagacacatctgctccgtactctggactccagtccccagagcctgtcccttatctaggtgagagcctgtggctcagccatgtcagccagggaagtgtgagcccgatggtggaggg

SEQ ID NO: 554472 - DNA, 439 bp, Homo sapiens
tcctcgttctcgtcccacactgttgatggtgcctctattccctggtcaggtagtgttctttcggtctctccactggacacttagtctttctcctctactttcgcacagtgctgcctctggcggcgtgtgctgtgcctcgctcacgcttgtggagtgtggcttcaatgtactcactctttcgcgggtagcgtatctgcataaactacttggcattctgcatggcatatttgtgtcttatctctacattttacactttatttgtataaaaactcacaacattattttgcgtccactgtatttctttttacaattacctttatagccagtgatcagttttgcctacaatttaagcaaatcatcaacagtacaaaaacactagagttgtaaacacgaaggcctgattctaacaaaacattactctaaggtgatggcataatct

SEQ ID NO: 554473 - DNA, 153 bp, Homo sapiens
gcaagtaggcaaggcttagacatctgctacttttcgcacgactgacatgctgatgacctgcacgtgtttgtggcgccacactctcacaatgacccatgctggatcaagacctttgacaagtgctacacacagcagaccaaacacatcctcaat

SEQ ID NO: 554474 - DNA, 294 bp, Homo sapiens
  misc_feature (90)..(90): n is a, c, g, or t
gtgacccaaaactttttccttcttaaagggtgtgtgggggggacccaaaaaggggggtttccccccccccagtcctttttggggccaaanaaacgggggggtttggaaaagatttccctttagtttttttacccccccccccagtttgggcctgggcgctttccgcccctgggggggaaaaaagccttttttgggccccttaaaaaaagcccgatttccaagggaaaagggggttttttcccgggaccaatttttccggtggggggggttccattaaagttttttttcccttta

SEQ ID NO: 554475 - DNA, 230 bp, Homo sapiens
gtcgtctaggatcccgcgctagcggatagtgaacgggagcgacggaggatgagacaggcaggtacacagtgtgctacagagagcgacaacttgagtgaatacgtaatcacatctggaccacagcgatttcggtgcaaccatttaggaaacctctgggcccaactcgaaaacacaggaggaggaatggacaggcctctttgtgagcatgcgttcacttaatgccgctagcg

SEQ ID NO: 554476 - DNA, 1114 bp, Homo sapiens
  misc_feature (1114)..(1114): n is a, c, g, or t
agcgggggtgaatgggaacctacggatccgcggacgtgcggtgtggggcaccgcgcggggccgggggaaccgacacccgacggacgtgctgctgtgcagaacacccccgaggacccgcagtgagtcgacgtggcgccgagcgtctggcagcggcgccggagacgagcgtaccggtctccccggcacactggcgcgagtgagacagaattgcggcactcggccggcatgcagcagcggaggatcgcgagcgcgtcccagcgcggcatccacgcgcagcggcaccgaaatcgacgggtcgcgcaggcgcaactagagcatggaggacggcgatacgggtcgcgcactgggtgacctggagttcgtcacgaccatagcaccgccaacctggcgaagcaaggccatggatccccctgtgagtcacttctacagccgacaattgctctgatcatattgctgtccctcccaagcgtttggtggaccccttggacgcgtggtggacacaccatggtaccaaactatggaagactaaaccgccaccttcctctgccacctggtaataccagatttccagtcaattgccaccctgatgcgattatctacactgcggagcatagtagcacaaacaagcacacctgtcacatacggtgagctgaggatccaatggtgcgcccccggttggtacaaccttcccgttggttagacaaagttcccaccttatgctctcaagccacccttcgcaactttgaccacggccccaccactgggtgccgcatttactcggcacaccacaccttggggcacggaaactgggggcccttgcacttaggtcgcgccacatggccccctcgtgtgaattcttcgtaagcccctatagccatgttgcaaacaaacttagcaaacacgatgggagcgcacaaaacaggccccacgtatggagccgccataattgataaactagccacgggcccaactttgcctcccagagtggcacatacccattgcgacatctatcctgagccggacacagttcgcaaacacgccgcctaacgggccatcacattcttcacacctacgcatgtgtgtacgatgtaaccacgcccagtttttccactcn

SEQ ID NO: 554477 - DNA, 407 bp, Homo sapiens
ggcacgagcgcccaagtcactattattacaaatgtttgaaaacagtgatagaaagtatgtctgtatgaggggtatacttagtctgcagcatcctgtgtaaggatccccgacggaaacagcatttcctctgagctctggaaagtgtagtaggtttaaatcaggcaccaggggagaggaagagctttcctagcagcatgtgcaaaggctccatggcaggaatggagcctggacacatatgtgagtcactaataaggaataagatgcaactaaacagaggaagtgagaggtggtgttttatgaaatggtctcagggaggttggcaggaagtggaccatgaagaggctagaggccattgcagggagctggctctgtatactttaaaaaacatgggtccaggcttggtggct

SEQ ID NO: 554478 - DNA, 435 bp, Homo sapiens
aatccaatcagacaaaggaattcgtcagattttaatgcatgagattctagccagtgtctgtatgagactgtctttaaaggttgttggtatggaaaatgtttgaaagaacgtaggatttatttcagaaatacaattcaaaagagcatcttgtaaagctggagtttaacaatcctccatggctggacggcctttagagctgggctttctgtatgtgggttataccactagtttatttgaaaaagaaacgcacacatgttttttccttggaaccaagactgcagaaaattgccaatgttctagtcccttgaaaaagcggatggctctcaagcgttttttaaggtattaaactgccctttaaagtgaaaatccataagaggtcctagttgagctcttgcacactctgggaattaatgacttcattatttgggcttttaa

SEQ ID NO: 554479 - DNA, 100 bp, Homo sapiens
tcggcacctttatgtacgggtcttgcatgtactggggaggggataaggggttggctagggtataattgtctgggtcgcctaagaggtctggtgagaatag

SEQ ID NO: 554480 - DNA, 171 bp, Homo sapiens
gggcacttcagagccctctgacacatcatcttcctcatcttcatcttcatcatcatcttcttcctcttctttctcaagtactcgctcttctccacctctcttgctgcgagacgggcgggcgctggcgccggcgcgcggtccgggcctgtcccgcgggtgcacaagcgctcc

SEQ ID NO: 554481 - DNA, 445 bp, Homo sapiens
cgggtcctcctactagctccacctccgcctggcccactcccgcgtccgtcctagcgaccatggcgggccctgcgcgcccgtgctcctgtggcatcctgcgtggcctggcgtgagcccgcgccggctccagtcccggcaagccgccgcgcctggtgggaggcccatggacgccagcgtggaggaggagggtgtgcggcgtgcactggactttgccgtcggcgagtacaacaaagccagcaacgacatgtaccacagccgcgcgctgcagggtggtgcgcgcccgcaaagcagatcgtagcttggggtgaactacttctctggacgtggagctgggccgaaccacgtgtaccaagacccagcccaacttggacaactgccccttccatgaccagccacatctgaaaaggaaagcattctgctctttccagatctacgctgtgccttg

SEQ ID NO: 554482 - DNA, 765 bp, Homo sapiens
ggccgcgcggtgaggttgtctagtccacgctcggagccatgccgtccaagggtccgctgcagtcggtgcaggtcttcggacgcagaagacagcgacagctgttggcgcatcgtgcaaacagcggaatggtctcatctaaggtgaacgggcggcccctggagatgattgatccgtgcatgctacagtacaagctgcgtggatccagtgtctgcttctcggcaaggagcgactttgctggtgtacacatccgctgcttccgtgtaatgggtggtgtgtcacgtgggccagatttatgctatccgtcaggtccatctccaagagcccgtgggtggccatattaccagaaaatatgtggatagaggcgttccacacgaaggagatcaaagacatcctcgtccagtatgaccggaccctggtggtacgctgaccctcgtcgctgcgagtccaaccaagtttggaggccctggtgcccgcgctcgttagcagaaatcctaccgatagcccatcgtgactcaaaactcacttgtatatagcccagtttcgagggatggacagtcgtcacaaacacattaggcctgagacgctgagtcgctgaacaaacgacggggtggcgggaaacaaagcgggtacaccgaatgggccctttggtccataaggtggtccctatgacccggtttttctttgtgcccaacgggggaaaaaacctggccgggtcccccatatatggaggccgcaaaaatgcagaaaacccggttccctgatatc

SEQ ID NO: 554483 - DNA, 299 bp, Homo sapiens
actgagaggcataattatctgaatgcattagcctcattggtcaggctgttgtgacggaaaaattcatgcaagatgcatcagatgtgatgcagctttatgttaaagacccagacagactatcaatgatatggaagatgatgatcctcagatctcttacatgatctcagcatgggccagaatgtgcaaactccttggaaaagaatatcagcaataccttccagtggttatggggccttaaatgaagacggcttcaattaagcccgaagtagcccttttagatacccaagacatggagaata

SEQ ID NO: 554484 - DNA, 147 bp, Homo sapiens
ttagaggatcccgcgtggttcttgcagaggcataaaaactggcacacagtctgttttcaggaaatcttacagaatggattgaactttccatcaggcacacactttcttcagctcttgtccttggcgtctctctcaggagacagcggg

SEQ ID NO: 554485 - DNA, 420 bp, Homo sapiens
  misc_feature (420)..(420): n is a, c, g, or t
ctctatcagcgtctgaagccctgtcagatcttggcctgtaataaaaaagatggcgctgatgttccatatacacgtcatcgcccatgaatgtacatgtgttaaccatctatcaccatagaaagtcgctagtccagatgatcctcgtatggtaaggcagcagcttatatggggaacaacgtgctttcctaagctatcatggctcatgaacacacccatgatcatactggatggaatctcttgatcaggctcgacttactacgatcctggatactcagaatcgaccaatcaatgataatcagtatcaccagcggatagtgactatctggtgctaccgggatgcctcgtaagagggttcggaattaatacactggaaccatagtagagctcaacgaggcggtctatagctctgtggagactgcn

SEQ ID NO: 554486 - DNA, 965 bp, Homo sapiens
  misc_feature (328)..(328): n is a, c, g, or t
gggatgggtcagtcttgtgatcccgaggcaatgaggaagagcatgagggtggagatgagcattcaatatggaaagcatggctacgtgtaggttactgcacggggtaccaagttccttggacacatgtgagtacgtcggtagaaaattggctggtcctcgtagcataaaaaagaattggcgttataaacttgaagatcccattggcactgtgttgaggttgacgagcgtgcatggttaaattagcaccagacgttctcgtcccagtgcaggggccttgcaccaggcagcctgaagagtaactcaacgtgtaggatagcgcaccacgcgnaagggacgaggtaggcttggtcacggtgtaggacctggtagggaatgcggatgtgcttgaggctaagtaagaactcgcaggaatgttagatatcttacattaaaagtaggaagtcgtgagggtgcggagtattggtagggggaatatagaatgaagtggagtgacattatattcaacaggatcgttaatatctcggggaggacaaagttatgctaacagtgcgaggttaaaattgttcgaattgttgatcttaagggcgacttgggaggtgtgcgagtgggatgtcttccatttaatttctgaaaacctataaaatgtgtgcggtatctaaagaagttgtcttctacagatgaattaaagcgttagactacgttgggggggataggcggttcaaacacgggggggaggaatggaaatcgtggatacgggggaattggcattattcaccattggaagtgaatcttggggtttgttgcataggtggtcacacattgttgggagcgcaaagataactaactcctcaattgttgtcctagaacatggtcttctggggctttcacgatagggggtagagagacacattttgggcaactgggggtcaagagtaaaagaattggctctcaagaaggtataagaa

SEQ ID NO: 554487 - DNA, 253 bp, Homo sapiens
tctacaggatttacgtccgtcgaccgctcgtccgtcgaccgctcgtgaccgctcagataaactggtagccccccgtcaacactcaggaaagaagcataagtgcttcagatgcacgggagataaatcaaaatggactgagggtcttgaacctagtaccataaataaagtgcaccatgaatggaggctataaaaagccgcttgcccaaaggctgaggtttggggagaaactaccatcaccacccagcggtcgacg

SEQ ID NO: 554488 - DNA, 846 bp, Homo sapiens
gctgcgttcttcacagaggctggttcgatccattagcaccaatgtccggagaaacctggccttccacacactcagccacggaagtcctgctcaaggagttctccactatctcctgaggccagcgcctacctgagcagcgctctgactgcccttaccccatgacggatcatggagctggacgggtggacgcgacggcagacgacgggggctgcccccgacggttcggacgacgacacagcagatagccaaagttctactctgggtgaccgacccgcagctatcaactgagacgctatggggcacgcgacgcggagccggagacgcggtcaacggctcaagtgggaactacacttgccttatacatctatcgtgagagaacggaggacacttgagggaattgaggggcagcaaatggattggtgcgctgcacgcaacgcgttcgcctttcacaacgaggaaacaacattgatttcgagaagcgacacccattaatccccacgaacgatcaggttagcatatccccccttaacaaagcaaggaaccccacttagcaacacaacgttaccttctccacacagatccccttttcgaaccaccgctttaacctcaaaaccagcctatgagttaacgatgctaccccttagtacccctactatctttgggtaccgagtcgaacggcctttgtgctgaccgaagccaaccgccacgtccacgaggtgcggtacactgagccaaatgtgaccaccacttgacaccagcgttagccgtggtgcctacattcgttgaccgtaggcagtcacttggacaccaaccactgactagcagcgtcactccaagactactacg

SEQ ID NO: 554489 - DNA, 205 bp, Homo sapiens
tctgtgacttctgctctggtgacttcgtctgctgtctgcctggcctggtcttctatatgcattgctagacctgtccctgtgagagaactgacatgggatgatgggtgtcagggctgcttcaggacgtgcttcaaaaggcaacggccctgagtccctgcggtgatgaggaaggtaaggaatgcggagaagggggacacgccaccct

SEQ ID NO: 554490 - DNA, 970 bp, Homo sapiens
gcagaaattacccagtgatcttctcattgcatcttacctgtgaccctacagttgtgatttgccctgttgaactggtaagtgttatgcattgatcacgtagaacagctgggtatctgctgaatttctcctctgtaatgtcatatcttcaccttgtggttaatcctggagtattcttacatgcgcaaggtaatatatgcagactatgtacatatctctactccccatcgagaccctcgaaattgtatttcatttctgcttgtactcaacataaaccatggattccatggctttattctcattcagtgagttcataatcttcattaattattcgttcagttcacacaaacctttgttctaatccttttaacgcaaatgttatattttgacaaacttcagaactctcagcgagacacacgaaatttactaatgatgagctacgttaacaacattcagaattgttctcgggaatactgtattgtcccaccgaaaaatttggtgtgacaacattttctctaagccttgacactttgttcaacctaattaatctcttttatgctgccccccattacctccttcctggatcccttggttctaaggatctttcacaataattgcaaaattactcaagcggtaaccttctaaaattaaccaatgcacctttttttaatttcaagtcttaacacaacttggtctaccagataagtgattaaggtctatcgaaccattcgagtgcccgtcttcctgtaattattacttaaccactaaagaattgttcggttactttctacccattgatagattataaacaattcgcaacagtatcacccctctcaaacattatatcttgggtatatcttaataaaattgtggttcatacacactcgaagggacttattaacacccacctgggttttcaacctccccttttcatataatcctttcatctctttataaataaccctataaagcg

SEQ ID NO: 554491 - DNA, 859 bp, Homo sapiens
gggcccgtcccagtgacgtccgggagttatttgtgtgagtcccctggccttgggtgacgctttcttgggcacagtgggttcaaagtcaggagtggttttcaaggatgttttctggcgacgttccttggtgacccgcagagctgccccccgccatgggaagcagctggcttctactgctcagggtgtttattcctgggccttcagtgcctattttgtcgccggcctatgtcccccgtattggagttgccacccggctccaccattgcacgcacagtttgctgagctgtaaggaaaagattgatcgccgtttctggtaaaaaagctggaagatggccctcaattcttgaagtctggtgatctgcccatgttgatatggttcctggcagcccactgtgtgttgagagcttttcagactatccacccttgggtcgctttgctgttcgtgatatgagacagacacgttgcggtgggtgtcactccaagcacgtggacaagaaggctgctggagctggcaaggtcacccaagtctgccccggaagctcagaaggcttaatgaatattatcccttatacctgccacccccaacttcttaatcaagtggtggaagaagcggttctcagaactgtttgtttccattggcccattaagtgttagtagtaaaagactggtttatgataaccatgcatcgtgaaaacctttacgaaggataggagcaatgttttgtggacccctttggttttcttttttgcgtgtggcagttttaagattattagtttttaaatcagtacttttttatggaaacaacttgacccaaaatttgtcacaggattttgagacccccctcaaaagtttaatgaga

SEQ ID NO: 554492 - DNA, 411 bp, Homo sapiens
aggaccgcggttaagtcacgaggtacaagtagtcagagtagatagacgtcaagacctatcatcagaatgtaatcgcgggtagaaaaaatggaaggaagggaactcgacgatgtaaggtcatgcagccttgtaatcagatacagactctgacttatctagctgtatttcagttgctatcgtcctgttactttgtctactacactacatccagccagttgtctcagtaaacaaggcgttcatcagtgtcaacatgctcctctgcgttggtgcttctgtaatgtctatactgccaaaaatccaagaatcacaacccagatctggtttgttacagtcttcagtaattacagtctacacaatgtatttgacatggtcagctatgaccaatgaaccagaaacaaaatgaaccaagtg

SEQ ID NO: 554493 - DNA, 81 bp, Homo sapiens
cagcctgttcccccccccccccccctcaggaaagcccagggaaactgtagttttagtggcaaataaaaacctttgcctcca

SEQ ID NO: 554494 - DNA, 360 bp, Homo sapiens
ctaccaaaattgatagcagggtctgaatagatacttatacacccatacccatggtcagaacagcattattcacaataagcaaaaggtaaaaaccaattctggtgtccatcaatggttgaatgaataagcaaaatgtggtctaaaaatacactggaatgttattcagcctcgacaaggaattctgacatatgctacaacatggatgaaccttgatgacattgtgctaagtgaaataagccaggcataaatggacaaataccatatgattccacttaagaggtacctagggtagtcaaattcatagagaaagaaagtagaatggcgattgccagggcctgggggtaggtatgatgaaggacg

SEQ ID NO: 554495 - DNA, 461 bp, Homo sapiens
ttttggtcacctgcactactacactggatccattctgtgctctggggtgtaagtgtgtgtgtgtgtctgtgcgtgtgtgtaatttcgggaacgggtaacacattcgtattacctctgtttggacacgatttttagtgacagagctaggaataacaggtggaaccttctaagttttgttgcttaaatatcaggccccctcagaattcaggactgatggtagaggatttaccagtttacagggaattcagatattctcttctctttctaggaaagccaaattgttggtcattctgcccccaacatttacagaagcagtttctcggttttatttatccaagattcttatgatgaatagtgttaatatcgcagcacactatgggctgtgatatgcctatatcacagagaaggcaagctgtggtgaagtggaataaatgaaaaactgtctataactctgcttctag

SEQ ID NO: 554496 - DNA, 655 bp, Homo sapiens
  misc_feature (313)..(313): n is a, c, g, or t
ttgtctgggtaaagccacttttttcaactttgccttttctctatttttccggcttatcaatctgggtgcccaggtggcatgcccgcagaacctaaggcagaaagatggaaagcacaaaggctaacgaggggatttttatgggtagttaaaagctttgagccaacccaaccaaacaaaaagtgaaagaaaatagaaaaaaaattagaaaaatatcaagaaagtatattcaagtgagggcttcctttgcggggaaaccaaaatgccacgtttaggccacatttgagggcgaagtttaaataaccaggacccattnttataatggggaaacccccaagggccagaggaagagaaattgcttgtcacaaattttgggaagctttaagtgcaaattggcagccctaaaagtaagagaaagtcaaacagtgactcccaaaaagcttggagaaaaacacacgtggcgatttcctcagagatttttgaacccagaaatgcccattgagtcagcaaatcgcattactggggtatatatttcaaaaggagtataaaatcattctatttataaagaatacatgccacacatattgttcaattgcaggccctatttaacaataaccaaaagacatgggaatcaaccccatatggccattcaggtgac

SEQ ID NO: 554497 - DNA, 312 bp, Homo sapiens
tcgagtctcgtcgtagtgtgatctgtcctttcccaccactagccctctttctctctgtgtggcaaacatttaaaaaaaaaaaaaaaagaggaaagatcccaagtcaaaagtgtggcttaaacatttttggtttctgggtgttgttatggcaagttttggctaagtgatgattcactcatttggggaaattctggcacggtatccaagttattggatcgtgggcgtgtggcccgtgggggagtccactttcctctctctctctctctctgttccaagtgtgtgtgcaagggttccgttcatctgaggagagtc

SEQ ID NO: 554498 - DNA, 203 bp, Homo sapiens
tctataaatatagaattaaagtcatctgcaaagagacgtatttagatatccctcttcctatttgaataccctttatttctctctcttaccttactgccctggacaggacttccagtactatgttgaataggagtggtgggagacagcattcttgtcttgtgtcagttttcaaagggaatgtttccagcttttggttatttcag

SEQ ID NO: 554499 - DNA, 1190 bp, Homo sapiens
cttcggaaagactgtccacacacagatggataatttagtggccttagctacaggagagaaaggatttggctacaaaacacagcaaattccatcgtgtaatccaaggcacttcatgcatccagggcggcagacttcacccaggggcagatggcacaggcaggcaaagcagcatctacggtgagcgcttccccgatgagaacttcaaactgaagcacatacgggaccatggctgggatgagcaatggaacaacgacaggtcacaagacaccaacgtgactcccagattctatcatcaacagacaagtcaagacaagccatggacatagaatggcaaagacactgatggatgtaaggcaaaagattctagcaggagcatggagggatagggtgcagagacagatggaaagacacacaagcacagacagaccgggataaaccacctgacaggatgtgatacatcgcagactgcgaacaagatcgaggatggaagaagcaccattatgacatacgacaaaggatcgtaagagcacaggaacatctatacttagaagtgaccgtaatgtagcaagcactgatagtcacgacaaagggaatctgaaactgcacatggacccggtgacatggaaatcatgagtgaagacggaacaaagataacaataaaaatacacaaagagacccatgagacataacttaaagataaaaaatatacttaaaaaattgaacaataaataaaaaaatgtgagagataaaaaatgaaaaaagaagaagagaacacacagaggagacaagacgaacgcaggcagaagaagaaaaaagagaaaaaaaggaggagacaaaagaaagaaataaaagtgaaacacaaagagaagaccacagatagatagaaaagagagccccaaaggagagaaaatagaagacacaaaactaaataaaactacataaaaaaaaaaacgtaagaacacatcctagaccacaacaaaaaaataaaaaaaatcaccatcaaatacatcataacaacaatatatgagaagatcataataggaacacaagagatatattaagttcgaaaataagaaaaggaagaagaagaagacgagacacacatcaccgatgatgaaagatagtaaggacagaaagataatgaaaagaaaagttagcagagtgtagaagtataataaaagtatgtataa

SEQ ID NO: 554500 - DNA, 173 bp, Homo sapiens
tcgagatatagaacaaatacatgaagagctcagctttaaagatgaggaactgattgggcccattatagaataaactagaaaaggtggctgtgagaggacgagataaaaaactaaaacctgaatatgatctaatgtgcaaagtaaaatcctgggttatagatccaagcgtgcca

SEQ ID NO: 554501 - DNA, 236 bp, Homo sapiens
tcgtttgtgcagtcacatcgtctgggctctcacgttgtccgggcgttgtgcatcttagttgtctgttcattgcagtctgtccctatgcattctttataactggttggccttacagccacaccgaggatccacccactccaggctccagttagaggccccacgctttccctgcgccacgcacatcgcgccatatggctcccgagctcgatcttcctaatcttggtcttcgctctttc

SEQ ID NO: 554502 - DNA, 1044 bp, Homo sapiens
ttggaacacagagtgtgtagggaagcactttgtaaactgtgtagcattatataaatgggagtattatttttatggcccattctcttcctccagtactgttaaggagtaaacaaaaaatgtatggattgcagtaatgttgcatttgggagaaattaaaatatgctcaccattagcaagctcttagaaaatgtggaggaaatttgcatggatcattttgggagctcagaactgtagggggtgcccaaggtatctggatgcaccaaatcacagtcccatccatgctgccaactagctgtcaggaagacatggatagttcctgccctttggtagtgatggaagtataggcgattacagatttttttttccatctcctatgggatccacagatatccggctttaaaatccataaacttgagccctaaaacaaacaaacaaacaaacaaaacacagcaacaaaaaaacaaaacacaacaaaacaaacaacccccccccccaacaaacacaaaagccggaaggggggatcctgagaacggcggaactcgactacagtaaccccccaccggtcaacacgcacacagtgctcacatcacagggctctcggcgctcacctgttggaaatcgccttgctacattcttccccccggtctcacccacctctcctctcaacggcatcggtcggaaaccactcccccacctggcccctctccacctccctttctacacactccccggagcagcactcactctactcgaaactcggtcagagcgccctacaacggtgtgacgacaccctgtccagcgccgctgccctcctagcaaacccctcgatcctgccaccttggaccctctgctcctacgacctcgccagcactacccctcgcaacaccccccaccccaactcccctaccacgaccctcagcaccgccatacctacactactactgacacgactccaccacaacccgcctcctcgcacccgaaagcgagccctcccaacacccaacaccgctggcgtgacacgacccgacccccaactcgccaacc

SEQ ID NO: 554503 - DNA, 283 bp, Homo sapiens
ttgcgttcatagagcccggggatctccaaggagcagcccagttttccctgtaagaacccaaaggtcttgtacagagttggaattcggcgaaaaacttgctccaacacgccaaatctgccgcatcctcaataccccaccctcttccctctgcgcttactgcccacacccctactcccaacttgaggactccccgcccccaccacgctgacagtctcaattccaaccccttggatgtgaggaagtgtctttgcgcctgaacgcgcccagcacggcgaggccaaca

SEQ ID NO: 554504 - DNA, 764 bp, Homo sapiens
aagacccagcccaggacccctaacaggggccctctcagccctcctaatgacctccggccgaggccatgtgatttcacttcgcactccatagaacgctccgtcgatactagcgcctactaagccaacagcactaagccatatcaccaatctgatggcgcgagggtagacacggagacaagcacgataccaagggccaccaacacaccacactgcgccaaagaaggcctatcgcatacgggataatcgctatttgattacgctcgagaagatttgttttcttctgcaggattgtattctgagcctgtttactcactcgcagcctagctcgcctaccctctccaatgtatggcagggctatcgtggtgccctcaagcaggccatcgagcctcgcgcctgaactcgcccgtacgaaggtcccaactccgtaaacagcatccgatgatgactcgcttcaggagttattcatgtcacctgagctcaccatagtctaattagaaagcgacctgaagcgcaaagtagatgtcgggcacttgcttatgacaacttcttactgggtctctaatttaagcctcgtagaagcctcagagtactctcgagtctcccgttctagccatggccgacggcgattctacggctcagcatttgttgtagccgcaggctccgacggactgcacgtcattatgggtcagtttactcattacttgttgcatccggccagtaatatttcaccttcttccaaacatcaatgggtttcaaagcgcgcg

SEQ ID NO: 554505 - DNA, 762 bp, Homo sapiens
  misc_feature (89)..(89): n is a, c, g, or t
  misc_feature (441)..(441): n is a, c, g, or t
gcttgttctaggccccgcggggtattcttgagggcggccccccttgttgcaccttgtgcgccccgcctctcggtcagatcccgcgcggnggcccccagggttggcttctgtctgttgctagaactcgcacgcaggccatgtttgtggcgcgccgcatgcgcccccgcgtgtggagagcggctcgcgattctgtctgttctgtattgtatgtcgcctctgtgtgcccctttcaccatagcgcgctgtggtgtagctatttgcgcgctcatagtcgctctcgatctatctcgctgcgggtaactagatcacccgcggctcttggatacgcggagacacaacgcctgtcacgcccctgggctccgcgcgctctatcgtcacgcatcacggcgctcgctcgcccacgcacaaatgcggcgtgcacacacaccgaacgctacactntggtgcgggaccacccgcgcgccgttgtggataacacactcacaccccgctggagaacacacccactgtctcaatatcttcgagcgctcgcacgcacgcacacgcacacacaggcgcacaatacgagaggtggggacacaagcgaccaagataatgttgttcgacgagcgttgttcgtgtcacaccactactatgctactattttctctgctacccctctccctggtaggcgctggcgaacaaccagcggggagatgggccacccatcacgccaaaataggtatttctatacacggaaccagtccgacaatagcagacaca

SEQ ID NO: 554506 - DNA, 244 bp, Homo sapiens
  misc_feature (112)..(112): n is a, c, g, or t
  misc_feature (161)..(161): n is a, c, g, or t
  misc_feature (178)..(178): n is a, c, g, or t
  misc_feature (202)..(202): n is a, c, g, or t
  misc_feature (210)..(210): n is a, c, g, or t
  misc_feature (228)..(228): n is a, c, g, or t
aatttaaaagatattattattactatcaattatatattgaatttattatattttggatatattaggttaaataaattattaaaattattttcaccttttttcctttttttanatgttactacttagaaacacaaacataatatatatgtgatttgtggtancaattctactggacaantccaccttaagagttaggtagggnagggtacnttaaaggctccagtgtcnggtgaccactaccagg

SEQ ID NO: 554507 - DNA, 975 bp, Homo sapiens
gtcaggggatgtggaggatgtatgatatggatagccggccactaggtcctatccttcatggtcctgcttactcatggcatgctagagtctgagaactgtagatgtttgatcggcctggaccttgggctcacatgggtgtcgagggatcgacgcgagacatccattgtttggagtaaatatcatccgtttctttatgtaaccagtcgtgttgcgagggtatgttacatgagggcgttctagaaagatcgtggcaagatatacatcacttggaataggtattgcatatatcaagtgtacgtagggtaaataaagttagcagtattggtatgtaggaactgggataggtggaataggaaatgtatacctctgggacaggtggttcggcagggaggctcccgatatgactccctttctaactaccctagattcatgaagactagccagaaatctcacgtataacatctcgctcgcaggatgtgcttgggacccactgctggaaattctcatccatgatcatacttgacatgagcatagggtgtgcctgatgtagctgatcatgtctcgactggggaagcaaggccattagcaattgatccgcggcgctgtggagatggtttatctccctaaaactttttccaagcctggcgggaccggggaacctgttcgtgtgtacagggatgcgttttgcaggcttgctacgggcatgtggaggtttagcacacaggctgagaatggttcggtagaacaggtcagatgggaagtagtatgctaacagatgccaggtgtatgtgcgttgtcacttcacttctatgggagggtcgttaaataggatcctagggatgggttgggagtttcattgtgaacggacgactagatattccttgccaataagattaaagaaggtggcaatagcgatagggggtacataaggggggcggttaatgaacaaaggggcttcgggtggaacaaagagta

SEQ ID NO: 554508 - DNA, 1140 bp, Homo sapiens
tggcagtactaccacggtttaaggtagcgaggcatgggtggcgtggaataaattgaatgacatgccaggtggatggtgcagctgtgaagctcgggctgattccccctctgtacccagaaggttggtccagagggtgtgacccagttaccctttaacccccatccttccagtcgggtgtcgagggcctgaacgggacccagggcaagcagctgtcgcaagccctattgtattcagtcttcagctataactcttagagttgagacgctaatgttcatgatctcctggccttgggatgtccaatgggattatctggcgtcaggctgtaaaagtagctcgagccatcctgcccattcctggagtgtcctacatggtgaatagctgcaggagctcagcataggacccagcatctctgggaggatggtcacgcgtggatgattgtcaatgatggcatccaggcaattagctgagccaacagagccatgtggacagcttctggccaggagctccccgtgtggcatctgggagccacagtgatgccagaccagctgggtcaggcgtagttccaaattccaaagaggatgggcttgtaaaccttcgtctccctctactgttagccagagagagcacatacgtgtgcagcacgcactgaagacacacattcagtattccacgcagacatgtatctctggtgccatctccatccataccattctctgaattcttggaggcgggcacactaacgggactcaaggccacggaagcatgtatagcttaagctttaagcctggcaaagctggacgaatccgagcataacctcggtagtcatttgaactcccagggaaaaagcgcaggagagtcgcagaccagaaccctgctcgtcacgggaggcattggcttcacagcgacgagttaattagtaaagaaggtgcgtgggcgaaagtgcaacatgagggccgcgagtagatgggtatatcaaggtggaaacattgacagggtattcggaggttggtgagacatagttggcggaagttaagggaattcctgtgggcattaactatattgtagaggagatgaagaagaaacatggagcggacataataaaagtgtgggcgaaatagggcagcatgtatagggatattg

SEQ ID NO: 554509 - DNA, 117 bp, Homo sapiens
tattcactcttcagatgtggagtatgaaacgtaaacactggaactccatcttagctcctagaagccagtaagtcacatcattaatacatatagtagtactgagctcttcccacgagg

SEQ ID NO: 554510 - DNA, 740 bp, Homo sapiens
gcagtgcctgctgccatcacgctgtgtggctagggctgcacacttcatggagccggtggaagccccgtccctcatgagttgggactggagccgcaaaccgctgctgcagacccaggccttctgctctatggagcaggcaggagccccaccctcttgggcagggctacagccacccaaactgcagctgtggatccgagcctctctgctcctgggggagccgggaacaggcagaatttgcccttccagatgcagctgcagccgcgcaggcaggagccaggacaagtgggagccctgcctcttccaagttggcggggtgggagctcccaggtgcagctgtggctgcccccccaggcacaggacgagggcatctctgcagcctgcaccatcggccatcccaggaaggacagccccttcaccctccatccctgcaggctcaggggtgtctgcttccactgcctggcctctctccactccagcaactgctctgatcttggaggggagtcggagccaagacctgcagccatgaatggcagcaggaggaagggggtggggtccccagtaaggcccaccctcaggccaggagggcctgaattctgggggctggctgccagtccctctgaccagagtggaaactcgtggagcttttctgggctgcaatggcccaatcagcacacacttcttcccgtgaggtcataaaaccctgggctcagcagagcaggcagagatagcagagatgagag

SEQ ID NO: 554511 - DNA, 341 bp, Homo sapiens
catcgccgatttgtacggctttggccacggatagtccggcgcgggatcccgcggtgttggctggggtgagcggaatgctctggagcgctttactgtccagcattgatggtcgccttctctattgcgttgtcggtgagtttccacttggcaagcagggtcttgtaagtgccatccgcgatcagcgcatcgagtgcgtcggccacagcctgttgcaacgccttttccttgaccggcagcgcgatacccgtgaactgcgtcgcgaaagggtcaccgaccggcgcgtaggtgccgggctcgaggtccatcacataaggcagcgtctcgttaccctgcacggcggc

SEQ ID NO: 554512 - DNA, 967 bp, Homo sapiens
  misc_feature (99)..(99): n is a, c, g, or t
  misc_feature (346)..(346): n is a, c, g, or t
  misc_feature (349)..(349): n is a, c, g, or t
  misc_feature (679)..(681): n is a, c, g, or t
  misc_feature (873)..(873): n is a, c, g, or t
cacattcccgacttattttataaatgtaaatttttagtagagacgggttttgcatgttggccattgctggtctcaaactctggacctcaggtgatccgnccgccttagccttccagtgtgctgggattacaggcatgagccacggcacccggcccataatgactttatatactagaggtgttagtgatttgaatgtccccaatttgttttattttcttggtttctgaggaggaagccagtgtagttgagctccttccttttcttttaaattctgtcttctagtctgaccctcttcaggcaggcagtagaacatgccaaggtcctttttgtagtttggtattcgtantanagtctgtgtattttagtcatcacttttacttttttcttgttggttgagctattactatcacaacatactaacatctcatttaacataactcagttttaaagataaatgaagggtcatgcttaggcatacaagatttttattttagccttttttttttttgaggcagaatctcattctgttgcccacactggagtgcagtggcaacagcgtgcagtgagcaatcccggcttactgcagccttgacctcccggctcaggtgattttcccaccttggcttcccaactggctgggactacaggtccatgccactgtgactggctgatttttttnnntttttttttttttccagtacagatggggtttctccaggttgcccaggctggtcttgaacttctgtgctcaggagatcctcctgcctcagccttccaaagtgctgggattacaggtgtgagccaccatgcctggcctatttgagccttttttggtgagagtcttaaagacgtaatatgtcctcctcttttcanatagaccatacttagtagaacttaatgttttattcatgactcagtataattattaatgccctcgcccctagcaatacttgcccatcttttaagg

SEQ ID NO: 554513 - DNA, 271 bp, Homo sapiens
taactcaccacccctgtacactagactagatacttgcttccatgatatttcatgtcacttcaagatgtttagtctagagtttgtaggcctccatcctaccccaacagcaggggtggctggagagcggcggtctccacccagcctacctttaggcaacttggtggtccccggctctccacccaaccccatcaaagacgtctccttcgcatatcccactcgccctgaaaggcctgtgctcaaggggctgacgttacccatacgtcctggtgat

SEQ ID NO: 554514 - DNA, 238 bp, Homo sapiens
atgctgggactacagttcctgcagcgcatcatgcacccggctctcgaactcacgctgcttcccactgccaatcgcctccagtcgggtctcatgacggcgcttggtctcactcagctcctcccggtagatgttcatctggaagtccagctcctctgtcatgatccgcagtatgttctcagcatacgcccatcgcagcatctcatcccaatgttgcataggcgcctcacctagacatgcg

SEQ ID NO: 554515 - DNA, 268 bp, Homo sapiens
cgtcgactagaaccattataccgttagaaaatcatggttttggtgatcgacctttcctgccttttgaagtaggacgtgcacgcgcaaatgccatgacaactttaacctgcttgaaattaaccacatgattaggatgcgggtcagccgttaacgaaccgatatttgctgttctcaatcagctcgctaatcttaacgggctaaaaggccagttgattaacttagcttcaatcctacgacgaacgtaccccagcactataggctgtcgacg

SEQ ID NO: 554516 - DNA, 119 bp, Homo sapiens
ccttgttagtgtcctgggttcccatggactcagggattgttggctaaggtttctctgtgtatatatatatatatatttaaatacacatatatattgtacagaataaaaatgttttattg

SEQ ID NO: 554517 - DNA, 206 bp, Homo sapiens
agccggaagacgaaaatgacagaccccagacgacattaattggggagtaggatgtggctgagtgcttttttttagggccagactagcgaattcagtcctggaagagagtatcatatactgagacccacaggcactgaaagcctatggtagggcaatacgaaggtgacatgaaatgagagaaaaccaagattcccagcatggggcat

SEQ ID NO: 554518 - DNA, 360 bp, Homo sapiens
tagctatgcctgaacatccagtttggtttttatttgcctccttccttaaaaaaaaaaaaatttaaaggccgggcatggtggctcatgcttttaattcccagcactttgggaggctaaggcagaaggatcgcttgagccccaggagttcaagaccagccccaggcaacacagggagacccttgtctaaacagtaacaacaaaaattaaccagacatggcagcatgcacctgtggtcccagctactcaggaggctgaggcaagagcatctcttgagcccagaaggctaaggctgcagtgagctgtgatcacaccattgcactccagccttggtgacaaagaaagaacctgcttcagaaagaa

SEQ ID NO: 554519 - DNA, 1225 bp, Homo sapiens
  misc_feature (186)..(186): n is a, c, g, or t
  misc_feature (200)..(200): n is a, c, g, or t
  misc_feature (483)..(483): n is a, c, g, or t
taccgctgggtgccgcgcccctcccctgcgctgtgtgttgtgggtgtataatatacagcgcggccttatcaacaaccaccatggtgtagtagaagtgatcaccaccttcttgagcgccccctccttaataattgggtgaatatgttcacattgaatcccacccccaacatttatcgccgcagcatntttttatatagggngtgggaacaaccaccccctcatttattattggaggaacattcttccttcggagaaaaagggggaagttttttcccccccccccacacaagtgtttgtgggtgcacaaccaccagcaaaatatgagataaggccctccagaggccctttctttggttgtgtaagaaatcagccggtgtctccgcggccccccccgcgtgttaaatccgtttaatattacaaccgcgggtgttctcttctaaaaggagttttaagttcgccgagagctctcttcgtcgggtttgngcgccgcgaaaattatttcgcgcgccacccgcaagagggtttctcccaagaagattatttcccagcgctttttcaacgcccctcggcgtttttatcctctcccctctcgcccccacctagtgcccccgcgaggagggataagaggcccacactattggcccttgtctctctggagagagtgtgttttaaacccgcgcgaccgcttttatatatactggcgctcttgaccaccagagagagttttttctgtgaagagactcgcgcccctctctatatcccccgcgatgggccctctcaggccacacgctggggatatattctccgcgaagatcttttccccaagacccctcttagagaaccaggccgccacaagcccacatctctttggtgtgtgcctgtgcacatctccacacctgttgaatgaggccctatatggtatatgctcacacagttgggggagaggcccctttgtgtgctggagacacccccacaatcacaccctataattataaggttgaatgacccacccacgaaaactataggagagaaatgggtaaggccctttgtaaaaattgacacacagaagagagggggaaaccccctataaagtgggttggttccacacttgtgtatagtatagttataaggactatggccacaggagatctccaggccacaggatagtccttgtaagagtatttccaaagccagaaatgaagaaattaatctttggctccaccca

SEQ ID NO: 554520 - DNA, 1018 bp, Homo sapiens
  misc_feature (379)..(379): n is a, c, g, or t
gcctgtccgcggtgggatgttgagctgaggcctggaggagaagtagcatgtcgctggtagagcacataggctgctctgggggatgagctggtgcgttaaggaataggccagcactggcatacgtgaagtccatggtgtgggaagggggagagatgccgaggtggtcagtaatcctgactttcagaggccttgtatggtaagtcctgactctatgtgcgtagagtctgatacttcaaaaaagcttcagtggtgtgaggaaacgtcacacggagatgttttagaaatgactcatataatgtccaccacactggatcagggaagctagaaagcaccacctaatgttttttgaaacgtatgtcatcgtatcgtcattcgctgntattctctattgatttgtgcccacaatgttagatccatatttggcgtcgagggaacgctctcttgggggaatagttcaaggattcttggtgaaagctcttgaaatgaggttgatcaagggtaaagtagcgtgtgctgtccagcattgtccttaaggaggtgggtaaaaaattgaactagtcaagattagtcgaaagtacagaatcactggaaagttttgatattttcatttcaccattattgtgaattaattttttctcgtgtttgactagggaagggggtatatgagtaatgaattgaaaaacctcagcgcatagtggaagatttacaaggagcgcattgagtattagtgtggctgtggcgcactgaaaatctcgagatgggaatccggcggggtgaattttgtcaaatactctgggagttacaatgccacgacaagctcctgcttaaaccaaggccttggctaaggtaactttcagatacttttcctcctttgttgacaacagagaagggctggcttagtttattttgcccaaaagtccccttccagggctggaattgcaccacgttacgcatttacctcgtctggcctttattccccccttccatggtcaatacgtggagcattaagcaaagccca

SEQ ID NO: 554521 - DNA, 94 bp, Homo sapiens
catggatttgctggtgcagtacaactaggcttaatagggactcgaattcgaggcattcaggcctgggtaacagagtgagaccctgtcccaaaaa

SEQ ID NO: 554522 - DNA, 146 bp, Homo sapiens
ttagaggatccgtgagatgcgagaaggagcagcagaaccaggagtacaatgatcgtgctgagcgtgaagacgcggctggagcaggagatcgccacctacctgccgcctggtggagggcgaggacgccaacctctccttctcgcagt

SEQ ID NO: 554523 - DNA, 688 bp, Homo sapiens
  misc_feature (600)..(600): n is a, c, g, or t
gccagggtcagggcagatgcaggaaaccaggccaggaagctgtggctgtcatctaagcaagagacagacaatggtgacacagggaggcaagtatacccccaggcctggccacctctccagctctgctcctgacatgaggctcacccagaaggtccttggccatagggtacattggtgccagctgcgtcttcagacaggagaaaaccccagtatgtgtctcaagacagtgagatgtcaagagtcctgctctcttagccctgaattatacaaactggagatttcagccaagaaacaggcagggtctgccccacttacagctcatgtgtctgttttgccgaactaagaaagtgagggcttctctcaatttggatattcatatttctggtttatctgctagctttcctcccagaacttctgaaagcatactctgcttttgggaaacctaagatcacaataaaagtggcagacctctttatccctgtctcacaaataaatggaggcacagaatggggaagtggaggccgagggaacaaagccaactaagactgcagcccggttccctggccacagcactgagggttgaggggtgcctccagtganggctccccatccccgacttggaacacagctcatagtttctgcatgcctatttcatacgcactcttcaattttcctgaattaaaacaac

SEQ ID NO: 554524 - DNA, 387 bp, Homo sapiens
ttttttttaaaaaaaaaagggttttttttctaaaatattgggccacggggcccttttcgggggttgtttttttcgggggttttttgggaaccctttttacccttttcccttccaaaaaaaactcctgggttttaaaaagcccccccttttggggggggatcccccgggttttttttttttcccccccccctttttaaaagggggtttttttggttccccccccttttccggtttttaaaaaaaaaaaaaattctttttgaaagatttttttttaatttttcccccaaggggttggggtttttttgggccccttaaaggggggttttttaaaaaagggggggttttttgggtcccccaaaaaggtccaaaaataaaattttaggaaca

SEQ ID NO: 554525 - DNA, 350 bp, Homo sapiens
ctaacttatggaatctcttctcccttattggcttcagaggaagcatggtgtgcaggtcaagaggaaaggctgcaggctttaaaggcggactttgattctacattatatgaacaagtcatcctggaaaaagaaatgggaacttatttgggcacctttgatgattacttttagttattcctgcagtttggttcatgtgagccttttctcctgtgtttaccctttaccatctgcctttgctgtgttatattacttcatctgaagtatattcagatgccttaaaaatgtgcagggtcttcaatacgtccattctcagaaccttcatccaatcttggtgtgtggcaggtatttct

SEQ ID NO: 554526 - DNA, 916 bp, Homo sapiens
  misc_feature (438)..(438): n is a, c, g, or t
atcacaattaaaataactagagaagcaagagcaaacaaactcaaaagctagcagaaggcaagaaataactaagatcagagcagaactgaaggagatagagacataaaaaccccttcaaaaatcattgaatccagaagctgtttttttgaaaagatcaacaaaatagaccactagccagactaataaagagaaaagagagaagaatcaaatagatgcaataaaaatgataaaggggatatcaccaccgatcccatagaaatacaaactaccatcagaaaataccataaataactctatgcaaataaactagaaaatctagaagacatggataaattcctggacacatacaccctcccaagactaaaccagggagaagttgaatctctgaatagaccaatgacaggttctgaaattgaggcaataattaatagcctaccnaacaaaaataggccaagaccagatggattcacagctgaattctaccagaggtacaaagaggagctggtaccattccttccaaaactatttcaatctgtagaacaaagagggaatcctccctaactcattttatgaggctagcgtcatcctgataccaaagcctggaagagaacacaaaaaaaaagagaatctaaggccaatatccttgatgaccttcgatgcaaaatcctcaataaaatactgggcaaactgaatccagcagcacatcagaaaagttatctggtcatgatcaaagtcgggtttcatccctggggaatgcaagggtggaattccaccattattgcaaattccagtaaacattattccaaccacattaaacagaactaacaggcaaaaaccagttgaatgtctctcagtagatgcggaaaagggctccgagaaattcaaaaggtcttcaaggtaaaaatcctcaataata

SEQ ID NO: 554527 - DNA, 437 bp, Homo sapiens
gtgatctagaggatctccaaacacgcatctggatgtactccaacctcttatcgctggctgaactcacgggaatcaaatggcgtagtaccattttggagggcatggggactgtggacccataatttccgccccagcccaagatgatccaattcatgttaacgtttcaataccggtgatctgcaagctaacctgctttgtgtatggcgtcgtgtatgtcccaccagattgggaagagttatggatattctggtggggagatgaaccctagctagtgggtgtaatacatcatggactgcaggttgtggaagaaggactctgaggaaaatggcctttcctattaatgttggacgctggtcttcaaagcgatccacaatctgttagaaaggtgcctaatgggtaagaacttcgtttggattgggaaatggtttgtccgaccc

SEQ ID NO: 554528 - DNA, 504 bp, Homo sapiens
ccccccccccttaaggaagggccgggggccggacccttccctttttaatttggggccctttccccgccccccccccattgggtttgttttccccttgtttgaggggtggcttgggttgattctttttttttccccgggggggggtttggggggggggggcccaaaattgtttggttccccggggcccccgggccccccccttggggttcccttgccacttttttcttttttttttcccgggcccccaatttcccttttttcctttttaccccccttttaaaaaggggatttcccgggggcccccctttttttaaaaattgggggtttttttgggggggaaattttcccggggtccattttttgggcccgggggttttttttttccacttgggaattccaagcccttttttgggggcctttttttttgggggccccaagggttaagggcccaatttttttgcccctttcctttctttttaccttggggttaaagggtttttccca

SEQ ID NO: 554529 - DNA, 308 bp, Homo sapiens
  misc_feature (252)..(252): n is a, c, g, or t
  misc_feature (272)..(272): n is a, c, g, or t
  misc_feature (287)..(287): n is a, c, g, or t
  misc_feature (299)..(299): n is a, c, g, or t
ctttatcaaccaaattgttttgcctatccaccccatggtgccaaacccatatactctcctatcctcaatacctccctctactacccattactctgttctggatctcaaacatgctttctttactgttcccttgcccccttaatcccagcctctcttcgctttcacttgggactgaccctgacatccatcaagctcagcaaattacctagggctgtactgccggcaaaggtttcccaggacaggcccccattnatttcaggtcaaggcccaantttctttccttcatntgtttacctatnttggggata

SEQ ID NO: 554530 - DNA, 200 bp, Homo sapiens
gtcgctccctgcttcgccgccggctccggacccgagccaagccggagtcaagtgttcctaggaggaccctgttaacaaccaacaaaggcgggacggaggggagtccatgttgggggaaccttgggcagcgggagtgacttgggaccttggggaacctacttgtggggcccgcggccgggaccggagcgccttcgaccctc

SEQ ID NO: 554531 - DNA, 824 bp, Homo sapiens
caagcatgtttgaaagttcaagaagcatacagtgtaacatgtcacttgtgcttttaaaattagtctgtatcaccatttattacagttactaattttggagttcatttttcaaaatcatgttctgtgtcccagagttctttagggttaacacctagggactgcgtccagtgtacctaaggtataacagctgagggtttgtaaagaaaattttgggcaaccatttgtgacttatacatgacaaaccttcattttcacattgtttaactacaggtttccccttaaataggactgggttgcctcctattgttgtttgaaacccctggtagtttggactttttcttcagtttcttttcaaaaccataatatatttggaattccgttaataaccatagaaaacacaggttcataacttggtgggggacatttgtgaggggaacacatgtgacagcaacggggagataaactttcggataactcttgctagcaaaggttttgcgccaccagggggtacacccattttgtggggagccaatggttcccaacctctttatttcttattaggcgaacgggggacaacaaaatcaccttgtcgcccaaacaaataaatatccacattaagctcttccataaggaccccacgtggaaggttccataagatttttatattccgccacaatgtacaaaacagaatgttcttctttaaaaccagatttgtctgcaggggtaaatttcctcaaaattcccctttttcaacaggaaccaaattggcatcttgtggacgggaagaaatccgggggtgcggaactaagagattgacccagtac

SEQ ID NO: 554532 - DNA, 330 bp, Homo sapiens
gcgtcgacatgatactgaacaaggaaaagctgaaagtactttctctaagatctggaacaagaccaggatgcccactttcaccacttttattcaacatagtactggaagtcctagctagagcaattaagcaagagaaagaaagaaagggcattcgagttagaaaggagtcagttacattgtccctgtttgcaaaagacataatcctatatatagaaaactctaaaagctctaccaaaaaactcttagaactaatcaatgaattcagtaaagttgcagaatacaaaatcaatatacaaaaatcagtagtatttctatatatcatcagtcgac

SEQ ID NO: 554533 - DNA, 493 bp, Homo sapiens
ccaaggtcccttaagccgaggagttgagtctgcagtgagctatgatcgcaccactgcattccagaccccatctcgaaaaaaaaaaaaaaaaaaaaaaacaaaaaaaacagaaaaaagcgggttatccatcatttttaagttaaaatcaggtgtaaaaataattaaataattaattaaataaatcccaggttatgagtgtcaggagcgggggagcccttccaggcagccagggagccagtctgggggaaggggtacttgggatagaaaattctctgggctccaacgcctctgttcgggtgtcttcccatttccccggggtctatgtgtggccttctcttcattttccagcaaattccctttggagatatgtgggcctccactgggttgaccaagggggtgaaggagggtggcctcggggggccactatggcgggggaaacagttaacccctgcgggccagggggaccttgggggtgccaagaaaccctagaggg

SEQ ID NO: 554534 - DNA, 566 bp, Homo sapiens
ggtcgcagatcagccattcttgtcttatggggtcccagctggcgcaccaaaaaaaaaaaaaaaaaaaaaaaaaaaatttttggccggcccggccccaaaaaagtttttaaaaccattcctgggggccggggccccaggtagggtacggtggacatgggacaaaagcgaggtcccagacagaaaacgccggggcacagaaactagtggggatggagattctctccaaccaattataaaaaagacgcgcccgggggacaccagagacgtttctggacgaactcccagagaatgagagctcagagagggagcataacaaggggggcaccttataaacaacagaggaggcacaaggaggaggtccggaatattcaaatataccgcccccgagccgggagaaaaaaaagaagaaagcaacacgaaagaaggcaaaacagataggagaacgagagaaatagagaacgaagagacacagcagcagaaagaaaaaacacgaaacaaaccaaacaaacagcaaagagaggaagaagacacaacaatgagaatagaaaagagacacgaaaaaacac

SEQ ID NO: 554535 - DNA, 205 bp, Homo sapiens
gcctggcttccccagatagtgtcctgggacatggtatgctttggggctggggtagcatggaatccctctgagggacctgggtactggtactacggggttgggaagaggaaccttaaacttggctttcccagccttcaagcctaggcttggcatgttctaggtcccagtcctttaggccttagggctgcaaaggttagagttgact

SEQ ID NO: 554536 - DNA, 435 bp, Homo sapiens
gggagatacagggggggcagaaggcaaggggggagcgggtgtatcacagggggagagcaggaacaagagaggggagaaggggccacacttttaaacagccagatctcactacaactcatttactattacaaagacagaaccaagctattcatgagtgatctcgccggtgatccaaacacctcccaccaggcctcacctccaacacggggggactacatttcaattggagaattggaagacaaatatccaaaccacatcaggtaagttaaataaacattttggtcatattctctataagagtctgaaccaagggtatatagaacatcaaaaagtgggcggggggcaggggctcacaccggtaatcccagcaattggggaggcggaggcaggcagaccacgaggtcaggagatcaagaccatccgggctaacatggg

SEQ ID NO: 554537 - DNA, 127 bp, Homo sapiens
gaagtgcccatgatagcccggcaccaagggcaggccaggcagcgatgggcccaagggggagaagggggaccctggccttgaggggccccgcggcctggctggagaggttggcgaagaaaggagccaa

SEQ ID NO: 554538 - DNA, 849 bp, Homo sapiens
gggacccggtgtctgcttcctgttgccttcgcctcctaattcctacaccactatgcgtgagtgcatctccatccacgctggccagggcgttggttgtctcagagtggctggatgcctgctggcgagctctactgtcctggtaacactgggcatccagtccgcgatgcgccagaatgcctaagtgagcaacgaccattgggtggaggagcatgatctcccttcatactatctttcttcatggagacggcgcgcgtggccacagccacgtgccccaggagctgtgtttgtgagacttggaggcccaactagctcattggatgcaaagttcgcactggcatctcatcgccagtttcttccaccctgagctaggtccatcacaggctcaggaagatgctgtcaataatttatgcccgagggcaacataacgactccgattggcaaggagatcgattgacccttgtgttgggccccgaacttctggaacgcttggttgagcatgtgcaccggtcttccagtggcttccgttgagtctttccacaagctttgggtgggggcgaactggattcttgggtttcacctctccctgctcataggaacggctctcagttgatgatggccgaagaagtccagagctggagtgtctccattgacccaggcacccgaggtttgccacaggtgtagttgagccctaaaaatacagtcgctcagcacccaacgcaaaactggaagcactctggattgtgccgttcactggggtagacaatgaggccttctatgacagtctgttgtaaaaacgtggatatgagcgccatactagataggcttaacgggcgtattagcagcgtgtgc

SEQ ID NO: 554539 - DNA, 404 bp, Homo sapiens
tcacaatgactaacttattaactccttaaatgcttgtggatgaaacaaattttcctaaccttttagaagtaagccaagtcagtagctaactggttactactgactgactgactagagttacaagaagttttatttatttatttatttttgagacacagtctcactctgtcccctaggctggagtgcaatggtgcgatttcggctcactgcaacctctgcctcccaggttcaagcaattctccagcctcagcttctcgagtagctgggattacgggcacctgccaccaagcccagctaatttttgtatttttagtacagacagggatccacctgccttggcctcctaaagtgctgggattacaggggtcagccaccacaccccgcttgatgttctgttgtgagca

SEQ ID NO: 554540 - DNA, 393 bp, Homo sapiens
ctaaaagggctgtccggggctggaaccgcctggcgggccccacgtatcggggtgtttacggcaccaacctcctgcgccacgccaaggttgtttgggaaatgctcaagttttaaatggcgctcaggctggaaaccttggccatgcggctgaccgccctcctgggttgtgttttggtcccccttaaccttgtgcccccaacggaggagctttaccagtacctggaaacctagggtgcaaccccccagggccggcggggcccttttccccttgggcttacggaggtggcggggctaaaggtgtaaacccccccagccccgtgggccctccccctggggggcttttacaacaactgggccaggaggccgtgtaatgacccccccctcctttcaaaca

SEQ ID NO: 554541 - DNA, 1425 bp, Homo sapiens
  misc_feature (432)..(434): n is a, c, g, or t
  misc_feature (446)..(446): n is a, c, g, or t
  misc_feature (456)..(456): n is a, c, g, or t
  misc_feature (472)..(472): n is a, c, g, or t
  misc_feature (475)..(475): n is a, c, g, or t
  misc_feature (480)..(480): n is a, c, g, or t
  misc_feature (680)..(680): n is a, c, g, or t
cgggtcgacgtgcgctcctctctggtctcgagtcaccaggaccagatcgaggatgcggccgacccctgcccgatgtggaaagcgaagtctccacctcgtgattgggtctctgctgtcagagagcttcacgagcttgaggggaaacagacagagaggtctgggcattgggcagtttcccgcctcccagccccgcgcactgaacagactgtgaccagaactgcgaacaaagcgcggagggaagctcttaaaggaggccaaagcggccgggcgctgtggctcacacctgtaaccccagcctgtaagcctagctactcgggaggccgaggcagaaggagcgcttgaagccaggagttggaagctgcagtaatccgtgatcggaccgttgcactctagcctgggcaacataacgtcctttgaaaaaaaaaaaaaaannnagaggccaaaangggtagcagnggtgcccgggcaccanggntgganggcctctctgaggaggtgatgccgagctgaagctgggaagcggatgtgagggaagagttccaggcagagggaaggcaaatgcagagatcctcaggcaggaacactgaactgttctccgtatttgaggagcagagggcgtgtcagtggtggccgcagcagctgagcaaaggtcttagaatcccagctaatgtcgtgggacntagcacccaatcccaaaagaaagaagaatagataggaacccactgttgacaagaaggtgcactgagaagtgtttttatctgacccgatctgcatccagtttagaagccgatacatcagggatttaacaatctgtcttaatgtctagcaaggggggttgctggagggaaaacacagagtcagagttctatcttcagccctgccagcaggtccctgggagatgctagacgagtgacttttctctgggcgtggttggtgtaagggatgcacacgcaggaggaaggtcggagtgtaaatgtgtgacctgggcctgttactgggtataaatgggcctgtagtgaccgggagctcatgttctaccaaaggggttgccaattttctgatttcgagtgtggcggtgtaaaagagaaaagcaactgctgccagctggggagctggtttgcaccctccactccagaagccttgatgttgctaagagctgacctggcacaacagcacgcatggtggtgtctggtgagcaacataattcccaaacacctccgaaaaggtcgttctctgacggttctaaaaaagaccatttcttataaaacgtcatacggaacacagacattgtgccaccccatatttcaccatttctcccccagggggggggggatggcgcttgcttcccactccctccgtgagggtctcgcacttcagatggttagggccctcgcccctctttttaacggacacccgccgtcctgg

SEQ ID NO: 554542 - DNA, 831 bp, Homo sapiens
agaaggaggtggaggcggcggctgtgcgttgcagcggctggcgtgcgatagctggctgggagccctgagtgcggcatgctgctcgctggcccatcgtggggcccgatgctgtgcgcctcggctcggagcccggaccgggctgtgggtgcgccgacgtgcctcagcctgcctttcgcgatggcgaggcgggagtgagcatgaaatggcttagggcccagggtggcggtgaagtgggggcctggtgccctggatccgtgcgggggagggcggagcctggatgtgcctggaccgtggcttcgcgcttgtcccctgggacgcggatcgaacgttggctggcgcggatcgtacgtcggcggccggtggaacgcgggagctgggcggcgcgcggactgtgggcccatggcgtctgtgcaggcgtcccgccgccagtggtgctacctgttgcgacctgcccaagatgccgtgggccatggtgtgggacttcagcgaggccgtgtgtcgcggctgcgtgaacttcgagggcgcggaccgcatcgaacttgctcatcgaattgccgccgccagctcaagcgcagccacgttgctcccctgatgtggcctgttctgccctgggcccccggccctttaatgcaacccgggcaccaagggaccttggcgtgcggcaagccggacatggggcccccaagcttgcctggcccgcggaagtggccagcccccaggcctgtcagggaacctggctggcgggcggttgtcgaggccaagggaaccggctattgacgagtggccacattcagtcatggcctggctcccccttgcacttcgccggccctg

SEQ ID NO: 554543 - DNA, 318 bp, Homo sapiens
caccatcgctgcctccgttcactatcgtcatgcatcgcttacacaatgggaatatgttctgacaaacctgtcattaggtaatttcattgttgtgcaacaccatacagtgtacttagaaaaaccttgatgatatatcctactacacaactaggctatgtggtatggcctatcactgctaggctacaaaccagcacgttactgtcactgaacttctgttggccactgtgaaacagaggtattagggtatctaaacaatagacaatggtacagtaaacatacagtagaataatcttataggaccacctatcgaataagagg

SEQ ID NO: 554544 - DNA, 1310 bp, Homo sapiens
gcgagagatccaggggcaccgagctactgagttgttcctacaatgactatgaagccctgattccgtggagtacgctgtctatatgtaacagataaatgtctctggtactcctacatgacaaggacctaataggaactaatactcttagcattgctatagaagcaagaattgctcatcgtggttgatctgtaactcaagcatcggtccacaactagggccacaggcgacagtattatcgttcgctttcgcgcgtgaaagatgaagaacgtcaagggctctctagagaggatgggtatccttgcagcaactctactcagagctccaggggaccaggactccagtggagaacgtctaattgcgcagaggctctcccgtggccaatgattgaaccagggtcccaccagttatacctagtcctgccctaatttactatagaaatcgaactcaacgaaacagcatgagctacgaaacacatgagactgcaccactttgggactgaccacgtcgccacaccatagaaacactgtacacatagacataggccttgccaatgcgaatagcgaacgtcggatttccaactttaaaagacagtgcataagactcgtccagaagaacctctgaaagaggcacaaagcaatcacttgcaaggaatgaacccgagtccttacaaaggcgaccaccgaagatgcgaaggcaaagtggccgttggttagatctgtactcatcgacacaccaggttgcgaaagggaacaccaccaagatctgggaaactcggctgtgagtccacgaaaagcggcactagatttgggcatatagaccaagttgaggacgcaatagcctgcctttgtattcaaccaaacgttagataatctgctgttctgcggggaagttacggctacaacaactgtggagcttgtgccattggtaaccaattatgagtatggacgacacagaaaccaccgctatgctaggtggtgtggaatatttcgtctcccgaatagttgggagtccctccatggaagaaccccaaagaaggaccacctcaagagcgaagtacgttatgaaaagccgccctagtaaagcagaggtgggcccgaagattaaagagcatagggggcgataatgtgagtaaacgcccccggaggagggaggcacagtgacgtttaatgggtttcggactgtgcctcaacctttgcatacaattagagaaggcaccgggttgccagcggagggggaagaccgatggggaaccttactatgtagacgaaacttaggttcaaatctgagcatcgcagctggtcaataaccca

SEQ ID NO: 554545 - DNA, 694 bp, Homo sapiens
  misc_feature (31)..(31): n is a, c, g, or t
  misc_feature (64)..(64): n is a, c, g, or t
  misc_feature (84)..(84): n is a, c, g, or t
  misc_feature (117)..(117): n is a, c, g, or t
  misc_feature (163)..(163): n is a, c, g, or t
  misc_feature (165)..(165): n is a, c, g, or t
  misc_feature (187)..(187): n is a, c, g, or t
  misc_feature (208)..(208): n is a, c, g, or t
  misc_feature (219)..(219): n is a, c, g, or t
  misc_feature (235)..(235): n is a, c, g, or t
  misc_feature (240)..(240): n is a, c, g, or t
  misc_feature (273)..(273): n is a, c, g, or t
  misc_feature (351)..(351): n is a, c, g, or t
  misc_feature (432)..(432): n is a, c, g, or t
  misc_feature (629)..(629): n is a, c, g, or t
  misc_feature (632)..(632): n is a, c, g, or t
  misc_feature (670)..(670): n is a, c, g, or t
ctgggagcagggccctcagtgacgttggcanttgtctggaacagcaatttggaaccctattctntggagggcagggcaggggtnccgctcgcacgggggcggccatcagagggtatnggtgtaaacacgcagacacactcaaggcacggtagtcattttttangnggtttgggggggggcttgctgntcaggatctgacagttttttntattttttttntaaaaagttttctagntttgnagttttttttttttcttttctttcatttttttnaaaagctacgagaatgagcaggtggactgtggtttccaggaatggtggcgtctcacgcttcttgtgctttttcctttngggcctccgatcggctggggttgggggactgggcaggaggctccctgtaaacatttggacttgggctggggcaggggctgntgttgggcaaagctgggggtccaggctggaaaagcaggggcccctccagacgcagccttggggagactcagcatgtgcccccctcccctcatcacagaacaagacaatggttaaaaaccagaacagatgcccagaagggggtacatggccattaccagcatctcagacaagggcaggcttcaaacagggagggctgntgnaacccctcccctacgtctggagctgaggggacaggggngctgagaaaaagagaggaaaaaga

SEQ ID NO: 554546 - DNA, 495 bp, Homo sapiens
  misc_feature (59)..(60): n is a, c, g, or t
  misc_feature (357)..(357): n is a, c, g, or t
  misc_feature (383)..(383): n is a, c, g, or t
  misc_feature (428)..(428): n is a, c, g, or t
  misc_feature (473)..(473): n is a, c, g, or t
  misc_feature (481)..(481): n is a, c, g, or t
gcagacaccccactgtcgccgctggcaagccctctcctccccaccagactgccagacgnntacatcattctgcccacagacctgcgctgccacagccatcgccatccattgcatcccaccgacagaatgctgctcctagtgatctggactcacctcggaggtatttgggctggccacagtccctggacagtgatccagacagctggccgccccccaagggatttgtcaccttcagcgagacctatttcctccccacccccagaaaccttttgtgtttttgcctaggcccaggtgttcctggcagccaaatcgagtctttcatttttttttgtgggccagttagttttgcccataacncagtattttgagtttgcaactgtctntttgatgtgggccttttgttcaacccagtaacccctgcattttgntttgctttaaaaccctacctggagaaagtcttttccttattttcnataaatgnccggcctttttgga

SEQ ID NO: 554547 - DNA, 1166 bp, Homo sapiens
agtttatgcaagcatgcccggaaagcaggattggttattcctccagaaaacatcggcaccgttccatacatctggcctgtacagctgggtatatttgcatgcctatgttcctccatgagggtgatgcacgcatatccatctctttcaaaggagggactgatagcagagacactgacacgcaatgcacagcacagcactatggcaatccaccacagtgtccaatcccggcaggcatcacacacagcactcatgcatgcccacactttcaacacatacacaggcaacttccccctggaaacacaagctcacaggcatcatctatatcattggcacagctcgacgctatatgtctcacaagtcacactcccagcaaccaattggaccgggcactatcagataacccataatgagataaaccgttgaacaaccacgctcgtattatcacaaggcaccatagcaacttatgcggaaccattcaaacaagtactaaaagaacccgttcacgggcatgcgcagacgatatatgaatggggacatctgtatcagataagacacgcatcatacaagtgaatatgatttacaaaggatttacggacacatgatatccaaatgaataagtgcagtgaagaccccaatgtggacacaccgagtgattaacagggccacaatgcacttcaacacctgggtaacggacaatggcacaccaaaccgcgagggcaaagaaacatcattgggcacaagttcgatatattgaacaccgaggtttatgggaccgggatatggatttggataaatgtggacccaacgaggcacaggcaatgaataacgcacagacaaagagaacatggttccactgggacacagcttaactaaggtacagggataatgtcaacccggaccaaacaacggaccacacagggatctagggaacaaacacaaaagcgccacacgtgcactggcggcacaacgtgccatggggaaacgtaccaatagggcaagttaacagccaacgaccgcactacacgaagacaccccccactcaatggagaggagcaacacacccacagatcttaaaagaggaccaaggaggaccacatacactgagttgacaaggaaacacagggtcgacagtgcaactcaccaccttgaggaggagccgtaacacg

SEQ ID NO: 554548 - DNA, 496 bp, Homo sapiens
  misc_feature (144)..(144): n is a, c, g, or t
  misc_feature (290)..(290): n is a, c, g, or t
tgtatctatcacatatcccagcagaacttctgttcaaaacatgttccattggacccaggctgttaagtttgggaaattcacagcttatgcctggggaagcccagttcagaaaaggatgccctatgatcagtcccaacccccttntacaatgtgacaaccatgaatgtaccaattccagtgtggaacggtggcaaggacctgttggctgacccccaaaatgttggccttttgcttccaaaactccccaattttatttaccacaaggaaattcctttttacaatcacttggnctttatttgggcaatggaagcccctcgaagtttacaaagacattgtttttatgaaatcaaaaaaaaaaaagtagttttggatttaaaaaattacccgtttgtttttccaaaaaactttattctttcaaacaaaggattttcaaaatgtttgacaagcagggcttctttctgtaattttgactttaaaaaaaaattggcctccccca

SEQ ID NO: 554549 - DNA, 301 bp, Homo sapiens
cccaaaaaaaaaggaattttccccactcataggtattggaggggcacaaccccttgctggggttgcctttaaaaagttttttttgatattccttatggaacagaattccctcagagcccattttaaaagcatatgggaaaaataattattcttgctggcctttatgcaaaaaatcaggccaaggataagactaaagttttttttgccacccatcctattatgatttgtttttaacaaaaaagaagactggagagtttcaaaacttatccccccggtccttaaattttagtttttttagtta

SEQ ID NO: 554550 - DNA, 648 bp, Homo sapiens
gggacgctccgagaggtgccgggcgtggccagagtcgcctttcccactgccccgcctccagccagccctgcccgaactcgcagacatctcagtgcgcagacgactgccctcgccaggccgcgccgccctgctcgctcaccccgcccgcgctgaccccagccccagcaaggagtccgacaacggcatcgaccaacggggatcgggagctactaccatgtcgcacggtgtggcagtgaatggtgcgattctgtctgaccagagcctcagggaaatccccaccgacgacaagggcttcactgccatccacttcgccgcccaatggggcaagcttgcatgcctgcaggtcctggtagaggagtacaagtttcccgtgacctgctgaccaacaaatagccagacacccctgcacctcgtccatccacagggacaacaccaccgtggcctcccctgcatctactaacctgctggacgaaaggggccagacctcgacagctcagacatgcaatcggtccacggcccctgcacctggagcccgtgacggtttggatggacctgtgtgaacggtcctggtgcagagttggcgccaaagtcgcatgcccacgatgccatgggctaaaacccattgacttctgcacaattatggaacac

SEQ ID NO: 554551 - DNA, 1000 bp, Homo sapiens
gatgtggctgggggctgcggggggaggatgcggaggggtttctgtgcaggacggcagctctcagagaggagtacgcgagtgtggtgggagtggagggccggccacgcggttggacacgagcgagggtgccaggctgacccgaagaccgtcaccacccgacagctacgcatgtgcctttgaccttgatttggagcttttctcccttttgcatttcggtgctacagacttgagacaccagctagaagttgtgttcagcccggccccgctgcgcctgtccgtggccggggtctggcgccggttgtgttggtgtccagccttgccttctttgcagccaagcagttcttggtggagctggagtgcggacattagctgctgcgccccaggggtcttcacaggattcacggatgactttctcttcttacacatggtttcctctcgcgcatgagcccggtgttgtgggggaggtctgtagtgcgggttctcaatcgcaggaatccattcccgtgggaggttctccgcgtggggcatggggaattggggcatgagcccgttcgtaaggttcgcctccatttaccgacgttattcttcccaggaagggaaaaggctcctcgggacttttcgccatggggtatacccgccgccagtgaaagcgggggatgtggaccccaatatgggtgcccttttaaaagagtgccggaataaacgcggggggggggggggagcactttttgggggggacagggtgggtccccccccccccgctgctgcagaatgggggggggtatttaaatcgcgccaaggagggggggagagaggatatctatttcatatgggggtccgccccccacagttttttttcgcacggatattttcttaattttccccccccccgaagaaagagcaggggggagggagggtgggccacacataaggggcggggggggagaaacacaagctttcttttggggacatgggttttaagatagagcgcaccccacaa

SEQ ID NO: 554552 - DNA, 233 bp, Homo sapiens
tggaacttctggggcataggtttatgaacatgagggcgatttctcgcgtgagggaggtttttatgttgctaatgcgacccaccgagggagcccaattgtgtcggggaaaacatgtagagggagtatagggctgcgactagtatgttgagtcctcgaagcaggagagtgatatttgatcaggagaacggggctactagcacagagagctctcccagtaggttaatagcggctga

SEQ ID NO: 554553 - DNA, 104 bp, Homo sapiens
ggtgccctagattatccgtatacacccacactgaatttaatggaggtagtgcttttcttatactggggagtgtggtatagggtagtatagcctcggtggtatag

SEQ ID NO: 554554 - DNA, 595 bp, Homo sapiens
  misc_feature (4)..(4): n is a, c, g, or t
  misc_feature (22)..(23): n is a, c, g, or t
  misc_feature (25)..(25): n is a, c, g, or t
  misc_feature (32)..(32): n is a, c, g, or t
  misc_feature (34)..(34): n is a, c, g, or t
  misc_feature (49)..(50): n is a, c, g, or t
  misc_feature (56)..(56): n is a, c, g, or t
  misc_feature (93)..(93): n is a, c, g, or t
  misc_feature (106)..(106): n is a, c, g, or t
  misc_feature (117)..(117): n is a, c, g, or t
  misc_feature (128)..(128): n is a, c, g, or t
  misc_feature (135)..(135): n is a, c, g, or t
  misc_feature (140)..(140): n is a, c, g, or t
  misc_feature (144)..(144): n is a, c, g, or t
  misc_feature (162)..(162): n is a, c, g, or t
  misc_feature (167)..(167): n is a, c, g, or t
  misc_feature (187)..(187): n is a, c, g, or t
  misc_feature (198)..(199): n is a, c, g, or t
  misc_feature (201)..(202): n is a, c, g, or t
  misc_feature (215)..(215): n is a, c, g, or t
  misc_feature (229)..(229): n is a, c, g, or t
  misc_feature (250)..(250): n is a, c, g, or t
  misc_feature (253)..(253): n is a, c, g, or t
  misc_feature (263)..(263): n is a, c, g, or t
  misc_feature (265)..(265): n is a, c, g, or t
  misc_feature (274)..(274): n is a, c, g, or t
  misc_feature (322)..(322): n is a, c, g, or t
  misc_feature (359)..(359): n is a, c, g, or t
  misc_feature (368)..(368): n is a, c, g, or t
  misc_feature (390)..(390): n is a, c, g, or t
  misc_feature (398)..(399): n is a, c, g, or t
  misc_feature (401)..(401): n is a, c, g, or t
  misc_feature (405)..(405): n is a, c, g, or t
  misc_feature (432)..(432): n is a, c, g, or t
  misc_feature (435)..(435): n is a, c, g, or t
  misc_feature (447)..(447): n is a, c, g, or t
  misc_feature (449)..(449): n is a, c, g, or t
  misc_feature (453)..(453): n is a, c, g, or t
  misc_feature (457)..(457): n is a, c, g, or t
  misc_feature (471)..(471): n is a, c, g, or t
  misc_feature (477)..(477): n is a, c, g, or t
  misc_feature (483)..(483): n is a, c, g, or t
  misc_feature (494)..(494): n is a, c, g, or t
  misc_feature (502)..(502): n is a, c, g, or t
  misc_feature (512)..(512): n is a, c, g, or t
  misc_feature (521)..(521): n is a, c, g, or t
  misc_feature (533)..(533): n is a, c, g, or t
  misc_feature (541)..(541): n is a, c, g, or t
tcanttaaattttttaatgggnntnaaaattntntgaaaaatttttggnnaagttntttccattaaaaagtactgattttaaaaaaaaaaaanttaaaactgccanacgcaaaaaanaaaaccaaagngggccanaaaanattntcctttccttctgaaggntttangatgcatttttataattaancagttttttannannaaacttaaatggncaattgaaaaaaanagttctgagaccgttcttccnccnctgattaagngnggggggggngggattaggggtaatattcatttagccttctgggctttctggggaganttggggaccttgccagccccagcagccttcttgtccnctgctttgntgaaacccaccgcaactgtttnttttaaannangaanagcaaagcgacccaaaggggggtagtntgngaagccctcaananaaangggntttccagggaccanataaanaatggnagcctcaccanatttcaanaatttagggncatcttccngctttttaccanaacggggntcaatcttttccttcagcccagcaaacttgcatgcaatgggggcggggggggaa

SEQ ID NO: 554555 - DNA, 266 bp, Homo sapiens
cccattccatcgtcgccggcgtcagcgccaccggcgacgccgatggctggctcatcctgccggccgacatgcccctggtgcagcccgcgaccatcatggccgtggcggcaggcctggagcgctatcccgtctgctacgcccagtaccgcggcatccagggccatccggtgggctttggcaccgagctgtattccgagctgatggccttgcagggcgacgagggcgcgcggcgcatcgtggcgcgctacgcggcccagccgattgcc

SEQ ID NO: 554556 - DNA, 327 bp, Homo sapiens
gcatgcacctgcatgctgctggtcaactctacgagatcccctgcggaacccctatcatacgaagggcaatgcttttagattaaaatgaatgtactttacagcttatagtctagtttaaaagttgtaggtaattaatcataatttcgaagtgcgatcttgttaaaacagataaatttataactttaaaagtatggaagcagatatataaaaagacaagctagtgacacaaatatgctaaggtgccttatgtacgacacttccgaagacaaattggaagatagataaccagatatgcaaaatgactattttgtcgatcagtttcagtat

SEQ ID NO: 554557 - DNA, 714 bp, Homo sapiens
catttccgcgcagcactccctaagcttgatcctttaggaaggtctaagccaggcctcagggtgacgggatcaggacttgaggggtggacaaggtggccctaagtagtggcttccagaccccgtagccccacgacctcaccaggtgcccgccatgagggaccctcaggtggcaggtgaccccgtcactagtatcaagacatcttctcctgctgagcagaaggctatcatcccgtgcaacgtacctcttcccgacgtctgttctcccctggtaccttcgaagaacctctgtacctctccgtcctcctcctcgcctcctgccagtgcagtggccttggtcttgggaaactgaagggagtataggtctggcccccagggtggggctctcctttccctcatccccagccccgccgtcagcactggctctctctgtgaggttcgatactttgttaccgccgcctctgtcctctgtgccattggtacctgggcataagtctaggaggtaggaaacagcacaactcacagtttgagactggggggtggtcttggcaaggcatcctgtctgtacccctccctaaccttctcagaagaggtgcacagcctctcgggtgacgttggaaactcgcatggtacgaaattccattctaacttattttgacatgatacaaacacaacgtgttagagattcacttgtgcaaaccctactgttacatcatg

SEQ ID NO: 554558 - DNA, 582 bp, Homo sapiens
  misc_feature (29)..(29): n is a, c, g, or t
  misc_feature (65)..(65): n is a, c, g, or t
  misc_feature (81)..(81): n is a, c, g, or t
  misc_feature (83)..(83): n is a, c, g, or t
  misc_feature (99)..(99): n is a, c, g, or t
  misc_feature (105)..(105): n is a, c, g, or t
  misc_feature (123)..(123): n is a, c, g, or t
  misc_feature (136)..(136): n is a, c, g, or t
  misc_feature (140)..(140): n is a, c, g, or t
  misc_feature (143)..(143): n is a, c, g, or t
  misc_feature (148)..(148): n is a, c, g, or t
  misc_feature (170)..(170): n is a, c, g, or t
  misc_feature (173)..(173): n is a, c, g, or t
  misc_feature (175)..(175): n is a, c, g, or t
  misc_feature (198)..(198): n is a, c, g, or t
  misc_feature (200)..(200): n is a, c, g, or t
  misc_feature (311)..(311): n is a, c, g, or t
  misc_feature (346)..(346): n is a, c, g, or t
  misc_feature (455)..(456): n is a, c, g, or t
  misc_feature (461)..(463): n is a, c, g, or t
  misc_feature (468)..(468): n is a, c, g, or t
  misc_feature (488)..(488): n is a, c, g, or t
  misc_feature (502)..(502): n is a, c, g, or t
  misc_feature (577)..(577): n is a, c, g, or t
cgtttttcagtgcagtaacattgaggttntccttgtttcctttattcagacagttctgcaaactngggaataaataagggngngggcacacaggggctngggggnggggcgggtgggggtgangggggttgggggngggnggnggggnggggggtggccctggtcctggnggngncgggactcaaggtggctcctggncngggggtgcagtggggggtgcgtgggggcgtccgctctatggtctcctcagtggtctattttaggtgtgggttttttttttttttttactgctaaacttttttacctcatantaaaaagtaactagtcaaaatttagaacattctgntcaaaatgggtctgcacatgcctttcaaacacctgctggtcatagtcagggggggcctgctcgctgcccctcgggccccccttcccgtgcctttccccctgttcttccnntttgnnntggtnatggttgggggggaacattnactcacaggggggncacttcttgtgaacatcaaagctggaatcaaagcaaaagcctgtcccatgcccacgtaaatgttgccttgggggntcagg

SEQ ID NO: 554559 - DNA, 347 bp, Homo sapiens
cacgttactagtgatggaggcgcgcctgggcatcgaagactttatcgtgcgcaaggccagcgcaatgatgggcgtgggctttacggtgctgccaatgatgtactgcgaagaggaactggccagcggccggctggtgcaattgccaccgcagtggtcattgccaggcggctggcttgcaggctggtctacccgcaccggcgcggcgtgctgccggccatccgggcctggatcgactatctggaagaaggcttcaaaggctgtggagatcggctgttatgagcatgacggaagaacaagtcgcacgtttctgcctgagcctgccaggcgcacgggaagactataaatgg

SEQ ID NO: 554560 - DNA, 411 bp, Homo sapiens
gtcacaaaaaacaacaacaaaattttttaaaaaataaagttagaagaagtaagttctagtatttgataatacagtagaaaaattataatgaacaataatttattgtatatctcaaaataactaaaagaggccaggcatagtggctcacacctgtaatcccagcactttgggaggccgaggctggcagatcacgaggtcagtggatcgaggccatcctggctaacacagtgaaaccccgtctctactaaaaatacaaaaaaattagccaggcatggtggcgggtgcctgcagtcccagctactcgggaggctgaggcgggagaatggcgagaacccgggaggcggactttcagtgagccgagatccagccactgcactccagcctgggcgacagagcaagactccgtctcag

SEQ ID NO: 554561 - DNA, 790 bp, Homo sapiens
  misc_feature (74)..(74): n is a, c, g, or t
  misc_feature (89)..(89): n is a, c, g, or t
  misc_feature (91)..(91): n is a, c, g, or t
  misc_feature (93)..(93): n is a, c, g, or t
  misc_feature (121)..(121): n is a, c, g, or t
  misc_feature (135)..(135): n is a, c, g, or t
  misc_feature (137)..(137): n is a, c, g, or t
  misc_feature (147)..(147): n is a, c, g, or t
  misc_feature (159)..(159): n is a, c, g, or t
  misc_feature (167)..(168): n is a, c, g, or t
  misc_feature (191)..(191): n is a, c, g, or t
  misc_feature (204)..(204): n is a, c, g, or t
  misc_feature (209)..(209): n is a, c, g, or t
  misc_feature (216)..(217): n is a, c, g, or t
  misc_feature (224)..(224): n is a, c, g, or t
  misc_feature (230)..(230): n is a, c, g, or t
  misc_feature (254)..(254): n is a, c, g, or t
  misc_feature (259)..(259): n is a, c, g, or t
  misc_feature (267)..(267): n is a, c, g, or t
  misc_feature (272)..(272): n is a, c, g, or t
  misc_feature (285)..(285): n is a, c, g, or t
  misc_feature (287)..(287): n is a, c, g, or t
  misc_feature (308)..(308): n is a, c, g, or t
  misc_feature (318)..(318): n is a, c, g, or t
  misc_feature (331)..(331): n is a, c, g, or t
  misc_feature (344)..(344): n is a, c, g, or t
  misc_feature (421)..(421): n is a, c, g, or t
  misc_feature (423)..(423): n is a, c, g, or t
  misc_feature (458)..(458): n is a, c, g, or t
  misc_feature (467)..(467): n is a, c, g, or t
  misc_feature (471)..(471): n is a, c, g, or t
  misc_feature (507)..(507): n is a, c, g, or t
  misc_feature (610)..(610): n is a, c, g, or t
  misc_feature (620)..(620): n is a, c, g, or t
  misc_feature (685)..(685): n is a, c, g, or t
  misc_feature (701)..(701): n is a, c, g, or t
  misc_feature (703)..(703): n is a, c, g, or t
  misc_feature (709)..(709): n is a, c, g, or t
  misc_feature (748)..(748): n is a, c, g, or t
accgcggcggtagtaggaggcgggagaaggtccgtagccgcgccgccctgccccgccatgggcctcctgtcggncccggttcgccggcncncncacgcccgcctagtgctgcgcctcaacncgccgttatgcgtncngaactacgtngcgggcatcgcntggatctnngcgctggttttcccgccgctganccagcgcacttanatgtnggaaaannccatggnctccancatggtggaggagcagtatgcagncaganaccgtacncgganttttacccgggantncaccgcccaccgcaagaagtngggggctctnccagtagcctggnttgaacggacgangcggtcagtagggctggaggtctacacgcagagtttctcccggaaactgcccttcccagaagaaacccacgaacacnanatggtgtcgggcaccaacgtgtacggcatcctgcnggccccgcntgcngccagcccgagtcgcttgtactcaccgtgccctgtngctctgactctaccaacagccaggctgtggggctgctgctggcactggctgcccacttccgggggcagatttattgggccaaagaaatcgtcttcctggtaanaaaacaagancttctgggcactgaggcttggattgaagcctaccacgatgtcaatgtcactggcatgcagtcgtntccctgcagggccgancnggggcnattaaagcagccgtggccctggagctgagcagtgatgtngtcccagcctcgatgtggccgtggaggggcttaacgggcagc

SEQ ID NO: 554562 - DNA, 223 bp, Homo sapiens
gagattgaaatggattgtcagaaaaggaaaatcactaaatggctatggtggctactaatgaaaaaggcaagtggcttggccagtagttaaaatagtagaccagcaacttttatatccagagttttatgtggcacatacaattttcttttcataggtcttctgattctgggtacaggggtatcatctggtaggtccgggtggtaatcactataggaatattctc

SEQ ID NO: 554563 - DNA, 827 bp, Homo sapiens
gaggcctgggtggaccagcatccccacctgtgccccctgcactgcccaacgcggccgtgtccatcctggaggagccacagaaccgaacctcggcctacagcctggagcacgcagacctgggtgctggctactaccgcaaatacttctatggcaaagaacatcagaacttcttcgggatggacgagtcgctgtggccctggtggcatgtgagcctgcggcgggaggagaaggagggcagcggagggggcaccctgcacagctaccgcgtcatcgtgctggaccacgcagctccggacactccgtggtaccatctcggaggacgcgctgccgcggggccccacggggtctgtccccaaggaaacttctggagcactgtggcgccgcagactgagccccagctgcctgcgcctgggctcagcttcacccaaggtaccacaggacgctgctcacactggatgagcaagtgctgagcttccaacgcaaggtgggcatcctgtactgccgggcggccagggctcggaggaggagatgtacaacaaccaggaggcgggaccggccttcatgcagtttctcaccttgctgggcgaatgtggtgcgggctcaaagcgctttgagaggttaccggggccaaggtaggacaccacaatcgggattccacagagacaccgcactcccctctacagccacataccaggaccacggaggatcatgtcccacgttgtcccacgatgcttgcgttaaaacaccttaagtaaaccagccaggaagggccgtccgcgaagggccaccaatggggcaccggcaactggggaccatatcgggttcca

SEQ ID NO: 554564 - DNA, 523 bp, Homo sapiens
tccatttatgctatggaaaaaccacttggaaatgtcttgggaaaccttgcacaggccccgccctagggagtggtgatgtgttgggggaggtgcttgttcccaggtccattcccacacgtttgctccagttgggatctccttatgtggcaggcgtggccgtggtggcttttctctcctcggtgtttctctttccttccttccagaataggggttctgcaggactctctcgtgctttagcaagtgtggtgtggccaaggacgtggtgtggagtgggttggcttgaaaccagcgccaagttgctctacaacagttggaaacgtgctcgtgtcctcccagcggcacttcagtgatattgtgctcccaggaagtgggcaaaaaaaccctcaattgggtccagagaatcgtaatacttctccgtgaatccggctgggcacatcatttctttcagggggccacatttcttaagtgattccaatcctttccccgtccgtgcctctgccactttaagccaggtggtaacaga

SEQ ID NO: 554565 - DNA, 257 bp, Homo sapiens
  misc_feature (4)..(4): n is a, c, g, or t
  misc_feature (79)..(79): n is a, c, g, or t
cganagggggggggttttgggggggggacccccgttttcttgatgaaggaacgtttcttggggggggggggcaaggttntggtctagggcctaaagtcccttttaagggtggcgcaaagcagaggggggccggtccccccccccattaacaacagaaacccctcattcaccgggggaaaccccctcagggtaaaacccctatcccccattttcctcctatccctcaacccggacatcattacgggggtttcctttta

SEQ ID NO: 554566 - DNA, 108 bp, Homo sapiens
ccttcacgctgactgtctcactttaacccccactgagcccagctcctacctctgaccccaacttctctttgatctctgaatcccctctgactccaacttctctttcac

SEQ ID NO: 554567 - DNA, 227 bp, Homo sapiens
acacaacatcccatcaaatacatgcgaatcttaaattcataagatcataaagaaacaagactacacagatccacgctggaggacgcggggtgacacatcactagctatagaaaaaagagtggataaagagaaggagtcgagcctcccacctctctgtccacaggaactgtctgctgcggttgcccagcgtcgatgagggcggctctcctgagagcgggagccctgct

SEQ ID NO: 554568 - DNA, 853 bp, Homo sapiens
ggttatgacactgtctcaggcactacggtctgtagcagatacagcaaagcctgttgagtatgactaacaacactaatgggagcctgcctacgtctccttccgccgacaagtggagttggccaggtcggtccgaggatttttggggagtgactgcccgtggttcgtgcctccctggtcctcgcgtgatgacgctctatgagaagcgatcggtgcggatggtgcgtgtgggtgtgccagacgtatgccttgctgcttgctggttgttcgggtgtacaggccctggcttccatccgccgtggcagccttacattgtcttggccctgctatcctttctgctgaccatcttgccttctgtgatgtactaagggtcggtgaggcccagcgttagtccggataatcagcacttgaaaggtgaatccgctattcagggatatatctggagtctgatgtggctgatatgtgacggatctctggtgcaagaggctacaagtaattactgtcccttgggatcgggtaaatctgcccgataaaggaactcaagcgcccttgtcttagtttgctgatttagttgcattctcttgaactgtgctgatgtttgatgctggggtcttggcctattgttgatgtccttggtaggaatggttctgactgtgcctgactctaggggtggtcactatgcacttcttccctgtgttccctgttggtctatgaaccggcccctgggcgaggtgcactagtacccacggccggtttccctatgtttgaccatgctgtggctcaccccggcgccgttccggtggagcgccgggtctggaaagcccaggcttgggggtcccgaggggggttccttcca

SEQ ID NO: 554569 - DNA, 518 bp, Homo sapiens
tttttttttttaaaaaaaaaatttttttttaaaaaaaaagaggcccccgggggggaggaaaaaaaaaaaaagagttttataaaaagagggggggggaaaaccccttttttttgggggggtctccccccaaggggggaatttttattttttcccaaaaattttttttttggaaaaaaaaattttttttttttaaaaaaaaatttttagggggggaaaagggttttggggcgaaaaaaataatgtgggaaatttttttttttgggacaaaaccccccccccgccggggggggggtggcccccccccaaaaaatatccccccttttttaaaaaaaaggggggttttttaaattttttaaaaaaaatttttttggggggggaaaaaatgtcccccccccaaaaagttttttgggaatctccccaccaaaagaaaggggggccccccaaaaaaaaggggggaaaaatttcaattcccccggggaaaaattaagggcagtttaatcaatgcaactatttgtaaa

SEQ ID NO: 554570 - DNA, 695 bp, Homo sapiens
cgctttgtctcagtctaatacttagatcttgagaaaaaatatttttaactatttttttaaaataacagctttattgagatacatttcacttttaaagtgtacagatcactggtttttagtatattcagagtagtacagtcattaccactatttaattttagaacattttcaccactccacaaagtaaccctttacccactagcattcactccctatttttccctctaatctacctggcaactcctaatctactttgtatctgtatagatttgcctaagatataaaatcttttaaaattattgtttattaactgaacagttatttaccagtcattggtacaagaacatgaatatgcttcttttttaaaaaggacataatcagtctattgtgtttatattaataaaacgtcacatatataattaattgactaaggaacttatctatttgatgtattacattttttaaagtcttgtgtttagtaaacaaaacagctcttatataatagtattaagctagttcaaaatctagagaatgataagaactcttaattatttctattacctcttctaggtatttcccaagatcactaggttagtatctgatacattactaggtattcattaagaaagcttattttattttggtgatagagctggaataagaatcagctttcctccaggagtcccttctcttca

SEQ ID NO: 554571 - DNA, 103 bp, Homo sapiens
cctcacatgactgcgccggcgcatgttagcactgagctgggtcctgcagcctcgcttgctgtgggcatcatgaccgtccccatcgcaggcccagagacccaga

SEQ ID NO: 554572 - DNA, 103 bp, Homo sapiens
tcgagctcggtccaccgacaggggataggacagcctaattattagcatcatccctctactattttttaaccaaatcaacaacaacctatttagctgtttccgc

SEQ ID NO: 554573 - DNA, 128 bp, Homo sapiens
  misc_feature (16)..(16): n is a, c, g, or t
cactctataggatccncaggcgttctccatgcgcaggtattcaagttcagccatcaactgctcacgcggtttcagcgcatcgtctttatcttcgggcacagcgggtttgggcttcttcgtcattacga

SEQ ID NO: 554574 - DNA, 121 bp, Homo sapiens
ggcaaaccaaagtttaccaggcagtccccatgatatatccaactctacaggaatcaaaattcatggacaggagttggtgttaaagcctaagacctgcgatgacaaggtggctgctttgcca

SEQ ID NO: 554575 - DNA, 142 bp, Homo sapiens
cagcggactgggaagggaactctatctcggcctggactcccgctgtacctttgttgggggctatgtttgaggctgcggtcgtccgagctcctgggtcgtgcgggcgccgcgatcccctcttcccgtagaaggcccaggcgct

SEQ ID NO: 554576 - DNA, 324 bp, Homo sapiens
tttttgctagagtctagctgtgttacccaggctggagtgcagtggagcaatctcggctcactgcaaactctgcctcccaggttcaagcaattctcgtgcctctgcctctcaagtagcaggaattgtaggcatgtgtcaccacaccagctaatttttgtatttttagtagaaacagggtttcatcatgttggccaggctggtctcaaactcctcacctcaagtgatccaccagcctgggccgcccaaagtgctgggattacaggcatgagcaccatgtccagccacttttacttctaatgaagtctcaatgggtcataagtcagc

SEQ ID NO: 554577 - DNA, 368 bp, Homo sapiens
ccaaagggaatttttttttgtaaacaaaatttaaagtccaacaaaaaaaattttgggcaaattgtaagtcacaaggattttttttaattaaaacttttgttttccaagggtccaagttttgatgtcaaaaatttccccccaatttccaaaaacaatgttaaatgggaaaatttagggacatttttcactttttattttaagcaatggccttttgtttggcccctgggtttttcatcccctttttaccggaataaaagaaaaatcctgttaacaaaagggaaggttctaataatttttttacccaaatacctccaaatccccaaaaaactcctttaaattaacaggacaccatttgcccacctgtgaat

SEQ ID NO: 554578 - DNA, 130 bp, Homo sapiens
aggggccaggagttcgctgactacaccaggcaggattagatgtattagagggccaattagggggcgggcagggatagtccatggtatcccaaaaattctctaaaaattgtgccaggcaccagttgtggaa

SEQ ID NO: 554579 - DNA, 106 bp, Homo sapiens
actctagagatccgagtgggaggagtgaaagtggctctgaacagttcatttgtgtcttcatgcttcgtgagtcaggagaggagtgtcgaaatcgtgtggatcgtga

SEQ ID NO: 554580 - DNA, 261 bp, Homo sapiens
aatcagtttacgacaggagagagaggcgagaaaagccagtcgaaatgagcaactcaccttagcctctgtagccgtgattagacagggatcaattgtaaagtgagggcttctccatgacaccagtagttctgcccaactactgcgatttgcggataagacaattctacacttgtgatgtctcgctttcacaattaaactcacagtcttaaagaatagaaataatctgaaaggaaattagaactgcacggaaattgaggggta

SEQ ID NO: 554581 - DNA, 231 bp, Homo sapiens
aagaggacgcaggcgtgtcaggcaagacatagtcggaagggctgaaggtacgagactggagtacaaggaagagcaggactacaagaagagtgtccccggctacaggatatacgtacgcataccaaatgtagctcccagtgctacaggtgcctagccagtctaccacctagctacctacatcctaactactacatacaccagactaggaatagtccatcataggatacccta

SEQ ID NO: 554582 - DNA, 84 bp, Homo sapiens
aacagcagtaagaagaaaagcagtcaatggattcaagcattctaagctttgctgacattttctctgttcctaggacttcttcat

SEQ ID NO: 554583 - DNA, 333 bp, Homo sapiens
ttttttttagacagggtctcactatgttgcccaggctggaatgcagtggtgcaatctcggttcactgcagccttgacctctcgggctcaggtgattcacctcagcctcctgagtagctgggaccacaggtgtgtgccaccacacccagctaattttttgtattttttacagagatggggtttcactatgtggcccaggctggtcttgaactcccgagctcaatggatttgcctcccttgcccttccaaagtgctgagattataggcatgagccaccatgcctggcctggaatcttcatttttaacaagtgccccagtagagtgtttgtcgacg

SEQ ID NO: 554584 - DNA, 269 bp, Homo sapiens
tgccaaagtagctcaaaattcagttgaatgaaaaataatgtttacacgaataaagtagttaagcaaatgcttatcatcagagtgaagaggcagtgggggccaatatatttatttacaaggtatgcaatgcggagttatgaggaagcagcctggtacggaggaaagtgcattgaagcaggcatcaggagacttagctcatgactggagaagttcttaaaaccatgactctaggcagaccttgatttctagctgtagaattttggccaggg

SEQ ID NO: 554585 - DNA, 465 bp, Homo sapiens
  misc_feature (97)..(97): n is a, c, g, or t
  misc_feature (109)..(109): n is a, c, g, or t
  misc_feature (130)..(130): n is a, c, g, or t
  misc_feature (136)..(136): n is a, c, g, or t
  misc_feature (146)..(146): n is a, c, g, or t
  misc_feature (149)..(149): n is a, c, g, or t
  misc_feature (163)..(163): n is a, c, g, or t
  misc_feature (205)..(205): n is a, c, g, or t
  misc_feature (232)..(232): n is a, c, g, or t
  misc_feature (240)..(240): n is a, c, g, or t
  misc_feature (244)..(244): n is a, c, g, or t
  misc_feature (433)..(433): n is a, c, g, or t
  misc_feature (441)..(441): n is a, c, g, or t
tcatcttgggcctgtgttatcacttcctcttcagtattgcatggcatggtttttaagaaggaaacacgatggtgatgtacatctgtcacagatgcanaaatagcagtgnactcttgtccttttgatggcntgatancagaaactanggnaccagtgttgatanagactgatgaagaattgatgaatttaagtaagggagaagaanatctcatggatgcataagtcatagctntttgcctnttangatgcaaatgttgtagtaacaggtggcaaagtggcagacatggctcttcattatgcaaacaaatataatatgatgttagcgaagctaaactcaaaatgggatgccgaagactctgtaaaacagttggtgctacagctcttcctagattgacacctcctgtccttgaagaaatgggacacttgagacagngttacctntcagaagttggagatctcaggtgg

SEQ ID NO: 554586 - DNA, 392 bp, Homo sapiens
aaaaaaagaaaaaacccttatctctggcccttatttggaattttccactctttcattaatttgttttaagccccgggtgggaaaaaaggggtagggcattttaaattgcccttcaaacgcttttaaaataagacaaatttacttgataagggccctttatttgatcccaagtgggataaaaccaataaatttgggttaccgcagtagtaattttatgcacccgggggttttctggttaaaaatgcaaaggaggcaacggtttttttagttacaaaagtttcaagcttcacttttgggcagtaaaaacaaaagtaggctccagtttgggccatgttgagggccagtttttgaaattgttttacaagactttgaaaataaaccccttaaactta

SEQ ID NO: 554587 - DNA, 1239 bp, Homo sapiens
  misc_feature (867)..(867): n is a, c, g, or t
cttcttcggtctttgtcatcgttgtgtctcacataacgtgggtcattcttgtcctggagatggtccgacccgctgccgcttaagggaagggtctccggatctcgcgcccgggggtttctttgttgcgcatctcccctctgggccgccaaagggaaccgtgctttcctcccgaccaattcgggggggtccagggccctccttgggttgtgccttccagccttttgccgccgttgtttccgcccaccccaggcgggcccttagccatctcttgtttgagcctcgagtgtcccacacgtgggcccctgacccctacgagtcctgccggacctggatttggggaaaccggtgttcttcccacctggggccacctttcttgggcctggatgctttcttaacctgagctgaggtgtaaaacttctgtggtcccttcccccgccggagggaccccggcaagtctcctgttgttgaaggacggctccgccccagcagccttgtctgttgaagtggggtcttctccccaagacttatgcgcctccaggacctcggggggggagcccaatctctcacagcacagcgccgtcaccacggatcccacccacggcaactcggagaccactgtggaatttaagagtatttttgaggtcgtccctctgtgctgttacccacaatatactgcgggttcttgggccactgttcaccactcacctcccagcttgttctacctgaggacccttttcacgaattcaccaccacggccctcttaccgctggagtttacactttgtgggcccacagaaactcacacacgtcaagttcttgttttttggtgttctcacgccctattgggaaatgattgtcgctcttgtgntctgttgcttcgttcaacaggtctcacgaccgagagctcaacttctggacacatctgacaccacatttcccgctggttacacacggcacacgcgtgcctcgaatgtaaattcttattaccaccctcccacatttcacagccacatggtggcttcgccgctggacacacggtggaccggcgaccctgtggcccgccatggaacccttgagaaccccagggacgacgcccagtgcccgggaaggaactctcccgggactccccgagcctgcaccttaactgttcttcttttctggctattttttgttgtttgtttcttttgtgttgactttgtccctggccaaattttcccctctgagtaaaaccagtttccta

SEQ ID NO: 554588 - DNA, 122 bp, Homo sapiens
tgtgaggccctgtggctgctggctgagggttcttgtgtccggtgccaccccattatagtgcagttccctccggaataatggacataagaatagtaaactgtgtagaaaatagtaatcacgat

SEQ ID NO: 554589 - DNA, 135 bp, Homo sapiens
aaaactaggccggaccctttttttttcggagtagtagtacaatatgggagattattccgaagctggtaggataagaatataaacttcagtgttgaccgaaaaatcagaataggtgttggtatagaatggggtctc

SEQ ID NO: 554590 - DNA, 80 bp, Homo sapiens
ctcttggggaaggccccaacgagatatccaaggatctcaattgtgctgcggtaccgcctaccgataaactcatctttgga

SEQ ID NO: 554591 - DNA, 427 bp, Homo sapiens
  misc_feature (204)..(204): n is a, c, g, or t
atctagagttcccaggcaaagtctacagctgtcctgcagttatgatatctatattcaaacacatactaacaatctctggagaggaatttactgataacacgtgtgacacattccaggaagttagaaattaggacagcaatggtgggatatggatatggaaagattctcgttctaaagattaaataatatccattctagcacatncagctcccccatgggccctatggaaaatagatcttttgcatacattatcccaacaagggtagtggggagttggagggagttggaaatttaagtgagtactggccctgtgccaagatgaaacagtcctgcctctagcaagggctcgttttagttcgagctgttgtttccattctctctggagaatggcagtatataagtggttaagttcatggactttgtagtt

SEQ ID NO: 554592 - DNA, 117 bp, Homo sapiens
ggtgtgttgattagtagtagttacggttgaacatgtatgtaggtgtatatatgtaattgagattgtcgggggaataggttatgtgattaggagtagggttaggatacagtagggaga

SEQ ID NO: 554593 - DNA, 135 bp, Homo sapiens
accagctcgtacagccctaaggtacagccagatccgctcttcctggctccttcccaagcagttcagccatagggtgcgctgtcgggctagtcggggctgtcgggctagtcgggtactgtcagggctagtcgggga

SEQ ID NO: 554594 - DNA, 256 bp, Homo sapiens
acgatattatgaaaagtgaaatacatattctttaaagtgcctcccttttaaggattttgtatcaacaaagctactgattgtggaattcatgtagtagtcttcatgaagtcacagtatattatgactccgcactatcaagtagcagcttaacagagctctataaaagcaaagcattatcacagtataggtcaagatcatacattatattgataatttgctatcgattagtttatccatagccaactgagctgagttc

SEQ ID NO: 554595 - DNA, 790 bp, Homo sapiens
gcaccaggtggtctcctctgcacttcaacagcgacacccacatcctccacctttgacgctggggctggcatgccctcaacgaccacttagctcaagctcattgtcctggtatgacaacgtaattgggctacagcgagacctaggggtggtggacctcagtggcgccacaagtggcctccgacaggaggtaacgaccccgtggaccaccaggccgcctcgaggcgaagaggcagctaagagacggaaggagaagagacccatcaccctgcgtgggtgagtccgctgtccgacactcaagtccccacaccacacttgaagtctcccgctccttacaggtagccgatgttagaccgccgttgaatcgaggggatggggtcgctagggaggcctgcactcttgtcaatgtggccattcaattataaggtaccctggtgcttctaaccaagatacatgaaaagaaaataggctcgatggcgtctggcgtcgggagtcgcggcgtaggaagaaggtcttcgagcttggcgctcgatgggcacgtaacctggtcgttgccctatgcccgtgtctttcgtcggtccacccggggggtgcgcctctgcgccggcgtctcgccgctaatgagtgaagcgtgccatcatgtactgggagtatcccggttgttaccccggggcattgtagcccgggggaaactttggccttgggggcccgtagagggctttgagccagcgggttcctgttgacccaggtgttgggcacgattaaattctctgcggtatcggggtgacaaggt

SEQ ID NO: 554596 - DNA, 239 bp, Homo sapiens
aacacctaggagaactaaatgggcagctgaaatattaccagaaacaggtgggtgagatgaattacaacttgaaaatgtcatcaaggaaaatgaaagagtcttgctctgtctcccaggctggagtgcagtggtgcgatctcggctcactgcaagctccgcctcccggattcgtgccattctcctgcctcagcctccccagtagctgggctacaggtgcccgtcaccacgccatctaattt

SEQ ID NO: 554597 - DNA, 116 bp, Homo sapiens
catcccacgcacagaggaggagggaggaggctacagagggctcaacaaaggtgaacaggaaagctgccgacagaggctcccccatgcccaagaaagcccgtctccctagttaagac

SEQ ID NO: 554598 - DNA, 137 bp, Homo sapiens
cacagtctgcgattctccctcggatgctcccaacccatcttcgtgctttctctgccagctcctggtccaactccgcatctttgctgagtcactcatggctcctaatgatctccccacccacttgggcctcctaacac

SEQ ID NO: 554599 - DNA, 127 bp, Homo sapiens
gcttctttctttctttctttctttctttctttctttctttctctctctctctctctttctctttctttctctcctctctctttctctctccctctctctttctgtctctgtctttctcactttcttt

SEQ ID NO: 554600 - DNA, 116 bp, Homo sapiens
agcggggaacaatcactttggctaggacctagcaaaagtgaacaaataggattacatgaagtgaaaaagcttatgtacagcaaaggaaacaatcaacaaagtgatggttccccgcg

SEQ ID NO: 554601 - DNA, 274 bp, Homo sapiens
gaagtggagagccgtatctcatgcctcgagtctagtgaggcgctcttactctccgctgggcaccaagaacatggatggatgaaacaaggttcctgtaggcaggtacacctgattatgcctacagctacgtgtgcgacacctctcatgcagcagtgccatcagctcttcatacctatttgaggacatggatggagctcacggagcaggaagtgtatctctggggaacgtgctgtctacagcggacatagcccgccacagcagggtgtcaagtctg

SEQ ID NO: 554602 - DNA, 535 bp, Homo sapiens
ggccagcgaatcaaaagtcaaacatatcacatgacatctccaaagcacggagtctcactctatattcgattacctgcacacgataagacaacagaagagtcagagagaatgcagctgtcgctaggctccggagatagagcaaggggccaccagtcaaggaatcagaataggttctagctggaaatggcaagaaaattgattcttactttgagtctcagaaggaatcgtaaaccaaaaataaaatactaagcatggcccaaccatctgaatggacaccccctctcagacaatggcattccaaagttagtaaaagaaaacttagggtacaagctctttgatactggccttggtaatgattttatagcataccacaataacagctcagacaacaaacagcaccccataacacaagtgggcactacaatgctctatgtatatttaggagtatgctttattctccaaacataaatttttctcatttatttacgattatatgcattgattttggaggacctcactctgtgtggtagacaca

SEQ ID NO: 554603 - DNA, 1535 bp, Homo sapiens
  misc_feature (969)..(969): n is a, c, g, or t
ccagtcccgcattggaacggctccccggcagtccaccgccacccattggaatggccaacaggggatcctgcattatggcactgagtccggggagggtgcggcctacgaatgtattgatgataatcacattattgattgcagagtctgtgatgcagactctctgaatccaggtggactcaccgaccgcagttgccgcatagtgctgtgggctcggcccctagaactggaacgcgaagaacttcctagcaatcttgggctcatacggtatgtgcatcgggtgcttatgttgtagactctattatactgcaactgtactctccgtaggggcctaggcccgcgcagttgaacacgcaagagtccacgtgcctgtccatacattggcctttcatagcacgataggtgaagcagatctctactagtctccgtgcggacgcaagtcttgatgcgcttatatggcaagttagacaactcatctggatcaagtcttttccaatgaccttgttgggaacccgtccttgtgcggacatgcgcagaacacgacagcatgggggccctgttagttgacatgccggagaagagacttgcattcgcaaattcctagggcgttgggagcctggagcctaagttaaatgcgcactggaagcacttgcaataggggcttactttactacctgtgtgggattcgcccaaacctgggatttcccccttaaaaggaacctattcgcaaaacggtcagcaacgttccccttccgggggaaaccgtatcttccgggtcatttaacgcccaagcgttggccacacgcaagggggccaacggaaacctggtggaattccgggcggtttaaccacggaatgggggggcacccacatacccgtcggcggggcggttcttacaagggccacgggccatgtgcacctttgggcgttaaccggggggaattgggccccaactggcccaaggagaatcanctcttcgtgagagtttgccaccaccgccgcaaaagggaccattggtcccacccactgggaccaccagtcccccacaagagaaaaatggggggttcaagcactaactaacatcacatcggtcagaaagataactagtgctccatatgtagcatagagacacaggggcgaccagaatatcgccgcaagagaggaaggcccacactcgaagagagatatcttacaaagagagtcaccgatatctcacttggcacacaggcagagcagagagcggggattacaagcacgcacgaggtaccatcgggtcacaccactctgtgaaaggtacgccaatacgcagaggagtagcacacaacagcccacaagagagaagataacacaagacactactcccacagtccacacaaaagacgaagaaacaacacaggtaccaccaagggacacacagcacaaatccacagcggagcagaaaacaaggagcacagaaccaatacagcacacaccgacgaacagctagtagaggcagtacatcacacccggtggtaggtagtatacgcaagagctagcca

SEQ ID NO: 554604 - DNA, 198 bp, Homo sapiens
cttagctcatctgctgagctctctggagcatcagtgcagccatgccgtggtgcagcagtgggcttccccacccactttatcaggtgtctacctgccatgcggatcactgttagtcctatgaggccctgggttaccacttaaagaactcccatgccttgcttggggttggccaaagccacaagggcacagtccattggc

SEQ ID NO: 554605 - DNA, 417 bp, Homo sapiens
  misc_feature (191)..(191): n is a, c, g, or t
cgcatctgtgggaaccgctttctctttctttgcaggagggtatactcagccgtgtgtcccccttgatcagaaagactctgttgtgaccttcacggaatcacgcatccccaggggtggggaaattcttccatctctctgagatcacctcgcggtcccatttgtgtctcttccacacaaactcccctataaanaccagcatggttccatgtgtcatacagggtggtagcctcaaagctccacctatatgaacagcgttcagccacgtgtgggtgtgtcttggtctcgccttcagcaacgttcacatgggctctactcgaagcaagaggggtgacattgccgagacaccagcataggctccacaaccacagtgcaacgggtgctcacagtaccctagccatgctgagctgcagaggccat

SEQ ID NO: 554606 - DNA, 274 bp, Homo sapiens
cagtgatatgtaatacattcataagacaagttgaaagaagacatggcagacacacagatgcaactgtgaaagttccttttcttaagaaatgcaaggtaagcaggacttcttaattacttacttgaagcaaatattagacaaagttcattcaattccagataaactcatggatgagactacttcagactcagactatgaagaaatcgggagtgctctttttgactgttgattgttcgaagatacatttgtaatattttgaagcagcgaggtaccg

SEQ ID NO: 554607 - DNA, 157 bp, Homo sapiens
  misc_feature (9)..(10): n is a, c, g, or t
cctacaaannatatgaatgtggtcgcatgtgcctgtagtcccagctctcaggaggctgcgatgagagaatcacctgagcccgggaagttgaggctgcagtgagtcttgattgcaccactgcactccagcctgggcaatgatgtgagacctaatctca

SEQ ID NO: 554608 - DNA, 159 bp, Homo sapiens
tcaaagggagatatgtcattgaatggactcggggatatcttacagttaataccttgatcactactttcgttactagctttctcgagtactatgacatatatgtccaatagtctataagggaatgatatgtcattgaatggactcaggggatatctgggc

SEQ ID NO: 554609 - DNA, 451 bp, Homo sapiens
tcgatagtaggtaactggaagcccagcaatgaagagggtgtatctatccccaccgcatgtggatcctgggtgatacggctagtccgggaagaaggagtacagaggtggaagagcccgatcaggcatgtccagacaccacaagggttatacaggatcgcgacaccatacacaacacctcgcaatgaggatgggattctagagatgatatatcccaacgatggttggggacttcagcaggtactcagtgtaagccacgataagcgtatagctggccaaggtctagaagatgtcctagtatgagatggtcaaagacagccgtatactacctcgtacaaactcaatacccgaactacactgcccagctctacgaagagggtacacaataacggatctggcagctaaccagcacacagcctcccagccgtacaatacacaggcactagatggtact

SEQ ID NO: 554610 - DNA, 812 bp, Homo sapiens
  misc_feature (36)..(36): n is a, c, g, or t
  misc_feature (68)..(68): n is a, c, g, or t
  misc_feature (73)..(73): n is a, c, g, or t
  misc_feature (93)..(93): n is a, c, g, or t
  misc_feature (684)..(684): n is a, c, g, or t
atgctttagatctgaacgcgaggactgttaactgtntctggcaaacatgaagtcaggcctctggtatntcttnctcttctgcttgcgcattanagttttaacaggagaaatcaatggttctgccaattatgagatgtttatatttcacaacggaggtgtacaaattttatgcaaatatcctgacattgtccagcaatttaaaatgcagttgctgaaaggggggcaaatactctgcgatctcactaagacaaaaggaagtggaaacacagtgtccattaagagtctgaaattctgccattctcagttatccaacaacagtgtctctttttttctatacaacttggaccattctcatgccaactattacttctgcaacctatcaattttgatcctcctccttttaaagtaactcttacaggaggatatttgcatatttatgaatcacaactttgttgccagctgaagttctggttacccataggatgtgcagcctttgttgtagtctgcatttgggatgcatacttatttgttggcttacaaaaaagatgtgaccctataatatggaactctggcacccaggcatgaagcacgttggccagttttcctcaacttgaagtgcaagattctcttatttccgggaccacggagagtctgacttaactacatacatcttctgctggtgtntgttcaatctggaagaatgactgtatcagtcaatggggatttaacagactgccttggttactgccgagtctctcaaaaacaaaaccctcttgcaaaccagctttggagaaagcccagctcctgtgtgc

SEQ ID NO: 554611 - DNA, 876 bp, Homo sapiens
  misc_feature (748)..(748): n is a, c, g, or t
gggagaacggtatgaaggtagggaagaacgttccataccatggaaggaacaagtgcaaagagcctgtggcaggaaggaatgaggagaaatcaatggttctgccaattatgagatgtttatatttcacaacggaggtgtacaaattttatgcaaatatcctgacattgtccagcaatttaaaatgcagttgctgaaaggggggcaaatactctgcgatctcactaagacaaaaggaagtggaaacacagtgtccattaagagtctgaaattctgccattctcagttatccaacaacagtgtctctttttttctatacaacttggaccattctcatgccaactattacttctgcaacctatcaattttgatcctcctccttttaaagtaactcttacaggaggatatttgcatatttatgaatcacaactttgttgccagctgaagttctggttacccataggatgtgcagcctttgttgtagtctgcatttgggatgcatacttatttgttggcttacaaaaaagaagtattcatccagtgtgcacgaccctaacggtgaatacatgttcatgagagcagtgaacacagccaaaaaatctagactcacagatgtgaccctataatatggaactctggcacccaggcatgaagcacgttggccagttttcctcaacttgaagtgcaagattctcttatttccgggaccacggagagtctgacttaactacatacatcttctgctggtgtntgttcaatctggaagaatgactgtatcagtcaatggggatttaacagactgccttggttactgccgagtctctcaaaaacaaaaccctcttgcaaaccagctttggagaaagcccagctcctgtgtgc

SEQ ID NO: 554612 - DNA, 1465 bp, Homo sapiens
tggggcttaaacacaaacttatattggagggccctcagcacctagtttctctttctccgggcacagtctgggtcccccggagacgttcagttccgggggggcagcaatgtgaaacccactttgggggccagcaggggcattcttctgtggggatgtgggtggagggctttgccgagtggtgcgtgggtggtgtgccacctctccaaaagggatgtgcctccacgagggattctcagtggccaacacccccgtatatcctcggtgtgccagaaagtgtctccctcttgttggccttatatatatttgtggtggatagcgcccgcggtgcacagcccttctcaagaaagtggtgtgtgtgtggtacaattctggagaccccactctctccagagccacacacacacacacacaacacacacacagagctctctgtgtgtgtggcccgtgagaggaggagatataacacccttctctgtgtgtgagagcaccccgtgagaggggggcacagctctctcacaccacagcggggcgtctatatctgtgggggactcccctccagaggggggtgtggagcgagagaggatataacacggggggggcgcgtatatagtgtctccccctgtgtgtagtcgccccgtgtgcgcccacaagctttgtgcgcccacgggcgtccctcacggaagggcgtctctcctctctctctccagagggggaggcccccagcggtatttgtgtggcccctctcagtggcctctgtgtgtgcgcgcccacgggggtggtagcggcactatttggcgcatatgtgtttgagagagtcgtgggggccattctgtggcgcggggaagtgtacaaaccaacattctggggggcccctgtgtgtgtgatatgggcgcccattcagggcggggggacaaattagacacacagggctcttccccgagacacgggagattcttataaaacaaccgagcagataacggggaagctcccccggggaaagagaaccccacctcctatagtgtggccagatgtgggggcacggccgcccggcgtggggcccccggggggatcatggcggggaattagaattggtccccctttggaacaaggaaagtagccccctatatggtagtgtataaccctcagagagacacggcctaccaagggcgtacaaaaaccccaacgggaggacggcagacaaaaggagagcggcagtacaagaaagggcgcccaatataaaaggggggggagcgccatcacagcggtgtgccgcggcggcgggtgaaaacacacacaaagtataaccccgtgggggcggccccccatttaccacttcctgttgttcccagggggatactctacacgggggcccacatgtgtgtgcgaaagacgggggctccctcggggtaaccccccgggccaatatagtgtggaaccacaacgtgcgcgtgtgttgacgcgcaca

SEQ ID NO: 554613 - DNA, 383 bp, Homo sapiens
  misc_feature (79)..(79): n is a, c, g, or t
ttttctcagagcagaacaatggttctaatgaaactctgttgcgcttctattccaatgtccaatttatggggaaaaaaanctaaataatgccattttaactttagccaatatgttcacacatagaatctgttaatttttataaaccttttacaacttgttcaaacctttagctttatttaatttaaacaatcctttaaccctctaacctaggcaaaactttacattcccatactttcttataatctcgtacaaaaacacattttattccccctacacatcttgtatgtaaacttattttttcagtagtctcaattacatattacgatgttaactcctagtaattttacttttggcgaaaaccttggtaagtaaggggtcgacgc

SEQ ID NO: 554614 - DNA, 634 bp, Homo sapiens
ggacaatttcccctgtatcttttgatcttcattccgaaggctcccatatatacatgataaataaatctgtatgccttttctctaattaatctgccttttatgagttgatttttcagcaaaacatcaggggaccaagggaaagctctcccttatcccctacggtatccaaaggaaagaaaatcagtgtgtcaaaaagatacctgtatttccatgtgtactgctgccctattcacaacagccaaaatatggaatcaacctaggtatccaataataaatagataaattaaatgtgatatatatatgcactacggaatactactcggtcataaaagagaatgaaatcctgccattcacagtaacatggattgaagtggaaggtaagtgaaataagctgcgaacagaaagttaaactccacatgttctcactcatgtgagagaaaaacagttgatctcatagaagtaaaaagtcagagaatactagaggctgagaagggtagagggaagggagggttagaatgagatttctaacaggataacataatatagctagacaggagaaataagttctagtgttctgtaccacatcataatgactgatagtaacaatagatatcatatactttctagctgcatt

SEQ ID NO: 554615 - DNA, 151 bp, Homo sapiens
ccactgggtctgaacactaacattgctaagaaacccacccaccaccaggatatatggaagtaacttcactatggaaagtaagagtagtcacaatactcatgaccctgttgtaaatatatagtccttgcgtatactgtcactttgtttatta

SEQ ID NO: 554616 - DNA, 635 bp, Homo sapiens
cccttttttttttgttctttctctctttctctgttcctgttgtccctgtttttgtttcctttttttctttcttttttcttttctttgtgtttcggcttttctttttttctctattctcttgtgtgtttctttctgctcccctttttgccggtgctattgtctttcttattcctttgtattttttttttccggtctcttgttcgttgttttctattgtgtcactctttgtcgtctcaactcgtcgtttcctgatcgatgattgtgttgttttgtcttctctgctttcttgtcgcaggtcgtcactgctattgttctttccgtcgctgctgtctatcgatcctctgtggcttgctgatcgtatcttgcgtccatatcgttcttgcgcctgtcggtcgtggactctgtgtgcgcgctgcaggcccttctgccgcctcgacggcctacgagtacgaggtgtccttcactggacgcgcacagcacgctaccacacggtgcacgagctgtcggcgcgcgagtgcgcactgcgtgtgacacctacactcactcggccggcgcggcggcaactccccccgcctcgacggcacacactggccaggccccgcgaaagactgggtaagccgagagcacgccaggcc

SEQ ID NO: 554617 - DNA, 1685 bp, Homo sapiens
ctatcccaaatcttttctgaagatgaacgagtttagttttaaaactgcactgccaacaagcttcactctcactactataacacgcattatttctctactcctttctgaggctgaactactaatttatacttacacatgtacacacagctctctttaatactaagctattctctccacggtcttcaccaagtatcaacagtaataacacaaactgaagctgtcattattcaaaatagtccactgactcctcacatctgttatcttacttataaacgaactatcttgtagtaactatcagaatctacattctaaaacagaaattgtactttttttctatgccacattaaccatcttttaacagttcgatgagaactcaacgtatggacacaaagtaaggccatactcttacataataaacatccctttctaagtaatttttctcaaagaatcacagaattctagtacatgtaggtaaatcataaatctgttctaagacatatgatcaaccagatgagaaactgggtggtctaatactgtgccagtcgagcattagtcatatcactaatatactaacaacagaatctactcttcatctacggcctgtagtgaactatctgagcctagagttacctagctttacatactatatcttgggatcctgaaccttagactccgaaggtttggcggggggtcccatccgcgcaaaccccagcggcccggcaaacagagatccggcgcgcagacttttctccgctttaacaatgaagtcgtccccataacacgagaactaggaggacggggccacaaatgaagcccgacgcaggcagagggcgcccacataaaataagatagaggtagtgaaaaaaaaaaaataaagatagcaccgcgcagcgagccccacacgccgccaaccgacacccctcaccatgtcgtgacaccagcgactaagacacaacggactgtgcaccccgcgctcgggtagtagctcagccccgtaggggccgcgccagagcaccgcgccctgcgctagcggcaggagagtaggggagtagaggcggacacgcggcggggccgcgtcgtcacacccatccgcccgccccggcgccccgcgagggcgcagccacagaagagacagcgcagcgagcaggaagtgggaagagtagggagtcgccagaggcgcccgtcgtccgggcggcccgaacccacgagccgctctccgcgcggcgccggcgacccgaccgcgacggcaacgcacgcgcggcgccggcccgcagccgtaccgccaccacgcgcgcccggccgtggcctcgtgcgcgccgcgttatcccgccgtccccggcagccgcgagcccggcgggagcacgacgccgcgtcagtgcgccagccggcgacgacacgagagggagccgagcgtgcgcgggagcggggcacgatcggacgggggcggcggcttagcaggtctgccttcgaactcgcgccagcgccgcgcccgcgcccgcagctagccgcgcgccgagcagggcggcgggacagaggcgggagcgaccgcgcagaacgaggaggcagcagacgcgccgtgccgcggcgtcgcgcgggacacgcgcgcgggcacggccgatgagcgctccgctagcggcgccgcccggcgcgggagggagaggaggctatggaggacagcacgacgc

SEQ ID NO: 554618 - DNA, 751 bp, Homo sapiens
tctcattaaactttttaaagggggcctcaaaatcctggggacacaaatttggggccacagtggttcccattaaaaagtcatcggttttataaaacacttaatacactttaaacagcgtgcccacacgcaaaaaagaaaacaccaagaggggctcccacaaacaactatctctctcctttctccttctcgtgagagggtttacacgacagtgcctgtgtggttactcatttacacgcgagctcttttatcactcacttcaacactttaaagtagtggccacgagtgtgagaacacaaaacacagagagtctctgtgagagacaccaggtctctctctcaccacacacagtgtgtgtactctaaagagagtgtaggggtgtgtgcagagagtagttataaagaaggagagactaacaatattatctcctcttatgcacacccctctctctgtgagagccctatatctctgtggggggcgccgcagacacttgctgtgtgcgtagacaacactatgtgctgcgcgcagtgctctccgcgcagcaccagcggccggcctctctcttcctgtggtgtgctcccacagcggtgggctatatgatggatagagaacacacccccaccaccgcgcgcacaaaccgcggtgggtgcgtgtgttctcatcatattttctcaccgcaggaaaacacagagagcaaatacgagcagaaacccaccaaaaggggggggggaataatagtctgtgtagagaagac

SEQ ID NO: 554619 - DNA, 251 bp, Homo sapiens
gggccccccaaagggggggggcccaaaccccccccttttagggttaaaaattttcggggggggggttggggggcctacccaagggccccattttgttccccccctgggttttaaggggggggggcccaaaaaagggcctttttttgggggccccccccccccccccccatggggggggaaaaagttttttctgggaaaagggccgggaaatttttcctttttttatggaaaacccggtttgggacccttta

SEQ ID NO: 554620 - DNA, 487 bp, Homo sapiens
tcttggtgcccttgatgctttggtcaggatccatgaccttcacaagacttcagatgctactcagggagtttggggtaggtcgcatttatgaataatccaagtgtcccgaggtgtctagctttggccacattggtcaagagccatggaagccaaccccacgatggttttggggctgggcttttttttttaatcccctcaagtgtcagtggctgcaagtggactcagagcaggtcccagggcccacgctgttcatattggtgtggcatagcccactactctgcagacagaaagcatactggcatttttctgcctgaacgcctgtcttgaaaacagcctggaagatgtcagtattgccattgagtgggtttgggtgacaagcggcccccacgagtcccctgtatgctatatgaacagctgaaggtcggagacatccatgtccatgggcctgtcatccctagtccgggccggagagatgccacgtagacgc

SEQ ID NO: 554621 - DNA, 202 bp, Homo sapiens
tgaacacgtgtcccgtggggtgtgcgtttaaaaactcgattcatagacacaggttccatgttccatttccgtcatggtgaagcgaaatgaattggcctggctaccactgtggtcgcgtgcgacaggtttgacaaagaagatatcatgtttctgattttttttgtgtagttggacgacgaattgttcatggggtacctgtagc

SEQ ID NO: 554622 - DNA, 112 bp, Homo sapiens
  misc_feature (112)..(112): n is a, c, g, or t
gcattcggcagcggccttaacctcccttacacctcctattcttttcattcttcttgcagcttctcgcagtaaagctcccagccatatttacataatagcgcgaggcgcagcn

SEQ ID NO: 554623 - DNA, 659 bp, Homo sapiens
atcaagataaaaatcggaggcttgtttccattttctcgataatagtagccataggtcaacacaagactcccataaagatatgactcactatggggcagccagatacctatttgtagtgaagcttacgtatccatgcatgcacgcacaacacgtaggcgtgttccttccaaagggagacatcattacacaggcaggggggaacagtcgacatagtgcttcaggcaaacacattccatgtgcttcttgcaatcacgcatgcaatccgataggcatcagcagaacaaatctgcttgttcgtcattcgtgcaggagttcgtctgcagcatcatcccattccacgtctgcgtatggccattctgggcccatatggatcattccacacaaggtcacatggaccccaaggcttctatcgtacacacgtctctgtccacgcaagccacgcaagacattatacccgttgttacgccccactaatataacacggggtgtccatggggacctacccgtgtaagaaacgcgccgttagccccaataagtcgctctgcaaccttctgttgtcccagcttagcttcacttgttaccccaatttaaaacaggcgtggctcccacaatggcaccttgtccttcaggattccaattacgaacgcccgcggtggaac

SEQ ID NO: 554624 - DNA, 658 bp, Homo sapiens
tttaaagtacagttggctgggcatggtggttcgcgcctgtaatcctaacactttgggaggcctaggtgggtggatcacctgaggtcaggagtttgagaccagcctggccaacctggtgaagccccgtctctactaaagatacgaaaattagctgggcatcgtggcgggtgcctgtagtcccagctgctttggaggctgaggcaggagaatcgcctggacctgggaggtggaggttgtagtgagatgagatggcaccattgcattctagtctgagcagcagagccagactctgtctcaagaaagaagacaataaagtacagttatttgctctgagcctatgctaacggtttggtgttcaggcattctttattttatgaaatgcagtatatatagactatgggatgtttctctcataaccttacttggcaacagccttactttatggtctcaaaattttgggggaaattttattggactttgaaatgtagatttctgggaagtatgcgtgaggcgatgaatattatggatagggtgaactaggtgcctctgagaccccttactgccctgagattctttagggctgcaggctgaatccttatgccaatgagtcatccatacgcgagcttttggataggagagtgggtgatgtgggcggcct

SEQ ID NO: 554625 - DNA, 145 bp, Homo sapiens
  misc_feature (28)..(28): n is a, c, g, or t
cccccctttggccccggggggggccccnccccccccccccccaaaaaaccaaatggggtcccccggcccccccccgggggcccccccccctggggggggccccccccccggggggtttttttcccaaaaagccccgggggttcga

SEQ ID NO: 554626 - DNA, 476 bp, Homo sapiens
tggttccatagcacacttatacgttaccaaataaaattttatttaaaatttccatataaaattggataaagaatcagaagagaaaacccaaatcaggggcaattgttagcaaatacttaatcataatctacagcattaagaggtagtaaagatttttagccaaattttgtcagacccacttggtccctgattccggcagatggagtgggagtagcttatacgatggtcacactggtgcatctaccactatcacacacacctgttagtggacagaagtcagtccagagtggcttaactctaagagtacaagaagcaaattggagaacaggagtgaagaagagagaaagtaaacacactttgaaactgttcagacccttgctggataggggtatggacctcatgccacccaagcccactctgcaggacactggcttttgtgcagctcttcatcacagagtctgttgagctacaaccca

SEQ ID NO: 554627 - DNA, 467 bp, Homo sapiens
gcccgatccgatggggtgcctatcttatccgacttatgcgcctgaggtacacacactatcggacatcgattgcaaccgggagctggctgactagaggtagtgactcatgtcacagccactagagtacaagcagtcaagagctacaggaggatggcctatggaacttctcaagacggctagtcgtcagagcatggcaagctgtgtcatgactgcgaatatggtagatcggcgaacgatgtaacacgaacggaccagctcacggtgcagattgccctactagctccaggtacagctagagacgagaggctttgacgtgataggagacggtgcctgttgcagatacgacgatacgtgggaccttagtgggcatgcagccttatgcatctcacggacaatatgagcatgtgagaccaagggactagagacagttttacaaggctgcccaggtttgaagctatctagaggac

SEQ ID NO: 554628 - DNA, 224 bp, Homo sapiens
taagtcaatcttacagctggagtatatttttcaaagcacaaatattggctgccaagactgggtgagtaaatgtactttacccccttattattttggaatagtccacataagataattcttctgaagacctttgtgggtgcagctgaatttgtgtgatagtaagtaactacacactctgtattattctcccatttgcatttccaggggtataaatagtcgttttt

SEQ ID NO: 554629 - DNA, 289 bp, Homo sapiens
tggaaacggagcttggctttgttgcccaggctggagtgcaggggccccctcggttaattgaagcctcggcccttgggttaaggcaactcccttgtttcagcttccaagggggctggcactacgggcccccaccaccatgtccggctattttttgttttttcggtagaaaggggtttcaaccatgtggcccagcctgacctgaaattcctaatttggggggaccggcctgcttaaccctccaaggggctgaaattacaggctgggcccattacaaatggccaatttcatg

SEQ ID NO: 554630 - DNA, 1883 bp, Homo sapiens
gtgagcctcaatacacagagtggtgtgtctcgttgatgtgggataggtggtggtctgagggaagattgattgatggcggggaagactgtgtgttggttggatggacggcggttggtgatcgtgcggatgtgagtgttgagtttgttgtgatcgtccatacatgctctcgttggtgaatgtaggggaagacacgcaatgttggcacgccagtctggggggaagaatggatgtgttgggaggtttgttcggtgagtgacagaatagaggggcaggatgacagtagcacaggacggagggggtgtgtttgtggttggatgagatggtctctcgcgccctacgcccagtgcgttaggtaaggagtgcatgtcaagtagttgaggtgtgggtgttgtttgagaacagaaagtagtgtatgtgctaagcaggttggtggggtgggcacccccgacagagaggagtggatgggttggcctactaacccactgtgttctgttaatttagttgctagaactcttgttgtgttgtgtggaaggagtgcaagtctttcgtaacaggactgctgtcgtaatcattgtttgatatagtgtttgtgctcgacttcagtcaacaacatgggttgggtgtgaagacgacaacaacatactgagtggtcgtgtggagcgcgccaaactggtacgatcatctccagctgccgtgtgggaagatatgttctttttgggaagttgtggagaacccactgcatcatgcttgttggtgagaatcataacaataagttctccttgtggggggacaatatgatgatgttgtggggtgatgataacgttatgatgtggtggtggagtaatcttgttggttatgccacgcctccactggaaggtctcgcacaacatcagatgggggacacgaacaacggttggtggagtaccaccaacaggaggatgtggacgaccacgacaactgtgtgcacccacacacaagcgtgggaggtgtggagagtgtactacgcgtgaggagctgtccgcccacaggggagtgactacacacccacagcggtggtggaagaactgagagtcgttttgtgctggtgcgacaggtggggaaaagagaagtttctactccactcatcatatattgtgttgtagtagtccaacacagaggaggaagagatgtttgattatagtaatcttggtgctctctgtgagtggtattgtggtgagtgttgtctgtgttgagctgggtgtggtagacaacacaccaacatagctcgcttccacacagagaagatattgtgtgtgttgagaagagagcactcaacagacacgctgtgtgcgagagtgaaattgagagagagagtgtgaaagaatgtgcgcaaaatagttgttgtggtgagaagagatagtgtggagaacacatcgtgtgcgcacacgtgtgtgtgcacaaatgtgtgtgcacacggtgagccggacacacacactacacacgcagcgtgtgtgcacacacatagtgagttgtcacagagcacgcacacatgagcacacacacaagttgttctgtgtgtgttgagtgtgtgttggccacatgtcacctctggatatcacaggatatcacacagagggaagaggaagatatggagaggcacacccacaaactgggaaactctcacacttggtgtcttgaacccttgggtgcacaccatggtgaagtgtcgaactcggcatgtaaagaatcttggtatggcgtggtctaagaaaacaatgccgaaaataaaaaaaataaaggcagttaacttcagggtcgagaagagtatcggatgcaacctcattttcagtatgtttgttttgttggttgttgtttcgtctttgttttttgctctgttgtgtagt

SEQ ID NO: 554631 - DNA, 1448 bp, Homo sapiens
ctgttgaattttgcactttgtacttctgatctgctttcgtgttagtcttcgcctcttgcttgtggttgtattgattgtgctcctgctagttttcgcttgatcatcattcgcttgcttataatgaattatatctgctctctcatcgctctgttttgcctgtcacctttactcgtattctctattccctctgtccatttctatacattgcggcgcgtcattctcttagtctataggtcaccctcgttgtattgtggtctgcaaaagttgtacctcagtgagtagtgatcgtgctgggctgacattaaacccctatttgggaagttaaattctaagttgttccgccctggtcatcggtcttttgcaagtcgtgttgttgtgtcttttcctcttagtggtttgcgcctatacttgggtgctttgagctattgtacttctgtgagtgtttgtgtgggttgccccagagtgtctatgattctgtacgtctgttgcataagacggcttgtagctttccgcccagttacgtgtctcttgtttccatcctttttagctgtttccttggatacgagtccttagttttaacctctgtattgggcttttgctatgtgtagcagatattcttgtgcttcaatcatctgtattgggtttcgtcgcgcgtactctcgtccttggtgctgcgctgtatggccgttggtgtcggtaagtgtagttgtctgttcgtgatctcattgggctgcttgtcctcagacgtcagtgctgatacattgcaattgagtcaccctactagcttccaattccccgtgtgtctacgttgtctccaggatggctggtaaacgtcgtgattatctcgctgtccctcagtgtaagcgcgagtcataaacgtctcataactttgcgctcttggagggtcggtttcgccccagtccggcgtgaccctgttgttgtcagcgcccgttgtgctgactcccagatttgttccttggtatgtttactccgtgttcatctgagtattacgtgtgggttactgtgagcacttttgcgtgggtgtaaatgctgctcgtctctgccgtgttagttcttctctatctacaattgtgtaaatgatctaaatttagttgtttatatgtggtgtctatagcgaagtttttctatcaagttttcccccatccgcatccccatcgctggacctcatcttgagatagacttgagagagatgtcttggatactcacgtctgtctgcatgtagctcatctgcttagtttacgtggtctgggatacaggatgtaagtctcctttttgtcaaagccatattgacagattacaccgaaatactcctcctctttgtatcacttcagccttttgctttagtttggtaagttttaagaaattgcaagcagcaaagttgtgattcacgtgggcacgatggactccaaatgcttccaatgttatga

SEQ ID NO: 554632 - DNA, 165 bp, Homo sapiens
gctgaacttatagcaggccaagcaatgctttgagcgactaaaatgaggttgggggtaatgctaatcgtcaccctcacaggaatggccacggggactgttatttcgcgagctggtttctagacctgttagctggtaccatggtgagcaccatttctggacgctcag

SEQ ID NO: 554633 - DNA, 1069 bp, Homo sapiens
gcgagaccccggaggctttgggtgcgctgcagctggtctgcgtgcgcgcagctgtttcggtaactgctttgcctcccggctcccgcaggagtgatgcttggtggtggaggtcggcgaactggcctgctccctgtgatgttggtggatgccgagtgctggtgcatgtgccctcctgtggagctgcctggtgtgtgtgtgtggtgcctgcactgtgtagtgctgcccttgcctcctgctgtgtgcccctggccagaactctgcgcctgtggcctccctgctgcttgctgatgccctgaagaggcgcggctcttggcctgagatctggctgcctgtgactcttggtcatgcgcccctgctgtccagaactctctggcaccgacagccctgtgccctgacatccgttcaagctgccaggcaacgagggagagcttccatgggagcagagctgctcttggcaggcttgaggccctgggatgacccggtcgtcagtgagctcctgcgagaacgattacggcagggccatggctgctaaagaagcagaaactagaacaggcttcaggggccagctcaagccaggagtgccggctcgagccaaggctgcaaaagaggatgagaccagtgatggccaggcttcgggagagcaggaggaagctggcccctcgtcttcccaagcaggacctcaaatggggtagccccttgcccaggatctgtctccttgtccagcttggccacttgcaggccttcgacctggtcaaggccaggccctggacttggcgttgtccagtctaagagactggccacaacggccggcctgcccttgcccaagagctgcggcttacagtaatctacagagacctgtgtgagcgaggttcttctcagtgcggcttgcaacgtccggacgttacttcctggtttaatcctggtgaccccttcgggattcacgccaattatatcggtcagtgtgggcccggagacaccatccattcaagaacttgttggtgttggcgcctttgaaccagggtagaagacctgtcctttgtatcgaggctgatgaaagtggtaaactcct

SEQ ID NO: 554634 - DNA, 258 bp, Homo sapiens
ctcaatgctgcaccacagcagccaggcgacactgaaaccacatcttacctgacgacaccacaacctcaggcctcgcgcagccatctacacccacccacagcagcactggctcgctacacacaacactgacccctgccagctccacaagcgctggccttcaggaacgaatctaccactttccagagctggccaagctcacgtgacacaacaccttcacctcccggcctccggcgctgcagcctgtgggtggccagaatt

SEQ ID NO: 554635 - DNA, 551 bp, Homo sapiens
agcggactttttcttcgttttttttttttgggaaacggagttcgttctttcgcccaggctgtcgtacagtgggcgatctcggtcatgaacctctgtccccgggtcaagcgattctcctgcctcagcctccggagtactgggattacaggtgcccgccaccacgcccggtgatttcctcttaagactttctacagcttccttatgaaatcttctgactgggccttgagcaatagggtctttggctacaatttaatgctcttttccatcacactatactgcaaaaactctccgtgtaggtcctgatctgtgtcagtcaggcaaaattacatcctgggaaaacgtcagatgaccaggggaggccactcgcttccgtgtctcatccagtttcagaacacgtttctgtggctattcatttagcttccagagcctcagccctgtgccctcgctttagctgtacagtcagaagctggttatactaccgcctcgcgagggtggccatggtcgctgtatgggagagacggaccgcttcaccaccagacctcgttggcgaa

SEQ ID NO: 554636 - DNA, 1493 bp, Homo sapiens
actccagcctagccccataccccccaattaggagggcactggcccccaaacaggcatcaccccgctaaatcccctagaagatcccgcacggttctccctggccatcgctatgagttgaccgatgcctgacccctatcgcatccttcaatgacctgggacctggcaggacccacaccacagtgcaccacctggagatccatactcggacgtgcccatggagattcctggacgacacgggcatatccacggtgatatgacactcttgatacccacgtcctaaaggcctgcggataaatctacgggtgcgagacgacggtgggtactccgcattctgacacttgggactcacagaggagacccgtgtggccttccatttacttcatgtgcgactacacccacaacacctggcccaggccctaccatcctatgtaccctaaagacccccatcctatatgtcgtgcggatagcgcgaagctgggagatacacggctgtccttgactcctggacaaccacagccgctgccttgactgagccagtttgccgaacgaacgcacactcacacgcgattgggacgacacacacgatgctgaagacttcacacgcaccaccttcccaactgggtacgatcctcgctaagcacgcacttccttaccaacccggcatgcgacagccatgaggcaaaagacacacaaggcaagcacattctgcaacgctacatggaaccgatttcccctcacccacaaccactcaaacatttcccacttaccccacgttccgattcgcattggacggaatgatcccttttcgcaaacctccgaagttcccacctccacaccgccaccaggcgatggcatcagcactatacaaccttatgtccacagacgggcgcgccttatacgcacagaagagtaccccttaacacaggacactcccacgaaacgcaaccacccgctttcccgatgaattgtatccccgggcatatcacccgcagtacaggtccgcacaccggaggacaccaccgcgtccaccgctataagggaacccacttatacaccacattgcggccctatggcgttctcactacaaccgcgcccacaaactgcgcacttgtgactcgcgcaacacagcttggccaggaccgcgcgacagtacatcttatcaagaaaacacctgtggcacacatcagcacagatccagggacttgacaacaccaccccgcggacgatgcctcgcaacaaccaccccaaaccttggcagctcccaagtggatcaagggcggaagaagacgcctgggacacatgcgaagcggcgaacagacgcggaccaccgaccgcacacacggtcgcatcacagagagacaagcatgagcgagacacgacacaacggcgccaccactcacagcggtcacacaacaccccgaccaaccaacacaaggagacacagaggcaaacgctactgtaccaaccacagggggacacaagccgcatagcgg

SEQ ID NO: 554637 - DNA, 470 bp, Homo sapiens
cgacactcttggttggaaggtctatatttcatcttggattgacctctcctctgttttcagacatcttctcagggagtctgaatgcataaggaattacttctcaggtgcttcttgagggagagagactttatttttatttactttttttattttttattttttgagacagggtctccttttttgcccaggatgaagtgcaggggcgcaatcatagctcactgcagccttgacaacatagcaagactctatctctacaaaaaaactaataatgtgtggtttttttagtatgtaaattatacttcgccaggcacagtggctcttgcctttaatcccagtattttgggaggctgaggcgagaagatcatttgagcctaggaggtttaggctgcagtgagctatgattgctccactgcattccaggctgagtgacaaagcaagactctatttgataataacaaccaagagtgtcg

SEQ ID NO: 554638 - DNA, 163 bp, Homo sapiens
  misc_feature (85)..(85): n is a, c, g, or t
tgggcccgagagctgcggcttcgatgccggggtgggagctactcaggccgcgcgcagccgcagtcctgtgcagcgcgtgccctgntcctccggaccgaaaagccgaagccgtcccccgcgacctaccccgcgcaactggctcgggtctgcacctagatggctg

SEQ ID NO: 554639 - DNA, 269 bp, Homo sapiens
agaggaaaatatatttgtactaagaggcaaattatccacagtcaaaatgactaatcattgtttaacttaaatgtgaaagataatggagagaggaatgtagcatttgtaaggaactgaaagactgaataatgtattagcaggtgaggtgtgggcctgtgagtatggacatacacccatggtatgtttgtgtgtggggtttatgtaaaacatagaaagacatatctacttttgcaaaaataaatcaacaaaatatgctttctaaaaaaaaa

SEQ ID NO: 554640 - DNA, 114 bp, Homo sapiens
tggcctcttgacagtctccagcctaatcctccctgacagtctcagcctaaccctccctgacagtcctcctgcctaagtctcctcctgtcctctccagctggtatagtgctcgct

SEQ ID NO: 554641 - DNA, 590 bp, Homo sapiens
ggaaccactgtagtacatgtggttgtcattgactgaaacatgttatatggtgcatggctatttctttaggagagattccagtactgacagtttaaaaggccaaaacttgttttgagaaaacctatatagttttggttgttgtggcctagaaattgtcttgaaactaaataacattttaattatcccacgccttcaactaacataaggttgagtcaaagttaattaatagattgaaggttgtttgcctcaggatagcatttagaagacatgtgttaattccttagttgaatttctgacttgaagcacaaaataaataataagcattatttcaagaaaagatacttttctatcttccattaagctttgcaaaaaaggtaaacttataaataagaataaataagaaataagaacctacagagtttattatttccaagagacatttgcaggtggctgacttctgtttaaatttaggtggtttcaaagaacaaatataatgaaagtgcttaatgattagaacttaaatacattaggatcctcattaaaatctagaataatctgcttgaaattaccattcaatgtagatgcatctc

SEQ ID NO: 554642 - DNA, 199 bp, Homo sapiens
cgtcttgtgccggtgtgctcgcagcttctcaggcccgtgattttcgttaagttgacttgccagtgtccaggtcatgcttgctttgctcgtctctcacatggcctgctccgtgctgtcttgttggcccctccaggcccagcctctggctcccgttgggctctaccgttgcccgaacgtctgcctcacagcagattcttca

SEQ ID NO: 554643 - DNA, 436 bp, Homo sapiens
  misc_feature (16)..(16): n is a, c, g, or t
  misc_feature (75)..(75): n is a, c, g, or t
  misc_feature (91)..(92): n is a, c, g, or t
  misc_feature (136)..(136): n is a, c, g, or t
  misc_feature (166)..(166): n is a, c, g, or t
  misc_feature (170)..(170): n is a, c, g, or t
  misc_feature (195)..(195): n is a, c, g, or t
  misc_feature (217)..(217): n is a, c, g, or t
  misc_feature (225)..(225): n is a, c, g, or t
  misc_feature (228)..(229): n is a, c, g, or t
  misc_feature (235)..(235): n is a, c, g, or t
  misc_feature (239)..(239): n is a, c, g, or t
  misc_feature (247)..(247): n is a, c, g, or t
  misc_feature (255)..(255): n is a, c, g, or t
  misc_feature (281)..(281): n is a, c, g, or t
  misc_feature (288)..(288): n is a, c, g, or t
  misc_feature (298)..(298): n is a, c, g, or t
  misc_feature (306)..(306): n is a, c, g, or t
  misc_feature (308)..(309): n is a, c, g, or t
  misc_feature (326)..(328): n is a, c, g, or t
  misc_feature (336)..(336): n is a, c, g, or t
  misc_feature (342)..(343): n is a, c, g, or t
  misc_feature (350)..(350): n is a, c, g, or t
  misc_feature (368)..(368): n is a, c, g, or t
  misc_feature (372)..(372): n is a, c, g, or t
  misc_feature (403)..(403): n is a, c, g, or t
taaacactggtatttncctcataaacttcaactaaaaaaaaaaaaaaaaaaaaatatgaaaactacaggaattanaactacctgcaaaaanntcatgctgagcctgaacttccaagtgacagcagaactgaaaatngtatgtctgcacaaatgccaaggctaagtnagtnacacaggcatgttacagcaaaaggncagagccaactgttaatttgtncacaattnagnnattggnaganttatattntcattttntatgttttttgtttattttattatanttttgtnctaggttttngatttttntnnttttttttttaataaannngttttatncaaacnngctattngtttatttcaagaaaganaatngaaaattagtctaaggcctttgttttaaatnagcttaagctatatgatatatatatatgtatgt

SEQ ID NO: 554644 - DNA, 164 bp, Homo sapiens
tactcggcgttctagaggatcccaggatggaagctgtaaaccacgttaagcttcgaagtttgtggcaaggagaatagagaaatggtgtggctcctgcgtcagggggcggggtggggattttttttttttttaagatgggcaactcttcatctacaacagatttt

SEQ ID NO: 554645 - DNA, 989 bp, Homo sapiens
aatgattaagtctctcttcacctgccagacatgtctaagctcacagtctcctaaagagcacgaacgaggtgagtgaagcatcttcattggagggttgagctttgaaacaactgatgagagcctgaggagccattttgagcattggtgaacgctcacggactgtgtggtaatcagagatccaaacatcaagcgctccagggtctttggtgtttgtcacatatgccactgtgaaggatgtgcgatgcagctattaatgcaaggccacacaaggtggatggaagagttgtggcaccacagagagctgtctccagtagcaagattctcaatagatcaggtgcccacttaactgtgatcaaagatatctgttgcgctggcattacacaagacactgaagaacatcacctatgagattattttgtgtcagtatggaccaattgacgtgattgaactcatgaacgtgaccgaggcatgtggcctagaaaaggggctttgcctttgtgaccttctgacgaccatgactccgtgagataatgattgtcatccagaacatatcatactgtgaatggccacaagtgtgaacgttagaaaacagcctgtcacagcgagagatgggctagatgcttccactccagaccaaagaggtcggacacgtgggttcttggtagacttcgctgatggtcgtcgagagtcggttcgggcgcaaatgactgcttacggcccgtgcgaaggaaactccaggaggatcgatcggtgggcgccgggtggccaccgtgatagctggtgcgatttgggtgcgcgtggcgatgttatatcgatttgtgatgcttggctgcatatggatggggagactaaaaaattcggatttacacaatccgctcaaatatggccctattgcgaattcgcgcaacttgcctttcatggcacttttacaccgacaagtctggccccgcatatttgggccaacacaccctgagagacaaagaacgcct

SEQ ID NO: 554646 - DNA, 528 bp, Homo sapiens
cttttacctcgcggcctatttttttgggaatttgtgagggaaacaatttttccccggaaacaatttttgccttttttcccccaagccgaaattaccccccctaaaggggaaaaaaggggaggcccccgcggggggggccccttttaaaatgggtgatcccccggggcgtaagaatttgggcaaagggggggggaaaattgtctcgccccaggggggggcccaccaaattaatttttggaggggggttttcgccttcccccaagggccaaggggcgggggaaacggtttacccccccttcccgggggaacaaatgggggcccagccggtctttgggcgcggaccccccataggcggtaaaaaaccgggggtgggcccctcccagggtggcccaaagcccccccccccccccaggggagggctcctgcctcttgttatggagcttgggaataaaaaaaccgggggtttttcgccaaaattcattaaaactttttaccggcaataatgtctaaaggccagatgtaataaat

SEQ ID NO: 554647 - DNA, 174 bp, Homo sapiens
aacccccatttttaagcctggcaaacccaagcaagaaatgttaccgtgttggttctttgccagccttcgtttccgaatgggagcaggttggagggagggagagccagatatacactatgggctgtattaagcccggttggttgccatgttgttaacgagcccctatttccttta

SEQ ID NO: 554648 - DNA, 163 bp, Homo sapiens
acgtccgatggcccacggtgctatgtaaggagacagctgacttcacggatgtacacaaaagggcgctggcagataggtggagctgaaggtcaccgatgaaacgggccccaagggagaggagcgcgtgaagcagaaggcactagggggattgagacagatgtat

SEQ ID NO: 554649 - DNA, 324 bp, Homo sapiens
ccacccaggcgcacttctggctgggcctgccccacaacgccgagagagtcctcccttaccactcagggtgtggacgttatcagtaaaatgctgatagatgcagatattgtgaggatgaggacgacctggcctacgcagagactgagaacaagacgaggaccgactccacgttcgacgggcgccctgcctggatgcggaccctgcactccaccgcgtcctcctcgttgcccctcatcccccatacgctgagccacctcaagcgctccgtgccgcatatcgaggatcctttgtccaggttctttgagagacaagtgcgcctgggtg

SEQ ID NO: 554650 - DNA, 237 bp, Homo sapiens
aaaccgggggaaccctcccatcctttggggccttcctaggagagcaaaaaaatttggtttggccttttcctttttcggattgcgggctggaaaaatttggccggtttttaaaagaggttttattttgttttcccgggaagggccagtttgccgggtcaaagggggattttttttaaggggggttttttggtttcccatttcaattttagatccccttttttttttgggggctgccca

SEQ ID NO: 554651 - DNA, 980 bp, Homo sapiens
aacacggtaacctacaaatcgcgtcattgcgtacctctatcactcagtcaaatagcccttgatactgacagccattctcaatccaaacgctccctgaagtttctaccgagccgacagctcaattctcatatactcggccctaagggatcattacatccaactacttgagctatatctgcactagactaaagcgtcttacactacggaatcggccactcacagatcgatttcataatgcctctcctcaagggacttatccagagcttacaccccacataattatgcatctatgttgagtaacttgtcatagtcaagcactcgagtaactctcgtcatctaccgccccactattatataacttactggtgagaacctggtcgtgtttgcattagtattaccgacggtatctcgctgaatcataactatcgacatctcctatgtatacaggacctgcatggcaatacgtatctgacgagccccatatatctcaccttcttactattattatcacgcaaccagatcgagccaaatgggtggcttcatctgctaacttccagccaacaattaatcagactatgaaaatccgctcattccacaagaggaaagatcaccctgcatgttcatacacccctatatcgccccatattctacctaccttatccgctacaaatgccccgtacaatacagtatgagccgggattttctaccttgctttaacacacacataatttctcagagctaacacccataagaaaacaaaacctacgccaaaatccatttcgactatcataattcagtgcgggggtacactctaaactattcctttccccgaagaagccacttttctcgggcccttattcccgggaaattgcccccgaagaaaggtccgggacctaacccccgaaatggccataaaaacccaacactgaaaagtattccgtaatgccatcctcgaaacggccccattccatgttcgtaca

SEQ ID NO: 554652 - DNA, 412 bp, Homo sapiens
gccactcaaatccaggccactgtactggatttccacatgaggtctcttggctgcacacagatattccaagctctaaaatatattttttgagtctgggtggctcatgcctataattccagtgctttgggaggccaaggcgggaggattgcctgagtacagtagtttgagaccagcctgggaaacatggcgagaccccatctctaaaaagaatagaatagaatagaatagaatagaatagaatagaatagagaataatagtctagcatggtggcactgcatctgtgctagctactcaggaggctgaggcaggatgatcgcttgagcccaggagtttgagactgcagtgagctaccatcatgccacccactccagcctgggtgacagagcaagatcctgactctaaagacatttg

SEQ ID NO: 554653 - DNA, 1133 bp, Homo sapiens
  misc_feature (152)..(152): n is a, c, g, or t
  misc_feature (431)..(431): n is a, c, g, or t
  misc_feature (442)..(442): n is a, c, g, or t
  misc_feature (463)..(463): n is a, c, g, or t
  misc_feature (468)..(468): n is a, c, g, or t
  misc_feature (478)..(478): n is a, c, g, or t
  misc_feature (543)..(543): n is a, c, g, or t
  misc_feature (546)..(546): n is a, c, g, or t
  misc_feature (562)..(562): n is a, c, g, or t
  misc_feature (581)..(581): n is a, c, g, or t
  misc_feature (707)..(707): n is a, c, g, or t
  misc_feature (761)..(761): n is a, c, g, or t
tggcggcggcagcggtgtcagagtcttggccggagctggagctggctgagcgcgagcggcggcgggagctgctgctgacggggcccgggctggaggagcgagtgcgggcgggggtgggcagctgccgccgcggttttcaccctgccgctgcngcactacttggaagtgagcggctgcgggagcttgctgcgcgccggggcctggcctggctgcagggcctgccgcagctgcacagcctcgtgctgcggcgcaacgcgctggggcccggcctgagccccgagctcgggccgctgcctgcccttcgggtgctcgacctgtcgggcaacgcgctggaggcgctgccgccgggcaaggcctgggccccgccgagccgccgggccttccgcagctgcagagcctcaacctcagcggcaaaccggctgcgcgagctngccaggccganctggcgcgctgcgccccgcgncctgnagagcctcanactcaccgggcaattgcctaggactcctttcccgccgagctctttcgccccggcggcgctgcccntgntcagtgaactggcggntgtgaacaatgcctccgangaactcagccccgaatcgcccaactggcctcgctcaagacgttggacctctcgaacaaccagctgagcgagatcccttgcagagcttgcgggactgccccaagctcaaggagatcacatttccgtngggaacacggctgaggggacaagcgcctggagaagatggtcagcggtgcagacnagatcatcctggagtactgcgcgtgagaggccgtggtggtgggaaggggcaagggcgtgcgagggctcggagacaaggaagaagagccgcgaggaaagaggagggagaaggaagcacaggcgggaaggttgtgcttgtcgaggagcagtgatttggagatccgggcgggtgtgtcagggtctgcacgtctctaaaacccgtaactatgacagtcagagtgagcccgaggtcgggaattcggcctaaatagtggggcctgtgaagatactgacaggaatccccagcggtctactggaacagtcacagactttaaaagagtcacctccacagacgcaaaccgtatccgcaagaaatctgcgaacacaagagaag

SEQ ID NO: 554654 - DNA, 128 bp, Homo sapiens
tcggaccgtcttcatatactactttgatggctacctcaaatcaaatcatatgaacttggggtcaggcatggtggctcacacctgtaatcccaacacttgggaggccatggtaggtatgatgaaggacg

SEQ ID NO: 554655 - DNA, 397 bp, Homo sapiens
  misc_feature (75)..(75): n is a, c, g, or t
ctgggtgcatgatgtggcccagctacttgggaggtgggggggagaatgttgaactgggaggagaggttgtggtgnggcgggattgcgccattgcactccagctggggcaaaagaacgaaactccgtctcaaaaaaaaaagaaagaaaattatacttggttgaaataattttatttcattagatatggataataattttaaggtctacaattttatgttcgcttgtgtatcggagtcggtaaatcataaggatgggcctatggggcattcatttcaatatagtataagggtaacagagcaaagagtatatgaatactcatgatcctaccacatttggggatatagtcggtagacccttttggtgcccatgtgcacacattcacatgcatgcacccagg

SEQ ID NO: 554656 - DNA, 336 bp, Homo sapiens
gctgaatttttttgattgcttgctttatttccctgttacatctttggatgacctatataggtaatcatatcatttgtaaataagaataatggtttccttctttctctcttttcaaaccacttattattcagttttatcttttatttattaacagagcatccagtgcaatgtttaatggaagtaataatggcattcttgtcccattcctcactttactgcaatactgctaacattttataatgataacaatgtttgctgtgggtttatggtaaatactttatcaagattattaagtgttctgtttccagatcataaagtattgtagtttgataattt

SEQ ID NO: 554657 - DNA, 165 bp, Homo sapiens
tggtacccattgtatcgagagaaatagttgtaggcataaaaatgattaaggatctagtataatgagatcaggttcgtcctttattgttgtgtactggttatcatttgattttcgaggttagtttgattagtcattgcttgtggtgggtagattaatacggttgtt

SEQ ID NO: 554658 - DNA, 138 bp, Homo sapiens
ccggagcccgggaagaccgccatccaggactcagatgcaggagccctgctggccacatgcaaggaccagcatctcctgagaggaccgctgggcttaccttggggggcaggatgcctggggacagttcaggacacacac

SEQ ID NO: 554659 - DNA, 183 bp, Homo sapiens
cgcctcctgggttcaagcaattctctgcctcagtcttccaaagtgctgggattacagtgttgtgagccaccgtgcccggttggcagcactaattttaaaaaaatgtttggtatgcttggtaattcatggttgtaacaaaccaacagtatagaaaaatataattgaaagcccctgtcttagtcc

SEQ ID NO: 554660 - DNA, 210 bp, Homo sapiens
aacaggatcttcaaatgcacattagcatggcttctcagcgaaggcatccgtctccaaggctgctcaaatttccgtgtcccatatcgctaatgcgatgagcgacagccctctctgtgtgcatcagcatgctctgtctaccctggaataagcccagctatagagcaaaagaagggaactagaggttcatctcgccattgtgtcaaaggcgtg

SEQ ID NO: 554661 - DNA, 367 bp, Homo sapiens
  misc_feature (3)..(4): n is a, c, g, or t
  misc_feature (82)..(82): n is a, c, g, or t
  misc_feature (101)..(101): n is a, c, g, or t
  misc_feature (111)..(111): n is a, c, g, or t
  misc_feature (113)..(113): n is a, c, g, or t
  misc_feature (179)..(179): n is a, c, g, or t
  misc_feature (191)..(191): n is a, c, g, or t
  misc_feature (226)..(227): n is a, c, g, or t
  misc_feature (254)..(254): n is a, c, g, or t
  misc_feature (283)..(283): n is a, c, g, or t
  misc_feature (291)..(291): n is a, c, g, or t
  misc_feature (307)..(307): n is a, c, g, or t
  misc_feature (339)..(339): n is a, c, g, or t
ttnngcacgagaaatagttcagtacattttttaaagttgtgcagtacatttttgtgaattatcaggagtaaatttgacaagnacatgtgaataacctcctntaaatgaatntnataacaaaaatgtactgcacaactttaaaaaatagttcagtacattttttaaagttgtgcagattngcaattttttgntatagctttgacttttctatgctgtgaattaatanntgcgatttggcaaacagccctgttgtntttgttaaaccctaaattttaagaggaantggcaganttaaaagcagaaacangaagatggacatggattagaggttatgtattntgaagtaaactacaaggtactaacatca

SEQ ID NO: 554662 - DNA, 341 bp, Homo sapiens
  misc_feature (3)..(4): n is a, c, g, or t
  misc_feature (82)..(82): n is a, c, g, or t
  misc_feature (101)..(101): n is a, c, g, or t
  misc_feature (111)..(111): n is a, c, g, or t
  misc_feature (113)..(113): n is a, c, g, or t
  misc_feature (153)..(153): n is a, c, g, or t
  misc_feature (165)..(165): n is a, c, g, or t
  misc_feature (200)..(201): n is a, c, g, or t
  misc_feature (228)..(228): n is a, c, g, or t
  misc_feature (257)..(257): n is a, c, g, or t
  misc_feature (265)..(265): n is a, c, g, or t
  misc_feature (281)..(281): n is a, c, g, or t
  misc_feature (313)..(313): n is a, c, g, or t
ttnngcacgagaaatagttcagtacattttttaaagttgtgcagtacatttttgtgaattatcaggagtaaatttgacaagnacatgtgaataacctcctntaaatgaatntnataacaaaaatgtactgattttttaaagttgtgcagattngcaattttttgntatagctttgacttttctatgctgtgaattaatanntgcgatttggcaaacagccctgttgtntttgttaaaccctaaattttaagaggaantggcaganttaaaagcagaaacangaagatggacatggattagaggttatgtattntgaagtaaactacaaggtactaacatca

SEQ ID NO: 554663 - DNA, 420 bp, Homo sapiens
aagaagtctcccggggggatttctctgtgggcaggtgtttttgaagtcccccccgcgggtgaaaacttcgggttttgggtgcgctttttctcccgggtcggccccccctccctgtcccggggataccggggccttgcccccgcgggcgctgtccccccgtgctaccgggacttgggtgcccggccccgggcccgggccccctcctttctgttcttgagggtgggggagttttcggcccgccggtgccgccggccggctgtcttgcagttccccggctcctggctcgggtttccgctgcccccccgggtcttgcgccgtcagccccagccccgtttctcctccgaggggcccccccccttttttttggtgccgggcccttgtccgggtgtgccccaaattaaatcaggaacgccccggtta

SEQ ID NO: 554664 - DNA, 621 bp, Homo sapiens
  misc_feature (578)..(578): n is a, c, g, or t
  misc_feature (580)..(580): n is a, c, g, or t
  misc_feature (616)..(616): n is a, c, g, or t
tgggaggattgcttgagcccagtagttcaagaccaaactgggaaacatagtgggaccccatctttgcaagaaaaaaaaacaaaaaacaaaaaactggctgggcacggtggcttacgcctgtaatcccaggattttgggaggtgggcagatcacctgaggtcaggagttcaagaccagcctggccaatatggtgaaactctgtctctactaaaaataaaaaaattagccgggtgtggtggcaggcacctgtaatcccagctatacgggaggctgaggcacgagaatcacttgaacctgggaggcagaggttgcaatgagctgagatctcgccattgcactgcagcctgggcaacgagagcgagactccatttcaatgaagcaggagaattgcttgagcccaggagttcgagattgcagggagccatgattgattgcaccattgcagtctagcctaggtgatagagctaataattacgttatagaagaggcattaacttcaagataactaaatgaaagcctggtattaacaaattttaaaaaagtacaaataaataatgatctaagctacccagattagntnctggaatttgttaaccaagacaatctccaagggtangctat

SEQ ID NO: 554665 - DNA, 630 bp, Homo sapiens
  misc_feature (606)..(606): n is a, c, g, or t
aattcggccattatggccggggaaatcgtttttgaggatccaaggttcccaggagggaagcatttggcctatcaaaactcctggggcctgccacctggacctatgggggttatgaccatggttaatggggccaccatgggttaagtattaccacccggggtagcatgtgttcaggtggggattattccttggggcattaccaaggcactttctgaagaggccaaagaagcgctgattgcaaaaggcatggattatcgaaggcgattactcagggttaacatccgcgttagagctgatttacgagataataattctccaggttggaaattcaatcactggaagctaagggaagttcccattagactggaagttggcccacgtgatatgaagagctgccagttggtagccgtaagacggaatactggaggctgccagttgctgaaattgaggcagagactaaacttcaggctattttggaagacatccaggtaacctttttaacagggccttctgaggaccttaggactcatatggttgtgcttattccattggaggactttcagaggatcttagattctggggattgttcagattccattctggtgnggttgactgtgaggactggttctt

SEQ ID NO: 554666 - DNA, 163 bp, Homo sapiens
attttacattcaaatacatagtctaagagtttttaaattaaattcatgtcatcattaccttattacctcttagaatatcatgtaccagatgggcactcctcccacctccccagtactttatgacagcatttcaggtggaagcagtcttatttaccataacaat

SEQ ID NO: 554667 - DNA, 252 bp, Homo sapiens
agctcgatcagagctaggtttaggtatcagggtctgctggcctggtagaatgaagttaggaagaattccctcctcttttattttctgggatagtttggagagaatgggtattaattcttctttaaaggtttggtagaacttcagcgagtaaagccgtctggattttggatttttttgttggttgaaagacctttttactacatgattcgtctctcacagacttggtaattgggtctcatttgtcgttttctg

SEQ ID NO: 554668 - DNA, 452 bp, Homo sapiens
agctaatacagctatactgatttcttccctacctgttcacatccgtaagatttaggatatacattttggataggtagtctgtctgatacaatgtaaatgacaaaacataattcctgagaggcccagaacaaactggagtctagcctggagttaaattgagacttctaaaatgattggaacaaagactaagtcgtgccagatgtaaatcaacccctcttttagtttactttagactttgtattagctcatcttttttgtagtaaatctatagttttaaggtttctcaagatgtggctctacctactatgatgaaaattgaagtgggtcaaaagaattagatgtacagtgaagggaaaagaaaaaaaatgggcgaagagagggtggaaaataaaaggattcttttttcttcctttctgtttctcgtatccctgctccccctccccgggatacag

SEQ ID NO: 554669 - DNA, 150 bp, Homo sapiens
tgcactgcgatacagcatcacaattcctagttatatgcacatcataaactttatcaactctaactatctccattagaaactgaaggagctaaggcgttcgcctagcactatataagtagtgagagtacatgctcagactttgtaccctgt

SEQ ID NO: 554670 - DNA, 323 bp, Homo sapiens
ggggggggggaaaaacacccccccgcaaaaaaaaaatatctttcccccctcctgaggggggggggagaaaaaaaaatctttggcccccccccccacatatattggggggttttttttttttttcccccaaaaaagagggggtttttttttttaaaaaaagggggggggggggttttccccctttttttccccccccctttggggggggggggggggggggttttggccccccggggttccaacaattttttttaaaaaagggggggggggttttttttttccccccccttttttaacctttttttaaaaaaggggctttttta

SEQ ID NO: 554671 - DNA, 913 bp, Homo sapiens
  misc_feature (386)..(386): n is a, c, g, or t
  misc_feature (802)..(802): n is a, c, g, or t
gagaatattccaccagggtatgaagttagtatctcttctggaggccctcaatcggggcccctcacgcccgatccccagcagttccgtcgcacttcacgtgcttggagatggtcacctctcaggaatgctcccttcatatgggcacgtgatgggcaacctggccccccgtcaggactgactctcgcctcattgtatcggctctgtctgacagtcagcatgtcagggactcaaactcaaaaaggagtcgtctctcgagatactccagcattctcctaagaatcgtctttcccagtgcctagcatttacagaagtgcaagcactgatgcaattgcgctgtcgaggcgagatcgtgacgactagcagctctcgtcagagtagccggtcgntatcagtcaatcatcgagagtacggaagtggtggatgctgacgtccaggaatagctgagcacaatcatcaagctgttgcatcggtcactcatgcgaggctagtctgacccacgatcgaatctgcgaacaccaagcgggagcgtcgctcctggtccatcccagcttaatctctccgtacaccacagtagcaggctccctggcacaggcacaggcaggtcgtgtgagtcgcgcaaggttcactgatcagtgtatccagtgggcagttccgtctcccagcaattcgaggccaccgtgatcaacgcgaatccgtcacttctcgatgatcctgggccttccattaacagttcgtcctcgctggtccacttgacacgagggacggggaggaagggcatcttcgtcgctttcgcccctctagnccctgtcctagcagaggtgccccccgtcaaggaacgacagggaagaaggggcgctgccaattcgggaggtgctccaagacgagcaacctttgcctggccctccatactggc

SEQ ID NO: 554672 - DNA, 170 bp, Homo sapiens
aattccatgccagcgtagcagcgtacatacacacatgcacacacacacacagggtatatatattatagtagtgcattatatcgtagtatctttatatatgcattattggggggagcagttttagattcacagaaaaattaaatgaaagatacagagacttctcatgtacc

SEQ ID NO: 554673 - DNA, 131 bp, Homo sapiens
agtacccggtcactgcgtacgcttactaggttgatgttggtttacgtcactggataagtattataatagagctacttagctgtggttattaatacccttctgttaacaatttgcaggcaaacttaatggcc

SEQ ID NO: 554674 - DNA, 266 bp, Homo sapiens
cagatggtattgacccaagaggaactggcagacttcaatattgcaactatgggtccattctgggcttccccaaggcgaagccctattaagtgaagcatcttgcgaggcccgactgtggacatactgattcctagttgcgcagttgcatgaatgcagttgcacctaatccagactgctccctagaggtctataagcctgagatcatttcctatacggtgccatatgggccatctactcctggaagctgactagatcttccttggagc

SEQ ID NO: 554675 - DNA, 342 bp, Homo sapiens
  misc_feature (33)..(33): n is a, c, g, or t
  misc_feature (97)..(97): n is a, c, g, or t
  misc_feature (130)..(130): n is a, c, g, or t
  misc_feature (132)..(132): n is a, c, g, or t
  misc_feature (187)..(187): n is a, c, g, or t
  misc_feature (189)..(189): n is a, c, g, or t
ctctgaggaggctgccacagtgaagcaaccgtnacaagtggtgcccgaccagggacctgaacgaggaaggtctgccagagcagagaaagtgaaactnatcagacgaactacgaacccctggacgggagantntgccggcggagaatataaggagatggacaaaccgtgtgggtgccctccaggtgtntntgaccatggaacgggagaccggagggttccatggtattcaaccgtgggcctgttacctccagtacgagccatgagccagcggaatctgaatgcaaagacagaacaagggccgaccggagttcacaatgacatccaaccccataaacatggggg

SEQ ID NO: 554676 - DNA, 994 bp, Homo sapiens
gggtaaggctgcgagagtgaaagaatgctgagcgccggtgatatacattctcgagctctgattcgcttgtgtaccagggtctactcagggctgtgtttgtcgcctctcgtttggctagcccagtgcattcagtctccaacacgcctttcgctaccagggtacgtgccctagttcgcaggtggtccggatgggcgttgtcgccagaacccaggtgttcgtgcctcccgctctcttggctcgactggccgttcgctctttgatgggtgctgggggcagcctacgacttggtgttggcctgtggttcggggtctcgggggcattggggaagcctttgttttcggccagcttgcctcatttgggtgtagtgccgaggaaacgactgattctgaggacagcagaatctttcatccattaggcccatgctatgggtaggcaccttgcgctgaagcgccatggggcataatctgttcagatcgtggcggccagagaaaatgttacatgcggccaatggtagagcgttccaatggtcaggatcagacgacctagaggcctagtggggattccataaaaccgttgctttgccggccgcgggtgtgggatagcgctaactccatttaccctggaaggttacgtcggattaacccaaaacactgagtgattgggaagttggtttgtgtcgtggatttctggcaaggaataccggttaaccataatagggtgaagaggtgggcgtcctcccaaggagcttgcattggttggatttggtggcgaaacatggcagcttcaagtggagcatgtgtggagtgttccacaattgacagggcgtggtgccccgcgtttggtccagagaattgcgcttggcttggtgcattggggcaaacacaagcggggtgatgcaaccacgcgcaagaggagaaccagcgatgatgacaaggctcttcatatgatgacactacgctcacacagagaaggtggaaaaacaacactatcaaga

SEQ ID NO: 554677 - DNA, 145 bp, Homo sapiens
gacctccagccgagcatccttcatgagcctgcagaactgctttcgtatgtttacccaggggacctcctttcagatgagctgggaagagatggaatgttttttcatatttaaataaataagcccattaaaaagcaaaaaaaaaaaa

SEQ ID NO: 554678 - DNA, 210 bp, Homo sapiens
  misc_feature (5)..(5): n is a, c, g, or t
  misc_feature (87)..(88): n is a, c, g, or t
  misc_feature (122)..(122): n is a, c, g, or t
  misc_feature (148)..(148): n is a, c, g, or t
  misc_feature (154)..(154): n is a, c, g, or t
  misc_feature (162)..(162): n is a, c, g, or t
tgtangaagcgctgcgtcaaccctggagactcagttgaattatttttttaaagtcccatgtgggttaggattggagttggactagtnngatggtttgaaggattaggcagcactgccagcgncttctcatgcatgatgtctgtgcatnccttgnatatttgntcccttctcctctgtagacacattggcattgttcacacctagaattcc

SEQ ID NO: 554679 - DNA, 772 bp, Homo sapiens
gatgtttgattatgtttatcttgtgcaagattaagtcaagctaattaacacatcacctcatttactgtatcatttttgtggtgaaagcatttaaaatctggttgtttagccatctagaaatgatatatgcattatggtttattgattggtcatcatgtctgtacaataggtcactgaagcttattccttctgtcagctgaaagcttggtacccttgatcactctctcctctttctctacccacctggcttcccccagcctctggtaaccaccattctacgctctcgaacttcttgtagatttcacatataactgagatcatgcagatgtgtgtcgtttctgtgtctggcttatttcacttggcctaatgttctccaggttcactgaagcaaatgacaggatttccctcattgtaaaggctaagtcgtattccattgtgtacatacaccacagtttttttaatccattcatctgatgtgggacattgaggttgcttccatatcttaactatcgtgaattacatttcaatgaacataggagtggaaatatctctgtgggcataggattctcaattcctttggcatatacaccccacatggtaatcctatgtgaagttcttctgaggaactcccagtactgtatttccatagatggctgtattagtttacgtttcccaccaacagggcacaagggttcactttgtccagtacccacaatcaagcttattatgtctttgcgataagtagtaatctaacaagtgtcgatgatatatc

SEQ ID NO: 554680 - DNA, 244 bp, Homo sapiens
  misc_feature (244)..(244): n is a, c, g, or t
ggcattcctgaaggatccaccccatgacccaaacaccacccactaggcccacctccaacattagggatcacatctcaacatgaaatttggaagaggacaaacttctaaactgtatcattgtcctaacaaaaagaaccagtcagatcatcaaaatcaccccaaagcattacccaagtggggcttttccctgagccgcgcataagagaaagtgtctgcatgcgctatttcagtcgcgccccatgtn

SEQ ID NO: 554681 - DNA, 564 bp, Homo sapiens
cggccatctttatgcaaagtgtctatcaagctggctggattgtaatatttcacacagaatctatacccaccagagatgatgtccggagctacggggtgacgagggagtatgatgaccttatggatccaagccatatgacggaatccgccagcgagaccctccatccggaaaaggagaacgcctccctcagcaccatatgtaccatcgatgtctcaatgatcatggtcaagtgctggctgatagacgcagatagtcgcccaaagttccgtgcagttgcatcatcgaattctccaaaatggcccagagaccccagcgctacaccttgtcattcagggggatgcaaagaatgcatttgccacgtcctcacagactccaacttctaccgtgccctgatggattgaagaagacatggacgacgtggtggatgccgacgagtacctcatcccacagcagggcttcttcagcagcccctccacgtcaaggactcccctcctgggctctctgagtgcaaacagcaagcattccaccgtggcttgcatagctcgaaatgggctgcaaaggtgt

SEQ ID NO: 554682 - DNA, 1679 bp, Homo sapiens
ttgagtaggcgccgtgtgctgctgtccgtgtgtgttcgtcgtcgggggcggatgttgttgaccccgcggcgccggtttggccgtctgtggcggctgttggggagcaccgtgaggcgcggtgtgtgtcccaaacgcgcggtggttccgccgttcgccggttttcccggcggaatgtcctgtcgaccccaccgtcttcccggtctgttcgctgccctccgggggggtgtttttcaccacaggaggctgtgggtttataaccccgcgggggttcactctcttgggggagattttgtcgctcccccctcgcttgttgcttctacaggatgagttgtcccccacagcacgttgtgttgtcggccagaagtgcgtgttggcggaaagagatagtgctctcggtcggcgcgctgtcaccgagagagattggtggcgcgcacaccgggtttgatatccggggggaaatgtggtggccacggcgcccgccctgttggtgcgcggggggcgataattaaggggggtgtcgtcagccgcttgggggaggaccttctgcggggggtggacaacacaacaaaggggtgggtaggcaccacccgtcctgcccctctgttagggcgagcgcaggtgagagcacggcgctgtccgtctgtgactccttgtcgtcgtggaggagaaggatgttcggcggttgtgttgagcagcgcaccagcgcagcacgcggggcgccaaacacaactgggtggtgagaaagagggggcccccccccggccagctggccgcctttttcaggggggtcccgcgttttagcccctgttgtttctcgccctcctattataatagagggccgcacccaccgcgggcctgtgagttgtttcgtccggggtggttttggcgtctgtgtggtgtgccgcacaaaagggggtgtgggggacgcatcttcttggggggccttcttcggcccactacacttgggcgcgggtgttgtgtgttgtgtggagaataaagtgtggggagaagagacagtttttcacggagaggggaccccccttctgtgggagagaacgcacccggttttagggcgcccacttttggtgacgcgcctctgtgtctcgacgtgaagacacactctgtgtggaaagaagacactatcttacagttggcgtcccacatgtgttgattgttgtgagacacacactgtctccacagcccccaaagcacctctggggcacactctttattgtgtggaagagcgtctctcctctctctctcaccctctttatactctgttctttttctctctctcttcttctctctccaacactttctctcttatataagtttctctcattgcgcctttgcgcacgctggggtgtgtgtggtgtgcacccacggtctttgtggtcttctccctcccccacacctttgtggtgtgggaagatgctggggcgccagatccctgtggtccaagacaccacatccattgtcccctgcgccacaagtggctgcccagagaatagttgttgctaacacccacccggttttttgtttgatttgggagaggtcaagagcccaggcccccccattggcttgaagaggcaccatatttccagaacattttttttttgtgcacttggggggtttatgcctttctatatttctccttattaactccctccaccttttta

SEQ ID NO: 554683 - DNA, 186 bp, Homo sapiens
  misc_feature (1)..(1): n is a, c, g, or t
  misc_feature (21)..(21): n is a, c, g, or t
ntcgtatgtcaccgcccaggntcttttgctgcgggacatacactgcaaaatagataaagggaatgaaatacctagaaaccaacagacactgctagcaagaactggcagctccaagaaactatcaagaaaggagatctgctactaaacagagttcaaaaactttccagagtaattattatgtaaagc

SEQ ID NO: 554684 - DNA, 137 bp, Homo sapiens
aagataagtagaccactccctcctcagctagctggttccggtcactgccaccacgactctatcctgtaattacttctctctaagcacccatcttcctcactccactgtaacattcaagattccttgtggcaggggct

SEQ ID NO: 554685 - DNA, 156 bp, Homo sapiens
tacttttccacaggaaagaaaagcttcttacatggcagcacaagagaaaaatgaggaagaacaaaaagcggagaccctgataaacccatcagatctcatgagatttattcactatcacaggaatagaacaggcccctttgattcaattacttcccc

SEQ ID NO: 554686 - DNA, 770 bp, Homo sapiens
caacctgaccaacatggagaaactctgtctctactaaaaatacaaaaatactaaaaatacaaacttagccaggtgtggtggcgcatgccttgatcccagctacttgggaggctgaggcaggaggattgcttgaacccgggagacggaggttgtggtgagccaagatcgtgccattgtattccagcctgaacaacaacaacgaaactctgtctcaaaaaaaaaaaaaaaagaaaaggtcagccaggcggaggggcctcacaccgtgttaaccccagcacttggggaggccaaggggggcagatcaccgtgaggctcggaggtggcatcgcgtgcactccagccggggcgacacagcagggctccatttaaaaaaaaagggccaggcaggggggcttcacaccgtgtattcccagacacttggggtgggccgaggcgagggggtcacctgaggtcaggagttcgagaacagccgggccaactgggtgaaacctgcgtctctacaagaaatccaacaactcggcggtgtgatggcaggtgcctaaaaatccccagctacccaggaggccgaggggcgggaagaaatgggctgtgaccccgggggaagcgggacaggcgggggagggcatgacgggttgcgtggaccgaaatcagcccattcattcagcctggtgagaggcacacttgtccgaaacaaaataaaaaaaccgggatatgggtggggaaaggtagacggcatgccacggcggacctcgggaggggagcgccagggt

SEQ ID NO: 554687 - DNA, 239 bp, Homo sapiens
  misc_feature (59)..(59): n is a, c, g, or t
  misc_feature (61)..(61): n is a, c, g, or t
  misc_feature (66)..(67): n is a, c, g, or t
  misc_feature (76)..(76): n is a, c, g, or t
  misc_feature (83)..(83): n is a, c, g, or t
  misc_feature (95)..(95): n is a, c, g, or t
  misc_feature (107)..(107): n is a, c, g, or t
  misc_feature (126)..(128): n is a, c, g, or t
  misc_feature (150)..(150): n is a, c, g, or t
  misc_feature (153)..(153): n is a, c, g, or t
  misc_feature (166)..(166): n is a, c, g, or t
  misc_feature (188)..(188): n is a, c, g, or t
  misc_feature (203)..(205): n is a, c, g, or t
caaagttgacctcaagataacatttttcattaaagcatctgagatctaagaaccaattntnatctnncatgttatnagctcantcacttattttnataactaatgancacagctattatactactnnntcgttattttgtgtgcatgccncanttccctgacttanacctcactgagagcgcaaaatncagctttatactttnnnctttcaattgcctagcacaatagtgagtacattt

SEQ ID NO: 554688 - DNA, 383 bp, Homo sapiens
gaggcggaggcgcacgatgcctggagttactgtaaaacgacgtgaaccatgcaggagttcgtcatagctctggcaggcttcctcaaaacacgtccgggaatctgttaacgtccccgaatgggtggataccgtcaagctggccaagcacaaagagcttgctccctacgataagaactggttctacacgcgagctgtttccacagcgcggcacctgtacctccgcggtgacgctgatgttggctccatgatccaagatctatggtggacgctcagacaaacggcgctcatgcccagccacttcagccgaggctccaatagtgtggcccgccgggtcctccaatgccctggaggggctgaaaatggggtcacacggatgtctcgct

SEQ ID NO: 554689 - DNA, 115 bp, Homo sapiens
gggaggaagagccgagaaactgtgtgaccggggcctcaggcggagtgcattttcggggtcccttttgcagatgccgattggcatcaccggtgcaggccatttgagggagcgggat

SEQ ID NO: 554690 - DNA, 164 bp, Homo sapiens
atgagtggaagtgccctgttctccccacattctcctggaagggcggcagaggctgctcttctgcaggtttatgtctcgagtcaaacaccgcagcaatcaccagatgcactccatgattgcagctcacaaatgggcttcatgctcctgaggactcatagagcacg

SEQ ID NO: 554691 - DNA, 560 bp, Homo sapiens
  misc_feature (258)..(258): n is a, c, g, or t
ggcagttcggcggtcccgcgggtctgtctcgttgcttcaaggagtgtcgggacggaagcagagtccggggactctcgttccagcactccgatacgccctccgatttgccctctcgcggcttgcaatctccggtgagccatacttctccggccagtcgtgccgtagcttcgtggagacactgcgcaggcatgcgccggttgttgggttagacatcccgtcgttggccagaaccaacgcgatgcagctgcccagtattcngtcgaggaattcatgtgccacccgacgatggaggtcatgccgtcatagcagcgctggatacaatctctgtaacctgtcaggccttcctgacagctaacactcgtctctgaggctgtctattttcgaccgcgatcgatgtggctctggaaggcgtgagccactgtcttccgcgaagtggccgaggagaagcgcagagggctacgagcgtctcctgaagatgcgaaagcagcgtgggggccggctctcttccaggacatcaggaagccagctgacagatgacgtggggtagaagcccagatcgc

SEQ ID NO: 554692 - DNA, 408 bp, Homo sapiens
gggttctacccacgtccaggcgcatggccaggccccggcaaactttttttgctctgaccaacgggggcttctcctgtcccgcacgttgtgcctggcccggacctggttcaaaacaagggggcctgcagcaggcgggtgcggcatctcggccgggcgtggcaggcagggcactgggccacctgtgtcctgcccccaagtccccgcccttgcatgaccttgagccagctcctcatcgcctctgcacctcagtttcgtggtcagcgcccagaggacaggagaggactccatcgcgatccgtcccggggctgaccgcgcagctcgcccggcgcctcgagtgtgcttggcgaaatgactgcgttgcgcccgtggagtgaagcagatgtggggtgcgtgagggagggacacgcg

SEQ ID NO: 554693 - DNA, 719 bp, Homo sapiens
ggtctgcaggagatctacaagcgcattgaccctcgggcccaagccccagtgcctggcaagggcccctttggagcgagatggaacttctgagtgcgcaaactcatccacgatgtgctgcgtgcatctggaagatacgcgactggggcagcttcagagatgtgctagtgctgctgatgacagatgtactggtgtttctccaggaagacggagcagcagtacatctttcctaccctggacaagccttcagttggtatcgctgcagaatctaagtcgtacgagacattgccaaggcaggagaaccgggatgtatcgtgatcagacgcagacccacctgagatgtcacgaggtgcacacagcatcccgggatgcaccgtgagcaccgtgcatccggggtcattcagccagagcgtgcgcacatgcccatccaagggaggactatcacccctgatcgagacagcaggatgaggcttaccctgcgagcgaataaccgatggagtatgcagcacagaaggaacagggcacatggtggagctgctgacaagagaaggtccgcgatagatatggctgcagcatgacaccaatatgccagagcacgaaagacggatcggtgaccaggccagactggacacgataccgcaagcaagacccaaagaggacataaaacgatcataaaaacacaatgaagacaacaacatggcaagacgacatgcaggagagat

SEQ ID NO: 554694 - DNA, 467 bp, Homo sapiens
agatgcaagtgattctacctgtctcagcctctcaagtagttgggattacagttgcctgccaccatgcctggctaattttcgtatttttagtagagaggggattgtcaccatgtggccaggcgggacttgaagtcctgacttcagatcatctgcctgtctcagcttcccaaagtgctgggattacaggcgtgagccactgtgcccagctgagatctgatggttttaaaaagaggagctccccttgcatgagatctcacttttggcctgctaccatttatgtaagatgtgacttgttccttcttgccttccatcatgactgtgaagcttccccagccatatggaattgtaagttcaattaaacttcttttctttgtaaattacccagtctcgggtatgtctttatcggcagcatgaaaacggactaatacagtaaattggtaccaggagtgggatgttctgaaaagata

SEQ ID NO: 554695 - DNA, 402 bp, Homo sapiens
agggaagggtcagtaggcagaagatgtatgctgtgataacatcttctgcatcgtgtgacaacgggaacttctatcacaggctctggggctctgaagaggtaggcggaggaccacggcgatggggtacaagtgtgaacgtggcatggcaccggaggtgtggacccccccattggagacgtggagtagctaacagccttcaggacagtggtgatgcccatagaccacgatgtctcacctgatgtggtcctagtcaccgccgggcttgatgctgttgaaggacatctgtctcctctgggtggctactctgtcaccgacagatgtctcggccacttgaccaggccgctgatgaccccggcagggacgccgagtggtgctgacgctgcacgggggcgatcctctaga

SEQ ID NO: 554696 - DNA, 922 bp, Homo sapiens
cggccgcccttttttttttttccacctgccccatgcctttgggttggtgaccccagaactctgtgatcccccaggtccatggtgctgctccatccgcccccctcccctgtgtaacgcgccccatcctgtgtgtcccagccttttgagccaaaaactgccaggcaggaccagctggggcccgtgcgggggcacccatcaggcactcacccgtgccagatgtatgtggcactcacatgtattaacataaggctcgccagagagccaggatctcaaggtcgtgaacagcaccacacgaaaaacatctaaaacaaaaaaaaaaacagggcgccacgatacaacaaatatcacacccggaagggcccacaagataacagcggtttaaccccgacgcctttacctgtgataccccaaccaggtgtggctccaccctaaatcaacgcgtacaggctcgctacctatttacatatcaacggccaacgaccgttactgagggctccgtgtcctgtcttattacaacaacatcgcttacgcagtcgccttcctgccgacaaacacgtgggcaacagcctagcgcggaatctataccaggcaaacagggaccacccacacaacccaccggccggagtgcccacacaaaaaaagtgggcgccgcgaacgagatcccaccgacgcgaacgaatcctacagagcaggctccctaaacggcgacaacactaataaaacgctattacgtcacgagcggacacaacacggccgccaaacaacccacagccccggcccactcatcgctatgaggcgcgatctgcgccaacacagcatctgaggcgccccacgcgtggaacactaactggacaatagaaagacgaacacagcgtcaaacgtaaacaacaccacgacagtagcaacgctaccacgacacaaa

SEQ ID NO: 554697 - DNA, 646 bp, Homo sapiens
aggaaaggccgggataaggagtgatgcccgtcaccaagttggccgctgtgtcaaggaacatgaagatcaatgtcccgtggaggagatcatatctcttctccctgcccattagggaatcagagatcatgtgatttcttccgtgggggcctctctcaaggatgaggtttggaagattatgccagttgcagaaagaagaacccctgttgcctggccagcggcaaccaggttccaaggggcatttgtgtgcgctatgcgggggactacaattggccacgtcggggtcgtgaggtgtaaagtggctccaagagggagttttggccaacggcaaattcgggtggggggccattcatccgtggccaaagctcctccaattcgtccccgtgcgcaggaggcgctacgtggggggacacacggactcgggcaaagcccccaagaagtttgtcccttttggcaagggtgttggaccaggcccaggatttgagggatacgaggtagtggagtaacagccattcattccccttggcaacccacagggggccagttgggagaattgggtcctccggagaccttggtggcctaaagaaaagctggcacaatagattgggagtggaaattcagtagatgtgataacacctcaagcccgggg

SEQ ID NO: 554698 - DNA, 243 bp, Homo sapiens
  misc_feature (95)..(95): n is a, c, g, or t
cagtaattagctacttaagtattttctatgcttcttctgcagagggccaacagatatactgtttagtgtcttgtcacaaaataatattataactntatattagaacgtatatttgatataaactatgttataataaggatcgaatctgattgaaacagaataacacagtgggcgctgagattagcgcaacttattcctactattatacttcttccaagaacagtcagtaagtactcctcaacg

SEQ ID NO: 554699 - DNA, 110 bp, Homo sapiens
atgaggtgcaagcgaggaggagaagagggaggacaaggaggacgaggaggatgaggaggatgatgattgagccatgtggacgaggaggactgcctgggggcggcagaggg

SEQ ID NO: 554700 - DNA, 273 bp, Homo sapiens
tttttttttttggccaaagtaatggggttccacccatggggaaacaacccaatcttttttttccttgttccaatggaggcaaaaaagcccaggccccaaggtttttggcaggggttttttaaatttccagtggtcccagctcccccccctggccctgccccagcctgtgtagttttttctgcatttggattctgcatttttggtttggggtttggattttgccttgcccccctgcctttcccttttggtaaaataaaaaatttttaatgccca

SEQ ID NO: 554701 - DNA, 174 bp, Homo sapiens
gtgtggtgtgagggggctagagatactagggaagttcctctcccggtgaggaaaggccccttctggctagtagtgagagggctggtctggaagtttctctcccggtgggaaaggctctcctgggtgtagtagttaggggctggtctggaagtatcgtctacccggtgggaaagg

SEQ ID NO: 554702 - DNA, 1056 bp, Homo sapiens
gcatgcaaggtaccacacactgtctgaatttcgcacgaaaaagtgattgtcggatcaggtgatagccccggaatgtagcagtgtcttgcgtgctgcaagatgccttctagaggctgacactaccttgggaccctacatgtgggcgatgagagtatcagcctctagcccaggtggttgacatgacgcactccctttggagaggcacttgaagggtataggggagtggtatgtgtctatcttctaatggaaatagcacatgagtggttgatacgcggatgtaagtactaaaggctgtatctaagaggtgtgattgataattagagagaatgaccaccacacggtagaagctgaataaaaggggcgtgctgggtagagcatggtagagagctcatagcagaactagttaggaaatggggactgtatctgagttatttactgagtatcaccggtctccagcttattgataggcgcagagtcttgattacgagggatggagacacgtgggttcacttttcctgtgatcgtgggatggtcgggaaggaacttcatcatttatctttgggctcgtagtctggagactgcagatggctgctaaactaagaactatggcttcgcattgagtggaattccggagccgtggtggctctcccttatgtcccggagctccgtatgtgccgtgggcaggccggtctggaactgactagtctcgaacgtgtcgcggggttgttccctggaggtcttgctctctagtattgctccgaaccggccgtccgtcgtctggacgcgacgagtcctagctttggtactactggcgttggaccagctcgtgtcgggaaagagctcaagctcccactcgtacaacagagtgagtaggagccaaaaggcatgaggtctccggggcggcaaggacagtgacacccacttttctcggaccacggcgggctctcaaaccggcgcgaatgccctgacggcgagaacacggaccaacgggcatgtgaacaacgacattggaagcagaaaagtgacacgaaacaagaaacggaaaatgaaaagaac

SEQ ID NO: 554703 - DNA, 378 bp, Homo sapiens
gtaaatgaaaagggtagcctgtacaagactgacaccccaagaaatcactgatcttatagcttggatcctgaggggactcacatctcctatctgtgccagagacacgggtacctgccatctttttttccctagaatcattggaggtatcgaccactcgctgtacacaggcaatctctggtatacacccatccggcgggagtggtattatgaggtgatcattgtgcgggtggagatcaatggacaggatctgaaaatggactgcaaggaggtaagaaaaccaagggagagcctgggaacatacgggggtaggcagtacaatgtgaaggaagactctggttatcatgtcgggacgatgaggcagacgtaatacgtcctgca

SEQ ID NO: 554704 - DNA, 89 bp, Homo sapiens
aaaattaacaaataaatattctaaactgtataggctacagggacaaagggtagaatatttatttgttaattttattaaaatgctttaaa

SEQ ID NO: 554705 - DNA, 340 bp, Homo sapiens
agatggtcatcaacgtataagcgccactgtgggacaggtagtctgttgcgaccgttcgctcgccagtttaaccgtcgaacttgactgcgccctaacgccacgctgatgacatgcaggacttctcccgtcgccgtatcgctgtgtatctccaaacccggcagatacatgacctgggccacatgctcaacagactttgcctgccacactcgtaccttgcgtccacgctgcccagtgccatggtagaaataccgatcgttatccgcaggccccgccttgcgcagcacctgggtgacttggtgcaattgattacggtcgtcccatgtcatcctcgggttgcttt

SEQ ID NO: 554706 - DNA, 442 bp, Homo sapiens
cctgaggattcagtcccttctctaaatcccacaggtccacggggaggtaattgaatcaagggggctggtctttcccatgctattcttgtgatagtgaataagtctcacgagatctgatggttttatcaggtgtttctgcttttgctgcttcttcatttttctcttgctgctgccatgtaagaaatgcctttcacctcctgccatgattctgaggcctccccagccaggtggaactataagtccaattaaacctctttttgttcccagtctcaggtatgtctttatcagcagcatgaaaatggactaatagtaccagtagagtggggcattgctgaaaagatacccgaaaatgtggaagcaactttggaactgggtgttgaactaatctggagggctcagaagaaggaatggagggtggacaggtcgaccatacgtgaaggca

SEQ ID NO: 554707 - DNA, 330 bp, Homo sapiens
cacgaggaaccgcgaaggggcggccaccctcgagttgaccatcggtcgacacgacggcgggctggtctcgaaccatctgtacgaccacgcccgacgcggcatggtggtcggactggccggcgtcggcggcgatttcgtgttgccggacccgcgcccgcggcgcgtcctgttcgtctccgggggcagcggtatcaccccggtgatggcgatggtgcgcaccctggtttcccagcggcatcgcggcgagatcgccttcatccactacgcgccgaccccggccgaggcctgctaccgcgactaattggtcgcgctgccgtcggtgcgggtgtt

SEQ ID NO: 554708 - DNA, 176 bp, Homo sapiens
cgaccagacacttgacaggcacaccggcactcagaagacactgatggcaacccccagcctgctaatccccagattgcaacaggctggcttcagtggcagctgcttttgtctatggactcaatgcactgacattgttgccaaagccaaagctagcctggccagatgcaccagcctta

SEQ ID NO: 554709 - DNA, 200 bp, Homo sapiens
ggcagcctgggcctgccgctgggggtgatccagggacagaacctggcgctgatgctggaaagcaaactggcccacgccagcgatacccgtgatttagacaagctgccgatccccttccgggccgtggctaccgatatcgccagcggcgagaaagtggtgtttcgcaagggccacctgccccaggtgatccgcgcccgcat

SEQ ID NO: 554710 - DNA, 758 bp, Homo sapiens
cggtgaccgcggcctggctgctcggacccgggaacatgatggtcgctggagcagaaggcgctgagaagggaccacggcggcgctgggtcgtgctgagccagtagcgggctgaaacgtagaggccagaaccaggtctcagggtgttgcactagaatgtgctgtgtctggagtgtaatccccacacctgcttcctcctggaagtcatgtgcttggcctgtggatgctccctgtatccatgtgactgtgtttgtgtctgcctctgtgcctgtgctgtggatccatatgtgtctctgtggaccctccctgtgtgactgctgcctgcctcccctgctgcaccataggccctgggagtacggctgtccccacagcttggacctggcagtggtgctcgtgaaatgttatgtcaagtggataaatgaccatggcctgtggtctccgcgggaggtgaggaaactgaaagccacctgaggaaaagggggtgctgctccttaatgaagtgccgcgtgtcactgtgtacgtatcaaaagaatggcgtgactgaagtagggatggggacctgcttgatgaccctcagaccctggactgtaagtgaagatgaggtgccgtgaaggggcaacccaggacactgagtcctgaaaggcaaggaggaacttccataaatgaagtggcgcgaaactccttcctgcatattgctcaagcggtcctatacacgatcaagttcttcccaatacccaactggggatcctgatttcaatctc

SEQ ID NO: 554711 - DNA, 660 bp, Homo sapiens
gcttgcgaggtgatcagaaggcaaagatgtcggagcgaaaagtattaaacaaatactacccgccggactttgacccatcaaagatccccaaactcaagctccccaaagaccggcagtacgtggtgctggctgatggcccccttcaacatgaggtgtaatgacgtgcgtgagaatacatctacaaggggaagaaattcaatgctcggaagtgagactgtgtgcagaacgagtgtctacctgggcctgcccatcttccgcttttacatcaagtgcactgctgctgcctggcagacgatcaccttcaatgacagaccctgaaaacacagactacaccatggatgcatggatgccacagctggaatttccagtgcttgagaagctcctgtgagtgagtgacgtgacgaagagggtgcatgaaggatgcggggagggactgagtgagctgaacaaccccatgacatggtgctggatgaacctggaccaatggactccaatgctggagatggaggtgcttggagaacctccaggagctgaaagacctgaaccagctggcaggcgcacgtggacttcgaggctatgctgagtgcagccaccgcctgtcggaggaggagcgtcggaggcagcagcatgaggaggacgagcaggagacgcggcctgttg

SEQ ID NO: 554712 - DNA, 305 bp, Homo sapiens
tgagaacacgggtcacagtaccttttattcgtcatgatacaacctgatgtgacaggaaatacagccactatctccaaacagtcttaatgcctttcagagtccaatgggaaagcccaagacggcgcctctattggggaagctatgaaccttccgcctttggatgccacaaatgggaacgatagaagtacaggaggtctgccttccacgccggaccatccagtgcagtcccatgcgcggacacagtgaggcgggacttggtacagaacgttttcctgataacacgtcacacgctagagcattccaga

SEQ ID NO: 554713 - DNA, 107 bp, Homo sapiens
tgatcgagctcggcccggctactggacttctggcatacctggacttctggcatcctggaccttctggcatacctggaccttctctaacagccttaacccgagcgcta

SEQ ID NO: 554714 - DNA, 251 bp, Homo sapiens
  misc_feature (24)..(24): n is a, c, g, or t
  misc_feature (61)..(61): n is a, c, g, or t
  misc_feature (96)..(97): n is a, c, g, or t
  misc_feature (135)..(136): n is a, c, g, or t
gcttagtgtaaactttcgtttatntgctaaaggttcaatcaccttgctgtttcccgtgggnggtgtggcttaggctttaagcgttttgaggctgcnnattgctgcgtgccttgatgccttgtcccttttttgatnncgtggtgatttaggagggtgaacctcaactggaaccggggatgccttgcccatgtgtaatcttactttaagagctaatagaaaggctaggaccaaacctatccaagttgcgtgtg

SEQ ID NO: 554715 - DNA, 704 bp, Homo sapiens
taacggctaggtagaggctggtgttaatcggccgagggacagctcggaggatctggggcggagccgcatggacctggctggccgccgatgtgaatgtgtgactccgtgggcctggcgtggaggcggggtgcgctaggctgcagctggctcggaatcgcggctggtttcctgtctggaaggggaaggggcctgcagaagggagctggggacagcagcagacatggcacaccccatgccttcctctctccctctcctcccttctctggaaaagctgagctggtgatgaacagctgcacaccaaagacgagacttggacactcttgtgcctatgagcccccatatgcatgcttggcactttccatcctgggaccaccacattatcctcacgttcgctattcattatttcttcaccatgcctggctcccgtgcagggcccctggagacagcagttggtgctgcggaaaatttgtcacagcagccagagtgtgtgttataacaggagtgcagatgggataatgtggcagcttactgccctctgcccaatgagcttggccacctctttaaagacttggtggaacatgtgtggagtgaggaacttgtgtggacaagtgtggtacctatctgtcccccctctggaggggttgacaaagtggaaagggcactggggggcaacagagaatgcaggacagatgcacatcctggag

SEQ ID NO: 554716 - DNA, 392 bp, Homo sapiens
tgccaggcctcatatgaagtgctgaggatacagactatgaataataacaactcttagcatgtttcctagctagaacttacaattcttgcctgacccatgtaaaagtcgtaaatctaggctgagcgcggtggctcagacctgtagtcttagcactctgggaggccgagacgggtggcatggcttgaggcaaggagttcaaaaccagcctggccaacatggtgaaaccccatctctactaaaaacaggaaaattaaccgagcctggtggcgcacagttgtaatcccagctactcaggagcctaaggtgaaaggatccacttgaatctgggaggtgaaggtcgcagtgagccgagatttcaccaccggaccccaacctgggtgacagagtgagac

SEQ ID NO: 554717 - DNA, 106 bp, Homo sapiens
accgagtattttgtgatgtgtcagcactggtgctcactgtgtcgacggaacttgtacagcggaggcatgcaccgaagtggttgaatacactgtcgaccatggctcc

SEQ ID NO: 554718 - DNA, 1371 bp, Homo sapiens
tggggggtttccttttaaatttttcttaagttctggggcccccccttaatttaaaaattgtgtggtgtgtatatttctctcgcggtaacttaaatctccttttaaaggtgggcaaaagccccattccccaatctcaaatatacacgggtccatacgagttggggttccgtgagagggggtggtaaaagaaaaactcctaaattattactctagaggtgtgggcactataagagtgggtacaagacatataccaagagaggtgaagagtttacacacgtgggcatcccatattttataaaagagctctgtgtgtgcaccctcttatagacactctgtggtacagaagtggtggagagaggtgtggtggaacaatatatctctttataatatattctaccacaatatatcacccccacacacaaataaaagaggcgctttccacacaataaagttacaaaagaaaaaacacctctttatatacacatataacacaggggagacacttatatctacatatatagatgattgtgcgcgcacatagtcgtgaacagggcggccaacacaaacatatatagagaccatagtgggtgaaaccctcttaatatatatatattctttacaacacaccctgtgggggcgccactatataaagagagaagcgacacacaacatagtgacaaacacctgttgacacacccaacacaaaaaacacaccccaagcgggggggggagacactctgtggggcggaagagagggacgcccataacaacgacacagggagtgagacacgcccaaaaaatttctctccccccccccgaggacgataatctttctacaccaccactcatatattaattattacatcaacgacagtattataatcccccaccggaggtgattaattctattatactaccaacctcatcttataaaacgatacttaatattaaaaaagcacccccaaaaattacttcttccccaaagaagaaaacagcaggagttataatattacacagcagcgaggtcgtgggcgacacatccatacgacccaccaaaccatctcttgtggcggggctagaaaacacacagaagcggttgtaggcaacacacaacattattactaaaaacaaaaaccacgcgcacgaaaaactgcgctcgcacaaaacacacgaccacacaacaaaacttccagtatgtaacaaccacaacacggcgggggggggtgtaacacaaccaccgcacacggggtcggacacaaaacaccccccaaaaatgtaacaacgcggtgagaacaaaccatgggggcgcgaagagcgactacaccaacaacatctcacacacacaaagtccccgacaaaaacacacccgcg

SEQ ID NO: 554719 - DNA, 207 bp, Homo sapiens
gagacctgaaatgaggaggaggagactctgcgctgagtactttgggtccggagggggatattccgggggaagcattcccgggggggtgaacgagggcggttcctcttggaattggattcgccattttattattctggctgctgaatcagcgagcccggaagataagagagtttgattgtctgggattcctgcatgaagacacccggg

SEQ ID NO: 554720 - DNA, 696 bp, Homo sapiens
gggctgtggcacccgtcagtgtgggtcccgttgaccctgttgcccccgttttcacgctttcgtgtcccagcaccatgtccatcattggtcaccgtggtctgctctcggtgtcctcttcttgccgtgtcgccgtgccgtcttgagtgctctcttcttgagcgctctttgctgcccctcatcttgttcgtcaccccctctttccgcccgcggttttcgttgatgttcacttcttctgtattgtgttcttttccagggatacggaccgagaggaagtagtggggatacagagcatgtcccaatagaggcgtaaatgcggctgacggctcttgagtgaggggccacggaagtcagggccggcaaagtctgtaccttcataaggtggtatgcagcgcttggggtcaggccctcgtaacactctgtcctacttgacgaatctgtcacggggaaaaatgtcaaggcggtagcaggaggacagagccaggagtgccagaggcagagaagagatggagtcttaggggccagggtgagcgaggggtcacagggcctagaggtgcttcctgggggcgggggaactgcagccagtgtccccctcccctcttccaccccagctccagccgtggtgcttagtctatttcatccctcttccaccaacgacagaaagaagttggggacctggcatgttatcgtgttcctgtg

SEQ ID NO: 554721 - DNA, 179 bp, Homo sapiens
  misc_feature (170)..(170): n is a, c, g, or t
atgtcagagccgtatcttcatgtgtgtttccagtattagtatagctatataattgtactgagtcacagcgacattagatcttcagttgaagcttagtacatcattgctagtcaggcgagaaagaactcaaagcacttcttgtctactgtcagtacctatgcagtcagatncatattcgc

SEQ ID NO: 554722 - DNA, 918 bp, Homo sapiens
atcaccatgtgtggctgagaccctgatacacgtatcctgaaaactggagggccttcaaggctctcatcgtttctcaatacaacagagctcaggtccgcggtgctctccgcatcaccccacttccattttgtgctcataatccaaccgcgacccgctgaattctcctccagcacatatttctctagccggcacatggctccacaagccacttgtgacgtggatgtatcgcatggcacttctcgtcgctcgtctttgagagcataggcctatctcgcactacatatgtgcatgcaatagaggagctgccggggaagtactccataggcaagcaaccccaggttggatgcatgtggcgatgaatcatttgcttgaattccgagtatacctgcccctcagcgctagtacctgcggtgttccccgacctatgagcattcatgcaccactaatcaaacacggccaacatgagtaatgctaccacggaaggagattgcgggcgcaaattctggcgagctgcttggcatagcttaactttggaatgtactgagggactttatactggttgtgcgcgcaactggagttggatcattagagcttggactatccactagtttgtcttgcacacctagttgttgcgctctattccgcaggtacttagtagccttcttttccgcctaggccttttccccaagtaaccatacactgtctgtgtttccttcatcgtgcttttaaccgagccccagttccgggcttgtcttgggcgcaagtgaaactgtgctgagaagatggcccagtttgatgctaaaaagtctgcagagacccaactaaaaaggacacaccacggaaccgagaagggttcacgggaaagagaagcagaaagccccaggctgagcggaaggaggagaaacaggcggctgccct

SEQ ID NO: 554723 - DNA, 173 bp, Homo sapiens
gatacggctacctgatattaggtgtctgctgtctctatccttctacagcaacgtgtaccgcttagcctactacaagctgcttaagtcagaagattgagtggtctggaggggagagggacaaaggactgcactatgggaagtggggcagcccctgggtgctggtttggaagagg

SEQ ID NO: 554724 - DNA, 359 bp, Homo sapiens
aaatgggttttttgtttaaatcccaaattttttgggtgaaaaaaacatccccaaggtttggattaaaccaggtgttgcttgttcagtatttccagccccaaaaaattaatttatcccttaaggaaaagacctttagcttgtttcaaattcaacgggttttatttagccaaccccccccgtttaaaaccaggatatccgggaatttttggatgggatttatgttttttaaaaaagaactgttcaaccggcttattaataaaatttaaaaggtacctgggtaccaaaaaaaaatgccccattaccctttaaacccacctgtgatattttaatgatgccataaaaaacccatttatttggga

SEQ ID NO: 554725 - DNA, 392 bp, Homo sapiens
agagtgaaactctatctaaagcaaaacaaaacagacatacaagcagccaacagacgtaaaaaaatgctcaacgtcgccaatcatcagagaaatacaaatcaagaccacagtgagaccaattaatagctcacaccagtcagaatggcttttgttaaaagtgaaaagataatagatgttggtgaggctgtggagaaaagggaatgcttgtacacttttggtggaaatgtaagttagtttagccaccatggaaagcagtttggagatttctcaaagaacttaaaacagaactaccattcgacccagcaatctcattactgggtatatacccaaaggaaaataaatcgttctatcaaaaagacacatgcatgcacccagggaactcgaacccagtg

SEQ ID NO: 554726 - DNA, 329 bp, Homo sapiens
tctggtcagggatatctcttcaagctcgagacctacttctgcctacttgacatcttcactgagatcaccttctaggttcctccagcatcaatatctgccacaactagaattgtcatgtgtctggtcggccaaatacaagctatgttgtcccaatagcactaataacacctccttttatttctgaacatgtgcctgtttggacaaaaaatgatatgggcatcctaccccaaagaaacacatgcctttcctctcctgggtctagccaggtgctttttggccatcatatagcccatggtggagttgtcccgaagtgcctgggctttcatgat

SEQ ID NO: 554727 - DNA, 180 bp, Homo sapiens
gctccaccttactacagacaaccttagccaaccatttaccaaataaagtataggcgttagaaattgaagcctggcgcatagatatagtaccgaagggaaagatgaaaattttatccaggcttattatggcagggcataaccctatacctattgcataatgatttacctggaagtaacttt

SEQ ID NO: 554728 - DNA, 1576 bp, Homo sapiens
  misc_feature (602)..(602): n is a, c, g, or t
  misc_feature (946)..(946): n is a, c, g, or t
cccgctggtgggtggtgtttccacttccctgttggtcggctgccttgggttggttagtgtccgctgctgcccgcggtggtgttgttggcgcaccgcagcttgggagtgactaggccccccgcgcacctggccgggggtgtttctaagagctgttggtgaacgcttctgtgtagggtgtggtccacaggcgcgagccatttcgggggcgaccccacccaacgtgtcttggtgcgagtggtgcgccctctcttctccggcgccctttttgggggcgcttttccccccagcctgtggtgggctgtgattgtaacagggggccccctttttgctgagggttccccattacgggcaggatttgtttggtggagagctaatgtgtctctgtcgttgggaaggcccccctattgaagcccaccaccgggggggtttaaacagataaagtgggtgcccccacccaccggcgcagcagacacaccccgccccgtgtgtgaggcttcattgttggccatctcttctattccgcgccctttggaatgtgaatgtcacaatgaatttttgtgggccctcgacgcttttatacttccgggacatcaccactcggngcacacctctttttgggtgacaaacacatgttttctcggtgttctcgagatggaattcccccctctaaggagaaccccctcggggtactgtctgtggtgatgtggagagtctccccgctgtgtccgcgctcttgtgaagagttatcacccctgcgtccgcggggccctgtagaagagacacactctcgcccaccaaaatatcacacactcgcacatgtgcccacacaaagtggccgccttctcacagagagaggtgccctccccacacctctccgggtatactctcctggttggggtctctgagagcgccacatctgttctcgctctgaggaggtcacacaggncctctcacagagagagagaggagcccacacagagagcgcgtgtgagtgcccccctgagaagagaaatttgtgtgagcgcactttgagcccccccccaactatgtgggctctccctcgggcccctgtgggcccacacagctcgtgtgtgtagagagagtctcacacccggagaagattcactctcacaaggccacaggggaagtgtgttgttcacaccccccccctctgtgtgagagaattgaacttcggaccctcgggggaatcgcctcgggcctcttctttctacaccaagtgtttgaagctgcacgcccttggcacctcgagaggagccacgccacggagaggaaggttgagaggaaaagccctcgtgaagaagtggccagagacctcggcctggggagcctgtggtgccccctgtccccaggaccatctcgccccactggccagaagaaagaatcggggacacattaccctttaggctggtggcccggcccgccatccagaaccaccttttgattgagccggttgccctggcccgtctccctggggccgggttgggcccccatgtggaagggctctgagactgtgtccctcccttccatttaaagatttttatgtctccgtgtccag

SEQ ID NO: 554729 - DNA, 315 bp, Homo sapiens
cacctcggcatcaaaacatcaggcaaggccaggctctgtgactcacgcctgtaatcccagcactttgagaggccgaagcgggcaaatcacctgaggtcaggagttcaagaccagcctgaccaacatggagaaaccccgtctctactaaaaacagaaaattagttgggcatggcggcaaatgcctgtaatcccagctactggggaggctgagattacaggcacctgctaccacccctggctaatttttgtatttttagtagagacagggtttcaccatattagccaggctgggaaatccggtctctactaaaaata

SEQ ID NO: 554730 - DNA, 189 bp, Homo sapiens
gtgcaaatcttaccgctgtttacaaaaacatcacctctagcatcaccagctattagaggcaccgcctagccagtgacacatgtttaacgcgccgcggtaccctaagccgtgcaaaggtagcataatcacttgttcctataagtagggacctgtatgaatggctccacgagaggatcagcgtgtctctta

SEQ ID NO: 554731 - DNA, 96 bp, Homo sapiens
gaactgtctggggccacatataaaatatactaatgatagctcatgagctaaaaaataaaacaaaatcacacacacacacaaaaaaaaacacaaacc

SEQ ID NO: 554732 - DNA, 377 bp, Homo sapiens
tcccccagttcctgctcttgaaagaaaatctggtagagttgtaaccacacgactgggatgcaaatatgtcagtctaaatgaaggatcagagtacgaccacgtctaagtggagaaagttagtccggtcatgatcgtacaggcatcagctatattagattatcttttggttaacaataggctgagtcatgtctatgcaagaagtagatcagccaccgcattgggagacaacctgcaagaattatacgagacttatgtcaggacatggaagtacatgctgaaaaactctaaatggctgaatataactgtattggagatgctttcagattgcattctgagtttacctgaaagggatcaaatttcaagaagcaggaactgga

SEQ ID NO: 554733 - DNA, 558 bp, Homo sapiens
  misc_feature (18)..(18): n is a, c, g, or t
  misc_feature (115)..(115): n is a, c, g, or t
  misc_feature (155)..(156): n is a, c, g, or t
  misc_feature (159)..(159): n is a, c, g, or t
  misc_feature (227)..(227): n is a, c, g, or t
  misc_feature (232)..(232): n is a, c, g, or t
  misc_feature (240)..(242): n is a, c, g, or t
  misc_feature (257)..(258): n is a, c, g, or t
  misc_feature (274)..(274): n is a, c, g, or t
  misc_feature (280)..(281): n is a, c, g, or t
  misc_feature (291)..(291): n is a, c, g, or t
  misc_feature (295)..(295): n is a, c, g, or t
  misc_feature (301)..(301): n is a, c, g, or t
  misc_feature (333)..(333): n is a, c, g, or t
  misc_feature (376)..(376): n is a, c, g, or t
  misc_feature (385)..(385): n is a, c, g, or t
  misc_feature (388)..(388): n is a, c, g, or t
  misc_feature (390)..(390): n is a, c, g, or t
  misc_feature (422)..(423): n is a, c, g, or t
  misc_feature (427)..(427): n is a, c, g, or t
  misc_feature (472)..(472): n is a, c, g, or t
  misc_feature (483)..(483): n is a, c, g, or t
  misc_feature (497)..(497): n is a, c, g, or t
  misc_feature (527)..(527): n is a, c, g, or t
agggggggggggggggtnggggagtaaatggaaatgttattgtaagatataaaaaggtagagaagaagaaaataattttgtggatgaaattagaagtgtgtattatattgatgtntgaagattgaaatatattagaaaggaggggtggagagaannatnttgattttgggagaaataagtaaagggggggtgaaggattagaagtagagagaaagggtgatgggaantgtgnagattgtnnnaagtggattgatttnncaggtatattgtggcntgaagnntcaagggtgnagangaaagnagatttgggtgaaaatgggtcggagcaagttnaagtatgggagattttggaaagttttttggaaaaggaaagaanatagtgatnatntnaggagctggtgttagtgaagaaagtggtgttnngacnttgagaggagctggaggttattggagaaaatgggaaggggaggangtggggaatgnggtggggtttgggnagaaggggtggggggtgtgggagttgtagnagtaggggggggaggtgatggggagaaagga

SEQ ID NO: 554734 - DNA, 143 bp, Homo sapiens
aaaccccccgacccacagactctgcaccccgcacgcccgatgatccttgagcgactgctgctgaaagaggctgtccacctagcgaaaccaccggaagcctcgtgaggcttgggggctccgccctgggctggcttccgtctcct

SEQ ID NO: 554735 - DNA, 449 bp, Homo sapiens
  misc_feature (2)..(2): n is a, c, g, or t
  misc_feature (36)..(36): n is a, c, g, or t
  misc_feature (107)..(107): n is a, c, g, or t
  misc_feature (132)..(132): n is a, c, g, or t
tnatttgtgaagcgggataaacaatttccaccacgnggaaaacagcctatgaccatgattaccgaatttaaataccgactcactatagggaaatttggcccctcgangccccaagaattcgggcacgagccntttgaaaaactacctaatcaagaccgggttcaagtggctcgcggctataatccccagtactttgggaggcccaaggtggaaggatcgcttgagtcccaggagtttaagaccagcctaggtaacatagtgagtccctgtatctaaaaaataaaaaaaataaaataatgccaggtgtgatggcatgtacctatagttccagctactcaggaagctgaggtggcaggatcacttgagcctgggagattgaggctgaagtgagccgtgatcatcatgctactgcactccagcctgcgtgacagagtaagaccctgtctcaa

SEQ ID NO: 554736 - DNA, 766 bp, Homo sapiens
ggagagagagaactagtctcgagttttggtttttttttttgggttgagcaacggggtacttaattggatgggtccatgacaaggtgcggcctccctaggcccctccccttcttacaaggggtctacttggcaacggtgaggaggggaaattcagtggtggtggggggactggatgtggtgggcagggactcccacagcagtagagggtctctcttcttcctctggtggctcttgctgggggctggtggtccaggggtctaactccttgggaggccatgtgggccatgaggtccacacaccctgttggctggtagccaaattcggttggtcataccagggaaatggagcttgacaaagtgggtcgttgagggcaatggccagccccagggtcaagaggtgggaggatgtggggttgtcgctggttgaagtcagaaggagaaccaccgtgggtgctcagtggtagcccaggtatgccctgtgaagggggccctcggaacgaccgggtacaccacctttctggaatgtcaccatatctggggcaggtttctctagaagcggcgaggtcaggtccaccactggacactgtggcggcaagtggggagtcacgggaatggccatgccaaaggagagctatcccgtacaggctcaggggactgaccgtggcccaaaagcctgtggacaggggccagaaaaagggcaggggatagatcgtccggggaagaggccccgggggcactacacggccaaaagaatccccggaaggggc

SEQ ID NO: 554737 - DNA, 211 bp, Homo sapiens
cgaaaccacccaagcaacagcaacgaaaaaaaacagttaaaagaaaaagcatctggtacttctactacaatcctcaacctcctaccgattttctcatttaaaacttttttgattcctcatcaaactttcaaaaacacgtttttttttccaccctgtggtgtccacttgcttacctggtataatccttcctcaacccagctagtgtaaataa

SEQ ID NO: 554738 - DNA, 489 bp, Homo sapiens
aagtaggggctaagagagaagaaagcactcttaccttgtttgtgtcttactttgctagttgatgtatcactttgcaaaattggttccagtctcattgttttggtgctgtgtaggttgggagcaaatatgtagcctcattgttttgaattgtcttagattcttaaatctccccctttttttcttagttatcggtcctatcgtccagcattttctttctctgttctaagacaaaatctctttgtctctctcctctttggagaactgcctataaatcctttttggaagaccatttgtgatcaacccaaccctgccaattcagatattctagaaagtactttggctctattttgtattctcagttttatatgttaaatgtatcagaccaattctaagacagtgaatagttcttttgtttaaactgaaagtttaagaggggctcagaaacattgagttataattaattgagttgtaggtgtaagtgatttaaaa

SEQ ID NO: 554739 - DNA, 670 bp, Homo sapiens
  misc_feature (126)..(126): n is a, c, g, or t
  misc_feature (142)..(142): n is a, c, g, or t
  misc_feature (158)..(158): n is a, c, g, or t
  misc_feature (186)..(186): n is a, c, g, or t
  misc_feature (188)..(188): n is a, c, g, or t
  misc_feature (223)..(223): n is a, c, g, or t
  misc_feature (252)..(252): n is a, c, g, or t
  misc_feature (259)..(259): n is a, c, g, or t
  misc_feature (288)..(289): n is a, c, g, or t
  misc_feature (295)..(296): n is a, c, g, or t
  misc_feature (413)..(413): n is a, c, g, or t
  misc_feature (424)..(424): n is a, c, g, or t
  misc_feature (429)..(429): n is a, c, g, or t
  misc_feature (431)..(431): n is a, c, g, or t
  misc_feature (447)..(447): n is a, c, g, or t
  misc_feature (454)..(455): n is a, c, g, or t
  misc_feature (457)..(457): n is a, c, g, or t
gagcggaagtgggtgctgtgaggcggcggcatctttctcgaggagctctcctgggcggctgaagaaggagcttcttctccggagtgcgccggggtggcgctgcggacctaactagctccaggttangccgagctttgcgggnaagcagcggacttganaatactgaaatctgtccggatccaacantnattttgcaagccagatgagtaaccagagggcatgnaaaggttgagaacatttgacttccctgcnaaacctntggtatagatcacttccttttctgtaggnncaggannggcaccaaagagcacaatgagtacaagaacagcgtcgccgtggacgccaatacaattctagacacagctcagacgcgaactcgggaagcaaagctccaaccccgagatctccttggnagcagaacccntagancncgtggaaacgctggancatgaanntngtggacctcacgtgtggaatctttagaagcctgtggtgggttgatctgactcacaatagatctgtgtgtggatttgtggacgaaagaagaacgaccaggaggaatgctaggagggtgacccaggaacatggtgcagcttggtgttgagcaggagatgaggagttgccaggacagagagtatttgtaataccaatactctagacagcaggttag

SEQ ID NO: 554740 - DNA, 138 bp, Homo sapiens
cacgaggaggacccacacggaaccatatgtgctcaaccacaccttctcctcctcctgccatgctgaatcacacaaattaatgtttaaattttgaggacacaatcatctaccaatgccgtgtctgtgtctccaaggaga

SEQ ID NO: 554741 - DNA, 1271 bp, Homo sapiens
  misc_feature (632)..(632): n is a, c, g, or t
gaatttcatatagtctttgcgtaccatttcctgagctaaagtagcttttttttcttggaacacctctctctctacacaagtgttttcctctatacacttctaaataaacactgttgccccccctttttttagcaataccctgtttttccacctctctttgtctttctctttaccttgttataaaccactctcggggggaaacgtaaaaaaagttttctctaaataaactatattgttggttcccacagaaacgcaatagaattttccgccctgttgtttttaagggttataggaaagaagtttgtgtaatatttttggaggtaaaatcttggaaaggacctctgtcaaaaacactggggggaacttaagtaagccccgaattccttttgtaaagagataaaaaatagggggtcacctatttgtaccacgttaataataataaatattattggcctatttatagcctattatttaatgctaacccttaaaattgttttctaaaagattattttttgtgtataagtccacgcctaagcgctgtgttaataagggtcacgtttctctaatgctttttgtaataattaacccgtgtttacaccaaaacaccacacatgtttgtgttcggcgttctngtaacgcacatcttgccttaatataagtgtctataaaggtatttgagtgtccacagccacttttctaaagtgtataacagcgtagaataatggctgggaagttcacagtcacatatatagtcttcgcactaaattcttctgtcttccccttctgttgtgtgttctctttctatatatataagcacacaatcgtggtaacacacacacacacacacaccaccacaaattattatctgaaaaagtctataggcgtataagtttctataaactcgagaatattccacacaaaccccacaagtcacacggacccaaagaaagtgaataattttccaacaccacacaccactggagtttctctgcccgggtgcacgatggctcacagcccgtaaataccacgcctccacactttgggaagttctgaaggtgggagtatttgcttgaggctcaagagttggaggaacacgcctgggcaaacactggtgagacctggtctttaccaaaaatttttttggccggaacgcacgtggctcaacacacctgtaaatcccacgcacactttgggaggccgaggcaggttgatcatgaggtcaagagatcgagaccatcctggcccaccatggtgaaaccccgtctttacca

SEQ ID NO: 554742 - DNA, 155 bp, Homo sapiens
acctaactgaccgtgacacgtccgtggacacgcctgtgtgctaccacacacaactgttgacgccgtacgactcgccgatcggacaactggtgacacggacgacctcgacacgtacctctgacgtgcttgtacgtgacgggtacacacactacgac

SEQ ID NO: 554743 - DNA, 1020 bp, Homo sapiens
cctcgaccagctgctggacatgtctacgagcagctgatgcagctgtacagtgctgcgccagcgtgtggcggctgaaccggggcctgcgtgtgtgaagcagcactccctgctgaagtgcctgcgcaaggcctaagaacggaggcgccgaccatgcgagaagccggaatctggtgaagtacgcattttgctgggactctgatcatcgctacctcgatgatgtgtggcgcagctatggtagggcgatctacaacggcaaggagcttacaaccacggtggagatcaacgcccgagcattgactcggccacgtacgctggtgcgagcttctccatctacctacaagcgccgtaaagcatggccggcccgacaatcggggccacccacttcctcccgcttacatccctctcaagtaatggctcagccttctacaggcgcaccatgaactatctcccaacaccacacccaataactaaaatacacatcctccccccgcccactccaccttaatacaacttctcccatacacatcaacacagtatactacccaacaatctcaccacctaggcaaccacaagcacgtatccccccgctgtagcccgcggtccttccctgtccgttccacaacgatcggtctcatcgcccttacctcggcgcggcacccccgtccatatcagccgccgccccggttatttcctacccaccaccgcaacaaagccccgcggcctacctcccctcgtgtccaattcaccattaattattatcacaatataaccctacataccaattaactaacaaaatactccacccacccatcacactctatcaacacaacctaaggaccatcctcaacccccctcacctcacaaaatcaacccacactatcaaaaaaacaccaacacaacaataacaccccccacatacacctcctcataaactatcatgaccacctaccaccaccacaaacccgcacaaccaattaacatataccccaaacctcaacatccacacaccctaactcccta

SEQ ID NO: 554744 - DNA, 135 bp, Homo sapiens
  misc_feature (87)..(87): n is a, c, g, or t
taacatcacgaatgtgtggttatcttactggtggcgtgcatcttgccagtcgtcacgccgcccggcgtagttaatgcacggtgtgcngtgtcgtcattctgcaggtacagtgctgaccggtacgagctcgaatcg

SEQ ID NO: 554745 - DNA, 223 bp, Homo sapiens
  misc_feature (209)..(209): n is a, c, g, or t
agccagggcaacataataagacttttctctactttaaattttttaaaaaattagttgggcatagtggcacttgcctgtagtctcagctacttaggaggctgaggtggcagaatagcttatgcctaggaggttgaggctgcagtgagctgtgattatgccattgcactccagcctgggtgacagagcaataccctgtctttaaaaataanagctattacttggc

SEQ ID NO: 554746 - DNA, 147 bp, Homo sapiens
gacgcaagaacagacgttccttcccacttctgtgaacaggtaactaagaactgaaaccaccccacccacattcaatccagttcctaattagtcagtgctttcctgcaatggtgccgcagaagagtcagaagtaaggctccggggttc

SEQ ID NO: 554747 - DNA, 100 bp, Homo sapiens
ggaacgcttatcattcagtggaataggaccggaaagcacccgtatggagagactcaggtaaacctgcccatgaaccacaccatccgatctcgaatcccag

SEQ ID NO: 554748 - DNA, 669 bp, Homo sapiens
  misc_feature (7)..(7): n is a, c, g, or t
  misc_feature (85)..(85): n is a, c, g, or t
  misc_feature (92)..(92): n is a, c, g, or t
  misc_feature (205)..(205): n is a, c, g, or t
  misc_feature (215)..(215): n is a, c, g, or t
  misc_feature (243)..(243): n is a, c, g, or t
  misc_feature (260)..(260): n is a, c, g, or t
  misc_feature (269)..(269): n is a, c, g, or t
  misc_feature (301)..(301): n is a, c, g, or t
  misc_feature (303)..(304): n is a, c, g, or t
  misc_feature (312)..(312): n is a, c, g, or t
  misc_feature (318)..(319): n is a, c, g, or t
  misc_feature (350)..(351): n is a, c, g, or t
  misc_feature (378)..(378): n is a, c, g, or t
  misc_feature (547)..(547): n is a, c, g, or t
  misc_feature (560)..(560): n is a, c, g, or t
  misc_feature (586)..(586): n is a, c, g, or t
  misc_feature (591)..(591): n is a, c, g, or t
  misc_feature (604)..(604): n is a, c, g, or t
  misc_feature (622)..(622): n is a, c, g, or t
gattggnttcacctcttctttcgcgtacttacgggcaaccgaggccatccgaggccctggtcccgaacgaacttgagtggcgagngattcanaataaagaactaagtgtggcctcccaggggctgcgctcgccatccagggactgaaagagacctgcgggatgattttctgttttcctctagcgggaatcagaacaaggggcgtngattcggttnaatttttctgcttcggtcaatgggaagntgaaatagaaaaattcnctttcactngcaacatggagatttagggggttgtttagctngnnggttggcnaactgnnaaagggggggggggggggggagggggggggnngggggctctttgtttggctcttctctnttcccaggactcaggctaggctaaatttctagcgccgtgtgttcttgaaagcagacaggtgggattcttggaaagaacatacacaacacagcttctgagccccagaaggaccttaagacaggagtccctgagccctgaacaagaggctacctagggtaaagcgattganctccgcgcggtgnggctgagaagagaaggcgttgttganctttncggggagtcagtnaataactcagccgagttngatgaagtgacgttctttctgaaaggggtcgtctcctgggccccttt

SEQ ID NO: 554749 - DNA, 554 bp, Homo sapiens
  misc_feature (74)..(74): n is a, c, g, or t
  misc_feature (105)..(105): n is a, c, g, or t
  misc_feature (107)..(107): n is a, c, g, or t
agcgggatggggcgggtggcgcatcaccggcgcggaggcaggaggagcagtctcattgttccgggagccgtcancacagtaggtccctcggctcagtcggccagncncctctcagtcctccccagaccccacacaacacgaccgcggctctgagacagcggcacccggcggacggacggacagcagcatgcagcatcatctccaacactccagccatggaagacctggagcagtctcactctggtctcgatcatcggacagcccagcaccggacgcagacaccgcgttcaagtaccagtgcgtgagggagcccgaggacgaggaggacggaagaggaggaggaagaggaggacggaggacgaagacctggaggagcatggaggtgcaggaagaggagagccagcagaacgacggagcatgtccaggcaggacccaagcaggaccaaacgacacatgaaagaacagagagcggcacgcaaggatggagagtgaacaagagtgacacgatgcaggacggagaaacgaaggaaacacagacagacaaaaaacaaagg

SEQ ID NO: 554750 - DNA, 163 bp, Homo sapiens
gcaaacctggaaattagctatgccaaaggacttcagaaactggggagcgagctgagcaaagcattacagaacacgagaaaaagttgtgttagcagtgcctgggcctgggcctgagagggaatgaaatgcacagggggtctggggccagaaactggggaaaggg

SEQ ID NO: 554751 - DNA, 422 bp, Homo sapiens
attagaggatccttatgctgtctcacaaaacaaaaacacatgcttcggaatactctgaggctgctgagttgtaagtataaatacatgaataacttctgaaatagcataaaaatatagtaaataccataaactagtaacagtcatttattattcattgtcaatgttttatggactatacgtacattgcatgtgctattttttttttttttgggggagggagtctcatttactctgtcgcccaggctggggtgcagcagcgcaatctcggttcatggcagcctccgcctccccagttcaagtgattcgcctgcctcagcctcccgagtaggtgggattacgggcttgcaccaccacacccggctaattttggtattttaaggagagacggggtttcaccatttgggccaggcgggtctcaaacc

SEQ ID NO: 554752 - DNA, 440 bp, Homo sapiens
ctatgtgataacagggtagacataggagcactttcctctcacgataatgtgtgtgttctgtctgtccgtgtgtctgtctgtgtctgtgtgtgtgtttcttgtctgtgtctttgtgtgtgtgtgttctgtctgtctgtgtgtctgtctgtgtgtgtgtgtttcttgtctgtgtctttgtgtgtgtgtgtctgtatgtgtgtttgtgtgtgtatgtctgtctgtgtctgtctgtctgtgtctgtctgtctttgtgtgtctgtgtctatctgtctgtttgcctgtctctatgtaagtctgtgtctatctgtctgtctgtttgcctgtctctgtgtgtgtctctgtctgtgtgtgtgtctgtgtctgagtctatctgtctgtctgtttgcctgtctgtgtgtatgtctgtattgtgtgtggtcgacccccccgcgaatttagta

SEQ ID NO: 554753 - DNA, 260 bp, Homo sapiens
gtctggggcttggctgtgccgctctggtcaccaaggcaggcgccctgcagtgcagccccagtgatgcctacaccaagaaggagctcatagatgtgtgcccgcgagagtctctgatcaaggtctcccacgtcctgagctgcgctccagcgctggcgaatcgtggcacccatgtcctgcaatcacagacagccacgcgctggtgtctggatatcatatgctgtacctcggacaccaccaatcatgcttcgcccactgactgg

SEQ ID NO: 554754 - DNA, 127 bp, Homo sapiens
catgagagacgtgttgagtgtggaacagagaatttgattctcatgaatttaggatttggttgaagtggtatttatattctttctacttgaaatagcctctttgtaagcattgcaacacggtctctca

SEQ ID NO: 554755 - DNA, 327 bp, Homo sapiens
gtaacagtagccttcccaaactcgcactttgccaagttcagggttagagaagcagctgccacccgttcacatactacccttagcgagtcaacatgatctgaccactcagacgaataaatcactaggtcatcaaggtatgcactacaattaggaacgccagctaatacggagttaaccagtcgttggaaggtggctggtgcatttcgcatcccaaaagccatgactgagtactgtaggaagttgtctggggtcacaaagacccgtaacataactcatgcaaattattattgtgacgaagtaaaagtgtgaacgaaataacgtcgacgc

SEQ ID NO: 554756 - DNA, 349 bp, Homo sapiens
ttcgtaccctttctcaggttcgcctttggccaccgccagttcaaccggcggatactcagcctggccctgcccagcctgaggttcctggtacgccgggtcgatcgcgaccagctcaaggcgcaactgatcagcaccttcctcacaggcgtcgaggccgcctggctccagcagcgggcagaagctttctgccagcaggcctggaaccgactgatgcgcccggcgggcctgcaggcggtggcccaggagctgcgctcaggcgccctggtaaccctgtgctctgcctccccggccctggtcctgcaacctttcgccacacgcctggggatcagcttgatcggcaccgaactgg

SEQ ID NO: 554757 - DNA, 2797 bp, Homo sapiens
aaagaactttctttcagtaacagattttttaacataaaggccaaagtttaaatgaaatagaaaacaaaatcaccaccactgttttaatgatcatggaaagtgatttatgaagtacaggatttaccataagcagtacagtgtcatcttgtgatttttcttcttccagaaagtttcatgaaagatttattaaatatataatatcaagagtttgcttttatttgcatattattcctttgttccagagataattctgaaggtactttttaaaagttgcttattctgatatgctatttaaaatttttagggatatccctgtggatttcaagtacatagcagaacccagtatgcactcaatgcctgcagtgactttgtctccaaatggaaaatggctagcatgccaatcaatggacaaccaaatcttaatttttggagcacagaacagatttagattaaataagaaaaaaatttttaagggccatatggtagcaggctatgcttgtcaggtggacttttcaccagacatgagttatgtgatttcaggagatggaaatggaaaattaaacatttgggactggaagaccacaaaactctacagtcgatttaaagctcatgataaagtgtgtataggtgcagtgtggcatcctcatgaaacttctaaggtcataacatgtggttgggatggtctcattaaattgtgggattaatgagattaatccttaaactagctgggatcatttttgatccattgtcatatttatatttaattattaaatgtatctgatgataacttgatttacagataatgttgatgacattgaccctttgtttaaaaaaagaaactgtaaatttgacataatttcatttgcaacttcattttgttttttataaatgttatttatacagaaagtggctattgactttctatttgacaagtagttataattggcaagcagtttgagtttatactcatgacatactgaaagcatctctttggggtcaagaaagaatccctagtggatttgggattctagaggaggtgttataattaattattcagaaaaatgcatgtatttacctcttcaaccaaaagggcagtaaagaatagggataatatattttaatgtaaatttggaagaaggataaaatcacccacagttactctccctattattttcactgggtcaagttttaatcttttggcttcatgagttccactccctttgatgatatatgttgtatatttttagttgtaaagcagtaatctttaactgtagcattcctctaattataaacagtgaaaaatcaaaatcagtccagagttcttttgttgacttaattcctgatcagtatagacaggactatatatatttaatcagagaattacattatatctgaagatggagctcaggagaatgcaccaagactttgaattgtatttacattcactgtcagtaaagacctggctacgctttgagaaatcaggatctcctaggtcattgcttcgcagctgtgattactgaaatcctcctcataggagataaagtacgaggggtagagtccaagatgtcaacttgtaatttctttgaagtcatatgttttatctttaaaattattcttattttacctgtgaatatatacaacagaactttttaagattaaaaaatttttaaacctctatgtctgaaaaaaaaaatgacactcctggaagatggctagggttccccagtttgagaagcagtggccatggtgaaaaatagtttttgaaaacatcagattataaaatcaagatagtccggacgcggtggcacatgcctgtaatcccagcactttgggaggctgaggcaggtgaatcacctgaggtcaggagttcaagaccagcctggccaacatagtgaaaccccgtctctactaaaaacacaaaaattagccaggcttggtggctggcgcctgtaattccagctactcagaaggctgaggcagggagaattgcttgaacccaggagtggaggttgcagtgagctgagatcatgccactgcactccagcctgggcgacagagcgagactccacctcaaaaaataaaatcaagataacctcttgaatgtaatagctcatagcactttaatttggcaagccatttttcctgttttattataaatctatattagatgtttgaatatggtttgaaatatttcactaccgtgctgaaaaaggttggttgatagcagcttggagtgctaactggaagatcaaaatcatgtctcttgctgataacctaagagcattaagctctgagtccagtgaggtcatagcagtgtatgctccttgcccttacggagtgtctgtttttagaaatttagattttaaaaggcgtgggacatacgaccaggccctatagccacataaatataaatttcatagaaaaagaataaaagcggagatatattttttgacacagaggcacccaaagaaatacaaacattgcctagctgctgccatttctgtaactgcccagaagggtgacagatttctgaaggggaaaggattcagatatgaccttttctttagtcccaaccactagttttaacaaatgtgaattattgaaatgtgaagggacaaaaagaatcatacatttaaactgtcttgttcagcataccaatattgtatgttacaaatcatcatttctaaatctggattgattctgttgtgtttttgactgtttctaaagtaagtgtgtataaaagtctcctttttaaaaagatcatatttttaaataaagcattttttgtagaaagtgc

SEQ ID NO: 554758 - DNA, 873 bp, Homo sapiens
  misc_feature (45)..(45): n is a, c, g, or t
  misc_feature (119)..(119): n is a, c, g, or t
  misc_feature (124)..(124): n is a, c, g, or t
  misc_feature (172)..(172): n is a, c, g, or t
  misc_feature (222)..(222): n is a, c, g, or t
  misc_feature (255)..(255): n is a, c, g, or t
  misc_feature (266)..(266): n is a, c, g, or t
  misc_feature (329)..(329): n is a, c, g, or t
  misc_feature (484)..(484): n is a, c, g, or t
  misc_feature (486)..(486): n is a, c, g, or t
  misc_feature (489)..(489): n is a, c, g, or t
  misc_feature (661)..(661): n is a, c, g, or t
  misc_feature (767)..(767): n is a, c, g, or t
  misc_feature (853)..(853): n is a, c, g, or t
accttctttcttttctctgctcctgctggccgtgccgtccatgcntttcttctttccctaggccatatttccccatcctgctcacagtattatggttaataagatgctggacagatgcntccanaagcctattacataacaacaaaatctcatcaatgatatatcaaatgcnaatttactaagacatcaagagaatatctgtttgtagttacatggctaaanacaagacattattacagtaaccaagtccataanactagaaaaanagcactgtataacaaaaaggccttttagaagctattaaatgaacaaacattatagataaaccnattttatatctgaagccgcttttagcccccccccgttggccggccccgccggggggtggggtctttgggccagggcatctggggcccgggggggctctcggccatcctctcctgccgccccttgttttaccaatgggggcataggggcccagggngntgnggcgccttgtcccgggtcacacagcacgggccggactggggaatgatccagggctatggtccgggcccctgccttccggtaggtgctctattttaacatacgggtatgagattctatttgatttgatgtattttttccccattaacaggtctaccataaaagaaagcaatanaacccataatgtactctggtattgtatttatttcactgagaaatgactggcatgtactacgatcattttgggggcctatatagatcttacatcaaaattcagaggnattagtcagataacactattttagttataaattgagaaggtggcatttgaagagaatatttggcacatcctccactacgtaagctnccctatgcctcaaaattact

SEQ ID NO: 554759 - DNA, 910 bp, Homo sapiens
ttaaactggagattatttgcaagatatgagttactagcttattatactgaattacagtatccaattagtgctgtgtttgtttgtttgtttatttatttatttttgtgatggagtcttgctctgtcacccaggctgagatcatgccactgcactccagcctgggcgacagagcgagactccacctcaaaaaataaaatcaagataacctcttgaatgtaatagctcatagcactttaatttggcaagccatttttcctgttttattataaatctatattagatgtttgaatatggtttgaaatatttcactaccgtgctgaaaaaggttggttgatagcagcttggagtgctaactggaagatcaaaatcatgtctcttgctgataacctaagagcattaagctctgagtccagtgaggtcatagcagtgtatgctccttgcccttacggagtgtctgtttttagaaatttagattttaaaaggcgtgggacatacgaccaggccctatagccacataaatataaatttcatagaaaaagaataaaagcggagatatattttttgacacagaggcacccaaagaaatacaaacattgcctagctgctgccatttctgtaactgcccagaagggtgacagatttctgaaggggaaaggattcagatatgaccttttctttagtcccaaccactagttttaacaaatgtgaattattgaaatgtgaagggacaaaaagaatcatacatttaaactgtcttgttcagcataccaatattgtatgttacaaatcatcatttctaaatctggattgattctgttgtgtttttgactgtttctaaagtaagtgtgtataaaagtctcctttttaaaaagatcatatttttaaataaagcattttttgtagaaagtgc

SEQ ID NO: 554760 - DNA, 1798 bp, Homo sapiens
  misc_feature (1429)..(1429): n is a, c, g, or t
  misc_feature (1438)..(1438): n is a, c, g, or t
  misc_feature (1468)..(1468): n is a, c, g, or t
  misc_feature (1505)..(1505): n is a, c, g, or t
  misc_feature (1521)..(1521): n is a, c, g, or t
  misc_feature (1597)..(1597): n is a, c, g, or t
  misc_feature (1600)..(1600): n is a, c, g, or t
  misc_feature (1691)..(1691): n is a, c, g, or t
  misc_feature (1705)..(1705): n is a, c, g, or t
  misc_feature (1708)..(1708): n is a, c, g, or t
  misc_feature (1737)..(1737): n is a, c, g, or t
  misc_feature (1761)..(1761): n is a, c, g, or t
  misc_feature (1770)..(1770): n is a, c, g, or t
  misc_feature (1774)..(1774): n is a, c, g, or t
  misc_feature (1777)..(1777): n is a, c, g, or t
ctccgcagaagatttgttgccgtcatgtcggctgcgattgcagctctggccgcttcctatggttcgggttcagggtccgaatcggactcggacagtgagagcagtcggtgtccgctgccagccgccgactccctcatgcacttgactaaatcgccttcatcaaagccgtctctagcagtggcagtggactcggctccggaggtggcagttaaggaagatttggagactggagttcaccttgaccctgccgtcaaagaagttcagtataatcctacctatgagaccatgtttgctcctgagtttggaccagaaaatccctttaggacacagcaaatggctgcccctagaaatatgctttctggatatgccgaaccagctcatatcaatgatttcatgtttgagcagcaaaggagaacttttgcaacatatggttatgcattagacccttcattagataatcatcaagtgtctgctaaatatattggttctgtagaagaagctgaaaaaaatcaaggtttaactgtatttgaaactggtcagaagaaaacagaaaagaggaaaaagtttaaagaaaatgatgcatccaatattgatggttttttgggaccatgggcaaaatatgtggatgaaaaagatgtagccaaaccttcagaagaagagcaaaaagaattggatgaaatcacagcaaagaggcagaaaaaaggaaaacaggaagaagagaaacctggggaggagaagacaatcttacatgttaaagaaatgtatgactatcaaggcaggtcctatcttcacatacctcaggatgttggtgttaatctacggtcaactatgccacctgagaagtgttatcttcccaaaaaacaaattcatgtgtggtctggacacacaaagggcgtcagtgcagtcagattgtttcctctctctggccatttattgctgtcttgttccatggactgtaaaattaagctatgggaggtttatggagaacggcgctgtctgagaacatttattggtcacagtaaggctgttagggatatctgcttcaatactgcaggaacacagttcctcagtgcagcctatgacaggtatcttaagctctgggacactgagacaggacagtgtatatcaagatttacaaaccgaaaagtaccttattgtgtcaaattcaatcctgatgaagataagcaaaatctctttgtggctgggatgtctgataagaagattgtgcaatgggacattcgaagtggagaaattgtgcaggaatatgatcggcatttgggagctgtcaacaccattgtttttgtggatgagaataggagatttgtgagcacatctgatgataaaagcctaagagtttgggaatggtgagtttccatcagtagaaaatctgatttacataaagcaagcagttaaaaattatatagacaangatgaagcntgataatatgcaaccatttgaatatttttngcaactgtgatcctggcttgccaatcaaactgttttnactatttaagtactgncaatatgcagattaaatccaaacagggtaccatttataatctttggatagtctttccaaaggatgtgtatcagganttntttttcttatacggatgacagatttgtattttgctgtcttacattctttattaggtaccttattcatctctgtaaaataactggcaagcantagggggactgagnatnagatcatggccctagaaccacccaaaganaatagtggtgtatatcttaatttnttaaatgtntacnttntatgatttttcagtactgaaa

SEQ ID NO: 554761 - DNA, 890 bp, Homo sapiens
  misc_feature (738)..(738): n is a, c, g, or t
ctccgcagaagatttgttgccgtcatgtcggctgcgattgcagctctggccgcttcctatggttcgggttcagggtccgaatcggactcggacagtgagagcagtcggtgtccgctgccagccgccgactccctcatgcacttgactaaatcgccttcatcaaagccgtctctagcagtggcagtggactcggctccggaggtggcagttaaggaagatttggagactggagttcaccttgaccctgccgtcaaagaagttcagtataatcctacctatgagaccatgtttgctcctgagtttggaccagaaaatccctttaggacacagcaaatggctgcccctagaaatatgctttctggatatgccgaaccagctcatatcaatgatttcatgtttgagcagcaaaggagaacttttgcaacatatggttatgcattagacccttcattagataatcatcaagtgtctgctaaatatattggttctgtagaagaagctgaaaaaaatcaaggtttaactgtatttgaaactggtcagaagaaaaccaaaaaaaaaaaaaaaaaaaaaaaaaatggggggttttttggggggggggggaaaagggggtttgaaggggctgtggtggggttccgggccccttttttggcaaagggggaaaaccgggagggcccccctaggggaggcggaataatttcgaaaagccagggtaccgtagacttgcgccgacagacaacnaaacacggaaaaaaagagagaacgacacactctgcacaaaaccgcgtggacaaacacacaacgcacacaccgtcggcaaaaagaacagcaacaaaaacactcacacagccaacacagaccacaccacaagacaaaaaagaatccgcacctca

SEQ ID NO: 554762 - DNA, 632 bp, Homo sapiens
  misc_feature (539)..(539): n is a, c, g, or t
  misc_feature (586)..(586): n is a, c, g, or t
  misc_feature (614)..(614): n is a, c, g, or t
gcaccgaccggcacgagtgcacgcggacagcagagacggggcgatgctacgggtgcggtgtctgcgcggaggcagccgaggtgccgaggcggtgcactacatcggctctcggcttggaggatccttaacaggatgggtgcagcgaactttccagagcacccaggcagctacagcttcctcccgaaattcctgtgcagctgaagacaaggccacccatcctctgcccaaggactgccctgtctcctcttacaacgaatgggaccctttagaggaagtgatagtgggcagagctgaaaatgcctgtgtgccaccattcacagtggaggtgaaggccaatacatatgaaaagtactggccattttaccaaaaaaatggaggtctttattttcccaaagatcatctgaagaaggctgttgctgaggtcgaagagatgtgcaatattttatcaatggaaggagtgaccgtgaggcggcctgaccccatcgactggtcactcaagtataagactcctgattttgagtctacaggtttgtacagcncaatgcctcgagaccatcctgatggttgtggggaaaccgagattatngaagcacccctggcattgcgctccacgnttcttttgagttaccgag

SEQ ID NO: 554763 - DNA, 165 bp, Homo sapiens
aactggagtttcaacccattccttacatttaagaaggtccattactggtttacaaggcttaatttttttcttagttaaaggtttttctttcaggccgtttttcttaatttaacggttccaacaaaaccaaattaacgtctggggtaaaccgggccttttcggttg

SEQ ID NO: 554764 - DNA, 323 bp, Homo sapiens
gcggccgatggcgaatcgcgcctgcgggagaatgacgatttcaagagacatgaatggctaccaatcctgggcggtccgggttcagaccaaagaagtgtttgcaaaaaaagaaaaagggtagccgaggctaccctttttaatcaatcacgcatgaaacaaaacggcgacgccgcttacttcttgcggatctgctggagagtacgcagctgggctgcggcctcggccagacggactgcagcagcgctgtagtcgaagtctgcgcctttttcgttcagcgccttctcggcagccttgacggcttcctgagcggaggcttcatccag

SEQ ID NO: 554765 - DNA, 578 bp, Homo sapiens
  misc_feature (14)..(14): n is a, c, g, or t
  misc_feature (73)..(73): n is a, c, g, or t
  misc_feature (76)..(76): n is a, c, g, or t
  misc_feature (81)..(81): n is a, c, g, or t
  misc_feature (88)..(88): n is a, c, g, or t
  misc_feature (95)..(96): n is a, c, g, or t
  misc_feature (131)..(131): n is a, c, g, or t
  misc_feature (158)..(158): n is a, c, g, or t
  misc_feature (170)..(170): n is a, c, g, or t
  misc_feature (177)..(177): n is a, c, g, or t
  misc_feature (180)..(180): n is a, c, g, or t
  misc_feature (183)..(183): n is a, c, g, or t
  misc_feature (189)..(189): n is a, c, g, or t
  misc_feature (192)..(193): n is a, c, g, or t
  misc_feature (196)..(196): n is a, c, g, or t
  misc_feature (198)..(198): n is a, c, g, or t
  misc_feature (202)..(202): n is a, c, g, or t
  misc_feature (208)..(208): n is a, c, g, or t
  misc_feature (217)..(217): n is a, c, g, or t
  misc_feature (253)..(253): n is a, c, g, or t
  misc_feature (256)..(257): n is a, c, g, or t
  misc_feature (263)..(263): n is a, c, g, or t
  misc_feature (289)..(289): n is a, c, g, or t
  misc_feature (336)..(336): n is a, c, g, or t
  misc_feature (341)..(342): n is a, c, g, or t
  misc_feature (395)..(395): n is a, c, g, or t
  misc_feature (409)..(409): n is a, c, g, or t
  misc_feature (411)..(411): n is a, c, g, or t
  misc_feature (422)..(423): n is a, c, g, or t
  misc_feature (428)..(428): n is a, c, g, or t
  misc_feature (446)..(446): n is a, c, g, or t
  misc_feature (449)..(449): n is a, c, g, or t
  misc_feature (453)..(453): n is a, c, g, or t
  misc_feature (457)..(457): n is a, c, g, or t
  misc_feature (473)..(473): n is a, c, g, or t
  misc_feature (506)..(506): n is a, c, g, or t
  misc_feature (511)..(511): n is a, c, g, or t
  misc_feature (562)..(562): n is a, c, g, or t
caactggtgtgtantgtcttctcctaaacctgtgttacttgtatcctggactttttcggtaaaatccttttcntcntctgnctcttcnctttccnnctcctcttccatatctccatcttcaggcctctccntagcactcttcgtctctttaggcagcngcgatgcctttncaagccnggngcnccgggnagnngcngntggnggggcntgggctggngtgtgaagaagctcactaattgcggggatgtgttangtnnaggggngttgaaaaagaaaaaaaaaaaaaaantcgggtagggtttggtcctgctgttgcctgtgttttccccatatggnattgnntggggttgtggggagtctttcttctgctagctgctgaaaaattgttggtgtgngtttttcttctggngnctttgttctgnntgtcncttttctctgtggttttnttnggtngttncactggggtctctttngccactggtaagcttctgatgtgaaggtttcanggacntctcgtggtacatacactccccactggactttctctctggagatacccttntgaaaatacaatggcc

SEQ ID NO: 554766 - DNA, 1068 bp, Homo sapiens
gttataaaacttagtttaaaaaaaagacaaaaaaaaaaaagccaagccgtgagccgaccagaaggccgtcctcttggatatcttttggcaattggtaccggaaagtgacttactcctctggcccttcctggcttccggtctctggccgggtgccgtggtggtcgtccggtgcctggtgaggttttggtgcagcgggtaaagtgctgggtgcttctgggtgaccttggacctgtgggtgtcacttctggtgtctggttttcccgtgttcgttttttggggttaagttggtgctttggcttctgctggcttgctggacctgggctggggtgccaagtgggcgcctgctggcgtcagagctcaaggaatctgtgcccaccaccagctcctggtccgtaggaggtgagacatggggttctggtcatgcccccctccattgagccttggctacatctggtgtctaagggcttggggctggatctaagtgggcggggtcaggtcgaaatgggggtcccttggggcgacccaagctgattccaaaacccaacaaactctggcctcgaggtgcgtggacattacaagggatgagggagtccactgtggagtggcccacagggctatggccagcgttcccgggcacgcatacctctggacatcagctctggacacaaataaggagaccagcgacagtgagactagcaggatctcaacgaccagactggaaccatgaaatgatgtaccaaggaagacagaaaggtgaatccaaggccaaacatggtggcacccaaacggggaaccgaccagtactcctggtcacgagataaatagaaagccatgagggataacaaaaaggtgaacaacaggggaaacagccacaaggagacacggaaaaggacacaacaaacacaaggaacaaaagggaaaaatcggcatcaaacagtagacatgacccaaggaacaagggaccaaggaacacagagtaatcacagaaaggaaccatagcggcaaagccgcaacgataaccaaagaagaaggcccacagcagacaagagaccactataaggggccacg

SEQ ID NO: 554767 - DNA, 578 bp, Homo sapiens
tgtgcctactaaaaattagctgggtgtggtggtgcatgcctgtaatcccagctactccggaggctgaggcaggagaatcgcttgaacccggaaggcagggttgcagtgagccgagatcaggccactgcactccagcctgggtgacagagcgagactccatttaaaaaaaaaaaaaaaaggaaagggtacaaagtttggtatacacgtttaaaggaggtaggccaggcacgggtggctccgccgtgtaatcctagcactttgagaggccgaggcaggcagatggcttgagctcaggagttcaggaccagcctgggcaacatggcaaaaccccatctctacaaaaaaatacagaaaattagccaggcgtggtgggcgagctcctgtagtgccacctactggggggtctgaagtggggaggatcgctggcacctgagaggtggagaccgcagtgagctaagatggcaccacttcacctgcactccagtctggggcgacagagtgagaccctatctcaaaaacaaaacacacaagggtttcaaaggggcaacaacacaaccaaccagacaaaaaaacagcgg

SEQ ID NO: 554768 - DNA, 1770 bp, Homo sapiens
agcacggccatgaaggactcgagagcatgctacgaagagtacaaggtagtagggtcgcatgccttgcccacccggcataatgccgatgaacgctcgccctcttcctagccgcaatggcagaagtgctgtattggcagcgcatacagtcactgttcgattcggacagaagtcgccgggttcgtgggtagctctagtactactgcaagttacaatgaatgatgaacgaatgtctctacagcggcgaggagttcgttgcgtaacgtagtcgcgtgcagtgatgcttctcgatgacagtctcgccacctaggcgtgggtgagagacacttgcgtggcatactagggcatgcgactactgaagtctccggaggcggtcatccgctacagcgatggttacgcagggggaaataagcggagcgaaccgtggcaaacgacactgcaagggcaggctggggcccacaccgtagttggcctacaccgaggagaacgcattgcgggttagccacatgtggtacacgcggcgtgcacccaggagaccccttacggacgctaatatcgcaggatcccattggagaacgggctcggcgaagagaagaaattcggcaggggcacccaaggccacatggcttggcgccatgcacctaggagcgcactgcgaggctctatgaatccaacattgcacatggctattctcggaactaggaacatattcccacaaaggacattcctagaaagtcttaccccccagggcattggaggaccgcaaacgcaggaggggattcccattggcaggacaccgggagatcacaaggtgcgcaaacgaaaaatgggcaacttaagcagagacagttgttaccgaagggccggaacacccaagaagtaaaggggggcgccacccacagaaggcaagccaccgttgtgccattaatcagcttaaggaagagtatgacaatgtggtgaaccgcactttgcggggtcacccgggggaggcttggctaggcgccacgcaaagacaatttacataaagcctccgaagggcgaaaaaaccggcccgcgtcaacggggggctacagatcacaagataccatgtgcacacacttacaaaaggacaacaaaccacatcggacacagagaagacggcgacgaggggaaccacgccaccacgaccacgagaaggccggtacaaccgcgctacgacacacagtcgggggagcgacaccccgcacaaccggggactcggcgccgcgacacggaaaaatcggcaccaagcagcagtcacactgtcgcgtgtacgcaaacccaacatgcagaggttcaacccatgacacccaggagtggacgacatgagtgcgctatcaagccacaagcgggcaaccggaacgaaactacacagaggcagcacacgagttgcacttaggacgcagcacccactgccccaacgtcgaacagttggatctacaaccaagcgggtcccaactcaacctgacggagggagcacacatcgctgagctaaagcgagcggagcaacacccacacagaacactaagcagtgagcgcggggagcgcacacaaccacaacggcggaggctacgcacaggcacaaccagacacacggcaacagcagcagctagacaaggcgcgccagcaagcagaggacaaacacacagacacccagtaagaaacagtgaagacctaagcagtgactaacacacagcaccagccctcacagtcgtgagtagactagaaacgagatagactaccaccagcacgaat

SEQ ID NO: 554769 - DNA, 406 bp, Homo sapiens
gagagagagagagagagagagagagagagagagagagagagagagagagagagagagagagagagagagagagagagagagagagagagagagagagagagagagagagagagagagagagagactgagtttttttttttcttctctttctttcttctgttattgtttctgaacgcttcttgaaagagctttttttttaattcattggtcttacaccttctataggtttgtgtcatgtcctacgctcttttccatttcttgacgaccttcggccagcggtttcctcgctgctcatgtcgtctctccggtgttctcctttctgtggctctccactcttccgctgctctcttcccgtttatccctaccgtggcaccttctttcggtttccttttttcgtgtcctcgtg

SEQ ID NO: 554770 - DNA, 436 bp, Homo sapiens
cggacggcgtgggttaagttagaagatgtggatatttaaggctatttttaatttctattacagtctccttaaaaaccaaaaaggaatgcattaatccacatttcccttcttcagaggtgtagtgtcctggctctggcaaggaattatgtatttaggtcagtccccagaaatgcagctgctcatacagctgagagaaggctattatgagttcctttacttactttttatactacactgatgctgcttgatagaagtctgtggcttgtcagatatgtcacccaagtaaatgcttgtagatctgattaaaatgaaaagctcacttgagaaacactgcagagttatgtaatgatcttgtgtgagtgtgtgaaagtcaaaggcatgtcagtttattacatttgcaacataaaagtacttaattaaaatagatatttagttt

SEQ ID NO: 554771 - DNA, 194 bp, Homo sapiens
taagaaaaaggtatgacttctggttttcggtcctgggcataatttttattcctttccagtggaaccaaaacctcctgaacccctttcggtgtcatcaaggcttgaacttcttctattctcgtggataaaaaactccgtccgcaaataagctgtgcaatccgatcaccttttttttcctaataactgtggggaac

SEQ ID NO: 554772 - DNA, 419 bp, Homo sapiens
  misc_feature (21)..(21): n is a, c, g, or t
  misc_feature (41)..(41): n is a, c, g, or t
  misc_feature (375)..(375): n is a, c, g, or t
  misc_feature (377)..(377): n is a, c, g, or t
attccctaagaagcccatccntgaaaaaaatagtttccatnatgtgtatgaataaacccttaaaaaaatgttaatatccttttatattgtattaaatgtccatgtctaagtaatcgatccctaaagaaataaccagtcaagccggcacagtggctcacacctgtaatccccagcactttgagagtccgaggcaggcggatcacttgaggcccaggagttcgagaccagcttagccaacatgatgaaaccccatctcttctaaaaatacgaaaattagccaggtgttgtggcacatgcctgtaatcccagctactcgggatgctgaggcagagaatcgcttgaacctgggaggcggaggctgcagtgagctgagantngccactgcactccagcctgggtgacagagtgagactccatct

SEQ ID NO: 554773 - DNA, 1377 bp, Homo sapiens
ctgtgcatcgctttggtgcggcaccctggctacctcctttctgctgacacgcggccagctgaggagagctccgcgccgcatcgccacgtggcccgacgcacacaacgcccacaggcacaggagctcacagacctgagcacacacagcgcactccactactctaactctctgcaaccgcgctgcgcgggcgccagcgcactgcgctctcatgctgcgctgccagcttctacacgcactctaccgcacgcgcactactacccacctctagcctacaacccctacacctgcacacacgcgcatactgtgctgacaccgcacaaggcggcaattggctccaacctgcacgggcacgcactcacgcactctcccgcactctctgcaccgcgcgccaacacccacactccacacccggacacaccgaggcaccacccacccctgccaccgagcctttggccaaaaactgggaagcgcactggacacgcagctagcgcacgctccgcacctcgctgctctcccacacgcacgcccacgtaccgggccgaacgcgctgctccttaccctggcccacacacgcgggcacacccttggccctatccccttatacaccctatccccaaggcacaactcttccgtggcatctaccttctctaaaccacgcagcttcacacgcaactttacccacttgtcctttcaacatctcctacgcacaaaccagcctttggtccccaccctctctgggggctttctccccaagcaccgaaggcaaacatacccttgggcaccccttaacccttaaaccccggcgttcacctcacggtctctcttgtcccatcccttaagcttctccgtagtgtccaagttttccttccccgcccaccattttatcacgcaacaccagagtattccgcgcattatcaagcgtccggcttacccgaccttaagctacccgcgttaacagccctatggggcctacaattatacttggcgtgggccacccacacacacagcgcccactttaccttctggcccaacttcactaaccaaccacaccacgataaaccccaccctaagacacccccacagacccgccatgacgcccccccacatagccggcgcggccaaccagtggctgccccgagcgaagactcggagacaccgacatacacaccgccctccgccgcccgcaaccgccgccgcgcctcgccagccgcaaaccacgaccacccacccgccgggacgcaccctcatggactcgagacaccacaccagtagccccccccccgagtactgcagccacccgcagccactgacgcacacgcgccccacctgtcgctacaagaacgccgacccgccgccctcaccaacgacagcacgtgg

SEQ ID NO: 554774 - DNA, 147 bp, Homo sapiens
gcttgaagtcggcaggacagacatggtatgggaaagaggcgtctctgcaaatttgacttggaaagtaaggtcttgatcttatgatttctttattcttgtcttataaccacagactcatcatcactgatcgaccgaatgttgtcgtgc

SEQ ID NO: 554775 - DNA, 256 bp, Homo sapiens
aaaatctgtccctcgttggtgactctgatcctcaacactgtccaaaagtgtgggaggacctctgttcatatccagcctgggtcattgcagcagtggagttactgtagagggatgtcccaagcttgttttccaatcagtgtacagctgtttgaaactctcctgtgtctgtgtatggtaagtgcgtgtgtgtgagagcacatcagtgtgtgagggctgtgttaccccgatttctctcctcccttacagacccatcatt

SEQ ID NO: 554776 - DNA, 139 bp, Homo sapiens
cacctctaacgactcccgacggacactacctctggtacgaactcgtgtacctgtactaccggacgacaacggaacgacgaacgtaagccgagggcgtctttgcattgtgtagtcaagggtggcaaggtgcatttcatcg

SEQ ID NO: 554777 - DNA, 220 bp, Homo sapiens
  misc_feature (194)..(194): n is a, c, g, or t
gctagataggacttccagtactttgttgaataacagtagtgacagtgggcatgcttgtcatgtttcagatctttgaggagaggctttctagtttttccccattcagtatgatactagctgtgggtctgtcatatatggctttattatgttgggtgtgttcctctatcccagtgttgtgagtatcttaacttctntgcaacataaatattttatttagacc

SEQ ID NO: 554778 - DNA, 524 bp, Homo sapiens
tgatagactattcgcatatgtctagaatgactgtagtctaacaatatcatggtccagacaagagaacgctggatatgcccctgtgtgccgcgacatattaatatgttactaaaatatgaaaactacgtttacagcaatgtcagttttataaaccacagataagatatgtacataggtgagtaagtgcaaaagagtcatcagaattgacatctggggttatacacgtgaccttgataggcagcctaatcctgtatctatcaagaaatctacctttaacaacttaaatattatgctttatggatatgccaaacccaagattatctttaattggaattagaccagcgcttgggtgtgggaagcatgcaatgatcttaacattcagtgtgaaatgcttctgtagaattatagcagaaagcccttgctataacctggcttagtgcagacatgcaaatctgagatagcacaaccagtttggctggactaaaggtgcagatgatcagtctaaacagcagtggtgataagca

SEQ ID NO: 554779 - DNA, 538 bp, Homo sapiens
ggtacgaatgctgttctttgcaatagctgtttagggatgcactctgagagcagcgctacctattcaatgatgtttagaaagctggactacctgttatctgatccaccgaggcacggaatgttccatgcaacaggcttggatctcccggcttgatcttttgtaagaaagggcagcctagttgatctgaaatgatgatcaccaagcctaatgtaggtatcctcgcgagagctcggggaatacctgcctattgcaaaatatagttgataaccgcgggcgagtaatacgtgtttacatctggtcatgctttcagacaatacgcattacgtgtgctcaggagtttgctaggactgagagggctgaaagatacatctcttaccatgtccttcagataggtctatgcttctcagaagatcgaaaatctgactactaggcactatagctctgagagcaagactctgaccgtacacatatattgcacatgcgcatatgacgacctacggttatgcataccatagactgggtgtgcctttctttgcct

SEQ ID NO: 554780 - DNA, 301 bp, Homo sapiens
gtgtcacctcgtcttataactttttttgttattctaagacaccaacttatttgcctcatttagagcaggtcacaatgtcattaacgcttagttgagagttttttctcattccgcggatgtaggaaaaatcgtcactggactgtccacctcttaatcaactcttggcatttctgcccagccttcgtgtgttgtccttatttgctgggatcccttgttgggcaatcactttcccgagctcttagttgttcaaggtctctctgtcttgatcataatattgtacatactggttacaaatttttct

SEQ ID NO: 554781 - DNA, 825 bp, Homo sapiens
  misc_feature (10)..(10): n is a, c, g, or t
  misc_feature (82)..(82): n is a, c, g, or t
  misc_feature (137)..(137): n is a, c, g, or t
  misc_feature (212)..(212): n is a, c, g, or t
  misc_feature (227)..(227): n is a, c, g, or t
  misc_feature (241)..(241): n is a, c, g, or t
  misc_feature (263)..(263): n is a, c, g, or t
  misc_feature (278)..(278): n is a, c, g, or t
  misc_feature (280)..(280): n is a, c, g, or t
  misc_feature (295)..(295): n is a, c, g, or t
  misc_feature (297)..(297): n is a, c, g, or t
  misc_feature (306)..(306): n is a, c, g, or t
  misc_feature (314)..(314): n is a, c, g, or t
  misc_feature (316)..(316): n is a, c, g, or t
  misc_feature (323)..(323): n is a, c, g, or t
  misc_feature (334)..(334): n is a, c, g, or t
  misc_feature (340)..(341): n is a, c, g, or t
  misc_feature (350)..(351): n is a, c, g, or t
  misc_feature (355)..(358): n is a, c, g, or t
  misc_feature (361)..(361): n is a, c, g, or t
  misc_feature (383)..(383): n is a, c, g, or t
  misc_feature (404)..(405): n is a, c, g, or t
  misc_feature (410)..(410): n is a, c, g, or t
  misc_feature (426)..(426): n is a, c, g, or t
  misc_feature (460)..(460): n is a, c, g, or t
  misc_feature (714)..(714): n is a, c, g, or t
  misc_feature (782)..(782): n is a, c, g, or t
cttttaaaanattcaaattcactgatttacatggcatcttctgttggaattcagaacctctcaataggccaaaatgtcctgnttctaactctaaacttcagccttaacaaaaatacgtattaaatgggtggcaaganagacttgaggattcttgattcatcattacaggggacttacccaaaacccaaatgtagtttatctctttgtttganattcaggagaatttnaccctaggaaatgnatcattgtatgaatccattttnatgctgctgataaananatacctgggcaattnanaaaaaaaanaagtttananccgggancagtggcttangcctgnngtcccagcnntttnnnngcncaaggtgggcggttcacaaggncgggggatcgataccaccctnnttttnttggcgaaaccccgtntcttctaaaaatacaaaaaaattaggtgggtgtngtggcaggcgcctgtgacaatgcctgctacacgggaggctgaggcaggagaatggcgtgaacctgggaggcggagctgcagtgagccgagatcgcgccactgcactccaggttcaagtgattctcatgcctcagcctcccaagtagctgggatcacaggtgcccaccaccgtgcctggctaatttttgtatttttagtatagacggggcttcaccatgttggccaggctggcctcaaactcctgatcgcaagtnatctccccttggcctcccaaagtgctgggattacaggcatgagcaaccgcgttcagcccacatgattnaattaccaggtccctcccaagacacatggggtatggggagcta

SEQ ID NO: 554782 - DNA, 604 bp, Homo sapiens
ggagctacaggtcacatggacccttcaatctgcagtctcattgccaagggatgaccagctgaaagttattgaatgcaacgtacgtgtctctcgctccttccccttcgtttccaagacactgggtgtggacctagtagccttgggcacgcgggatcatcatgggggaagaagtggaacctgtggtggactaagtgacgtgggttctggagtctgtgggagtaataggtgcctcatgttctccttctcccggcttggcgtcgtgcatgacgtggtgttgggtgtggtaaatgaccagtactgggagagtgtgggccggctttggggagacgcgctgtgaggcatatctccgaaaggcatgtctaagtcagtggctaaggatccccaaggaaggaataatcctgtcgtgaccattgaaagcttttacgaactttaagcgagttgttcccatggatgtgctggctatcgtggaggagcctgggactacatgactctagtgccaggtctcgagtacaagtcgtgacttctacactgagacatggctgtcgaaggtaaccaagctgtggactgacacattagaggaggctgtggatggtgaaatgaccag

SEQ ID NO: 554783 - DNA, 846 bp, Homo sapiens
agcccaggtcctgttcccagagtgaattgccagccccttccgcccgtttccatcacgagtgccgccagcgatgtctgacaaactgacctacaaagtcgacgacatcggctggctgcctggggacgcaaggccctggccattgctgagaacagagatgccgggcactgatgcgtatgcgggagcggtactcggcatccaatctctgtgaagggcgcccgctatcgctggctgtctgcacctgacctgtggtagacggccgtcctcattgaagaccctcgttcaccctgggtgctgaggtgcccggtggtccagctgctaacatcttctccacccaggacgcatgcctggcgggttgcccatatgcccaaggctggctattctcgagctgtattgcctgagaaaggggcgaaaactggtatcgatgggagataaccctgtgaatgacaatttgaagcaatgaaaccacattgtatatctttcataggaacagggagaccccctccaagctattgacatatcctgggacctgacagagagatgctaagcttacaatccaaaactcatcaatactatcaaagcaaaatgtacaccggcaagactatacatgcaccattgtcgattccgcaaggcctcattcttcatgaagggacagaacctaacagaacttgggatcggtgccaaccaaactcctcccttaccacagcatggaattgagccacaaggtggtcgactcccctcacagggatgcccttgcgcaatacaaacttgttcaacattgaactccccgtcacaccaacagaaggcaaaggtctgaacaaacactcctatgacgtagccagggactca

SEQ ID NO: 554784 - DNA, 482 bp, Homo sapiens
tatctatactgtctgcctgtcactggtgatgcagtggcaacatagctcactgtaccttaactcctgggctcagtggtcctcccactcagctcccacatactgaatacaggttgcacactgttcctgggtaacagttggaacttcttatctctttttagggtcttaacaaagaattttgttttatttttagaccgaggtctataactttttctgtgacaggcaagatagtaaatagacaagactttgcaggccagaccatctctgctgtgatgactccactctacctttgtaaaagaaaagcggccatagacaatatgtaaacaaatgagcaaggctgtgtgccgataaaactattaaaggacactgaaattttcatttcatataattttttcatgaaatgatgtttgtttttccccctatcatttcaaatgataaaaaaaattccttaacttgcagttcagacataagtaggcagtagcctg

SEQ ID NO: 554785 - DNA, 149 bp, Homo sapiens
atcatcctcccacttaccaaactcagcacacgtcactgtgtttgccacaaacatcacacagagtatcgatctgtctgatgtttcagggacccagccatgtcatggagggtacatgggcaggtaccatctcttgcctggtacatcgggca

SEQ ID NO: 554786 - DNA, 330 bp, Homo sapiens
  misc_feature (222)..(222): n is a, c, g, or t
tttcagcacgctggagtggaaacaggaagggtatggtaatcacacacacgcaagggaaaaggagcaagtagcggaatagttgattatgtattagtctcacgctcagtaaatcggcactttgtgtaagctgtgtgtgaacatggtagcagctacctgtgggagatatttaacacttttatctcgtagctgtctgagttaggaacaataaggaaaggcagcttncttgcagtgactcagactttcagcgtgaagctttttttcgttgttggcagaagtgaactgtgggtactccacgcgtgcgtgatacacagggtaccgtagctcgaaatt

SEQ ID NO: 554787 - DNA, 131 bp, Homo sapiens
ggaattcccctaaaaattttaaaaggcccccaaaaggttaaggtttttttttttggggttatttaccaaaatggggccccgcccccctttttgggggtttttggggaaaaaaaggggttgtttttttttta

SEQ ID NO: 554788 - DNA, 1040 bp, Homo sapiens
cggctcatcctcacgtgaacttcaccagagcactcacaagatcttcttactcaggctctggcgctgctgcctcagctgctcttcggccatcagagaacaacttgcacatgacttcctggctttcctggccataaattattcctggatgagacatgtggcttaactcacaggtttcccatcagctttctccctaaaactatgttcatctgcctctctctgaccagcagaacatacagccgagaatactgccgcagctgagactgactactgtgcattaggaaagacctggagtcaggactttggctgggataaggagctccgaggcagtcaataactgaacaagcagccctgtacccctaggctgcacgaacccttgacactgcatcctctcccagaacctgacacacaggaaacctggcgaggctatcgtcaggtcagcccacactgcatgcaccacgcacaccatcctcagacagccaatgttgtcatctcatgaagcaggcaacgaacacgcggcacacccacactgtgaccctgattccggtatggcttgcactacacgtacccctgcaaacctcctagcactgctgtgctaacacccagggcaagcactgctgactgccactccaggcaaccccatgaatgactacgatagcaagcacagtgtatgacaacggagccctatagaactaaatgccccccaaacaaacaaatagactactcgttgctgcgcacatctctcctttccatagaacaaaattcaaaacgacgacaccttaactacctatcccaattttaccctcatgtaattctagaaatacacatcaacaactcatataccttaaagaccattcacaaataccctctctctgtcaaccgtctctcaactaagaacgagcggaacctaaatgaacatatacccaaaatcaccaacagactacagcacaccctggatatacacccctgactgatggtgacaaaccacacacaccttcagaaatcactagagccttacactaacgcgccatctacatctatcc

SEQ ID NO: 554789 - DNA, 1008 bp, Homo sapiens
  misc_feature (3)..(3): n is a, c, g, or t
  misc_feature (197)..(197): n is a, c, g, or t
  misc_feature (201)..(201): n is a, c, g, or t
  misc_feature (206)..(206): n is a, c, g, or t
  misc_feature (211)..(211): n is a, c, g, or t
  misc_feature (215)..(215): n is a, c, g, or t
  misc_feature (241)..(241): n is a, c, g, or t
  misc_feature (309)..(310): n is a, c, g, or t
  misc_feature (339)..(339): n is a, c, g, or t
  misc_feature (345)..(345): n is a, c, g, or t
  misc_feature (393)..(393): n is a, c, g, or t
  misc_feature (417)..(417): n is a, c, g, or t
  misc_feature (536)..(536): n is a, c, g, or t
  misc_feature (610)..(610): n is a, c, g, or t
ctngcagccacatgttctcctgctgccccgaaggacgacaactggacataaagaagtcaagctacaaaaagctctctaagttcctgcagcaaatgcagcaggagcagattatacaggtgaaggagctgagcaaaggggtggagagcattgtggctgtgcactggacacacccgaggattacatttttcgtcataccngagncctcnccganctcncagactatccaggagggtagcagggnacagccctatcaccctccagatataaaacccctctactgtgtcccagccagcatgaccctgctcttcnnggagtctggccacaagaaggggagctttntggagngcagtgaggtccgaacgatcgtcattaactacgccaagaaaaatgacntggttgatgcagacaacaaaaatnttgtgagattggatcccatcctatgtgactgcatcttagagaaaaatgaacagcatacagtcatgaagcttccatgggacagtcttctgaccaggtgtttggaaaaattacagcctgcntatcaagtgacccttcccggacaagagcccattgtgaagaaagggagaatctgtccaattgacatcaccctagnacaaagagcgtctaataaaaaggtgaccgtggtccggaagttggaggcctatggtctggacccatactcagtggctgccatccttcagcagcgatgccaggctagcaccaccgtgaatcgtgcccctggggccaaggacagccttcaggtgcagatccagggaaaccaggtccaccacctcggctggctattgcttgaagagtatcagctccctcgaaaacacatccaaggtctagaaaaggccctcaaacctggcaagaagaagtgacagactcttttgtctcacgtggtggatccggtggaaatccaagctctgggctggtaatttttatgagcattttcagcttttgcaaatacaaaatataattctttacaaaaataaatttttattctaatct

SEQ ID NO: 554790 - DNA, 421 bp, Homo sapiens
gagctatcctcccatcgcatagttattatctcgccagtgttgctctatatagtacactgggatttatactactggcagttgaatgtgctctagacctatcttctcttcatccccgttgacaacatgctcaacctcaattcggcctattatgctgcctgtgctcgaattcagaacacatcatcattcatcggcccctgtgtgaatattgtttccactaactgcgaatcctagtgtaataagacgtgctttgcttcgcttatgatgttttgggaattccctttgtgtatccggagttcatgtactccagaagaagtgattcccaagagattgcaagagacacagaggtcataacggtaaacagccgtacgcatctcccaggagattgggaaccttatgaaggaaatcgagacccttgtggtag

SEQ ID NO: 554791 - DNA, 383 bp, Homo sapiens
gctctcagtgtgaaaatttcagaaatatacacatcagctgtgaggtgtaggcgtaagtggtcagtcccgaagttgagtttgagctgggtggaatgacattgtgaggcaacgggtactggtgtagggccatccttttatcaatttcatcgtccgctgaggagtgtgtgctttttggattgtagaagagtatcagctccctcgaaaacacatccaaggtctagaaaaggccctcaaacctggcaagaagaagtgacagactcttttgtctcacgtggtggatccggtggaaatccaagctctgggctggtaatttttatgagcattttcagcttttgcaaatacaaaatataattctttacaaaaataaatttttattctaatct

SEQ ID NO: 554792 - DNA, 278 bp, Homo sapiens
cagtatgtttgttgaatggcaaaatcttgcacgtccaaatatgcctctttggcacaggattactttaaactgattattttgggaaacagacacaggagaagctctgaaaacagtaaaagttgtatttttgtaagagaaatttattttataaagaatatctacatttgtaagagtgtcttcctttctgtaccaggaagagaaggatgactaaatcactggaaacttttatttatttgtttgagacaggatctggctctgttgcccaggctggagtgcat

SEQ ID NO: 554793 - DNA, 359 bp, Homo sapiens
cgggtgtgtctcgtgtgactgacgggttttatgttgtaaactgtggtgggtgagtgacgccccattgtgttgtggtaaatcatgtagagggagtatagggctgtgactagtatgtatgggtcctgtaagtaggagagtgatatttgatcaggagaacgtggttactagcacagagagttctcccaggtagattaatagtagggggtaaggcgaggttagccgaggcttgctcgcaagtctttcaacccagctatcagtgggagtagagttcgacgccttgcagagaggcatcatgatgcgactgtgagtgcgtacagtagattgagtaatgctcaggccaccaatcgtaatgagggatg

SEQ ID NO: 554794 - DNA, 432 bp, Homo sapiens
  misc_feature (14)..(14): n is a, c, g, or t
  misc_feature (19)..(19): n is a, c, g, or t
  misc_feature (57)..(57): n is a, c, g, or t
  misc_feature (122)..(122): n is a, c, g, or t
  misc_feature (248)..(248): n is a, c, g, or t
  misc_feature (373)..(373): n is a, c, g, or t
  misc_feature (387)..(387): n is a, c, g, or t
  misc_feature (419)..(419): n is a, c, g, or t
taagcccctacccnaaaangttttaaggagtttccttggggggttaaaaaattgganaaagaggaccctgaaggagcctagatcacctcataatccatagggtgtgtatgttttaaaaagtnaggagagacccattcctaaagcttgtgggattagaatttgtctcaagagcccggcgtggtggctcatgcctgtaatcccagcactttgggaggccgaggcgggcagatcacctgaagtcgggagancgagaccatcctggctaacatggtgaaaccccgtctctactaaaaatgcaaaaaattagccgggcatggtagcacatgcctgtaatcccagctacttgggaggctgaggcaggagaatcacttgnacctgggaggcagnggttgcagtgagccaaaattgagccattgcanccccagcctgggc

SEQ ID NO: 554795 - DNA, 618 bp, Homo sapiens
ggaaatacagttgttggcctccggcctcccctcaaaaaaaaaaaaaaaaaagaaaaaaaaaaaaaaaaaaaaagaaaaaaaaaaaaaaaaaaaaaaaaaaaaaaaaaggaaaaaaaaaaaaagaaaagaaaaaaaaaagaagagagagaggagagaaaaaaaaaaaaaaaaaaaagaaagaagaggggggggggggcggcggggccggcacgaagaaaagcagacataggacacaacaaatccatggcgagggcggggcggagcgacgcggacagacacataaagagagagaacagaagacgaagagacgactacaggcacagccttgacaacaagaacagcacgacacaaggagtaaaagaagagggagagggcggcggtgcagccacacaccaaacaagaacaacagagagcgcgcgcggcggagggagggaaaacatagaaagccggtaagggaaagatacaagaaccagacagagaagcggagggggagtagtgttgaggagagtaaaggagggtgcgtgtgagcaattaacgaaaggcaggcgagcgggacggcggagggggaaaagcatagaaaaaacaatgcaccgccccgccgcgcgggggggtgggagc

SEQ ID NO: 554796 - DNA, 165 bp, Homo sapiens
cacatcgtatatagtattattttaagaaattgccacagcactctagccttcagcaagctactaccctcatcggtcagcagacatttacatcaaggcaagaccttccaacagcaaaaacattataatttgcagaaggctacgatacagatgatcatatagcatttt

SEQ ID NO: 554797 - DNA, 166 bp, Homo sapiens
  misc_feature (142)..(142): n is a, c, g, or t
acgcccttccccacagtgaggtgaactttctgcacttgtcctcatcacaccctcagtttcacatcagaacccttacctcactttagttttcattggccatttaattgtctaggcatcttgcagaaaggggtccatgtctctncttgctcaactgtggggagaaggg

SEQ ID NO: 554798 - DNA, 189 bp, Homo sapiens
ggtctggggttggcttgaacttggtctccttaaatcctcatgtcactgccacgaaactggccctctctatttgtctcagttttacacctggtggacatggtggggttagtatttgaacctcatccaaccccatactccagttgggacccctggctgggtctctggccagtgctgggaaagagggaggca

SEQ ID NO: 554799 - DNA, 874 bp, Homo sapiens
gtaactgctgctatgggacctcgatgtggaggtctggcaatgcgttcgcctgtctgtatcccgtgaggatgcattcgaggggggagtgccattatcaacgcagacgatggtgttgcccgtggatcgtggcgatgcacaggcacttgtgcagagcggtaaggtgagccggaaacagtacaggtgctataggggccgtttcgctagcgtataggtaagtcctgactcgctatccgattaaccatgggttgagtattgaaagcgtggaatatgaaattgctgtccagagaggtacacagaggcaagtacgatgtacacatctcactacatattatgtctttaccactctctaccaatggagattcaacacggtggctggtttccattccacgctacgtcgtgcaataatatcttcccactagcacagaaaaacacccgtttatcgtaactatttccacggcagctgaatgcggcgatccaccactacagcgttttccaatcatagaccgagctagaagcgggaaagttaaccaccaaaggcgagtcactacggtctcgcgtggaggaatccatgtgcggtgggttgggtgactctcggccccttcccaaggtacactcgtcttacggtcaaccattgagcgattgctcttatcgctgagttggtgtccacaaggcagagacgcaccaagtcccttggaacatacgataccagcgcaggaggagcgccacgtccccagctcagtgtataagctcacgccacgacgtcaggctgggaagggaacaatctgtcatcacatcgcaatttggagcgtttgactacccccatgcctttgtagtttcacaaggtgtccaaacagagattcgctcaggggtggac

SEQ ID NO: 554800 - DNA, 126 bp, Homo sapiens
agcaacaaacacaaacaccatattgagaggtgaagccggctggtgcctctggggtcaggtggtggacttggatgcaactttatctaggtctagcctaaaggtttgtcaaaggtagacaatcagtcg

SEQ ID NO: 554801 - DNA, 201 bp, Homo sapiens
  misc_feature (3)..(3): n is a, c, g, or t
  misc_feature (33)..(33): n is a, c, g, or t
ccnaaaaatgcttccctgtagggtttttagatnctcctggagaggagttaaaaccactcatctcccctgtctcggattctaatgcattgttccactgagggacagggacaagtagtgattaaaattcattgaccatgattcttagatttggaatatagaaattttgtttttgggctggagagatggcttagcagttaagaa

SEQ ID NO: 554802 - DNA, 200 bp, Homo sapiens
tttaggaaggttaaatatatcattttattggggatgagatcatagtctttacacaaatgctatgtaaacaaggttacggaatatttttcacctcgtgggagttggtacacaacctttaatatagaccacccacgggttctcgatgctgttgaggtgtagaagggcctgaggatgtgcaggagcgcaagagtgcgagcaaa

SEQ ID NO: 554803 - DNA, 789 bp, Homo sapiens
agcgggcggaagggccctggccttgtgggtggaggtgaagagttaatggctccgcgcgcaggcactgccctctgaactggaacaaaatgcaacttccggttggagtcactcggccaggcgccggcgaactgaggggagagggagcgcagctgaaagcgtgaaactgtgcctgtcatttactcccatcctttatagtgatgctacaggacgaagagggatgggtttaaacattggggagcaactctataaagcgtatgaaaccctttcgggaagcatgcgtgggtagagattctgcagtaaaagaatttcagccgaaagactgtgaactatgagcacgagaataccgtgtacaacacgggacaagctgtcgacttcttacagactattttttgagaaagctaaaaatctccacgttacttcttgtgaattccactctcgatatcaattatgggcggtgttccctctcgcgttgaaagacacgtgagacccagaaagaatattttgactcttgggtcacgcccacaaagataaaggtgagttcacggggaaatatgcgcgagaagaaaactatcccaaggtgtgaaagaccccgagggtgtctttctcctatgaaaaaaagaaaactttcacgcccagggagtctttgtgcacgtcctttgctcccatgaaagggggtgacatataggacgaaaagacattttcctgggagtctgaaagaaagaattttctaaaatattgcgtggctagcccaaaaagcgcagaaaagacactttagcaacttatatatca

SEQ ID NO: 554804 - DNA, 1210 bp, Homo sapiens
gctcccttccaagtcacagatgctgctgttctcaacaatgtagcacacagcattgggcctaatggacacagtcaagaaggttgtagacaacgagaaggaaccaagtagaggcatgggagaagaacagttgtctctatactctgacagacattggaacgccagttggaggagcagaagaagcaaggcacaggatcacaggctgaatatctcgagacgagttcaaaagtgtggtactgatgcctgtgagcactccgtaagcctccaagataaggccccggcgtcctagcggcacagtcgctccactcgactgtcttgagactccttctcctcctgtcacagccagccgtcagttctacatggcatctcaccgcatcaccatcaaccccagatgggatcagtcattttccatgggcaatattccagtggacaacctcagccagggctccaggtcctggtgaactggttcccaaaagaatgagcttcatgggcctacagactccttcccggtatagtgcacaaagtggtgcttctctcgtgcacagagagacaagactacacccactagtaaccaacaggtgacactatcaaccacaccttcactcatacgcattgagccagctgcgatgacgctctaacgtggccagtgctacggcatggcgcagctcaccactgggggccaaccgatggaaccacccagtgggctaaagaccctgagtgacaattggcgccgcgaccatagggaagctccaggcctcaaaccgttcggccacatccacgggctagacggaaaaggcacccccaagcaggggattcggggccacgcaccccaatccatctgacgacagttggaacaccaagaggaccccgagaacaccccagaacgcactgacacagaactacctcggaagggcggccaccaccgccccacgcaccaccccgcctggggcagacacccaggacggccctcgaccggcgaccctcgacagaggcagccaaaacagcaatcgccggacctcaccgagcacacacccgcaacgcccacccgcaccaccgaccaacgccacagcagctaaacgcaaagcgcgcgcaccactcacgtcgccgccccactgcagccacgacaacacaacagcaggcacaagcatagcgcacgagggacacgcaccgcccaccgcaccagcgcaccgcccgacacgcacccaaccccgac

SEQ ID NO: 554805 - DNA, 615 bp, Homo sapiens
atgctattctctgtgccataccagagtacaggatcagctgagctgaccttactctgacgactaactcttttgctggaagcggcttctgattcacagctcttgtgtactaccagacatgttggcggtagagattatggcttttaaggggttgtacgatggcgtcaattctgtcacgttcccgctgcaggtttaactaaaagggagtgacacaatgacctctgttcagtgatcaaactatacaatctatgttcatatccaatccctggctctggagtccaatgagctagatacatttgctctaacgcctgatgctgctcaacttgccaaaagtgtgactacgctctgacatactgtaccatgctcacagtgctgctcgccatataggtgcatatttggcaaaaccatttgcggagtacctgcaggctgaactgcagaagctataccacataggctgaatgggcacaccacaaggggactgacttgcctggatagctggttggacgttgacatggtgtgtcacgttagcctatctatcattaactacatggtacagagttatgctaagcgaatccagcagcagctagactcagaggaggacttaactcctaggttccg

SEQ ID NO: 554806 - DNA, 539 bp, Homo sapiens
actatgctgtacaactgcctggacttcctgcagtggttggtgcctgctcaccacggtgactgcttaggacgaggcccagaggtaacattacagggtctactttggggatatctgggacaagatgctgcagtaagggcatgtagaagagttgtgtgcttccggtgtccttgcagttttgtgctctgccctggcaagaagagttgtgtctgcggttcatgcgggaggtggatcgactgatgacccctgaaaagcagtcttcctgatggctctggtctccagaggactctgagacttacatttctgcatgcccagcctagtttgggcactgctgccctgccgcctcagcaaggaaatgtcctgcatggggcagaggcttctgtgtcctctccccctatccctttatgatagcgccgtactctctgtagtctggacttctatcccttctctggtttccctctcttcgtcctgattcctctcattcccattttgctgcccatgggtatgacattgctcaaggtccaactaacagtttagaaact

SEQ ID NO: 554807 - DNA, 220 bp, Homo sapiens
aagtagtagctgtgttcgtgtgtgctgggtacgcgtgtgtgtgtgtatagtagtagtatatatatgtatagtagggaagaaagtaataatggctgagacatcacctacatagtagtttgcgattgggatgggtgactaacactccaaggtagagtgaaggcagaggagggaaacaagatcacataaactcgtcatcagtactaggtttctgcctacagga

SEQ ID NO: 554808 - DNA, 601 bp, Homo sapiens
taagtccatactctttcatcatctggaccatgctttaccatgtcccaggtgtcctgtccttgaagtaagtttataccgtttgaattgcatgcctgccatcatttatccctccatccacctccgtctactttagaacactgtatcatgggatctgatgttaccaagccgtcattgtctcccatcatctgagatgctccatccatgagggcattaccgactgtgcctctatacttgttcactaagatctggtatttgttggcttcattctgtacagtgattcctccatagtgagcctttactttgtctccattccagtcctccatttctatcaaaagttctgtgggtcccatcctggtaagctgtctacttgtatcatttgcaatgccaatattcacctggtagtcctcagtaattcgtgccatctgtgttgtctgcaatcatttcctgatcactgtttatatggatcccatttcctgccaaagtcatcactaccgtcttgctcggttatgaatcactgtccatcctacatcttctgtaatcatgtcccagtatactctatacggtttgacagctctgtcaggttgaatgacatacatctcag

SEQ ID NO: 554809 - DNA, 948 bp, Homo sapiens
agactgtggccgcgatactttgtgggaagctcgcgcgatagttcgttgtgccgaccctatcagtgttcctctgtgccggtctccgcatatcctctcgggtttctcgccttctgctcccgggatttttttacgccccgcgggtgggcgggatcaccccacggcaccggggggtctctggagcacaacccctggggcgacgagtagtggggaacccctgggtctggtcgctacaagcgtggcaatcttgtcgggccatctgtgcgcggccgcctgttactcccccgctccttctcttgcacgctctgctgttccggcaatctatcctttgcgccccccgagggggtaggggcctgcccccgtggtcggacaatgtcctccccctcttgttccctcctccggaggcccacgagtcgttgtttctgccgacgcccagcatcgctcaccccccgttagatctcccgcgcgcctcctctgggttctccgccgccgcgctgtggcccgccccacccgctttggcggccacacagtggggacgtcccgcctttctccggcgggaatcccgctgcattgacggggacgcctctctctctcgcggggttaacactcggttggtgtaaacacgcgctgttgtggctgattaataagcagcggcaaaagatcaccgcggcttctgagctgcgcagaggccaccacccgctcagcttgcccccagctgatttctcggtagagttggtacgggcgcgacaggacattggtgaagacaccctgggagcagcagccctcccgctccagtgccactggagtgcagctccaccctctgtaccaactccccacctctcggacgagcaaagagtggcaagtaccccttgtcccccaacaaataaacgaagaaaatgccccccccaagttaacccctttcgcaaaaaaaaattttcgtcccacaaaaca

SEQ ID NO: 554810 - DNA, 169 bp, Homo sapiens
taagatctctgtgtcgctcactccaagtctggatcaggtacgagccacagtcagcgagacccatcactttgactctgtcttcatatatattgccaatctaactaccttttatatcttctaattttatccttctagtatatgatggcattaatcacttggcccagattat

SEQ ID NO: 554811 - DNA, 262 bp, Homo sapiens
ccagtcttctcccatcagcagtagatcagataaagaaaattggtacatatacaccatggaatactatgcagccataaaaaagaacaagactgtgtcctttacagcaacatagatggagctgaggctcttatcctaagtgaattaatgcaggaacagaaaatgaaatatcccatgttctcacttataagtgggagctaaacattgattacacatggactcaaagaagggaacagtagacacgggctgatgggagcaagatgcg

SEQ ID NO: 554812 - DNA, 210 bp, Homo sapiens
gataaggtttgtataagacatcagctgtaatcattcctgtgctgtgtaatatattacccttggtaggtattagacttgcacttaaattaaaaaaaggtttctgcatcgtggaagcattaagaaccagagtggaacgcgtggcctatgcaggtggataccttcaggtctttcctttggttctatgagcatctttgctttcattcgtctccc

SEQ ID NO: 554813 - DNA, 203 bp, Homo sapiens
  misc_feature (103)..(103): n is a, c, g, or t
tttgagactagcctgagtaacacacagaaaccctatctctacaaaaattagaaaaattagttgggtgtggtagcatgtgcctgtgttcccagcttcttagtgnagtgagggtgaggatcacttgagcctcccaggctcaagtgatcctcacacctcagcctgggaggttgaggttgcagtgagccatgttcgtgccactgcac

SEQ ID NO: 554814 - DNA, 676 bp, Homo sapiens
ctgcttgaatacttctcccacagataccctagttcatcactttcaagtttgctcttccacaaagccctcagacatggacacagttcaaccaagttggttttttttttttctaatttataaaaaggatagcctttactctaggttccaagagagttccatttgagaccttgtcagaatggccttcattgtccaaatttctgtcagtattctggtcatgatcacttaaacaatctctagtgagttccaaactttccttagtcgtcttgtcgtctaagcctttaccagaatgaattgaaggctttttctggccttggcctgctcctccaaatgcttctggcctctgcccttactttcacgttttcaggtattcattattagcaacagccccacttctgataccaattttcttagtccattttctattgcttataacagaatacctgaaactggataatttataaagaaaagaagtttatatatattgatgataattgctttccagaaagatcgtgagggccttcttgctggtggggactctttgcagggtcccaaggtggtgcagggcatcacatggcaagcggtctgagtgtgctagttcaggtctctcttgctgttcttatgaagccaccagtgccactcctgtgataacccattaatcacttaactcattaatcca

SEQ ID NO: 554815 - DNA, 384 bp, Homo sapiens
agattcctaccatacgtttggcaaatgatattcacagtagcaatcagatttagaagcttttcaaaaagaatctggaggccaggtgtggtggctcacgcctgtaatcccagctacttgggaggctgaggcaggagaatcgcttgaacccgcaaggcggaggttgcggtgagccgagatcacgccattgcactccagcctgggcaacagagctagactctgtctcaaaaaaaaaaaaaaaattaaggaaggaaggaaaggagatcctggggtccctcctctctttctggctaaattcgattggagattgtccccatttggaagggggaggtggcacttccttggttccgggaatagctgtggtataatttccatcctggtcacacg

SEQ ID NO: 554816 - DNA, 356 bp, Homo sapiens
  misc_feature (90)..(90): n is a, c, g, or t
  misc_feature (97)..(98): n is a, c, g, or t
ctgtgttggccaggctggtctcgaacctttgacctcagttgatccacctgcctcaggcttccaaagtgctgggattacaggcgtgacagncacgcgnngcctcatcctgtattttttaatgttctgttgtactttataatggagggagcatctcttctggtttacatgctctggagtcagtcaatagactgaaatgctcattctactagctgcacgaccttgagtagattaacttctctggcttcagtttcttaccctgtaaagtaggcttatactgtgtcatggagctgctatgaggtcgtttttattgttgttgttcttcttcctttttttgtttagagacagggccgtcgacg

SEQ ID NO: 554817 - DNA, 288 bp, Homo sapiens
gatccccgcgacatgcgctgtagccatactaccaatcaatactcatcattaattatcatacttgctatagctataaaacttggaatagccccctttcacttctagcattcccataggttacccatggcacccctcttacatccggcctgcttcttctcacatgacaaaaactagcccccatctctatcatataccccatctctccctcactagacgtaagccttctcctcactctctcaattcttatccttcatatgccggcagttgaggtggattaatccatatcca

SEQ ID NO: 554818 - DNA, 447 bp, Homo sapiens
ttacccgctcactccattcgccgcattagtgtctgagtaccttcactacaggcgctgcaccatgcccggtaatttttttttaattttcggtagagacggggttttaccgtgttagccaggatggtctcaatctcctgacctcgtgatcagcctgcctctgcctcccaaagtgctgggattacaggtgttagccaccacagccggccctcttttttttggagatggagtctcgctttgttgcccaggctggagtgcagtggcgcaatcttggctcactgcagcctctgcctcccagatacaagtgattctcctgcctcggcctccagagtggcttggagattgcgggcacgtgccaccacgcctggctaatttttaaatttttagtagagacagggttcaccatgttgtacaggctggtctcgaactcctgacctcatgatccggctg

SEQ ID NO: 554819 - DNA, 1212 bp, Homo sapiens
catagaataggatgaaagccgagacgtgagcgatggagaatggacacgcgaggaggactatcgtgcgagttctccagaatggaggaagatgttacgatcgcaagtagcgtcgtgtgagagacattatccaatgtgtaaagccctgcactagtgagtcatgcgacgtggagaccacgggccatcatcatgatcccagctcgatctactacctatattgccgaggcacaatatcacagagcatctcgcgcgaacgtccccggacaggaccctgcacgacattcactccgcagtgagcctaagcatgcgcatgatgtgcgagcctcgggactaagatcgacggcccgaagccagcagaggaagcatagacgaaggccaccgacatgactgatatggcgaagacctagggcagcaacggccaccgtcgttctgtgacaagatttcgaattgaacacacagtcgggtgagcgcagtgaccatctatcgtcctcaacttattacacttccaaacgttgaccatcggccgcagattggaaacaccgcggaagagggtctccctaggacacacctagatttcctgtccctttacccggtggggccgtggcctcactcgccaccaaaacgacaagaccttatcattcgatcctcggatgagcatggtcaccgaaaaaccgagcgtggatccccaattccactaatggcgagatgtggcctataagttagcgaaaaccggtaccgtaacgttacacgccacagaaggtggtatccggtaccccggtttggtgagacgcgcgtaatactagatgcgcatcagaggagtttgccccacagtgatgcgagtcggttcgctgtcgacgccccaatacccctatgattaacacttaggaggcgttgtaggtcaagaggacctcccaaattacgcgaccagatacacggacagcgaagagagagcaccagacacgagtaactcacccgatggtgggcccgcaaatagagagccactcgaggcatcgggtccgaggaaagaccagaagcataggggtaccacataaacgatgggcgagagctgacgagtagcaggagcccgcacacacagggccacccactcaaagcaacggacgtgtcacactcctcccccttgccggctataacctccgctgaacatgccacgcaatgacaaccacatgccgtgggaggtgcacaacaaaggaagcc

SEQ ID NO: 554820 - DNA, 179 bp, Homo sapiens
ggttttattttttttccgggggttccccggttgggggaaaaaatatttttgaccccgaaatttttaaccccccggggggggccccccccccaaaaaattttaaaaaaaaaggaaaagctttttttccgttttttttttttttggggggggggggttacccccccggggtcttgttttta

SEQ ID NO: 554821 - DNA, 116 bp, Homo sapiens
taaggtcgatcagaggatcccctttttttttttgggacagtcttactattattcacataataacacaggagaagaaaagaaacactctaagaacacatcgaagcgcagaggaaagg

SEQ ID NO: 554822 - DNA, 86 bp, Homo sapiens
aggttgttttgggatccccccccagcccctggtcagtttgcccttgtccctggtttgaggtcattaaaattacattgaggttccta

SEQ ID NO: 554823 - DNA, 265 bp, Homo sapiens
aatcagtatctcttagaaaataactccccattcttcctccccccagccccggtactttattctactcccgtctctgtaaattgcctattccaggtagctcatgtaaatgggaataatatatttgtccttctgtgcctggcttatttcacttagcataatgttttcaaggtccatcatgttgtagcatatatcaaaatttcattcctttttatggctgaataatattccactgtatgtatatacgcattttgtttgtccatgcatc

SEQ ID NO: 554824 - DNA, 222 bp, Homo sapiens
tgacactggccagattctgctgccactgaggcactggtggcacgagcaggctcgcctgtgtgggccggcggagcgatgatggtggtcactgggtaaggcggccctgcttgaggccgcaccgctgcagcagaagctggaagtcttgttggtctgcgtgtgggttgtgtaagtagacagtgtagttgtaccccaggtggggcaagtccacgagctggttgcccc

SEQ ID NO: 554825 - DNA, 299 bp, Homo sapiens
actgttccgagagtatcagggacggctagagttaacagactggtgattataacaggaaggcagagtgaaccaggatgcgtcagtcttactagaacaccgagtagtggctgtcatgctgatctcatacaaatactcaagtaaaaaaagatgttagatttaattcttatctgagtgccaaataagatcagagcaaaataaaaagttagtatacagctctataagaaagctaccgtctatacgatgtacatgtaagagatacgtatctctaacattacacatagatagcactttatcagtat

SEQ ID NO: 554826 - DNA, 1397 bp, Homo sapiens
  misc_feature (361)..(361): n is a, c, g, or t
  misc_feature (379)..(379): n is a, c, g, or t
  misc_feature (408)..(408): n is a, c, g, or t
  misc_feature (425)..(425): n is a, c, g, or t
  misc_feature (444)..(444): n is a, c, g, or t
  misc_feature (458)..(458): n is a, c, g, or t
agcggagagattcctcgaaggctgcacagcagttcaggacaagatgactcactccgtgtgcctctaggctggtgctcgctcctactctctctctgtgcttggcctctgagcaagcgctaatcccaggcgatatcatcgcagacgtattaaagtgtgtatatcttccatctgctcactctccacgccatgtacgtatagtggaaaaatgtcaatatgtattccttgcaatttgacctattgttgctcgtgttgtgttgcataccatccgaccaattgaaagctatcgaactgtgacctaggacagacagttggacgcaagaagaaaattacgaagaatacccgtccggcatgccatttcgangcatcctctcgtgctgtntatttacgctatagggacataatgcgtcntatatcatctacttctncgtttggttcacataacanacattcgtagtatncgtacgcgcacgcgcactatgcatatatatacgataagcatgtatattggccattgaccctgtgtgtggcacatccgcatacgttagacttaattgatcaggccacgtccccgactgtaatcaaggttatcacagttagtggcgtatatcgtaggacaacaagtagataataaggccacggcgatcctagtcgtggatgagtcctatgggaaaggaacgtggactcgggccaatatatagtggcactttgtgcccattggggacactatgtcgctataatatttatccattgactttttgaaccttcttgggcgtcctttgtctaagaaaataactctagaaaatagttggcaatttcaccgtaacgagacaattataacgaccattggtttggttgcacaaccacagacatcctgttgtacagagcgcgtgtaattcacactgtatacctgcgtttatacccaatctgtgtaacctgaatgcaatttcgttatcctttatttagaatacattttttccataaccgtgtgtgaacgtatgtccatgtgtcacttccccagatgtgtttaccgcaaggtggtaactcccctaaggaacgaccaaggtggttttagcccttccccccattccacgtggctcatgccctttcattatggggcatgccggggccgtcgtgggctaaaagttggtgcaccgcatgccgctaagggagcggaattgcccagagcagggtaagatttttccctacgtgtaaattacccaaatttaatatccagaaaccaagttgcgttgtcgaggcaccaagtagttgttttgtaacacccttcctctcttccaaagaaccgctttcgtgtaggcccaagctgtccagagagaatgtcctttgcgctataaaagaggacataagagtaataaagggtgcggattggcccagtgtga

SEQ ID NO: 554827 - DNA, 177 bp, Homo sapiens
agaatctagaggatcccgaccattgtgtactcagtggtagggtgggaagctgaggagctgaggtagtggcagctattagatatctactactggtaagagccgaggaaacgcatcgcaggacagagagtggggagacagcaggtcactgaatgagcctagcagtcctgagcagatggg

SEQ ID NO: 554828 - DNA, 580 bp, Homo sapiens
  misc_feature (551)..(551): n is a, c, g, or t
agaaagacatcgaacgattaaaacaaagaatccgccggtgaacagaaggcctccatctcttctctcgacggcagcacccgattaaagccttccttggcgatgcttgtgatctcagtgatgggctttctgtgcagcgagcagccggacctagacctgaaccctggtgtttcagtaacagttccagccgatggcggtcattcaaacatggagtgacttttcatgggtaacatatgttaatcacaggcagctgcatggccacgaaaggtttccaactgttcagaatttcatagcttctacgtctgtgtccggcttggatacatcggatgaattcttgagacccccttcacaaagaagagacatgcatctatctacacatagatttacatgtaccggatagggtatcgtcattctccctagctcctcaggcccattgtggaaccctctaagtatcctggaagctcggttgaagaatctctacacaatatgaaagtaatgtatataattctatagatgcttatatggccatgtatattggtttcttatccagtgtntctggagaaaacagagataatactttgag

SEQ ID NO: 554829 - DNA, 1085 bp, Homo sapiens
ttcgcttctgttcttccttcttgtgatgttatttcttgcgctcgcgtttctgtgcataccggtcccttgttgtgtccgttgatcttttcccctcctttccctgcttttgggcccttacggctgttcacaaagcggtgtccgtcgcttcccggtttctcccccccggtcaagtcccgtggccgtggtccggcgggctcgggccccgtttacgccctttcttcgccccggttccggcctcgcttgtcccggggacactgtgtcaacatcgaggcctcccattgcgttttgcccatcaggacccatgttcgggccccggaagacccccagaggattcttcgcgccagaacccgagggccctgaccgtgcccatctgggacttggaccccggacgcccacgtacttgtggacccacggagtagtaatctcttgcagacctttagaagatggccacacacagcccagatggatgctgttcgcatcatggccaaagacttggtgcccccccggcgctatgtgccccagtttgtattgatccgggcccacatcccggctgtgtccccccagatcccagaccactccagtcccaccactcgatggccccagccctgaagggtgtccacccaggccctgggccacccatggaccagaccagctgaagttgcccccagatcccagaagatccatgatggagtttgacccgcgccgcgccagagatcctggatatgaaggaggagatgatgaatgatcgcccttgatgatcccctgggtgatgaggaagatgaagaggagagtgatgctgttggtgtccccaggttcttggatgagctgggacttagccttcaccagatgagctttctgacaccctccccctccaactgggggctccccttagtgtggctgctggtgggaaaaaacccgaggcccccagcctctagcccttagctgatagctgatcgccagacctggaggaaccggcttaagaacctcgcggagggactgagtgcccctgcccctccgagattaacccgtggatgccccggatcttttacccccacccctctgtaataaaagagatttgaccacta

SEQ ID NO: 554830 - DNA, 285 bp, Homo sapiens
tacaactacctaagaggcaggtgcttgtgtctttgtccctgaacatataaaaaccagtggtttccacttaacttttcctggttatttagttactaacttgactttaaaatcttagaatatgaaaagaattctagttcaccataagctaatctccaaaagcataattactggtcctattgcttttcatggaataagcattgaaatgatggcttctatcagacattctccagtactcagctgatatgcccataccactagtgtggaggatacactcctgtctttttc

SEQ ID NO: 554831 - DNA, 154 bp, Homo sapiens
ccaccttctcatacactagcggagacatacgcaaacatacgacaaataacacagacataaacacaacacacgagcagacacagacacacatacacatgcacatagacacacaagcacacacacgcgaacacagcacacacgaacacagcacaca

SEQ ID NO: 554832 - DNA, 774 bp, Homo sapiens
  misc_feature (520)..(520): n is a, c, g, or t
aagatggcggacattcagactgagcgtgcctaccaacaagcagccgaccagtcgtttcaggaaatcgagaagaggtgtcctgctgggagaaactggcatggagaagctcccgaggtactacaatgaacatctgcgtctggcgcttacagtgactacccaagagaggctattgatgggcaccttatattgagaatgaaatgccccttcatctggctaatgtgtccattacgaggcgcaggatcctctctgcgcgtggtgaccatagatgaagtatgtcatgacggtaccatgtgtcatccgaccgagatctactctgacactaccatctcggcaagtacaagcggattcgacgaagcgccactaagaatatgtctgtagcactcatgtccaccctgcttcatgggtactgtctcagatcgggtgactatcagtctactagttgggacgagttgcctggtccatctgatgcaacgacgagttgcgctatcgaacgtgcgtcacaggtcagcaagggctgtcnggcgctcagagaagcacgttccatgaaagttctgagtgctggatcatcggtgccgctccaccactagtgaaataaagttagtattctgattctctaaaaatctagacaacacaaggaaggaatcgaatttggcaaaagctgggctcaggaaaagctcatggaactccatgactggggcaggggccccaaggggtagggaacaggggcacaggggggaccccaggagaaccccgggcctggcaaaggcgcagggg

SEQ ID NO: 554833 - DNA, 159 bp, Homo sapiens
cgatggtcctcagcttctcaggaggatggcttgagtccaggagtttgtgagcaggccttggcaacatagtgagacctagtctctacaaaaaaattttaaaaattagtggggcatagtggcgcactccgggagtcccttcctcttgagaagctgaggtga

SEQ ID NO: 554834 - DNA, 135 bp, Homo sapiens
gatacaccactgagcaggaaggaccctcgcctctcacttcagcatcaagtggcctctgacctctggtgcctggctttagggtgaagcccctctgctcagaagcagccccctccacagcccacccatcccttaagc

SEQ ID NO: 554835 - DNA, 1052 bp, Homo sapiens
gcttctctctcagactgcggccaactggtgtccggcgtctctccacggtcgagagtctactccaatccaggatactgcacactgcgtgacatgctgctcgactctacggtgaacgtgcggttgcgcgtccgaatgcgtcagcagcgcctcgattctgtcatgtaactctggtgttctgcccgggtgccagttgccgtttttcatcattcgttgaccattcgggtagcgcgtggcgtggcgtgatcttcgatcctggctgtgcttctggtctgagcctgagcggtaggtgcccttcagggtcctggggcctcctggttgcctcttcgcggtcatccggacggggactctgtgtgccggttgcctatcgccagtttgcatgattgccttccaagccctgggatgagtcgtgtaaggtcactctggcccgtcattttgacactcctacactgtgtgcgtgatcgctgccgaaggacacctgtgggggaccttcgtcgctgtcggggaatccttgggggggtaagctatgaattctcgtgggtcttgctggacacatgatccccgcgcatcgttgaatccaatgcagaaccccagaacttgacaggttccaggctcaccgccaatcaatagggtcaaaccttccgaggttgcactactgggaaacatgttgcgctaatggagaaagtattgtagtgacttcagtatgaccgtgtgggtagctaggaagatgcttgtgctgttatgacgtgctaccagggtcgcctgacgataggtcccggggaactcttggctctgtgtcacggatattacgcggccagacccctctgttgtgaggatgccgttgtctgagaagaattgtgggtgcccgcgacgcagggatccataccaggttctccacgttcatgattttgttggcccgctgtgaccctgggtctgggggaggtggggaaacgggccatgaaggcggctgccgtgagggtaggttgaccgggcttgttggtgggcccctgcctcaaccctttgggcgcgcgcggccagtggcggcccacagtggg

SEQ ID NO: 554836 - DNA, 254 bp, Homo sapiens
  misc_feature (7)..(7): n is a, c, g, or t
  misc_feature (89)..(89): n is a, c, g, or t
  misc_feature (95)..(95): n is a, c, g, or t
  misc_feature (134)..(134): n is a, c, g, or t
  misc_feature (156)..(156): n is a, c, g, or t
  misc_feature (179)..(179): n is a, c, g, or t
  misc_feature (184)..(184): n is a, c, g, or t
  misc_feature (202)..(202): n is a, c, g, or t
ttttttnttagtccggccgtcaatttgtatagtaccaatttctgtaaattctctcaattcattgaagatcgtagggttaaacttttttntgtgtnatttacacttacaaacaagtgaagaagctatcgtttatntcagacgaggctgtagtttaantaacaaaagagggaaaataaaanagaanctttgtaaaatatatctnaaactaatggtttgtacaactggagaatcgttctagattagttaacaattaa

SEQ ID NO: 554837 - DNA, 93 bp, Homo sapiens
ttttttttttcttcccagccctctttccttccccagttgctgcagcactccatttggcagcacatcacccagactccacctcaactgtgtttc

SEQ ID NO: 554838 - DNA, 170 bp, Homo sapiens
ctaagctgcagaactgccactgagctaaagatggtggggccacatgtctgaccaagcccacattcacattctgtgtagaatgtagctccagggagcttgcgtggacggcctatgcttgctgtagcagttgtacggggccccgcactgcactgcagattgtccacggctca

SEQ ID NO: 554839 - DNA, 325 bp, Homo sapiens
tcataggttcgcaggataggacaagatgttcattcactcataaaaatgctaattgaaatcactgaaatatcatctcaccccagttaaaatggcttgtacccaaaagacaggcagttaacaaatgctggcaaagagatggaaaaaaagggagcccttatacactgttggtgggaatctaaattagtacaaccactatggagaacagtttggaggctcctcaaaaaattgaaaattgagctaccataggatccagcaattttcctgctgggtatttacccaaaagaaaggaaatcactatattgaagggatacctgcgaacctatga

SEQ ID NO: 554840 - DNA, 756 bp, Homo sapiens
gacactcatttatactcagcattcctggagggcaagagggcaattcctaagggcctgtctatggcggtgcagctaatgggaaaacaggagaggagcctgccactctagcaaagagaatttccagctcgtgcgtctccagggagtaagaaaagagaaagtggaaaatagaaaacgaagctggctgcttcaaggagtaactcagtgctctccataacagaagtcccatgcatggttgctccagaggtacatctcagttccctctttgcaatacccaaagcaattttcctgagagatgggaaaatcaggaggaggcaagccgatgacatttgtgatgggcagggcccactcggagaggcatggtggaactttctggttaacaaagttaaaagcaaaacaaagtaaatgacgaagtccaccagctcaatgctgcatggtacttgtgtttttaaagaaaatggtaacaactttgtgctggtgtttagtgagtgagattttcaggagtggatggaagaacctgtattatcagtctgttggcaggtaagaaaccttgttgtgagatggggtagtgcttattaataatacgtgctttccacttcagcctcatttgtagggccgtgaactagtgctactgggtcttcaactaactttagacttctactgctggagtcttccccatctcactgggatggtcctttttctcggccagcacttggagttcctcctaggtctagggagactacttctgtcaatggtgcg

SEQ ID NO: 554841 - DNA, 196 bp, Homo sapiens
agttggcgaaggtgtcacaggaggatatttcttgctggcactgctgaggctgggcagggctgtggacactttggtgatggccaggctcagcgcacttctgggtgtggccatggctctgggcactttggcgtgaggcacacaggcagtggctgtcagggctgcttccattgttgctgttgataagacatcctgctgg

SEQ ID NO: 554842 - DNA, 871 bp, Homo sapiens
  misc_feature (417)..(418): n is a, c, g, or t
  misc_feature (828)..(828): n is a, c, g, or t
  misc_feature (862)..(862): n is a, c, g, or t
  misc_feature (867)..(867): n is a, c, g, or t
gccactcgcatccgtatagcactttaaagtttctgcagtcctttgacacttgtcataaaggagggtgtaatagaaattgtcttgactctcttgtaaatcctgtgaagtctgtacaacatctggaaacagttttctctagcaggaatttactgctttgggcctgatggctttcacaactttttccataacaacaatggcgtcttcaatggtataagtcttccagactttcatgatgatctctgtattgggtttctcttccatagcattggcaaatcttttccataggatgctgtatataatgagccttaaaggtccctatgacccagaccaagaggctgaattagagacgttgtgtttgagggtaagtagaccaatttgatatcttctgtgttgaactcgtggtgttctgcgaggtgnngggcattgtccaatatcaaaacagctttaaaaacagtcctttactgacaaggtacttcctgacatcagggaaaaagcataaactgaaccaatccagaaaaagggttcttgttgtccaggccttcttgttttaaaaccaaaagcctggcaattggtgtttatcttttcccttcaaggctcaggggttagcagctttacagataacggcagtcctgttcctaaatccaactgcatttacaaaaaatggtagaattagcctatttcttcttgccttaaatcctggtacttgcttctcttacttactaatgaaagtcctatgtggcaatttttcccccttagaataaggcactctcttctgcattaaaaacccgttcagccagatattcctttttcctcaatgattttaatggnatcggggaactcatcttcttgcctcttgggcagnagagnttct

SEQ ID NO: 554843 - DNA, 147 bp, Homo sapiens
actgtacaggtcatagagggtatgagaatctccgtcactactatacacaccagactccttggacatcttcatgatggatgcatacccgtactttcccaaagtggttcagagtcatattcaaagtgtcaagctgggtcactccccatt

SEQ ID NO: 554844 - DNA, 742 bp, Homo sapiens
  misc_feature (6)..(6): n is a, c, g, or t
  misc_feature (66)..(66): n is a, c, g, or t
  misc_feature (92)..(92): n is a, c, g, or t
  misc_feature (108)..(108): n is a, c, g, or t
  misc_feature (154)..(154): n is a, c, g, or t
  misc_feature (171)..(171): n is a, c, g, or t
  misc_feature (176)..(176): n is a, c, g, or t
  misc_feature (202)..(203): n is a, c, g, or t
  misc_feature (206)..(206): n is a, c, g, or t
  misc_feature (281)..(281): n is a, c, g, or t
  misc_feature (286)..(286): n is a, c, g, or t
  misc_feature (302)..(302): n is a, c, g, or t
  misc_feature (334)..(334): n is a, c, g, or t
  misc_feature (338)..(338): n is a, c, g, or t
  misc_feature (355)..(355): n is a, c, g, or t
  misc_feature (363)..(363): n is a, c, g, or t
  misc_feature (365)..(365): n is a, c, g, or t
  misc_feature (394)..(394): n is a, c, g, or t
  misc_feature (398)..(398): n is a, c, g, or t
  misc_feature (415)..(415): n is a, c, g, or t
  misc_feature (470)..(470): n is a, c, g, or t
  misc_feature (493)..(494): n is a, c, g, or t
  misc_feature (528)..(528): n is a, c, g, or t
  misc_feature (606)..(606): n is a, c, g, or t
  misc_feature (675)..(675): n is a, c, g, or t
  misc_feature (682)..(682): n is a, c, g, or t
  misc_feature (739)..(739): n is a, c, g, or t
attaancacagaactttgcatttacccagttctatgcaccaaacatgaacaaatacattaacaggnagaaacaggctaggtaaaaggcatanatatatagtaaatttntttacaaaagtttcttagttcaaaaagtgataaagtaatacctacncaaaactgtcacaaccnacttncatacgaaaatataagtgtcaaattnngtnatgtatcagcgtcatactaaagtatacaggcagtctaagactcagtacagtacataacacacattaacaatatanttgtntacaaaacacgccccncaaacattgaggcattattacagtcctcaggnatcnccccccagtctaacacnggccgccnancccacccctcattacccaggatgtatacnaaangcggatgtctcaatggnattcacagacatctcccccaggcgtatcaaatggcaaacccctcacgtcgcaccncccggaactcaagccccactctnnaaagaaggcatgactttctgtcgtctggcaactnggcacacacaaggcgactccaacagcgccagaggctcccaaccgtcaccaacgtttagcgctgtcatggaggtgaggnggaggaggctgcagggccacccagcatcctgggatgcagggtctccaaggtcccagcagaaccccacantggtggncctactgcccacccagagccgaactcgacaggggagcgatttgaaagtaaccaacantct

SEQ ID NO: 554845 - DNA, 410 bp, Homo sapiens
atcccgcggggtttctcctcttgtgtctttgggaaccaggggctttctcaggggctttagggtctgccaggttgtttcagccaggagggcccaaatcaagggttagatgtagaaagttgtaaaatagaaaaagtggagttggtgaaccggttgttctttccccccattgggatgattgtcataaggtttttggcatgttcctcctttttttcccccccccctttttttttttattaatcaagagaaccttcaaagttaatgggggggggggttttcccggggtgagaactggttcccctccaagcatttcatgaaaaaggggctttttattattcatccaaactctccccatgatgggaagggtttcccaaatctttccaaataaaaagtaatgacttagaaacggccca

SEQ ID NO: 554846 - DNA, 236 bp, Homo sapiens
aggaaagttgagccaatcaatgacgtgtaagtccgtggaagcctgtggctacataacaatgttgacgccgtgagatgccgtctgacacatggtgaacgggagactcgacagtactctgagagcttgtagtgagggtaaagatagagacccaggtaaaattgttatatagcagctgcttggaattattctggtttcgggttgtctttctaatttagcactcattaagactttcggga

SEQ ID NO: 554847 - DNA, 138 bp, Homo sapiens
gctggttggggtcacgtatgtatcctacgcacttcgacgacggcgaggccggtgatcacgacggtccggagtttgagacttacgcctgggccaagactggtgaacgcgctgtctctacctacaaataaaacaaaaact

SEQ ID NO: 554848 - DNA, 146 bp, Homo sapiens
tggcgtgtggcagtttaaagttataagtttttaaaaactcagtacttttctacagtggaaacaacttgcaccaaaaattgtgctcacagaaattttgtgagacccatttaaaaagtcttaacagtgagaaaaaaaaaaacacaaag

SEQ ID NO: 554849 - DNA, 137 bp, Homo sapiens
gagtagccgcctacgccccgccactacgaggcggttaggggaacaggtagaagtaccgccgctagccactagggtacgaggaaggtggtaagcccatactatggacatagtaagccatagcctagatagcagtacct

SEQ ID NO: 554850 - DNA, 957 bp, Homo sapiens
tccctcctccctcagacccagaagtccaggccccagcccctccttcctcagacccaggagtccaggccccagctcctcctccctcagacccaggagtccagaccccagcccctcctccctcagacccaggagtccaggcccccaggccctcgttcctcagacccaggagtccaggccccagcgtcctccgtctctcacatcccaggaggtccagaccccagacgtccatccgtctctcacagcgcaggagatccagacaccaggagatccaggaacacagagaacaacaacagtccacatcaaaacgaccagagaggtcctagggacaagacacgacgatcacactgaggcgcacacccagcgacccgacgggggcctcaaacactcatcaagggacacagtaaagcgccagcacacaaggaatgagcggaacaccagccagacgccagggaaaaagtgacggagaggaggcaagaccgggaacgcaaaggacaagaaggagaggaaagaagagcaagaagagcaagcagagcccgaaagaaggcacgacgcacaccccgagaggggccgaagcgggcaagaacgggcaaagaccgcgaagacgagacagcaggaacccacggaagagagcaagaaagtgagacaacacacgaacaacaagcagggcaaggaaaaagacgaaaccaggagccgagaaagaacgacaagacaaatccacggcacgaagcaccccgagacaacaagagcaaaccggcaggaaacaccagaaaaacaaaaacgacgacacaaaccaaacaaaaaagaaaggcgagccacaggaaaaagagagcaagaaggaagacgagaatggccgggagcacagcggcgacggcaagatgggacacagaaacagcgaaagaaaccgaaccccacgaacagcacacccccagaagacgagccaaaaggcacaggcaaaat

SEQ ID NO: 554851 - DNA, 534 bp, Homo sapiens
  misc_feature (203)..(203): n is a, c, g, or t
ggccttaacctctgctggtgaccagaagcctgcatttctgcattctgcttaattccctttccttagatttgaaagaagccaacactaaaccacaaatatacaacaaggccattttctcaaacgagagtcagcctttaacgaaatgaccatggttgacacagagatgccattctggcccaccaactttgggatcagctccgtgngatctctccgtaatggaagaccactcccacttccttttgcataatcaaaggcccccttcaacgttacctggttttggaacgtttctttccaaggggccaattttcttactccacattacgaagaccattccattcacaagaacagatccaaggttgggggttggcacgaatttacaaggtatgacctgaaacttcaagagtaccaaagtgcagatcaaaaaggtgggcaggcctgcaatctccagccttattattctgagaagactcagctctacaatatagccttcactgaaaaggaagccttccaaactccctcatggccaattgaact

SEQ ID NO: 554852 - DNA, 149 bp, Homo sapiens
ctatatttgcttttgaggagtcagggtgttcctggatcacggtcgcatgtagtacacgaatgcggtctaggtagttggtcacctttgtgtacacacccggaacatcctatctgtccacaggcccaatgccccagcctgatgatgcccac

SEQ ID NO: 554853 - DNA, 311 bp, Homo sapiens
tatagacgatccctggagtagtccaaactcctggtcttccggttatttgaaaatatacaatacattattattaactgtagtcaccctacagtgctgtagaacactagaacttattcctcctgtctagctgtagttctgtatccattaaccaacctctccttctcccccacttccctctatccttcccagcctctaataactactatgctactctctacttttatgagattgactttttcagcctccacatgtgagtgagaacatgtggtatttgtctttcatgcttggcttgttttacttaacataatgtt

SEQ ID NO: 554854 - DNA, 695 bp, Homo sapiens
cagtaggctgaggtgaaaggattcctttaacctgggagactgaagctgcagtgagccatgatcgtgccactgcactccagtctgggggacaaagtgggaccctatctcaaaaaaaaaaaaaaaaagtctcactcctctcctctccaacttacgtgattgtgacattattggatctcatctcagttcagaaccctctcacgtgccattacagggactcccttagaagggttctctattttaattagcttgtgaagcagagggagaacttataaagggacgttgttgttgagtgtgaaattagggattattagcccattatacccaccggtgtgcccagggaccctgtgaccaggcgttctccaatttcctttttgtgccagccatgtggcggaactctcaaagggtgtggcattgcccaaggttctcaaccttcagggcctgagggttatctccaccattgtgtcccaccattcagcggcaaaggccctctgtgcacctgtgaccgggtgtgtgaggccctctcatgtggtagagaggagagccgatgtgtgtgtctgtggccacagaggagaatctcccttgtgtgtttacacgtggtttgtgcggtggggtgttctcctcttttcaattggcaactttaggagccctcattgcccccctttttcgtggcctttggccgggtggaatttggggat

SEQ ID NO: 554855 - DNA, 460 bp, Homo sapiens
tcactctatgacacagttacacatgctttctgatctcagtatttaccataatgaatctgctcctataattgaggcataccacactcaaaaacctatttgtaaacagaattggacctggccagaaataatgaaattacttgtttgggaagattgcattgcagaataggccaaggtgctgtgcaacaattcctatggaatcattattgattggtcccctaaggggatgtttagcttaaactgcacccctcagtctgcacgccatggccacactatgttcagctggtctgaacaaaatggtcagatggtagaaatggtaagaaatatgacaagagttccgattatctggaaacatggtggtatagtggcacctcaacctcaaatgatatggcccactctaggagctaaacataaggatttgtggaaaatattaatggctcttaataagatcaaaatttaggaa

SEQ ID NO: 554856 - DNA, 123 bp, Homo sapiens
accagctgtgtctcgtacagtgaccactcgatacttcacagaaactcctgcaggtaggtggaccacattatcgagggatcccaccttggactgggccttctccttgaatgttcaacttctgac

SEQ ID NO: 554857 - DNA, 786 bp, Homo sapiens
agcggggggtgagcagcggccagaggctcccggagcatcgcgctgggagaagacttcgccgctcggggccgcagcctgttgggcaaggcgagcatcatggcctcggattgcgagccagctctgaaccaggcagagggccgaaaccccgaccctggaagcgctaccgtgggagcccgtccgtgaggccaagaatgacagcgagcgagtgttgcagcccatgcggcgtagtgaccaaggcagtgcaaagcaggtgacatagatgccaaaacgtcgtgcggcggagtcttcgaatgcatgtcggacttcagccttccccaagtcgtctcctgatccaccaagggatggcgccgtgactggtctgccctgactcatgttctgcggtgctttgggatgtggccctgcgtggccatgcgttctgtcagtgaccctgaaactgggcggccatcctccaagtccttgaacaatgattcccatttcttagctaccttcctctacagcccggtggggacccgagacgatgcttgcacagcgctccattgattgatgacacctaccagtgcctgactggctgtagcaggcacacccagagggcctcaggacctcattgctggtggcaccgtgtctgcacctatgccaggcatacctgggggcacggctatggctttgaccaaggccctggcactcctggtgggtgctgctggctgctgcggagacacagtgcttggaaaggaaggcggagcccgacctgcttggccgagttgcggggctcagtgaggattccagaaa

SEQ ID NO: 554858 - DNA, 134 bp, Homo sapiens
cctttttagggtctgctgaagggtgctacgtgtggagaggtcattgtgcccgcaggttgtttgtgattagctgtctctaacaattgttcatacaataattgttcattattgttctcaacttggggctctcccca

SEQ ID NO: 554859 - DNA, 1096 bp, Homo sapiens
gtcgatccgtgatcggcaggagctcctgctgcgtttcaacctcgctcccctttgcgtccgggagcctgcgagcacccggacgaaggtgcagccgattcttgcgggagtcgccccgaaagcgtcgggtttgtgtggggttagcgggggcctgcgtgccatctgtacttcgacccgccgaactgcctcggggaaatgccctgacagaggcaggcggaccaaggagaagacgcaaagaacagcagtccgtctggatttagtttgcccaggactggcgccgcgcacgcggattcgccgaggggagttgcggtcggaagtcaccgagcccccgattccccgcccggacagcttgaggccgagagatgggagcggctgaccacgtgattacagtccccgaaacgcccgacgtctccgcacaggttcattgaagcagctgggaccttgggtgaagccccacttaactgtggcccttgaggggcccggaagccccggaccgaacgagcaagacgggaagccaggaacacaacattgcgaacggacagaaagttatgacacgaaatatacaaccaccgatcccagaaagacagctagtaatgattgtgtttggaccaaagtaagacagaaatcacacccaagcttccagagcattgtggaaaatatacacggacattaaacagtcactaccaatcgaagaggagaaaattttaacaccgtttagcgggaaaaaacttagcgaaccccggacaagcaaaacttatggaaaccttatggcccagagtgcgaaaacccacgaaacagccaacacaggaacacggacccaacacaccatcgaaaggagaaaatgagatattaccccgagataaagataacagacactgtgtcaccaaccccccaggaaaccggtaccacgagaagaacacacaaagtgggctcattgtacacaacgccgcgccaaaaagcccgctcaatatcacaaaagagatttaacaaaatataaactcacccccgtgagtaagcaccaacccacaagtatgaaaacgccggggggaatttttaaaatcacgaaggacacaaaatggtccgaaaggagtttcaacct

SEQ ID NO: 554860 - DNA, 663 bp, Homo sapiens
  misc_feature (547)..(547): n is a, c, g, or t
agcactttgggaggccgaggcaggcagatcacgaggtcaggagttcgagaccagcctggccaacatggcaagaccctgtctctactaaaaatacaaaaattagctgggcgtggtggcgcatgcctataatcccagctacttgggaggctgaggtaggagaattgcttgaacctgggaggtggaggttgcagtgaacctagatcacgccactgcattccagcctgggcaacagagcgagactccatcttaaaaaaaaaaaaaaaagaaagaaagaaaagaaaatgggagttctgagagctaggaaactggggaggttgagccaggagcaggggaactggggctttggaggcggagacctaattcttaggggggctctatgaggacatgggtggtggggcaaagtgacagccggccctgagccccttcttgcctggtcccctttggcccccaggatgaatacgacgacattgtgggttcacagcagccgcagccaaaacccggggtggctcccaccccaagcctcaaaacctcttcctgagacccccgncccgttgtgattgtcttcatcgtcacatataatttccagtttaataaacaaaaccctagtttctgacaaccagaaaaatacctcactctcaaaaccacgatctataaaaaaggggg

SEQ ID NO: 554861 - DNA, 192 bp, Homo sapiens
gtagggcacggccttctcatgagtctctctctctctctctctctctctctctctctctctctgtctctctgtgtgtgtgtgtgtgtgtgtgtgtgtgtgtgtgtgtgtgtgtgtgtgtgtgtgtgtgtgttctcttttttttttgtgtgatatcgccccccactctctctctagaacccagtgtctcactac

SEQ ID NO: 554862 - DNA, 390 bp, Homo sapiens
actgaattagatactgtttttttaaagtacacagatagagcccagcagatctaaggggccatctagaagctgcacatacattttaggtgattcaaacataatttttaaattcatcattttcacagtgaatatgtttccatgagggtaattttacctagagtgggtccatgtttaacggtgaattaaggaattacttattggaggtatatgttgataaggacaaagagagccctaaagtaaagatagttggcagtttaattggttttaaggacatccaggtcaggaaattatagcccttatagtaatggggaatattctggcacaaatcccttactcaagttaggcacctttggaatttcaccatcctaaattggacagtagcttgtgccg

SEQ ID NO: 554863 - DNA, 231 bp, Homo sapiens
cgaatcgctatctgcaggattctctagagacgaccaggctccagataaacgatatttggagggcagcacgatactcacgtgcggacggaacttgtacagggaggcatgcaccgcagtgttgaatacacgtcgacctggctgcatgtatacgatctttggtggtgagcgcggttcttatgtagcgacggtacttgtatagagagtcatgcaccgcagtggtgaatacacgtg

SEQ ID NO: 554864 - DNA, 517 bp, Homo sapiens
gtgtcttcctccccgatcgagctcctcctctgcctactcgatgtgccgccctgcgcctgccgccttttatgttgacccacttccatttaatgactcgtacctatattttctctttcttatgatttactacataacattttctctagcttactttattgtaggaatctcgtgtataatacatataacacgcaaaatctgtgttaatttactgtatatgttatcagaaaggaatatggtcaatagtaagctattcggtagtcacgatttagcggacccaagaattgtcagctcccctaaaccccatgttcaagggtcagctgtagatatcatagatgggcccacaagttcatttcaaaatataatctaatcattagttaatatttggagagagaattcatatatttataaaaaatacttgagataatatatatttccgtcactggaaatctttaattttccatacctgcataggatgttaggctggcatggaaagacaaacttaaacatcattctgaaa

SEQ ID NO: 554865 - DNA, 357 bp, Homo sapiens
  misc_feature (311)..(311): n is a, c, g, or t
  misc_feature (328)..(328): n is a, c, g, or t
gttgtttgtttgttttggacagcgtctcgctctgtcgccaggctgttgtgcagtggcacaatctcagcttactgcaacctctgcctcccgggttcaagcgattctcctgcctccgcctcccaagtaactgggactacaggcacgcgccaccacgtccagctgatttttgtatttttggtagagacggtgtttcaccatgttggccaggatggtcttgatctcttaacctcgtgatccgccagcctcggcctctcaaagtgctgggattacaggtgtgagccactgagcccggccaattacccactattctnaaaggtcagcagtactncccaaaggacaggaatgcaccccaaacag

SEQ ID NO: 554866 - DNA, 244 bp, Homo sapiens
atactactgtagtggcaattattaaactatacttatcctcttaaataaatacttgctcaatcagttaatcagcagtgaatcatcttgcagctatgcacctgataaagaaatatacgtgattaccaatatcaagatgctgctagctgatatatctgttttaacgggtatcttttgtatgttctatccacttaattattacattcgtggctattgcatttccaggctgtactttcatattgtggcg

SEQ ID NO: 554867 - DNA, 83 bp, Homo sapiens
gcggccgcctactactactactactgctcgaattcaagcttctaacgatgtacggggacatgttcaataaaaagctgaacttt

SEQ ID NO: 554868 - DNA, 481 bp, Homo sapiens
ttcaaaagaaatacttaaaataaaacattgtagaagtataactttagaaagccagagtcccatgaaaatcactggtagctgtttgtttctgttcaagaaaaggtttctgacagttttccagcaatggaaaggggtaccccagagacatataggaatcagggattactgcatcaggtaaaggattaatgtagagtaacttccaagtttcctggtatgtttaagatttatcttctaaaatgctaaagtcagagccttgcccaaaacctttaggcattttcccagattgactgcttgtgtggttaggttgtttgatacaataggaagagcactgaatttggagccagtttgttcatctgttccctaatttgtgaagcccttggaatgcagaaaagaattcagtgcaggctctatcttagggaatttgccatcagtgaggttacagacccatcaacatgtacttaataaaaataagttattacta

SEQ ID NO: 554869 - DNA, 423 bp, Homo sapiens
tgaaataatttcaaaaagagccagaaattattattgagatctatactattctgaaagctgagatagagaagaaagttgaatacatgtccactaccctcttgcagatagtgaaaaatgtgtgaataaatttataattatgacataataaataaaaaaggtactatgaaagtatagaagttgaagaaaagaagttgaagtctttcttatataatattttgcttagcagggttggcatgtactatcatctttatttgccagatgaagaaatttgagttgaaagaggttaagtatcttgctcagttacacagaataagtggtatagtagtacattcttaatgtataagtgatcagaggctggggaaatgatttctaacaagggtaataatttttataatactgcctgatatttttacactttgaatc

SEQ ID NO: 554870 - DNA, 208 bp, Homo sapiens
  misc_feature (1)..(1): n is a, c, g, or t
naggcgttgaatggccgatctgctagaagatgctgctgctccctgtgatcccagcaggcctcccttcaccgtgacccctgtacctttgtcaggaaggtgcagtttttcttctcaatctatatgcctttcaggtgggccgcttccttggctacctcgttccagggggctgttttgtaatgagatgctgcttgcaggccattcaacgcct

SEQ ID NO: 554871 - DNA, 338 bp, Homo sapiens
gaattaaatggtcccgtctttttcatttttaatttattgtcacacatgggtttcatatttataacggcatcatgagctcattgcccttaatacctgcaatgtttgctactgtaccccaattgattttcaatactttattccgaaggatgaaactgtaatgttttattaccaatgcttctggaaatgaatgccttttaaagcaaataaatctttttgatagcccttttccaaaatccctttgccctaatgaatgctttcttatggcaaataacttaatatttgttcctggggcccccgctgttttggaatgttcaaaaataaagactctatttccccca

SEQ ID NO: 554872 - DNA, 101 bp, Homo sapiens
acaatggcagattaacagtatatggccactttcaagccaccatcacaattgtagagggactcttagaggtaaacatcatccagatgacagacgtcctgatg

SEQ ID NO: 554873 - DNA, 236 bp, Homo sapiens
aagacatgatctctgctcagtggaaactccacctcaggctcaggcgatactcccgcctcaccctcccgagttgctgggattacaggtgtgagccaccacacttgggctaaatttttttgtagagatggaatccttgtatgtttcccagggtgctctccaacccctggcctcaagtgattctctagcctcggtctcccaaagtgttgggattacaaacatgagccattgcactccgg

SEQ ID NO: 554874 - DNA, 363 bp, Homo sapiens
  misc_feature (85)..(85): n is a, c, g, or t
  misc_feature (263)..(263): n is a, c, g, or t
  misc_feature (298)..(298): n is a, c, g, or t
  misc_feature (319)..(319): n is a, c, g, or t
  misc_feature (327)..(327): n is a, c, g, or t
gatttaggggtggagtttccagacaacgacacatggctcgccaggtggagcgcaacatgggaaatctccagacgtaataggctgnccgcacaataaatcgcgcactgaaagttagcagtgtgtcccccgcatcgcaatttgtgaatcttcccgagcactcactttcgcgagaatgggcaaaaaacgctcggccggggcgtcaacggcaggaactgtttgccgcgctgtggggccgtccgtgcaattttgaaacgtcacctcanacacccggaatgataagcgcgatagctccttcatnactggaccgctcatcctatcntgagcctnaccgcgccctcgccagcttcgtaagcagaggtggcc

SEQ ID NO: 554875 - DNA, 166 bp, Homo sapiens
cgtctgatagtcaaacagcttttctttgagaatcgaggaaggaaattatttatttcctaagatgtttaaaactctttaaacatttggctatctgggaaatatagcaaaatgctaacctgagttcaatctttttttttttttttttttggaaatggattttggctct

SEQ ID NO: 554876 - DNA, 472 bp, Homo sapiens
gtctgccacggaagagcaattcaagagtgttgccagtctaaaacagtaatatgattcatacacattcctgtgttcacgtcattttatatggaaaggcttacaaatcaatattgtaagcattcattatataagaatgtacaatgtattagtgtaatctcatagcacagtcaaccatctcagatgttgcagcactgttaggtctcaatcagcatgtggatacagtttattttcacttgcaacatttagttgtctacttagtgtgttaaacgtaactatatgtcagcagtttcgaatctgcctgcagttgtgcaccaagaaagcttacgtgatgcagttattggcaagattgccatgcttatggaaaaatagaaagcgaatactcagtttaagccaaggaacatatagtggcatttaatatttgatcacaactgattttgtttaacaggaaatttaaagcattcagtcatataat

SEQ ID NO: 554877 - DNA, 145 bp, Homo sapiens
  misc_feature (11)..(11): n is a, c, g, or t
gactgatggangctgctcaatgaaaaagtcccccctcctcccaggagactcatgacagtcccttcttgccttgagggagcagagccattgacaattcggaatcttccccagctttattgttcaagttgagccccagcaaggaggt

SEQ ID NO: 554878 - DNA, 1117 bp, Homo sapiens
  misc_feature (595)..(595): n is a, c, g, or t
  misc_feature (598)..(598): n is a, c, g, or t
gtcctgtggctactgcatatgcccttttagattgggactggaatggacaccaccagaagcaccacagttatttttgtagagattggaaacaaggagcttattgccctgcttgtcaaggctcaggacagacaggaggaagaatcacgtataaagggtttaggctgtggacagaacgtgggctccttcgagattttgttgaccctttacagctgagggccgtccctcagacgacaccgcctccctccgtgccgacaggggggacggacccccctgtccacaccactgacctcgctacaattaaacatgcgctccaccaacactctcgccgggccgtgacgtaagatacgcgactctgtcgggtgtgtctcgacctacttagggaggcgcgcgatgtggtcaccttgctccttgtgcgcctctcgcgcgctctcagtgatcgccccataccttgccgcttactccgcctcttgctcccccctgccaccctctatccatactcctacatcgcgcctgcgcatcgggcccgtcgccctgcacggctcgacttgagacacatgcgtaccccgcctcgtctccggtcgcgcgcgcgacggantcnctctctcagcaccgtagcgtctgcgatacgacagcggagcgcagtaaggcgagcgcgacaatgtcgagccacttcgtgtactctgtagcggcgtgactgcagccggaaggattcgtggcgtggtgcgccgtctaccgcagcgccgtcgcttgctccacctccctgctgctccacgctcacgcgatcacacctcactcgcgctcacactcagcgtctcgtctgccctcagcgtcacccctctcctatcgtctcgtagtgtgacgggtaggttagcagacgtatgagacaattctcctcacttctatttctctacctctctgtagttatcaacatgctgtgtgagtgacgtcggcagacgcacggcgagtcgagcgtgagatatagatcggttcgtttccgtcgactcgtgacgaatgttcctcagctgttgtacactcttgaggatgcgttgctctactacgctctgtgctgcccgcgcgcctgcccgcctcgccatcctactctgccgcacttcgtctc

SEQ ID NO: 554879 - DNA, 890 bp, Homo sapiens
ggccccccaagggtgcgcgtgcccccgaagcaagtcgcaccgcggcgtggaaggccccccgccccacggggggggccctctgtaacaactacgagggcgggggtgacatatagagtaaaaccggggcagtggaaaaaatttatcaccgcgggcacaacgccacaccgctggtcaggccgccgcacgaaggatgccccccctcggtgtagtgagactcctagtcacaacggcctcgcttcacagccacccaggggtcatggagacatatacgggtcccgccaagtataataaatgtcgccgcccccaactctaatggcccacacgtgaggtaagtcatagttggcggcgcgttattactaaaagggttcttgtctctttacttactttcctggagagagcgctccatgatgggggcggagtacatcatgtgaaaataatttacaagagggattgttatcgaccgccgcgggtgcctcgctcgtctttacaacattctcaatatcaagggggacgcacctcacgtctcgtcaagtaaagaatgcgccgcacgctttaggtatgctgcccgcgttctgtgttattgtatgttacacacccactgtggatcccgcaccactgtacgccgactcagggaggatgcttggagaccccgccccatgtggacgcgcacgcggtgagcaccgggcacctgttaggaggcggcaggggagccaccttttcacccaacacttaaaaacggggcggtgcaatttctcggcgagacaacaccacacacattatgttacagaatataatgaggtgggccgcccaacccagaccgaaacaagagacagacgctacacggaagacacgccccccccacaactactaaaaaacaaacaaacaaaaca

SEQ ID NO: 554880 - DNA, 152 bp, Homo sapiens
attaaaaacctgctggagctcccaaggggggagttccaaagaaaggacaaagtttttaattcccgggcccctaagggggatttggttcggctcctgtcggaaaagaaagaagggctcatggtggggcagggttgtggcctcccctcccaaaa

SEQ ID NO: 554881 - DNA, 998 bp, Homo sapiens
gcctgtagtgataccgtactgcgccgcgcggtactctggatgcacccgttgctgaaatactgtcgtccgcactttctctcctaactaagtgcgtgccgtcaaccacgatggaaagattccgatggacatgggacattgagcccctcgtggggcccccatgaactatctttcctggttggtgaagcaaaacgtgccgatcaagatgactataatcagttgttaaaggtgtaataagtgatcgcaataaatgaagcaccatagtatattcgtgaacacgacacagtgtgcagaagaagcggggctcggtgcaaaaagagatagacgctcggatccggttgatagaaagcccatggcacgtgaaattaccgaaaggccaggataccaactttcacaggtaatacctgggcgatgtttgccaatgactgtgacagccaccagtgaagccgcgtatggagaggctatggagcaatatagcagcatcagtgtgcatttaacgagtgtgagaggtgtggttgcattagccagtgcatagtaatgtggaaagcactttagtacctgaggagaaaaggatgcccgagtacagaaaatgacgaaggaggaggatgtgacactctaaagtatatctggaaagcggtctgccctggaggggctagccaggtccccacagaagagaagtcaaacttgctgctgtgaagatgatgacgactaagatgaacaggcttagtgatgacaatgatgctgatgactgctttgaagattaggaaggtaaagagacggcacagttgagaacttatagaaaaatatcaggccaaatgagaaagtgtacatcaaggggaagactgaacacgtcttaacccgtaaagggaacaattcaaaggaaatctaaaacaaggcatgtgtgaacaatagaatgtgggataaaggggccccagaacacacaagtaaaggggggagaggaaatactagggacacaaaaaaggagagaataaaggttagaa

SEQ ID NO: 554882 - DNA, 683 bp, Homo sapiens
cttaatggggtgcagtgttgcagtcccacgactgctggtttgagggtataagaccgcttcagaaattagttagggggcctagagcgcagaaacctgttgtacattttcacaaagagattatactatgtcgcatgtgggaggggctaaattctctgccctccaaggagtttcttttgtggtttccccaatgagtactgtaatggtgtctacataaggttagagggtgtgtctctggtatccgctctaatggtgtgggaggcgggtaataaccagggatgattcgtttgcgttcgctttcccgagcccggccaggaaccggtggccaggggattttgggcgcttgggcctgggaagtgtgggattgtccgaagacccggcccccccgcgcagcgtcgagagatatttgtctcgagagagcagaacaattgtgtaaggtatacttgggggcttctgcgagaggcgctgggccacggtgtactaccacacatggacttctagtctgttgcacacaatgaacacgtgtctgtactgttaacctcttttttgtgtccccttaaagacccctacctgatattgggcgcataaacttcagcccctttagagttggtccaggacatattttgcaagatttagtgcctagggttgcttttttgatgtaataaaaggtggtctggccgcaccta

SEQ ID NO: 554883 - DNA, 410 bp, Homo sapiens
caacgtcacactgttagttattgtagagctagaacttaacctagtctaactccaaaccttatgagcggaatgaacacgtggtgcttggtaggctaaaataataattaccacgtattgcgtccctgtggtctgttgaacatttatcttcattctgtataatccttagagtaactctgaggtatacttagtccgtttatagatgacgacactaagagtcgggtcacacaaactagtgagggagccaggatttgaatcaatgtccatttggttccaaaatctgttctcttcctactgcagtatgtactacattgaggctcacctctgtgtactttgagcttcttccaccctcagagtttctgggccatgatgcccaacttcactttttatctttgttaaaatttattttactt

SEQ ID NO: 554884 - DNA, 168 bp, Homo sapiens
gagattgcaccactgcactccagcctgagcgactgagtttttttcggaactctgtctcaaaaacaaagaggtaaattttagatcatcagctatagtaaggagtaagtgtatgttcatgtgtggctccaggacaactaatgcttcatattaaatataggcagggaagtc

SEQ ID NO: 554885 - DNA, 1812 bp, Homo sapiens
  misc_feature (150)..(150): n is a, c, g, or t
ggcgccctgtacccgtcgccttctggtcgtgtgggcctggctctttcatgagcgatccctgtcatgcgggggagatggtccttgcagcagtgatgcatctacgctgtgtgaggtctgggccgtcctagagaatgcacccgaataactttntgtggaggtcgtcgagtagagatggtaaggcccgctcggattcgtacgaggggggttctgggcgtgcggcgtggcttagcacctggagtccactctgcgcagccatccgtgatgctcgaacggccacaaggccagagaaacgatcgtgccattgaggctcgtgccccccacgaagctttcccctctatacgcctcgcccaacttcgctcgtcgcgttagttttggttgcgttgccttgggtgtgtgggaggcgctatttagggctttgtgtccaaccgtggaccctcgaaacacggctatacaggaggcactccgtgcgtgaaccactatgtggtaccccctgtctgcgcgtgcattaccaagccctcggggtgccacgaggacaattgcgtcgagcccttcctgtgccaacctgggagcgccacgtgtcgggtggtcatctcgctccttcacctgttcctggtgcaagggactccccctttgccgccccgttgcgcctgggaggggatttactgtccctgggttggaaaccctcattcggaagactttagaacggctttccacccctagtggtccctcagtctgtcagtcactagacataggacactgtattccacatacaccaagaaaccttcgctgagcgaatgtctccttcattccacgttatatctaccccacatatattgggggaaagcttgggcccttccccttgtctctacttttcgcccgccagttggggtttgtttacacccttggtgtcaggggcgccgttcattggattcatcccccgtggtgtgggcccccatgctatgctggcgcgcttgggcgcccctggtccactagcggtgggccccaacatccgtcggggctctccctccgcgcggcgatggcacccattaagacgcgccgtgtcttgtccaccccctagcgggggcgagcccacgcgcgggaatcttggccccccttttcgcgtcttcgacacaaggagacattccggcgttgcccgcagggacaacgccgcacgcgggatccaacgccctaagttgcgcagacgcgccccatatcgttgcgctcagtctcgtggcccctatcgcgcccggagatccgagaccccccttgtgtaatagcactcgcaacctctgctgtgtcgccccactcccctctactccgggcgcgcactaccaaaagcggtgtcaaccttgcccccgtatattgttatcccccagcttttcgatctggggacgctcccccatgagcaacgtgaggcggcacgcagaagcgcctcgtgacaccactatcgtggagagcgctatccttatagtcatcccacccccacgtgtgtttttgctctttgtgtgttcgccgcccatgagtcctccgctccctgtgtgtgtcgcgcgcggtcaccctggcgtggattctcctgcccccccgcgtggcagcgcgcctggatgacgcgacgcacaacgcatcgtcctgcgctcagtcaccctccggtcgcgtacacgcagcgcccctcgccgtgccatctctctacgcatcggtgcgcgtcggctccacccagcgctgcacctgtgctgcgccgccaactactcgttggccggtggcggcgcgccacgcgcgcggccgcgctgccgaccccctcaccgctgcgtgcgagca

SEQ ID NO: 554886 - DNA, 634 bp, Homo sapiens
  misc_feature (27)..(27): n is a, c, g, or t
aagttgcagctttggagacccgtgggngtccacagcactcaggaaacctggggggcttgggctttggatttgatggagcgggaacaacaagtggcctgccatttgcccaaaggttgaagcaatgaataaaagactgggctccttggtggatgagtttaaggagcttgtttacccccagattccaatcctgaagggaaagttcccaagagaaaaccgataatgaaggttttggaagcaaaaggcccaaggtggagtattcaaaagaggagctgaagccccccatcagcaagggtacgctgggcaagttccctgtgcccattctaaaaaaggcctcccgggcttccgggttaaaaagtggtttaaaaaagcaggagctgttggaagccctccccaagcccttccaggattgaccaaaggccgggggtccagttgcccttccccagtgtggccaggctgctggcccttgtccccacccagttaaaatgtgtttttcctgagctaggaagagtctacccgccataagtcgagggcctttatgtttttgaggctttctgttcccatggtgatggggtagccctccccctttgctgttccttactttactgcctgaataaaaagccctaagtttgtccta

SEQ ID NO: 554887 - DNA, 407 bp, Homo sapiens
gtaaaaatccagattattagtaatgtgtttgacttgtgttaattttaccttaaaaattacattaaccttatgtttttctaataagtatttttagaggagtcaaagtttaaagtgagctttgaatgaaacaaaggaggtgatttcatagatgggaattgctagacattgtaaatatggcagtagactggggagtttgttagtgatctccacagttctccatctgcggattcgttctctaccccactcttcactcatggggtacagaccccatggtaagtcatgaccagtgggctctgggtacttctttgccccagggttgtcaagtgaagtgaatctctggggtcttagtttttattacctacaaaataataatggacagcattagctccaaagtctcttcctgttgt

SEQ ID NO: 554888 - DNA, 377 bp, Homo sapiens
ggtcgatctctagcaggatcccccatttggtccgagagaaattaggatgggccgaagtccatataatgtatttcacattgccagcctaaataactttaacggtctaactaactaagcataaccagttcccactaatctttcagaagataaacattatgaatgaggaaaaagtttacagagtaaatgatagcttttgcttatatgtacaattatggaacttgctcatttcgctctatgcatttcactttaacctctgctgtaagtcctgtttcctctgcagcgtcatgaatgcagcccagtttatgttcatgaagctactagattaatggctcttttgttatatactggtgatgcatctcatttctctcggaccaatg

SEQ ID NO: 554889 - DNA, 371 bp, Homo sapiens
cagatactggaagacccaggactgacacatcctggaaagcagcactgctgcacaggtaaagccaacccatgagaggaagcggtcagacgcagcaggcatgcgacaggaaggactgctggcccctcccactgtggcccacaccggcgagttcaggccagtcttggaatgtgaagatggtggagggcagctgcaggctggcagggtgagccgccaggctatactgcttccccttcctcaaggagagcctccatcccgcagccagggcacaggatgcagagctccagagcttcacccggctgctgtagttgccggtacccaggagggctggctctggagggctgcgcttggcaggctgtggagagcaacgaggt

SEQ ID NO: 554890 - DNA, 317 bp, Homo sapiens
gattgatatgagtggaggagaatcactacgatggcagtctgacatcaggtatcagagcctagggtgtgagggaaagatgcactgagaggctggttacatgtacacgtgtcagatttctgtcatagaaatggtagaagttttacaaatatagaaagaattagaacaaccccttgagtgttggatcagaattggaggtatcagtgtaaactccttgatatcaaactacatagtaagatgtaaaaataaatatgtgtttttatgcatgtgtattacctatggtgagtgtccaagtatattcatacatacattcaagtatt

SEQ ID NO: 554891 - DNA, 362 bp, Homo sapiens
agagtctttcattatcatcatctggaattgtcacctgaatgatgtttctggaagggctcttagagaaggtgctctccttaatcgccgtctcaacacatttcgggctttttaatgatgaacttaattttggctttgtttctaagtatcttctccagcctcggaatgccaaaagtcaatggtcttcggaatggcacaccctcagtgtaagccttccacataaaatgtcttccgggaaagactcaaataacgcgagcggcaccttcacagcttgtttaagcccaagagcttccccacatttctcattgaagagattttcaactctctgttataggtccgtgattttggcattacaggcctcaaag

SEQ ID NO: 554892 - DNA, 100 bp, Homo sapiens
aggcgctccctgtagggacggtgacacctgctgcctgagctcactgttggcattgagacatgagtactgtggtggggctagtgcgtggtgcaggtgcagg

SEQ ID NO: 554893 - DNA, 215 bp, Homo sapiens
cggaaccaacaggactggttaaccacgtgtgcatgatgaactccattaaggacagagcacgttctgtcttacgtcacatttcagaccaggctcgtgaattcatacctcagtttgtgggaagttgatcgaccatttaaatcaatagcacaaacaagtggatcaaacaaatctgaaattcacaatgtcaccaacgagcctatcccttgccaagggtc

SEQ ID NO: 554894 - DNA, 696 bp, Homo sapiens
aacatgatttagattgagcagtagaacctctctttgctagaaactgcaaatggacatttggagcgcttagaggtctaatgtggaaaaggaaatatcttcacagtaaaaactagacagaagaattctgagaaacttcttggtgatgtatgtgttcatctcacagatttgaaactttcttttgattgagcagtttggagacactctttttgtagaatctgcaagtggacatttcgagtgcttggtggcctgtggtagaaaacgaaatatcttcacataaaatctagacagaagcaatctgagaaacttcttggtgatgtgcgcattcatctcccagagttgaacctttcttttgttggaccagctttaaaatactctttttgtagaatctgcaagtggacatttcgagcgtcttgagtctatggtggaaaatgaaatatcttcacataaaaactagacagaagcattctgagaaacttgtttgtgatgtgtttgttcatctcacagatttgaacctttcctttgattgagcagtttagaaacactctatttgtagaatctgcaagtggatatttggagcacgttgtggcctacagtagacaggaaatatcttcaataaatctaccagaagcatctggaaactctttggatgtgtgctcctccccgagttaacctcctttgattgagagttggactccc

SEQ ID NO: 554895 - DNA, 430 bp, Homo sapiens
ctcttcacgtcttcagagggatttactgaagagggcctgtaagccccaaatggaaaactattttttagaaattgttataatttttgattgcttttgtattttatcttgcaatactggacaagtcctggaaaataaatttctgtaactgaaaaaaaacggcacgagaaattactttccctgcaagacgttgaaacccttacagtttacactcgattaggctatccagtagagacgatgaaaccacagtcaaatgatgtccagatttcacaaggcacattctttcactattttggtcagcactgctgcaattagcactctttttcctttgtcaatctcatccgtgcattccttcacttgcaatttcgcctcaacagcttctggaggtgcatcgtatattgctagtttttgtcgataaacaggtttcggctcg

SEQ ID NO: 554896 - DNA, 338 bp, Homo sapiens
gagaaaggacacctcagtagcagtgagtatacataggactcaggccttggttgctaaataccagtctcctctaaaataagccaatgctctttggagaaatggagattccagggctgggcatgggaagtataagaggggtctggaacatattctcatgacagaaaataaagaagtggtcaaagaatgataggagctggatatggtggctcacgccagtaatcccagcactttaggaggctgaggcaagagaatcccttaaacctgggaggtggatgttgcagcgagctgagatcatgccactgcacttcagcctgggttacagagaaagaagctgtctc

SEQ ID NO: 554897 - DNA, 288 bp, Homo sapiens
  misc_feature (201)..(202): n is a, c, g, or t
  misc_feature (211)..(212): n is a, c, g, or t
  misc_feature (215)..(215): n is a, c, g, or t
  misc_feature (217)..(218): n is a, c, g, or t
  misc_feature (221)..(221): n is a, c, g, or t
  misc_feature (225)..(226): n is a, c, g, or t
atgagcggaccctcgttgtttggatgtgtgtagatatgggtattaaaattaggattaggatggaggctactagggccaacactccacctagtttattgggaattgaacgtagaatagcgtaggcgaataagaaatatcattctggtttaatatggggtggggtgtttagtgggtttgctggggtgtagttgtctgggtctnntagtagtcnngtnannatngacnnaatagcaccttgtactattctcaccagacctactaggagacccagacaactacaccccagca

SEQ ID NO: 554898 - DNA, 91 bp, Homo sapiens
aaataaatgggttcttgttccgccctttttaaatcaaggtttttgttaacggggccttcccttttcccttaataaagtttccccttcccca

SEQ ID NO: 554899 - DNA, 109 bp, Homo sapiens
ccacagatgtgcctgaccgtgccctgctgtgtgacctgctgtggtctgaccctgacaaggactgtgcagggctggcgcgcgagaactgacctgtgtgcgtactctttta

SEQ ID NO: 554900 - DNA, 368 bp, Homo sapiens
aaaatggggttttcttttctacaacatggtcaggctgcaaattttccaaacctttatgttctgcttcacttctaaacctaagttccaatttcagaccatatcttcgtgaatgcacatgactgaacgctttcagaatcagccaagtcaccactaggatgctttgctgcttagaaattttcttctgccaaataccctaaatcatctcaaagttcatcagttctctagggcaggggtaaaatgctgccagtctttttgctaaagcatagcaaaaataacctttgctccagttcccaataagttcctcatctctgggaccatttcagctggattcatgtccacgtcacatcagcttttggtcaaaagtatca

SEQ ID NO: 554901 - DNA, 249 bp, Homo sapiens
tactgggattacaggcgtgagccaccacacctggacacgttactgaatatttctgtgcctaggtttcttcatgtgcactgggattgttgtgagaacacatagggattcccagggtcagttcctcagtgcatagtcatggctgcctttgtgtgtgctgtgtgtgtgtgtgtgtgtgcgcgcagtgtgtgagtgtgtttaatatagcagacagggtctcactctgtcgcctaggctcgtttcaaactcctg

SEQ ID NO: 554902 - DNA, 241 bp, Homo sapiens
cgtagtatatgaaaatatatgtattaccatgttctgtgaattagtacttttatcatttgaaatgttgttttcatttctgcggaccgttctaaccggggtatctattttgactggtttttaatgtaactactaacatctttttatgttctgacccacctccggggacagtgccaggtggggagtttgactcttatgttctgacccacctccggggacagtgccaggtggggagtttgactgg

SEQ ID NO: 554903 - DNA, 289 bp, Homo sapiens
ataggcttagcgtggtgcctcacgctttgtgatctccacagttgggaggccgaggcaggcggatccttgaggctaagagtttgagaccaacctggccaacatgacaaaaccccattctactaaaaatttaaaaaagtaaccaggtgtggtggtgcgcacctgtggtctcagctacttgggaggctgaggcacgagaatcacttgaacccagcaggcggaggttgcattgagctgagatcacgccattgtactccagcctgagcgacagagcaaatctctgtttcaaaaa

SEQ ID NO: 554904 - DNA, 690 bp, Homo sapiens
atccacaatgagccatctgcttaattctccagcttaatcaccttgtcgcctgagaatcattgacttccagggtggcaatcaccaagattatactcgccctaataactttcaaatttgttaaaagctgctcatgtcgaaactggagcgctttccgctatggttaatgcttcgtaatgctagcacttcatcttgagagatcagttagcctgatcccaactcatccagtcctaatgttagccctctcctcgcaaatcctagcttagatagtcctgaacgtatagtaattatattgatcgatagatgggagggtctgtgtcgtctttcaggagaacagctagtaacagtgcaacaagtttgggggagaccacaaggaatgtggagacgaaagcagccagtaatccagagaaagagcaacgaggacagagaaaagttgcgtcaggtaaggcatgaagtaaggaagagacaagtgacagtctatggacaagtagagggcgcccaagaaaaacgatccgcgtaggaatatatcacgaagggcatgaggatatgacggtaagaagtgttacacgagagatcctgggtgggagaaggagaattgtaggtgaaggacacataatgcgggaataaacgcatgaatagcaacacgcgctttatatcggggcgcacgggacaacgcacgtctcgcccccaacc

SEQ ID NO: 554905 - DNA, 409 bp, Homo sapiens
ccgtacactggcatcgtgatgactccggtacgggtcacccacactgtgcccatctacgatgggtatgccctcccccatgccatccttcgtctggactggctggccgggacctaactgactacctcatgatgatcctcaccgagtgcggatacagcttcaccaccacggacgagacaaaaaatcgtgcgtgacattaattagaagctgtaatacatagacctaaacttcgagcaaaagatggccacgtgattgcttcaagctcctccctgaaaaaaaactaaaaaattgacttgacggccaggtcatcaccattggaaatgagaagataccagatacactgagacaatcttcaagtattcctataataataataaaatcatatgaaatcaagaaaaaaacattaaactcc

SEQ ID NO: 554906 - DNA, 1380 bp, Homo sapiens
gctggaagctggccgactgcgactgcgacggcatgcttgatgaggaggagttcagagctggccaagcacctcatcaagatcaagctcgacggactacgagctgcccagacagcctgcccccaccacctatgtgaccccacactcgcacaggaagtccctgacccaaggccgactgaggggtgggctgcagaactggggtgtggaacttgggaggacctgggtactcagtgcctagctccagccactgactcaccgaatgaccttgggcaagagcactagccctcatctgtagcacttgagttaaccccatactgtaagaatgcgggcagcggtggcacacatgcgcaaacctcacactgcacgttactctaacacccatccacaacattcccctataagatcatcctcatgaacaacatacatctgcggagcgctagagcggcggtaggactcaacagaacaataacgacacggcatccgcacgcaagacccaagcacacacctcgagcaccaaaagaaggtccatccaaaaaacactgcacctgggcagcacaatggagacactggagagcatatggccgcaagagacaaggatccccaaacggacgccactagcggcacgagcaccctccgggatcacgacacgagaacacaacgccctgagacaatgctcccgaagggcctgaccatagcagaacacaaagcatgacacgcaaccatcagagacccaatcttcgctcggaagcccagagactgggtacatggaaccacgcatgaacgtagccgcactccacatatgggactggcacatgcacaaaagagtatatacctgacataacgagacacgatcaaattattctgttgcgtaacattgacacagatgatagcagaaggtgcacactacaaataatgcgtcgaaggatcgagcatacgatatactagcaagaccaaggagaggatagcatacacagacaaacagagccacaggacaaatcactacatggactacagtaagatcggtagatcctcacgttcgactgtacagcgatccaattctgtccagacgtccctaggtcaccacggacgacaatgaaccaagaagtgcagatcgcgagccccatagacaaccagggacagacacacacacagctagaccagggaggaaactcgcgacgatgtcgacacgctcggcaggcagcaagaagaaagcaggcagcaagcacgacgcaaacacacaaaaagcgagggaggacacaagaacagaggaaaaacgaggcagacgcccaacgcgaagacgaagcggcgcgcacacgtcagaggaacaacaaacttgagtgatagcgcatattgatcagcagaatgtgaggcacactgacgaag

SEQ ID NO: 554907 - DNA, 359 bp, Homo sapiens
ctcccaggatcccccagagccaaacagtgcccttgtctttcattctttctctacccacaacccacagtcccaatggcatttgtccccgtcattgacctaccctgacttggcggctgtatgttccggtccgcctcccagccaccaccaccacagccaccgcccggctccccaccggcatctgagggcggttgctggacaaggctgtcattttccctgctggggattacaggtttggggctgtatgagtctgaactgtaggaggatgaggagccatgactttcccagcgccaagctggagagagacaatagacactctcacaggacagattggcttgttccctgtcactattcggattctg

SEQ ID NO: 554908 - DNA, 107 bp, Homo sapiens
aacgacatggtttatatatgtggtgtctggtattcggcatagatgccgccggtgtagtgagccagtctgtctgtgccatttattccacgagctgatgggagaagatg

SEQ ID NO: 554909 - DNA, 702 bp, Homo sapiens
  misc_feature (28)..(28): n is a, c, g, or t
  misc_feature (40)..(40): n is a, c, g, or t
  misc_feature (54)..(54): n is a, c, g, or t
  misc_feature (69)..(69): n is a, c, g, or t
  misc_feature (94)..(94): n is a, c, g, or t
  misc_feature (108)..(108): n is a, c, g, or t
  misc_feature (110)..(110): n is a, c, g, or t
  misc_feature (124)..(124): n is a, c, g, or t
  misc_feature (126)..(126): n is a, c, g, or t
  misc_feature (130)..(130): n is a, c, g, or t
  misc_feature (139)..(139): n is a, c, g, or t
  misc_feature (147)..(147): n is a, c, g, or t
  misc_feature (154)..(154): n is a, c, g, or t
  misc_feature (159)..(159): n is a, c, g, or t
  misc_feature (163)..(163): n is a, c, g, or t
  misc_feature (168)..(168): n is a, c, g, or t
  misc_feature (171)..(171): n is a, c, g, or t
  misc_feature (173)..(173): n is a, c, g, or t
  misc_feature (185)..(185): n is a, c, g, or t
  misc_feature (189)..(189): n is a, c, g, or t
  misc_feature (195)..(195): n is a, c, g, or t
  misc_feature (200)..(201): n is a, c, g, or t
  misc_feature (206)..(206): n is a, c, g, or t
  misc_feature (208)..(208): n is a, c, g, or t
  misc_feature (212)..(212): n is a, c, g, or t
  misc_feature (231)..(231): n is a, c, g, or t
  misc_feature (234)..(235): n is a, c, g, or t
  misc_feature (271)..(272): n is a, c, g, or t
  misc_feature (277)..(277): n is a, c, g, or t
  misc_feature (282)..(283): n is a, c, g, or t
  misc_feature (288)..(288): n is a, c, g, or t
  misc_feature (308)..(308): n is a, c, g, or t
  misc_feature (329)..(329): n is a, c, g, or t
  misc_feature (335)..(335): n is a, c, g, or t
  misc_feature (338)..(338): n is a, c, g, or t
  misc_feature (358)..(359): n is a, c, g, or t
  misc_feature (363)..(363): n is a, c, g, or t
  misc_feature (368)..(368): n is a, c, g, or t
  misc_feature (373)..(373): n is a, c, g, or t
  misc_feature (375)..(375): n is a, c, g, or t
  misc_feature (387)..(387): n is a, c, g, or t
  misc_feature (405)..(405): n is a, c, g, or t
  misc_feature (412)..(412): n is a, c, g, or t
  misc_feature (415)..(415): n is a, c, g, or t
  misc_feature (417)..(417): n is a, c, g, or t
  misc_feature (421)..(421): n is a, c, g, or t
  misc_feature (424)..(424): n is a, c, g, or t
  misc_feature (442)..(442): n is a, c, g, or t
  misc_feature (448)..(448): n is a, c, g, or t
  misc_feature (450)..(450): n is a, c, g, or t
  misc_feature (452)..(452): n is a, c, g, or t
  misc_feature (454)..(454): n is a, c, g, or t
  misc_feature (475)..(475): n is a, c, g, or t
  misc_feature (486)..(486): n is a, c, g, or t
  misc_feature (506)..(506): n is a, c, g, or t
  misc_feature (693)..(693): n is a, c, g, or t
aaaataaagggaaaaaagggttggagcnttctcagagcantgctgctaaggtgnccaaaaaaagcgaanatatggattcctgaagttcatgatnagaaagcagatgtntnagcttggaaggacntntttnttcccaggncggttctncgagcantcagntttntaggnttntntgcacccacacnaatncaagcnctgannttggnanctgntatttgtgataaattgganatnnttggggttgttgagacaggaagtgggaaaattcttnnttttntcatnncaatnatttatgtagtgttgtagtngtagaagaggaatgttgttcntttttnaantaatattgaagtaccatttnnaganattanaattnangttggagttganattagattattaggtaangttgaanttnantttnatntattgcttgatgatattntaattnanantnaagtactgcccagtgatattntagctgaggcnagagctaagattggaggtantgttttagaccaggcgttgctctttggtgacgatgatgctggtgaagggccttcttccctgatcagggagaaacctgttcccaaacagaatgagaatgaggaggaaaatcttgataaagagcagactggaaatctaaaacaggagttggatgacaaaagcgccacctgtaaggcatatccaaagcgncccctgctt

SEQ ID NO: 554910 - DNA, 160 bp, Homo sapiens
agaccccttgggcagtcagcaaagggccccgagaccaaaacaatcacgggatgtgacacagccggccaatcaagacgtctcccgcaggatgggaaaggcgggcagagaaaggggacgggaaggcgtgtaccgagcgtcgaatttcgataggtcggtgggt

SEQ ID NO: 554911 - DNA, 394 bp, Homo sapiens
  misc_feature (34)..(34): n is a, c, g, or t
  misc_feature (39)..(40): n is a, c, g, or t
  misc_feature (89)..(89): n is a, c, g, or t
  misc_feature (173)..(173): n is a, c, g, or t
  misc_feature (186)..(186): n is a, c, g, or t
  misc_feature (220)..(220): n is a, c, g, or t
  misc_feature (266)..(267): n is a, c, g, or t
  misc_feature (314)..(314): n is a, c, g, or t
  misc_feature (331)..(331): n is a, c, g, or t
ccggtaccatatcctctccgcagccctgtaatanataanncacaaataaatgaaaacttatgtaggcaatgttactgaatcagaaaganaagtggctctttagatgaactgttgatttataactgtgatgaggaaggctcagggataaatccatggagtaataggaaacatgnggagagccaccanaaactcttacaagaccccactcatagcgcaccanggtaaagatgcagcactttggctcgctttatataaacccctatctnnattattctcctcttgtgtactgatagcacatagcaactggacatcanacagcgctgcatgacantctcagagagaggaaaagctcttgtagaatagattgtctatatactgaaaaggccaaacacac

SEQ ID NO: 554912 - DNA, 110 bp, Homo sapiens
cgtccttctggccacgtctccttctggccacgctgactcaatgaacagtgtctgctgcaccagctggctaaacaagtctcttcctgtagacccagtctctcgacaaatgc

SEQ ID NO: 554913 - DNA, 245 bp, Homo sapiens
ttttttgatgattcagtaattaaacccctttggatagagttcaagatggacctgccttatgctgaatttcgctttggagcaaattgttagtcacaggtgccagtgaatgtatgaaggagaatgagaaatctctaactgatttttgaaaattggtcatctctcagagttttctttgaccttaggtccacttttcttcagaggtgagtaaggtgaaaatgtgctcagaattgccctctgggtcgacg

SEQ ID NO: 554914 - DNA, 83 bp, Homo sapiens
  misc_feature (17)..(17): n is a, c, g, or t
  misc_feature (54)..(54): n is a, c, g, or t
aatttgtagttgtccantgttgtgcttagtaaatgtgtgtcattaatgctgtantctcctagctattatggaaacttgtttaa

SEQ ID NO: 554915 - DNA, 105 bp, Homo sapiens
gcggccgcctactactactactactgctcgaattcaagcttctaacgatgtacggggacatgccactgtactccaacctgggtgacagagtgagattctgtctcc

SEQ ID NO: 554916 - DNA, 603 bp, Homo sapiens
  misc_feature (581)..(581): n is a, c, g, or t
cctagactggatacttactatgttgatacgaagaaattgagctgatacttatagctgctggcgtcacgtcccttccacgacctctgtcgtttctggttctgtaccacctgggacgttgtctgcccggtgccacgcctcaggtgtcaccctccggtcaacctgagggggtgctgttctttggggaatgctacgggttttgccatttgcttcctgaatcacatacagctataacaaactttacattaaacactgttctgtcctgagttgggggaaagcccattgaggaggggccgagttcactgggactcttccctccttggcgtggcgtcatacgtggccctcaggtttctcttcttccattgcttgactgtctgttcctttttcattagtgaccccttctgaagtcttcttgcccattgctttattggcctcttccttggcatcctgctctgcaaacttcttgaacatgttggcgtatatcctgcggtcccgctcgttgtgctccttggcctttttctggcacatggagatctgcagtcttgcagccttattctgggggtttacttccagcactttctcanagtcacccttggctgactcaaa

SEQ ID NO: 554917 - DNA, 153 bp, Homo sapiens
agtgctgggcctctgtcttaattcccagctcttcagtcaccgtcagtcagtgtgaggaacgcttccatgtccacctcttgtccctcaaaaatgggctgatattgctcaagtgataatttcttaaggattccagtcagttcatcctcatctgtg

SEQ ID NO: 554918 - DNA, 885 bp, Homo sapiens
tacctccgccacctagtcctcccgctggtattcggccaaattaggcgaattgcccccgctcccgttgcgtagccactttctccgccgtgggcgcatttacttaccataagccctttcgtgctccccctgttctccccgagaaaatggtttgtttcgcgcagttgaaatgtaatgttcacaagatctctaatagaaccttcttcatggtaaatatagagtgcgctatctccaacctgcgaagggcagcactgctttcactatgcggttcgcacgttttacgtttgcactccccgcgcgccacacagtgtgtctcacgacgacacaccaattcatcactgtgttgggtaagaaatcccacctccttggagggtttggccacacgcgagggaccatttctcgccaagaaaatgtctacagagagagaagtcttgctcccgctgtacaccccacagtcgcgagtatatttaccactttctatcttataaatagcgcgcggccctcaatcatttgtggcaggcacaactttataacgagtgtcctcggtagaagagtacccccatctttcagtcactgagaaacaacatgatgataatagcacggacattgggacccgtaaccacaccagtgtgacatacagtagcaccgggcgccccaacacacgcgggctccgagaagttagaggtgtgagaacaccaaaggagggcacgaatgaagactgcccaaaagaataaggggatcttttgtcacccccccccacgggtcaatacctacgctgagccagtccactcgggtacagccaattctgagtacaagacccatgtgaccctttttattaaccctttaaaaaaacggcgctccgaatcaaaaccagcccgtccacatgac

SEQ ID NO: 554919 - DNA, 174 bp, Homo sapiens
  misc_feature (33)..(33): n is a, c, g, or t
gagaaggtgtcacagtcttaagggctcacaggnaatcaagggactgcagctgtgctggctcaggtaggcaggtttcaaagtggcacaaagatgggtgtttgaatagttctctgtgggtgcctggcacccctctcttccatgacacagtgatggtcttttctgcaaatataccaa

SEQ ID NO: 554920 - DNA, 750 bp, Homo sapiens
  misc_feature (223)..(223): n is a, c, g, or t
caaacgttttatcgaacaggtacattggccccattgcgccctggctacgccgggatagactgagggttttcatccaccctgtggggtctacacacgcctccgtaggcacatagagatgtaaacatgccatggtggaagttttactcgggagccctcgtgtggtgaacaatattcctacccgggtcttttaaacaatgtctgcgtgcaaattacattattgggngcggatgacgaaagggcaccagcctttattgagtgattataattaaagagcgaaaacacaaccgttggccgacacaacaccaagcgcggacggccccgcacaccctgccaaagtgtccgccctggtgggttaagcacccagctagccacaggttcaccagcaactgccccaattgttcttcacccaaagtgcgagaaagcaccaccgggtgctccccacgagcccgggttcaccgccaccggagggggtcacaccaacggcctctccgcctctcgcaccggtgtgtgtcatgaacaccaattccccactacaacatcgccttttcgataccattgctccccttcttcgcacccccccacaccaaggcaaaactcgagtatacaatggtctttccctgacgcgctgcggtatattacgtgtgtatgatgtaagtaatgtggtgttgtacaaacaaatttcgaaaaacaaaagtttccgtagacatcacaccatcttcatcaagggcttcttaaacataacaccctgac

SEQ ID NO: 554921 - DNA, 102 bp, Homo sapiens
acttttctaggagatctgatgagcgtcggcatcgagtgcgcctaaagccggcgtacggttcatcccgacagcgcacagattctgcattaccaccaagtggcc

SEQ ID NO: 554922 - DNA, 329 bp, Homo sapiens
  misc_feature (97)..(97): n is a, c, g, or t
  misc_feature (128)..(128): n is a, c, g, or t
  misc_feature (245)..(245): n is a, c, g, or t
  misc_feature (284)..(284): n is a, c, g, or t
  misc_feature (295)..(295): n is a, c, g, or t
taaggcagtagcttgctgatgctcccagctgaataagtcccttctttctacaactcggtgtcttgagttttgtctgcagctcctcctgttacatttnttggctccctgactgggaagcaacgtgactnacagacagctgaggcagccccttaggcaacttaagcctgccttgtggagtgcccctgtgggggactccagccagcctgagtgacatgatccaaagagccctcctgggtaggaaattnccccggtggaatccctcaccagagaagcaggtagcaggncctcgcagggntttaacacagtggctgaacaccaggaaggaactg

SEQ ID NO: 554923 - DNA, 146 bp, Homo sapiens
  misc_feature (78)..(78): n is a, c, g, or t
ttttacggatgagtccatgtgagtaacagttcatggacgaattttgtgctgcgtcagaaaagattattggatctgtgnaaaagaagaggaagaggaatatagaagaggaagaggaagaggaagatgaagaggaagactatgatgtt

SEQ ID NO: 554924 - DNA, 111 bp, Homo sapiens
ctagttttagaagttcaatagcacatgctgcctggggtagtaaaatgggcaggtcagggtgtgattccattgctgcctgggggttcttttgtaggtgctatgaaacttcta

SEQ ID NO: 554925 - DNA, 210 bp, Homo sapiens
  misc_feature (24)..(24): n is a, c, g, or t
  misc_feature (27)..(27): n is a, c, g, or t
gcccagggttttggaccccttttntcntcttgactcagttgtgtaaagtatttctttctcgaacccagtcaacacaataaaaaaaagtcactgttcaacaacagggtttaaaaaaaatttcttcactttaattcaaaacttcaattttcgtttttcttccttttttttggaaattattgtcctgaccttttgttttaccgtatattttaa

SEQ ID NO: 554926 - DNA, 619 bp, Homo sapiens
tgagagtattctgagggtgtgtctggttccatgtgatctatttcggtttgggtacaataccatgctgtttgggttactggtagcctgtagtatagttggaagtcaggtagtatgatgcctccagctcggttctttgggcttaagatggacttggcgtggcaggctctttttgggttccatatgaactttaaagtagttttttccaattctgtgaagaaagtcatgggtagctggagggggatggcatggaatctataaattacctggggcagtatggccattttcacaatatggattcttcctacccatgagcatggaatgttcttccattggttggtatcctcttttatttcatggagcaggggttggtagttctccttgaagaggtccttcacatcccttgtaagtgggattcctaggtatttaattctcttggaagcaattgtgaaggggagttctctcatgctttggctctctgttggtcggtcatgggtgtataagaaggcttgtgatttgtgtacatggattttgtatcctgagaatttgctgaagttgcttatcagcttagggagactttgggctgagacagtggggtttctagataccaatcatgtctctg

SEQ ID NO: 554927 - DNA, 843 bp, Homo sapiens
  misc_feature (265)..(265): n is a, c, g, or t
ggtcagggctaagctgtgcgccctagaggagggaggaggacatcgcagagtcttggtcgagaagaatgaagaaggatttatgagtttggctggaacgagccattgtggagggtttacccgcactccacgttgtcccgttgcaccgatattcacgtgcctaccaagctcactccttcgcatactagctgcggaacctatgagtccacagccttcacctggatggccgtcaaagactactgcttcagggagttgatctggggacgangatgggaggccagcttgaagtttgcgcgcgatctagagacgtctctacgctgcttgcgccaggttgaacccacgcgtcgagacgaagggcgaaccagggtgaagcccataaacatgaacgtgtcgcctaattcttccgaatctcctaaaacttgctacacatctactaattacaatttcttaaaaatctcgttacttcttctccgacaaactttcaatagacacaggacagatgacgccgtggagcggattaggaatacaagaacctcgtaaactgttgtgaaatcgggctcagtggactcctgggaccaaaccttctgctagatcatctaagaacaagtgggagccaagagatggatgagaacctggagtcgaaaaagaacatgctttcagtccgccgctgtaccgccatgtcctagacatgtgggagcaggcagggcgcactgaggagcctgcgttttactggaccgttccatgggactcatccctaccttcatcagggctgttgtgaggtattgtgtgaactgcgtgtcctgcaaacgcccagctcggtgcccataacaggcgggggcacccaaa

SEQ ID NO: 554928 - DNA, 529 bp, Homo sapiens
gatttccaaagccaactgtttcctgtagtgagtggatctctgcaagcagagcctcatctttcaatttcagctacatgaaagaggaagaaagggaaagatatatgtcatacgtgatatactttatgtggctttgaagacccctcttttgtggggctacggctaaagaacatacttccctgtgatggaattggctcttcctatttccctacttcatgaaaacctccagtcgaagaccctagaaccttgccctgttacatggatatgtttactttgggaaaattcattaagccctatgcaccgtcctgatttgcacatttttttgtaagatcactccatttacaacttccttcttttaattttaaaaaacacaaaccttcggccggaatccttggccctccgcgggcccactccccttatcgggtccgctttaaacttccactcacgcatcgctctttcccggttgaaactttactcccttcccattctttcaccctccctcccctcgcaaccctatatctcaacccgcggc

SEQ ID NO: 554929 - DNA, 190 bp, Homo sapiens
caactggtattccagtcagtaggcaactacaggggttcgccactgactgcaggcactggaggttcgcagaaggggggtatggggctgttttctgcttcgtctggcaaaatctttttgacgcacctcttagcaattccatttctgtgccacgcagagttaccttcggttccgagttagcagctcgtctagc

SEQ ID NO: 554930 - DNA, 450 bp, Homo sapiens
cctttcggccttattgccgtcttttttgatgcctatgcgccattggagccacgacgaggctgacttgaatgccctgactgaagcgcacgagaacatcgatgaggcccgggtccacgtcacccggttgcttgttgcaccgagcaggccccagtggcattgacacggaatgccaaacgctgtcactgctcgctacaagctgcgcaactgcgagctactagctagagtcttgctgactgcagctctaacttgatagccctctgatcgtcctgcacctgtgtgacccactttggtcatatgcaaatagcccatgttggtcctatgacctggacctgtgacattctgaactattactgtgcttatttgacgacgactgaaacgcgcatcaaccttattagctattccgtagtttgagctgaagacatgatgagattggcatggctctatttgctc

SEQ ID NO: 554931 - DNA, 906 bp, Homo sapiens
agccacgtcttacacgcgggtgcaccgactagtgcctccggtctgggattccattcgatacctcaatggttctatacagaatgctgttgtacctttaaaatgatgcttttcattgaacaaattcacaaaattcacagtggtgcttgttctgtgtaataaccactatgggaaaatatcccgtaaacctgcctgtggccatgccaatggagtgactgacactggtgacatctgtttcgagcatgctttgtgtggctggtagattgccgaccgttgtgcatacactttgtccctcaggggtgacagggagggttactagatcatggggggagggtaaaattggatggtttgttgaacctttttcgaggggtgcgggggatatagtactcagctttatggcctaaaataacatgtataaaaagcccctgaagtatggtgtgggtgtgtacgtgtgagtgtgtgtagtatacgtctggcaattaaagctgtgtcttctggaacttagtgaaattcttttctctttttcctccagaagtattctgtgacaagatcggtaaataagagctctacttagttgtttaccatgaacatgtgccgcaaagctatgcatctaatcctacaaggttaaagaagctctaagacgtggcaggtaagcaacagccaggtcctcagtattgttgcctggattatcttagacttcatttgccagtctaagactcccagctctgatttacgctacttatatgtctgcgcggaggtaaccacagaccgttccgttaaccagtcctggcgcgcgcggctctttccgcacaaaacaactgtgtgtggggccgggtttccgcttaagtcgtgttggaacaaaacgcgggggggcactcgagagattttgtgataccagaaacccgcgtg

SEQ ID NO: 554932 - DNA, 473 bp, Homo sapiens
gatggcctcaaggatgcaagaacaagctggaagggctggaggatgcccttgagaaggccaagcaggacctggcctggttgctgaaggagtaccaggagctgatgaatgtaagctggccctggaggtggagatcgccacctacggcaagctgctggagggtgaggagtgcaggctgaatggcgaaggcgttggacaagtcaacatctctgtggtgcagtccaccgtctccagtggctatggcggtgccagtggttgtcggcagtggcttaggcctgggtggaggaagcagctactcctatggcagttggtcttggcgtaggaggtggcttcagttccagcagtggcagagccattgggggttggctcagctctgtgggaggcggcaagttccaccatcaagtacaccaccacctcctcctccagcaggaagagctataagcactaaagtgcgtctgctagctctcggtccaaca

SEQ ID NO: 554933 - DNA, 299 bp, Homo sapiens
cggctagatctttgctccaggcgaggattcgataaactttgaagcagcacactgggttatctcaggcaaaggatggagaggaagtccacacaaagaatcaatcagatttccatagtagtcgatccctggtcgcacagctgacacaagatccggcgcaatagaatctccgccttgacgcacgtgaaattctccccatacaatttttttctcaggtgtgacccaaaattcaccatgcagatttccacactcaattccaagcgcatttacacagctttgaagctgttcttcaaattcacgtt

SEQ ID NO: 554934 - DNA, 528 bp, Homo sapiens
  misc_feature (23)..(23): n is a, c, g, or t
  misc_feature (30)..(30): n is a, c, g, or t
  misc_feature (89)..(89): n is a, c, g, or t
  misc_feature (101)..(101): n is a, c, g, or t
  misc_feature (103)..(103): n is a, c, g, or t
  misc_feature (178)..(178): n is a, c, g, or t
  misc_feature (255)..(255): n is a, c, g, or t
  misc_feature (291)..(291): n is a, c, g, or t
  misc_feature (441)..(441): n is a, c, g, or t
  misc_feature (460)..(461): n is a, c, g, or t
  misc_feature (482)..(482): n is a, c, g, or t
  misc_feature (485)..(485): n is a, c, g, or t
gcattaaggcttactaccgctgnctaaggnttcatattccaccgggtgaaatagtcgtccatagaattacgtcctcgagtcccgcgagnagtcaaccgagnanaccaattatatcaataattattagcgttgtgggagcggcgtttccccctatgcgtctccccggaatatcaaaagnagggagtccatcgccaattactccagcaataataatcgtacatttagcaatcagtaaggtcaatcaaacgtcggggnagcggggtaggccgcggtttcgtaatcataccaatngccccccattcaccccatggtgtttttatccgtgaggggggggaacaacagccccaggccccaccgttgccgcccccggcccagtcgtccaacggcggaacctcaagatgtacgcgtgtcggtgggtgggatggcgtgtgagaaagtttnagtggtgttatagtacccnngcccgtgtcttcgttggccgngcnggggcccgttgacttgacggagttattatttccatgattttcc

SEQ ID NO: 554935 - DNA, 112 bp, Homo sapiens
taggctgactctagaggaccccgagtgtctcaagaatgtggctgcaggcaaggggctagaaggttcacctctgacagtattatgaatactatgcaaggtatggaatagggag

SEQ ID NO: 554936 - DNA, 420 bp, Homo sapiens
acggattaatccagaatcaatctcagctgctggagatgtttggattttcccaccggcgggaatgtgcctttgactgttgtttgtatatttgacttggacacaacatcacgtgcgagtattacaaaacaaaaacatgacacaaacgcttcacacagtctctctataatgactctgaaatcagccaatcagcaggactgttttgatgcatctgattggaggattgattgtggaggcggggtgttctggatgctcattagcataaactccgcccttttctggtatatttttttatgtgtgttttctttcagtattttgatggatattatgagtattgtttgtattgcatatttattaattatgatgagtaaacaataaagtctgtatgtttatgttgtcataaagaagtatttgtccatttta

SEQ ID NO: 554937 - DNA, 1360 bp, Homo sapiens
aaaaaaaaaaaaaaaaaaaagggcttttttacacccagaagccctttaagatgataaagggacccaattgcaggtaatcctgtatttgggactcacgtaatggtaaaatggcaaaagtttaagtggatttatttaaatctggggcctaaagctaagtggagcagttatggcacacaatgggccctataaaggcactcctaaagcgcgccgaagccaaagggagcctccttcccattcctgtggtgtcacaccccggcccaagggaacctgtgcccccaaattcctgtggtggccctgtggggcccaggtttccaatatagtgtgctcagaaagcaacttgtggtggcatatggccatggagtgtgctgaaaattggggtacattctccaaaaggggagcgcagcgccttgggggtgaatggtgggcaagcgctcaaggccaaagccccttgtggagggcctacaaaacgccacgcttggggccccagaggctctccaggacacgtgcgccctctacagagtgtgagaaacagcccccagtaagccgcccctctcaagacatacgagatcccttgtgagtcccaagtgtgtctcaaccgcgcaaaagacaccacaagaaagggggaggtgatgtgatcaccggagcgtatatacgtgggtgaaaacgtccaatctatttccccgtgtgaagctggccccaatatcccgctctgtggaaccacttcgtagacaagtgtgcccccaaacgcttttgggggacccgagaacattgggcaggggctccaaccagagagtgaggcactatgaagaggaagaaacccccgtgaccttaaaagaggcaaatttttcccccaacagtggtggggctccccacaaactttctagtgggcatctataggaggaaacttggcgtcatcacccaccgtgtgatgagtggaccccccttactaatcccttgtacctatttacaaggcggggatatatgggggccaaaagcgcaacgtgcggaatagccccagatatgcactaccccaaaggggctcccaggcggggggtaatttacggctaacatttgcacgaacaaaagtactaagaggggataatccgagtcaaaagggccattaacaaggcttattaacgccccagttaatgggagtcaccaacagtgtgcaacccgtggtgaccacaacgggtgttactggcacagaaaacattagttcgccctaaattatgagatgcccacctacattgtgttgtgaccactcacataaccactgtttaccccctattataatcaggttggtgctcaaaaaggatgcgagtgctatggacagacaacaattcgagcaatactagtagct

SEQ ID NO: 554938 - DNA, 195 bp, Homo sapiens
gataccgtgatgttatcccccaacacctgaaaacaggatgaaagccctgtttactgcaattccttttacccagtgtatcatgtctacctatcaacagaaaattacaagcatacttaaaaggcagaaaatgcagtttgaagagactgaacaagcattagaaccagagtcagtcgtggcaggagtgttgggcgataa

SEQ ID NO: 554939 - DNA, 397 bp, Homo sapiens
atggtatagctgattcttgagggtccacagcgggcgagcttttcttgctcctgggataggctggttaggaaggaggctatgtccaggagcaaagaaagggcctggagtggaggggggtggggcggggcatggtggctcacacctgtaatcccagcgtttgggaggccaaggccagagaatgccaggagtttgagaccagcctgggcaacgtaatgagacctccatctctacaaaaaaaaaaaaaaaaaattttgtgggccttggggccccgcccctatggcccaattttttaagggggatgtgggggggggaattattggaccccaggggggggggaaagaagggacctttttttgtccttctgccctcaacccggggggacagagggggccttctt

SEQ ID NO: 554940 - DNA, 164 bp, Homo sapiens
acgatctagccgtcggtcactgcgttacttattcctctgtccttgttcacgtctttcaacatgttgcagcaaacgagagtcagccccagcgcagatcagcgcttgttggcgagcaggtacagccccacagccagaccaacggcgcacaagcctgccacatagta

SEQ ID NO: 554941 - DNA, 160 bp, Homo sapiens
gttataacagcagcacggggagggtggagctatgttttgaacacaagtgactcattttggtatcccagtcgtttggcagagaaggcaagcccacatgacataccatgcttctgggtttctcagtctggcagtagtctggcagggctgctcactgtgcttg

SEQ ID NO: 554942 - DNA, 513 bp, Homo sapiens
gagtcttccttataaacctgatgagcagatctcaactatctagcttgtgtgtcatcagaaaggtttatccctttgagagtatcaagtcctccgttaatgattcttgctttcatccctccccgtatttgctgtgggagctcgttttattctttaatttggaaatcacgtaatttttcttctttattgacgaattcctcccctcacccaaactgttctttcccaccctctttccacatatcttaaatgtccctgaatttcttgttaatttttaaagtcactaaaatgtacccacgctcactaaaataccactaaaatgttaaccctctcgcggttcgcacaccctctgtgtcttcttgccacgctttataaggtaaatggatatttgtagcccactttgaattttcttcacctcttatttctcgtaatttctggagttttttcagattgtggtgtattttattgtgctcctatgtaagatgaagaattaactattaaaattacattttcaacata

SEQ ID NO: 554943 - DNA, 188 bp, Homo sapiens
actctgtccatactacgcacatgaccgtaaattcggcattgcagtacgacttgcaatacaggcatatgcccgtcgatagataacagccattctcatccaataccccctgaagctacaccggcgcagtcgttctcataatcgcccacggggcttacagtcctccagtcatgtgggggtggtacctgagc

SEQ ID NO: 554944 - DNA, 105 bp, Homo sapiens
tactgaatgccctgacacttgccctgatgctgtccatgaaattgtgctcaccatgcttccagctaacagtgtctagaaaaccagctagctgaataacatgtgtgt

SEQ ID NO: 554945 - DNA, 130 bp, Homo sapiens
tcatagacaagaggcattgctgtgagcgatgagacaggtgactctgagttcttgaggggcgccgtgccctgactgtggatgtgagcaggagagaccagagaaggaagtgataattgccaaattggataag

SEQ ID NO: 554946 - DNA, 1213 bp, Homo sapiens
  misc_feature (328)..(328): n is a, c, g, or t
  misc_feature (974)..(974): n is a, c, g, or t
agcggattgtcggcggcgggagcggtgcggggggcgcgagcgggactggccgggtcggctgaggctgctggctgcgaggagccgcggggcctgtgcgtcggtggccgacaggggagcaggcgcgtggtgctggcgcgaaggtagtgcctgcggggcgcggtagacgtcgcgcgcggcctcctcgtcgtgggtgagcgtgcctgcggcgcgctgccgtcgacatcgaggccgcagcgcgcgcgtcgtcggccgcacacggtcgcgtgcgtccggcgcatcggcagcgccgcgcgggcggcttccaggctgcatgactacgtcagctagnagaggccgcgggcctctcaggtgaagccaaagggtcggcacatgtactgatcaatacattgttccaccttactggcttgttatcagtactacgggagatgagcacaggtttggaatgaaaaggcgtataacatccagggcattgacaactcttattttttcgtagagtcacccatagaggacctaagccttccagtgtccaacgtgggggcccttgcgtaaaggccctttttggcaggggcataattggacaggcaactaaactttccccctaatttctatttagccaaccataagcgtgttatgggccttgggggataagggagaccaaccgtggcacaaaggttgaggatactccttggacaggggtacacataacggaacttagcatacgtgggatacaccacttgggtcacagacggtccctcgcgggggtttgggcggaaacgcccggaaacggcaaatttaaacttctaagaccaccccaattggggacttcccccggggtccaacaatggcgtcccacttgtgggcgcaatgcaaatttcggttatagcggggaaacggccgttcccgggcggcccctgtttgtgtaaagatttgggaaacgcggcccaacgcaaggggcttatggaatttggccaatncgggcggcgctcccttcgcaggcgtcccaacatttgagtttcctacacccccatctggggcaatagtgcgggcttttggggtgcggcggcaaagagcttcccccaaggttacgccatcaagtccggcagcgcgatatattacctgtgggctcggctatggccgggccccgaggggattttgcctgggggtccgagatcacagttggggttcggactcgaaggctgcggaagccacacca

SEQ ID NO: 554947 - DNA, 360 bp, Homo sapiens
tggtgagtgtaacaggagacggagtcttgctcggtcaccgagggctggagtggcagtggtggtcgatacttgggctcaccggtaatctccgcctcctgggttccagcgattctcctgcctcagcctcttgagtagttgggactacaggtgcccaccaccacacctggctaatttttgtattttcagtagagacgaggtttcacatgttggccaggatggtctcgaactcctgacctcgtgatccacctgcctcggcctcccaaagtgctgagattacaggtgtgagccactgcgcccggccaacatggtgatttttatttattttttatttttttattttttaggttaatgttagagata

SEQ ID NO: 554948 - DNA, 772 bp, Homo sapiens
  misc_feature (201)..(201): n is a, c, g, or t
tctgggtgcccggaggtcagctgtgttctgcggagttcgcccgtctggcccccgatcaccatgtcggtctttcgacatccaatccccttcgcggatcccagtggatgtaaaccccttccaggatccctctgtgacccagctgaccaacgcccctgcagggtcggtctggctggaacttcaacgccctttctcagagacaanatgcaggcagacatactagttcctgtcatcgccaacatccctggagtcctcacagccagcgggttctccagccatcagtggaaccaatccagccgaccccccaggccgtggtgtctgcagacccaggctacggcctgctccgtgctagacagggaagaaactggtagcaggaacagctgtccgtacgactggaaacgcaatggagcgggagctgcagaagcacctgctatgcacaagcttgctctgctgagacagaaccaagctggcctccccgtctgctcctcgtggtgcccgtgttgcaggccctgcttgctagtctaggatttctccacagagatccctggcgactaccagcggatatgcaagatgctctactactcggtggatgttgcattcgagtgactcgtgtttcttgaacctgcttgccctgctggcctggttctcgggcaaacagctccaggtgagtggactttggcctctccatcctgtggtttctgatcttcactccctgtgccgttccttttgtttgttgcggccatctttaaggctttaggtcgacatctttcagtct

SEQ ID NO: 554949 - DNA, 1331 bp, Homo sapiens
gcattctgtattctgaattcctcctgggacattagtgatgtgtttttttgtaacttaggaattgtacctaatttattttttaaccaaatagcatatcttcttgagatggctagctgagaaagagtatgacacatgtgtgatcaaggatcagcaaaattaactacccatgcaaagattaaacctgttacctttacttccctaatgtggtattttaactagctgagctaaccaccaatggagtgatggtatggcctttcctgtactcaattcagtaattgaacagttatttatcgaaccctctccagatgccaggcaccctgcagaaagtaacattctgaaaaggaacagccatgcctgtagcccaaaagtgagtagttgtattaatggtccattccttattaacaaattaatttcctcaggagtttattggaccagatatcaaagtcccactggaatgtcttaagtgagagagaggataaatcaaagttttccttatccaggctttttggatgtcttttacctgagcctcctcttccaagcctgttttgctctcagtcaggatttaccagcactctgcatgtgtaggcacgctcgcctgcttccttctgtagtggtaatgacaacctacatttgtattctgcagttgataaagcctgttcgtggtacaatacctcatttgaccctcccaacaactgtagggtagatgttatctacatgaaattgagtctcagagagggtaagtaactcacccaggttacacagtaagtaacagagatgacacacgagttcagcttttctggagctaagttctcctcttcctccacccatgcccagccactcatatcctaggtgtagatcagaaggttcttaaaaatattgttagactgagctttaaaagcagtttggatcagagattttcattgtctgttttgtgttcacatggcagtcgaaagtctctaggttccattgcattatacccttcttagaggctccagaataaatttttttatagtggtggggaaaagcccttattcttagaataagaatatagatcattggtaatagtaatcagttccatttcttatgagatagttgtcaggattaaatgacataatgaatttaaagtatattgcctgtcatagcaagcactctgttactgttagctattatcatttatgactattgctctatgttgttttttgtttgtttgaagaatgggctcttaaccttgtatgagaaagaaaagggtgaggaagaaaatggattgaaggaattgtaggagactaaatgttaaaagtcattaaactaccttctggtttaaaaaaaaaaaa

SEQ ID NO: 554950 - DNA, 697 bp, Homo sapiens
tgtagtcgctcctgtactcctgtatccacttcaggagcctccctctctgcaaatggctgaacttccagagttcagaactgagtgtgctgccctgggatgtccatatctagcttcctacccaggactcccacggtgactgtggagtactccgtgaaagcccgttttcggctggcaagcggagggagtcttggtggagactagagtggaaagtcgtgcaggctgttgcaatgccgagcagagccgtgcatctcagcccccgtatcccctagcacgtcctgaggtcactcgagagcatggatgtccggccccccgtgcatactgaaatttctgttcctcccattccccttcgttcatacacataagtcaagctgaatccaatggtgcgaccttctcgtcgtttcagctcaaggcctatgacgtggtgcgcatgtgaggtccctgaactctctgaagcctcgctggtgtctggggccgttggagaatgcactgtggtgctgctctggaattccctcgtgcagcaagaaaaattccgggaccttgttggtggaagataccctaatagtacccttttgatggctacgtcttgctcatttctaacctgtgtcctttggaatcaaggctaagtattgccacacgagacctgctgttcttgtacagcattccttgcaaaccggttgacgattctcatcccgaggag

SEQ ID NO: 554951 - DNA, 593 bp, Homo sapiens
cgaatcataccttaagtcaattgggtaccgcctatgtagtacaaatattcgattacactgattagctcagagtgttaagataaagcctggcctgaataaggtccagtaggacagtaaagaagctttcacgcatctgtggagcatttgtctgtcatgatggcgcttacagacataacaccgatagactagtgtcgccatctgcagatgcataatgtaaggagtgcagctgctggtctagctgtcggcatgggcacatctgccagactctagccccggtggatgttgatgtccgaattgcattactggttagcatagtggtctatacaccatcatctgctgtatcagagggtctctgagctgtgagttcatgagccagattgaagctgtcatgaatacctttgtcacgtgtagactagccaataggcagatacacagggtatgtctcggctccacagatagccgtttcccctgcataatatcaagtagcattgacttatacaggctcgtatacatgatctatgaaggcatttgaaccagaagtaagctttctcagctaccccgcaaatgagacagcgatgggacctgcatcaagg

SEQ ID NO: 554952 - DNA, 360 bp, Homo sapiens
  misc_feature (40)..(40): n is a, c, g, or t
acagacttcgagaggtaaccctagcactgtccttcgtganaatctctctctctctcaacagccacagttacacatttccggtagtcccaagtacacattacttaggtcatgtacacagcttggtatttctcatgtcgaaagccgggtatttctcatgtcggaaccttgtcacccacatgccagaatttgggattgtgcgcacacaccacttcttgtggtccgtgtaatcttccccaccagcctagcaattcactatcagcatatacggacccacacagctttagtggtaagaccctacacagcacagtcagcgatcacagcacgagggttttctcagacacacttgtgctagcaaaccct

SEQ ID NO: 554953 - DNA, 600 bp, Homo sapiens
agagacatagtcgaggatagagtggagatagtagaatagatgagaatgtgagtatagagaacttgatgtgagtagaagatgtaatcgtcgtgagagtcacggtgtatgtgacggtggagagaagatgagaagcgaagggagatagagagatatgaagagtgagtgagacgtatgtaacgacattcgagggtagagtagatagagagtagagaggcatcgagtgatagatgagacgtggaggacgagttggaagctgagacgaggatatgatggaggagcagagagggagagtggcgtagtgatggagatgcatgtgtagtgagagtacggagagagaagatagatggtgtgtaaaaggatatgtaagctgtggaagtatgaggggaagtgcaagtgctagtgctagagggaatgataagagggaagaagggcatatggagtagggggagagcgtggtggagggaagagagaggaggatagggcaggatcagcgggagaggtgcgaaggtaggacgaggaaggagcgaaccaccaccacaaatccttaggaaaacaaaatagattcactacaataaagtatctgccattccatttttcaac

SEQ ID NO: 554954 - DNA, 205 bp, Homo sapiens
  misc_feature (1)..(1): n is a, c, g, or t
ntctagaggatccctccagtctgaggcgggtgcggtggtcacgcttgtacagatggaggcaaggtggcggatcactgaggcgggagttcatgaccagcctgaccaacatggagaaaccccatctctactaaaaatacaaaattagcccagcatggtggcgcatgcctgtaatcccagctactctgggaggccgaggcgggtggat

SEQ ID NO: 554955 - DNA, 1127 bp, Homo sapiens
  misc_feature (356)..(356): n is a, c, g, or t
  misc_feature (474)..(474): n is a, c, g, or t
gtgccccaacgatcccccaggctttggatgaagatcctgcagctgatagggagagccgccaggacagcagatgaattctcagcaggaggaagaggaaatggaaacagtatgctcgcgtcgttcccgtggtgcctagttcatgcgtcgaagtaggactgaggtaggtactagcagtgtccggtactctacatgaaggcagaaaaaccggagagcgtaggagaccgtaaagaagaagaaaaagccccagcgtggtgcggatggggttgtccatctgatgagctctgcgggaccgggacgcaaatgactcaacccggtcccggtggcttgctgattccccaaggcaggcgtgagtgttngaggatgtgagtatcgtggacgtgaaggaacctggaatatttacgaggcccaacgtcttatctgtcttctacagaggcatcctttggagcgcttcttaagtcgtcactgagtgcatgntgcaagtaagggagcacaagcaggaagaggagcccagagtaaacttgtacaatacgtggagtaactctgcagtccccgcgaagaacgaatcggatttgagagaggcagcacaaggacagtgaatgagtgacagcagtgaatgacgagcaggaatagaggaagcccagaagcccccaaggctgtccaaggaagaagttgctgccgaaatgaatccgtttcacttgtggctgaactcaagcaggctggtggctcgggccgatgtcgtggagatgcacgatggtagacagcgcagggaccctaagctcttggttcaacctcaagggcactcggaactcttgtgcctgtggcaagccacttggtggtttaagccgaataactgtcagggcaaccgggccttgagaaagcccccgcttcgggctggccgacattcacaagaggcacagggatccaggagagtcgaaaggccttgaaggagaaagggagaccaagaacccggaggtcccacgtgtgaagacaatttgcgccagaggggccacagtgacccagataccacaagcggtgagcgcctaaagaggacacgcacaatgataccgggggcgacaaatggagagatgcacaggacgagaaaaccatcttcatcagaaccatggtga

SEQ ID NO: 554956 - DNA, 224 bp, Homo sapiens
  misc_feature (185)..(185): n is a, c, g, or t
cgccgccaccaggagtcaggagccgccgcttccactcatccggctggctggccagtgctaagccgtcacacagagagagtacgaacggctggttcagagacagggggctggactctattgactcgcggactgagactggagcccgtgagggagacttgggcagggtgctgcgcggccgaatcgtntgcgaggcggaacccccctccgctactgggttaccgagc

SEQ ID NO: 554957 - DNA, 357 bp, Homo sapiens
cattgctcccggaagtgtgaagacctcccctcttgtcacgttattgagttaaaataattaaaacaaactcagcctggcgctgttgctcacgtctgtaatcccagcactttgggaggctgaggtgggtggatcacgaggtcaggagatcgagaccatcctggctaacaaggtgaaacccgtctctactaaaaaatacaaaaaattagccaagcgtggtggcaggcacctgtagtcccagctactcggaggctgaggcaggagaatggcgtgaacccgagaggcggagctggcagtgagccgagatcgcgccactgcacctccccctgggcgacagaggcggatccgtctcaaaaaaaa

SEQ ID NO: 554958 - DNA, 246 bp, Homo sapiens
cccccaaaaaacccccccgctttttttggggggggggatggaatttaaagggggccttttttagcccccctttggggggggtttttttaaaagcctttgtgcctcccctctttgccccccttgccgtctttttttagggggccggggggttccggggttccattttgggaaaaaggacctttcttgggccgggcccctctttccgtttttttcttggggcttccaaaaaagtttttttttggggga

SEQ ID NO: 554959 - DNA, 1101 bp, Homo sapiens
ggacctttctctcgctgactgatgatgaccccgtgtcatcgtgcaggccgatcacggaaatctgactgtgtgcttcacatgtgttcaacactacagtatgtcacggcttcagcgaggaacatacctttgcccgttgctggctacttattgatcctaactgagagctgagtgacctgtgccagatgaccaggttagatctttctttgtctattaccgcaagaccaggatagcaagaaattccgtgcgcgttatctaatagtagttgcgtggagtagttgcgtgaacgcttgtgaaatggacgctcatcatagttgaggcaagggccgtgggggagatggctaaatgttactctcagtagttagtagcctcgtgatgggcagtcttgcagtctaatcacgttgctttccgaagatagatggactacttcagcgcagcgttgagagggtagtgttgctcacaatctctagtttcgtacgattatacgcaacatacataccatggacccgagtctatcaagtcgctacaccggaatggacggacagaatggacttaggtgccccattactggaataaatcgtatgaccaaaggtgggctgatgagcagtgaggaggatggaacagaactaaaatacctgtaagtcttgatcatacatgtgcagatacgttgacaacacctccgtgggtgatacgaatcaaacggagacctgtacgccttctttcctgcactgggccattgcccaaagaacatttgacggttgtgttgaacctaaaccatgttatttattggaagcttcccaaatacccagagtggtcttactggggtgaaattctatctggagatagaggactccttgtcgcaaacgtggatgcctaatgggtcggttgccaaattacccgaaggtgtgattgcaacaaagtattgaacccaaaggtggcataggctcaacgccgttaatgaagaggggcgcccttggcgcagtgccaagattggaaagaaattgaggcttgcatgaggaaagaaccacaaagactcttgggaggaaaccgtttcaacagagggcttgcccaaggaattcttacgctggttggacctccataaat

SEQ ID NO: 554960 - DNA, 124 bp, Homo sapiens
agtcttcagatgcttctagctcctttaattatatcaagtcctcctatgagctctccagaaacatagagctgaggataggtaggccaacgggatggggcttggagacccgggggaaaagtagggt

SEQ ID NO: 554961 - DNA, 650 bp, Homo sapiens
taatgggggggggggggagggggggaagggggggggggaccaacccccccccgcggggcccccaaaaaccttttcccaaggggccccctaaaacccgcgcgcactattcttccactaccacccctctctataatttcacccgcccccgaccttattactctcccaccaaatgcgtctctcttcttatctattatagaacacccccctccccaatacaccaaccccctgtgtgacacactctcaccacataggcgcctcctcattatttatctctcatcgacaccaccctctcctacgcccaacacgggcgatacacccccacaccccctccggtgcacatgaggggggaggagccctcaaacactcacaaacaaatacaccccggtggagcgcggcgcgccccggcggagaaagagagaccccaaaacacaaacactctcactaatgtgtagagagtccaccgcgctcagaaccctacaccattcttcttatatctaccaaatcttacacatataagagggggggcgcccttatcacctcccttccccccccttttttctaaaaaccaagaaaacaaccctcgtggttatacctcgcgggcgaacgagagtcacccggggggcacaaatagaaggttattgactcttctc

SEQ ID NO: 554962 - DNA, 536 bp, Homo sapiens
ggcacgagaccaggtcctgcttgccaagacagaagctagaacctggaaaaacttggggaccagactcttcctacctctttcctgggcatacttactctgtctcagaagacagatctctgggcctctcgcaggagtctcagctgcactcaggccagttctggagaaggcccaagagtctggaaggagcagagcagccttgagccaggagtactgtatatagaaggacctgcttatccaagagctggagaaagttggtgttttgtgtcttgttcaaagctgcccatcaccatccgatgacgctaggaccttgagtggtatcagaggccagaagccacacactgccttccacatctgtccctccactctgcaacaggctgaaggatgtgtgtctctgcacacactgaaggatgtgtctttgtagtttgtgctgtaaataattgcttttggggccccagggtcatagctcagtggtagagtgtgtgtggtcaccctgagctctctacaccgaaccacaagctacattaaattacaaatta

SEQ ID NO: 554963 - DNA, 924 bp, Homo sapiens
  misc_feature (77)..(77): n is a, c, g, or t
atgatgttgttagttgtctcgctggtcgtggctccctcggtgttggggtgcgacgtgtgcaggtgggcggagagatncgccatggaggcccgccccctctgggttcccccgaatggtcctacccgccccattggggcgtctcctccttctcagcggtcgtcccagtccttttgcgggagtcccccccggatttgctgtgtgcagcccaatgttgggatccggtgtccccggcccgagcacttcccctggttcttgccctttcctccgggcggcttttgcctcttctcgcaactaaacatccccgtggccgcctccataagttcagggtatcctccccctgggttcctcctcggaccagcactctctcccaagcccgactttgaacagagccctcccccccctttcggagatcttttttcttcttccctcttctctcctcagaagccctgggtcaatgaacacctcaactgggggtcctatgccctcaccctcgacaagtatgtttccaattactccccgttctcgcgggcacgcaccgattcaaaaggcgtcacgcaccaacaatagcgccaaatcatttgccgacacccgtggaccaggggagcaattttgatgacccattatacgcggccacgcgcggacatggactttcagtgcacccccatcggcaccggcagtcggatccgccaccccgcacggtcgggtactcaagctacggttggaaagtagggcgcagacactcctccatcaattccctactgtgcgggagaacgccacttgttacgcccactttgcgaattcgttaaatgtgcggctcaaaacactcagcaaagcacccctttagggatcaacgccgggagaataaacgattctgatagaaagcaaccgcgttggggttaaaaagggaacacacaacatgacaca

SEQ ID NO: 554964 - DNA, 262 bp, Homo sapiens
acagagtacacggactcagctttaagacctcactgacatgttggataatcaatgggaaacaatcgtaaagccttctgctagggcataaattggattccgtctatgtaactcaagaaattactttgcctcctgatctaaatgcttgcctctagtctagggcttagaataaggtcctggttatttgaactggttgtcaatcaaggtccccttcattttcgctttcttggcttccaattcagccagctcttgcagtcgcctcttg

SEQ ID NO: 554965 - DNA, 263 bp, Homo sapiens
ttcattattgcggtagaggcagcagaggttgtagaactgctccttgtaggcagatgccacaccccaatttcatggagtgatttgcgtctgcagcaggcagcaaggctctgagcatgttgtcctagacctgggcaaaggacaattcagagctcgggggaataggggtgtgctcagcacgactgggtggacaggccgtttgttgtgaatcgtacaggcttccaggagcgggtgccgatcaatagcgaggtgccgatgaatagcga

SEQ ID NO: 554966 - DNA, 195 bp, Homo sapiens
agagctggatagaggtctgggactttggcaccagccccaaactccagagaggggagaggggctgaaggttgagccagtcaccaatggccagtgatttaatcaatcatacccatttaacgaagtctccatacaaactcaaagggacagggtttggatgaacttttgcggtcggggttcttggagggtggtgttcca

SEQ ID NO: 554967 - DNA, 1479 bp, Homo sapiens
caccctacagtggggccagtgcggcaatcagattgggtacggagtatctggaaacgagctgtgcgccgagcgatggtatcagcccctgagggcgtcgtggaggagtacgccaccggagtgcactgaccgcacagcacagtctaaaatctaccaggcagacgatggagcactaagatagccccggggcggtgctgctaggactgtggaaacccggggtggatccattacgatccctcaagtcgcccctaatgccaagggtctagcaacccagagaacatcctaaccattgatcgggaaccattggcacgtgaacggacgctggggcagagcaaacattggggcgcatgtgcgaatttcctcccacaggggaacggacaacgatgattccacatttgaacggaccataactcgtggagcatacataagaacccgtggaaagcgacaggacctagggcaacgtaggacctaggtcgataggacggcgccctatctggtcgcctcgttagtccagacgttccccaaaggcgcccagggcgcggggcaccaggggccatccctggaacctggggggataccacgaaaccattcgtaaacgagaaacccgggtgcttggaagctgtgccctggcgcataattcccttaaagacaagggctgtggatggccaggaacatttaagcttcaagaagggactaaacccaccaaaacctcatgtgtcacgagaagcaattgcacgccggaaactcagctggctactggatccccaaggcgcctattcagcacaagattcccacccttcccatttccaacgtaactattctaatatgacaggtgcgtagtaatcgccagataaaaatttgtggacgaagccatgtgtctggccagcaacaggcgctctgtgcctatggacagacaaaagtcaaccaacgggaccccgctgtagaatcccgaggaacattaggagccccaaaagagatactgcggtgaccttgtgcacacatattccactgggaagccccacagtaccgcacatcaccatcgcccgaggcaaaatacaaaaacacccagacaacatggagtaaggatactgaacccacaatccaccggcgtcagcaaggccgcaggcacagcccgacaggacgaaaaaacccagtggtcagaacgagatcaccccagggaggacaaccacaattgagagacaccccactatggtacccgcactcacaaactgcgggagggccgcctgcacaatcggcgacgacagacgacgtaccaacataaacaccaacgacagcccaaaggggcgtcccacacagtacgaaggacgactacagaggaacacgcgcggctgtacaaaggcccccgcacgtgcaacgtaaccagagggatccagtacacaaaggaggaagacacacacagtaccgagcagcagtcagaaggccacaaccgacgccacagccgcatggaccaaacagaccacg

SEQ ID NO: 554968 - DNA, 169 bp, Homo sapiens
ctccactgcactccaggacctggcaaacaaaacaagactctagtctcgaaaaaaataagaaaaagaaggaaaaaacataaaaaagggtcccccttggtggaccccttggcctttaaagggaaattaaaattaataaacggttaatggcccagaattttgatacttaaat

SEQ ID NO: 554969 - DNA, 161 bp, Homo sapiens
ctaatgcatggtcctcgctcaagaatagtcctccagctcaacgactagtcctcagatcaacgatggatcctcagcatacaacgatagtcctaccgctccacgatggtcctcagctcaacgatggtcctcagcccaacgctggtccacagctacaacgatgg

SEQ ID NO: 554970 - DNA, 389 bp, Homo sapiens
  misc_feature (361)..(361): n is a, c, g, or t
cccctatcacttccttacgtatcttcgagtgacacgttgaagacaagggtacaggtaacaaaaattaagatcacaatcaccaatgaccagaatcgcctgtacaccatgaagaaatctaaaggatggttaatgatgctgagaagtttgctgaggaatacaataagctccaggtagcgcattgatactagaaatgagttggatagctatgcctattctctatcgaatcacattggagattatgagtagctgggcaggtaactttcctctgatgataaggagaccatggaatatgctgtagtataagggattgacatggtctgtaaagccatctagatgcttacttttaacacttcccacgctntcaagaaggtacaggatggtagctaggg

SEQ ID NO: 554971 - DNA, 231 bp, Homo sapiens
gaagcaaagaaaaaaaaggctactacatctagctaaattcacttccgattgttgaaacacaagggaggggctgggccgggtggctcacacctgtaatcggagcactttgggaggccaaggcaggtggatcacttgaggccaggagttcgcgaccagcctggccaacatggtgaaaccttgtctctactaaaatacagaaattagctgggcatggtggcacatgcttgtaat

SEQ ID NO: 554972 - DNA, 134 bp, Homo sapiens
acagatggaaacagagatatctggggtcgttgtgtatcagtggaaccgtctgtctgtgggatcatctcatccctcaggtgactttatcatgtggagctctttatctgtcaagccctcccccatgggtgaagaga

SEQ ID NO: 554973 - DNA, 4156 bp, Homo sapiens
gaagcatggagaaggctagaaaggtttgatattaaactgctctcagaattttcctcttgcctagcagatcagcatttgtattttagtccattaatgggaaaaatagctgatattgttcataggaacttggaaaccacacaggacttaagttccttgtctgtcttgatggtcaacatatcttctttaatatcacgacattttcaacaacaactggtgaacaaaacagaacttctttttgacaccatagattcttctgaggtcaacgttgcaaaaagcatagcaaagtttcttcgaaatgttagatatcgttatcaaccactattagaaagatgtaataacgtatttttaagtaatgtggaccaccttgatttggattccatcagtaaaatacttagtgtatacaaatttctacaatttaatagttttgaatttattataatggctaaaaagaagctaactgaaatgattcctctgtgtaatcatcctgctagctttgtaaaattgtttgtagcattgggacccattgcaggacctgaagaaaagaaacaacttaaatcaactatgttattgatgtcagaggacctaactggcgagcaagccctggcagtgttgggagcaatgggagatatggaaagcagaaactcatgtctgattaaaagagttacttcagttctgcataaacatttggatggctataaaccattagagttgttgaagataactcaagaattgacttttctgcatttccaaaggaaggagttttttgcgaaacttagagaattactgcttagttatttgaaaaatagtttcataccaactgaggtgtctgttctggtccgtgctatttccctgctcccttctcctcacttggacgaagtggggatatcccgaattgaagccgttttaccacagtgtgacctaaataacctgagtagttttgccacatctgttttaagatggattcagcatgatcacgtgtatttggataatatgactgcgaaacaactgaaactacttcaaaaattagatcactatggtcgtcagagactacaacacagcaacagtttggatctgttacggaaggaacttaaatctctcaaaggaaacacgtttcctgagtcacttcttgaagaaatgattgctactttacagcatttcatggatgatattaattacataaatgttggggagattgcatcttttatttctagtactgattacctcagtactttgctactagataggatagcctcagtggctgttcagcagattgaaaagatccatccttttacaatccctgctattattcgtccattcagcgtattgaactatgatccacctcaaagggatgaatttttgggaacttgcgtgcaacatcttaattcttacttaggtatattggatccttttatattagtgtttcttggtttctctttggccacacttgaatattttccagaagatctgctaaaggcaatttttaacatcaaattcttagctagattggattctcaacttgaaattttatctccatctcgaagtgcaagagtccagtttcatcttatggagttaaatagatcagtctgcttggaatgccctgagtttcagattccatggtttcatgaccgcttctgtcaacaatataataaaggtattggtggcatggatggaacacaacagcagatttttaaaatgttagcagaggtactaggaggaatcaattgtgtaaaagcctcggttcttacgccttattaccacaaagtagattttgagtgtatcttggataaaagaaaaaaacctcttccgtatggaagccataatatagcattgggacaactaccagaaatgccctgggaatcaaatatcgaaatagttggatcaaggctgccaccaggggctgaaaggattgctttggaatttttggattcaaaagcaatgccctgggaatcaaatatcgaaatagttggatcaaggctgccaccaggggctgaaaggattgctttggaatttttggattcaaaagcactttgtagaaatatccctcacatgaaaggaaaatctgctatgaaaaaacgacatttggaaattctggggtatcgtgtaattcagatttcccagtttgaatggaactctatggcactgtcaacaaaggatgctcggatggactacctgagagaatgtatatttggagaagtcaagtcatgtttgtagtttttatttaaaatgaatgttatcgtgtgttacatttggacctattttaataaagtggcctgtctcaattaaaaaataggtacaaatgtcctaaggtgggaacatgcctggcatgtttgagaataacaaaggatccagtgtggctggagcagaacaagtggggagtggggtgggagtgtataagagaaaagataagagataacagagtcaaatacaacctcttggctactctgagcgagatgagaagccattgggggcttttcaagtaaggaatgatatgaattcacattttaactgcgttactttggctaccttgttgagataagaaaagactacgatgaggcaaatgtgtaagaaagaaaactctttacgaggtcattgcaataatccagacaacaatggatggtggcttggagagagtggtagcagtggaggtaataagaagtagtcagattttttggatgtatgttgaagataaaggcaacagaatttgctcactgattggatatgaggtatgagacaaataggagtcaaggataattctaagtttttgtcctaagcaactaagaggatgtcattagcattaactaagatggggatagtctataggaagagcaagatggggggcaggtggtgggggttgatcacaagtttgttttagatatgttgagtttgtgatgtcttttaaacatctaagtggatatatcaaatagagaattcagtaaatgagcttggaggtcagggaagaggtccaggccccagatataaatgtataaatgtcagcagtattcaatgccatgagagtagatgaaatcgcttaaaatgagattagagaagagtgtgaatggaggagaggtctgaggactgagttttcaagtgccccaacattaaaagattaagaggaagaggaggaatcaggaaaggagactgagcagggatggccaatgaggtaggaggaaggaaggtaagtaatacttcctagaagccaagtggataaagcatttcaagggggaggtgagtagttgtatcagatgctgctgataggtcaggaaagatgacaaatgggaaatggctattaaatttagcaacatgaaaatcattagtactttgaaaatagtcgttttgaagtggtgcatgtgaaagcctgactggttcaagagaaaatgggaggagatacattttctcctaaatggaagcaaagaaatggggtagtagctgagtggaccatcttgacctggtgtaatcctacacattgagggaataatggcttctccctgtcttacaacacatttattcaataaaatggttactaagggcctactgtgtgatataatccccaacccttcctctaagagtgatggttttgtgctcagcaggccacagcctaactactctcagttacgccacctggtggtggtggaggtaattgaccatctgaaccgtggctatcttctgactccatgaccttctcaattcatactatctcaaaataagttggtagctggagtgccttcaatcataagcatagctttaaaatttgtgtcttgcatgtaaattgcttcactgatgtttggcttaggcttagttgaagtacatgtttaaaatatccaatgactttgcatgatttgaactccaatacttaatgattttgtggaatattaacttcacaaaacgttttgtgaaaaacaaaatcagaatagtaagtgaaagatgtctcattgtctcttcctctttctgaatttcctcatagtcatattagtggaaatgctaaattcagtgtttaatttccatgaaatgtgttctatttctcaagcaagtgataacaagaactagaccattgaataggttaaaatattttactatgcaactttagaataaaatgattaggctgatgagggttataaagggtttcctttggatataaatcattaaaaatttagtcatt

SEQ ID NO: 554974 - DNA, 127 bp, Homo sapiens
tagtcatcgtagacgtaccgatgtcgacctggttacttcccgagaatatcgccgacgtactgccgtcggaagcgcgcaagatcgaggagctgcgccgcaggctgctcgaccgcttccgttcgtatgg

SEQ ID NO: 554975 - DNA, 4065 bp, Homo sapiens
gaagcatggagaaggctagaaaggtttgatattaaactgctctcagaattttcctcttgcctagcagatcagcatttgtattttagtccattaatgggaaaaatagctgatattgttcataggaacttggaaaccacacaggacttaagttccttgtctgtcttgatggtcaacatatcttctttaatatcacgacattttcaacaacaactggtgaacaaaacagaacttctttttgacaccatagattcttctgaggtcaacgttgcaaaaagcatagcaaagtttcttcgaaatgttagatatcgttatcaaccactattagaaagatgtaataacgtatttttaagtaatgtggaccaccttgatttggattccatcagtaaaatacttagtgtatacaaatttctacaatttaatagttttgaatttattataatggctaaaaagaagctaactgaaatgattcctctgtgtaatcatcctgctagctttgtaaaattgtttgtagcattgggacccattgcaggacctgaagaaaagaaacaacttaaatcaactatgttattgatgtcagaggacctaactggcgagcaagccctggcagtgttgggagcaatgggagatatggaaagcagaaactcatgtctgattaaaagagttacttcagttctgcataaacatttggatggctataaaccattagagttgttgaagataactcaagaattgacttttctgcatttccaaaggaaggagttttttgcgaaacttagagaattactgcttagttatttgaaaaatagtttcataccaactgaggtgtctgttctggtccgtgctatttccctgctcccttctcctcacttggacgaagtggggatatcccgaattgaagccgttttaccacagtgtgacctaaataacctgagtagttttgccacatctgttttaagatggattcagcatgatcacgtgtatttggataatatgactgcgaaacaactgaaactacttcaaaaattagatcactatggtcgtcagagactacaacacagcaacagtttggatctgttacggaaggaacttaaatctctcaaaggaaacacgtttcctgagtcacttcttgaagaaatgattgctactttacagcatttcatggatgatattaattacataaatgttggggagattgcatcttttatttctagtactgattacctcagtactttgctactagataggatagcctcagtggctgttcagcagattgaaaagatccatccttttacaatccctgctattattcgtccattcagcgtattgaactatgatccacctcaaagggatgaatttttgggaacttgcgtgcaacatcttaattcttacttaggtatattggatccttttatattagtgtttcttggtttctctttggccacacttgaatattttccagaagatctgctaaaggcaatttttaacatcaaattcttagctagattggattctcaacttgaaattttatctccatctcgaagtgcaagagtccagtttcatcttatggagttaaatagatcagtctgcttggaatgccctgagtttcagattccatggtttcatgaccgcttctgtcaacaatataataaaggtattggtggcatggatggaacacaacagcagatttttaaaatgttagcagaggtactaggaggaatcaattgtgtaaaagcctcggttcttacgccttattaccacaaagtagattttgagtgtatcttggataaaagaaaaaaacctcttccgtatggaagccataatatagcattgggacaactaccagaatgccctgggaatcaaatatcgaaatagttggatcaaggctgccaccaggggctgaaaggattgctttggaatttttggattcaaaagcactttgtagaaatatccctcacatgaaaggaaaatctgctatgaaaaaacgacatttggaaattctggggtatcgtgtaattcagatttcccagtttgaatggaactctatggcactgtcaacaaaggatgctcggatggactacctgagagaatgtatatttggagaagtcaagtcatgtttgtagtttttatttaaaatgaatgttatcgtgtgttacatttggacctattttaataaagtggcctgtctcaattaaaaaataggtacaaatgtcctaaggtgggaacatgcctggcatgtttgagaataacaaaggatccagtgtggctggagcagaacaagtggggagtggggtgggagtgtataagagaaaagataagagataacagagtcaaatacaacctcttggctactctgagcgagatgagaagccattgggggcttttcaagtaaggaatgatatgaattcacattttaactgcgttactttggctaccttgttgagataagaaaagactacgatgaggcaaatgtgtaagaaagaaaactctttacgaggtcattgcaataatccagacaacaatggatggtggcttggagagagtggtagcagtggaggtaataagaagtagtcagattttttggatgtatgttgaagataaaggcaacagaatttgctcactgattggatatgaggtatgagacaaataggagtcaaggataattctaagtttttgtcctaagcaactaagaggatgtcattagcattaactaagatggggatagtctataggaagagcaagatggggggcaggtggtgggggttgatcacaagtttgttttagatatgttgagtttgtgatgtcttttaaacatctaagtggatatatcaaatagagaattcagtaaatgagcttggaggtcagggaagaggtccaggccccagatataaatgtataaatgtcagcagtattcaatgccatgagagtagatgaaatcgcttaaaatgagattagagaagagtgtgaatggaggagaggtctgaggactgagttttcaagtgccccaacattaaaagattaagaggaagaggaggaatcaggaaaggagactgagcagggatggccaatgaggtaggaggaaggaaggtaagtaatacttcctagaagccaagtggataaagcatttcaagggggaggtgagtagttgtatcagatgctgctgataggtcaggaaagatgacaaatgggaaatggctattaaatttagcaacatgaaaatcattagtactttgaaaatagtcgttttgaagtggtgcatgtgaaagcctgactggttcaagagaaaatgggaggagatacattttctcctaaatggaagcaaagaaatggggtagtagctgagtggaccatcttgacctggtgtaatcctacacattgagggaataatggcttctccctgtcttacaacacatttattcaataaaatggttactaagggcctactgtgtgatataatccccaacccttcctctaagagtgatggttttgtgctcagcaggccacagcctaactactctcagttacgccacctggtggtggtggaggtaattgaccatctgaaccgtggctatcttctgactccatgaccttctcaattcatactatctcaaaataagttggtagctggagtgccttcaatcataagcatagctttaaaatttgtgtcttgcatgtaaattgcttcactgatgtttggcttaggcttagttgaagtacatgtttaaaatatccaatgactttgcatgatttgaactccaatacttaatgattttgtggaatattaacttcacaaaacgttttgtgaaaaacaaaatcagaatagtaagtgaaagatgtctcattgtctcttcctctttctgaatttcctcatagtcatattagtggaaatgctaaattcagtgtttaatttccatgaaatgtgttctatttctcaagcaagtgataacaagaactagaccattgaataggttaaaatattttactatgcaactttagaataaaatgattaggctgatgagggttataaagggtttcctttggatataaatcattaaaaatttagtcatt

SEQ ID NO: 554976 - DNA, 303 bp, Homo sapiens
  misc_feature (20)..(20): n is a, c, g, or t
tgtcgtccttaatatttctnagccttttgtcatagaggtggtcggttggacctcaaagcctccatctaattttttttgtctatgtttctatatctctctcttttacgcttctttcccggaccgtcccctccctctacaattatatttactaccttcatgattgctttttattatttctttcactcatcattattgttcattttttaattaacaatttttttcattattctttttcttaatttgtaacccgtttctaattttctcaattattgcgctttctcaacccccctccttcctcattac

SEQ ID NO: 554977 - DNA, 325 bp, Homo sapiens
ctggagacctcaggaagctataatcatagtagaggcaaggtaggagcagcacttcacatggctggagcaggaggaagagagagtgtggggagtgggagtgctacacacttttacgcaaccagatcttgcaagaactcactatcacgagaacagtaccaagagggaaacctgcccccatgatccaatcacctcccaccagaacccaactttaacactggggattacaatttgacatgagatttgggtggggatacagatccaaaccatatcaatgctcatagataggaagatagtattttgttaatacatcagttctcccgaaatt

SEQ ID NO: 554978 - DNA, 358 bp, Homo sapiens
gtggtgttgattgctcttggtggctgtccctgctgcagcagcccatgatggcggtggtaagaagatatcccgcatagcgaacagaacggacacatttcaccgtccgccttacctgatggctagacccgtgaacatgtgaagctgatcaaggaattcgagaactacatccaaggcatcaacctcgtccaggcgaagaagctggtggagtccctgccccaagaaatcaaagccaaatttcgccaaagctgaggcggagcagatcaaggcggccctggtggcggtgggcggcaccgtgggtcctggaagtagcctccagctcggaggacttgtgttcaggggtcctggacccatcggcgtg

SEQ ID NO: 554979 - DNA, 1054 bp, Homo sapiens
ggtgttcccccaacctttatttccaagtgcacattttcagtctttcacaatagctgcctttctgtgcatgtggtgcatttcaacatgcatttcaagttccatttgttctcaaccttggggtcaaactgcaggtcattttgcttcctgggcaagcatcttcgcaattattgagtgctcctgatggggcagcggggcatgagctaaagatacaatagtttaccctgacccgacaccgattccacaaaatagcaatgtaggattatagcagactctgaacttctgactcccagtaacccatcgttagggcactctagacactatggaggtacccaaggctcagccagtctctatattaagaaaatttaacaaataagagtaaccctgtcaccaatcactgaatctctagattactactcttagaaaacacgctgtggacattctagagccctccatgtagaccgaatctgaaatcatctctgcagatactacaaaaatagacccagtcaaattctccacttggaggaaaatagtaacaagagtggaacccataagacattagagtccacccccccatagactaccaaacatgtctagacccccgaagagagctcatagtcaggtcccttgattccatcctattaaccataaaggggatgagtgctagcaactcaagaaataactcatctaacacctctggtgcttttccttcaggattcccatgatccctcatggtcttgagaagggctggtgcaggaaaaacaagaaaacctgactcttgcccatcacttgaacaaatataaagcaatgaacaaaagatgtttaacagaagacaactgtcacctacgaatccaggtgacccgaaaaggaaaccacggcaccacgaaaataagatgaacaatcccacaataaatagaatcttgcctttaaaaccgcaaccaggtggatatcataacaacaaaacacacacaagagtatgttagacacaccgcccagggaaaaacggtccaaggtgactacattgagtattcatacctagtgttaaggaacataaaca

SEQ ID NO: 554980 - DNA, 221 bp, Homo sapiens
gcagaagtctccaagaccccgggaggctaagtcaccggcgttggaatagagcctgcctccttaccaagatctctctcgtcgacctccctccggcctgcactccccagttccgggccctctggcacccaggcagctcctgtttggaatgggagctgcctaggtgggagccaccactcctgcctccccacaccactcacaccagtaataaagcacccaaatac

SEQ ID NO: 554981 - DNA, 321 bp, Homo sapiens
atggacttgatcaatcatttcggccttcccttgtggagcctgtccaggagaatggatgtggactgtgttctgatggaggaaaataaattgttcttggtcaggtttttgaaaataacagtccttgtctctcaggtgggcacatgcttcgctgattgatggaatatctagaagccttggcttaaatatagaacaaatgatattgagctacttaatcttactatcactgtaccaggttccataaagatgatgccttggtgagctgaggctgctgtaacaaacaaaggcacgtttcttataaacaatagaaactggttttcacag

SEQ ID NO: 554982 - DNA, 459 bp, Homo sapiens
aaaaaaactctttccctcggagacgggcggcggcgttggcggcttgtgcagcaatggccaagatcaaggctcgagatcttcgcgggaagaagaaggaggagctgctgaaacagctggacgacctgaaggtggagctgtcccagctgcgcgtcgccaaagtgacaggcggtgcggcctccaagctctctaagatccgagtcgtccggaaatccattgcccgtgttctcacagttattaaccagactcagaaagaaaacctcaggaaattctacaagggcaagaagtacaagcccctggacctgcggcctaagaagacacgtgccattgcccgccggctcaacaagcacgaggagaacctgaagaccaagaagcagcagcggaaggagcggctgtacccgctgcggaagtacgcggtcaaggcctgaggggcgcattgtcaataaagcacagctggctgag

SEQ ID NO: 554983 - DNA, 1266 bp, Homo sapiens
  misc_feature (604)..(604): n is a, c, g, or t
  misc_feature (1192)..(1192): n is a, c, g, or t
gggtaatctaggctggcagtggtgtgatccggcaccaaatcgtggccgcggtgcggtgcggagatctccgatgagtgccctggtactatgaacacagtctgagctggaggtggtggggcgcaggacctcgggtggaatggcggtgccagcttctgggggccgatgacgctggaccgcggctccacagagtacgcgtttgatctgatatagccccacgcggggcatggactgtgatcacgatacgcactgaatgtccatggtcgatcgccgagtgtgtcttccctacggttgcggttcaggtgtacatggagcggttgatgtggagggctccttccagatccatatgcagttgccccttgcaactttccatacaccgcggaactgcaagcgtgcgaccaaggggaggcgcattcaaggtactgcgcttgttgctagaaggcttggtgacactggagttagcctacatgaggggggccgcaccaaacggcacgggcagtaacacgacgcattgctcaagcaccagcctcaagatcaacgggttctaaatacacttgggccggatgtgcacgctaaagcgcttgacaagtattgaggtacgcgagantcgcccgagagttcatctttcttcgaacaccgtcgtaccgaggctcgaagccattcgcctcaagacacttcaattggcccgagtaggaatctcgcgaaagtagctcgattcaatcttggcgaaagtcccacccgacacttagtcaactctagttgttccaattgtaggccaattccccgggcacggggggttaaatccagaggatctaggcaaggtcgcgacgataagtaggtacagccacgtcaattgtgtggggcggcatcaaggaaccgcggcttgggtgaaccctcacggaaggaaaggtcgccttggcgcgaacactttgcgtagggatgcttggtcccccggaaaatgtgggcccatttgggcacccccaggcgtactatggtacagaatcccaaggacaatgcgaatttgaggcccacggcgcacctttgctggaaggctttggccgcggcgttatcagagcaccgccaatattgtgacactttcagagggggagaagaccacacaccccttcagagaaggcgtggtggttcaaacaccccctatcgaattgaagacagagggactaggggacatcgcgcnatttctagtaattggggttccaagcacacctcgctggaacttgatgcacggggcacgagagacaccgcacaggc

SEQ ID NO: 554984 - DNA, 113 bp, Homo sapiens
ttggcctttctgctgtatgtctcccagtgctggggtctctccttggcatgagttcagctgggggtagccagaaactgaccttcagaggtctgcagttctccttcacataccgg

SEQ ID NO: 554985 - DNA, 503 bp, Homo sapiens
accaacaagtctcctagcattatcttatctttgttttttattactgtacgtttactggaaattattctggaggttgctgtctcagatcagcggactttttgggtcgtaggaacctggtatgagtcgtcggtgggttgcgtatcgaaggggtcttgttgtccggagtcggttagtaattatccttcccattcgttgtgggacgcgtcggtttaatcgtttagttctaggtattcggatccaagcaacaacctgtcggcgagttcgattcatgcgcttccttgtaattcgatatactcagaaagttcttattcggaggataacgtttctaaggcttcctataacggtatttcggtcgagccgtaaggctcattttataccagggccccttcggataataactttcgggctcgtgatcgttatacggtagatacggcgattcggtctaaggaaatagaggcagcgtagggtgactggtctattcgcgtacacttggaacgggctgg

SEQ ID NO: 554986 - DNA, 669 bp, Homo sapiens
aaaaaaactctttccctcggagacgggcggcggcgttggcggcttgtgcagcaatggccaagatcaaggctcgagatcttcgcgggaagaagaaggaggagctgctgaaacagctggacgacctgaaggtggagctgtcccagctgcgcgtcgccaaagtgacaggcggtgcggcctccaagctctctaagatccgagtcgtccggaaatccattgcccgtgttctcacagttattaaccagactcagaaagaaaacctcaggaaattctacaagggcaagaagtacaagcccctggacctgcggcctaagaagacacgtgccattgcccgccggctcaacaagcacgaggagaacctgaagaccaagaagcagcagcggaaggagcggctgtacccgctgcggaagtacgcggtcaaggcctgaggggcgcattgtcaataaagcacagctggctgagtaacacttattcatctccttcatgtgcccctttcgctcaaactacttaaccttctattcaaacaacatgccgcccgcttgctcaaatcgactttaaaccttggccacctttttactttggtccccatccgagcttaatttcccaagttcccctatattggattgtacttatttttagtgcctcctctttctcaccctcttactgctcccg

SEQ ID NO: 554987 - DNA, 407 bp, Homo sapiens
aaaaaaactctttccctcggagacgggcggcggcgttggcggcttgtgcagcaatggccaagatcaaggctcgagatcttcgcgggaagaagaaggaggagctgctgaaacagctggacgacctgaaggtggagctgtcccagctgcgcgtcgccaaagtgacaggcggtgcggcctccaagctctctaagatccgagtcgtccggaaatccattgcccgtgttctcacagttattaaccagactcagaaagaaaacctcaggaaattctacaagggcaagaagtacaagcccctggacctgcggcctaagaagacacgtgccattgcccgccggctcaacaagcacgagagaccttagccacgacgcagcacggaggagcgctttccccttccggagtcgcggtca

SEQ ID NO: 554988 - DNA, 903 bp, Homo sapiens
gatactgtgacgctcatactgcacaccagtgctaccagatttgtaactatcagatttaaatgaaagaagagaagggaagaggctgagttgcgtggcagtgtcataacgaatagtcttggccgggcggtggtggcttcacgctttgtagatccacgaggacgactttagggagagccgaggcggggctggatcagcgaggtcaaagagatcggagatcatcctgcgctaacactagtgaaaccccggtctctaaataaacaatacaagaagatcacattgaagcctgggccgtgagtggcagggacgaccctgtagtacccatactactcagggcagcgtctgtaggcacagcagtaagtggctgtgacagcccgaggcaggcggatgccttgaaacgtgagccgaaattggcgcccactgctactccttcgactgtgcgccaccacgagcgagcattccgtctcaaccatagaacaggagcgaaccctggaaaagcttcaagaacgcatgatcgtcgggtgctgaaagagaaggggtgttggaagataccggcatatgtggctctctgttcgtcgggtcttaaaccgagattattcgtgtccgagcgtggaagtacattgcagggatccctacaggaagaggcggtcttaagattgcacgaaagaactcgacgtgtaatcgcgtagggcatgattaaatcgcgcggtgaaaaaagtttccccggtttcaccaaggaacggacaggaaccaagaacccgaaccaaccttgtcctgggggagtggggagaattctccacccattccaagaacggaactggaaaggacttggagcccaggccaagaggccgggggcagggcaagactgaacggacgggacgaagggacagcggattttgtcccgcc

SEQ ID NO: 554989 - DNA, 692 bp, Homo sapiens
aaaaaaactctttccctcggagacgggcggcggcgttggcggcttgtgcagcaatggccaagatcaaggctcgagatcttcgcgggaagaagaaggaggagctgctgaaacagctggacgacctgaaggtggagctgtcccagctgcgcgtcgccaaagtgacaggcggtgcggcctccaagctctctaagatccgagtcgtccggaaatccattgcccgtgttctcacagttattaaccagactcacctcgcctcaggtaactctactaggtcatgacttccatgctccccgaccctctgcccacgaacgacactcgccacgcgccgtcgccttaccacgcccgccccgaacctgacgaccaccacccccatcgtaacgagcctccgctcccgctcccgcaccccgcccagtccctccctcctcgcaccgtccccgtcccattgttctctccccctcctcccctacccttactcatctccctactctcccgttcccctcactctacccccgccacccttttctctaccccctacctacctctcctctcttccctcctcccttgccccaccctcacttctcggccatgcccctgcccccctccactcgctactccctctccccacccttccgcctgcccctacacctctcccttcctccacctactacgtcctccctccccccctccccctc

SEQ ID NO: 554990 - DNA, 106 bp, Homo sapiens
ccttgttggtagtttctgaggatccccgttcgccaccgcgacagatcaccgagcgtatctcctgtgaccttcggctccgtcgggccgctggggtccgatgctcgaa

SEQ ID NO: 554991 - DNA, 301 bp, Homo sapiens
aaaaaaactctttccctcggagacgggcggcggcgttggcggcttgtgcagcaatggccaagatcaaggctcgagatcttcgcgggaagaagaaggaggagctgctgaaacagctggacgacctgaaggtggagctgtcccagctgcgcgtcgccaaagtgacaggcggtgcggcctccaagctctctaagatccgagtcgtccggaaatccattgcccgtgttctcacagttattaaccagactcagagagggaaccttaggggattttatcaaggggcaggaggtgtcaagccccttgg

SEQ ID NO: 554992 - DNA, 593 bp, Homo sapiens
tgtctgctaaacaacatccattctgcaggatccattactccatgggtcaaggagtaattttgactttcaagtattatttaaggaatacattttgtaaggctgtggctgccatagtggttgttctgtacaaagtaacttgaaaaccttctggaaaggattcatcattctagatgccattaaggacatttgtgattcatgggagaaggtcaaaatatcaacattaacaggagttcagaagacattgacctcaaccctgatggatgatcttgaggggttcaagacttcagtggacgaagtaactgcagatgtggtggaaatagcaagataactagacttagaagtggaacctgcatatgtgactgaattgctgcaatctcatgataaaacgtgaacaaatgaggagttgcttctaatataagagccacaaaagtgggttctttgggattgaaactacttctgggggaagatccttgtgacctttgttgaaatgaacacaaaaggccttagaatattacataaacttaatttggtaaaacagcagccgaagtttgggaaggaatggattccattttttaaagaaaggttccactgtg

SEQ ID NO: 554993 - DNA, 960 bp, Homo sapiens
tgctaacatgagacactctggacgattactggggctaccccgtgagttatccgccatacgggtgtgggacgcccgtgggtcacaattcacccggtcaccctttacgcgtgaaccccccaattgcggggggccgctcccctggggctcccccccccaatgaaggcgctgggcaacaacttgtgaggggaccgcaaatttccgcaaagtggtttcaggggaggctgttataccagcaatattccctcaccgctttttattggcaccctgctgttgcccacgcaaacaccggaggggcttcgcaacctccacgcctgcctctgtggcacaccccggcactggctcctcctctttgtcaacgtgcccccattggcggggccttttgccccgggcccctgatgggtgttcccccgtcggcagtgggtctgtgaaccacttggtgccacctttctcctgtggccttggaccagcccgcgtccaagagccggctctaattgtgcggcggaagtttttctccacaacttggtgtgtatgaatccccccgcttgctcccccgggtccgccccccaccactctggggtttctcccctcttgcggtagcctctctcccgtggtagcaccctgcgacacggtgaccccggcagccctgccgattggcgcgtgcagccacccgtggtttggccacttcggcgcccatctcctttcgcgcagacacttctgcacgggagtggttgcgagcaaccccctcgggtaatcaaggcggtggggtcgcccccagacgcctttgcccccgccggccgattcctccccgggtgttactcgttcggcgcaacaggcacccgttccttgtggggcgtgggggcaggcccctcggctgctcgcaggcggggtttcctttgccctccccccccccttaagcccctccccccccggcccacataacaaaaaaaacaaacataaaaa

SEQ ID NO: 554994 - DNA, 472 bp, Homo sapiens
atgcagacaggtctcacccagcatagtggctgggtgagagctgggactcaaatccgagctgcgtgcccaggtccccagctgccccactcgtgggcagcgaattccacacccacatgcaacgctcccacaaggtcagccaaacagagcactccgcagcctggagatggcaggccagggtgtggcactgcaccaggcaggaggtgcgggcaggcagctggcaggaggtggggcaggcacctcatctcatcaggcctgtactggcagaggcagagcatcgacctgaccctggtgctgggctgccggctccctcctgctggctcgcagatggcatcacccaggtggtaacgcaaaggctcttgggtgtgtgagagggggagatgttgtctgtgctagagtttgcagagatggcagcctctgctgtgatcttgtgcttctccccagatcctgaggaggatgaaggggctggcctgga

SEQ ID NO: 554995 - DNA, 889 bp, Homo sapiens
tagcttccttagggctttgtgcccctcctggcaagcgtccaagggccgttgtggccgaccaggagtatatgtgaggtgtccaaaccgtagcgcatgtagattaaccctatctcgccccgatcccgttgccctttttccgtgagggcccccggagggccactctaacgggggacttgtacccccttgggcactctggggggggccttggtcccagcacgagcgcactctttgatctgagattggaagccactgagcctgagggtccacgatttccccgggttcacccagagggaaggggctacagcccccagctgtgtgcagggaggacacatcagccccctaccgcgcccacacatgcctaaacttgtttcaaaccttggggttttctatatatttcagctgggaaagcttacctttaaccctttgcgaaaaatagatacgtgattagcctccactaaccttgctgactattaagccgtatattccccctgtcgctggccatatgtcattgcgtacccccatacccccccgaagtagcccgaggcccgtttggacatcaccatatctaagtgttttagtaactatttctggcgtgagtccaccgatcatgtagatagagtccattattgtttgtggagtttttcagctataggggaggggaactattaaaataccctttgtttctattccataggtaataaaattagttgtccctgggtttgggaaacttaaagccccttacagccctggggaagggttttctgtcttatggagatgagtcttagcatttaagttataccgttgtctgcctttaaatagtagcctgctaccatgacttctttgggtagacccatttcataaggaattaaataccagatatgagtaatga

SEQ ID NO: 554996 - DNA, 472 bp, Homo sapiens
gatcttgccagtacgtttaatgaaaataactcaggatacccaaaaatgcattatgtaaattaaccagtttctcagtttctgtagaatatctcctttagaaaacatggcattttgtccatgtctgacctgttctaatggggagaaattcctcctaaaccttggaaggtagaaaggaacatggcagaggatagttttaaggacgtcacagtttgacttagcccatatgatggaatgtttgcctcatccgcaaacatcctttcccctcatgtaatcgactatttcccacattcatggaaaatttgacatttgtcttaagtggttcccttgtgagaatatgaaagcatttctacttttgaaaaaataagaaaataaccacagcagaaatatgacaagatttcacatttaagatctcaaaacaccatttcactctatataggaaaacatcgttttgtacactttaaatacatacact

SEQ ID NO: 554997 - DNA, 313 bp, Homo sapiens
tctccgtcgtttacaaacttcattgatttttgactgcgaggggtgtgtggactggagaagcccttgaggtgaggtgttcccagagttcagagcggtcctcagttggtcctcggggccccaagggatggatgccaggtcgtgacttggaatggcctggcggcccgagcaggcgtggccctacctgggtgaacaggtccagggccttgtgcaagttggcgtgcatgcccgtggggggctcgttggtgatcttgatggcgttctccagaatgccctgggggatgatgtgggtcgccagactgagtggcgggtaccg

SEQ ID NO: 554998 - DNA, 370 bp, Homo sapiens
tggggtttccacccatgttggccaggctggtctcgaactcctgacctcaggtgatccgcctgccttggcctcccaaaagtgctgggattacaggcgtgagccacagcgcctggcctgtagtgccttctttatgatgggttcccagtgctggaagtgccagaagatgggatgctacaacacggctcaatgaatgaatgactattctggtattcaaagattcaagtgtacatccttttacccaggtcagttttaagggcaaagactattttattatctcgtgtcatttatttaactatggtcatgaccataatgagctaaagattaaactatattcatgaggattgaaagactcgggttccctgggcctagt

SEQ ID NO: 554999 - DNA, 132 bp, Homo sapiens
gataggtactggaggatctctacagtcgaccattgctccatcttaacgatatttggagtgtcagcactggtgctcactgtgtctggtgtgaactagtacagttgaggcatgcacctgcagtggtgaatacac

SEQ ID NO: 555000 - DNA, 470 bp, Homo sapiens
ataaggcgcgtctgcgtcgaggcgggcggatcacaaggtcgggaaatggagatcatcctggctaacacagtgaaacctcgtctctactgaaaatacagaaaaaagtagccgggcgtggtggcgggccgctgtagtcccagctactcgggaggctgaggcaggagaatggtgtgaacccaggaggcagaggttgcagtgagccgagatcatgccacggcactccagcctgggcaacagagccagactccgtctcaagaaaaaaaaaaattagccaggtgtgggagcgggtgcctgtaatcccagctacttgggaggctgaggcaggagaattgcttgaacccgggagacagaggttgcagtgagctgagatcgcaccattgcactccagcctgggccacagagtgagactccatctcaaacaaaaaaggaaggaaagaaagtacccagggggcacgcaaaaggcgcctaag

SEQ ID NO: 555001 - DNA, 573 bp, Homo sapiens
  misc_feature (4)..(4): n is a, c, g, or t
cggnccgatctcggttcacttcaacctctgcctcctgggttcaagcaattctcccgcctcagccttccgagtagctgggattacaggcgcgtacaaccacgcccagctaattttgtatttttagtagagatgaggtttcgaggtttcaccatgttgcccaggctggttttgaactcctgggctcaagcgatctgccctcctcagcctcccaaaacggtcggattataggcgtgaaccaccgcacccagccgcctggaatttttaagcctcaagtttgttccactttgaatgcaagaagccacctcatagatggagtctcgctctgtcacccagatgggagtacaatggtgcaatctcagctcactgcaacctccgactcccaggttcaagcgattctcctgcctcagcctcccaagtttaagggcccttgggcgggcgacattgtatacccttggggtaatagattgggccaaacctttggcccccaaagttggccaccccaaagggccgttaacaaatttttattatataggttaaattttaatattttaaaaggggtttaacggaaaggaa

SEQ ID NO: 555002 - DNA, 240 bp, Homo sapiens
ctctagaggatctccgtactgtggtgtaccgtagcaaataaataagtaataggtggaaacgatgagtgcgttttaaatcggggtagattttaaataggatggggagggagatacttaatgagacgatagccttgagtcagtccccaaaaaccactggtgccaggacctcagggcctggaatgagggtaaagtgagttaggcactctcctgggaggcagacacatgtacagggaatagaat

SEQ ID NO: 555003 - DNA, 604 bp, Homo sapiens
ttgtggatgtatgtatgaggtggtagtgtttctgagactgattctcactctgtcgcccaggctggagtgcagtggcgtgatcctgggctcactgcagcctccaccttccaggttcaagcgattctcctgtctcagcctctcaagtggctggggactacaggtttgcagcaccatgcccagctgatttttgtatttttagtagagacagggttttgacatgttagccaggctggttgaactcctgacctcaggtgatccacctgcctcggcctcccagggtagggattacaggcgtgagccactgtgcccagcctatacacagcactttcaaccaccatctgtaaagagatacaaagtacctcctgcttcaagaaagggttcctatgaatctataatccatccactaaaagcagtgaagttccattaaatatcggggctgagatcctaatttccatgtggagacaaggagacttagtcccctccataaagctgggtgtttcccttgtgtctggggtaaattcgatacaaactgcttcttttcgactcctgaatccattaattacacttttttttatcacattcacacacttccgcgtgttgctga

SEQ ID NO: 555004 - DNA, 306 bp, Homo sapiens
caggcagatcacaaggttaggagttcaagaccagcctgaccaacatagagaaaccctatctctattaaaaataaaaaaactagccaggtgtggtggtgcgtgcctgcaatcccagctactcaggaggctaaggcaagagaattgcttgatcctgggaggcggaggttgtggggagccgagatctcgccactgtactccagcctgggcaacggagtgagactctgtctcaaaaaaaaagaacaatcatggggggaaaggacactctcttcaatactgatctataggagtggtggggtaccgagctcg

SEQ ID NO: 555005 - DNA, 785 bp, Homo sapiens
ggactcagcgggcgtgaggtccggctgagcgagcgagcctgggcgagttaattgtggctgtggttgacggtggagacaccccccggagggaggcggagggaagggaggcgaggctgcactgattcttccggctcccactccccagcgccccggaccgtgcagttctctgcggaacaggccatggagctccgaagtccggcgggtcccgacggcgttcctgtccggcggtcgcgacctctgcggtttcggctgcgcagctggaggccctgcggaggatggtgcagagcgcgagaaggatatctgacggcaatcgcgcgactgtgcaagagtgaattcaatgtgtacagtcaggaagtcattaatgtccttggggaaattgaatttatgcttgagaatcttcctgaatggttactggtaaaccagttaagaagaacgggctcaacatgcttggaagagggctatattcagccacagcctctgggagtggtgctgataatcggagcttggaattaacccttcgttctcaccattcaggcactgaataggagccatcgctgcaggaaatgctgtgattataagccttctgaactgaatgaaaatacaggcaagaacttgggcaaagcttctcctcagtatttagaccaggatctctatattgttattaatggtggtgttgaggaaaaacacggagcttcctgaaggcagggatttgaccacattttctatacgggaaaacattgcgggttggaaaattgtcactggaaggctgttgcaaggcatttgac

SEQ ID NO: 555006 - DNA, 314 bp, Homo sapiens
gaaaaagtcaaatgcggctaagaacctcatagaaacctccagagaacacagtatgtattagtctctgtgtatatactcatattatagaggctccaacacctgataagtctcagggtatagtaaaaactataaaccttcaagtggtctctggaagattgtatagaaaaagattgtatcacttatgatcagactagtgtcagtatataaaatacaggaaatcacccaatgagccacaggctggactgatatctgcctgacctatggcttcagttacctaactgacaacatctgtacagaggcagatctcataacag

SEQ ID NO: 555007 - DNA, 166 bp, Homo sapiens
taaaaaaacacacccaaaagagaagaaaaaattcaacaagagagagagagagggggggccgggggggggggggggaaacaaaaaaaacggcggacagccccgagagaggagccttgaaaacgcggggccgcgcgggaaaaataacaaaagaggggggggcgtatct

SEQ ID NO: 555008 - DNA, 485 bp, Homo sapiens
  misc_feature (378)..(379): n is a, c, g, or t
  misc_feature (424)..(424): n is a, c, g, or t
ggctctcacacacacgtgcgtgattggttagttcgcctgtgcatatacccacctatgcccacagggaggtgtttgggggacacatgtcagagacgggcaccaacagctggcagctgacttggcatgggagtttctgacagtggtggagtcccacaataatggcttttagcttaccacatcctgtgcctcagtttacccctcttgtataatagagagagcttggagagactgaggacacaggagacacaggtggttgagtgttctgagatctgcagactgggaggcattatgcctgtaaaatgtaaagttaacaaaggcagaaactggtggtgggaagtggaggaggtccttaaaaagaaagatgggactgggcctggnngtcacgcctgtaatcccagcgcttggggaggctgagacagaaggntcacttgagcccagaaatttgagttcaccctcagcaacataatgagaaccctgtctctgca

SEQ ID NO: 555009 - DNA, 160 bp, Homo sapiens
ttagccccccgggacgccccaaacagtgcatgattcggctgctgcagcggagccacatggcttcttctgtgggatataaatttaaaatatgaaacaatgaatacgtcaagtaaaagggtttaaagaagaaaaataatcgagcttcctgtaatcccagata

SEQ ID NO: 555010 - DNA, 365 bp, Homo sapiens
tacctgggtcgttgtgttgtggtactctgggtactactgtcggtagacaatgtctacctacgactaacggacactaccactggacgctacgacgctccaacgacgacggtctgggactacgacgacataccggttactaatcccttacgactcacgtgacacttaacttactacctgtgacggtgtaagacagacgacaaacggaccaaagacaaagccctcaggaatgcccacaggaatgcccacatcaaaggtctcagtagacagcatcaaataaaaagcaaatgcagcagtgaaattgataactggataagcctgtggaatttgaaattagtaaatcattgacaaagctgcttcattagaat

SEQ ID NO: 555011 - DNA, 140 bp, Homo sapiens
tttgagttgtaatgtcggtcggagtacgcgtatcgatgggcagtgaggggcgaatatgatctagctttatatcggatatagtagcggtagtacaagtactctagaatatagtagatggcaattaaggtgtatcgatggcg

SEQ ID NO: 555012 - DNA, 411 bp, Homo sapiens
  misc_feature (273)..(273): n is a, c, g, or t
caaggaagaatgatccggccccaaataagaaaccctgggctggtcagcaacaacccctttgttttgagaagagaggaggaaagaataaaagaagtggggtgaagttttggtttggtagaggaaacttgaagacattttccctggaaaggaagagaggaagaggagggagatgtctgtaaggacgagcaaaccgggtgacagctgatttcctcatattgaagtaatgaaaactgcaggagtggaatgacagaacctttggtcatacttgagggngtgaagctcaaatgaggaggaaggaaaggatccaggggttagaaagagcccctgtgtttcttgacatggaagtggcctaagaccttaatgagtcctagttataataaattcctaataaaaacccagtttatccctgca

SEQ ID NO: 555013 - DNA, 873 bp, Homo sapiens
tctcgcaccggaacaacaaagcaaggaagaggagtccgagcctcgggggctctaccaacgggcgggcgggagtcctgagactgggagcgcgccgttcatcctcatccttgtcctccagcttctctttcgcatcggaacgcaaggcggaagcaggcgctggcgcaggtatcctcagcacagggttccctcttcccaacggatggtgatctagcggggggggagaaaagggttaagttttaaaaaaaccacgccaaaattgcaattgcaggaccaggtaggtggtcggcgtggggaccattccttatgttaacaagtgtggtacgtccgggtgctttaaagacacaaggggatgggtctattttacaaccttgtaggggaaggatggggcttggggggagcggagcggcaacatgttggtaatttgaataagaaggggctgatgtggtgggaacaactggtttttgatggaaagggcataagggaaaccgtatagaagttaccgaggctaacgaagtgggggtccctcaggagaaacaaatttattggtgaccgggaggcaaccagtgtgaaggaacgaacgctaaaagtttgggggccagaaggccttagaccagggtggttcgtgaagaaactagggtctgcggggtaaatatttacagattttaaagggttggtcaagcgttcgtggcaggtgttgtaactttgcctatttgggaaatccgtgtggcagaattccacaggaaagtagaccttctatgcagtttaggaactggatacacacggggggtgtatggataaaattcgtagagtacttcaagttttcagaggagttccataacgggccagtaagggtgtactggggaacataccatg

SEQ ID NO: 555014 - DNA, 558 bp, Homo sapiens
  misc_feature (138)..(138): n is a, c, g, or t
  misc_feature (385)..(385): n is a, c, g, or t
gggctctccagttaccgctttgtgcagaacgtgactcgggccctgcagctggcagcagagtttgcagcaaaggccgcgtcggagcagcaggcaaacacgtctggaggagacagccccaaggtttgagcccacctggcnccgtggtgcacctggtgacccaggatcgggccataatgacccggcgcgggcggcacaaacaacccagggcctgcgggggtgtgctcaaggtggtttcagcccacagggaaaggaaccccagctggcggtaaaaccgtcggcccttttttgtttttgggcccaaataatccccgttggtcatttgttggtgaaaggggtggggggtcaccaagggcccctccccccacgctccttgttaatttgccgngggaagcccggggtcaaagccttcaaacagcccttgagcaggagggggttcccctaaaaactttgttttagttcatttttgtccaaaaacggttttcaaattgatttttggaaaaggggagaaatttcaaaattaaattaaaaaaaaaccgaagttttccttcccatggggca

SEQ ID NO: 555015 - DNA, 262 bp, Homo sapiens
cacgaggccaagaaacagattttgctgtgacatttatttagcagctagtaacttcacttatttcagggtctccaattgacaaacatggcactgtttttcctgtactctacccatctattgctggacttctgttgtccaagttggcaaacactgggtgtgactgcgctgcatgaacgcatgcccgttcacactgctgacaataggcttacatgtgtcagattacaaatcattactcaatttgcattcgaataaactgttttac

SEQ ID NO: 555016 - DNA, 102 bp, Homo sapiens
aagggctacctcccagaatctctacaccacctgctagtctctatggagtcagggactggtgacttcgggtacctggtgctgctgtcccacgttggcgagcgc

SEQ ID NO: 555017 - DNA, 291 bp, Homo sapiens
  misc_feature (221)..(221): n is a, c, g, or t
  misc_feature (250)..(250): n is a, c, g, or t
ctttactcctggcattcagctttctggctggctgcgcctccaagccggcttactacatttcgcccgcaccggttcacattcccaagaccgccacctattggctcgataccttcgacgttgacgtggtgggcaagaacccacgcttcctgcctgatgacaaagtccgcgagcaactgggtgtcgacctggtcaatcgcctgatcacggccaagcgctacgcnaccagcaaggaaagcgccgactatctgtnggatgtgaaggtcgtctacgcccgtcatttccaacaaatag

SEQ ID NO: 555018 - DNA, 692 bp, Homo sapiens
agcgggtctccctccccagtgctatgccgcgagcggacgcgtcttgacctctgtttcgtcttggtcttattttaccctccactcttcgcctttcctgtttcttttgccaacggttttaggttttcgtccctgatcctcgccacattcgagagaattttacacttctgtagcgatggatgtcctcagtgtcgtgggtctcagcagagggtcgaaaggcgggaggcggggaggatagtacgatggaatgtaacagtgggaacacttccgataaagagtaagtgctcacgtaatcaaccaatgtccactgactgagcagttctggtaaggaagggtcattatcgccaccatcgaaactaagactacaccaggaaggtggctcctggctcagtgacatgctgagtgagctcggcctcgaaagcagtccgtgcattgctctgtagatctcgagaacgcacccacaggggcgtacttgcggtacttaacacgcacgtgctggaacaggctcctgtattgggcaaccgcgctggaatggtaaactgtctactgtcatagagagctcttgcccgcgtccacagacactacgacttacagcggcttccttgattaaaaccaggacaggattggcaatcgggacatgcaccgcacctaagctgcccgcggataggaccgtagagcccaattattccaaccag

SEQ ID NO: 555019 - DNA, 1214 bp, Homo sapiens
agcggggttaccgggaagtcgctgaagacagagcgatggtagttctggaggcctcgctccgtgtggccgaccctgaggccacagtgcctccgcggtagaccggacttgggtgactgggctcctgggctccctgaggtgaagagcatctgggggctgacgggatggaacgggtctaagactgtccaacaatcagcaccatgcagtgtgacgcttccgtgtgccagacgctgcatgccatgccccttgaaagcttgcgacacgagctttcaatgatccttggaccctgttgtcatccagtcccaggaatctcagcagagctccagttacattaacctacaagcgccaagtgcgaaatccaaggacgagaacccacggcacggaacgaagaaacctaagcgtcaagcgagaagtgaagcccagtgagaatctggagaaccgtccatctgcccaagggcattggctggtttcattcatcgaccaggaactttcaagttccctccacaccgccaggccccagggaactggaacgtggttccgaaccaagaaaacgatggctcaaacccaagccttatcaaccattcctttggaattttggcgcggaaactgggcccacatttccttggaacttggtggccgcggcacgccccaaattggctacaagtaaacgccccccttcccaggcccctgtaaactgcaaccttggaccacgtggtccaggcattggaggtgtaggaaaccccccattctatcatacgcggacccccgctttcaacgttggttccgcgctcactcccacaggcaaggctaatgaaattagcatgggagaagttcaaggcccgccaagaacctgtcccttggcttgcacgcgtggcacaatgattgcgcccagccaactccacttttaacccttccccttaatatacgaaacgaaaacagccaaagtccccttggaggcaacgcaagcgcgtccacgagacacatgccaaagcgtgggtaccacaccctttggagtccagacacactgcgaaggacttgcgatttcccatcggaacgcaccgttaaatcacatacaccatctggcccatgtggccatacacgtgcgggccacgaacttccctttaaccgacatcgtcccaacgccgctcttggcacacgtttggagcccgtcaacttgacacccctggcgctgggaaaactccagggggttatcagcc

SEQ ID NO: 555020 - DNA, 796 bp, Homo sapiens
  misc_feature (550)..(550): n is a, c, g, or t
ctgtctcttacttttaaccaggtgacatactttgacctgctccgtgacacgagtgcggtgctatgacacagactaagatcgagatagaccctagtggagcatttaacttctagttgaatgcacaactgagtacctaagcaatagcccaccaggttacttaatagctacgcaaatcgctgcaattaacacagatttcgagcttggcggccagacctcgtgagtcatgacacccaacgctcctgagctagtacgactgcttaacagacttcagccaagtctaatacgcggaagctagcgtactacgtgcaatttcgatgccaactaagcttagacgcacacggaaagcatagttgacccgtatgggactaacgagacgcaagtctctattgctcagagttccacgtatcaagcagatacggggttctacgagccgacgcagtgttcgcgatcacgagacgatcaccgactggatgacagacccgccttattacagatggattgcggtatgaggattcatagcggaccttaccaaggtccattacggtgcacntctgatgctctcaagaactcagcgagtgaatctcagggatccgtgtcttcgtagtgctaccttcgacaagttccgtcgcgctgatacgtaaagggggcaatgagcaaactagaggcgctactttcagcaatagtcgtccttctcccctggtaagactgcatagtcagtcatcgaagcgtttagataattaataccgcacattccatgcgcaagaagcagggcttgtgttagaaacaaacatgaaaa

SEQ ID NO: 555021 - DNA, 271 bp, Homo sapiens
  misc_feature (38)..(38): n is a, c, g, or t
  misc_feature (60)..(60): n is a, c, g, or t
  misc_feature (154)..(154): n is a, c, g, or t
ttactaagccctaaaaatcctctgttctgcttgtttanaccctccccaccaaccactganctttttgtcttttccagagtgtcacagagttagaatcatacagtatgtagccttttcagcttagcttctttcacttagtaatatacatttaagntccttctacgtctttttatggcttgataactcattttattttagcattcagcaatgtttcattttctggatgcactacagtttatttaggacttcttaaaataggtcaaaagcattt

SEQ ID NO: 555022 - DNA, 625 bp, Homo sapiens
tgctgggcgactctagaggacccggctcatttcaggttttcaggtatgtcctccaatacctgtttattgaaagtttttaacatgaagggatgttgaattttaccaaagaccttttctacagctattgagataatcacatggttttggtcttcagttctgtttatgtgagggaattacatttattgatttgcatatgctgaaccaaacttgcatcccagggatgaagccaactctatcatggtggataagctttttgatgtgctgctggatttggtttgccagtattttattaaggatattcacatcaatgttcatcaaggatattggcctgaagttttctttttttgttgtatctcttccaggttttggtatcaggatgatgctggcctcatagaatgagttagagtcctctaaaattgatcacataatcagaaaacactcctcagcaaatgcaaaggaactgaaatcataacaagcagtctctcagaccacagcacaatccaattagaactcaagattaagaaattcactcaaaatcacacaactacatggaaattgaacaacctgatcctgaatggctcctgggtaaataataaaattaaggtagacatcaagacgttctttg

SEQ ID NO: 555023 - DNA, 632 bp, Homo sapiens
cggaggaaaacaaaaaaaaatatatggggtggggggggggaaaaaaaaaaaaaaaattcttccccccccccccctttgttgggggggaggggggggggcccccccccccccccttttataaaaaaaaaaaattattttttggggggggtggttgttgtttttttttttttttttaaaaaaaaaaaacctctccccccgcgcgggggggggtgtgtttttttttttataaaaaaaaaaaggggttttttttttttttgtcgccccccccccaaccttttttttgttttaaaaaaagggaaggggtggagggggggggcggggggggggcaaaaaaaaaatttcccccgaagtatttttctcgcggggggggggggggggagaaaaaaaataattttcgccggggaaaaggctcccccccccccaaattgttgtgtttttttattttccggccccctttataaaaaaaaaaaaaattttttaaaaatttttcccgcgcccgccccaaaggtttcctttccgccttttaaaaaacaaggggtccaattcccacccccctgttgggccaaatctgtggttttttgctcttccccaaggatccctttttttttttttttaacctaaccacttttttt

SEQ ID NO: 555024 - DNA, 144 bp, Homo sapiens
gctctgaggatcccaaccaaaaaagaggctgcactgcaaggttgaatcctaagccaaaagaacaaagctggatggcatcacacttacctgacttcaaactatactacaatggccacatgtaaccaaaacagcatggtactggta

SEQ ID NO: 555025 - DNA, 131 bp, Homo sapiens
ctggccgcatcgtgggatcactggaacggtgaaggtgacagcagcggttggagcgagcatcccccaaagttcacaatgtggccgaggactttgattggccatttgaacagtctacaagtttaacgttattt

SEQ ID NO: 555026 - DNA, 865 bp, Homo sapiens
cttgtgtcgtgtagcgccacccaggtagaaaatcaacttaaatactatctctcctctatcaggacgtattgagaacgagactgttcgtcactacgatcctgcgtaccacccacttcctccagtctgtagtgaaataattagagaaggaacaaggattgggcgaagcagaagaccttcacctattgatcacagacattcagcaattccacagtgaagatgaatcgtctcttcacctcagagatggagcagtctctcacatgggagcaagatccggagaacaaaactcaggctccttgtgtaaaccgtctcacagcgccactctgccgaagttcccaattccaactactcgaagcgagtcgacgaagccccacattctcacgcaagagctcccagtactgtgcgagatgggcatgctgctgagaacaagtgatgtcattagtacaacgaacggacatatatgacacgaattgctgatttgacatagcagaattcagctatcaaggcacatatgactaatcttattgagcccagaggagagcaaggggatggactccgggagttgaacaaacaagaaagtgcaagtgacatgacttctacttttccagtagcacagtctctaacaccaggtagtatggaggaacggattgcagaattgaatcgacaaagtatggaggctcgtggaaaactactgcagttgatagagcagcagaaacttgtggtttgaatctttctccaccaaatgtcacctgttcagttacctctcagagcatggacttgaaggagcaagaggacaactcgaggtatctattccaggcagcaggaagccccagaaaaggctccaaattgtatgtcctggtcttctccg

SEQ ID NO: 555027 - DNA, 384 bp, Homo sapiens
gggaatttttaaggaaaaacttttttcccccggaaacattttttccccttttttcccccagtttaaattttccccccccaaaagggaaaaaaaattgggtttcccccccgggggggcccctttttaaaaattgggttccccccgggcccaaaattttcgcccaaaagggcccctttttttttttttcttaaccttagggggggggggaaaaaaccccaattggtttttccctttttttttccggtttttttttcccccccggggttttaaaaagaaaaaaaccctttgtttttggcaaaaaattttttttttttttttccccccccttttttttttaaaaatttcccttttttttttttttaaaaaaatttcccccccccccca

SEQ ID NO: 555028 - DNA, 179 bp, Homo sapiens
  misc_feature (25)..(25): n is a, c, g, or t
  misc_feature (27)..(28): n is a, c, g, or t
  misc_feature (37)..(37): n is a, c, g, or t
  misc_feature (98)..(98): n is a, c, g, or t
ctggtctacatatcaacagtcattngnncactctcgntttctccccaacacattttttaaatctttatatgcccaggctgtgaattttccaaatcttnacattctgcttctcttttaattataaattttatatcatagcagcacaaacaaagacaggctccttcagcagcttcacagaa

SEQ ID NO: 555029 - DNA, 386 bp, Homo sapiens
ctttctacgtctcatcactggcaacaactataatgtgatatgaaaatatctgtgatttctattggcaacaatatcataggtgctgtgattttctgtctgctttcataatcaaagaacatgccaaattttaactagtgaaaattaaaatataacatttgtttaccatctaaagtcaagactccctgaattctatcctcagacctctggagggaggtgtctatgacttcacattaagaattcctagcaaaaaaaaaaagaattcctagcttaaagtcaaaaatctctctcggtaaatgtcacattgtacttgaaaatatgtgggttattttcaaatatcttttgatattgatttctaacataattccacagtgatgagacgtagaagg

SEQ ID NO: 555030 - DNA, 229 bp, Homo sapiens
ggatagctggttgtccaagatagaatcttagttcaactttaattgccacagaaccctctaaatccccttgtaaatttaactgtttaggtcctaagagggaacagctcttttggacactagggaaaaaaccttgttagagagaggtaaaatatttttacacccatagtagggctataagcagccaccaatttagatagcgttcaagctcaacacccactacctatataat

SEQ ID NO: 555031 - DNA, 124 bp, Homo sapiens
ggtaaagtttaacacatttatttactgtcaaaccgtgttaaactttacactggatattagtgatgggctcattattaacaggtttacacggtttgacagtaaataaatgtgaattttttcaagt

SEQ ID NO: 555032 - DNA, 150 bp, Homo sapiens
tgatatcaaggactcacccctataccttctgcgtaatgaattaactatgaaagtaacattgtcaaggagatgccatagctgaagatctccgtacaccagacgagctacctaagaacagctagcagagcacacccgtctatgtcgcagaat

SEQ ID NO: 555033 - DNA, 156 bp, Homo sapiens
gagcaggaggcgccatcatgggagtagacataccgccataacaaggaccgaaagttcgcgcaagagcccaagagccaggatatctacctaggctgtttgtcaagttatacaggtttcttggccagaaggacccacctccacaattcaaccaggttg

SEQ ID NO: 555034 - DNA, 376 bp, Homo sapiens
  misc_feature (22)..(22): n is a, c, g, or t
  misc_feature (89)..(89): n is a, c, g, or t
  misc_feature (94)..(94): n is a, c, g, or t
  misc_feature (96)..(96): n is a, c, g, or t
  misc_feature (145)..(145): n is a, c, g, or t
  misc_feature (161)..(161): n is a, c, g, or t
  misc_feature (166)..(166): n is a, c, g, or t
  misc_feature (183)..(183): n is a, c, g, or t
  misc_feature (186)..(187): n is a, c, g, or t
  misc_feature (219)..(219): n is a, c, g, or t
  misc_feature (236)..(236): n is a, c, g, or t
  misc_feature (294)..(294): n is a, c, g, or t
  misc_feature (301)..(301): n is a, c, g, or t
  misc_feature (369)..(369): n is a, c, g, or t
tcattctgaaaatgacacaaancacaaatataaaaagaaattcaaatataatcacactccctaataaaacagcctaattaccaaaagcncacantntaacaagtaaattctaagacttaagccgtgtacggtgtgtgcaaatttncagaaacctataccancacangcaagtatcttactgcnacnnaaaacaatctataccctttcaggatgcgtgtngtaccataatcagaccntaaatttaaacattcatcaagagacctttttaggaggcgtattgtaccaagcagaccnaaatgtnaactttcatcaaggactatgtgatgtcaagcaaggcagtacccatgtatttcattcaaaaaccaatantcccccc

SEQ ID NO: 555035 - DNA, 248 bp, Homo sapiens
gaaacaaagatggctatgtccaggatggaggagtacatcgcggatctgtactcagccgagcctggggaggaggagccggcgtgggtgcagacggataggcagcactgaacatgtgggtgaggcttgtggactggaggtctcacagtggactgggcagagacccactgtttggggaacccccagtgtcaggatctgtccatctgttctctttgatcacgtttccctagagagacaattcaactaactgt

SEQ ID NO: 555036 - DNA, 192 bp, Homo sapiens
catgaaaactagaagataaaatataaaggtatatattacatatggttgcacatattacataaacaatattaaatatcgaaaagtataaatatcataatagcaatatcaaaatatatacttcatataaactcatagcagggtaaataatcaggtcctttaatatatggtgtatcagatgtctcaatcagggca

SEQ ID NO: 555037 - DNA, 423 bp, Homo sapiens
ctgatcgacaaaaatagagcgttgagaaacgtaccttgcacatgaaatgtttctgtgatcaccccattaatgttgaaaaacctgctgcttgccctggctctctctgtaattccaaaactagggacacagagccccaaatggatcattacccaatggacgcctgattctgcaacatgacagatacactatcccatgcttaagtttaaatggctcaatactgcggatgcgcacattgaacccaattgcatagccgtacgaactgtaatggtttaaacttgaacaactgccagtctgtccaaacacagacggtactcatcatattcatcttagcggacattctcattagggcaaatgttatcatatcaaatacacccatctcaatagtcagtttaaacagcatattactcttgatgaacatgtccc

SEQ ID NO: 555038 - DNA, 1162 bp, Homo sapiens
  misc_feature (1162)..(1162): n is a, c, g, or t
ggacatgcgaggctctgggaggcagcgtaaggctagacatgggcagttgagagggcgatgacattgatctcttcgcctgaatgggatataatcagtagtcaaccctagtatgcacttctcgtactagttgcacatgcctcgccgagaaaaaagttagtttaagtaggtgactggacagttaactgggttattgggcagtgcgcagtgcactattgggcgtgtgacgtttgggggagtggtagagccttgcctgagagagtctgggcagagggttggcgtgttagcacatatggattgaatgcagtcgataaatgcatagggtagtatcgtatacattgaagtccatggatagatactgataggaactgaagattggtatgtcgagactaggagggcagatcaggaaaacagttatactctgaaaaatggatggttgaaacgtgcttcgtgcggtcgtcgaagacctagtgttagttctcgagttgactcgtctcgcaatacaccatgagaagaaacatttgatgttcccatccctatgtctgggctgacccttatgctaggaatgtatgctttggaaaaagacatgacttgcatgggtacatttgcaatatcatccccatggatacagaatcatgtatccacaaccggtcacactggacctttatgcttacccaacatggcaatggaaactactaatggggatcattctacggggctatgccattgtggacctaagagggctacggcggtatgaaccgtggaccaactgttacttgaacggggccagtgttaagccgttggatacagaaacacaggtaataacgcagggtcccatggtagcaaggaactcggaagcacatgccatttttcgttgggagccaacggtgttgccgtggttgctaatccgttgcatttgcgggagggaaatcccttttaggttgtggggagtacttacggtaggaaaacctatggtagacgtgggtagttcactggatggaggtggagactcttcgtcggccttctctttggggtgtgcgaggaggtgaagacgaggtgaactaaaccgttggtgataaagtcctaggggccccagatttttcgcggagacaagaatacttatggacagggggaaaaatggtggtggttgtgtggggtatgatgn

SEQ ID NO: 555039 - DNA, 534 bp, Homo sapiens
gaattccgacagattctcactttgtcacccaggctgcagtacagtggcatgaccttggctcactgcaaccgccgccccatggcgtcaagcaatcctcccacctcagcctcctgagcagctgggactacaggtacacaccatccgcccggctattctttgtctttctaggagagacacggtttcaccatgttgcccaggctggtctcaaactcctgaggctcaagcaatctgccttccttggcctcccaaagtgccgggattacaggcatgggccagcacgccctgcagccttatctactttcttaattgtctgttgcagtttcatgtaggttaatctcatctgtctacctacccaatgagagacaggaactaaaactattagagcatctgtatactactacagacttcataggtaattttatacaatactgaaggccaaagtaggatatgtgaagcaacgtcagagatagtttattcgcttaacctaatagggaacttggattggaatccagatgacttcaaaatccggaattc

SEQ ID NO: 555040 - DNA, 1748 bp, Homo sapiens
  misc_feature (296)..(296): n is a, c, g, or t
  misc_feature (663)..(663): n is a, c, g, or t
  misc_feature (1197)..(1197): n is a, c, g, or t
  misc_feature (1381)..(1381): n is a, c, g, or t
cgtgtagccgtgtgttgcctcaaggtggtggtgttgcttactctcgttgtgatgtgttcttcggcgtcgtgtggttggctcccttcttcttactcgtgggatcccatctcattggtggtgttctttttctgtggggtttctcctcgattgtttcattttggggggaggatgattgtttgtgccacagaaggtggccatcttttcgagactccctgctgtctgcccaccggctgctggtgtgatataaattgtttggggggagtcatgcttatcccctcatgcgccgcgcgagcggncgctgtagccacactgatttatgcgacaatcggtgcgcagcgatcaaattattgttcatggtgggtggcacaaaagtgcttgcctcacgtgtgttcttatacacatcattcttctctggcgtgttgatcccctcccttgcgaccgcactaaagtttgtctgccgtttccatagagtaattctctgtgtgtatattctcccatgcagagggttgttgtctcccgtagtgtttgacgctcccccatcagtgtgtgtgtgctccacccactggtggccgacattattttgttgtgtggcgccaacaatttgtggttgaccgcccacagtagtagtgtgtcgccccccgtttttgtgggcgctgctcgcgnaatgatgttgtgcgcggccctcatcaggtgtatgtcctctcctcaagtttattcttactgttggcgtcccaatggggtccccccctcttttatgacagacaccaggtcggtgttacactatatggttggccgccagttttgtggcacaccaccaggggggcctctttgagaacgaccgccatgtttttagggagtagagggggcgacccgcgccctggtagctcgccgtgtgttgccggcgccctgttttgtccctctacgttgttgatcccccggtcgacactctttttatattgagggcgccccggtggtggccccctgtgggtcttgtgggactgtgctttccacgcttgtgctctgtgtgttttcttgtgtctccctcgcgagattggtttgcgcgaaccccacgcgtatgtttgtctatgggccgcacagtggcgccacaccctcatatttgtattgttgtttatatgggggcgcttgttgttgggggctgctccacatgtcacgctctcctcgctatatgttcgtggnttttatacacgtctttgtatatagtaagagagaaatctgtgcgcgccacacatttgtgccacacgtgtgtgtctgtttctcgctgtgtgtggcgccacgcgcgcactctgagaatattgtgtgtgtgtgcctcacgcgcgctgtgccacacagctcgcagaagatctatattcacacacagcgnggtttccacacacacccatatatcacacccccacactgtttggttgtgcccaccgcggggaacacgcggcacacaatattgtgccacctgagaggaatgttttttcctgtttatacccccacgtttgtggaaagtgtttgttatatcccttctggaagaacctcccacttatatgaattgtttataagggagccaccccgcgggctttgaaactgcaacctgaatggttattcacccacggccactgcattcctggctgtcccaagggtggaccccgctcccagacttttgggggaattctcccctcctgcttttttgttactgaatgaaataaaagttgttccataaagacttttatccccccaaa

SEQ ID NO: 555041 - DNA, 415 bp, Homo sapiens
acccctaagcaaaggtattgggaaagtgtccaggttggtgaatgtgtccacttgccaggaaggtgatgcatccaaaattccacggatacagaagttcctgtacctaggaccattggctggactttgtcctatgaacctattcatctgactgtcatactgttcatttgtatcctttagaatatcctttataataaaccagtaatacgaagtgttcctctgagttctgtgagtggttatagcaaattatcagacttgaggaggggtccacgtagccaggtcagaagtataggtaacctggggactcactacttgtgattggcatcagaagtggggagcagtcttgtgggactgaacccttaacctgtagggtctgcactcaccttgggtgtcagaattaaattgaattgttgatccc

SEQ ID NO: 555042 - DNA, 270 bp, Homo sapiens
tttattgatgtgagcctgccgcgcttctttgcgctagagctaaagctacatacaatggctttgtggccacaattctcccgtacatttctgtacctgctttagtagtctatacttctgggagaggaaaaacatacaaaaccaaaccctatatagctgcgaccaccctccatcataaccctttcgcaacattagaatagattgtaaccacaattgagaaaaactctattccgtgagaatgttcatccatccaatacccaattcatctaagga

SEQ ID NO: 555043 - DNA, 169 bp, Homo sapiens
acggagtatcgcagtgtacgaagtcctcgtcgccgacgtgcaccttgatagaagtagtatgtccccgcgaccagctggctcttgaatgacactggccttaaagacagtggaacttcttgtatatctttctcttcaagatgggacctcacttggcccttgccatatgcaa

SEQ ID NO: 555044 - DNA, 317 bp, Homo sapiens
  misc_feature (32)..(32): n is a, c, g, or t
  misc_feature (35)..(35): n is a, c, g, or t
  misc_feature (43)..(43): n is a, c, g, or t
  misc_feature (73)..(73): n is a, c, g, or t
  misc_feature (179)..(179): n is a, c, g, or t
  misc_feature (199)..(199): n is a, c, g, or t
  misc_feature (239)..(239): n is a, c, g, or t
  misc_feature (265)..(265): n is a, c, g, or t
  misc_feature (271)..(271): n is a, c, g, or t
  misc_feature (291)..(291): n is a, c, g, or t
ggggtcggggagacgctgggggccctcaacgnggncctggggncaggcggtccggtgtggatcaaggagacgngcacccgacacctgcgttcccgagactttctggcaccgcaccgagagctgcaggcggtgtcgatgacggccaggttccggagcatttgctccatgccctcgactgnctgcagggccccggtgtggncccggtgctgcgctgcgcgcgacccccgcgggtctgtctntccaactgcagcggtccgccgtcttngagcgngtcctcagcgccgtggccgnctatgccacgtccggctagactgcct

SEQ ID NO: 555045 - DNA, 131 bp, Homo sapiens
cccaggggccccatgggctgagcagggggggtccctgaggtttagcaaaaaaaaaaaactttctccatgaactcccgtttgtggagaaggctgcccttgaatggcctgtgtttttcaacccagaaattgta

SEQ ID NO: 555046 - DNA, 228 bp, Homo sapiens
ggatcgtacatgctgatatgtcttcatgacgagtagagctcgtccaggaccttcaccaaatcatcttggagctgctggccgacttcttaactcttttaaagagtcttcctgagatcctcgctgacttgtacaaactcgaggaatgatattattcaggctagatgatcacatcagggatggtatggtcccatgctttcccaacttcacctggatttaacgaggagattc

SEQ ID NO: 555047 - DNA, 669 bp, Homo sapiens
caggacatgactgggaaaacctgtgcgtggagacagagtgttgtgggctcaggctttaccagcaaacacctcagcacaaaaggctgaattgatcgccctcactcaggctctccgatggggtaaggatattaacgttaacactgacagcaggtacgcctttgctactgtgcatgtacgtggagccatctaccaggagcgtgggctactcacctcagcaggtggctgtaatccactgtaaaggacatcaaaaggaaaacacggctgttgcccgtggtaaccagaaagctgattcagcagctcaagatgcagtgtgactttcagtcacgcctctaaacttgctgcccacagtctcctttccacagccagatctgcctgacaatcccgcatactcaacagaagaagaaaactggcctcagaactcagagccaataaaaatcaggaaggttggtggattcttcctgactctagaatcttcataccccgaactcttgggaaaactttaatcagtcacctacagtctaccacccatttaggaggagcaaagctacctcagctcctccggagccgttttaagatcccccatcttcaaagcctaacagatcaagcagctctccggtgcacaagctgcgcccaggtaattgccaaaaaggtctaaaccagccaggcacg

SEQ ID NO: 555048 - DNA, 190 bp, Homo sapiens
gtggtgttaagtgtgttacgtgttgatcctgtccctcaggtttggaggtagtctacttcatttacaggtgaacactcccgggagaggtaaactaagttatccaaggttgcacagttgataaacaacagaacagagattcaatgttggtgaatttgatgacaaagcccaagctctttatcttgctcattgg

SEQ ID NO: 555049 - DNA, 518 bp, Homo sapiens
tatcctttgtctagcatatacacgtgtatgcactattcactatgttagtcactatagtagccatcttggttatcagatcgactgttgggatattgcagtgcttgtgtcgaagtaacccctattttacttaataatggccccaaaatgcaagagtagtgatactagcatactgttgaaattgttctattttattatcagttattgttaacctcttactgggcctaatttataagtcagaatttatcataggtatgtatatatagggaagaacatagtatatatgggatttagtactttccatactttcaggcatccattgggagtctcggaacttattttccatggataaggaaggactcctgtatccatgagctgtgggacaactacaaaaggcgtaacatacacacataatgggaataacagaaggagaatagagaaaggaacagaaacaatatttgaaacaatacggctgaaaatttctccaaattaatgtcagacaaagggaaacaccgggtacc

SEQ ID NO: 555050 - DNA, 266 bp, Homo sapiens
agatcaccttgatcacctttagaaaaattcacaagtccccatccacaaaaaaaaaaaaaaaaaaaaaattatcagggaataaaaatagatttggaacaaaagggaactttggggggcgggggggggcatctcattttctatagcaccagtatcaccgggttcgcctttagcaccagggtgggccgtcagcaccgggggggccagcaaagccagcggggcggggggggtgatctccggcacgatgagggtgatctcctgcacgatag

SEQ ID NO: 555051 - DNA, 698 bp, Homo sapiens
gggcaaccccaagtgtgtctccattgcaatgtgtacttattctgtaggtaggatggccccacaatgtgggttaaaatgtcatccataggtttctgatccacagctacagtgtgtatcttactaccagagtcacgcttgtggtccaatctgtgacccttcctgcccagtctgagtggtggccagaagagggatctcccatagtgctctaggagtctcaggcaaggtaggtcagggctattgtgcggcagtggtcgtgagtgtcgctgtgactcaggatgaagggctagccttaatgacccatgcctttcccttgctgcacctgcaaagagcgtgactcgcagcaaggaaattcgcaccagcaattacggcctgtgttcattgcgtatagctggtatgatgcagttctctcacatagttctttaagttatcagaaaagtatatgaagttgataacttcgcatggaacgtggtactgaatatcttgcgagtgagcgtcgtccgagcgtggccacgccggatatatgagtctaccttgcacagcgctacgaggaatctattacaaatctcatacatagcagccagagtggatgatttcgagccgtattttgtaggctagtaatgacccttatacgtgaaatcatgttcggaacagcatagaagccattagaacacaccaacaattcatggagttagggttag

SEQ ID NO: 555052 - DNA, 627 bp, Homo sapiens
  misc_feature (6)..(6): n is a, c, g, or t
  misc_feature (98)..(98): n is a, c, g, or t
  misc_feature (101)..(101): n is a, c, g, or t
  misc_feature (105)..(105): n is a, c, g, or t
  misc_feature (228)..(228): n is a, c, g, or t
  misc_feature (231)..(231): n is a, c, g, or t
  misc_feature (251)..(251): n is a, c, g, or t
  misc_feature (260)..(260): n is a, c, g, or t
  misc_feature (271)..(271): n is a, c, g, or t
  misc_feature (276)..(276): n is a, c, g, or t
  misc_feature (306)..(306): n is a, c, g, or t
  misc_feature (333)..(333): n is a, c, g, or t
  misc_feature (336)..(336): n is a, c, g, or t
  misc_feature (363)..(363): n is a, c, g, or t
  misc_feature (376)..(376): n is a, c, g, or t
  misc_feature (386)..(386): n is a, c, g, or t
  misc_feature (392)..(392): n is a, c, g, or t
  misc_feature (397)..(397): n is a, c, g, or t
  misc_feature (509)..(509): n is a, c, g, or t
  misc_feature (514)..(514): n is a, c, g, or t
  misc_feature (559)..(559): n is a, c, g, or t
  misc_feature (615)..(615): n is a, c, g, or t
agcggncctgccgggaaaccccctccccatactcctcccccccctccttcaccagccgctccacctcctcccgcttgatcttcttcttcctctgctgnaangccnactggcctgcgatcatctcgtacaggaggcagccgagcgcccaccagtcagggctgaacgtgtaccgttcattcttcaccacctccggaggccatgtaacccacggtgcccacacgccctttnatngtctggccctcgggcacatncacagctantcccaggtcanagatncggatgtggccgtggtcatccaccaaaatnttctcgggcttcaagtccctgtacacnatncgctcccggtgcaggtccgtcgcaggncacagcagatctngggggcatanaaaacngcccncacttcggggaaaccagcctggcccatgtggtagatgtggaacttgagggcgcccccgttcatcagtgtcagcaccaggcacagcgcgtccttggtctcataggcgtaggcnaagcncactacaaacctactgttcactttctccaggatctgcttctcgtncagcgccatggcctcccctttccgcttcttgatccgctttttctctagcctcttgnaggcatacatct

SEQ ID NO: 555053 - DNA, 214 bp, Homo sapiens
aggccagggtggccaacagtggctgggtccttccgggcccctccgtcctcctttccctgagcaccttcatcaccaaaggctttaaggaaccccgccatgtggcagggcacaggccctgttcctggtgaaccttggaccccagcatgtcagtgctttagggattgtttactccagggatttttttcaaaatttttaaacatgggaagttcaaaca

SEQ ID NO: 555054 - DNA, 481 bp, Homo sapiens
cgggttatgtgactataccatcatcattaatacaccacaccagcaggactgacatgcccactcttcccaattgcatgtatacccacgttacactggcaatatgtggtgcttctcagtataagattatggctccataatactgagtgaaagtaaattagaacccaatgcttggcttagaagaggtatcaaagcctaagcaggtaaggattctaggactcaaattctgctgaaattctccccttcttttcattcattgtgtgtatatttctctttgagtcttcggacatatttattatggctgttttaaaggccttgtctggaatttccattacctggatcctcctcagggtcagtttctattgaatgccttttctctctagattatttttagtcgtctttgtgtatcggtgatctttgatggcaactggacattatacattatacattgcagagtctctggattctaccacaataacccgga

SEQ ID NO: 555055 - DNA, 290 bp, Homo sapiens
acagttgatcagagctgcatgaagggaacacatggcagaagtgggggtgggagcaaacctagctgggaagagctgagtctcagcaagtcagtcctttcagcgggtcatgacatcacgggctgctcccacgggacacacgtggccattaccgtgtctcacacgtggggccagacgccagcacttggacggcaacgctgtagacagtctctcagcccatcagcgtgccccctatgctccccatgctgacatgcttcatcagcctgaggcggttgctttcctgctggcctctg

SEQ ID NO: 555056 - DNA, 564 bp, Homo sapiens
  misc_feature (464)..(464): n is a, c, g, or t
atccaatccaaggttcccaaatcgcccgcacatccaccgaggatgcctcctatataggaaaatccctaagttttccctggcgcccgccctctcccccttcgaccgtactagtaacgagagggtggtaggcttaagacccgtttctcgctaagagaaggggcttatcgtctaactttacaagaggaattccgccttgcactcatgatgcgttgtctttgctgtatactgaagtgtcgtgtttggggaagcgggggggtatggggtgcttaggtagacttatgttgtggcgttggtgttgttagagatgtctactttccgaactaggatagttcgttcgttgttctgatcctactttgatcctttatggtttataatggttgtacttttctttttggtgcgggggggtatgtgggggtgggcgcttaggggaacgggggggggggggggggggacaaccactctgngaagtccggacttgcatgcacatacgtacagcatcgtgactcttctgtgatatcgcctgggttcggttcgctaaccatcattttgcggcatcatagctaa

SEQ ID NO: 555057 - DNA, 163 bp, Homo sapiens
atgattcggaacgcgtgaattcacgacaggcgggcttgaaggcaatcttctttatgatggccgtaacaacaagcccgacccaagttccggtgtctatctcgaaggcgatattcagccattctacgagtttcaacgcggcaattttgcaacccgtttcactgct

SEQ ID NO: 555058 - DNA, 294 bp, Homo sapiens
gcaggacaaaggcagagaaggcactgcatggtcctgcatgccagtaaaactactcatgtcagctgttctgcaggatcccatgagaaggtgagtcaccagaaaatgcagtttccacatcctgatgatttcatctccctaccccaactgatcaatttctccaattttccagcctctcaccctccacaatccccttaaaaactgtagcccagaactctctggaatgatgaatttgaaggtttgctcctgtctcctcactcagaagcctgtaatcattaaactctttctctgatgcaa

SEQ ID NO: 555059 - DNA, 380 bp, Homo sapiens
gtcccctactttgcaaagggctccggggggccagtgcccactaccagccccttgatttttcctccaaagtacagtttttggggctacccctataaggcccccccgttttattagcaaaattgcggcggcgtggaacccagcctgaccccttagagttgacccccgtgttgccttttccaggcaggcctggcctttgccctgggattggggcgcccagggcctcgtgcctttttttttggcctagcctggccccctcaggacctgcccagcctttgccagctcctttggcatccgcccttttttccctggggctggggtgggggtggcagggaactgggacctggaaaaacaactcctgtaaataaaaccctttatttgta

SEQ ID NO: 555060 - DNA, 152 bp, Homo sapiens
atcttgagatcccgtgtgtcgagtaagagctcaggtggaaaaggagggagctactctcaggctgcgtccaggacagtgccagggctctgatgtgtctctcacagcttgaaatgcctgagacagctgtcttgtgcagggacttgagatgcagg

SEQ ID NO: 555061 - DNA, 142 bp, Homo sapiens
tgcctagcggtattggtgcgtgcactgtgtctcgacgcataccagtcacgatcggcgatgcgcacccgctccagcggtggcggatatcggcgtcgggaccggtcgcgcgcagaaccgtgcgcaggctggaaatagcgcttga

SEQ ID NO: 555062 - DNA, 602 bp, Homo sapiens
agagagagtgcgcgagagagagataccgctctagattctgagtctagatgaccgtgccgactggacagacgttgatgagagctgctagagtttttgaatttggtggtgcagaagtcctgaaattgtgatcagatattgcagtaccgatttcagacatacatttgctctggtacttatagtacaataccactcttaccctatactactgggtcatatgtggctgtggtgatagaagctgttgtagattatgcatctgcttgtacgaaaggtgacagagttttcactagcagtacgatctatgtgggttttgcagagtatgctcttgcagtacaccacactgtttacaaactacctgtactggactgttaacatggagctgccatcggcattccatattgtactgcttattgagctctgatccacagtgactgtgtgacagctgtagagagtgttctggcttatggtgcaacgtgaaggagttgctattatgcgcattgcctgatcgtttgagcttatggtttagagatttttgggcactgcttggtacttgatcgaatgacagcaacactgctcttgactaagcgaggcccatgtgtgctctc

SEQ ID NO: 555063 - DNA, 437 bp, Homo sapiens
  misc_feature (24)..(24): n is a, c, g, or t
acggtgtctggggacgagtactanagctcgctgccctgtctagtatcattaactgtaaaactaaaaacgctctaaaatataaagtctgttcgcttttttacaagtaactgacatgaatacacttcttcttcttcttttttttttccttgtaccaggctggagtgcaatggcatgatctcagctcaccgcaacctccacctcctgggttcaagagattctcctgactcagcctcatgagtagctgggattacaggcatgcaccaccacgccggctaatttcgtcatctcagtagagacggggtttctccatgtaggtcaggctgatctcgaactcctgacctcatgtgctcctcctgccttggcctcccaaagtgctgggataacaagtgtgagccacaatgcccagctggctcttctaatttttattttaagtctat

SEQ ID NO: 555064 - DNA, 1093 bp, Homo sapiens
gggcgtgatgtctcacagaaagttggtccgcctgcccagacgatgggtccctcgtgcttcctgcctcgtgaagcgcagcagcagcgcgatacgtggagacaggcgaatgagctgtacccatagaggcacgacccagtccagagaccggttccagccgtcaaaggccgtattcctgcggactacaagggcgtggacatgcactcacaatcgatgccgcggcaagctcgaacagcgccgaggcatccgacggctgaaccaagagaggagagcggtgagacggctggttggaacacatgtgttacgatagacagcgctagctcgcaagtgaggtcggggtatagctgggtcactatgttgggcgcgcatagcagtaggattaatgcgcactctgtaggcggctttcctgtgtatccctttcgatacgagctggattctgtctgggcgtagaacgcgagcgagttcatgtttgacttgaacattgccaacaaagacagcgacttgctccccgtacataacatgcacacgcattcagccacacgtaccacgcctgcctcacaggggaactgcaagagggacgccctatgttacagcgcaacatgtgcgcatatatcgttgagaccaaaaggaacaccaaatgcgggccagcggcacgttgcacagagcacagtcgccggccacagggacccagcgccagggcgtcgggcggagggacaaaaaggtgaacctgactcacgagggaccgaggggcacactgggacccttggaacacggtgtcatgacctgcgggagccaaaagagtacgttgcgcacgattaccgccggctgagggagtgcaacgtcatagggagcgacggcaacgcaaggtgctccgagcgagaacatggtccgagcgcctaggagacatacatcccccttgccgtggactcggacccacgagggaaacaggcacaaaaggtggcgccccaccaccctaggtaagatgggcgcagcgcaacattcgcccagagggtgtcaaacacgccgtgctacgcgcacacaaccgtggcagggaggcgccggaacaaaacagagtcctggggggcaaccgccggga

SEQ ID NO: 555065 - DNA, 880 bp, Homo sapiens
ggttgagagctaagcagacatcaggacttaccagctgcagagaggagctacccactgtgggcttcgtctctgctgagagctgaacactcactgggacgccctgcctatggaaaccagctgttcactctgggtctcctctgagctgttctgtcgctcagtaaaggtcttcttctgcttactcgccctccatttgtctgccttacctcattcatcctggacacaggacaagaacttgggacttgccggtatggtggagctaaaatagctgtaacacaaacaggattgaaacatgccccttgctcgccacattgtggatgacaagagcggagggaacgaaaggagagaagatctgcgacccttcggcaaacccagacttaggagatcggagagccaagactgtgacacccttttctggggctctgtggttcctggcgtctccaagcttctgggcacctcggctttccccggtgccagtcgtggaagctgcttgtgcagagtcttgctttgtcacccaggctggagtacagtggcgtgatcacagcttactgaaacgtctgcgtcccaggttcaagcgatttttctgactcaacctctggagtaagctggaattacagtgttagcagtcactgatgctcaaacatgagaaagacttggacatccatcacgataagaaaacgctgcccaaagtgttagactaataagtgacaggggttgggacaatgaaacccaaacatcaaccttcggaacaagtgagttttacaacgctagattatgctaatcttatcagaacaaaacacgacattgttcgggcacggtggctcaacgcctgttatcccagcactttgggaggccagcgggccgatcatgaagtccggacaag

SEQ ID NO: 555066 - DNA, 755 bp, Homo sapiens
aggggccccggcctgctctccctccctccccccatctcctcctccgctgtgccctgctctctccggaggccctcctgcctcattgctcctgtaattttggtctttcgagtgccttggtggtttccctgatctcccgtgatgatacagagactgtctcctttttttttaacttgtgacaatcgtgagcttactgtatatccattttcgtaagtataattatttgcaagaccaccccggacaggccccagctctgattccttcaaggcccggcctgtccggggccaacattccacaccttgcggtttgaaacagctgttttgcccacatttgctgcaggcttggctgtctcctgcccctggcctgcgccagtctgtgcctatagccgccagccgtggggcccggggtccctgctcggatgcccgcctctgccttctgatgccttaaacagctggggcccatggctctgcgttgccacgagtcgcagatgccaccgtctctgtgtgacgcttgatctatggaccataacagtctctggccttagggattgggccaggcctacccatgggtctccaacctggggacaagtacaggggggatgtcttcatcttggctgaccgtgccccgactgcccctcgtaccgggcctccgtgcagcgatgggcgtctctgccagtgccctgtgtctgtctgtggggatcgtactggttgcctctgccggagctctgtgtggacgctgttgagatgatctgttcgctg

SEQ ID NO: 555067 - DNA, 188 bp, Homo sapiens
  misc_feature (7)..(8): n is a, c, g, or t
gtggtannggtagtatgtaggagttgaagattagtccgccgtagtcggtgtactcgtaggttcagtaccattggtataataattacatcacaagacgtctgcactcatgagctgtccccacattaggcttaaaaacagatgcatcccggacgtctaaaccaaacactttccgtacacgactggttgtg

SEQ ID NO: 555068 - DNA, 344 bp, Homo sapiens
gaccaaataaataaaaggtacattttcaaggagaatcagaatcattatttgataagattctgggctgggcgcgctggctcatgcctgtaatcccagcactttgggaggctgaggcaggcagatcacctgaggtcaggagtttgggactagcctggccaacatggtgaaatcccgtttctactaaaaatacaaaaattagccgggtgtggtagcaggcatctgtaattccagctacttgggagactgaggcaggagaattgcttgaacctgggaggggcaggttgcagtgagctgagattgcgccactgtgctccagccttggtgataaagtgagactctgtctc

SEQ ID NO: 555069 - DNA, 465 bp, Homo sapiens
tctctggatccatgaccatccttttccttctgttttggggacatggtcttgctcttttgtccaggctggagtacagtggtgtgatcatggctcactgtagcctccaactcccaggctcaggtgatctcccacctcagcctcccgagcagctgggactacaggcatacaccaccaagcccagccaatttttaaaatcttttgtagagatggggtctcactatgtttcccaggctggactcaaactcttggactcaaactcttggactcaagtgatctttctgccttggcctcccaaagtgctgggattacaggcatgagccaccatgcccagcctgggtcttcattttcttcattttcataaaggttcccatgtcaggtggaggttgcagtgtgccgagattatgccacggactccagcctgggcgacagagtgagactttgtcaacacaaaaaaaacaaaaacaa

SEQ ID NO: 555070 - DNA, 1716 bp, Homo sapiens
  misc_feature (1)..(1): n is a, c, g, or t
  misc_feature (1209)..(1209): n is a, c, g, or t
  misc_feature (1418)..(1418): n is a, c, g, or t
ntccccccctgctagcaggagcgacgacggcagcgagggggggcggaggcgcgatgcgcttacgtttgtctgtgtctgtatttttatttcgtgtgcttgctctcctgtctggtgttgttgttatagtgtgttctctctgttttgtgttaggtcggtcttgtttcttcttctctcgtggttgtttttcttgttcgtctgactatgtgtttctcactcgttagatggtgtgcgttcatgtcacctgtggtcttttatcctcattcttttcttcggtgcataggttgttttgttttggttgctctctccgtgagtgtttctgtgttgtctcctccctatctgtggtggtggtcttcgtgtgccttcttccccgcccaggagtgcgcttgtggtccgccgaatcaccccgcatgtgtgttgttgttgggcgcgggtccccgcagcctggttggtaccccctggggcgctttgtttcgacgactcagggtgtgctctccgaatagggtggttgctcccttgctctccctgggtgcgcctccctgcgctgtccctttgtgtggggtgtttctcagtattcacgtttggttgtcttccttcttctggggctccccaagatgttcctccctcccttggggggatatttgctgcgggtgtgttccatcatctcttgggggcgtctctcgctgtgtcacagccctgttcccgggacgagatgtggtggagtgatcccttcccacttctcgcgggtgttttttttccggggttgttcggcgctccctctttcagtgtggtgggtcccgccccgcgccgtataagtgcttttttttttagtccgcgcgggcttttattgagcgtcctcaaatgttgggcggggagacaacacgccccgtgtctttggtgagcccacagcagaccctttttatctctgggcgcgcctccccggtttcccccccgcgtttggtgagagattttgtgcccctccggcctcctttattatttttgtgtctttgttgttgtgtgtgttgtgtgtttttttgcgggttgtgttgtctttctgtgtctgtcttggtgctcttgagccttccacggggaggttttatacaacacctcgggagacgccggtgtgaaaaggtggacccacaccacgtctccggttttggagtgttcgagagcactttccccgcgccacaggttgtcaccacacatgtgggncgcgagaggagcttttggagttcgcaccacttggtgttgttgtgtttgtaattaagtgtcacttgtccacacataatgaagaatcgcactctgttaccacaggaaagtgcccctctcgccactcctataaatagccaccccccacgctttcttctctctaaaggaggaaattggcccacagtgcctttttcccacaagtgccacacacnccaggggagaggtggagtaagcacttgcttttcgtggtgaaattatagtgaaacgccaaattgtttgttaatcttccgcctctaataacttttttattgttgtgtgttattcttgagatgatgaggcctctcgggcgcccccctctccccctctttttgtgccccccacctgagatgtatgtaaggcttttggtctccctgggagtggcgtggaggccaacccgggcttaccctgtaccctgacttgagacccagttgaatataaagtgccccccccttaaacaaaaaaaaaaataaa

SEQ ID NO: 555071 - DNA, 108 bp, Homo sapiens
  misc_feature (16)..(16): n is a, c, g, or t
  misc_feature (104)..(104): n is a, c, g, or t
ctcaattcggccgggncactagctggacataggtgccgctactacgctgagctaattttatattttttgtagagattgagtttcactttgttgcccaggctggntctc

SEQ ID NO: 555072 - DNA, 309 bp, Homo sapiens
ttccagcgacgctagacccaccacgattgactcaggacgacagagaaggtagataaatctatatagcaaagagattcagcaaagggactgaataggtaatcaaaaaaagaaaaaaggaaaggaccatgaaaaacaattgcccaaaaaagaaaagcctggggccagatggctccaggggtgatttctgccatttttcaaggattagccaccaagtctgctcaggctctttcaaaaatctggaggagggggtattattcccggagcttattctatgacaccggtttggccctgatacaaaggccagcaaaa

SEQ ID NO: 555073 - DNA, 167 bp, Homo sapiens
  misc_feature (29)..(29): n is a, c, g, or t
  misc_feature (38)..(38): n is a, c, g, or t
  misc_feature (40)..(40): n is a, c, g, or t
  misc_feature (46)..(47): n is a, c, g, or t
  misc_feature (67)..(67): n is a, c, g, or t
  misc_feature (106)..(106): n is a, c, g, or t
  misc_feature (120)..(120): n is a, c, g, or t
atgtgtaagtatgctgctggaggacagancaagagacngnacccannccaatacatccctaatggangaccatggcatagagaaggagaggtgagacttgctggantgacacttacttangacccaactacagctgctatacagaacggattttatccttcaccata

SEQ ID NO: 555074 - DNA, 193 bp, Homo sapiens
ctcacaacattgccagtggcacacatgtcgacgaggactgggtctaccagttccaactgcttgtggttctcacccctgaccacaccccacccgagtgtggccagaattcccttatatgtagcaaaaacgacagctgccgcgtgacactgaacacacattagcaccatgcacacattaaaatgcagcatgctca

SEQ ID NO: 555075 - DNA, 305 bp, Homo sapiens
gcaaaattaacccccttaataaaattaattaaccactcattcatcgacctccccaccccatccaacatttccgtattttgaaacttcggctcacttcttgcgcgcctgcctgatcctccaaatcaccacaggacttttcctagccatgcactacttaccagacggctcaaccggccatcactcgagacgtaaattatggctgaatcatccgctaccctcacgccaattgcgcctcaatattttttaactgccccttaccacacatcgcgcgaggcctatattacgggcatttcactactcagaaa

SEQ ID NO: 555076 - DNA, 1182 bp, Homo sapiens
gactttgaaggattgccaccagcgttggtcgcgaataagcaagggctgtgtttaatacggtgggccccactgagcctttatgcgggttcctatagggtttatacaatggcccttgggttggctcgtaaattttcgggcacacaaggggggaaaatccccttgggggtataacggcggcgttcacatgttacgtgtgtcaagacccatgggggtgtcaccgcaggacacttagggacacagggggccttcttataagtattgccctcctgcatcaggtggtcctcagagtaggttattggtagtcggggatttctctcgggtggtatgatatgaataggaagtgggtgctgaacggcgcgcccacgttcgaaggggtcgccttcttgtggcccaaaggggcgtaattgcctcgtgccgcgggaagttgtgttttctgcagacacgtaccctgtcacacatgtgttgccacgcgtccccgtgcgcggtgtttgtaagcgaacaaagccccccgagcgtatcgtgttgaaaacctaactctccaagcgttttttttccgcaaaacactgtttttacacacccgagacacaaaggcagtttttttctcctatatgatctgccggtctttttgaactgtggaaacactgtgcttaaaattttcggtgtacacatcccgcgaaatttccccgagggaattgtgtgacccccgcggagatacggttcgtagtgtaatcaccgcattaacgccgcaaggaaatggattgtgggacacgtgtatacgcgggtgtttccgccgaacccgaggcccttgcacccctgggccaaaacccacacgggggccaccttgccccaacccgggttcccgcacatggcccgcgcgaagccccttggctttccacacgccacagcctgtcccgcattccacacccggcttggcacaataattttctccagaagcgattttccagggtcgacccgggaagaaggaaaggtgagtatgaggcatgcaacacaggggtgcgcaccagccaacgtttctctctctctagacctcactgggcggcaaagaaggtttctcccggattccagcctcacagacaaagtgtgccctttgaccctctcgggaaatgaggagagccccccattggacccatgtttgcttagtgtcttcacctgtattttcct

SEQ ID NO: 555077 - DNA, 179 bp, Homo sapiens
gatcgcaggtgtgagccactgcacctgggcctataattacttttaacataactgatatggtttttctgtgtaccccccatatctcatcttgcattgtagctcccataattcccacatgctgtgggagggaccctgtaggagataattgaatcatgagtgcagtttcccccgtaccgatc

SEQ ID NO: 555078 - DNA, 145 bp, Homo sapiens
  misc_feature (23)..(23): n is a, c, g, or t
  misc_feature (119)..(119): n is a, c, g, or t
  misc_feature (126)..(126): n is a, c, g, or t
tgggtgatctagcaggagcttantatctctaatcttggtgacagatagttagagctgaaaatgctgtttaggggcccaaggccagaagactgtacaaaacacctttgagtctactgagncttattntggactttgtatttccctg

SEQ ID NO: 555079 - DNA, 179 bp, Homo sapiens
ggtcggtacctgcttactgggcgtatgcccatttccgtaacactcacaaaactaactaatatctaacatctcagacgctcaggaaatagaaagcgtctgaagctatccgtgcccgccatcatcctagtcctcatcggcctcccatccgctacgcccccggtgtgctgggtgatccgtct

SEQ ID NO: 555080 - DNA, 1570 bp, Homo sapiens
taccaaacgcccactctatcgtctgatccgtcctaatcacagcagtcctacttctccatatctctcccagctcctagctgctggcatcgctaatactactaacagaccgcaacctcaaacaccaacctctcttcgacccctgcctggcaaccaagcacaacccacaatctctactacacaaacaccatatacctagaactcccaccccagcgatcaaccccttgacagtcacaatcatccctctatccctaaccaagcgccctcacaggaaactaaagtcatcccccatttactcggccaccacctctaccatacacatcccgaagagatcacaacatcgactacccaccttcgtgccacaaaccacatacgcgctattgacacccctcgagccataccgtgaccaactcgcaacattcggcccctaccccctaccggcgcctccacacctcccgacgccttgcctcgccaccaaaccccaccacctcactttttcacaaggacaagcgccacacttaagcaccctccattaccaacctacaacgtttcagcccaacttaactacaacaccaacctatacgcagaacctaacccaaatctcaactcccaactccgactattattcccccctccaacccggacaggctccccacagcacaccctcccaaagaaccatggcagcaatccacccccaacaaacatcccaacagagacaaaccaacacacactgcaaccaccaggaaaaccagagacataggccacaaacggacctccctgcaaagcaccccaaaaacccacctacccacaaccagcacagcataccaacacccccacccacacagcaacacaaaaaaaaaaacaagaacaagaaaaacagacaacagacttcaccagcaccagcaaacctatcgatccaccaccacgacacacagaaaccaccacatacacaacacaacaaacaccacaacaccaagaccagaccaatacgaaaaccaacacaacgaaacgaccaaaacgacgcatcccacgagacaccagctaacgcataccgacaacacaaaccgaacagacaaacaaaaccacgagagtacacacactacacaaataacaaatctcgtacatacgtcacactactcccacccacacacaacagcaagaacccacaatccatcgtcatcgcgtagcaacaccacccgccagcacaccgccataccgacacaaatccaaccattctacgcatcacgcacgaacatctacagcgacacctcaactatcaccaggcgctaccacactctactaaacctcaggcaccacccactacaccacaagctccctcgcacagatctacaattcacccgaccttcaccaccacatacgtgataaccacacacacatacacgcatcacgccacaccaacgtatcctccaccaccactactctccatcatcaaactactcgaactcgcgacccaactcactccaacaacaccacaccacgcaacacagctacactcccacaccacactccaccatcccacacatatcactccatacagaccagatcacacaca

SEQ ID NO: 555081 - DNA, 1491 bp, Homo sapiens
  misc_feature (390)..(390): n is a, c, g, or t
ctgttcgtttttactctgtctgctgctccccttagtttcctctttctgtgtttaccgtcggtctcacgttgtggatgatattgtttgtccgtttctttcttgccgccagtcggatattccgcactgtttgccccaagtgttttctacccattttttttagtgctctaaccctacctactctcctccttcataacacgttgtggcgtgtaggggtgagatttgtggctcaccaagccacccttttctcctgccatagtatggtggtcgcctttttttgttccgccgtcccctccctctgtcccacggcttatttcaatttcgtgttgtacttttcagtttccacctgggtccgcattctctggatgtcatcgtcctcatgtttgtggtaantcctcctctctacttgttgggtatttctcccccattcctgtccacagcaccacccgacgttttaggataaattggtccgggaatgtccccgttttgataataaatggtctccctagggaataccccaaacacaaggctttgtgtgtggagaaacgtgatttgttttatagagtgaaatatttggtgaagcagcccttgtttttaacacaccttgtttttgtgtgtgtggacgctgccctcataaaacctttaattgtttcctaaacccccaattttggacgggaaaaagacacccatggtgttggtacccgagttctctctctcaaaagggagtcttttatgaatctctatgtataaatttactccagtttgtggactcccatgcccgcattctcccaggttgaccctggggtatctaaattacgcccacgaagggataatattatatatttccaattctgttgcttatatatatatgacccaccaactgtcaccaccgtattgttttgtatattctcgcgctcactatcgtccaccacattatgcccatatgatcctctgtgagatccccaaacccccaaaatgttccaccgctattgtagtataaccacggagcttataggaataaatttggccaccaataataccacccactgtgaaatattattgccacggccacttaaaatgtatgagctccactgtcctcttttatgggaccactggattgtaaagcctggagaacccactacctttctcacgcccaatcttccccaccaggacccaacaaacccaacacccaccactgtttctcacactcacacacggtgggagaactgaaccacaatgagaaccacctgtggaccaccacggaaaggggaacactcacacacacacccgggtcccgttgtgggatggggggaggggagaggggtatgcacttaggagaatatacctaaatattaaatgacgagttaaatgggtgcacgctcaccccaacactggcacacacatgtaataacacataatgtaacccaacctgcccgcttgtgcgcatgtaccctagaacttgaagtataataaaaatataaatatacttattta

SEQ ID NO: 555082 - DNA, 297 bp, Homo sapiens
  misc_feature (292)..(292): n is a, c, g, or t
caggtgaacaatggaagctggaccctggctgatgtcttgagcctactctggaccaacatggagcagaccactacattagatgaaaatattgagaaagtactaatgaaaaggaaaacagaggattaataagccaagtctgagaagttggagaaggataaagaagcaaaggaaggctctgagccagcggagcacgaagaccttcaagagactgatgaggaaggctcaaagaatgatgcctcgatgactgactactcattaactgctgataacatgctgaccaacagagcaccanagcag

SEQ ID NO: 555083 - DNA, 793 bp, Homo sapiens
  misc_feature (793)..(793): n is a, c, g, or t
ggggaacgctggcctctgaaactagctctggtgacctgggtgtctgcgtgccggcccctagctggccccgtctcccataccccagaagggtattcactgtgtggattctagagctatatgtgctactaccagttaacccacgacacgatgttccctattctacagctagctaggaggactaggactagctactactaactacctgtgctgtggcatgtgagagaatcctgtgcagacagaagaaaaaactatgcgactatggtaggagaaaagtgtgtaaagagtcacgagaaagagtatggctctacagtagaagcagtgctagaaaccacttgtttcaatcaaacatgctttattgatgcaggccactagttcgtgggacccagtgggtatcaaagcagcagcataaccattcgtcacgcatacctctaccagtgggattgttgctctgtggcaaaggctttggtgacagaaactccactcacacattatacatttggggtagaggaaccagtggtgtcgcccttgggcttggcccaagccatttccaacaccacacacaccacatgcttagaaagatatggtgtgctggacaatctgttggacgtgtaatcaacttggctttgggaggtataacgagaggcgacacggacgctgttccacaacgccctgaacacggaagccaccattcccaagccaagttccctttcattccacacataccttgatgaacaagcggctaccactctctcgggaggacataccaaatgtttggccctatggcaccttcccn

SEQ ID NO: 555084 - DNA, 1860 bp, Homo sapiens
  misc_feature (650)..(650): n is a, c, g, or t
gggtcgtaaacatagtgcgcgctgtggcgtgcgacgggtccatgtgacggtaatgtgaagacttatggatatcaagatgtgaacctatagataagatcctgcggcgatagcatgagatgactcgtcaatatactgcaacacagagataaactgaatagcacgcggtaagcagcatggccgtgaggcgtgtcctgaagacagagatgtccatggaatgggatgtttttctcgacgggttgcatgttactctggcacgtcatctacaatggtaggcgtaggattcgcaaagccagatgggcatgcgaggtacctcacaaaactgagacgtacctctcgggcgctcgagggaccgggggccgttcgcaggaccgtaaaaacgcgacgccttaaccataaggagcgaaaacgccccataaatggccagaaaaaacttagacttgccacacacacggaacgcccgacagaggcggaaccttcaaaaagccacggaaaacccctacttaaccttgtgcccgtgcttcccaaattggcacacaacaccaggcctcgcggcaccacgagaccaaccggtctccaccttcatgttggggcaccacacgttggcacccatacaccacaacgggggctagtctttattgtctgtggggccncccccagcgcgccatacccccttgtggtataggtataacattaaccgtacccttcatcacctggaggcgccacagacgaggtgaacacttggggaccagccggacacacacacacgccgcacagacacatccggcaaaaccctacccgacctgtcgggggcaccaccctggcccgggaacatggcgcgtttgaggtgtactgccgtgatggtacaagccgaaacacgaaaaggcattcctgtccaaacagcgccgcggtgtggtttggccacaacttctaccactctcgaggcggacgacacatacgggggacacacacgtcaacggctgggaccgcgcaacaccggacacaccatcttggccagggccgagggcctgaaacaaacccttggtggggaaaacagggcgacacacacgggaaaaccgtctaagctgaggacccagcccacgcacccacaaaacaaaacccaacttcgcgacaacctaacgtacagttccctgggaagcgctgtaccaaggacacccaacagcgctcgaccacacggccaacgtgtccccacaaaggggtaaggagacccgcatggctacagcacgagcgactggcataccctaacagtggggacaaaacacacagcgctgacactgccacacacacattgggacatgactgcgttaccccagcaccaaggcgacaaaggcgcgggccacttacaagcaggggctgccagctacgttctccgaaaaaccgccgtttccccaagaaaacaaaaccgcacaagcgttcacgcctcacatcctgcggacagcacaacacttggctactgcagcctaatacatcggcccgttgcgcgcctaacggggaacacccacaagggggtggggcacacagagatgtcaacagacaggaacgtatcgagaagtccccaggccatacggtagcagcatcacaccgaaataacctgccccgtgtagcaacggaacaggcgacacattacgaaagcgccgcagagcacacaacggacgaggaggaagaagcacactatcaacattctcacagtgcgcgaggcagcgagacaatggaacacagaactgacgggagtaccgaacatagcgcgccgcacaaatggccgaaccccaactatggtacaaacacgccgaaacagtgatggcccacaacggaagaggagcacaccccactagcgtaccggca

SEQ ID NO: 555085 - DNA, 251 bp, Homo sapiens
cgaggtcatctagagatccctggtgcatgataaaaagtagactgtcttgaagagactgttagtagaaatttagacattaaaggttattctggtgaaggcacagaaggaagtgaagaggatgacagagaaagcgtccatcatcttttttttttttttttttttggaaacgggttctcactcttttgcccagcctgtaccccttttcccatttcttacccaagccacccccgtggttcaccgaccctcgattt

SEQ ID NO: 555086 - DNA, 83 bp, Homo sapiens
tctacatctgtgctgtcatccatcgatcgggcctcgattgggggatacgcggcgctacgatctcctgggacacccgacagatg

SEQ ID NO: 555087 - DNA, 712 bp, Homo sapiens
  misc_feature (291)..(291): n is a, c, g, or t
agcggggtgtgcggcgagctgagggtggcggtggtcgacatgtgccaggtcccggatagcgagggcggccgcgccggctccagggcccatgagagccgcccaggaggagacatcgagcaatcgtttgcggacatgtccaagaagaagctacatccttcgcagcaggcctaataggatggtatctaatatgttgggaccgaacagaagaaccatcgagaacatacccgaagaggacaatcatccccccagaggggttaacaaggaatgtgggtatcgttgtggagcgaatcnaagcgccaccggatggccatgactgcgacggagcaccatcgtaaccgcaacgctggcgaagaggacatgacgctaagcagtaactatttgtctcggcgatctccagggtctaactagcctactttctaccgtctctggctagcatccctaaaaacaatatccctagaggatatggaacttgcattccagacgtgaacagcgcaggagacgggtatgccaggtgctcttttccaaaaaggcgtccaaggcgagatgcgacatgtttctagggagaatcatggtgggtgccgtagattatcctggatgcaagcattagtcatcgagttaggaagttcccctgagtcacccaggaaacagtccaagacctagtgctgactgaagccgtgggggaagctcttctgtgctggtggcggacgcccaa

SEQ ID NO: 555088 - DNA, 128 bp, Homo sapiens
tagtcgggtagctgtttgatgtgtaagctcctggttgatctggctgtctggcgtgctctgagtcctggtggtagttctggcgcacctgcgaggtggacgcggtcgtcatggacttgcgacaggcgtac

SEQ ID NO: 555089 - DNA, 236 bp, Homo sapiens
gcgacgagagctagcaccactcaataccctgtgcaattaagtgagaccctgtctcaaaaaaaataaaaatgagaatataaacttaggaagcccacagtaaagaagtgaaaaggtaagaaagtaaaccggtacctggtaactgttactgattttaatatgcttctaaatagggtcctcgttattttccactcacctgaaaaccctggagttaaagatggcagttttcttggccaatt

SEQ ID NO: 555090 - DNA, 523 bp, Homo sapiens
  misc_feature (336)..(336): n is a, c, g, or t
  misc_feature (479)..(479): n is a, c, g, or t
ggaattcagcaatgcccacggttatctgctggacacgagtctgtagcctactctgtgcggacagacattgtgggacaacacagaggtcattgccagctacaatcagctctcaagtttacgccagccaaaggcggtgcgctaccgcgtggtcaacctctatgaagatgatcataagaacccgacggcgacgcgcgagcaggtggacttccagcaccatcagctggctgaggccttcaagcaatacaacatctactgcgagctggacgtgctggaggtgagcaactcctccgttcggcggcgacttatcctggccaactgtgacatcagcaagattgnggacgagaactgtgaccccgaagtgcaacacacgctgacgggccacgacggcggggattgccgcacccgcgccaccctgccttcgtgaagaagcagcacaacggggtgtgtgtcatggactgcaactatgaacggttcaactntgatggtggagagtgctgtgaccctgaaatcaccaatgtcactc

SEQ ID NO: 555091 - DNA, 101 bp, Homo sapiens
aaattccacttttattacttccaaggatcaaccagatttgtgcaggcgaccttctttccagccagaaagcagttataaagtggatatccagcctggacaag

SEQ ID NO: 555092 - DNA, 858 bp, Homo sapiens
ggagaaggccgtgtagcgtcgtcgctgtactccgaggagataccagtcggtagaggggtgcaaacaagtgcagtagtaataaaacttttaatcttggagaagctaaaagccatacgtccaagaagagcactcagtcaacagtcaccatccagcagcagcaccaccgagcgagcgaacagcagccagcgcgccacacagccgccaaattacctgcaatgagtgggcaagcaggccagcaggcaaagatgagaggcttgactattgacctgaagaatttgtagaaaaccaggagagaagaccttcacccaacgaagccgtctttattgtgggaaatcttcctcccgacatctactgaggaagaaatgaggaaactatttgacgaaatatggaacggcaggcgaagtcttcatgcataaggatcaaggatttggctgtatccggtgtggaaacccgaaccactagcggagatggccaaagtggatgctggacaagtatgccactccgtggagaagcagctgcgtgtgcgcttatgctgtcataggtgcatcccttacagttcgaaatcttcctcagtatgtgtgcaagcgaactgctgggaacgaagcccttgtctgctgtggggccaggtatgagaagggccggtaagccattgttggattgatccgagggaagggccgccaggaaaaaggccatggtggaagtctaccaagggaaggccaagttggatctagaaactctggacagattgagcgaaggcctttcctggaagccatttcttgacctgtgaacagggagccatggcccttcaataaccaggctccaaaacaggttgtaaaaacgttcacgacaaaaagcaat

SEQ ID NO: 555093 - DNA, 941 bp, Homo sapiens
  misc_feature (941)..(941): n is a, c, g, or t
gcacgggtgccccagccgctgcgtgcctgcggttggggaccagtgcagggaccgggtcgcgccgtgctatgtgccctgtaccacactgaggagcgcggcagacctgctcgcaaattaccgcctcttctttaggccctcagcggtagccgcgcgtccaggccaccttacttcccgcggggagcgcgcaccgagtcacgagaactgccagcgaggaggcggcgggatcaagaccccaaagctggagagcagaggcgcatggctgccgtgtgggggggtagatagcgccctgttgccctgccgagcgccctccccgagggggtaaggcagattgcaagcggcaccccgggggggctgcagcacattagccggccggccgcgttacccggttcacacaagctcagtgaggaagggaaggcagagcccgcgcaacggccggcttcctagaggcgtaagaaagctcctagtgggggaagctcgctgacgttcggaaggcaggccggaactttgcgggatgcctaatccagcgcgtctctttagcggggggactcctgataaggtctttccccacagaagctttgcttgggtacgccacgaagtttaacccctgagttgtgcaatccaccatcccaaaagggcttccgtttgggtcccagggacggcagccccgttttcccctccccacaggtttgaacaatgcccccagaaagctaacgggacttcgggggggcgccagaagtttgccgagcccaagggagacggcccatggttttcgggagccatatggcgcgggatacgccaatagggcgactatggagcgttacccggacagagagatatgagtcgggggtgtttacacccccagaattgcgagactcggggtggaaacacggggcgattgcccccttagaacaagctggcggcaaataaagggcgcgtaatcn

SEQ ID NO: 555094 - DNA, 100 bp, Homo sapiens
gtgcacagcagctgtgcctccgtaaatggttttacaaagcctgggtctgaatgagaaggggattggggccagacagagtaactcatgcctgtaatctcag

SEQ ID NO: 555095 - DNA, 483 bp, Homo sapiens
agttcgacggagactctctcactattttaggcatatagaaaagtgcaaaaatagtagagagagtgcctgtattcccttcgcccagattcctctaatgctaacgttgtacataagcatagtacactgataagaaccaagaaattaacattagtaaaacactattacctatagaccatatttgaattttagcaggttttccacttatggccttttttgttccaagatcttatctaggatcccacattgcatttagttgttatttttccttcatttcttccagtctgtaatggttcttcagtcttttcttatctttcataatcttttctgagtattttaaagcaaagcccagacatatcatcttcatttgtaaatacttccctacgtttctctaacaggtaaggactttttctttgttatcatacataacaaaactaataataactgcactccagcctgggcaacagagtgagagtctccttcgaa

SEQ ID NO: 555096 - DNA, 1351 bp, Homo sapiens
acaagatggctatatggtcggcttttaccctaccctgtactatacatgaaaattccagttattaacaccactcaaactggtgtgcagcttgttcacctctaggcaagagggattgtatatatggcaggcttccctgtgtgccgatgtaaagggctacatttggtgaacagtgggacttccattgggcactcattaagctgcataatgcatggccatgacagtcacaacagggtgcctcaatgcatgcatcagtgcacaaatccagttactttctcacacacattctcttacaagcaacaatccaagtgctacatcaaccatcagtcatcttctagatgtgcactatcattcaggcagcataagcgcaagcagccatttggcgacaactttgccaccagcctcagactcatagcatctcaccatcttggcgctataagcgggcttcagcttcatgccaacattgcttctcttcagatcatgccactgtgcttccacaatccaacctttcccaccatcacaaaaccttccccgtgagttcctcccgaacaaacgcgtcccagacagccagaatcagcaggtttcacatggaagttcgggagatgagtacagatttatctctctacagacctgggagcgtggataaggcttttatcctacattacctggtcaattgggggcatccttaccgccagtcctttacctccgcgagttaccccacaagttttcctgtgtccaattcgttccccaagggtccttggatggttctatcacctacatcttcttggacgggaccacgccagaggctctggggacgtcccaccgttccacagttagtacaccaatagtaatccctacaattcaccatccataccacaattacccccagaagttcccacatggttactaacttcaaaactgcacacatcttccataaacccttctcgtgatgcacccggctctatacaacttgggccccaactggggcgttcctacaccaacctttttcacaccttgggactatactccctatgtagctaacccacttctgcacaaccccacacgcaattttttcttcgtctcaactcgaaccttgggactctcttaccgcaacatgcatcgctgctctccacaccgtcgcaacaccgccgcactgccacacgctccggaacaaccgctccaaccatacagcccaccttcaggaacaacagaacacgcctacgacaaagatccgtataccacgcacaaccggcagccctcgcaccccccggggcacctgcgacaacaacacgcgcacagcgccccaaagcgaagcgcaacaaacacacattacagacacacccgagccgacgtc

SEQ ID NO: 555097 - DNA, 322 bp, Homo sapiens
ggcgggcgttgaggaatttggcttggttgatctattccccatgggagcttaaacacagaaatgtgtgtgtatatatatatatatacatacataaaaacatttccagatacatgccattgaggaaaattccccctcagggaaaaatgatgaccagaccaaagaatttgcaaagaatgggagacccccttattagacccccaaaccaataaaagaagtctttttagaaaaaacatctttagaatgggaatatcaatcttcgaagccaaaatcgagaagcccaaccccccctagcattcctgcacatctgtacccacgccttcca

SEQ ID NO: 555098 - DNA, 229 bp, Homo sapiens
agcatatcctcaaatctatatgtataaagtcacacaagagtattcagcaaatggaaactaaacctatgtaggtacatgacacttgtatcactcaaaaataactgaaacagaacacaaagaattcacttatgggaaaaattctacatctaaggccgggcacggtggctcacacctgtaatcccaccactttgggaggcttaggcggcagaatcgcatgaacctgggactt

SEQ ID NO: 555099 - DNA, 501 bp, Homo sapiens
  misc_feature (129)..(129): n is a, c, g, or t
  misc_feature (294)..(294): n is a, c, g, or t
  misc_feature (307)..(307): n is a, c, g, or t
  misc_feature (350)..(350): n is a, c, g, or t
  misc_feature (368)..(368): n is a, c, g, or t
  misc_feature (414)..(414): n is a, c, g, or t
  misc_feature (428)..(428): n is a, c, g, or t
cacgaggccaatgatcatcgggttcttcatcggccgcctcccttggtatcctcatgcccgatcgcgttcttgtgggcacggagttccagctccttgatattgccctccgtatcggagagtttttccagnacctcagggtcctccacctggaccatcttcttcagctcttccacgtccacctcttccacgtcgtgggcccggcgcggccactcgcccgtcttcaagcactgcgcgcagcgcaccatctcagccagaccctggagcagcaccaggaaacccgcgatgggaatcagngtcttgaagtggnacaggggcggccccccggcggttgtgctggagtgctcttgcanagcccaggaagtcttcgngaagtctatgccagagtaagccagtgccagaatgccggggatgaanaacaagaagtacancgccaggtccagccctgcctggaggcggggaggaaagaagccgtagagcacgtcaccacgcacgtggccgttg

SEQ ID NO: 555100 - DNA, 632 bp, Homo sapiens
tggccggggagagattaggcttagaactccagaaactgttatcagcctaaacaggtgcagcagcgtgtttgttgtctcttgatcaacttacaatgacttttatgtgacagtatcaatgttatggcattgtataatagatagcaggagacacaggattcttacactgagatagcagaacgaaattttttttggtcaatagtttggtttggtgtgtatttagagtaaattcacctgtttaaaaatattactgagctgttctagacaccaaggtacatcagtgaaaaaagcagacaaaaatggaactcacattccagttagtaaattttagtagttatactaactgctaaaagcacctggtatactacaaacagatataaaattaaggtagttgatggtgatgttagggctacatgtaaagctaagatttgtgtcttactgaaatgaaactaaaccagtggtccagacagcttaaagtgttggtaatttattgaaactattcttctacttcagagaattacaagagacagcttctccatctggatgctctgcaaatgtatatattagttttgatagagacaataaatccttttgtaattactacaaagcttataccatttgaattatttctatag

SEQ ID NO: 555101 - DNA, 176 bp, Homo sapiens
taaaaaaaaaaaaaaaatcccaaattagctggggggggggggccctgcctggtatccccgcttctcgggggggtggggccagagaattggttggacccgggggggggggggcccggggggccggggttgggcccttgccctcccgccccggcccccagggccaggctccctttcca

SEQ ID NO: 555102 - DNA, 434 bp, Homo sapiens
  misc_feature (430)..(430): n is a, c, g, or t
taccctggtcatgcaaaatacacaaattgatatatattctttctagaggaagatgaaagatgaaagagccaatgaccattttcacacatatgaaaagagaagaatttaagtacagttcagtttcactgtttttccctcagttcagcaagggttaagacactgccaaatctatgcatcacccaacagagtgatttttcttaagctgagacaggcctcaaactcagtctaaaactaggagaatcctaacagaggagcaagcagggaaaataatacaattttgcaatatacccactgacctcatggtcattattttccaaacttgtgtagactacatcatggcctgtgagattatccgggatccaggtggaaacgtactattttccctttattccacctacacagtcatctattattccctaagtccaagtgnatac

SEQ ID NO: 555103 - DNA, 411 bp, Homo sapiens
acccttagggtaatcaccctcgtggaaaggcaacagacaaatagcatagagtgaagcggaccaaatgccatcctacaataacctcagtggtctgatccacaacgagcatgccgcgtaccactctgaagtaaaatctgataatagtccggcgtatctggccaagatacaaaagctgaaactatacactacacagcaaaaccccacaataaaatacgataagaactatactaggcaacagtttattgctcagtaaactattttgaagcattactgataataagcttgtgggtcacataagattccgcaaaacgttagcaacatactcttgattcttgaagaggtgaggtcctcgagacagagtatactgacccaagatttatgtaacagctcgaatgtcattttagtaagatg

SEQ ID NO: 555104 - DNA, 255 bp, Homo sapiens
acacgcgcaccctgctgcagtccattgtggcttagtgaatcaatctataatccacgaggacgaaggttcatccctggctcgctcagtgggttaaggatctggtattgcaaatagctgtggtgtaggttgcagacttggctcagatctggcgttgccatggctgtggaataggccagtggtttcagctccaacacatgaacggcagcttcgctgcggccgctgcttctgcttgcctcgttggccttggttgtgtct

SEQ ID NO: 555105 - DNA, 245 bp, Homo sapiens
cttctttacgacgaacagccacggtttttgctctggcgagacaccaagatttctcacaaactttgtgttgaagtccccagtctcggtcctattggtaacgtactggggacgcaacgcaggagaagggtcaatttttccaactccgatggctacgtttccctctccctctattgggctggtttcatagccgagaaacccctcatccagtctcatctgagtttgggagcgcaggttattgtgaagcc

SEQ ID NO: 555106 - DNA, 252 bp, Homo sapiens
aaaaggggatttagaaaaaccccccccccccccccggggtgggtttgggtccccttgccccccccctcaaaccctttagttttagcccccccccgttgggttgggccggggcccgtttttttttttgggccaggggggggcggggcccccctcccccccccccccccccctgccccccccccttggggccggggggggttttgtaaacaccttctttttttttccccccattaaaaaagggggggggtttca

SEQ ID NO: 555107 - DNA, 808 bp, Homo sapiens
gataagacagttgcacgaccgctaggactgcaaggtgaaccgtgaacagcgtacgtatgcccagcagggaggttccagccagcatcacattttttagtccctctggcctcacatacaggtctcaagcacattcagggagtaatctggtgacaagtatcgatcaatattaagtttagcagtgcatcgggcccatgtacggactcgcgcgctggccgcccagggccttcctgtaagctgcactgcagagagaccccacgccagaagcgccgtggcctagctggcatgctaggagaggctctccagtgcgccactggacatgtggtgcctgaggtcatgggcatacatagacgacatgagccccaatggcaagacacatccctaggggcgtggatgcattggacatctggcatgcgagaccagagcatcgtgcataggtgctactcgtggagaactgcatgcccgtcagaactcctgcactcatatgcctgatgtggaaacgcaccgtgagagaccggggactcgggaaccttgacctgggggctgggcctcagtgcccacagtgacagcgtgacctggcccatctggtggacagccaagcttaaaaacccctagaccctggtgaagaagcttcctagatgacccaagacacggaaggaaagtcaaaattaaacacaacacttgacctacactcgtgtctttacctggacacaaaagaatacgcgaaaccacaacacagaaaacaaaagacccacaaggcgacataaattgaaaggaggaaggcggagagacacaccaacaagacgaatac

SEQ ID NO: 555108 - DNA, 407 bp, Homo sapiens
  misc_feature (6)..(6): n is a, c, g, or t
  misc_feature (24)..(24): n is a, c, g, or t
  misc_feature (98)..(98): n is a, c, g, or t
  misc_feature (118)..(118): n is a, c, g, or t
  misc_feature (124)..(124): n is a, c, g, or t
  misc_feature (158)..(158): n is a, c, g, or t
  misc_feature (188)..(188): n is a, c, g, or t
  misc_feature (241)..(241): n is a, c, g, or t
accggnactgaaatggtccggttntaatctaacaactttgtgctatttgatgcttattcattagatggtgtaatcagatgtatggccttagaagcagnttgaaagtgctactaatatntactantaatatttaatagcagcggatttagatccaaatncattgattccaagtggtagaagatgatggnggatctctattcactccctacacccaccatcttaattctaatggcaaagtagncatttaaaaaaccctgggggctttcacagtgcctgccctacctcatgaggtcagttcccaaattaaaatttgctactttactcagctgagagttagtagtaataatctattgaagcttaagtagtttttaaaccttttaatagtcacccctcttaacctcccactg

SEQ ID NO: 555109 - DNA, 806 bp, Homo sapiens
cttctataatagccatcctaactgaagtaagatgatgcctcactgtggctttgattagcatttccttgctaattagtggtgttgaacattttttcatatatttgttggtcattgtatgtcttcttttgagaaatgtctgttcagagcattgtttatatttaattagatgttgtgcttctttgctgttgatatgtttgaattccttgtatattcttgatattaatttcctgccagatgagtttatactttctcccattctgtaagttgtcttttcactcactttcttatttcctttgctgtgcagaagatttttagcttgatgtgatcctatttgtttattttttctttgttgcctgtgcttttgatgccttattcataaaatattttcccagagcaatgtcctgaaggatctcccctatgttttcttctagtagctttaccatttgggtcttatatttgggtatttgagatactttgagtttatctttgtatagggtgagaggcagaggtctagtttcattcttctgcatatggatatccagtttttccagcacaatttattgaagagactatccctttcccgcaatgaagtgtacttgggcatcttgtaaaaaatccgttggtgagatatgtggattttccggggtctttattctaattccatagggtctatgtgtctggtttaatgccaataccatgatgtttggggtactaaccagtttggagggtattctggaggcctggacctgattcattccgttgtcctttggcagaaggcttgggaaccaggacttggagcctaaatc

SEQ ID NO: 555110 - DNA, 1850 bp, Homo sapiens
  misc_feature (437)..(437): n is a, c, g, or t
  misc_feature (676)..(676): n is a, c, g, or t
ccgcctgtcgtgcgtacgtctatgagtacagtgagcaaacgagaggtggggagcatgcaaggttgactcgctacattacggttgcgtcgctacttatttgaaagtctagcgctccgtcgtgcttgttctgtgctctagcttcatgtggttgtgggttctgccgtctctccgtccgagtagtggttgttgcgtggtgtggttgttgtcgccactgcgcctcccccctgtgtggggtggtgttgcacaaaggggtgggtctcctcctccctcgtggtggtgtttttataatacggtggtgttatagggtgtgggtgggaacagcgctcgtgttgctgcatcatcctttcgtgagtagaagggcggatatatatgttgtgatgtgagagcccccccctgttgggggcgcgcctcccgctcgttgggtgtcgcgccggagntgtgtgttgggcaggacgccgcccgctgggatgacaaacaggggtgtggaaatagacgcgccgccattagttgtttcgaccggttgtagttatgacgcccccgagtgtggttgccccgcgacgccttatgttgcggaggagcttccctgtgggttcgtcttccctttgggcaacaacaggttgtttcaaaacaggggggccccccctagtggaaacccgtttggggagcagcttgcggngcccccagtggggaatagaattggcgaatctgtcggagtgttccctccctgtgggccacacaaaccgggtggtaaaagttctctgtatataacggacaactatacgcgtttgtggaagactgttgaggttgagggaactttccttgtggccccctctttgtagattggcccgtcctcggatggtgcagcaccacataatccgttgtgtgaagctgccttattcccatcgggagtcctctgcccacccacaacaatttggcggggagaaccttcggttcacacatagaggactctgtgcatttttcttagccgtggaagcttcgtggggagattcacactgtacccaacactgtcgttgaccacctcggaagcgggcgtaaacacccccttgtagaaagggcttgtggatgggcattcccttggcactttcgccacactgctgccaccgatccaccctcgggagagattacacagggcatgagaaattgagataggttgtgtacacagaaagggttggtaaaaagagagggagagcggggtcccccacatatggagagagatgacccctcttttggggatgatagagagcgtgtgaacaaggcgctatcatctcgcagagacttatagtggctccgcggggcacaaagagggtatgagaattttacacataggtccgcggaatacccgcacacttggagaagggtcggcctgacatgtggccacgctgtgacacgcacaggggacatcttgtgtgtgtgtgtcacctaatacattcgcaagcagggtgagaagagggcttactgtctgtaaagactttcgcggtgtattgggaccacactcactgttgcccgcgagagccccacgctccacattgatgaaacaacgcttctacacgcctggagagtcacactctgttggagaacctctgggccgcccccggacctggcggccacagggaggaacgaggtggaacctgggcctggtgggcgccccaacccctggcacgcacggagcccacccacgtccaagtgcttctgctcctgaatgtggatgacccacgaggcacattcccacgctctggcttaactggatgccctaagcaccaccctggttccccttgtgaacccttctgttccaaacttttgccatgcttaaggattccccacgactaaga

SEQ ID NO: 555111 - DNA, 344 bp, Homo sapiens
cagcggagatctccaagcgcagacaggtcctccttctgctccctcatgacctttgaggctcctctcaaggtgacactgactgagatgttctctgactgactgagatgttctcctggcatgcaaaatcatggataaacggtccaccaataaatacagtgcaacatacgagacatgaatatcgtccaaccatcagcatctcatcatgattgtaacctgtgcgtgatatacaactcttaaagatatgtggacaaaaagttatctatcatctttttacctttgccacgtcatgcaaatgtgagttcgccacatgataatcacccttcatcagaaatgggaccgcaagg

SEQ ID NO: 555112 - DNA, 116 bp, Homo sapiens
ccggggggccccccgggtttttggggtccccccggggggacccccccaggaaacccccctttttggggggggcccttttttttttcccccccgggggatttttattttttttggga

SEQ ID NO: 555113 - DNA, 130 bp, Homo sapiens
aggatgatgttagctggatttgtcgtatattcactttattgtgttgatttatgtcccttttatgcccatgttgtttaaggttttttttattataaaggtatgctgatttattgtaaatgctattttcagc

SEQ ID NO: 555114 - DNA, 245 bp, Homo sapiens
tgcggtgcatgcgagtgtacgacaacggggattgcacgtgatggaagagtgcgccctgggacaaggacctctgcaggaccacgatcgtggcgctatgtcgggcagacggagaagagctggagcatggtggagaaaagctgtacccactacagaggaagaccaacagggaccctgaagctcatcggactggacttgacagactcaccagcctttaccgagagttgtagtagtagggtatagactat

SEQ ID NO: 555115 - DNA, 629 bp, Homo sapiens
cacagtagctcaaactcctagattcaagtgatccttccaccttggcttgttgtacccaagcgagttagaaaaacgccacactttgagacaaattaagagtcttttattagccggcgacctagagacggctaatgctcaaaattctctcggccccaaggaaggggcttgattaacttttataccttggtttaggaaggggagggggggtctagttaaaacaattttacggaagttaagtagtcaaaaagttaaaaggacaaatggttacaggaaagtaaacagttccaggtgcaggggctttaagactattacaaggtgatagatccggggctttgggcgtttatcaatcggacgaattcctgggaactgcggatatagcttgccacagtatcttatcagttaattgcattcttggatgtgctaggagtcagcttgcaccaagttaagtccttgaggaaggggctgccactgaaagagccaagatggagtctctctggctctcttagctaagggagagtcaattcaggtggaaacaagactaggtgattacgggaaaagggagagtctaaaaacagagttagtaaataccaggttgggcattaccgcctcccaaagtgttgggatccagg

SEQ ID NO: 555116 - DNA, 209 bp, Homo sapiens
ctctactttcttgtagtctgatgccaaaatctatagagtatcttcatcagttccaaggcccttcatggcagcacgaagttcatcagcatcaaatagcgctggagtttttagcagactctaaaacaacctcctcaaggtgacctgtaagggcttgcttcagtgtatcatccaggggctttcctgtctcctggagatatgctgctttgatc

SEQ ID NO: 555117 - DNA, 889 bp, Homo sapiens
  misc_feature (881)..(881): n is a, c, g, or t
tgactgagcgagtggagtaagaaatacggagtgggacgtgtctttgtgtaactgctgccttgtcactccgctcaggcagtagcgagagctcacactcgttggctgacctatgtactgatgtgcatgatttgaaagctgggtgagatctgtgggaaatgtattatcagggatctgaacgttctagatgtctatagacatgagcaataattggggggaaagaaaggatgatgcatatcttgggaattcgaaatgagttgtactcagaatgcgatgaggcatgaattcgtggtgcctgtatgcatgggatcatcgctggacttagcggaaatttccagcaggggcgtaatgtaagagtggctttgtaaatgtaatggggcattccatataaagtctgctattgcccgagatttctatgataaatgctcagggaagagtgtatgatgtgatcagtgattgtctattcaagattgcagtgtcggttgttgaatactagatagaggttctgggagtttgtgtccattgatgacttgtgagacggaaattgtgcctgtctgatttgttaataaaagaacgtttaggggtgaaaggatggattctcagagtgatcccatggtaagtatggattttgtgtcaaactcagcgtattttttggttggtgacttagttaataagatttcttgatttgtgacttcggatgaggatagggctcttgaatgctgttcggggggtcaggggagacgtgaaagaatgggtgggcccctaaggtggaaggattcagggaaatgttggtgccttatagcacaagtagagggttttgacagaagtgtattacgaatgtgaaattaatatgatatagaaggttatatagacaaagataaaanatataaaa

SEQ ID NO: 555118 - DNA, 433 bp, Homo sapiens
tggacgacaatcatataaaacaaaagctttaacactgattactagagaagtgcaaatcaaaaccacaataagataccatctaacaccagtcagaatggctattaataaagagtcaaaaaataacaggtgtggcaaggctgtggagaaaaataaacacttatacactgtcggtgggagtgtgaattagttcaaccattatggaaaatagtgtggcaattcctcaaagatctaaagacagaaataccatttggcccagcaatcccattactgggtatatatccagaggaatataaatcataaagacacatgcacacatatgttcactgcagtactactcacaatagcaaagatatgaaattaacctaaacacccatcaattacggactgaataaagaaaatgtggtgtatatacacaatagtcgtccaaccaata

SEQ ID NO: 555119 - DNA, 381 bp, Homo sapiens
  misc_feature (23)..(23): n is a, c, g, or t
  misc_feature (29)..(29): n is a, c, g, or t
  misc_feature (39)..(39): n is a, c, g, or t
  misc_feature (49)..(49): n is a, c, g, or t
  misc_feature (79)..(79): n is a, c, g, or t
  misc_feature (85)..(85): n is a, c, g, or t
  misc_feature (91)..(91): n is a, c, g, or t
  misc_feature (152)..(152): n is a, c, g, or t
  misc_feature (165)..(165): n is a, c, g, or t
  misc_feature (199)..(199): n is a, c, g, or t
  misc_feature (220)..(220): n is a, c, g, or t
  misc_feature (289)..(290): n is a, c, g, or t
  misc_feature (301)..(301): n is a, c, g, or t
  misc_feature (310)..(310): n is a, c, g, or t
ctgtaggaattcggcacgagcgnctctanggacacagancacagagatntgggtctcagacccatactgagtgagttgnagacanttacanggactctctgtgcacccttgaagaggccccgtgaaggaagcagtgaggagcttttgagtgntgacctgtgtcgnaccaccccagaatgtgcactgggggctgtgccanaagcctgggggggacccttanttcccttggtttttttggcttcctggctaacattctggtattttttcctggaggaatattatgaagcgnngtcttgagganctttcctgngctgtgggtcttgggcctgaagaacaatgactggtgtgggtgctgcggcaacgagaggctgtgggagcgtt

SEQ ID NO: 555120 - DNA, 352 bp, Homo sapiens
agtgcagtgggattagtcaccattgaaacagatagagaggcatgtaccgaagcatcagaggtggagctctcagtaaatacagtcactggggctgctacttgtagtaggagtagtgggaacacttcggacacctgactctatcttcatgagctaagaacaggggtgtatcatacattcctaaacctccttaagaagcaagctggccaagatcagagtgaatagaacttgtacggtggcatatacttcggtggcccaaaaccggaatctaaggaacacagacaacctgcggcgaatgaattgcttccacaaatccatcagtaacgatgtggcaccacaagagttggagtacttg

SEQ ID NO: 555121 - DNA, 230 bp, Homo sapiens
ttctttcatcctcagcatgtccttgttttcaatccagtaagtgtttttcacgatgccagctgctacacagtgctgagaagtcaggcggtgactatgataaagaactaacgttttgggatagtgtgatcgtgaagatcaactggtcaaatgaagattcccaatgcctcagccagaacttagaatatctagcggtcacggtgactacggaatttgcatatttacacgcaagc

SEQ ID NO: 555122 - DNA, 141 bp, Homo sapiens
taagtgaataaaaaaggggattaaccatgtaggatgggttgaacttgaacatccagggttgatgagatccttgcaaaacactggggttatagaaccatgctctaatgaacggatatttactgtatttttgtaaaaggaaaa

SEQ ID NO: 555123 - DNA, 368 bp, Homo sapiens
  misc_feature (60)..(60): n is a, c, g, or t
  misc_feature (90)..(90): n is a, c, g, or t
  misc_feature (112)..(112): n is a, c, g, or t
  misc_feature (145)..(145): n is a, c, g, or t
  misc_feature (157)..(158): n is a, c, g, or t
  misc_feature (161)..(161): n is a, c, g, or t
  misc_feature (165)..(165): n is a, c, g, or t
  misc_feature (170)..(170): n is a, c, g, or t
  misc_feature (180)..(181): n is a, c, g, or t
  misc_feature (215)..(215): n is a, c, g, or t
  misc_feature (228)..(228): n is a, c, g, or t
  misc_feature (231)..(231): n is a, c, g, or t
  misc_feature (233)..(233): n is a, c, g, or t
  misc_feature (245)..(245): n is a, c, g, or t
  misc_feature (247)..(247): n is a, c, g, or t
  misc_feature (252)..(252): n is a, c, g, or t
  misc_feature (266)..(266): n is a, c, g, or t
  misc_feature (270)..(270): n is a, c, g, or t
  misc_feature (280)..(280): n is a, c, g, or t
  misc_feature (287)..(287): n is a, c, g, or t
  misc_feature (292)..(292): n is a, c, g, or t
  misc_feature (296)..(296): n is a, c, g, or t
  misc_feature (299)..(299): n is a, c, g, or t
  misc_feature (304)..(304): n is a, c, g, or t
  misc_feature (307)..(307): n is a, c, g, or t
  misc_feature (313)..(313): n is a, c, g, or t
  misc_feature (324)..(324): n is a, c, g, or t
  misc_feature (331)..(331): n is a, c, g, or t
  misc_feature (337)..(337): n is a, c, g, or t
  misc_feature (343)..(343): n is a, c, g, or t
  misc_feature (345)..(345): n is a, c, g, or t
  misc_feature (347)..(347): n is a, c, g, or t
  misc_feature (356)..(356): n is a, c, g, or t
  misc_feature (362)..(362): n is a, c, g, or t
ctggtgttcatttcaaggccagtgttcagcagcagggtttggaaagcaggttttgtgggnccccccgccccgccccccgcactcctttanagcagcaggagggggttttccntcctgttttttgcaacattttatacaaaactgngctgtgcccctnnggnaggnctggntttggcaaanngaaaacaaatgaaaccccttttttttttttccgncccacaactttgnagngntttttgcccccntnccccnttcccccttttggntttnattttaaagncaggggnctgcnaggnagntggangcnagatanatactatattnaactggnctgttntttaanangnaataaagcngtttgncctgga

SEQ ID NO: 555124 - DNA, 196 bp, Homo sapiens
cgcgagtatagcgggctcaggaatatacaacagcatgatctttgcgaccaaatccagcaaccacgaacttcatacatatttcctacaataaagttcaagcaaccgtcatagagtacaaaggctgtgattttctatgccatatcttcccgcgttaaactacgcgtgtaccgacgctcgcaatatcgtaactcatagg

SEQ ID NO: 555125 - DNA, 867 bp, Homo sapiens
  misc_feature (705)..(705): n is a, c, g, or t
gagcatgccctgcgcctcagcccgcgcgctcgcagttctcgctctcgcctgcctgcccgctcccttgcttgctcgcgctttcgctcgccctctcctcgaggatcgaggggactctgaccacagcctgtggctgggaagggagacagaggcggcggcggctcaggggaaacgaggctgcagtggtggtagtaggaagatgtctgggcgaggacgagcaacaggagcaaactatcgctgaggacctggtcgtgaccaagtataagatggggggcgacatcgccaacagggtacttcggtccttggtggaagcatctagctcaggtgtgtcggtactgagcctgtgtgacgaaaaggtgatgccatgattatggaagaacacagggaaaatcttcaagaacagacacaggacatgacgaaagggtattgcttttcccaccagcatttcggtaaaataactgtgtatgtcacttctcccctttgaagagcgaccaggattatattctcaaggaaggtgacttggtaaaaattgaccttggggtccatgtggatggcttcatcgctaatgtagctcacacttttgtggttgatgtagctcaggggacccaagtaacagggaggaaagcagatgttattaaggcagctcacctttgtgctgaagctgccctacgcctggtcaacctggaaatcagaacacacatagtgacngaagcctggaacaaagtgtgccactcatttactgccgccaatagaaggtatgtgtcacaccagttgaagcagcatgtctcgatggggaaaaaagcattatccagaatcccaagaccagcagaagaaggaccatgagaaagtggatttgaggtacatgaggaa

SEQ ID NO: 555126 - DNA, 742 bp, Homo sapiens
  misc_feature (580)..(580): n is a, c, g, or t
gagcatgccctgcgcctcagcccgcgcgctcgcagttctcgctctcgcctgcctgcccgctcccttgcttgctcgcgctttcgctcgccctctcctcgaggatcgaggggagaggacctggtcgtgaccaagtataagatggggggcgacatcgccaacagggtacttcggtccttggtggaagcatctagctcaggtgtgtcggtactgagcctgtgtgacgaaaaggtgatgccatgattatggaagaacacagggaaaatcttcaagaacagacacaggacatgacgaaagggtattgcttttcccaccagcatttcggtaaaataactgtgtatgtcacttctcccctttgaagagcgaccaggattatattctcaaggaaggtgacttggtaaaaattgaccttggggtccatgtggatggcttcatcgctaatgtagctcacacttttgtggttgatgtagctcaggggacccaagtaacagggaggaaagcagatgttattaaggcagctcacctttgtgctgaagctgccctacgcctggtcaacctggaaatcagaacacacatagtgacngaagcctggaacaaagtgtgccactcatttactgccgccaatagaaggtatgtgtcacaccagttgaagcagcatgtctcgatggggaaaaaagcattatccagaatcccaagaccagcagaagaaggaccatgagaaagtggatttgaggtacatgaggaa

SEQ ID NO: 555127 - DNA, 481 bp, Homo sapiens
cagctcgcaccccagcgccactaacctcatgagtagctgggattacaggcttctgccaccatgcccggctaatttttgtatttttagtagagaccgggtttcaccatgtttgcccagctggtctcgaactcctgagagtttcgacagggtgatccacctgcctcatccttcccaggtgttgggatttcacgcgttagccaacagacttggcccaaaaagaaaatgtgtttcgaagcactagccacaccagagctattcaagaaaatgtcttctttctcttaggttcttcttgggttggcgcctgggacaatgggtagaataaggccttttttcattaattttaaccttcagaatgttaaagccttctaagaatattaattcatgatcttttagggcacccacataaattgctgatttgctgagatgatgacatccaagcgccaaagagtcgtcgaccttcgtgggaggaatcacatagtgc

SEQ ID NO: 555128 - DNA, 275 bp, Homo sapiens
aactgggcccccccagttgtaaaaaggtatgtttttccccccccgttatcccccgggtagcctgtccagttgagaagagtgaacccataactgggttttgttttaaaaattaaattaacccctgataagaggggctttttttttttaggggttggcccctgccccctagtttgatcccctcccccttttgggggccctgtttcccccccgggcctgttcctccccctgcctacctgggtaagggcttaaaatggaataaattgcttttttcccta

SEQ ID NO: 555129 - DNA, 1105 bp, Homo sapiens
  misc_feature (103)..(103): n is a, c, g, or t
agcggcctcggaccgtcttcccggacccttagcatgcatgctcgtggctctcgtagcactcagttgcgctttgcctgcgcgcactgcggagggcgcccttaangggtcaccgctaagcactacttggcacgttaaacatgacacagatagagcgaagcttcgttatcgtgttctgtaggcgtcgagactcacatatgcggtgcgccactacagttctccgtgaccacctcccgaccccaatcgctagtccccaacgacttgggactccgggggcgagactgaagcggaatgagggtagtcacgagtatatcgtggacgtacccgttggctcctgaatccggagaagaagcaaaggtcgctcgtagttcgctcagcatcgcgtgtctcctgtctacgctttccccattcacacgcgtttgtgccgccaggcggcacctgctctggagggccagcacatgcgtaccacggcgtacgtctgtggatgtataatggcaaaaaggcgaccggagctcgcgctggagaaggctacgggatactgacggaagatctgtaccccacaaccggggggcgaccgttccggggttaccccccccaaggaacccacccgggaacaggccaaagaattcccttgacaagggaaggttaccaagtccaaccttcaaggggaaagggcccgaacaaaagccttgggaaaaacgcagggggggccccccggccggggccccagccgaggaccaaccccatttcgacccaaaagccgaccgggttgttccttagggcagggtctcggacagggcgcaatccaaaggttatccgggcaaagaaattgcagggtggtttctttggggaccggtccattaccggaagatactggttctgaaacgcgtcttttggggttccaaagaccggcccaaaaacggaggccgagagtggttcacttgggcggcaaagacggaaggacataccggtaggagggggcttcccgattcacaaaagaattggcccgagaagttcctttccccctccttccagggggccgatttgcccccagaagggcctttggcgcgcccttggggggcccttccaaacagaagcaaagggttcc

SEQ ID NO: 555130 - DNA, 233 bp, Homo sapiens
  misc_feature (1)..(1): n is a, c, g, or t
ngtgatctagaggatcccttcagcccatgaagtcttaaaaaaaaaagggatcctattacccaccatacttagtctggcccgggattgattttacaaaagccagacaaggggatacagataaagggggttaaatacggagattaatcaacatggcccttttccccggccaagggctaatttcctagaccggcttcactatgactactaatggtgcggaaggggtcccggaggct

SEQ ID NO: 555131 - DNA, 392 bp, Homo sapiens
gcagggcatagcgtgcaggcaccatgagctcaggaacacaggacagaccggttgtccaagtcacaacggcacatgaagacactgggcccaggacagcagctcttaatccaaaatggtctcaagaatcctttacactctgaaaaataaaccctctttatgcctgaggtagcaatttttatgtaaacacatcagaccttggcgatgaccttgagctgtaggacctaaataactcccacaagcttagggtgccactaatggaacactaggcataaatgcgttttcctgcggacccaaacagctttcgattatgtgggcgtcctagcctgtctacgtgcctgtgtgtgtctatataatttttctatattctatattaccgctgagacatttacccc

SEQ ID NO: 555132 - DNA, 264 bp, Homo sapiens
tggggttcccccgggggttttgccccccggtgggctaagatggggccaggtttgggggttgttttttttaaggccaccccttcccggggttttcccggcccatggaattttgtttttagaacccaagggtttttacccaaagggccgcttgggttggggggtcctgcccggtatcccccccccttgggggggccagggcgggcggtccctttagggccgggggtccaggccccgggggccccctgggggaaccccggttttcca

SEQ ID NO: 555133 - DNA, 595 bp, Homo sapiens
attaacccaaagtcaatagaaagccgggcgtaaagagtgttttagatcacccccccccccccgcggaataaaggtaaaagttccctgggttggaaaaaactccagtttggacccaaataaactacgaaagggggcctttgaccacctatcttgtttagaaccccacaacaaaaacgctaaagaacccacaagtgtggggattacgaatatcccccacacatatatgtcctatatagtccccctataacaccgttcacaccacgttttaacatatctacaaccacaaacacgatgtgttcactctgctcccaagagtaaaaggacccctctgatgcggagagagccgcgcaccaacaggcgcgtttattaaaacacagccgcttcctacagaaagaggggaaacacccgcctggttgtgcggccggaggatggatggtgggcgcaacttcgtcctcacgaatttaattatccttcgcctccccgcgcccggcctatcgatgtacctttgaaaatggaacgaaatgcagaggtgctcgatagtaagaccgacccgccagtaggaggccatcagaagcccacacgctggggctgacaa

SEQ ID NO: 555134 - DNA, 1201 bp, Homo sapiens
  misc_feature (276)..(276): n is a, c, g, or t
  misc_feature (419)..(419): n is a, c, g, or t
  misc_feature (465)..(465): n is a, c, g, or t
  misc_feature (486)..(486): n is a, c, g, or t
  misc_feature (643)..(643): n is a, c, g, or t
  misc_feature (672)..(672): n is a, c, g, or t
  misc_feature (687)..(687): n is a, c, g, or t
gagccaaagagaacaggcgctccgagaggcagaaccagtacccctgctcgccagtctcgcctttcctaaaagagcagtgtctggagttgtgctgtttcccgactccccagcctgcatgtccagcccagtgggagacagggccttctggtgcagtttcccaatgatgttccgtcgtcgcacgtattcgtcgcgatgggatctacctattcatacatttgcatgattcgctctgtaagtagtagttaccagtgcctataatcgacgccaacaagagcncattacctaccacgttaatggattgtggtcatgggtggtgcggacgattctctggtccgaactcccttgtgctatggacagggacactagtatacataccacatggaagctcaggtagcatcctaattttaaacttatccgcntgtgcaagatcgtgtgacattccatcgcttcactctctcagctagnggagagaacactctcctctgntgagcagagtgaggcccgtcaatcatgcgaggccactatatacaaggcctttccaagcgtgtgtattcccatctccatgggcaagactgaggtacctcttcctatgagagtctcgcttcttcatgtacgaggcctcaggctggggtaagggtcgtgntccaaggacaagtgtcacggatatctcgnatacgagaaccaaanttccactgacaacagtattctacttcacttcattcagcatacgaacccagtaaaccccatgtggcgacatccagacatgatctttgcacagtcctaaaacgaactggctggcttgtgacacacatctattgcgatatttcgcaaatacacgacatctcacttgttccgtcttacggcgtcttgggcttacgattctcgtgtatattattccccgtttatagacttagagtatagagattcaattctacatgaaatgatggcagcagagggccttaaggttactagggtaaattgagctgaatggtgcagggaggactgttgagcaagggagcctaagtgaccagaaagcctgacacagaagatacgtcacgggactactatccttacacagggaactgcggcccctggggggtcaacaagccccctggcgcgcaccggcagctcacaaccaggagtctggctcgagacacacagtagcggccagaccgagggccccgacggccaggaaacacag

SEQ ID NO: 555135 - DNA, 128 bp, Homo sapiens
aatcgaggaaggtatgataatcccacaccaatattttgggatttcttggaaattgacccaactctccattctaataacatctccattccccaggaactgtacgaaaggtgctggagccacagtaacga

SEQ ID NO: 555136 - DNA, 240 bp, Homo sapiens
tgtaggccagcgcatcaaaattgacacctgaaattattgttctaattgaaattgtgttcccatcactgctcagcccattgttaaaatgctacatacataggtcagaggttctcattgttggctggctgcgtatcaagtcacctgggaaccttaaaaaaaatctgatatcccacctctaggaattgggatgtgtttggtcccgctggcctacagcacatgccggtaccgagctcgactcac

SEQ ID NO: 555137 - DNA, 384 bp, Homo sapiens
gtcgaccccgccatcactgatcaccagcgtcaaggttttaccacgtagatccggtgcgctgtccccccaaccatcgctgaccggtacccgcgctaacatgcgcacaccgtcgcgactcacctttggcttgccgaggtcagcatcttccagggtgtcgaagaacagttcaggctgctgccaaccagcgtcacgctcagtgctgatttgcagttcgccactctggtagccggccttaatactgtccactaacccatcagcaatcggtacctgccccatcgcttgggcaaaatcatgggtaaattgcgcgtcagacggcgtgccaagatccaggctgaatggatagtcggtcaagatacagacgttgctgcaagttgacgtcgacgc

SEQ ID NO: 555138 - DNA, 117 bp, Homo sapiens
tgtcaaggtcctaggagttgtgtaaggcccggacattgtgcagcttgtgctgtagctttaacgaacactagaacaagctacctattgagttgtgccccttggccttcccatatgcaa

SEQ ID NO: 555139 - DNA, 226 bp, Homo sapiens
gaaaaaccgggggtttcccgattgggggggggggggtttaaaacccccccctcggggtttaacccccccgggccccccaaagggggggggttaagggggggggccccccccccgggccctgggccccttttaaaaaaaaaattttttaaagggccccaagggattatttaccctttcccgggggttgggggtttggggattaaaacccaaaatttcggcccttgga

SEQ ID NO: 555140 - DNA, 91 bp, Homo sapiens
  misc_feature (19)..(19): n is a, c, g, or t
  misc_feature (68)..(68): n is a, c, g, or t
acctgcccagacctaaganagtacctttaaggagtggctggagaggctctttccatcttctttgtcantctagccctgcgctaggcctctg

SEQ ID NO: 555141 - DNA, 117 bp, Homo sapiens
  misc_feature (2)..(2): n is a, c, g, or t
gntcagactgtgagcatatatgcatggggtacccatctgagtcagtaatgactatctacagcgtgtatggcaaatcatagaagcgactgcttgacagatacgctttgattgctcgat

SEQ ID NO: 555142 - DNA, 219 bp, Homo sapiens
  misc_feature (85)..(85): n is a, c, g, or t
  misc_feature (87)..(87): n is a, c, g, or t
  misc_feature (194)..(194): n is a, c, g, or t
ggaactcttaatttaaatgttggaaacctagagtgcacttatagaattaaatggttagcaaatgcattggcagtggggtgtttangnaaatatgcatttttttctggtgaaaagtctataactttcatctcatctgaaaaagtttttacctagaaaagttgaattcttaccatagcctgccctctgtgttgttnttttacttgggtacaatccatttcc

SEQ ID NO: 555143 - DNA, 115 bp, Homo sapiens
aggcccctccggaacactgtggcgtgatggccgcgggctctccagaacatcatccctgcctctactggcgctgcaagggctgtgggcaaggtcacccctgtcgggctagtcgggg

SEQ ID NO: 555144 - DNA, 700 bp, Homo sapiens
cccgccggggtggtccttctctgggttttttccctcctatcatgcacgccagggttatctattgtgcgaagattaacacgccctgcagggggcgccacttctcgttctggtgtcgtatctactgcccgctcgcgtgtgacttacgcctgtgcgtgtgtcgccggatggacacacgcggggggccccgctctatcctttcgcgcccctctcgtcccggggctgcccctgcgcggtgttgtctctgtctcgtgtcgaccccccccctcgttggggaccttggtggcgggcgtttcggactgcacatacgttggtacaatgtggtgtgtgactcgctgcgctcggcggccccggctctcgtgtgacaccgctctctgtgtgaggtgtgtgccctcccccccctcgtgtgtccctctccctcggcacgtatactggttgttcgccggcgcactctatatgtattcgccgcgcgctgtccatctctctctactcctcgccactctatttgcctcgcgctgtgtcgcgctccgccaccaggactccacacaattccacattgtgggcacacactccatttctttttctttctcccgctactattgttccccatgtttttcttcttgtagcgcacctcacttatctctcctcctcctctctactaaatatgataataaaacacaccacaacaaatatcaaacaaaac

SEQ ID NO: 555145 - DNA, 165 bp, Homo sapiens
  misc_feature (76)..(76): n is a, c, g, or t
tgacgcattctcctgcgtcatggatacaaggtctattaatcaccttcggttatctcttgttaaagatcggcttcanattattttaatcacctacaacttttaaactaaactttaagcttgtttaagtcaccttcattttagtctagaccgcctctgcagggtacc

SEQ ID NO: 555146 - DNA, 244 bp, Homo sapiens
taatcccactcatttaacgggcccctgtccagctccgtatttgtgacatactcaggtagaaacttagaaatcgcaatctcttatactctattgattgttgatcatattaaagtttgcagtatctgtcaaatagagtagccatggtcttgcggtgtagctcaggcatgaactcctgggctcaagcaatcctcccgccttggcatcccaaagtgctaggattacaggcgtgtaccgctatgtctga

SEQ ID NO: 555147 - DNA, 308 bp, Homo sapiens
gctcctagacggactacagatgaaaatcgatatctttttcaaataataaaatttctgagatgacagcagtgcattgaggggtcccatactcatctcccattcttctgtcattcccagtcacatgaacatgctccaataaagatatcttcttttacagacgccttggcgcgaagtattagtgaactttccaaggtaactgtccatctttaaatataaccagtgcatttcattcaggtcgtaacaataatctggtcatttataaacaataaaatcccctcaagcttcacatcctccacaattttctttcc

SEQ ID NO: 555148 - DNA, 258 bp, Homo sapiens
ggagtttgagaccagcctggcaacactgagagaccctgtctctacagaaaaatattagctgggcatggtgatgtgtgcatgtagtcccagttactcatgaggctgaaataggagggttgcgtgaacctgggagatggaggctgcagtgagttgtgatcatgtcactgcactccagcctaggtgtcagagtgagattctgactcaaaaacaaaacaaaacgaaaaatttggtcgaatctgtagatgtagaacctgggga

SEQ ID NO: 555149 - DNA, 168 bp, Homo sapiens
gcctggccgcaagagcttagtatactagtacacaaaagggctcaacagtccgcttccccatgcactttatgaaacaggtgcaggactaggaaaagggccacattagttaaaattactaactgtacagaaatgatttaaaaaagtcacagctcaaaatcgcgctttggc

SEQ ID NO: 555150 - DNA, 2484 bp, Homo sapiens
agagagttgggagatgtaggtgtgtggataggatgggagaatggtaggtgtagtgtaggtggagctggtgatatgggtaggtgtatgtgagtcgatggtaagactggtggtggtggtagagaggaggtgtttatatgggagtgtaagggggaataaggttttgagagagatgaaagggatgggtagtgtggttggtgagttattaaggattgttgggggatgggttatagtgttttataattgttgataattgtagttttgatttgtggagggtgtagatttggtgtagggagatttgtggcatgttagttgtgtcattaatagatgttagggtgcggtgtcccggaggtcccagggtgttgcgtggtttccgcgtttctcgacgcgtgtgttgggtggcgtgtgccgtgtcctttgcgtgtgggatttcgcgtttcgtttttgagtgggggtcgcccgctggggtgcgaggtgatagtgtcgtgggtgagggtgtaaagctgtggtgggcgcgcgttggtgggagatatggtgtggaggggtgccggcctgtttttgttgttttgtttttttttttttaaaacaaatatttttaattaaattttcaaacatgaaagtataaacgttaatatttgttgaaaaatatatacggcatttcccccgtgtgaacacaatggcttccggtaacactacccacttacaatgagatcttttaggcacttgggtgtagaatgtgcgagagggaaatgcaactttactttcctgctacctataggggcaaccacaattagatctcatgaaatattgttttcaacactgttagcattaacaccgacttaaaacatacggtgaccggacatataacctttaaagtcccagtatatttaaaacaggagaaatctggtaagttgttaggattctaaattccttttagtctgttcactgagatattaaatttcagtagacagaacccaaaaagagatttcatttctttctaatcactttggcttctttcttttttgttaagtaggtaaaaaccttcttggtgggcacctaagcaggatgcagccaatagttcatgaaccagctgcgcacgtgaggcttaaaatctaagatgctgctgaagtggctgcgggaggagcggctgcgacttacttttaatttcaaatcagctgcagatgtttgggagccctctcgatgaacagaacaaatcacataacatgcagaatccactcagaggctgttattccagggaaagagcgggcaggtgtcctgaggagtacattcttgctgtcacagtctcactgctggcacagaggtgccttgtttatgagatttaaaggccacaaactctggctcaggtggggacaagggtgtgccgtggctgaaaccagcgtggtcactgtgtggctggcacggcctgcacatgctgcaggagctgctcgcagtaggtggccgagcggtgcttgtggatgacggcctccgtctccctcaccaggagatctgggaacagcccgctgccctctttgaggacctctaaaattgcatcctggatggccctctctggatcgtcaaggtgaaccagcaactctcggtacaggtactggacactgctctgatagtaggattttgcgttggcacccttgacacactgcagccaggtgaccaaggtggaggcggctgccatcctcacatcgttggacacgtcatctaggcgttttaagagttcaggataaatcttgatgagtttctctggatccgtcatgccgcccgaggtttttaagaacgtgttgataatacggcatgagatcagtcgcgtcatcttcgaatcctcctccagggtggtcaggacctggggcatcagtgtttcctgcacgtcccgtatctgctctgccgacaggacctcgctgctggtgagcgcccagaggcaggacacggcagccgtgcggatggccgcggctgtcctccccgcatgccactgcagattgggggccaggatgtcctttgtcaccgtctcgaggtagctgggaaactgcccctgggagttgatggtgtccgtggctctgagcagcacggtggacaggatggagaacagcttcaggcgcatctgcgggtcttgggagggctgcagacaggccctcagcgtgggcacgacgtgtggcagggcttctcccagggcagggcctgtctccgctcccagcgcgagctcccgctggctgcacagacacttccgcccggaccacgtgtctgccctcccagcgccagctcctgctcgctgcaaggatacttccgcccgggccacgtgtctaccttccaagcacgagcgctcctgctggcggacacttctgcccggagccacgtgtccgccctcccagcactagcgctcctgcttgcagcagggacacttccacgggaccatgtgtctgccctcccagcgtgagctcctgctcgcagcagggacacttccacccggaccacgtgtct

SEQ ID NO: 555151 - DNA, 838 bp, Homo sapiens
tccatcgctgtcacatgcctgggatgaagcctgatcctactgcagggccatgagctgtgtccattactgcagattaggtataacctgcgaagtgagacctcctctttacttgtggccaaggaccctatctgtcaattgtataggtactctgtgaattggtgagacggctgtggcacctacatgggccatacctggagctgtgatggtgtgtggactgctgacttggtgacaccatagcatgtcctcacttggctcagctgacaacatgctgtcgtcatcatgggactgtgaaacaggacaagcagctggcccattctcaatgaccaaattcggctgtccggacctgcggttttgacttagggcggcaacatcatcatgtactccacggacaagcacgatgggctaccagtgctatgtgagcttctctgacctgcgcggatccgagccagattgacaacaatgagccctacatgaagatcccttgcaatgactctaaaatcaccagtgctgaatgcggacccctggcggacagcggcatcatcgctggccatgagagtggagagctcaaccagtatagtggccagtcaggagaggtgcaggcgcacggcacaggagccactcccggcagaatcaacgaccatcaagaaaacaggcacctgaccaatgacgcgaaccgcgtccacagccaaaacacggcacaggcaacggaccccacaaccctgacacacctcgcaacatctacggagacaaaagctcgaccacaacaagagccctaaaccccaacaatgaaccgaaacaccgagacggggacagacacccaatatcacaccccacacaa

SEQ ID NO: 555152 - DNA, 406 bp, Homo sapiens
gcacgaggagagttagagagagagagagagagagtgagagagagttatagctagagcgtgttccacctcgatttcgttgtttctttccttgattcatcactctcttcatcctctccacttctactctctttggacatacctgtcatactccttcaaggctgttactccacatttcacgtgattgagttattgccaattctgttaccatggtaatccatgtttctttctcatacctatcctttattcctcccactgtatcttttttgtccatatctccccttgactttttttatccctctatcccttcttcttccacagtatgctttactcccatcactttacttctttccttccatcacatcctagttcttttccttcctctgcctttctctttgtgattttcttt

SEQ ID NO: 555153 - DNA, 776 bp, Homo sapiens
  misc_feature (260)..(260): n is a, c, g, or t
  misc_feature (263)..(263): n is a, c, g, or t
  misc_feature (267)..(267): n is a, c, g, or t
  misc_feature (273)..(273): n is a, c, g, or t
  misc_feature (366)..(366): n is a, c, g, or t
  misc_feature (381)..(381): n is a, c, g, or t
  misc_feature (419)..(419): n is a, c, g, or t
  misc_feature (421)..(422): n is a, c, g, or t
  misc_feature (432)..(432): n is a, c, g, or t
ggggaaagcactgtcgtcacgacttcccgttgccgacatggatcactgcgcctgttgccttcaaatgccgctcacacggaccttgtcagttcttgtggcgaaatggtctgcatcaggggcccgatcagagactccgactgcatgtggaatgctcgggcgtggcctgcgccagggcggcggcgcagctgcagctctcgcggcgcacggcggcgaaggggtcgagcagggagcagcgcagcgcgcgcagagcgtcgtccagntgnggcncgagcncggcgccgcacaggtccacggccaggcccagcagctgcacaagcgccaggcgcagctcctcacaggcctcgggcgggcggcgcgcgggcacgnggccggccaagcgcncggcgagcgcgggcagcaggcgcggcagggcatcgcgngnncgcgcggcgnggcgcaggcccagatccagcaggtgcactgccagcgcgcggcagccctcggcggggtcgctcaggcagcgcagcaagcgcggcagcagtaggcgcgcccaggggccctggaaagcggtggggtcggcggcagggcctggctcctccagcgcgcgccgcagggcctccaaggcgcgccgccggcccggcttgctgtcggcctccagccccggcagcaggcggctcagggcgcggctcagctccaccgcctcagccgtctcggccccctcagccgggtgtggggccgccacggcctccgccacccccagcgccgccatcttgcccgcgtcagccggccaccccgct

SEQ ID NO: 555154 - DNA, 219 bp, Homo sapiens
gacgactcctcgactagccgacagggtgaggccagtgcagagaagcttcccaggggattcctgggttcccccgaaagacaagcgaggtcattgcagttcacctgatgttgctcctgtcccgtgcgtcccggggaggctgtccttggtccgaggctgctcgttgcagcccctcccctgctgtcgggctagtcggaaggatcctctaagcaccagccaatc

SEQ ID NO: 555155 - DNA, 373 bp, Homo sapiens
  misc_feature (367)..(367): n is a, c, g, or t
gaggacacctttcgggaagagcggtggcccttgtcttggactgtggctgtgggggcgtgggccccgggatgacctgtcctcatcctcccccgacagagtccctggagaagtgggagcgtctgaccgtggcggatgcgctggagcccgtccagtttgaagatggagagaaaatcgtggtccagggagagcctggggacgacttttacatcatcacggagaaaaatttgccgggtgtggtggcacatgcctgtaatcccagctacttgggaggctgaagcaggagaatcgcttgaacccgggagatggaggttgcagtgagccaagatcacaccattgcactccagcatggacaacagagtgagattcngtctca

SEQ ID NO: 555156 - DNA, 140 bp, Homo sapiens
ggcaaatcatactcaggaggtctattgtgaacccatatttcagcatgcttttgaaaaagggtaattaattttcctacccgacactgaattgtagggttgtgaaagaacattaaaatgaagacaaatttccccgtgggctg

SEQ ID NO: 555157 - DNA, 311 bp, Homo sapiens
ggccgaatcatcacgagtatcatactttaaaacaagatgtaacatatatacaagtattatttgccaattacaatacatacatttaaaaatattttagatattgtgtccattttggtttcaagtttactaggcggtcattttattgttaagaaattctaggtagttttcggctgggcacagtggttcatgcctgtaatctcagcactttgggagcctgacgtgggtggatcacctgaggtcaggagttcaagaccagcctgaccaacatggtgaaaccccatctctactaaaaatacataaaattagctggg

SEQ ID NO: 555158 - DNA, 2573 bp, Homo sapiens
  misc_feature (42)..(42): n is a, c, g, or t
gggcggcgttgggggtgcagcatgcttgctgctgcggcgcgngggggcgggcgtggagggcggcgccgctgcagtgcggggacccgctcgctcgctcgccagccgtccccgcgccccgcgtcccgcgcagccgcctcctggcctcgggcgccgcgcatccaggaaggaagcagccaccctcgccatggcctccccgcccgcctgcccctcggaggaggacgagagcctgaagggctgtgagctgtacgtgcagctgcacgggatccagcaggtcctcaaagactgtatcgtccacctctgcatctccaagcccgaacgccccatgaagttcctccgggagcacttcgagaagctggagaaggaagaaaacaggcagattttggcgcggcaaaagtcaaactcacagtcggactcccatgatgaggaggtgtcgcccacccccccgaaccctgtggtgaaggcccgccgccggcgaggaggcgtgagtgccgaggtgtacaccgaggaggacgccgtgtcctacgtcaggaaggtgattcccaaggactacaaaaccatgactgcgctggccaaggccatctccaagaacgtgctcttcgctcacctggatgacaacgagaggagtgacatattcgatgccatgttccctgtcactcacatcgctggggagactgttatacagcaagggaatgaaggagacaacttctatgtcgttgatcaaggggaagtggatgtgtacgtgaacggagagtgggtgaccaacatcagcgagggaggcagcttcggggagctggcgctcatctacggcacccccagggctgcgaccgtgaaagccaagacggacctcaagctctgggggatcgaccgggacagctaccggcgcatccttatgggcagcacgctgaggaaacgcaagatgtacgaggagttcctcagcaaggtctccatcctagagtccctggagaagtgggagcgtctgaccgtggcggatgcgctggagcccgtccagtttgaagatggagagaaaatcgtggtccagggagagcctggggacgacttttacatcatcacggagggcaccgcgtccgtgctgcagcgccggtcccccaatgaggagtacgtggaggtggggcgcctgggaccctctgactacttcggggagattgcactgctgctgaaccggccccgggcggccactgtcgtggcccgggggcccctcaagtgtgtgaagctggaccggccccgcttcgagcgtgtgctggggccctgctctgagatcctcaagaggaacattcagcgttacaacagcttcatctccctcaccgtctgagcacagctcccgccctgcagccccagctccccagtgtggtggccgtgccctgctcgtctgtgtcgggggcccgggagccgctgtgtgaggtgtgggccgggtggggctgggtcccggcagcgtgaggactgccccttccccggactcactttttggaataaatgatcaccttgtgcatttccaaatcaaaggacaagcggacaaaatgcatcccaagatcaaggaagggacaggccagcttcctccccacacgcctccccggctgcctctgtgggcttctcctggggggcccaccccacccctgccagtctcctggagatgcttgaggatcggtcctccccagaaccaggccaggacgttgcccctggggcctggtgaccctgtgaggtcaggtcccccagattgaggtctgagtgtgggcaagtgtgtcaaaaggggctgccccccaggggagatgaggctgagagcagggagttgaggccgaagaagtcaaggcccctcccgcaaatgtgtacccctgcccgcgccactgcaccccgccgcacccccacctcccccgggggccctgctgcggatgccggagtgggagagtctctgagctgtgagattgatcttgcccctaattggagaggaagccgggcgccaagacacacggggctcctgccttgggagccagggccgcggccgcaggtagaccccagtagggggggccgggctcgaagttcctttgggaggggctggcgggactccagcaggccgtcctcacctttcttagaaagtccacccagggcaagttgatgttgggggaaagcagaagtcaagccagccgcgggccccacacgccccgacccgctcaaccgacttgtcccttaaatgtgtcttggatcccgcagtgatgacgtgagccagccaggcccgaaagggtgaggccagtgcagagaagcttcccaggggattcctgggttcccccgaaagacaagcgaggtcattgcagttcacctgatgttgctcctgtcccgtgcgtcccggggaggctgtccttggtccgaggctgctcgttgcagcccctcccctgctggcggttacgatgcgtggggtccccctccccacccagccccggccacgtcgccgtgtcccgcctgtgcctgtgacgtccctgtggacctgtgagccatccccccccttatctctgctctgaatactgcatgaagcattaaacgtgcaatgaagtacaaaaaaaaaa

SEQ ID NO: 555159 - DNA, 2478 bp, Homo sapiens
gtgagtgagggccaagcaggaacaggggtcacggggcaaggagcacgtggcagcgcaggaaatccaggaaggaagcagccaccctcgccatggcctccccgcccgcctgcccctcggaggaggacgagagcctgaagggctgtgagctgtacgtgcagctgcacgggatccagcaggtcctcaaagactgtatcgtccacctctgcatctccaagcccgaacgccccatgaagttcctccgggagcacttcgagaagctggagaaggaagaaaacaggcagattttggcgcggcaaaagtcaaactcacagtcggactcccatgatgaggaggtgtcgcccacccccccgaaccctgtggtgaaggcccgccgccggcgaggaggcgtgagtgccgaggtgtacaccgaggaggacgccgtgtcctacgtcaggaaggtgattcccaaggactacaaaaccatgactgcgctggccaaggccatctccaagaacgtgctcttcgctcacctggatgacaacgagaggagtgacatattcgatgccatgttccctgtcactcacatcgctggggagactgttatacagcaagggaatgaaggagacaacttctatgtcgttgatcaaggggaagtggatgtgtacgtgaacggagagtgggtgaccaacatcagcgagggaggcagcttcggggagctggcgctcatctacggcacccccagggctgcgaccgtgaaagccaagacggacctcaagctctgggggatcgaccgggacagctaccggcgcatccttatgggcagcacgctgaggaaacgcaagatgtacgaggagttcctcagcaaggtctccatcctagagtccctggagaagtgggagcgtctgaccgtggcggatgcgctggagcccgtccagtttgaagatggagagaaaatcgtggtccagggagagcctggggacgacttttacatcatcacggagggcaccgcgtccgtgctgcagcgccggtcccccaatgaggagtacgtggaggtggggcgcctgggaccctctgactacttcggggagattgcactgctgctgaaccggccccgggcggccactgtcgtggcccgggggcccctcaagtgtgtgaagctggaccggccccgcttcgagcgtgtgctggggccctgctctgagatcctcaagaggaacattcagcgttacaacagcttcatctccctcaccgtctgagcacagctcccgccctgcagccccagctccccagtgtggtggccgtgccctgctcgtctgtgtcgggggcccgggagccgctgtgtgaggtgtgggccgggtggggctgggtcccggcagcgtgaggactgccccttccccggactcactttttggaataaatgatcaccttgtgcatttccaaatcaaaggacaagcggacaaaatgcatcccaagatcaaggaagggacaggccagcttcctccccacacgcctccccggctgcctctgtgggcttctcctggggggcccaccccacccctgccagtctcctggagatgcttgaggatcggtcctccccagaaccaggccaggacgttgcccctggggcctggtgaccctgtgaggtcaggtcccccagattgaggtctgagtgtgggcaagtgtgtcaaaaggggctgccccccaggggagatgaggctgagagcagggagttgaggccgaagaagtcaaggcccctcccgcaaatgtgtacccctgcccgcgccactgcaccccgccgcacccccacctcccccgggggccctgctgcggatgccggagtgggagagtctctgagctgtgagattgatcttgcccctaattggagaggaagccgggcgccaagacacacggggctcctgccttgggagccagggccgcggccgcaggtagaccccagtagggggggccgggctcgaagttcctttgggaggggctggcgggactccagcaggccgtcctcacctttcttagaaagtccacccagggcaagttgatgttgggggaaagcagaagtcaagccagccgcgggccccacacgccccgacccgctcaaccgacttgtcccttaaatgtgtcttggatcccgcagtgatgacgtgagccagccaggcccgaaagggtgaggccagtgcagagaagcttcccaggggattcctgggttcccccgaaagacaagcgaggtcattgcagttcacctgatgttgctcctgtcccgtgcgtcccggggaggctgtccttggtccgaggctgctcgttgcagcccctcccctgctggcggttacgatgcgtggggtccccctccccacccagccccggccacgtcgccgtgtcccgcctgtgcctgtgacgtccctgtggacctgtgagccatccccccccttatctctgctctgaatactgcatgaagcattaaacgtgcaatgaagtacaaaaaaaaaa

SEQ ID NO: 555160 - DNA, 1200 bp, Homo sapiens
  misc_feature (197)..(197): n is a, c, g, or t
tttttttccatgtttttttttaaacaatggaagtgtcaaaaaatagggtcaactgtgtgtttagacttaaatttacatttaatgtgtattattgctgcacgtgaatgtggaacctttgtgtattgtgtaatttatcattagagaaagcacagttgtgcatctcatatttagtgcgcaatttatccctcaagtgaaanatcttccagagtctccttttatatttgtgtggaattatctccgtgttaaaccaatctcaaacccaccagaaacatgtgattgtgtaccaacagttaaaatgtgttcctcttgtacatttaaaccgtgaagatttctcgtgttataattaaacaaaagaaaacagtgttaaggaaagaggtgtactttagaagccctctttactttctcatagagttccgagaaaacacccttagaacaattctcagagggcattcttataatctctctcccattctagagaaaccaaacaaaaagaattaattttgtgtgctcatgtgcgtgttaaatctccattcattatatgtggattaaacaccgtggtgtgcaaattgtgggtctcaaaggtgatctccaaaacaaaacactgtgattgtctccaaggcgtggccattattgggggcaaccataatctcgcgttaaaccgtgggtgtggtctccacaataagcacgaagcttttacaaagatatctctttccccattttttctatctctggtgttctctttttcacccagagggttttctttgaaaagagtttccctggttgtgctccctaaaaataaacgtttgttaaggaagtcttcccccaagtttgggagttatactcaccatccatccggaaatctgaaacgcaaacgcgtttttgtgttagacccccttcgcaaaaattttcccttgtttgggtcggccgtggtggggacttttaacccaaaaaagtttgctcgttcatttataccacaactatagggggctccatgtagaggagccccgccttgtggggaacagctcacccagagctattcaagagaagagtcactatatctaaaatcattgttggagaggacatgtagattatcatcttgtagagcacatttcatatcatcataagacacagcggtggtgtgccacacaaattcatcacaaatattcaacaaactatgttctgcaaactgtataaggagca

SEQ ID NO: 555161 - DNA, 2670 bp, Homo sapiens
ggggaaagcactgtcgtcacgacttcccgttgccgacatggatcactgcgcctgttgccttcaaatgccgctcacacggaccttgtcagttcttgtggcgaaatggtctgcatcaggggcccgatcagagactccgactgcatgtggaatgctcgggcgtggcctgcgccagggcggcggcgcagctgcagctctcgcggcgcacggcggcgaaggggtcgagcagggagcagcgcagcgcgcgcagagcgtcgtccaggaaggaagcagccaccctcgccatggcctccccgcccgcctgcccctcggaggaggacgagagcctgaagggctgtgagctgtacgtgcagctgcacgggatccagcaggtcctcaaagactgtatcgtccacctctgcatctccaagcccgaacgccccatgaagttcctccgggagcacttcgagaagctggagaaggaagaaaacaggcagattttggcgcggcaaaagtcaaactcacagtcggactcccatgatgaggaggtgtcgcccacccccccgaaccctgtggtgaaggcccgccgccggcgaggaggcgtgagtgccgaggtgtacaccgaggaggacgccgtgtcctacgtcaggaaggtgattcccaaggactacaaaaccatgactgcgctggccaaggccatctccaagaacgtgctcttcgctcacctggatgacaacgagaggagtgacatattcgatgccatgttccctgtcactcacatcgctggggagactgttatacagcaagggaatgaaggagacaacttctatgtcgttgatcaaggggaagtggatgtgtacgtgaacggagagtgggtgaccaacatcagcgagggaggcagcttcggggagctggcgctcatctacggcacccccagggctgcgaccgtgaaagccaagacggacctcaagctctgggggatcgaccgggacagctaccggcgcatccttatgggcagcacgctgaggaaacgcaagatgtacgaggagttcctcagcaaggtctccatcctagagtccctggagaagtgggagcgtctgaccgtggcggatgcgctggagcccgtccagtttgaagatggagagaaaatcgtggtccagggagagcctggggacgacttttacatcatcacggagggcaccgcgtccgtgctgcagcgccggtcccccaatgaggagtacgtggaggtggggcgcctgggaccctctgactacttcggggagattgcactgctgctgaaccggccccgggcggccactgtcgtggcccgggggcccctcaagtgtgtgaagctggaccggccccgcttcgagcgtgtgctggggccctgctctgagatcctcaagaggaacattcagcgttacaacagcttcatctccctcaccgtctgagcacagctcccgccctgcagccccagctccccagtgtggtggccgtgccctgctcgtctgtgtcgggggcccgggagccgctgtgtgaggtgtgggccgggtggggctgggtcccggcagcgtgaggactgccccttccccggactcactttttggaataaatgatcaccttgtgcatttccaaatcaaaggacaagcggacaaaatgcatcccaagatcaaggaagggacaggccagcttcctccccacacgcctccccggctgcctctgtgggcttctcctggggggcccaccccacccctgccagtctcctggagatgcttgaggatcggtcctccccagaaccaggccaggacgttgcccctggggcctggtgaccctgtgaggtcaggtcccccagattgaggtctgagtgtgggcaagtgtgtcaaaaggggctgccccccaggggagatgaggctgagagcagggagttgaggccgaagaagtcaaggcccctcccgcaaatgtgtacccctgcccgcgccactgcaccccgccgcacccccacctcccccgggggccctgctgcggatgccggagtgggagagtctctgagctgtgagattgatcttgcccctaattggagaggaagccgggcgccaagacacacggggctcctgccttgggagccagggccgcggccgcaggtagaccccagtagggggggccgggctcgaagttcctttgggaggggctggcgggactccagcaggccgtcctcacctttcttagaaagtccacccagggcaagttgatgttgggggaaagcagaagtcaagccagccgcgggccccacacgccccgacccgctcaaccgacttgtcccttaaatgtgtcttggatcccgcagtgatgacgtgagccagccaggcccgaaagggtgaggccagtgcagagaagcttcccaggggattcctgggttcccccgaaagacaagcgaggtcattgcagttcacctgatgttgctcctgtcccgtgcgtcccggggaggctgtccttggtccgaggctgctcgttgcagcccctcccctgctggcggttacgatgcgtggggtccccctccccacccagccccggccacgtcgccgtgtcccgcctgtgcctgtgacgtccctgtggacctgtgagccatccccccccttatctctgctctgaatactgcatgaagcattaaacgtgcaatgaagtacaaaaaaaaaa

SEQ ID NO: 555162 - DNA, 2496 bp, Homo sapiens
  misc_feature (42)..(42): n is a, c, g, or t
gggcggcgttgggggtgcagcatgcttgctgctgcggcgcgngggggcgggcgtggagggcggcgccgctgcagtgcggggacccgctcgctcgctcgccagccgtccccgcgccccgcgtcccgcgcagccgcctcctggcctcgggcgccgcgcatccaggaaggaagcagccaccctcgccatggcctccccgcccgcctgcccctcggaggaggacgagagcctgaagggctgtgagctgtacgtgcagctgcacgggatccagcaggtcctcaaagactgtatcgtccacctctgcatctccaagcccgaacgccccatgaagttcctccgggagcacttcgagaagctggagaaggaagaaaacaggcagattttggcgcggcaaaagtcaaactcacagtcggactcccatgatgaggaggtgtcgcccacccccccgaaccctgtggtgaaggcccgccgccggcgaggaggcgtgagtgccgaggtgtacaccgaggaggacgccgtgtcctacgtcaggaaggtgattcccaaggactacaaaaccatgactgcgctggccaaggccatctccaagaacgtgctcttcgctcacctggatgacaacgagaggagtgacatattcgatgccatgttccctgtcactcacatcgctggggagactgttatacagcaagggaatgaaggagacaacttctatgtcgttgatcaaggggaagtggatgtgtacgtgaacggagagtgggtgaccaacatcagcgagggaggcagcttcggggagctggcgctcatctacggcacccccagggctgcgaccgtgaaagccaagacggacctcaagctctgggggatcgaccgggacagctaccggcgcatccttatgggcagcacgctgaggaaacgcaagatgtacgaggagttcctcagcaaggtctccatcctagagtccctggagaagtgggagcgtctgaccgtggcggatgcgctggagcccgtccagtttgaagatggagagaaaatcgtggtccagggagagcctggggacgacttttacatcatcacggagggcaccgcgtccgtgctgcagcgccggtcccccaatgaggagtacgtggaggtggggcgcctgggaccctctgactacttcggggagattgcactgctgctgaaccggccccgggcggccactgtcgtggcccgggggcccctcaagtgtgtgaagctggaccggccccgcttcgagcgtgtgctggggccctgctctgagatcctcaagaggaacattcagcgttacaacagcttcatctccctcaccgtctgagcacagctcccgccctgcagccccagctccccagtgtggtggccgtgccctgctcgtctgtgtcgggggcccgggagccgctgtgtgaggtgtgggccgggtggggctgggtcccggcagcgtgaggactgccccttccccggactcactttttggaataaatgatcaccttgtgcatttccaaatcaaaggacaagcggacaaaatgcatcccaagatcaaggaagggacaggccagcttcctccccacacgcctccccggctgcctctgtgggcttctcctggggggcccaccccacccctgccagtctcctggagatgcttgaggatcggtcctccccagaaccaggccaggacgttgcccctggggcctggtgaccctgtgaggtcaggtcccccagattgaggtctgagtgtgggcaagtgtgtcaaaaggggctgccccccaggggagatgaggctgagagcagggagttgaggccgaagaagtcaaggcccctcccgcaaatgtgtacccctgcccgcgccactgcaccccgccgcacccccacctcccccgggggccctgctgcggatgccggagtgggagagtctctgagctgtgagattgatcttgcccctaattggagaggaagccgggcgccaagacacacggggctcctgccttgggagccagggccgcggccgcaggtagaccccagtagggggggccgggctcgaagttcctttgggaggggctggcgggactccagcaggccgtcctcacctttcttagaaagtccacccagggcaagttgatgttgggggaaagcagaagtcaagccagccgcgggccccacacgccccgacccgctcaaccgacttgtcccttaaatgtgtcttggatcccgcagtgatgacgtgagccagccaggcccgaaagggtgaggccagtgcagagaagcttcccaggggaggctgtccttggtccgaggctgctcgttgcagcccctcccctgctggcggttacgatgcgtggggtccccctccccacccagccccggccacgtcgccgtgtcccgcctgtgcctgtgacgtccctgtggacctgtgagccatccccccccttatctctgctctgaatactgcatgaagcattaaacgtgcaatgaagtacaaaaaaaaaa

SEQ ID NO: 555163 - DNA, 175 bp, Homo sapiens
aaggctacctgtgagagatctttaaggcgagctcgggctactggcgcgggctgtataacgctgtcaggtgggtgcgctgaagggcggccacgagaacggagcggaagctagctaggaggttgcggaggccacagctcttccctctgcccaggtggttacccagggatgataccgc

SEQ ID NO: 555164 - DNA, 2200 bp, Homo sapiens
ccggtggaggacgtgtgggcgcggccggtggaggacgtgagggcgcggccggtggaggacgtgagggcgcggccggtggaggacgtgtgggcgcggccggtggaggacgtgagggcgcggctggtggaggatgtgtgggcgcggtgctggtacttttacaatgcttcgtgaacctgctgtccgtagctctgtttcacagatggggaaactgaggcctggcgattaagtggcctgctgaaatcatccagctatgacatattcgatgccatgttccctgtcactcacatcgctggggagactgttatacagcaagggaatgaaggagacaacttctatgtcgttgatcaaggggaagtggatgtgtacgtgaacggagagtgggtgaccaacatcagcgagggaggcagcttcggggagctggcgctcatctacggcacccccagggctgcgaccgtgaaagccaagacggacctcaagctctgggggatcgaccgggacagctaccggcgcatccttatgggcagcacgctgaggaaacgcaagatgtacgaggagttcctcagcaaggtctccatcctagagtccctggagaagtgggagcgtctgaccgtggcggatgcgctggagcccgtccagtttgaagatggagagaaaatcgtggtccagggagagcctggggacgacttttacatcatcacggagggcaccgcgtccgtgctgcagcgccggtcccccaatgaggagtacgtggaggtggggcgcctgggaccctctgactacttcggggagattgcactgctgctgaaccggccccgggcggccactgtcgtggcccgggggcccctcaagtgtgtgaagctggaccggccccgcttcgagcgtgtgctggggccctgctctgagatcctcaagaggaacattcagcgttacaacagcttcatctccctcaccgtctgagcacagctcccgccctgcagccccagctccccagtgtggtggccgtgccctgctcgtctgtgtcgggggcccgggagccgctgtgtgaggtgtgggccgggtggggctgggtcccggcagcgtgaggactgccccttccccggactcactttttggaataaatgatcaccttgtgcatttccaaatcaaaggacaagcggacaaaatgcatcccaagatcaaggaagggacaggccagcttcctccccacacgcctccccggctgcctctgtgggcttctcctggggggcccaccccacccctgccagtctcctggagatgcttgaggatcggtcctccccagaaccaggccaggacgttgcccctggggcctggtgaccctgtgaggtcaggtcccccagattgaggtctgagtgtgggcaagtgtgtcaaaaggggctgccccccaggggagatgaggctgagagcagggagttgaggccgaagaagtcaaggcccctcccgcaaatgtgtacccctgcccgcgccactgcaccccgccgcacccccacctcccccgggggccctgctgcggatgccggagtgggagagtctctgagctgtgagattgatcttgcccctaattggagaggaagccgggcgccaagacacacggggctcctgccttgggagccagggccgcggccgcaggtagaccccagtagggggggccgggctcgaagttcctttgggaggggctggcgggactccagcaggccgtcctcacctttcttagaaagtccacccagggcaagttgatgttgggggaaagcagaagtcaagccagccgcgggccccacacgccccgacccgctcaaccgacttgtcccttaaatgtgtcttggatcccgcagtgatgacgtgagccagccaggcccgaaagggtgaggccagtgcagagaagcttcccaggggattcctgggttcccccgaaagacaagcgaggtcattgcagttcacctgatgttgctcctgtcccgtgcgtcccggggaggctgtccttggtccgaggctgctcgttgcagcccctcccctgctggcggttacgatgcgtggggtccccctccccacccagccccggccacgtcgccgtgtcccgcctgtgcctgtgacgtccctgtggacctgtgagccatccccccccttatctctgctctgaatactgcatgaagcattaaacgtgcaatgaagtacaaaaaaaaaa

SEQ ID NO: 555165 - DNA, 2482 bp, Homo sapiens
agcggggggggaggagccggcggcgcgcgcctccctgggcccggactcggccgcctcccgccgcctcccgcgcggcatggactgagcgccgccggccaggccgcggggatggggccgccgctcccgctgctgctgctgctactgctgctgctgccgccacgcgtcctgcctgccgccccttcgtccgtcccccgcggccggcagctcccggggcgtctgggctgcctgctcgaggagggcctctgcggaggtccgaggcctgtgtgaacggaagaaaacaggcagattttggcgcggcaaaagtcaaactcacagtcggactcccatgatgaggaggtgtcgcccacccccccgaaccctgtggtgaaggcccgccgccggcgaggaggcgtgagtgccgaggtgtacaccgaggaggacgccgtgtcctacgtcaggaaggtgattcccaaggactacaaaaccatgactgcgctggccaaggccatctccaagaacgtgctcttcgctcacctggatgacaacgagaggagtgacatattcgatgccatgttccctgtcactcacatcgctggggagactgttatacagcaagggaatgaaggagacaacttctatgtcgttgatcaaggggaagtggatgtgtacgtgaacggagagtgggtgaccaacatcagcgagggaggcagcttcggggagctggcgctcatctacggcacccccagggctgcgaccgtgaaagccaagacggacctcaagctctgggggatcgaccgggacagctaccggcgcatccttatgggcagcacgctgaggaaacgcaagatgtacgaggagttcctcagcaaggtctccatcctagagtccctggagaagtgggagcgtctgaccgtggcggatgcgctggagcccgtccagtttgaagatggagagaaaatcgtggtccagggagagcctggggacgacttttacatcatcacggagggcaccgcgtccgtgctgcagcgccggtcccccaatgaggagtacgtggaggtggggcgcctgggaccctctgactacttcggggagattgcactgctgctgaaccggccccgggcggccactgtcgtggcccgggggcccctcaagtgtgtgaagctggaccggccccgcttcgagcgtgtgctggggccctgctctgagatcctcaagaggaacattcagcgttacaacagcttcatctccctcaccgtctgagcacagctcccgccctgcagccccagctccccagtgtggtggccgtgccctgctcgtctgtgtcgggggcccgggagccgctgtgtgaggtgtgggccgggtggggctgggtcccggcagcgtgaggactgccccttccccggactcactttttggaataaatgatcaccttgtgcatttccaaatcaaaggacaagcggacaaaatgcatcccaagatcaaggaagggacaggccagcttcctccccacacgcctccccggctgcctctgtgggcttctcctggggggcccaccccacccctgccagtctcctggagatgcttgaggatcggtcctccccagaaccaggccaggacgttgcccctggggcctggtgaccctgtgaggtcaggtcccccagattgaggtctgagtgtgggcaagtgtgtcaaaaggggctgccccccaggggagatgaggctgagagcagggagttgaggccgaagaagtcaaggcccctcccgcaaatgtgtacccctgcccgcgccactgcaccccgccgcacccccacctcccccgggggccctgctgcggatgccggagtgggagagtctctgagctgtgagattgatcttgcccctaattggagaggaagccgggcgccaagacacacggggctcctgccttgggagccagggccgcggccgcaggtagaccccagtagggggggccgggctcgaagttcctttgggaggggctggcgggactccagcaggccgtcctcacctttcttagaaagtccacccagggcaagttgatgttgggggaaagcagaagtcaagccagccgcgggccccacacgccccgacccgctcaaccgacttgtcccttaaatgtgtcttggatcccgcagtgatgacgtgagccagccaggcccgaaagggtgaggccagtgcagagaagcttcccaggggattcctgggttcccccgaaagacaagcgaggtcattgcagttcacctgatgttgctcctgtcccgtgcgtcccggggaggctgtccttggtccgaggctgctcgttgcagcccctcccctgctggcggttacgatgcgtggggtccccctccccacccagccccggccacgtcgccgtgtcccgcctgtgcctgtgacgtccctgtggacctgtgagccatccccccccttatctctgctctgaatactgcatgaagcattaaacgtgcaatgaagtacaaaaaaaaaa

SEQ ID NO: 555166 - DNA, 736 bp, Homo sapiens
aacagtcgtatcaacgcagagggcccattacggccggggcccgcaaggtcgctttgcagagcgggagcgcgcttaagtaactagtccgtagtccgagggtgcgccgtgtcctttgtgcgttggtaccagcggcgacattgacggggtacactccggatgagaaaactgcggctgcagccagcttgtgagagctgagaaaggcgatggcctgaaggaccaggagcttgagccctcgggaagcccgggtgcttggccccccagagcaacgatgggggcctatggagaaacttctgggaaacttaacattttggggaggaataaattccccttgggacggcacccctgggtccagtgggggttatacaaaaaagaagtatctgggtttacactccaggttactttgttacctggtctggatttatccattattaccttgcacgtatcatggtctctgaaaaaacccattattggcatagtttgaaaaagaaggtccaaggaatattcccttgggtggattacaacttctggaagactgggagaaagtaatttccacccaagttgacaacgaacttttcctgggatcaaccattccatttacaaggatttactgttaccaaaccgctttacacacgggcttaatgaagacccttaagttggggtgccttattttttacccaataattttaagcggaaattttcctggcgacaaaggtaacttttacatacacggtttaac

SEQ ID NO: 555167 - DNA, 529 bp, Homo sapiens
  misc_feature (320)..(320): n is a, c, g, or t
  misc_feature (385)..(385): n is a, c, g, or t
  misc_feature (429)..(429): n is a, c, g, or t
  misc_feature (439)..(439): n is a, c, g, or t
  misc_feature (452)..(452): n is a, c, g, or t
  misc_feature (477)..(477): n is a, c, g, or t
  misc_feature (479)..(479): n is a, c, g, or t
  misc_feature (481)..(481): n is a, c, g, or t
aaactttttatttggtcaactgaaaaatatcacggttttttttccccttggcactcataacaggacgacgctaggactccaaacacacacggcatcaataacgtatcttgactaacgaggaacaaaagcagacacagttctagcattccagagagcggatgcttatgctcacattctaccagggcatgtggagagggcacacatagcttgagaaagtcaacctcgtttggcatcttctcatattctcacattgagtctcactaacatgctagaatagatacgtctctaccaagagcgtagaagagtgcagctcttagacncttgttgaactagcatgtcctacgtatgtagaaacacaatagcaagtgactgtcattatctgaanatatatatagtgtgagtgtgtgagggccatgagctgcaccattntgcgtgtggnggcaatcactttngtgtatgaatcgcgacaaatgatanantntccgtatgtacgtagcatcgaatatgacttgacaagtaagtaccacac

SEQ ID NO: 555168 - DNA, 142 bp, Homo sapiens
  misc_feature (88)..(88): n is a, c, g, or t
acctagcaggcacctcccaggcaaagcatgggcaagggggctgggcacgtgcaagcaaatcataccaagggtgttccagccattttcncccttccccatctttcctgggtcacgcagctcgcaattctgtcacatccatggt

SEQ ID NO: 555169 - DNA, 654 bp, Homo sapiens
  misc_feature (164)..(164): n is a, c, g, or t
  misc_feature (166)..(166): n is a, c, g, or t
  misc_feature (169)..(169): n is a, c, g, or t
  misc_feature (173)..(175): n is a, c, g, or t
  misc_feature (188)..(188): n is a, c, g, or t
  misc_feature (190)..(190): n is a, c, g, or t
  misc_feature (310)..(310): n is a, c, g, or t
  misc_feature (312)..(313): n is a, c, g, or t
  misc_feature (315)..(315): n is a, c, g, or t
  misc_feature (318)..(318): n is a, c, g, or t
  misc_feature (320)..(321): n is a, c, g, or t
  misc_feature (331)..(331): n is a, c, g, or t
  misc_feature (342)..(342): n is a, c, g, or t
  misc_feature (348)..(349): n is a, c, g, or t
  misc_feature (351)..(351): n is a, c, g, or t
  misc_feature (359)..(359): n is a, c, g, or t
  misc_feature (363)..(363): n is a, c, g, or t
  misc_feature (378)..(378): n is a, c, g, or t
  misc_feature (381)..(381): n is a, c, g, or t
  misc_feature (386)..(386): n is a, c, g, or t
  misc_feature (401)..(401): n is a, c, g, or t
  misc_feature (405)..(407): n is a, c, g, or t
  misc_feature (437)..(439): n is a, c, g, or t
  misc_feature (455)..(455): n is a, c, g, or t
  misc_feature (463)..(463): n is a, c, g, or t
  misc_feature (480)..(480): n is a, c, g, or t
  misc_feature (485)..(485): n is a, c, g, or t
  misc_feature (543)..(543): n is a, c, g, or t
  misc_feature (557)..(557): n is a, c, g, or t
  misc_feature (601)..(601): n is a, c, g, or t
cggcccggccctgccgcggaggcgaggccgccagtgtcccgcgcccctgatatctgcagtgagcctgatacctgcctctgcccttctgagcctgttcctcttccctgagtacagggcacaaagcttgcgccctgaggggcggccggcgcgctccctggcccggnanccncccnnncccgaaacccccncncctccccgacccggggccggggcccctgccgccgccgccgccgccttccgacccctgcgccccggccccggtcccccgggccatgcagcctcggccccgcgggcgcccgccgcgcacccnannanatnannctccgcaatngcaccttcctnacgctnntnctcttctncctntgcgccttcctctcnctntcctngtacgcggcactagngtannngcgagttgtggagtttacaggggagttctnnnctgccgatcggtgcancagcgagnggagagctcagcgctcnaagantcacctggtgctggagagatcagagggccgtgtcagaacgcacgcgcgcgagacgagnggcactcgcactgngggcgctcacagaggaccccgatggagcgtggcacgctcacacnagcagtgctgcactgcccacgtctacatcactgcgacactgctggcaaagaga

SEQ ID NO: 555170 - DNA, 1140 bp, Homo sapiens
ggtttttgggaatgcgaggcagccgctggcggaggcgcattctcggggtggcgaggacgcctccgagggcggcgcggaggaaggacgccggctgtgcgcggtggtggcagcgcggtgcgccggggaatggcccggtcataacgtgcgctcactgcccatgacgatccccgatgtgtttccggcactgccgctcatcgccatcacccgcaacccggtgttcccgctgcttttatcaagattatcgaggttaaaaataagaagttggttgagctgctgagcaaggaaagttcgtctcggcccagccttatgtcggcgtctttctacaagagagatgacagcaatgagtcggatgctggtcgagagcctggactgaacatctaccacacggggacgtttgcccagatccatgagactgcaggacctttggggacaaagcctgcgcatgatcgtcatgggacacagaagagtccatatcatgcagacgagctggcaggtggagcccgaggagccggagggccggagcaacaagcaacaaggccccgcaggcaagtcaaacgcggcggcaacgaacggaggcggaggaccgagctgaggcgcctagggcacccgtgtggatgcttggcggactgggagccccaacccccttgagcttcccccgggcttgcgcggtgctcactggtgcgacggtcagacgaaacggtttgttccaccgatggactcttcccaggcttcaccggacggcagtgtgacacagcccttgtacctggcacacagtatccggctgaaatgacacccactcacggggaccattccatttgcccctgtgcacaccactcatccatacatcgcggaacgtacatgcttcgcctttgtcacgcaaatgtattgccggtgcgctgtggacccgacctcggggatcgtcgtagtggcaagcaaccgccccaagctcttcccgctggaagtgacgaaaatttgggaacgcacccgcgcggagcctcacatcggagcgtcaccgataagttccccattgcacggcttggacacgcgaacctccctggtgacgcgacgacgccgatgtaattcacctaagtcgtgacactgtatacacgggacctacgttccccgttacggcaaacagag

SEQ ID NO: 555171 - DNA, 583 bp, Homo sapiens
  misc_feature (164)..(164): n is a, c, g, or t
  misc_feature (166)..(166): n is a, c, g, or t
  misc_feature (169)..(169): n is a, c, g, or t
  misc_feature (173)..(175): n is a, c, g, or t
  misc_feature (188)..(188): n is a, c, g, or t
  misc_feature (190)..(190): n is a, c, g, or t
  misc_feature (310)..(310): n is a, c, g, or t
  misc_feature (312)..(313): n is a, c, g, or t
  misc_feature (315)..(315): n is a, c, g, or t
  misc_feature (318)..(318): n is a, c, g, or t
  misc_feature (320)..(321): n is a, c, g, or t
  misc_feature (331)..(331): n is a, c, g, or t
  misc_feature (342)..(342): n is a, c, g, or t
  misc_feature (348)..(349): n is a, c, g, or t
  misc_feature (351)..(351): n is a, c, g, or t
  misc_feature (359)..(359): n is a, c, g, or t
  misc_feature (363)..(363): n is a, c, g, or t
  misc_feature (378)..(378): n is a, c, g, or t
  misc_feature (381)..(381): n is a, c, g, or t
  misc_feature (386)..(386): n is a, c, g, or t
  misc_feature (393)..(394): n is a, c, g, or t
  misc_feature (396)..(396): n is a, c, g, or t
  misc_feature (398)..(398): n is a, c, g, or t
  misc_feature (407)..(407): n is a, c, g, or t
  misc_feature (414)..(414): n is a, c, g, or t
  misc_feature (417)..(417): n is a, c, g, or t
  misc_feature (427)..(427): n is a, c, g, or t
  misc_feature (437)..(437): n is a, c, g, or t
  misc_feature (501)..(501): n is a, c, g, or t
  misc_feature (565)..(565): n is a, c, g, or t
cggcccggccctgccgcggaggcgaggccgccagtgtcccgcgcccctgatatctgcagtgagcctgatacctgcctctgcccttctgagcctgttcctcttccctgagtacagggcacaaagcttgcgccctgaggggcggccggcgcgctccctggcccggnanccncccnnncccgaaacccccncncctccccgacccggggccggggcccctgccgccgccgccgccgccttccgacccctgcgccccggccccggtcccccgggccatgcagcctcggccccgcgggcgcccgccgcgcacccnannanatnannctccgcaatngcaccttcctnacgctnntnctcttctncctntgcgccttcctctcnctntcctngtacgcnngngnggggggggngaaaggngangttgtttacntttaccatcnttaattcctttctcttctctatctttttcactcatcctatcattataacctcaatctccccaantatcccaacctttttctttactatatcaatatttccttttcataaattcactctcttctatacntatacttcaatctcacct

SEQ ID NO: 555172 - DNA, 388 bp, Homo sapiens
cacaggagtggcaacatgaaggaccacccccctgcgaagatgggttactttaaaggttagtcgttattaccaagtgatgtgatcccacacagctgtgggtcacactaactacattatagtaccacccagagcgaccactggctcctttaacaccaagtcctacacagctctggccacccattactacaatgttacaacattcacaataaagcacagtagcaataaagcacagtaaaaatcaactggagagtactctcacaagcaaagatatacctcactccagtcccattttctgggcacacacaattacccttccaccccaaccatgctatgagatacgcatcaacacttgagatctatcttcctacctactgtgggtaatgagaga

SEQ ID NO: 555173 - DNA, 120 bp, Homo sapiens
cgggcgtaagcattcgtcaggtacactgcggtctcaataggcccgtgactgctgtctacccaccttggcagctgtcacaggaggtcgtctgtctgcccagccacagaatggccgacccct

SEQ ID NO: 555174 - DNA, 528 bp, Homo sapiens
  misc_feature (274)..(274): n is a, c, g, or t
agcggaaaaaacaactattgggtacaaggcttagtacctggatgataaaataatctgtacaacaaacccctattacctaagttttcctatataacctgcacatgtaccctcaaaagtaaaataaaagtttaaacatagttccctattttgaaagattagagcaatatttcattgttgatagaccttcaataatagtcaaatgtacctaatatatattaaacatctacatggttctatgatactaacataaacccatagccaatgaactcttatngtcaagaagcttatagagtagaagtagaattaatttaataattaatatagagtagaagtgaattagtagagtagaagtgaattaatttaataatataaaaatgactctgtattataaatgttaaagtcaagagtaatttttttttttttttttttgggaccaagaattctcccttcgtttgcccagggtgtggattgcagtgacacaatctcagacaaggcaccacactggggccacaaagaagaatcggccgg

SEQ ID NO: 555175 - DNA, 145 bp, Homo sapiens
tcacgggaatatataatgacaggaaggatgatcccatcatacttctgctggaaccagcgcgatggcctcctcttagctagatactagtgtatggccccgaggcagcctgtcctgcgctatcttgtctagagatgctagaaacctg

SEQ ID NO: 555176 - DNA, 993 bp, Homo sapiens
gtgcccagggaggatgctgcagagtgactacctgcagccctgttctcattcatttggatgcgcctcgcagaagatctggggagaccatacatgctttagagccattgtttatgctccttagtcaagtatggcaagagcatatggccagattcgcatgtttcaaaggctgcagttgataagggcatgttgcaccaatcgctggctaatacggtgaagaccccttctctactaagaaatacagagaaaattagccgggcttggtggcgggtgcctgtagtcccagctactccggaggctgaggcaggggaatggtgtgaacccaggaggcgggagcttgtcagtcgtagccgatgaatctattaccagctgtcgagctccagatcctggtgcttcacaatacaaggataaagaacaacactgaggttaaaacctggtggtcctcggttgcactgcgagagatgcctatcgcgagggtaccccacatgcgggtgctctccatcgagaaaaaccatgtagaaaagtagggggcgcctctcttgggaatacttttggggggggctgaccgttcagcctgcatgcattagcgaatgacgaccaaactggggctaacgagggggtttcacgtctctaactcgggagggtattaccgaggtcattgcactagagaattattgtggccaatgtgtgcggagggaacagccccagtggcgagtttgaactactgctgcccgcgcgaaggggaagataggtggcgctattacagaaagggtcatcccaagtatgactagatttcgatttatggtataaccacatataagaacttggcctgtgaccaaagggcagacgccaacctcgttgattgaataccacaggacacgggtggcttgtccacacattgctctgtggagttcttaattgtaacctgtcaccatgaaatctggtccttctgtggggcaagtggagtctacacatcacgcccttgtataaatcccc

SEQ ID NO: 555177 - DNA, 217 bp, Homo sapiens
ccctgtcatcgataacgcacaaacccctgatctaggccttctgtacagatgcctaccatcctgccgcctactcctcctagacctaagtctgactagaatagccattaccttataacaatttcacagcaccaaatctccacgctccatcatcacctcaatcccggacaaggcatagttaaactttacttcctctatttcttcttcccactcatcctaa

SEQ ID NO: 555178 - DNA, 729 bp, Homo sapiens
agtcttgcgtcgacgagtccgggtctgtcagcgcagcggccaggtaagctgcaataacctatgtgtacactagaggtccccgagcttaatgctgagctcttgatctctgtgcttgcgttctctccagttagtgagtaacgctgggcgggttcatctgcgaggccgttctgctaccgaacttgccgtggtgggactcctggattggtgcttcggtgctcgctctaattgccgggtagatatggctcgcgatctacgtgtctctagatgatctgcggagaccttggactgtcggacgtgttgggagattgctctgttggcggttgctgggtggttggatggctccctgcgtgccactcataccgagtttggccatgtgagcagccttgcactggagttggttcactcgtatcttgtgtgcagcgatactttgatgcttccattcttgtatatcgccgttccggcgtacttggaggaccttttctagtcttttgcctctgaaattacccctagaagactagtttagttggtcccactagtgtcgtgtgtcgtagttctggtacactctacccttgctaggataggtccgcggaaggtgaataaacccgtttttccattgccagttgagttgccatctcgggtgaggagagctacattagttccctatctatgtttgcgacgcacattactagttgacgttgcgtttgacaggtgtcatcccctttgaatgcc

SEQ ID NO: 555179 - DNA, 416 bp, Homo sapiens
gcacttgaggttaaggcaactggaagcatatcgagcagtgagtttctgtctcacagaattaaagcaattctcctggctcactgcccacgtagtgggaaagcgcaagtacaaaatgcgccttgcagtaactgcttaggaattatgtactgtagcagcaaccaaggaggtttacttaacaagtgtgggaacaaagcattgcaacaggtgaaaatctgccacaccacactagagatggtcgcgcgcatagccgtacgcgacccaacatacactgtagccttaataacgtaatgaacgaaatagatgcaccatctataatccgagtcacaataacatcgtcctgactacaattagtcaccgacaaactatgtcaagctagtacaatacaacactttactaaaggtatacattggcggttc

SEQ ID NO: 555180 - DNA, 494 bp, Homo sapiens
gagtgcagtggcgtgatcacagctcattgcagtctcaatcccctaggctcaagcattcctcccacctcagcatcccaagtagctgggactacaggcatgcgcctctatgcctgactaagttttaaggtttttttttttttttttttttgtaaaaacggggctttgtttttttccccaggcggttctcgatggagtgtctccttctcttataaggagaaacaaaaatgttttattagggaaagggagtgtatgatcttccaccatcagcataccacaattagagaggctgatccccccatatgttccaattgatctataaaacagggattaaccacaacccatgaaaagacggatgttaccttccaaaaattctaactatcatatctggtgaatataacaacaaacaaaaatgtgtaaaacacacaaaactcttatgaaatatctcatcttctgaaaaaaaaaggggagaaaaagggtaggcgtatggaggggcc

SEQ ID NO: 555181 - DNA, 315 bp, Homo sapiens
tatgtgttgttttatttctctcttgttcccactatatcttcctcatgggacatgagactccacaacctgctaaaaatgagccttcctaacaatgtgggacctatctgtctaggaataaacaatcccaaccatgagtcatcagacaaaacctgagaccagagactcaatttcttctaaaatgctttctcttaaagatttttttaaattgtgggagaaatgtgaaaggaaaattaaaactcaggaccccaattatctatgcccaaagaataaaattaagctgaaagctgagtcatgcaagaaactgcctttcctttt

SEQ ID NO: 555182 - DNA, 206 bp, Homo sapiens
tgttaccgtgctggcccgagttaggcgcaggtgtggtcccccacaaaaaaaccctcaaacacgagggtgcattcatgtccccattttacctgcaagcaaagtaaggctcaggaaggccagctgcctgcccagcttccctgttgcaaagaggcacaagcgggggtggggattgggggtcagcagcctaacccactgctatgacacga

SEQ ID NO: 555183 - DNA, 230 bp, Homo sapiens
gtacagaaccaacagcaatatgcatcccatatgtgtgaggagttaagtctgtatcgtaattacaacagggaccattgaatgatcagcatgtagacatcatatgtctagggctcacacaggatgtcaaataatatttctcaatatgagaagtatttactttagaaatgtacatgtaagtgcttgggtcattcgggtcgtatgggtaccgacgctcgaaatatcgtatcatg

SEQ ID NO: 555184 - DNA, 175 bp, Homo sapiens
gctagtattcccaggcaaagctctactagacatgctttggtgtatcagaacaccggagtctgagtaagctgacaatctggatgtgagatgagagtctgctgtggtatgtctattcaggtacctacagactccagtggattatcacgtagcagttagattatgagtttgagtaagg

SEQ ID NO: 555185 - DNA, 357 bp, Homo sapiens
gtctcgcttcaaactctatatacaggacactggctttccgatcgggagtcattacgaacggacgtgggacaaatatctcctacgaggcaacataaacggggaacaggtagggagaaaacataagttactaaattaaatgtcattttgccgtttatagaacctccctatcctgtacatcaattaatagtagcccaacagaatgaaagtagctccaacctccttaaattcctctcctggtgtggtagacatggaaatgcgctggccacatcccccttcaagggaagacttgttgctcctcctctcagcccttcctgtggtagctcacatccagactgagggaggccgagctatcaaagt

SEQ ID NO: 555186 - DNA, 364 bp, Homo sapiens
cttgcggggctcataaatgcatgtggcacttagtgtccatggctctccagagggtggcagctggagtctgtcagtgtacctaactgagacagcacagccacctagctagcaacatttgtttcagtctgaacaattatatacttgtagaattcagtccacagatacaccatctgaaacagcttcatggggtgaactctaacagtagttgctatggttcagaatgagacttactactctgctatctagatctgaactccttggcttctttacttagttcaagccccagcctaggaaagccagtcacataacagttggcccaggggtcttagagctttacctgaatatcagacccgcgagggagcac

SEQ ID NO: 555187 - DNA, 428 bp, Homo sapiens
  misc_feature (8)..(8): n is a, c, g, or t
atgggggntttagccaaggatctttgtaccaaaagcaccggtggggccccccccttcaatgtccctgtcaccaagactgacaaaacgctagtcctgctgatgggcaaaaaaggtgtccccggtggtttgatcaacaaaaaatgttatgaaagggcccccccccttgggggttcccagaattgacctggtttgtcccttccccttccccgctccccccagctttgcacccctttcctccccatacacccccaaaccattttattttttgggccattcccccataccccttattgctgccaaaaccccatgggttgggggccagggttggatggaaaaacccccccccctacccaaatcccccccggggggggttggaaaacttttgttttttggggtttttttttttctgaataaaaaagattctccta

SEQ ID NO: 555188 - DNA, 651 bp, Homo sapiens
  misc_feature (136)..(136): n is a, c, g, or t
  misc_feature (149)..(149): n is a, c, g, or t
gatctttagacaagaagcctcttaattagccagattgctttgaaaaaaccatttaaaaagccttccaaaggaatgtttcttccttctcacaagaaccacttcctgggtccctcaactgctttgtaatgcttctctncacctaaaaatanaataaaatcgagtgtccagtaacctttagttcaaacaggcatcatctttgaaaactaaaagcctactgttatttgttattgtgctttaacagctgatacaggtattctgttgacacacctgtgctggcttacttaacctaaatacactatttttttcgttgtattactggtatgtcattttttttactgttaagtacttatgtgtgaataagtgtaaaaaaatgattgcttatcggtaacatataaattcagaatcaggaatgatggtgatgccaaacaatcacagatcgtccacatgggtggcggagatgttaacacctttgctttctaatggttcagtgtatccacactttgtttcatgccgaaattatttaaaatattgtatcaaattaccttcagtctatgtgtataaagtatatatgaaacataaatgaactttatgtttaaactgggatcttatcctcaagctatctcattgtgtatgtgtaaatatttcaaacta

SEQ ID NO: 555189 - DNA, 277 bp, Homo sapiens
ccggcggtgggattgcggacttcttcatcgaatatacaaactacgccgatccatctattccatatggatcaatgttttctgtgttggtgggcgttatttacccctatctcgatagtgacaatttcttcttcggctaagcgagggagcctcggaatcacggctttcggagatagtgatgcgttcgggttttacatacaccggcttgttcgagaccaaggaagacggcacgactatctactattacggtagacgggatggtcatgcgctcggataccgc

SEQ ID NO: 555190 - DNA, 238 bp, Homo sapiens
tccagcagcgggttctaaaggctgataaaaagcatcctaacttaaaaacagataacaacagctaccacataaaagacagaaaagtggcctgaacttataatcaatcaatgcgaaggtagattcataaaaataaaatacaaactggcgaccagtccattaaccatggggataatgcctcgcctgaaggaagatgtgtacgctgcattcacgatccagcaagcgcggagctgctcttggc

SEQ ID NO: 555191 - DNA, 242 bp, Homo sapiens
  misc_feature (17)..(17): n is a, c, g, or t
tttggctaaaatatttnctttagaaataaaaccgtttttcttccgctctgtcacttgacttgcatccttaaaatgcagccctttataggcctgatggtgggtgtcattttcccatggtctttgtgacatttttttttgcgttggctttcatctgtcaattgtggtttttttggttgggcccctgttcatggccccatgccgttagtgctttcgccctttcccataaaatattaaaagttcca

SEQ ID NO: 555192 - DNA, 272 bp, Homo sapiens
gggtttcctgggtgactcgcactttccttccatcggcatgtgatatcaggttattcgtactgagaacattgagattacagaaggaagacaccctgaaatcttatgagtacgcataccccaaccacccctctaactagctagctagtttgtactaggtacgacctgattcactctctccatttacgactggctacgctgtgcggtggaccgactcttagacactggcctgcctcacttggctgggaccaccctcacgactacggacacgtggc

SEQ ID NO: 555193 - DNA, 272 bp, Homo sapiens
ttaaatgggagggcctcatccataaatgatttctggcaacgtcttcttcaggtggagcttgacgtctttttaatgttacttggggagggagtgctcattaagggatgccagggccagctgtggtggttccaggggaggctggatactcacctgctgattcattctatgaggcatgagaaaagattccttgttactgaaagatactgaatacgtgtgatacggctgatattgcactttctggctgaacggaaacgtaatgaagggcgtattct

SEQ ID NO: 555194 - DNA, 317 bp, Homo sapiens
tgttcctttcgtttaattaaagcccccccctaaactataggggctgccagtaacagactgttaaattgtggtttataaactttttgccttgtaaaaagtctttgttggcccttgtcagggtaataaaaacaaaatctttgtatatccaaatcatgtagtttgtataaaatgtgggaaggatttatttccagggtgttgtaattttgtaaggccccctatttccaagttttaaaaattgctatcatgtatatttacccctttgataaaaattaaatcataacttggtaaaaaactcctaattaaaaggttttttccca

SEQ ID NO: 555195 - DNA, 180 bp, Homo sapiens
  misc_feature (39)..(39): n is a, c, g, or t
  misc_feature (58)..(58): n is a, c, g, or t
  misc_feature (77)..(77): n is a, c, g, or t
  misc_feature (96)..(96): n is a, c, g, or t
  misc_feature (134)..(134): n is a, c, g, or t
aggtgcgagggctttatcccgatcatctccaatgcagcngagtatgagaacattcccntccggcaccatgaagaccntctcctgaggcagttggcncagaaggtcccccacaacctgaataaccctaagttccntgatccgcacgtcaagaccaacctgctcctgcaggctccacttgtc

SEQ ID NO: 555196 - DNA, 180 bp, Homo sapiens
cggccagcatctggttttatttattgttttaaaattccctttgggccagacgtgtggttcatgtctgtaattgcagcacttcgagaggccaaggtggtagatcacttgagcccgagaggtcgaggctgcagtgagccgagattgcgccagtgcactccagcctgggtgacagagcgagag

SEQ ID NO: 555197 - DNA, 741 bp, Homo sapiens
cctggacccacctttcagtatgtagaatgtgtctattattactaaaaatggggagtctcctgttagctcagagagagcccacgagcattgcatgttagtagccatatcctgcaatagggtatgtgctctaagatctgcaacaagatagaaatgctcacctttaccaacgttattcaacatatagctggtaatgctggcgagcgcactatatcaagagaataaagggcgtacaaattgaaaaagaagacagattctgctgaagacatgagcttatatactctatatcctaaagactccacctgaaaaccgctagtactgaatgatgaattcagtagtgttgcaggatacaaaatcaacatatcatgatcataacatttaatatacactagcagcagataacctgtaaaaagatatcaaggtcagcgatcacacttaagaagctactaagagtagacaatagctacaaagtatataaaatacctaggaatcaagttaaccaaagaagtgatagatgtatatgaggaaaactatgaaaaactggtgagagaagttcaagatgacacacataaaaggggaagacatttcatgctcatggattagaataagtaaaatgacaatactactcagagcactctatagattcaatatgagctctatctgccaatgacattcttcatagaaataggaccaacactctgaaatgtatgtagaacacatgaccctgagtagccgtttctgtgc

SEQ ID NO: 555198 - DNA, 118 bp, Homo sapiens
tgtttatcgatgcacccagtcaatgagttaccataaatgttcattcatggacggggtgggatgtgaatggaatgttagaaatgtggtgtgaattgaagttctgtggcatcgataaaca

SEQ ID NO: 555199 - DNA, 432 bp, Homo sapiens
atgtaaattactaaggtggtgccagcatagtctcacggtccagtatataaggctcataagtgatgccaatccatatcagcatagtactccataggtacgtcagcagctctagtacccattgtagatccagtgtgatcatatcatgcagtcatgaatatctgtgtctgttaaaaactatccagtgaaaagatgctgcaacaggtatcactatatggtacggatatgcgtcacatatactaagttcacgatctggataagcggctaaagcctgagttgccagtacatggttcgttataagcgcgcgcatcgctacagatcagaagttccagcccactaagtgcaaccttggtgctgatccaggcctgcgatattaaccctcagttaacagaaaataagggctaagtgggcaacgaggtgcaagccggaaatagc

SEQ ID NO: 555200 - DNA, 428 bp, Homo sapiens
acttcctattagggctcacagtacagctctcactttctagatgcagaaacttgattttagagagatttagagacctaaatacctaaatggctagtacaaatgtacacagaaaggaacatttcaagagactgcacaaagtaggtatgaaataaatattattctggctagctaaaatcatagagaacaagcccttcacattccagtaaacatatatttatgttggttgttaatggtgtaatttttttcttacctatcttgttaagaatattagtccagattttaccacaggtgatcagtttcttgatattttctttgaaatatcaaggatattttagggtatttcaggatatcttcctgacatgtataagtgagtcaaatgacagttttaaaatgtcattctttgcagtctatcaaggcagaaactaact

SEQ ID NO: 555201 - DNA, 231 bp, Homo sapiens
ctcagtcaggaacagggaggcatgtgtctttggcagtcaggccagatgggaattggtagctgatcaggtacagtgctgggtcatgtctacacgtagaacagctaaagcttcactgcacggtggctgcttacaatttcccagtgactgctatggtatatgccccaataccaacaaccttgtcatcgctcattcggaccagcaggtatttgagtacagcatcccagacaaaca

SEQ ID NO: 555202 - DNA, 849 bp, Homo sapiens
cgccgctcgagaaagctgagtcggaaggcctgtccagctcctgtcaggccctcctaagctggtcccctctgctgacctgaaacgtctccccactccatggtggctgcatttgactacaagccccaggagagttcccccaatatggtacgtggcaggcatgagctgcccttccgtggcaggggcgatgtcattactgtgatttggggcccatggacgatgacggtttctactatggggaacttaaatggacaaaggggcctggttccatccaacttcctgagagcggccctgggcctgaagagcagtgcgagcctgtacagggaacccatggacaccccaggctgatgatgtcaggactgggggcttgcaaccacacaaaggtccccagggcccccatggtgggccattgtacacccgctagactctggcagcagcacctccaggatttgaacgtggggacgccccatgggccacgaaagcgaagaaggtcgtggaggttgcgttctccaaaggggaacgcagctcctcaggaggctggggctcttgggaatgaaggacggtgaacgctgtgtgccatcctgcaggcacgacagaggccctggagaggcccacacagatcactggtctcctgcttgcagcaggggaaggctcaatagctggtgcccagagcccccgtactttctcggcgttaagcacttgtgggcattccagatgggcacattgaccaggagcctttggtgaagggtcacaggctaaactggctcgttaaggctcgaactctctagagcactcacccttactcctaaaggaggggaacacgtgagcgccgagtgactatgtacttgaaca

SEQ ID NO: 555203 - DNA, 677 bp, Homo sapiens
  misc_feature (12)..(12): n is a, c, g, or t
gggggggggtgnttgcccaggtgcttccccctcttgtacacaccccccccggggggtgttgtccccccaatttttttttctctttgggggcccggggccctgttttacccggggggcgcccaaaccccccccccttttggtggtggccgcccacctccttctgggggggggggggccccccccaccccccccccccttaagggggggtttttttagagggtctttctgggggtggggccctctgggttgggcccacgggtgggggggtgggcacgggtttcccccgggggcccgggggccccggttttttttggtttgtgggttttttgggtcccaaacccattgggggggttttttttttggggggggagacccccccccccccccttttgggggcaggttttggggggggggcccccggggggccccccccccaaatgtttttccccgggggggcttttcttttttgggggttacccttttccggggggccccgggcccccccctcccccctgggggggggggccccccgggggccccccccccccctggggccaaagttccccccccccgggcccccggggggtttttttcccccccccccttgggggttttttttttttttttttttttggggcccccccccccccttttttcttttaggggggtttttttca

SEQ ID NO: 555204 - DNA, 274 bp, Homo sapiens
  misc_feature (141)..(141): n is a, c, g, or t
cccccccccaaaaaaaaggggggggggggggcggttgaaatccctttattcgggttttttcccaaaaaaaaaatttttgtcccccttttttttttaaaaaaaaaaaaaaaacccttttgttttttttcccaaacccgggancccccccccctggggttttggggcccccaacccccccctttggggggcccgggttttaaaaaggggcctttcccccccccccccccccccaggggggtggggtttttttttaaaaaaaacaggggttttggga

SEQ ID NO: 555205 - DNA, 118 bp, Homo sapiens
atccccagagtccaacagtgcttcattcacttcaccctttcagatacacatctttaatctataaaatgtgagaattgaatgaggcactgtgtggactctgggcactgtgtggactctg

SEQ ID NO: 555206 - DNA, 215 bp, Homo sapiens
ccccaccgcagtgacctgcgccgtgcaagcagtagacgctcaacgacttcatccaacctaagtgtaggcgcgaggcacgctcaatgattcgggaggcttgggtccctaggctgcactgagctggcagctgctgagtaagtaactggtcagatgagctgtctcaacatcagaaccaagactcactgtagagagagatgacacacacactcgtgaac

SEQ ID NO: 555207 - DNA, 235 bp, Homo sapiens
cattgagcccctgatgcccatccagactttcacaatgacattgtccagcacatagcccaagctttgagtgtttttgctgctcaagtcacagaaaagagcctctagagtaatggacagcaaaatcatgcgtgaactcccattcacaattgcttcaaagagaataaatacctagggatccaacttacaagggatgtgaaggatctcttcaaggagaactacaaaccactgctcaatg

SEQ ID NO: 555208 - DNA, 350 bp, Homo sapiens
cttgccaagacctcaattttttccacaccatttcaaacagaccctttcccaagatttatttaaaagatgggcttcaggaagatagcagatattcataaaatagccacactcctaatagtaagcaataagatgttacctacttttaagaaatgaaggtgttggccgggtgcagtggctcacacctgtaatcccaacactatgggaggccgagttgggtggatcgcttgagctcaggagttcgagaccagcctggggaacatggagaaaccccatctgtgcaaaagatccaaaaattagccaggcgtaatggtgcatgcctgtagtcgcagctacttgagaggctgaggtga

SEQ ID NO: 555209 - DNA, 675 bp, Homo sapiens
ccaccccggagccaggggccgttgggccctgttgttgggctcgcgggggtgggggggctcgggcctttgttggtcacagatggcccggggatttcctgggatagaaatagccgccggctccggccccttaaagctgcttaaggggcgggatgcggaggggagggtccgggcacaccccacacgtccccggccgagaccccagcctccgcgctgagctcccacccgggagacgccggcagcggcgcaggcctccggttgcttggggcggaccgcggaacccgaggccatgtcccatgaaaagagttttttggtgtctggggacaactatcctccccccaaccctggatatccgggggggccccagccacccatgcccccctatgctcagcctccctaccctggggcacccttaacccaacagacgccctttttcgcagacagtagacgaacaatacgggtacaaggcaacacaggggtaaacaccccaaatgtagcgcccaagaccccaggtaaagccaccagaggggggaatcgaaccaaaatgaaggatacaagtgaacagaatcgactgagagacaaaagccacagaggagaaagacacaaacaacaataagagagcagaaggacacgagagagaaccgaaaaaacgaaaaagcagagatgaaaaagcaagga

SEQ ID NO: 555210 - DNA, 565 bp, Homo sapiens
  misc_feature (224)..(225): n is a, c, g, or t
  misc_feature (564)..(564): n is a, c, g, or t
ctgtgtcaccaggctgggagtcatgtggtgcaagctcactgtagcctcaactttccaggctccagtgatcctcccactgcagtctcccaagtagctgggactacaggcgcacaccaccatgcctggctaatttttgtatttttttttgtagagacagggtctcgccatgttgctcagactgtactttttcttacagtattttttaataaacagaagttgctcgnnttaaagtacttgagtttttagttctttctctttgtggtctatgcttttggcatcttgtttaaggaatctttccttaacctgagaccgaaataattttccctataatttcttggtaagctttgtcatgctgcctaaggttaactttccattaaaatatttcctttaggtgctccagctgctgctcctgcccctgcctcagtcccacagatatcccagccccccttcttgttggatgggctttcatcacagcctctcttcaatgatattgctgcaggtacgatgactgttgttaccatcattacatggagcactgagtaatgagatgtggaaattatattna

SEQ ID NO: 555211 - DNA, 206 bp, Homo sapiens
  misc_feature (11)..(11): n is a, c, g, or t
  misc_feature (30)..(30): n is a, c, g, or t
  misc_feature (77)..(77): n is a, c, g, or t
  misc_feature (163)..(163): n is a, c, g, or t
  misc_feature (181)..(181): n is a, c, g, or t
  misc_feature (194)..(194): n is a, c, g, or t
ttttattgttnttttactgtacatgttttnttctctttttagagacagagtctcattctgttgcccaggctagagtncagtgacatgatcatagctcactgtaacctcaaacttctaggcccaaacagctctcccacctcaacctcccaagtagctaggactncagacgtgtgccaacagntatggctagtttnttttttgtattt

SEQ ID NO: 555212 - DNA, 421 bp, Homo sapiens
cacggcgccgccgtcggttctcacgcgcttctccgggcccaggctccggggctccccacagcccggggcaaggggcggaccgcggaacccgaggccatgtcccatgaaaagagttttttggtgtctggggacaactatcctccccccaaccctggatatccgggggggccccagccacccatgcccccctatgctcagcctccctaccctggggccccttacccacagccccttggcaggcctgcccgctagggtcaggcaagggtagcccatgggctagggcgataactatacatgggggcaaaccaaggagattcctaggggcaaacgagggaaaccagaggtcgaataaaacgagcgcagataaatgaaagggaaaacaagaggcgaaacgcagggaaagaaaaagaaaaaaagaaac

SEQ ID NO: 555213 - DNA, 450 bp, Homo sapiens
tttttccgcccctttttctccccactccactgcaaaacgtcccaagcggtttccccttgtggcttcaggtgttttcaagcccaacccccccaacaagcaagtgcattttcagtcgttgggcttttttgttttgggcaaacgtcttactaatttaaaaatgctgtcggccccatgtttatttatttccagtggtcatgctcacccttgttgctttgggtggcgcaggtgccatgcctgctccctgtttgtgtcccacccccccagggccatcccttgtgaggtcggccgaccaggctggaccccctttcccgagtaatgacgtgtgtggctgggcccttcttttttttgtgttaatggctaccctgttcccctgggctgggttgggtagggtgttttggcttttttgtggggtttttttttttaaaaaacccccccttcttcctcccccta

SEQ ID NO: 555214 - DNA, 5344 bp, Homo sapiens
ttttttttcagagttcccgggtcccttccgcctgggttcacgttcacgtttattcaaacaacagagccgactcgggcgaggtctgggagcggcgggcgggcggtgtcgcctcctgggctctgctgacccctggtggtggggtcggcccaggctgggacctagcccggcccccctcggccgctgctgaccgccatcccccacaccgccttctggagcccgcagagggaggcaggggcgtccccggggacagctcaggcggccacagttgggggcggggagcatcagcctgtgcggagctgggagcctgggaagcaggaggccagagggtggccccttcggttaagtgtctggggagcggcccgggagcccagaggggtcgtcgggggaagcgcggggcacgtgctcgcaggtgatgaggtgggtgggcagcgcctgggtgtcgtggaagatgacgaagatgctgggctggcagatgcagtccacggcgctgtcgtagcgcaggagcacgtggccaggaccccgcagagggggcgcccgcagaccgcggcggccctgcccgtagtcgccagtcagcacccgtgccacgaacaccgccttatggccatcggcgttggggggcgagtagcggtcctgcaccgacagggaggcgcgcctggcgaaatacacgcccttcccgtagaccgtggcgttgcggccgcagaagctgcggttgaagccgtgggcgcagatgtcaggcactgccggtgccgtcgtgccgtggtacagcacctgctccaccgggcgccgctcgcatcgctgcagcaggcgctcccggtacagctcatactgctgctgcagcagcgggtgcgacacgcgctccacacgaacgacgcggatgctgctgcgggcagcgtccagggtgtcgtagaaggcccgcaccacctcctggaactccccggtgttctctgccagacgctccaggttgttccagggccccttcagcgtctgccccgccaaggtagggcctgaagctgccaagggaaaggccaaactctgatcccaggggccagccagaagtgccaccaagtggcgggcagcacgggcagggtgggccccgaagccacggaggatggtgcagtcaccacgcagggcaacactcacaccatggcaccgctccaggcgagcacgcagctctgcaggcagtgtgcggcgccagggccccaccgtctcctcctggacgtggacctccaaggcagccctgagcgcccggtccagctcctccacatcctgctcaaaggccgagtgcaccaccagctgggccttgccatcagtccccccatctgggggctcttctgcctccaacgggggctgctccagcagggagagggttagggcttgccgcagggcagcagcctcctcctgctcagccacctgaccttgaggctccagtgaccggtggagggccagctgcagagcggcctcctcctccagccacctgggtgccacagtgctgggggccacaggctcctcctcctcatgccctggggtcgcctcctcctctggctgctcctgaggcccttcctcctccagctcccgaggcagccagtcctccccgtctaggtctaggccctccagggtggccagcagttctcggacctcctccaggctcacgtcctcctggtcaccacctgtactgtctggggtccacagggtgtgggcgttgccagggagcactgggagggcctcggtagggtccacctcttcaaggcctgtgtccaacgtggctgtggccaggcgctctgtcccaaagacacactggaactgagcctccagcccctggagaaggtgctgcccttctgggcccaggagaaacctggcgctgcccgggtgctccaggcacaacacatggcagctaatgctgcccagcaggctccgcagaaactcctcagccgcctggcaggaagcctgggctccacagagccgaaagccagtcatatccggtccttcaagtggcaagagagcgacgtctcccaggcccgcaagaaggtcctcatggtagagctgcaggaagcgcatcgcccctggctccatcaatagcaccatctccaccaggccctcctgccctgccagcttcacacatcctgggctcacaggccctgccttctccagagaccccatggtgatctccatgggacccaccagcccctcttgctctggtgagtccatggcaatttccaccaggccctcctgccccggcaaccccttagaggtctccactgggcctgcagaccccacaggccccaggctcatgggcccctcctgttcctgcaaccccacaggcctcaggcttaccagcccctcatgttccagagaccccatgggcatcgagctgacttgctctgcctgtcccagagaccccatgggacctgtcctcagagaggtccctgactgccctggttcctggccagagcctgttgtcataatccctctaccctgcaccatgggacctgtcctcagagaggcccctgactgccctggttcctcgccagagcccattgtcacagtccctgcaccctgcagagccgtcaccaaccctccggtcctcaggagagcatgcttggtagccctaggcccctgggtggacgggtggtcccctccactggtgttctcagccagctcctcgggctccaggatgtcgtagtgggggacaaggctcagctctgagccctgcaaccggtgctcctgctgcaacactcgttctgccacttgccactgctggaaggaggcaacagtgcccaggggcccgggtaggcgttgcaggtcctccaggggccccccaccactgcggcgctcattctccaggtacaactccagcaacagcaggtccacagaggcaccatcccccaccacacgcaccgctcgggcctggggaacccgggccagggacaccaaggtcccctccaggcccagattctgggcctgctcctccaggacacggacatctgcctcagaaaggggcttgggcaactggaccagagcccggtctggccgggggctggccaaggcacagcaaggctgtactgggagccccgaggcccgcagcaaggcctggacatgctgctccaagcgctggggcgtggtgccagggggcagtccttggagcagcaggcgtgcaggggctcgtggtggagctggccgcaggctcagctgggcaccatgtagttcgtgatctgcctgggccaagaccctctcggcgtctgcaggctctctgaaggtgaggacgcccccacagcccagtctctgccagctcaacacaggtccccctccagagcgtcggcggttttcaaagtagagagtgagcagctcgtcgggcacggcagggggcagtccacggacctccactgccacccctgcctctgcctccgccattgcaaccattccccgtggccgctaggcagcctcaggccatgagctcagccaggactcctgtgcctgcccctcagcaagcctaaccccggcctgcggcgcccggccaccggtgagtccccggcccgagcccaggagcgcctctgacccgctgcgccgcgcggcctgccgcccccgcccccgcccccacgcggatcttgcgcatccgagcgtggccgcctcgggggcggaccgcggaacccgaggccatgtcccatgaaaagagttttttggtgtctggggacaactatcctccccccaaccctggatatccgggggggccccagccacccatgcccccctatgctcagcctccctaccctggggccccttacccacagccccctttccagccctccccctacggtcagccagggtacccccatggccccagcccctacccccaagggggctacccacagggtccctacccccaagggggctacccacagggcccctacccacaagagggctacccacagggcccctacccccaagggggctacccccaggggccatatccccagagccccttcccccccaacccctatggacagccacaggtcttcccaggacaagaccctgactcaccccagcatggaaactaccaggaggagggtcccccatcctactatgacaaccaggacttccctgccaccaactgggatgacaagagcatccgacaggccttcatccgcaaggtgttcctagtgctgaccttgcagctgtcggtgaccctgtccacggtgtctgtgttcacttttgttgcggaggtgaagggctttgtccgggagaatgtctggacctactatgtctcctatgctgtcttcttcatctctctcatcgtcctcagctgttgtggggacttccggcgaaagcacccctggaaccttgttgcactgtcggtcctgaccgccagcctgtcgtacatggtggggatgatcgccagcttctacaacaccgaggcagtcatcatggccgtgggcatcaccacagccgtctgcttcaccgtcgtcatcttctccatgcagacccgctacgacttcacctcatgcatgggcgtgctcctggtgagcatggtggtgctcttcatcttcgccattctctgcatcttcatccggaaccgcatcctggagatcgtgtacgcctcactgggcgctctgctcttcacctgcttcctcgcagtggacacccagctgctgctggggaacaagcagctgtccctgagcccagaagagtatgtgtttgctgcgctgaacctgtacacagacatcatcaacatcttcctgtacatcctcaccatcattggccgcgccaaggagtagccgagctccagctcgctgtgcccgctcaggtggcacggctggcctggaccctgcccctggcacggcagtgccagctgtacttcccctctctcttgtccccaggcacagcctagggaaaaggatgcctctctccaaccctcctgtatgtacactgcagatacttccatttggacccgctgtggccacagcatggcccctttagtcctcccgcccccgccaaggggcaccaaggccacgtttccgtgccacctcctgtctactcattgttgcatgagccctgtctgccagcccaccccagggactgggggcagcaccaggtcccggggagagggattgagccaagaggtgagggtgcacgtcttccctcctgtcccagctccccagcctggcgtagagcacccctcccctcccccccacccccctggagtgctgccctctggggacatgcggagtgggggtcttatccctgtgctgagccctgagggcagagaggatggcatgtttcaggggagggggaagccttcctctcaatttgttgtcagtgaaattccaataaatgggatttgctctctgca

SEQ ID NO: 555215 - DNA, 5232 bp, Homo sapiens
ttttttttcagagttcccgggtcccttccgcctgggttcacgttcacgtttattcaaacaacagagccgactcgggcgaggtctgggagcggcgggcgggcggtgtcgcctcctgggctctgctgacccctggtggtggggtcggcccaggctgggacctagcccggcccccctcggccgctgctgaccgccatcccccacaccgccttctggagcccgcagagggaggcaggggcgtccccggggacagctcaggcggccacagttgggggcggggagcatcagcctgtgcggagctgggagcctgggaagcaggaggccagagggtggccccttcggttaagtgtctggggagcggcccgggagcccagaggggtcgtcgggggaagcgcggggcacgtgctcgcaggtgatgaggtgggtgggcagcgcctgggtgtcgtggaagatgacgaagatgctgggctggcagatgcagtccacggcgctgtcgtagcgcaggagcacgtggccaggaccccgcagagggggcgcccgcagaccgcggcggccctgcccgtagtcgccagtcagcacccgtgccacgaacaccgccttatggccatcggcgttggggggcgagtagcggtcctgcaccgacagggaggcgcgcctggcgaaatacacgcccttcccgtagaccgtggcgttgcggccgcagaagctgcggttgaagccgtgggcgcagatgtcaggcactgccggtgccgtcgtgccgtggtacagcacctgctccaccgggcgccgctcgcatcgctgcagcaggcgctcccggtacagctcatactgctgctgcagcagcgggtgcgacacgcgctccacacgaacgacgcggatgctgctgcgggcagcgtccagggtgtcgtagaaggcccgcaccacctcctggaactccccggtgttctctgccagacgctccaggttgttccagggccccttcagcgtctgccccgccaaggtagggcctgaagctgccaagggaaaggccaaactctgatcccaggggccagccagaagtgccaccaagtggcgggcagcacgggcagggtgggccccgaagccacggaggatggtgcagtcaccacgcagggcaacactcacaccatggcaccgctccaggcgagcacgcagctctgcaggcagtgtgcggcgccagggccccaccgtctcctcctggacgtggacctccaaggcagccctgagcgcccggtccagctcctccacatcctgctcaaaggccgagtgcaccaccagctgggccttgccatcagtccccccatctgggggctcttctgcctccaacgggggctgctccagcagggagagggttagggcttgccgcagggcagcagcctcctcctgctcagccacctgaccttgaggctccagtgaccggtggagggccagctgcagagcggcctcctcctccagccacctgggtgccacagtgctgggggccacaggctcctcctcctcatgccctggggtcgcctcctcctctggctgctcctgaggcccttcctcctccagctcccgaggcagccagtcctccccgtctaggtctaggccctccagggtggccagcagttctcggacctcctccaggctcacgtcctcctggtcaccacctgtactgtctggggtccacagggtgtgggcgttgccagggagcactgggagggcctcggtagggtccacctcttcaaggcctgtgtccaacgtggctgtggccaggcgctctgtcccaaagacacactggaactgagcctccagcccctggagaaggtgctgcccttctgggcccaggagaaacctggcgctgcccgggtgctccaggcacaacacatggcagctaatgctgcccagcaggctccgcagaaactcctcagccgcctggcaggaagcctgggctccacagagccgaaagccagtcatatccggtccttcaagtggcaagagagcgacgtctcccaggcccgcaagaaggtcctcatggtagagctgcaggaagcgcatcgcccctggctccatcaatagcaccatctccaccaggccctcctgccctgccagcttcacacatcctgggctcacaggccctgccttctccagagaccccatggtgatctccatgggacccaccagcccctcttgctctggtgagtccatggcaatttccaccaggccctcctgccccggcaaccccttagaggtctccactgggcctgcagaccccacaggccccaggctcatgggcccctcctgttcctgcaaccccacaggcctcaggcttaccagcccctcatgttccagagaccccatgggcatcgagctgacttgctctgcctgtcccagagaccccatgggacctgtcctcagagaggtccctgactgccctggttcctggccagagcctgttgtcataatccctctaccctgcaccatgggacctgtcctcagagaggcccctgactgccctggttcctcgccagagcccattgtcacagtccctgcaccctgcagagccgtcaccaaccctccggtcctcaggagagcatgcttggtagccctaggcccctgggtggacgggtggtcccctccactggtgttctcagccagctcctcgggctccaggatgtcgtagtgggggacaaggctcagctctgagccctgcaaccggtgctcctgctgcaacactcgttctgccacttgccactgctggaaggaggcaacagtgcccaggggcccgggtaggcgttgcaggtcctccaggggccccccaccactgcggcgctcattctccaggtacaactccagcaacagcaggtccacagaggcaccatcccccaccacacgcaccgctcgggcctggggaacccgggccagggacaccaaggtcccctccaggcccagattctgggcctgctcctccaggacacggacatctgcctcagaaaggggcttgggcaactggaccagagcccggtctggccgggggctggccaaggcacagcaaggctgtactgggagccccgaggcccgcagcaaggcctggacatgctgctccaagcgctggggcgtggtgccagggggcagtccttggagcagcaggcgtgcaggggctcgtggtggagctggccgcaggctcagctgggcaccatgtagttcgtgatctgcctgggccaagaccctctcggcgtctgcaggctctctgaaggtgaggacgcccccacagcccagtctctgccagctcaacacaggtccccctccagagcgtcggcggttttcaaagtagagagtgagcagctcgtcgggcacggcagggggcagtccacggacctccactgccacccctgcctctgcctccgccattgcaaccattccccgtggccgctaggcagcctcaggccatgagctcagccaggactcctgtgcctgcccctcagcaagcctaaccccggcctgcggcgcccggccaccggggcggaccgcggaacccgaggccatgtcccatgaaaagagttttttggtgtctggggacaactatcctccccccaaccctggatatccgggggggccccagccacccatgcccccctatgctcagcctccctaccctggggccccttacccacagccccctttccagccctccccctacggtcagccagggtacccccatggccccagcccctacccccaagggggctacccacagggtccctacccccaagggggctacccacagggcccctacccacaagagggctacccacagggcccctacccccaagggggctacccccaggggccatatccccagagccccttcccccccaacccctatggacagccacaggtcttcccaggacaagaccctgactcaccccagcatggaaactaccaggaggagggtcccccatcctactatgacaaccaggacttccctgccaccaactgggatgacaagagcatccgacaggccttcatccgcaaggtgttcctagtgctgaccttgcagctgtcggtgaccctgtccacggtgtctgtgttcacttttgttgcggaggtgaagggctttgtccgggagaatgtctggacctactatgtctcctatgctgtcttcttcatctctctcatcgtcctcagctgttgtggggacttccggcgaaagcacccctggaaccttgttgcactgtcggtcctgaccgccagcctgtcgtacatggtggggatgatcgccagcttctacaacaccgaggcagtcatcatggccgtgggcatcaccacagccgtctgcttcaccgtcgtcatcttctccatgcagacccgctacgacttcacctcatgcatgggcgtgctcctggtgagcatggtggtgctcttcatcttcgccattctctgcatcttcatccggaaccgcatcctggagatcgtgtacgcctcactgggcgctctgctcttcacctgcttcctcgcagtggacacccagctgctgctggggaacaagcagctgtccctgagcccagaagagtatgtgtttgctgcgctgaacctgtacacagacatcatcaacatcttcctgtacatcctcaccatcattggccgcgccaaggagtagccgagctccagctcgctgtgcccgctcaggtggcacggctggcctggaccctgcccctggcacggcagtgccagctgtacttcccctctctcttgtccccaggcacagcctagggaaaaggatgcctctctccaaccctcctgtatgtacactgcagatacttccatttggacccgctgtggccacagcatggcccctttagtcctcccgcccccgccaaggggcaccaaggccacgtttccgtgccacctcctgtctactcattgttgcatgagccctgtctgccagcccaccccagggactgggggcagcaccaggtcccggggagagggattgagccaagaggtgagggtgcacgtcttccctcctgtcccagctccccagcctggcgtagagcacccctcccctcccccccacccccctggagtgctgccctctggggacatgcggagtgggggtcttatccctgtgctgagccctgagggcagagaggatggcatgtttcaggggagggggaagccttcctctcaatttgttgtcagtgaaattccaataaatgggatttgctctctgca

SEQ ID NO: 555216 - DNA, 519 bp, Homo sapiens
agtcttgctctgaagccaaggctggagtgcagtggtacgatctcagctcaccacagcctccgcctcctgggttcaaatgattctcctgcctcagcctcctgagtacctggcactacaggcacatgccagcacgcccagctaatttttgcatttttagtatagatggggtttcaccatgttggttaggatggtcttgatctcctgacctcatgatcctcccacctcagcctcccagagtgctaggattacaggcatgagccactgtgactggctggctattaacattttgctcctcttatgcaaatttctacagtaggcttgagttcctccccagaaaatgtttttttcttttctaccacatggtcaggctgcaaattttctaaacttatatgctctgctttccttttaaatataagttccaatttcagataatcactttgtgcacacatattagtgcatgctgttagaagcaggcaagtcacatattgaacactttgctgcttacgaatttcctcgtgc

SEQ ID NO: 555217 - DNA, 5142 bp, Homo sapiens
ttttttttcagagttcccgggtcccttccgcctgggttcacgttcacgtttattcaaacaacagagccgactcgggcgaggtctgggagcggcgggcgggcggtgtcgcctcctgggctctgctgacccctggtggtggggtcggcccaggctgggacctagcccggcccccctcggccgctgctgaccgccatcccccacaccgccttctggagcccgcagagggaggcaggggcgtccccggggacagctcaggcggccacagttgggggcggggagcatcagcctgtgcggagctgggagcctgggaagcaggaggccagagggtggccccttcggttaagtgtctggggagcggcccgggagcccagaggggtcgtcgggggaagcgcggggcacgtgctcgcaggtgatgaggtgggtgggcagcgcctgggtgtcgtggaagatgacgaagatgctgggctggcagatgcagtccacggcgctgtcgtagcgcaggagcacgtggccaggaccccgcagagggggcgcccgcagaccgcggcggccctgcccgtagtcgccagtcagcacccgtgccacgaacaccgccttatggccatcggcgttggggggcgagtagcggtcctgcaccgacagggaggcgcgcctggcgaaatacacgcccttcccgtagaccgtggcgttgcggccgcagaagctgcggttgaagccgtgggcgcagatgtcaggcactgccggtgccgtcgtgccgtggtacagcacctgctccaccgggcgccgctcgcatcgctgcagcaggcgctcccggtacagctcatactgctgctgcagcagcgggtgcgacacgcgctccacacgaacgacgcggatgctgctgcgggcagcgtccagggtgtcgtagaaggcccgcaccacctcctggaactccccggtgttctctgccagacgctccaggttgttccagggccccttcagcgtctgccccgccaaggtagggcctgaagctgccaagggaaaggccaaactctgatcccaggggccagccagaagtgccaccaagtggcgggcagcacgggcagggtgggccccgaagccacggaggatggtgcagtcaccacgcagggcaacactcacaccatggcaccgctccaggcgagcacgcagctctgcaggcagtgtgcggcgccagggccccaccgtctcctcctggacgtggacctccaaggcagccctgagcgcccggtccagctcctccacatcctgctcaaaggccgagtgcaccaccagctgggccttgccatcagtccccccatctgggggctcttctgcctccaacgggggctgctccagcagggagagggttagggcttgccgcagggcagcagcctcctcctgctcagccacctgaccttgaggctccagtgaccggtggagggccagctgcagagcggcctcctcctccagccacctgggtgccacagtgctgggggccacaggctcctcctcctcatgccctggggtcgcctcctcctctggctgctcctgaggcccttcctcctccagctcccgaggcagccagtcctccccgtctaggtctaggccctccagggtggccagcagttctcggacctcctccaggctcacgtcctcctggtcaccacctgtactgtctggggtccacagggtgtgggcgttgccagggagcactgggagggcctcggtagggtccacctcttcaaggcctgtgtccaacgtggctgtggccaggcgctctgtcccaaagacacactggaactgagcctccagcccctggagaaggtgctgcccttctgggcccaggagaaacctggcgctgcccgggtgctccaggcacaacacatggcagctaatgctgcccagcaggctccgcagaaactcctcagccgcctggcaggaagcctgggctccacagagccgaaagccagtcatatccggtccttcaagtggcaagagagcgacgtctcccaggcccgcaagaaggtcctcatggtagagctgcaggaagcgcatcgcccctggctccatcaatagcaccatctccaccaggccctcctgccctgccagcttcacacatcctgggctcacaggccctgccttctccagagaccccatggtgatctccatgggacccaccagcccctcttgctctggtgagtccatggcaatttccaccaggccctcctgccccggcaaccccttagaggtctccactgggcctgcagaccccacaggccccaggctcatgggcccctcctgttcctgcaaccccacaggcctcaggcttaccagcccctcatgttccagagaccccatgggcatcgagctgacttgctctgcctgtcccagagaccccatgggacctgtcctcagagaggtccctgactgccctggttcctggccagagcctgttgtcataatccctctaccctgcaccatgggacctgtcctcagagaggcccctgactgccctggttcctcgccagagcccattgtcacagtccctgcaccctgcagagccgtcaccaaccctccggtcctcaggagagcatgcttggtagccctaggcccctgggtggacgggtggtcccctccactggtgttctcagccagctcctcgggctccaggatgtcgtagtgggggacaaggctcagctctgagccctgcaaccggtgctcctgctgcaacactcgttctgccacttgccactgctggaaggaggcaacagtgcccaggggcccgggtaggcgttgcaggtcctccaggggccccccaccactgcggcgctcattctccaggtacaactccagcaacagcaggtccacagaggcaccatcccccaccacacgcaccgctcgggcctggggaacccgggccagggacaccaaggtcccctccaggcccagattctgggcctgctcctccaggacacggacatctgcctcagaaaggggcttgggcaactggaccagagcccggtctggccgggggctggccaaggcacagcaaggctgtactgggagccccgaggcccgcagcaaggcctggacatgctgctccaagcgctggggcgtggtgccagggggcagtccttggagcagcaggcgtgcaggggctcgtggtggagctggccgcaggctcagctgggcaccatgtagttcgtgatctgcctgggccaagaccctctcggcgtctgcaggctctctgaaggtgaggacgcccccacagcccagtctctgccagctcaacacaggtccccctccagagcgtcggcggttttcaaagtagagagtgagcagctcgtcgggcacggcagggggcagtccacggacctccactgccacccctgcctctgcctccgccattgcaaccattccccgtggccgctaggcagcctcaggccatgagctcagccaggactcctgtgcctgcccctcagcaagcctaaccccggcctgcggcgcccggccaccggtgagtccccggcccgagcccaggagcgcctctgacccgctgcgccgcgcggcctgccgcccccgcccccgcccccacgcggatcttgcgcatccgagcgtggccgcctcgggggcggaccgcggaacccgaggccatgtcccatgaaaagagttttttggtgtctggggacaactatcctccccccaaccctggatatccgggggggccccagccacccatgcccccctatgctcagcctccctaccctggggccccttcccccccaacccctatggacagccacaggtcttcccaggacaagaccctgactcaccccagcatggaaactaccaggaggagggtcccccatcctactatgacaaccaggacttccctgccaccaactgggatgacaagagcatccgacaggccttcatccgcaaggtgttcctagtgctgaccttgcagctgtcggtgaccctgtccacggtgtctgtgttcacttttgttgcggaggtgaagggctttgtccgggagaatgtctggacctactatgtctcctatgctgtcttcttcatctctctcatcgtcctcagctgttgtggggacttccggcgaaagcacccctggaaccttgttgcactgtcggtcctgaccgccagcctgtcgtacatggtggggatgatcgccagcttctacaacaccgaggcagtcatcatggccgtgggcatcaccacagccgtctgcttcaccgtcgtcatcttctccatgcagacccgctacgacttcacctcatgcatgggcgtgctcctggtgagcatggtggtgctcttcatcttcgccattctctgcatcttcatccggaaccgcatcctggagatcgtgtacgcctcactgggcgctctgctcttcacctgcttcctcgcagtggacacccagctgctgctggggaacaagcagctgtccctgagcccagaagagtatgtgtttgctgcgctgaacctgtacacagacatcatcaacatcttcctgtacatcctcaccatcattggccgcgccaaggagtagccgagctccagctcgctgtgcccgctcaggtggcacggctggcctggaccctgcccctggcacggcagtgccagctgtacttcccctctctcttgtccccaggcacagcctagggaaaaggatgcctctctccaaccctcctgtatgtacactgcagatacttccatttggacccgctgtggccacagcatggcccctttagtcctcccgcccccgccaaggggcaccaaggccacgtttccgtgccacctcctgtctactcattgttgcatgagccctgtctgccagcccaccccagggactgggggcagcaccaggtcccggggagagggattgagccaagaggtgagggtgcacgtcttccctcctgtcccagctccccagcctggcgtagagcacccctcccctcccccccacccccctggagtgctgccctctggggacatgcggagtgggggtcttatccctgtgctgagccctgagggcagagaggatggcatgtttcaggggagggggaagccttcctctcaatttgttgtcagtgaaattccaataaatgggatttgctctctgca

SEQ ID NO: 555218 - DNA, 5433 bp, Homo sapiens
ttttttttcagagttcccgggtcccttccgcctgggttcacgttcacgtttattcaaacaacagagccgactcgggcgaggtctgggagcggcgggcgggcggtgtcgcctcctgggctctgctgacccctggtggtggggtcggcccaggctgggacctagcccggcccccctcggccgctgctgaccgccatcccccacaccgccttctggagcccgcagagggaggcaggggcgtccccggggacagctcaggcggccacagttgggggcggggagcatcagcctgtgcggagctgggagcctgggaagcaggaggccagagggtggccccttcggttaagtgtctggggagcggcccgggagcccagaggggtcgtcgggggaagcgcggggcacgtgctcgcaggtgatgaggtgggtgggcagcgcctgggtgtcgtggaagatgacgaagatgctgggctggcagatgcagtccacggcgctgtcgtagcgcaggagcacgtggccaggaccccgcagagggggcgcccgcagaccgcggcggccctgcccgtagtcgccagtcagcacccgtgccacgaacaccgccttatggccatcggcgttggggggcgagtagcggtcctgcaccgacagggaggcgcgcctggcgaaatacacgcccttcccgtagaccgtggcgttgcggccgcagaagctgcggttgaagccgtgggcgcagatgtcaggcactgccggtgccgtcgtgccgtggtacagcacctgctccaccgggcgccgctcgcatcgctgcagcaggcgctcccggtacagctcatactgctgctgcagcagcgggtgcgacacgcgctccacacgaacgacgcggatgctgctgcgggcagcgtccagggtgtcgtagaaggcccgcaccacctcctggaactccccggtgttctctgccagacgctccaggttgttccagggccccttcagcgtctgccccgccaaggtagggcctgaagctgccaagggaaaggccaaactctgatcccaggggccagccagaagtgccaccaagtggcgggcagcacgggcagggtgggccccgaagccacggaggatggtgcagtcaccacgcagggcaacactcacaccatggcaccgctccaggcgagcacgcagctctgcaggcagtgtgcggcgccagggccccaccgtctcctcctggacgtggacctccaaggcagccctgagcgcccggtccagctcctccacatcctgctcaaaggccgagtgcaccaccagctgggccttgccatcagtccccccatctgggggctcttctgcctccaacgggggctgctccagcagggagagggttagggcttgccgcagggcagcagcctcctcctgctcagccacctgaccttgaggctccagtgaccggtggagggccagctgcagagcggcctcctcctccagccacctgggtgccacagtgctgggggccacaggctcctcctcctcatgccctggggtcgcctcctcctctggctgctcctgaggcccttcctcctccagctcccgaggcagccagtcctccccgtctaggtctaggccctccagggtggccagcagttctcggacctcctccaggctcacgtcctcctggtcaccacctgtactgtctggggtccacagggtgtgggcgttgccagggagcactgggagggcctcggtagggtccacctcttcaaggcctgtgtccaacgtggctgtggccaggcgctctgtcccaaagacacactggaactgagcctccagcccctggagaaggtgctgcccttctgggcccaggagaaacctggcgctgcccgggtgctccaggcacaacacatggcagctaatgctgcccagcaggctccgcagaaactcctcagccgcctggcaggaagcctgggctccacagagccgaaagccagtcatatccggtccttcaagtggcaagagagcgacgtctcccaggcccgcaagaaggtcctcatggtagagctgcaggaagcgcatcgcccctggctccatcaatagcaccatctccaccaggccctcctgccctgccagcttcacacatcctgggctcacaggccctgccttctccagagaccccatggtgatctccatgggacccaccagcccctcttgctctggtgagtccatggcaatttccaccaggccctcctgccccggcaaccccttagaggtctccactgggcctgcagaccccacaggccccaggctcatgggcccctcctgttcctgcaaccccacaggcctcaggcttaccagcccctcatgttccagagaccccatgggcatcgagctgacttgctctgcctgtcccagagaccccatgggacctgtcctcagagaggtccctgactgccctggttcctggccagagcctgttgtcataatccctctaccctgcaccatgggacctgtcctcagagaggcccctgactgccctggttcctcgccagagcccattgtcacagtccctgcaccctgcagagccgtcaccaaccctccggtcctcaggagagcatgcttggtagccctaggcccctgggtggacgggtggtcccctccactggtgttctcagccagctcctcgggctccaggatgtcgtagtgggggacaaggctcagctctgagccctgcaaccggtgctcctgctgcaacactcgttctgccacttgccactgctggaaggaggcaacagtgcccaggggcccgggtaggcgttgcaggtcctccaggggccccccaccactgcggcgctcattctccaggtacaactccagcaacagcaggtccacagaggcaccatcccccaccacacgcaccgctcgggcctggggaacccgggccagggacaccaaggtcccctccaggcccagattctgggcctgctcctccaggacacggacatctgcctcagaaaggggcttgggcaactggaccagagcccggtctggccgggggctggccaaggcacagcaaggctgtactgggagccccgaggcccgcagcaaggcctggacatgctgctccaagcgctggggcgtggtgccagggggcagtccttggagcagcaggcgtgcaggggctcgtggtggagctggccgcaggctcagctgggcaccatgtagttcgtgatctgcctgggccaagaccctctcggcgtctgcaggctctctgaaggtgaggacgcccccacagcccagtctctgccagctcaacacaggtccccctccagagcgtcggcggttttcaaagtagagagtgagcagctcgtcgggcacggcagggggcagtccacggacctccactgccacccctgcctctgcctccgccattgcaaccattccccgtggccgctaggcagcctcaggccatgagctcagccaggactcctgtgcctgcccctcagcaagcctaaccccggcctgcggcgcccggccaccggtgagtccccggcccgagcccaggagcgcctctgacccgctgcgccgcgcggcctgccgcccccgcccccgcccccacgcggatcttgcgcatccgagcgtggccgcctcgggggcggaccgcggaacccgaggccatgtcccatgaaaagagttttttggtgtctggggacaactatcctccccccaaccctggatatccgggggggccccagccacccatgcccccctatgctcagcctccctaccctggggccccttacccacagccccctttccagccctccccctacggtcagccagggtacccccatggccccagcccctacccccaagggggctacccacagggtccctacccccaagggggctacccacagggcccctacccacaagagggctacccacagggcccctacccccaagggggctacccccaggggccatatccccagagccccttcccccccaacccctatggacagccacaggtcttcccaggacaagaccctgactgtgagtctcaggaagggaggggtggggtggccgggagggcagggggaggtgcttgtgagtggcgctgacccagcctgtctgcttctcagcaccccagcatggaaactaccaggaggagggtcccccatcctactatgacaaccaggacttccctgccaccaactgggatgacaagagcatccgacaggccttcatccgcaaggtgttcctagtgctgaccttgcagctgtcggtgaccctgtccacggtgtctgtgttcacttttgttgcggaggtgaagggctttgtccgggagaatgtctggacctactatgtctcctatgctgtcttcttcatctctctcatcgtcctcagctgttgtggggacttccggcgaaagcacccctggaaccttgttgcactgtcggtcctgaccgccagcctgtcgtacatggtggggatgatcgccagcttctacaacaccgaggcagtcatcatggccgtgggcatcaccacagccgtctgcttcaccgtcgtcatcttctccatgcagacccgctacgacttcacctcatgcatgggcgtgctcctggtgagcatggtggtgctcttcatcttcgccattctctgcatcttcatccggaaccgcatcctggagatcgtgtacgcctcactgggcgctctgctcttcacctgcttcctcgcagtggacacccagctgctgctggggaacaagcagctgtccctgagcccagaagagtatgtgtttgctgcgctgaacctgtacacagacatcatcaacatcttcctgtacatcctcaccatcattggccgcgccaaggagtagccgagctccagctcgctgtgcccgctcaggtggcacggctggcctggaccctgcccctggcacggcagtgccagctgtacttcccctctctcttgtccccaggcacagcctagggaaaaggatgcctctctccaaccctcctgtatgtacactgcagatacttccatttggacccgctgtggccacagcatggcccctttagtcctcccgcccccgccaaggggcaccaaggccacgtttccgtgccacctcctgtctactcattgttgcatgagccctgtctgccagcccaccccagggactgggggcagcaccaggtcccggggagagggattgagccaagaggtgagggtgcacgtcttccctcctgtcccagctccccagcctggcgtagagcacccctcccctcccccccacccccctggagtgctgccctctggggacatgcggagtgggggtcttatccctgtgctgagccctgagggcagagaggatggcatgtttcaggggagggggaagccttcctctcaatttgttgtcagtgaaattccaataaatgggatttgctctctgca

SEQ ID NO: 555219 - DNA, 1068 bp, Homo sapiens
agcggagatgcactgtgcgaggttgctggttcccagaccatggtttcgcgctgctggcgctggtggggctggtcggcgtggcctcggacccggcatgcctcccgccggggagcaccccgagcagttctgccaatcaactgttcatcacaacaacaggagaagaaccacacagatctgctggtggtgggcagtgacccagctggcgtacgtaccacggggccaacgaccgtgctaaagcagccccaggccgcacgatgggacgagtctaagcagaaacgaggcctgatgcccgtttgtgcctggtgcagctcttgagtgatggagcctgaatcagcccgacggtgaacgaactgtcatcagacacattgtacccaggacaggcacctattcttggcacgcgtgtgtcttctgggggcaagcgtggaggtgggcagggacgtgacggtgccggagacagcgggaggcctaccaggctgtggtgctgagcttacgggggcagaggaccagcgggccctggaaattcctggtgacggagctgccaggtgtgtgcgtccgccgggcctatcgagggcttggttacaacgggcttcctgagaaccaggagctggagcctagaccatgagctgtgacgacaggcgtgatccgtggggcaggggaacgtgggtctggaacgtggccgcatcctactgaccccaactgagcaccgtgagagaacggacatgacgaaggcaggccctgggcgtgactgaggcaggagtcagagtgaagacacgtgtggctcagttgggccggatgtggaacccatgcgacgtggaacttcaacatgacggagcctccgggaagaatgacccaggtacggacagcccggaccaatttgggaatcctgttggagtacctgggggatcacccaggacagaagacttgaggaggtccccacgaccgatgacaagagaggacagaaagggattgaaagggcaacagaaaaacacaggacagggaaaacataccacaacagaaacacctaagataagtgggacccaataaccaaaacccaacgtaggcaaaaca

SEQ ID NO: 555220 - DNA, 5473 bp, Homo sapiens
ttttttttcagagttcccgggtcccttccgcctgggttcacgttcacgtttattcaaacaacagagccgactcgggcgaggtctgggagcggcgggcgggcggtgtcgcctcctgggctctgctgacccctggtggtggggtcggcccaggctgggacctagcccggcccccctcggccgctgctgaccgccatcccccacaccgccttctggagcccgcagagggaggcaggggcgtccccggggacagctcaggcggccacagttgggggcggggagcatcagcctgtgcggagctgggagcctgggaagcaggaggccagagggtggccccttcggttaagtgtctggggagcggcccgggagcccagaggggtcgtcgggggaagcgcggggcacgtgctcgcaggtgatgaggtgggtgggcagcgcctgggtgtcgtggaagatgacgaagatgctgggctggcagatgcagtccacggcgctgtcgtagcgcaggagcacgtggccaggaccccgcagagggggcgcccgcagaccgcggcggccctgcccgtagtcgccagtcagcacccgtgccacgaacaccgccttatggccatcggcgttggggggcgagtagcggtcctgcaccgacagggaggcgcgcctggcgaaatacacgcccttcccgtagaccgtggcgttgcggccgcagaagctgcggttgaagccgtgggcgcagatgtcaggcactgccggtgccgtcgtgccgtggtacagcacctgctccaccgggcgccgctcgcatcgctgcagcaggcgctcccggtacagctcatactgctgctgcagcagcgggtgcgacacgcgctccacacgaacgacgcggatgctgctgcgggcagcgtccagggtgtcgtagaaggcccgcaccacctcctggaactccccggtgttctctgccagacgctccaggttgttccagggccccttcagcgtctgccccgccaaggtagggcctgaagctgccaagggaaaggccaaactctgatcccaggggccagccagaagtgccaccaagtggcgggcagcacgggcagggtgggccccgaagccacggaggatggtgcagtcaccacgcagggcaacactcacaccatggcaccgctccaggcgagcacgcagctctgcaggcagtgtgcggcgccagggccccaccgtctcctcctggacgtggacctccaaggcagccctgagcgcccggtccagctcctccacatcctgctcaaaggccgagtgcaccaccagctgggccttgccatcagtccccccatctgggggctcttctgcctccaacgggggctgctccagcagggagagggttagggcttgccgcagggcagcagcctcctcctgctcagccacctgaccttgaggctccagtgaccggtggagggccagctgcagagcggcctcctcctccagccacctgggtgccacagtgctgggggccacaggctcctcctcctcatgccctggggtcgcctcctcctctggctgctcctgaggcccttcctcctccagctcccgaggcagccagtcctccccgtctaggtctaggccctccagggtggccagcagttctcggacctcctccaggctcacgtcctcctggtcaccacctgtactgtctggggtccacagggtgtgggcgttgccagggagcactgggagggcctcggtagggtccacctcttcaaggcctgtgtccaacgtggctgtggccaggcgctctgtcccaaagacacactggaactgagcctccagcccctggagaaggtgctgcccttctgggcccaggagaaacctggcgctgcccgggtgctccaggcacaacacatggcagctaatgctgcccagcaggctccgcagaaactcctcagccgcctggcaggaagcctgggctccacagagccgaaagccagtcatatccggtccttcaagtggcaagagagcgacgtctcccaggcccgcaagaaggtcctcatggtagagctgcaggaagcgcatcgcccctggctccatcaatagcaccatctccaccaggccctcctgccctgccagcttcacacatcctgggctcacaggccctgccttctccagagaccccatggtgatctccatgggacccaccagcccctcttgctctggtgagtccatggcaatttccaccaggccctcctgccccggcaaccccttagaggtctccactgggcctgcagaccccacaggccccaggctcatgggcccctcctgttcctgcaaccccacaggcctcaggcttaccagcccctcatgttccagagaccccatgggcatcgagctgacttgctctgcctgtcccagagaccccatgggacctgtcctcagagaggtccctgactgccctggttcctggccagagcctgttgtcataatccctctaccctgcaccatgggacctgtcctcagagaggcccctgactgccctggttcctcgccagagcccattgtcacagtccctgcaccctgcagagccgtcaccaaccctccggtcctcaggagagcatgcttggtagccctaggcccctgggtggacgggtggtcccctccactggtgttctcagccagctcctcgggctccaggatgtcgtagtgggggacaaggctcagctctgagccctgcaaccggtgctcctgctgcaacactcgttctgccacttgccactgctggaaggaggcaacagtgcccaggggcccgggtaggcgttgcaggtcctccaggggccccccaccactgcggcgctcattctccaggtacaactccagcaacagcaggtccacagaggcaccatcccccaccacacgcaccgctcgggcctggggaacccgggccagggacaccaaggtcccctccaggcccagattctgggcctgctcctccaggacacggacatctgcctcagaaaggggcttgggcaactggaccagagcccggtctggccgggggctggccaaggcacagcaaggctgtactgggagccccgaggcccgcagcaaggcctggacatgctgctccaagcgctggggcgtggtgccagggggcagtccttggagcagcaggcgtgcaggggctcgtggtggagctggccgcaggctcagctgggcaccatgtagttcgtgatctgcctgggccaagaccctctcggcgtctgcaggctctctgaaggtgaggacgcccccacagcccagtctctgccagctcaacacaggtccccctccagagcgtcggcggttttcaaagtagagagtgagcagctcgtcgggcacggcagggggcagtccacggacctccactgccacccctgcctctgcctccgccattgcaaccattccccgtggccgctaggcagcctcaggccatgagctcagccaggactcctgtgcctgcccctcagcaagcctaaccccggcctgcggcgcccggccaccggtgagtccccggcccgagcccaggagcgcctctgacccgctgcgccgcgcggcctgccgcccccgcccccgcccccacgcggatcttgcgcatccgagcgtggccgcctcgggggcggaccgcggaacccgaggccatgtcccatgaaaagagttttttggtgtctggggacaactatcctccccccaaccctggatatccgggggggccccagccacccatgcccccctatgctcagcctccctaccctggggccccttacccacagccccctttccagccctccccctacggtcagccagggtacccccatggccccagcccctacccccaagggggctacccacagggtccctacccccaagggggctacccacagggcccctacccacaagagggctacccacagggcccctacccccaagggggctacccccaggggccatatccccagagccccttcccccccaacccctatggacagccacaggtcttcccaggacaagaccctgactcaccccagcatggaaactaccaggaggagggtcccccatcctactatgacaaccaggacttccctgccaccaactgggatgacaagagcatccgacaggccttcatccgcaaggtgttcctagtgctgaccttgcagctgtcggtgaccctgtccacggtgtctgtgttcacttttgttgcggaggtgaagggctttgtccgggagaatgtctggacctactatgtctcctatgctgtcttcttcatctctctcatcgtcctcagctgttgtggggacttccggcgaaagcacccctggaaccttgttgcactgtcggtcctgaccgccagcctgtcgtacatggtggggatgatcgccagcttctacaacaccgaggcagtcatcatggccgtgggcatcaccacagccgtctgcttcaccgtcgtcatcttctccatgcagacccgctacgacttcacctcatgcatgggcgtgctcctggtgagcatggtggtgctcttcatcttcgccattctctgcatcttcatccggaaccgcatcctggagatcgtgtacgcctcactgggcgctctgctcttcacctgcttcctcgcagtggacacccagctgctgctggggaacaagcagctgtccctgagcccagaagagtatgtgtttgctgcgctgaacctgtacacagacatcatcaacatcttcctgtacatcctcaccatcattggccgcgccaaggagtagccgagctccagctcgctgtgcccgctcaggtggcacggctggcctggaccctgcccctggcacggcagtgccagctgtacttcccctctctcttgtccccaggcacagcctagggaaaaggatgcctctctccaaccctcctgtatgtacactgcagatacttccatttggacccgctgtggccacagcatggcccctttagtcctcccgcccccgccaaggggcaccaaggccacgtttccgtgccacctcctgtctactcattgttgcatgagccctgtctgccagcccaccccagggactgggggcagcaccaggtcccggggagagggattgagccaagaggtgagggtgcacgtcttccctcctgtcccagctccccagcctggcgtagagcacccctcccctcccccccacccccctggagtgctgccctctggggacatgcggagtgggggtcttatccctgtgctgagccctgagggcagagaggatggcatgtttcaggggagggggaagccttcctctcaatttgttgtcagtgaaattccaataaatgggatttgctctctgcaaacccctggtcaaaaaaaacacaaaaaacacaaacaaacaacgacagcaaccaacaaaacaaaacaaacagggcgggggcgccgccagacagagaccaaccacgggggccgcaccaacacgaaaccaca

SEQ ID NO: 555221 - DNA, 5345 bp, Homo sapiens
ttttttttcagagttcccgggtcccttccgcctgggttcacgttcacgtttattcaaacaacagagccgactcgggcgaggtctgggagcggcgggcgggcggtgtcgcctcctgggctctgctgacccctggtggtggggtcggcccaggctgggacctagcccggcccccctcggccgctgctgaccgccatcccccacaccgccttctggagcccgcagagggaggcaggggcgtccccggggacagctcaggcggccacagttgggggcggggagcatcagcctgtgcggagctgggagcctgggaagcaggaggccagagggtggccccttcggttaagtgtctggggagcggcccgggagcccagaggggtcgtcgggggaagcgcggggcacgtgctcgcaggtgatgaggtgggtgggcagcgcctgggtgtcgtggaagatgacgaagatgctgggctggcagatgcagtccacggcgctgtcgtagcgcaggagcacgtggccaggaccccgcagagggggcgcccgcagaccgcggcggccctgcccgtagtcgccagtcagcacccgtgccacgaacaccgccttatggccatcggcgttggggggcgagtagcggtcctgcaccgacagggaggcgcgcctggcgaaatacacgcccttcccgtagaccgtggcgttgcggccgcagaagctgcggttgaagccgtgggcgcagatgtcaggcactgccggtgccgtcgtgccgtggtacagcacctgctccaccgggcgccgctcgcatcgctgcagcaggcgctcccggtacagctcatactgctgctgcagcagcgggtgcgacacgcgctccacacgaacgacgcggatgctgctgcgggcagcgtccagggtgtcgtagaaggcccgcaccacctcctggaactccccggtgttctctgccagacgctccaggttgttccagggccccttcagcgtctgccccgccaaggtagggcctgaagctgccaagggaaaggccaaactctgatcccaggggccagccagaagtgccaccaagtggcgggcagcacgggcagggtgggccccgaagccacggaggatggtgcagtcaccacgcagggcaacactcacaccatggcaccgctccaggcgagcacgcagctctgcaggcagtgtgcggcgccagggccccaccgtctcctcctggacgtggacctccaaggcagccctgagcgcccggtccagctcctccacatcctgctcaaaggccgagtgcaccaccagctgggccttgccatcagtccccccatctgggggctcttctgcctccaacgggggctgctccagcagggagagggttagggcttgccgcagggcagcagcctcctcctgctcagccacctgaccttgaggctccagtgaccggtggagggccagctgcagagcggcctcctcctccagccacctgggtgccacagtgctgggggccacaggctcctcctcctcatgccctggggtcgcctcctcctctggctgctcctgaggcccttcctcctccagctcccgaggcagccagtcctccccgtctaggtctaggccctccagggtggccagcagttctcggacctcctccaggctcacgtcctcctggtcaccacctgtactgtctggggtccacagggtgtgggcgttgccagggagcactgggagggcctcggtagggtccacctcttcaaggcctgtgtccaacgtggctgtggccaggcgctctgtcccaaagacacactggaactgagcctccagcccctggagaaggtgctgcccttctgggcccaggagaaacctggcgctgcccgggtgctccaggcacaacacatggcagctaatgctgcccagcaggctccgcagaaactcctcagccgcctggcaggaagcctgggctccacagagccgaaagccagtcatatccggtccttcaagtggcaagagagcgacgtctcccaggcccgcaagaaggtcctcatggtagagctgcaggaagcgcatcgcccctggctccatcaatagcaccatctccaccaggccctcctgccctgccagcttcacacatcctgggctcacaggccctgccttctccagagaccccatggtgatctccatgggacccaccagcccctcttgctctggtgagtccatggcaatttccaccaggccctcctgccccggcaaccccttagaggtctccactgggcctgcagaccccacaggccccaggctcatgggcccctcctgttcctgcaaccccacaggcctcaggcttaccagcccctcatgttccagagaccccatgggcatcgagctgacttgctctgcctgtcccagagaccccatgggacctgtcctcagagaggtccctgactgccctggttcctggccagagcctgttgtcataatccctctaccctgcaccatgggacctgtcctcagagaggcccctgactgccctggttcctcgccagagcccattgtcacagtccctgcaccctgcagagccgtcaccaaccctccggtcctcaggagagcatgcttggtagccctaggcccctgggtggacgggtggtcccctccactggtgttctcagccagctcctcgggctccaggatgtcgtagtgggggacaaggctcagctctgagccctgcaaccggtgctcctgctgcaacactcgttctgccacttgccactgctggaaggaggcaacagtgcccaggggcccgggtaggcgttgcaggtcctccaggggccccccaccactgcggcgctcattctccaggtacaactccagcaacagcaggtccacagaggcaccatcccccaccacacgcaccgctcgggcctggggaacccgggccagggacaccaaggtcccctccaggcccagattctgggcctgctcctccaggacacggacatctgcctcagaaaggggcttgggcaactggaccagagcccggtctggccgggggctggccaaggcacagcaaggctgtactgggagccccgaggcccgcagcaaggcctggacatgctgctccaagcgctggggcgtggtgccagggggcagtccttggagcagcaggcgtgcaggggctcgtggtggagctggccgcaggctcagctgggcaccatgtagttcgtgatctgcctgggccaagaccctctcggcgtctgcaggctctctgaaggtgaggacgcccccacagcccagtctctgccagctcaacacaggtccccctccagagcgtcggcggttttcaaagtagagagtgagcagctcgtcgggcacggcagggggcagtccacggacctccactgccacccctgcctctgcctccgccattgcaaccattccccgtggccgctaggcagcctcaggccatgagctcagccaggactcctgtgcctgcccctcagcaagcctaaccccggcctgcggcgcccggccaccggtgagtccccggcccgagcccaggagcgcctctgacccgctgcgccgcgcggcctgccgcccccgcccccgcccccacgcggatcttgcgcatccgagcgtggccgcctcgggggcggaccgcggaacccgaggccatgtcccatgaaaagagttttttggtgtctggggacaactatcctccccccaaccctggatatccgggggggccccagccacccatgcccccctatgctcagcctccctaccctggggccccttacccacagccccctttccagccctccccctacggtcagccagggtacccccatggccccagcccctacccccaagggggctacccacagggtccctacccccaagggggctacccacagggcccctacccacaagagggctacccacagggcccctacccccaagggggctacccccaggggccatatccccagagccccttcccccccaacccctatggacagccacaggtcttcccaggacaagaccctgactcaccccagcatggaaactaccaggaggagggtcccccatcctactatgacaaccaggacttccctgccaccaactgggatgacaagagcatccgacaggccttcatccgcaaggtgttcctagtgctgaccttgcagctgtcggtgaccctgtccacggtgtctgtgttcacttttgttgcggaggtgaagggctttgtccgggagaatgtctggacctactatgtctcctatgctgtcttcttcatctctctcatcgtcctcagctgttgtggggacttccggcgaaagcacccctggaaccttgttgcactgtcggtcctgaccgccagcctgtcgtacatggtggggatgatcgccagcttctacaacaccgaggcagtcatcatggccgtgggcatcaccacagccgtctgcttcaccgtcgtcatcttctccatgcagacccgctacgacttcacctcatgcatgggcgtgctcctggtgagcatggtggtgctcttcatcttcgccattctctgcatcttcatccggaaccgcatcctggagatcgtgtacgcctcactgggcgctctgctcttcacctgcttcctcgcagtggacacccagctgctgctggggaacaagcagctgtccctgagcccagaagagtatgtgtttgctgcgctgaacctgtacacagacatcatcaacatcttcctgtacatcctcaccatcattggccgcgccaaggagtagccgagctccagctcgctgtgcccgctcaggtggcacggctggcctggaccctgcccctggcacggcagtgccagctgtacttcccctctctcttgtccccaggcacagcctagggaaaaggatgcctctctccaaccctcctgtatgtacactgcagatacttccatttggacccgctgtggccacagcatggcccctttagtcctcccgcccccgccaaggggcaccaaggccacgtttccgtgccacctcctgtctactcattgttgcatgagccctgtctgccagcccaccccagggactgggggcagcaccaggtcccggggagagggattgagccaagaggtgagggtgcacgtcttccctcctgtcccagctccccagcctggcgtagagcacccctcccctcactcgctcaatccttggagtcgtgggctatgtatacaatagtgatgcggatcatatccgtgatcatatcacagatgtatcatcgtatggcatgtttcaggggagggggaagccttcctctcaatttgttgtcagtgaaattccaataaatgggatttgctctctgca

SEQ ID NO: 555222 - DNA, 251 bp, Homo sapiens
gaattcccccccccccccccccccccaatgggtatatgtaagtttcttctggtccccacggggaccttcattggtgccatccctgctctctggaagccgttagttcttaccccttcccatgtttctgacaaatcctctgtaaatatgtcacatcctccgaggggcctccccgatcacccagggataaaacactctcccctctctctctcagatcattatggagatgggagactcgctctagtcaacccagg

SEQ ID NO: 555223 - DNA, 5425 bp, Homo sapiens
ttttttttcagagttcccgggtcccttccgcctgggttcacgttcacgtttattcaaacaacagagccgactcgggcgaggtctgggagcggcgggcgggcggtgtcgcctcctgggctctgctgacccctggtggtggggtcggcccaggctgggacctagcccggcccccctcggccgctgctgaccgccatcccccacaccgccttctggagcccgcagagggaggcaggggcgtccccggggacagctcaggcggccacagttgggggcggggagcatcagcctgtgcggagctgggagcctgggaagcaggaggccagagggtggccccttcggttaagtgtctggggagcggcccgggagcccagaggggtcgtcgggggaagcgcggggcacgtgctcgcaggtgatgaggtgggtgggcagcgcctgggtgtcgtggaagatgacgaagatgctgggctggcagatgcagtccacggcgctgtcgtagcgcaggagcacgtggccaggaccccgcagagggggcgcccgcagaccgcggcggccctgcccgtagtcgccagtcagcacccgtgccacgaacaccgccttatggccatcggcgttggggggcgagtagcggtcctgcaccgacagggaggcgcgcctggcgaaatacacgcccttcccgtagaccgtggcgttgcggccgcagaagctgcggttgaagccgtgggcgcagatgtcaggcactgccggtgccgtcgtgccgtggtacagcacctgctccaccgggcgccgctcgcatcgctgcagcaggcgctcccggtacagctcatactgctgctgcagcagcgggtgcgacacgcgctccacacgaacgacgcggatgctgctgcgggcagcgtccagggtgtcgtagaaggcccgcaccacctcctggaactccccggtgttctctgccagacgctccaggttgttccagggccccttcagcgtctgccccgccaaggtagggcctgaagctgccaagggaaaggccaaactctgatcccaggggccagccagaagtgccaccaagtggcgggcagcacgggcagggtgggccccgaagccacggaggatggtgcagtcaccacgcagggcaacactcacaccatggcaccgctccaggcgagcacgcagctctgcaggcagtgtgcggcgccagggccccaccgtctcctcctggacgtggacctccaaggcagccctgagcgcccggtccagctcctccacatcctgctcaaaggccgagtgcaccaccagctgggccttgccatcagtccccccatctgggggctcttctgcctccaacgggggctgctccagcagggagagggttagggcttgccgcagggcagcagcctcctcctgctcagccacctgaccttgaggctccagtgaccggtggagggccagctgcagagcggcctcctcctccagccacctgggtgccacagtgctgggggccacaggctcctcctcctcatgccctggggtcgcctcctcctctggctgctcctgaggcccttcctcctccagctcccgaggcagccagtcctccccgtctaggtctaggccctccagggtggccagcagttctcggacctcctccaggctcacgtcctcctggtcaccacctgtactgtctggggtccacagggtgtgggcgttgccagggagcactgggagggcctcggtagggtccacctcttcaaggcctgtgtccaacgtggctgtggccaggcgctctgtcccaaagacacactggaactgagcctccagcccctggagaaggtgctgcccttctgggcccaggagaaacctggcgctgcccgggtgctccaggcacaacacatggcagctaatgctgcccagcaggctccgcagaaactcctcagccgcctggcaggaagcctgggctccacagagccgaaagccagtcatatccggtccttcaagtggcaagagagcgacgtctcccaggcccgcaagaaggtcctcatggtagagctgcaggaagcgcatcgcccctggctccatcaatagcaccatctccaccaggccctcctgccctgccagcttcacacatcctgggctcacaggccctgccttctccagagaccccatggtgatctccatgggacccaccagcccctcttgctctggtgagtccatggcaatttccaccaggccctcctgccccggcaaccccttagaggtctccactgggcctgcagaccccacaggccccaggctcatgggcccctcctgttcctgcaaccccacaggcctcaggcttaccagcccctcatgttccagagaccccatgggcatcgagctgacttgctctgcctgtcccagagaccccatgggacctgtcctcagagaggtccctgactgccctggttcctggccagagcctgttgtcataatccctctaccctgcaccatgggacctgtcctcagagaggcccctgactgccctggttcctcgccagagcccattgtcacagtccctgcaccctgcagagccgtcaccaaccctccggtcctcaggagagcatgcttggtagccctaggcccctgggtggacgggtggtcccctccactggtgttctcagccagctcctcgggctccaggatgtcgtagtgggggacaaggctcagctctgagccctgcaaccggtgctcctgctgcaacactcgttctgccacttggaggaagggaaaggacagaaagcctgtcagatttctgcaggagagggacggtcgctgggtctgccagccccactcaccttgccactgctggaaggaggcaacagtgcccaggggcccgggtaggcgttgcaggtcctccaggggccccccaccactgcggcgctcattctccaggtacaactccagcaacagcaggtccacagaggcaccatcccccaccacacgcaccgctcgggcctggggaacccgggccagggacaccaaggtcccctccaggcccagattctgggcctgctcctccaggacacggacatctgcctcagaaaggggcttgggcaactggaccagagcccggtctggccgggggctggccaaggcacagcaaggctgtactgggagccccgaggcccgcagcaaggcctggacatgctgctccaagcgctggggcgtggtgccagggggcagtccttggagcagcaggcgtgcaggggctcgtggtggagctggccgcaggctcagctgggcaccatgtagttcgtgatctgcctgggccaagaccctctcggcgtctgcaggctctctgaaggtgaggacgcccccacagcccagtctctgccagctcaacacaggtccccctccagagcgtcggcggttttcaaagtagagagtgagcagctcgtcgggcacggcagggggcagtccacggacctccactgccacccctgcctctgcctccgccattgcaaccattccccgtggccgctaggcagcctcaggccatgagctcagccaggactcctgtgcctgcccctcagcaagcctaaccccggcctgcggcgcccggccaccggtgagtccccggcccgagcccaggagcgcctctgacccgctgcgccgcgcggcctgccgcccccgcccccgcccccacgcggatcttgcgcatccgagcgtggccgcctcgggggcggaccgcggaacccgaggccatgtcccatgaaaagagttttttggtgtctggggacaactatcctccccccaaccctggatatccgggggggccccagccacccatgcccccctatgctcagcctccctaccctggggccccttacccacagccccctttccagccctccccctacggtcagccagggtacccccatggccccagcccctacccccaagggggctacccacagggtccctacccccaagggggctacccacagggcccctacccacaagagggctacccacagggcccctacccccaagggggctacccccaggggccatatccccagagccccttcccccccaacccctatggacagccacaggtcttcccaggacaagaccctgactcaccccagcatggaaactaccaggaggagggtcccccatcctactatgacaaccaggacttccctgccaccaactgggatgacaagagcatccgacaggccttcatccgcaaggtgttcctagtgctgaccttgcagctgtcggtgaccctgtccacggtgtctgtgttcacttttgttgcggaggtgaagggctttgtccgggagaatgtctggacctactatgtctcctatgctgtcttcttcatctctctcatcgtcctcagctgttgtggggacttccggcgaaagcacccctggaaccttgttgcactgtcggtcctgaccgccagcctgtcgtacatggtggggatgatcgccagcttctacaacaccgaggcagtcatcatggccgtgggcatcaccacagccgtctgcttcaccgtcgtcatcttctccatgcagacccgctacgacttcacctcatgcatgggcgtgctcctggtgagcatggtggtgctcttcatcttcgccattctctgcatcttcatccggaaccgcatcctggagatcgtgtacgcctcactgggcgctctgctcttcacctgcttcctcgcagtggacacccagctgctgctggggaacaagcagctgtccctgagcccagaagagtatgtgtttgctgcgctgaacctgtacacagacatcatcaacatcttcctgtacatcctcaccatcattggccgcgccaaggagtagccgagctccagctcgctgtgcccgctcaggtggcacggctggcctggaccctgcccctggcacggcagtgccagctgtacttcccctctctcttgtccccaggcacagcctagggaaaaggatgcctctctccaaccctcctgtatgtacactgcagatacttccatttggacccgctgtggccacagcatggcccctttagtcctcccgcccccgccaaggggcaccaaggccacgtttccgtgccacctcctgtctactcattgttgcatgagccctgtctgccagcccaccccagggactgggggcagcaccaggtcccggggagagggattgagccaagaggtgagggtgcacgtcttccctcctgtcccagctccccagcctggcgtagagcacccctcccctcccccccacccccctggagtgctgccctctggggacatgcggagtgggggtcttatccctgtgctgagccctgagggcagagaggatggcatgtttcaggggagggggaagccttcctctcaatttgttgtcagtgaaattccaataaatgggatttgctctctgca

SEQ ID NO: 555224 - DNA, 528 bp, Homo sapiens
  misc_feature (458)..(458): n is a, c, g, or t
  misc_feature (477)..(477): n is a, c, g, or t
ggctaatcattttattattattattattattattattactatttttattgttgtagggatgggttctcactatgttgcacaggctggtcttgaactggtttcaggtgatccacccacctaaccttgccaaagtgctgggattgcaagtgtgagccaccacatctggcctgacgttctcgttgcatcaagccatcatccaccgggcgcccctggacgcgcgttctctccctctctctctttctctctctctctctctaatgctgacccactcagtagagcaggggccagccagagggggacgaagtcaccaatccaggcaccaccttcccacatgtccctgcaacttctctctttccagtgtgctgaagaagggaggtgccacccctcctccagataaatggccccagaaaacgatccaaaaaaatacccagggagcgattccttatgtaccccctccncccctctctttataaaatntgatgattacaaaagaaaggaatgggttttttgtgggcacacattatggag

SEQ ID NO: 555225 - DNA, 585 bp, Homo sapiens
tgccttcccagatgaaattccttttattaagccctcccttttgtagcagtaaatttgttcacatgtgatttgatcagtttccgtcataatactaacacagcagagcaggctgggtgtttttactcatcacatacatcctcaatgctctgcagcggtgcacagtagtaggtacctggttaactatttgtgaaaaacatgaaaaatgggaacaatggggcagagtcaagttaggaagttcagtcatccaagaatcaaggagttgctgcactgaggtattgcacgatgatgggggcacttaaatttttaggaaaacgaattaaaacattgaattaaacaataatttcaagcaattcccaaaccaattaatgcatagattaggttgtaactgtccagatatgtttggcgacacaattctattagcatcaagactcatctaagtacctgaagtagtggcaccaccatcaggctcagcagtacaaaaaggcacatcattcttgtcctccctaatctcctgcagtatggattttgccaaaccatttcgattagagctttcaaaggccagtttattcgggagaaagggtccat

SEQ ID NO: 555226 - DNA, 5317 bp, Homo sapiens
ttttttttcagagttcccgggtcccttccgcctgggttcacgttcacgtttattcaaacaacagagccgactcgggcgaggtctgggagcggcgggcgggcggtgtcgcctcctgggctctgctgacccctggtggtggggtcggcccaggctgggacctagcccggcccccctcggccgctgctgaccgccatcccccacaccgccttctggagcccgcagagggaggcaggggcgtccccggggacagctcaggcggccacagttgggggcggggagcatcagcctgtgcggagctgggagcctgggaagcaggaggccagagggtggccccttcggttaagtgtctggggagcggcccgggagcccagaggggtcgtcgggggaagcgcggggcacgtgctcgcaggtgatgaggtgggtgggcagcgcctgggtgtcgtggaagatgacgaagatgctgggctggcagatgcagtccacggcgctgtcgtagcgcaggagcacgtggccaggaccccgcagagggggcgcccgcagaccgcggcggccctgcccgtagtcgccagtcagcacccgtgccacgaacaccgccttatggccatcggcgttggggggcgagtagcggtcctgcaccgacagggaggcgcgcctggcgaaatacacgcccttcccgtagaccgtggcgttgcggccgcagaagctgcggttgaagccgtgggcgcagatgtcaggcactgccggtgccgtcgtgccgtggtacagcacctgctccaccgggcgccgctcgcatcgctgcagcaggcgctcccggtacagctcatactgctgctgcagcagcgggtgcgacacgcgctccacacgaacgacgcggatgctgctgcgggcagcgtccagggtgtcgtagaaggcccgcaccacctcctggaactccccggtgttctctgccagacgctccaggttgttccagggccccttcagcgtctgccccgccaaggtagggcctgaagctgccaagggaaaggccaaactctgatcccaggggccagccagaagtgccaccaagtggcgggcagcacgggcagggtgggccccgaagccacggaggatggtgcagtcaccacgcagggcaacactcacaccatggcaccgctccaggcgagcacgcagctctgcaggcagtgtgcggcgccagggccccaccgtctcctcctggacgtggacctccaaggcagccctgagcgcccggtccagctcctccacatcctgctcaaaggccgagtgcaccaccagctgggccttgccatcagtccccccatctgggggctcttctgcctccaacgggggctgctccagcagggagagggttagggcttgccgcagggcagcagcctcctcctgctcagccacctgaccttgaggctccagtgaccggtggagggccagctgcagagcggcctcctcctccagccacctgggtgccacagtgctgggggccacaggctcctcctcctcatgccctggggtcgcctcctcctctggctgctcctgaggcccttcctcctccagctcccgaggcagccagtcctccccgtctaggtctaggccctccagggtggccagcagttctcggacctcctccaggctcacgtcctcctggtcaccacctgtactgtctggggtccacagggtgtgggcgttgccagggagcactgggagggcctcggtagggtccacctcttcaaggcctgtgtccaacgtggctgtggccaggcgctctgtcccaaagacacactggaactgagcctccagcccctggagaaggtgctgcccttctgggcccaggagaaacctggcgctgcccgggtgctccaggcacaacacatggcagctaatgctgcccagcaggctccgcagaaactcctcagccgcctggcaggaagcctgggctccacagagccgaaagccagtcatatccggtccttcaagtggcaagagagcgacgtctcccaggcccgcaagaaggtcctcatggtagagctgcaggaagcgcatcgcccctggctccatcaatagcaccatctccaccaggccctcctgccctgccagcttcacacatcctgggctcacaggccctgccttctccagagaccccatggtgatctccatgggacccaccagcccctcttgctctggtgagtccatggcaatttccaccaggccctcctgccccggcaaccccttagaggtctccactgggcctgcagaccccacaggccccaggctcatgggcccctcctgttcctgcaaccccacaggcctcaggcttaccagcccctcatgttccagagaccccatgggcatcgagctgacttgctctgcctgtcccagagaccccatgggacctgtcctcagagaggtccctgactgccctggttcctggccagagcctgttgtcataatccctctaccctgcaccatgggacctgtcctcagagaggcccctgactgccctggttcctcgccagagcccattgtcacagtccctgcaccctgcagagccgtcaccaaccctccggtcctcaggagagcatgcttggtagccctaggcccctgggtggacgggtggtcccctccactggtgttctcagccagctcctcgggctccaggatgtcgtagtgggggacaaggctcagctctgagccctgcaaccggtgctcctgctgcaacactcgttctgccacttgccactgctggaaggaggcaacagtgcccaggggcccgggtaggcgttgcaggtcctccaggggccccccaccactgcggcgctcattctccaggtacaactccagcaacagcaggtccacagaggcaccatcccccaccacacgcaccgctcgggcctggggaacccgggccagggacaccaaggtcccctccaggacacggacatctgcctcagaaaggggcttgggcaactggaccagagcccggtctggccgggggctggccaaggcacagcaaggctgtactgggagccccgaggcccgcagcaaggcctggacatgctgctccaagcgctggggcgtggtgccagggggcagtccttggagcagcaggcgtgcaggggctcgtggtggagctggccgcaggctcagctgggcaccatgtagttcgtgatctgcctgggccaagaccctctcggcgtctgcaggctctctgaaggtgaggacgcccccacagcccagtctctgccagctcaacacaggtccccctccagagcgtcggcggttttcaaagtagagagtgagcagctcgtcgggcacggcagggggcagtccacggacctccactgccacccctgcctctgcctccgccattgcaaccattccccgtggccgctaggcagcctcaggccatgagctcagccaggactcctgtgcctgcccctcagcaagcctaaccccggcctgcggcgcccggccaccggtgagtccccggcccgagcccaggagcgcctctgacccgctgcgccgcgcggcctgccgcccccgcccccgcccccacgcggatcttgcgcatccgagcgtggccgcctcgggggcggaccgcggaacccgaggccatgtcccatgaaaagagttttttggtgtctggggacaactatcctccccccaaccctggatatccgggggggccccagccacccatgcccccctatgctcagcctccctaccctggggccccttacccacagccccctttccagccctccccctacggtcagccagggtacccccatggccccagcccctacccccaagggggctacccacagggtccctacccccaagggggctacccacagggcccctacccacaagagggctacccacagggcccctacccccaagggggctacccccaggggccatatccccagagccccttcccccccaacccctatggacagccacaggtcttcccaggacaagaccctgactcaccccagcatggaaactaccaggaggagggtcccccatcctactatgacaaccaggacttccctgccaccaactgggatgacaagagcatccgacaggccttcatccgcaaggtgttcctagtgctgaccttgcagctgtcggtgaccctgtccacggtgtctgtgttcacttttgttgcggaggtgaagggctttgtccgggagaatgtctggacctactatgtctcctatgctgtcttcttcatctctctcatcgtcctcagctgttgtggggacttccggcgaaagcacccctggaaccttgttgcactgtcggtcctgaccgccagcctgtcgtacatggtggggatgatcgccagcttctacaacaccgaggcagtcatcatggccgtgggcatcaccacagccgtctgcttcaccgtcgtcatcttctccatgcagacccgctacgacttcacctcatgcatgggcgtgctcctggtgagcatggtggtgctcttcatcttcgccattctctgcatcttcatccggaaccgcatcctggagatcgtgtacgcctcactgggcgctctgctcttcacctgcttcctcgcagtggacacccagctgctgctggggaacaagcagctgtccctgagcccagaagagtatgtgtttgctgcgctgaacctgtacacagacatcatcaacatcttcctgtacatcctcaccatcattggccgcgccaaggagtagccgagctccagctcgctgtgcccgctcaggtggcacggctggcctggaccctgcccctggcacggcagtgccagctgtacttcccctctctcttgtccccaggcacagcctagggaaaaggatgcctctctccaaccctcctgtatgtacactgcagatacttccatttggacccgctgtggccacagcatggcccctttagtcctcccgcccccgccaaggggcaccaaggccacgtttccgtgccacctcctgtctactcattgttgcatgagccctgtctgccagcccaccccagggactgggggcagcaccaggtcccggggagagggattgagccaagaggtgagggtgcacgtcttccctcctgtcccagctccccagcctggcgtagagcacccctcccctcccccccacccccctggagtgctgccctctggggacatgcggagtgggggtcttatccctgtgctgagccctgagggcagagaggatggcatgtttcaggggagggggaagccttcctctcaatttgttgtcagtgaaattccaataaatgggatttgctctctgca

SEQ ID NO: 555227 - DNA, 378 bp, Homo sapiens
  misc_feature (308)..(308): n is a, c, g, or t
  misc_feature (327)..(327): n is a, c, g, or t
ctccataatgtgtgcccaggctggtctcaagctcctcctgccttagcctcccaaagtgctgagattacaggcgtgagccttttcttttctctctctctctctctctaatgctgacccactcagtagagcaggggccagccagagggggacgaagtcaccaatccaggcaccaccttcccacatgtccctgcaacttctctctttccagtgtgctgaagaagggaggtgccacccctcctccagataaatggccccagaaaacgatccaaaaaaatacccagggagcgattccttatgtaccccctccncccctctctttataaaatntgatgattacaaaagaaaggaatgggttttttgtgggcacacattatggag

SEQ ID NO: 555228 - DNA, 579 bp, Homo sapiens
  misc_feature (9)..(9): n is a, c, g, or t
  misc_feature (12)..(12): n is a, c, g, or t
tgattgacngantgatgagcatgcagattccccaggtcagacacctcacattcaactagatcacatttcttataatgtgatgttagaaagtctggtcattctgtttgaaattcgtgtgcaaaaggaagattcagggaataaagaaggcatgtgaaagtattacaaaggagaggtaataggaatataatttcttggcttgaaatgaattctggtgctagaccttggatatgcagagtgatggacagaatttcctaagaaataaataatcccctagcaagtcttgttctaaaattacactgatataaaaataacctgattagaataatgaaagtgtgaattaggttcacacattggtgcctttgctgggacaaaaaagagactttcctgagggttgtcttgttccagtttctcagccactcaccatgtgatacctctgacttgtcctcttggatcatttcctacctcttgcctttggcagtgttaatctggtgattttcaaagtaaagaaatgaacagctgatgacagaagaaatttggaaataaattgagggtgactcatcctcaagattaaaaacaaaa

SEQ ID NO: 555229 - DNA, 210 bp, Homo sapiens
gcttggtaccccagcgccactatgcctattattagcataattcctttactattttttaacccaatcaaccacaacctatttagctggttcccaaccttttccttcgacccccttacaaccccccttctaatactaaattactgacttctaccccttaccattatgggaaggcaaccccacttattccatggaccaattttcccaaaaaaa

SEQ ID NO: 555230 - DNA, 1280 bp, Homo sapiens
  misc_feature (661)..(661): n is a, c, g, or t
  misc_feature (900)..(900): n is a, c, g, or t
agcggggatacgggaaggagccaggcaggatgcatgggggaaagcggcagggggcttgacgagcgaatgagctgcagctgagagcactggatgtcagggtagaccaggggtcggtcaccgttgcgtagattcaagtcctcgttgagtgtaaggagagcgggagaataacagtggaggcgagtcgtcggtagctcgccaacgcacttagagcaggagctcgtcgagcgatggacgagggcgcgggatctgagatagagagttctagcctcaagaacagtcgcaccgtagggcatggtgcgaaggacttgtgagaaaaccacactcatcccagtgaaacaaggaaggagtggccttcattggatggctctgactatcagacagtgccacgttagtcccctatacgcggggacacgtactatggagggggcacttcttgcatgggtaaagctcggaagatttacacaggtggcacaaagcacctaccttgcgttgcccctttcgcgaccccccaagaactctctcaatatacttaccagattgtgcccatttgtgccagacgacaattctctggtgtgagcggcacgccctacaacccaggattacgtttccgtatacaagccacgcccagctcctggggcctcctagttgtcacaacgccacnaagaggctgagaaaatcctaggagttagacgccaattgagacccaaattcctttggcacgcgctggcgtacagacacagagagactttgtgaaggcatctccctaaggcatagaggcaaatctcttcccccttgtttcttgaccttgaaagctacaaagcattgcgggcacgagggcggggtttcgacagcgaacaccgtttgcgcactagcggcacctaagggaggatacacttagcnttccttatatctatgtgcgattcccaatatcgaaaattccacaaagattgccgaaggtgaaaagaggaaaggctaggcaaagctatcatagtccgcacatcgtggagcggatttcaaactctacaagaatttgcctcaaccagactggaggatattcttgaagtcccgctagtaccagcgcgccagtatcggcataccatcatcagcaagttggtatcaccacgaagagcgtaggaaagaggtagccgtaataggggggaaggggcaaaaaagacgaaagacatttccttggaagactaaaccagtaaataccctggatattgccgcttccgcactcgaaaacctgggcaccaagtacctcccccgtggatccgcccgaa

SEQ ID NO: 555231 - DNA, 1345 bp, Homo sapiens
  misc_feature (881)..(881): n is a, c, g, or t
gtgctataatacccgggattaccatgtattatttgccggggaggtgttattatttacacagggacagttggtgcactcgcctttttgggacactataaacaggtgtcacaaaagccagcgtgggatccgtctgggattttcccggggattttgtaggcaacaagctcttcagaacatatcggtgttcccggcaatatgggcacggcgcaaattatcccagaaaagggaaaattttttccgcttggtatgggacaatttttcaaaaacgttgacacgtgtatagagggtttttctttaaatcccggggagaccttgggccttgaaaagatgggcctaacttcttgggaaatttgaagagttggccgagggtttaccccccaaaccacgcggccacggaaaattcatttatttcttttgtcccccccgcggaagcaccagagaatgggtttcttggtgtcaaaaaaaggggccccgcgccgggaatttttcggggggaatctggtgacttctctggttaggatttcacgaaaagagaaggttttgggcctttttccacagaaggggcccaagttgtaaggagccttttatttgcctggaaaaaagggtgggccacacactaagaagggtctttgtggtggcacccaatttgccccccaaggccatgaattcttcttggcgcgtgtaccaaaaaattccctataggaagggctctttcctgtttcgcgagagggcccctgcgttatgtgttgttgcctctccggtttcatatcacatggaagaagttgtgggccccaaaggccctgcgataggctttttgtggtgttttttgtggaaaaacttctcgacaggaacacgaaggggctataaatccactgaaagtnttgttggaatgtggcctcgagatgagttccaccacggcggagggaaccctcgggttaaactatatctatacgcgttgagaacctgggctgtggcgcgccacacgctggttgtgctcacaaccacggagttttgctgggcacttacaaggtgaaagattcacttcttggccctcgggagaccccacactggtaaagaattggcccttaagagaagcccctcgcctgagccacacgtggaggcacttttgggagaaccccaaagagttaggagtatctgcccacccaccccccactttcacgaaacacgaaagggtgggaaagccacgaagccgcctgccacatgccccacagccacgtccccaccacgcactataaacgggtttccttggcacagctgtatattttggaggtttggagatgttgcttttcttaagacccttttataaaattttgtaccaagacca

SEQ ID NO: 555232 - DNA, 271 bp, Homo sapiens
ctgattccaagtctgactctgacctgtggggggagcagggcacaggggcccgtgcaccattaagcatacgcaggagctaggatggaggaaatcctgccctattgggtggcaggattactgtggcaaatcaggcagaagccaaggagatgctgtactggtgtatagggccctgggcccaaccctgtttctgagagacccaagcagaggatcagagaccaggatgataactaaacttggggcaaacaaggaagctcactcactcagacaccct

SEQ ID NO: 555233 - DNA, 863 bp, Homo sapiens
accgtgggagcacatcatatatttacagtaggaatagacgtagatgcacgagcatatttcacctccgctaccataatcatcggtatccccaccgtcgtcgaaagtattaagctgactcgccacacgtccacggaagcaatatgaaaatgagtcgtgctgcaggtgctctgagccctaggattcatctttcttttcaccgtagtggcctgatttggccattgtattagcaaactcatcactagacatcgtactacagcgacacgtacctacgtttgtaggctccacttccactcatgtcctatccaatagggagctgtcattgccatcatagcgacggctctcattcagtgtgattccccctattctcaggctacaccctagaccaaacctacgcccaaattccatttcatatcatattcatcggcgtaaatctaacttatcttcccacaacactttctcggccttatccggaatgcccgagttaactcggactaccccgatgcataccaccagatgaaccatcctatcatcctgtggggttcattcatttctctaacaagcagtaatattcactaacttccatgattctgagaaagcttcgcttcgaaggcggaaaagtcctatagtagaagaaagcctccataaactggggtgactatttggatgcccccacctaccaaatcgagacccgtattcttaacatctagacaacaaggaggatcgaccccaaggtgttaagcacaccaggctcctgcttttagacgacacttgcaacacacagcacaacacttgtgggcgcgcgcagaggtttacacctggcggggccacggaaactgcccgtccaacacggacgcaggggccca

SEQ ID NO: 555234 - DNA, 153 bp, Homo sapiens
ctgtgtcctcctcctgctgctgtcctcctcctgctgctagagaaatgaatgagcctacagatgataggaggtatcatgtggcgcatgcatcagggaggaggacagcagcaggaggaggacacgcagcaagaggagctgcctctagcgagcatc

SEQ ID NO: 555235 - DNA, 139 bp, Homo sapiens
tctggggggacccaaaccctctcctctcacagaagcccctaattcttcatctcagccccttcccacaaggtcagctgaagatctacagcccaggaaaagcccactccaggctccatcgcacatgagcagcttagaagac

SEQ ID NO: 555236 - DNA, 621 bp, Homo sapiens
  misc_feature (33)..(33): n is a, c, g, or t
  misc_feature (119)..(119): n is a, c, g, or t
  misc_feature (122)..(122): n is a, c, g, or t
  misc_feature (151)..(151): n is a, c, g, or t
  misc_feature (168)..(168): n is a, c, g, or t
  misc_feature (176)..(176): n is a, c, g, or t
  misc_feature (189)..(189): n is a, c, g, or t
  misc_feature (217)..(217): n is a, c, g, or t
  misc_feature (225)..(225): n is a, c, g, or t
  misc_feature (227)..(227): n is a, c, g, or t
  misc_feature (248)..(248): n is a, c, g, or t
  misc_feature (250)..(251): n is a, c, g, or t
  misc_feature (258)..(258): n is a, c, g, or t
  misc_feature (271)..(271): n is a, c, g, or t
  misc_feature (280)..(280): n is a, c, g, or t
  misc_feature (282)..(282): n is a, c, g, or t
  misc_feature (285)..(285): n is a, c, g, or t
  misc_feature (298)..(298): n is a, c, g, or t
  misc_feature (366)..(366): n is a, c, g, or t
  misc_feature (415)..(415): n is a, c, g, or t
  misc_feature (448)..(448): n is a, c, g, or t
  misc_feature (500)..(500): n is a, c, g, or t
  misc_feature (544)..(544): n is a, c, g, or t
  misc_feature (546)..(546): n is a, c, g, or t
  misc_feature (581)..(581): n is a, c, g, or t
aaaaagcctagagaaaatatgcttagcaaatantttacaaacagaaaacagaaagtcatcaactccacaagctccaaaatgaagcagtaacatgtgctccaatactatgaggcaaagtnttntccaatcgtggctgcattagtgtccatcngcaccagcacccttggnagtttggnaataccttaatgntcctcaagaatgggcaagggttcctttntacaatgngngccatgggccacaccaccccngnncattttntccatgattctgnttttgacantnttntcccttgtttgtntaggtgtgccctggaaacccaggtagcatttagtccctaaatttgtgaatgtcattgaacagcctgtngaagggaaaggctgcttcattgggatgcgggcagttgtagttgcatttncaggactggatcatcatgacgttcttggaaaanatctccccatcttcgcagcggaaccgcatcttcacagtcctggtcagctggngcgtgcagcatcggccgtccacgcaggaaccgcagtacttgggncnggtatttcttcacactcaaacatccagcgtaagtnaacctgactggttcgggggatttcttggtcttgctgcatt

SEQ ID NO: 555237 - DNA, 798 bp, Homo sapiens
  misc_feature (430)..(430): n is a, c, g, or t
  misc_feature (615)..(615): n is a, c, g, or t
  misc_feature (631)..(631): n is a, c, g, or t
  misc_feature (693)..(693): n is a, c, g, or t
  misc_feature (703)..(703): n is a, c, g, or t
gcctgcgccgcctttctccgctggcaagggccgtcccgtcctcctccccagccatgggttcacgtcgcggccttctgctacatgctggcgctgtgtcactgccgcgctcatcttcttcgccatttggcacattatagcatttgatgagctgaagactgattacaagaatcctatagaccagtgtaataccctgaatcccctgtgtactcccagagtacctcatccacgctttcttctgtgtcatgtttcttgtgtgcagccagagtggcttacactgggtctcaatatgcccctctgtggcatatcatattggaggtatatgagtagaccagtgatgagtggcccaggactctatgaccctacaaacatcatgaatgcagatattctagcatatgtgtcagaaggaacggatggtgcaaattagcttttnatcttctagcattttttttactacctatatggcatgatctatgttgggtgagctcttagaacaaacaagaagaatgtggtccagttaagtgcatgcaaaaagccaccaaatgaagggattctatccagaagatcctgtcccaagagtagcctgtggaatctgatcaggtactttaaaaaattgantccttatttttaaatngtttccaccatttttggtggtggacagactgtttcatatgtatactcagataagatttaaanggattacgtntaattactttaaagggtactttggggttgacaggtggactgggctttaggaaagcaaactttgagtggtaaaaggggctagattgggttgttagc

SEQ ID NO: 555238 - DNA, 389 bp, Homo sapiens
ggaccccgccaatggagagaaaaaagatattatacttttaaaaagagggagataagagagaataagaaaaataaaaaaaaagactaattattaaaaaaaaaagggatcctcaacctaaaaagagattttacaaaaaacaaaaaaataggtttaaaaataacgtggagaattttaaatgccccccacagaaaaatatgcaaaaaaagcaatataaaaaaaaaacacggaaagccacctgaaaaaaaacttcccacaaagaaaaggaatttttcctaaagggagaaaaaaatataaaaaagcaccgagggataagatttcccaaaaatgtatttaatgaaaattagggaaaagaaaaaaaggagggccaaaggcaaaaataatttttcacc

SEQ ID NO: 555239 - DNA, 400 bp, Homo sapiens
ctcataccttgtctacacagtccttgtacagggctcctaacctgtgatgagtaaagaatgtcactttctaacaggtccaggagccccaagttatcttgggacctcaagaagagaggaatttacccaactcataggtattggagggtacaaacccattgctgggcttgacttttaaaaagtcttttctgatattccttatggaacagaattccatcagagccaattttaaaagcatatgtgaaaaataattattcttgctgtactttatgcaaataatcaggccaagtataagactaaagtttattttgcaaacaatcctattatgatttgtttttaacaaaaatgaagactggagagtttcaaaacttatcacacttgtcattaaattctagttttatta

SEQ ID NO: 555240 - DNA, 1132 bp, Homo sapiens
agcggttggagaatgccctgctcacaatgaggacagttgccacggtagagaattcgcttggcctcaagaggcccgttcaggaaaactagcagccataagatgtagtgatgaaaaggatagcacctggaagggattcatccactgcacgaaggaacatgacagcaagtgtcgcaatgttccattctgaggtctttggtggtctgcattcttcagataaggaatcacgttaacccaacactcgttccatcctgaacgatggctcgcgagacatattatttctagcaagtgctaatggtcaagccatcgtaatgcgcatgcacatgaagaactccctgtggcacggaacatcctcagggtcgctgtgccctctagcggctggcttcaggaaccggcgctttttaacctgcttgggaggccgacaagacaccagtggatatctagagactcaagagctcatgaaggggtacctggccctccatattactccttgatcaacagatggtatagaaacagcaatgaccctaatgatcgagaggaggcttattcattcaagcacacgttacacgtctcacccgccaacgaaggatgcagacctttgcgagcgagactgcgcaaacagaatcgcgctgggagccaaaagtgcacacagtgccctgctatttcccttataccagattagcggataaccgggctgtcaatgggggagccgatgcttacatgtgaacatgggcccctgaatgactgggtggcggtagactggcgcgtgggggttactcaccacgtgtatcctacgaccaggcaagaccgtggacagacccccaggaacaaaccccgagcagaggggacacaggcgacacacctccacgctgagggcactttccaacagtggcgtcccccccattggccgaggaccaaagccgcaggacgacctcgacaggcccccattggggccccataacacggaggaacgacgcaagaactggggacacaagcaatactaacacgtagtcaccaattcccatcggatggcgcccgtttccaaatggtgctggaaacagagacccagcgtcaatgacacccagcgaggaagaccacagcaactaggggagaaatcacactacgacagctgggc

SEQ ID NO: 555241 - DNA, 145 bp, Homo sapiens
cacgaggcggcagaccgccccagggtgtcactgacgccatcactgctgctacgccccaggcaggagccctatgttttcaaacccgctgtgcatcccgggctggtgctggggagcaccagccaggggccatgtcggggcggcggcc

SEQ ID NO: 555242 - DNA, 111 bp, Homo sapiens
tgcagtcccagatctccgacacatctgtgtgtgctgtccatggacaacagtctgctccctgtgacctggacggcatcatctgctgaggtcaaggcacagtatgaggagatg

SEQ ID NO: 555243 - DNA, 488 bp, Homo sapiens
gcatcttggtgaagtctacttggaggtcttcaaaggggtctgctccacaggcttgtatgccgggcgggacatttgcacttggcctacctttctgctgccagcaggtgacacactgatacaccacggttttggctagggctgccggatgtgagttgtagaactaccggcctaacaacttttcaagtgactctcggcctaggtgggtggtctcatgaacagccagtacgactgcagctcctagcggttgtggcatggctattcttctatctgataactggatccatccctcttcaatcacctgccctccctctgcctggagaaagtccttctcttctttagaataagtaggtacaaggtcaggtgcctgaaggagcagggggtgctgtgactgatgcccggtagggggtggatgctgcttttcaagcctctgagtcagctcgggagttcccaaggcaatcaaggtgaaagattgtcgtcgtcctctgcag

SEQ ID NO: 555244 - DNA, 343 bp, Homo sapiens
gggatgggatgaatcaaagatgaaggactatgatctgagagcagatgctatttccatcaaaagtgccaaggcctccagggacatcgccagtgactacaaatacaaggaagcctatgagaaacagaaaggccaccacattggagcccagagcattgaagatgatcccaagattatgtgtgccatacatgcaggaaaaattcaaagtgaaagggagtacaagaaggaattccaaaagtggaaaaccaagttctctagcccagtggacatgttaagcatcttgctggccaagaaatgtcagactttggtcactgacattgattatcgcacttacctgcataaatgg

SEQ ID NO: 555245 - DNA, 537 bp, Homo sapiens
  misc_feature (295)..(295): n is a, c, g, or t
  misc_feature (466)..(466): n is a, c, g, or t
  misc_feature (516)..(516): n is a, c, g, or t
ccacgtctccaccctgaggctgggtccctgaagaagccccttgtttctccttcattctatagtgtgtgttgctccaccacccagaagccatgattggtgtaagtaacgggagagattatgcacatggaaatggaattacctattttcggccacattatctgaagtggaatagtagacctcagttgagaaagctggagggaaattgccccagtttgtctagagtctcctccgtttctcggagtcctcccagaactaagtgaggggcttactgtacgaaagaggcccagcctggcangtccttgtgtttacgatggggagggttaattctgaggcttcctgtaataaaaaggcttggggaatgtggagacgtataaggatgaagcatcaatggggagactcctcctcccttgaaatcctaaaagtgtttgaggagcaaggactctgggggttcctgcagtttctgtcntggcaagtgttccacacagaaggggctcaggaaccaggattaaaaatccnaattgatgcccaaactccata

SEQ ID NO: 555246 - DNA, 302 bp, Homo sapiens
ctccctccaccagccgggaagctgaggcaggagaatcacttgaacccgggaggtagaagttgtggtgagctgagattgtgccactgcactcagcctgggcaacagagtgagactgtgtctcagaaaaaaaaaaaaaaaagggcacagacattagaattgtggaatgcaagcgtttcccttggttagagtctatttttaagtgcttttaataaaaagtaataagattgtggcttgagctggagggatctaaagaagttgggtttagaatttggaaataaggagtcctactgaagatcatggaa

SEQ ID NO: 555247 - DNA, 319 bp, Homo sapiens
  misc_feature (43)..(43): n is a, c, g, or t
  misc_feature (98)..(98): n is a, c, g, or t
  misc_feature (224)..(224): n is a, c, g, or t
  misc_feature (244)..(244): n is a, c, g, or t
  misc_feature (255)..(256): n is a, c, g, or t
  misc_feature (273)..(273): n is a, c, g, or t
  misc_feature (295)..(295): n is a, c, g, or t
  misc_feature (301)..(301): n is a, c, g, or t
  misc_feature (306)..(306): n is a, c, g, or t
ctagtaatgactagtggcttctctggagctgacctgacagagntttgccagcgtgcttgcaagctggccttccgtgaatccttcgagagtgagacttnggcgagaccgagagaggctgactaacccatcagccttggaggtagaataggatgatccattgcctgagatccgtcgagatcactttgaataagccatgttctttgcgcgccgttctgtcagtgacnatgacattcggaagtatganatgtttgcccnnacccttcagcagagtcngggctttggcagcttcagattncctccnggaanccccttattgggt

SEQ ID NO: 555248 - DNA, 215 bp, Homo sapiens
  misc_feature (151)..(151): n is a, c, g, or t
ctacgaggaatacgaattggtatgtcctaaaataagaaagctaataaaggagggaaatccccttttgtctgctataagaatagtgtatcgttcagatttaatttatagttgtgttgctcttagagttttaggcatttaacgagaacaaagnaaattttataactgctagttatactgttattgtaatataattaagtataaagaaaatagtgtgc

SEQ ID NO: 555249 - DNA, 270 bp, Homo sapiens
agcgggagcacaatcacttgaggattcgttgttataaagcaaacacggagcacttgctctcagccagacagacatgttctaggaggtggaactagagcagaggaacaggacacggccctcagggcgccaaatgctggtggtggcagataggtcgcacaggagcctgtgtgaagatgcgagatccgggcaggcacaggagtaatgggggcagtggaatgttgttgctgcatgctagatgtgccggggagaggcctcctctgaggaagggac

SEQ ID NO: 555250 - DNA, 944 bp, Homo sapiens
  misc_feature (26)..(26): n is a, c, g, or t
  misc_feature (226)..(226): n is a, c, g, or t
  misc_feature (879)..(879): n is a, c, g, or t
  misc_feature (908)..(908): n is a, c, g, or t
agcggagtgggtcatcagtcggcgcnagcggccgcacgccgcggagcaggggctcggaggtcccgggattacggtgctcgagcacgctggtgggaaaggacccgggacttgaacagtgttgtgcggcgccatgcaggtctccagcctcaatgaggtgaagatttacagcctcagctgcggcaagtcccttcctgaggtgagtcacttcccggccccctcactctcnagctcttgggggtcgtcctcctcgtggggcagccgcccctctcctcggccctagcctctgttttagctggacgctggtcaccccccgactcggggaggcccagaggcggctgacaatttccgggggaggtgtcggcattgggagacaaggacactgccgtcaccgcgccagaaactggaccaagggataatcagggtcagtgagctttgctggaacttttgtaaagttctctgttccagagaacgcaaccatttgggcctctttgggtgttcacagtccctgccgtacatcgaggaggaaaacgtggcagattcgttgacacatctctcccccatatggccatcagctgtttgtggagtccctatcatttgccaggtcttagggatacaacagtgaacaagggagatacagacttcgcatctgcagaatttatggtgtagaggacagtattttcgagacttgttgaacttaacctgattcctagtcttaaagttggagagggcttggacaagtcggtaattctcttccaatcttctcgtgtttagtaatgcagctgagatttaataatgcgtttaatatgcagctgagatccagcaaggggaagggtgacttgtccagcatgacacacttaggctctgaaacttgtcttttgnttcttatacgtgatgatccagcctctgtncaagcactacactgagcactacctttgtgggagtca

SEQ ID NO: 555251 - DNA, 625 bp, Homo sapiens
  misc_feature (255)..(256): n is a, c, g, or t
  misc_feature (305)..(305): n is a, c, g, or t
cactatgatcaagtatggggggaactctggtgaagggttctgcacatattttccgcacttcatccaccttcccgtagatatctcgcgaatcactttattctcagttggcagcttattacaacccacgtttctcatacaatcatttccatcgatgtgtatggcttttacacacacatacatcaaatccaatagtgtctaaagcacaaaacgcattttttaattatcaattgcgaccacgttgcatagcctggggannaaaactcttaaagcggtcggtgctgccttattatatgtttattccatanttttatatgcgtacgctttttaaatttttgtgggtcggccatattattaaagcgggcaaaaacgttagaggttaaaattttggcctaagtaaatttcccaactttttgtgcctctttcgtagttacacgcttgacatactaaattactcacgaacctgggtttcattctttgattgggggccccctaatgggagaaattttctggagcaactattatacatttctattcataagcttcttaaccccttttccatattaaatttaaacttttccatgggacccacaagaaatgttttgcctggaccccttttaaacccaaa

SEQ ID NO: 555252 - DNA, 498 bp, Homo sapiens
  misc_feature (26)..(26): n is a, c, g, or t
  misc_feature (313)..(313): n is a, c, g, or t
  misc_feature (410)..(410): n is a, c, g, or t
  misc_feature (415)..(415): n is a, c, g, or t
  misc_feature (417)..(417): n is a, c, g, or t
  misc_feature (438)..(438): n is a, c, g, or t
  misc_feature (444)..(444): n is a, c, g, or t
  misc_feature (454)..(454): n is a, c, g, or t
  misc_feature (461)..(461): n is a, c, g, or t
  misc_feature (475)..(475): n is a, c, g, or t
  misc_feature (477)..(477): n is a, c, g, or t
  misc_feature (489)..(490): n is a, c, g, or t
agcggagtgggtcatcagtcggcgcnagcggccgcacgccgcggagcaggggctcggaggtcccgggattacggtgctcgagcacgctggtgggaaaggacccgggacttgaacagtgttgtgcggcgccatgcaggtctccagcctcaatgaggtgaagatttacagcctcagctgcggcaagtcccttcctgagtggctttctgataggaagaagagagcgctacagaagaaagatgtagatgtccgtaggagaattgaacttattcaggactttgaaatgcctactgtgtgtaccactattaaggtgtcnaaaagatggacagtacattttagcaactggaacatataaacctcgggttcgatgttatgacacctatcaattatccttgaagtttgaaaggtgtgtnagatncnagaaagttgtcacctttgaanatttgngtctgatganctactcnaaagattgtcttcntnacataatgatannatacattg

SEQ ID NO: 555253 - DNA, 126 bp, Homo sapiens
aagttttaatcttacttccttgtccaaaattgctacgtgagtttcagtcgttgcattcttattctgcgcagctaagagaggcacggtattaaacacaggccatctcagtatcatcactctctttaa

SEQ ID NO: 555254 - DNA, 200 bp, Homo sapiens
agaatctttacttacagggttcaaagatgagagctagaaaaatcgtggccttaacaactgaaagctataacagggtatcatgctactgaggtgtcaggcagtgcagcatgggccagcttgacaccatcgtaagcagccgtactcattctctcgatcttgcgtgcgtcctcgtctgtgcgagtcctcagatcactcatgct

SEQ ID NO: 555255 - DNA, 700 bp, Homo sapiens
  misc_feature (26)..(26): n is a, c, g, or t
  misc_feature (515)..(515): n is a, c, g, or t
  misc_feature (612)..(612): n is a, c, g, or t
  misc_feature (617)..(617): n is a, c, g, or t
  misc_feature (619)..(619): n is a, c, g, or t
  misc_feature (640)..(640): n is a, c, g, or t
  misc_feature (646)..(646): n is a, c, g, or t
  misc_feature (656)..(656): n is a, c, g, or t
  misc_feature (663)..(663): n is a, c, g, or t
  misc_feature (677)..(677): n is a, c, g, or t
  misc_feature (679)..(679): n is a, c, g, or t
  misc_feature (691)..(692): n is a, c, g, or t
agcggagtgggtcatcagtcggcgcnagcggccgcacgccgcggagcaggggctcggaggtcccgggattacggtgctcgagcacgctggtgggaaaggacccgggacttgaacagtgttgtgcggcgccatgcaggtctccagcctcaatgaggtgaagatttacagcctcagctgcggcaagtcccttcctgaggtttactctgttgcccatggctggagtgcagtggcacaatcatggctcatcctacagccttgatttctctgggctcaatgattcttgcacctcagcctactgagtagctgggactacaggtgtgtaccaacatgcctatcagacatccaagcggggatgtcaagaacacagttggatacacaagtccagttccagagtagagtggctttctgataggaagaagagagcgctacagaagaaagatgtagatgtccgtaggagaattgaacttattcaggactttgaaatgcctactgtgtgtaccactattaaggtgtcnaaaagatggacagtacattttagcaactggaacatataaacctcgggttcgatgttatgacacctatcaattatccttgaagtttgaaaggtgtgtnagatncnagaaagttgtcacctttgaanatttgngtctgatganctactcnaaagattgtcttcntnacataatgatannatacattg

SEQ ID NO: 555256 - DNA, 462 bp, Homo sapiens
  misc_feature (1)..(1): n is a, c, g, or t
  misc_feature (229)..(229): n is a, c, g, or t
  misc_feature (236)..(236): n is a, c, g, or t
  misc_feature (244)..(244): n is a, c, g, or t
  misc_feature (253)..(253): n is a, c, g, or t
  misc_feature (350)..(350): n is a, c, g, or t
ngtgccaccgactaattcatcaagccaacttaatacttcagaccttcaaaactgtggcctgaaagttgtatatgttaagagatgtacttctcagtggcagtattgaactgcctttatctgtatatttttaagtttgactgtattaattatcagtccctcctgaagggatctaatccaggatgttgaatgggattattgccatcttacaccatatttttgtaaaatgtancttaatnataatctnacactgaanattttgcatcactttccctattatcattcttttaaaaattataccccaaaaaaatttaccccttaatgtgtcattatatcccattccttaaaagaantgcaaatattggccgctcggttctcaccttttaacttgaaagccatatgctccccgatactgcatttaacaatatttggtggcaaatattcaataaatagtttacatctgtt

SEQ ID NO: 555257 - DNA, 979 bp, Homo sapiens
gtttcaacgtgttggccaggctggtctcaaagctcctgagctcaggtgatccagtagcctcagcctcccaaagtgctgggattacaggtgtgagccagcgcagccggcttacaaagagaacttttaaggccaggcactgtggttcacaccttcgggaggctaatgcaggaggatcgcgtgggcccaggagttggaggctgcagtgaagtatgattgtaccatctgcgtctccaagccgggtgggacgagagccaataatcgccaatctcaaaacatgaaaccaaaatgtggactggacttccgtgtccaactgctcctccctcaagtgtcaacatggcccctgcacacctgtcttgcttgccttgtgtccctggggcagggagacctatcgttcgagaattggaacacgtcgatttgccctcctctctcctctgcaggagcaagaagatgcgctggggtccttggaagggttcggggctctcggatggagtagtgcattccctggccggatgtggagggagccggacaccgctagaccggcgtatggactgagacgacagactgttgtacaataggccgctccagattatgtctagtgggaagcccgcttgtggctcgggaaggactctgaatcgtgagggcttggagtcccaggtgttggatggcctaggaggtataccttcctgatgcagtccgcttgagaagtctaaagtaggtgagttccactcatgatggcattctgcagatgggcctgaatgcggtgcaggacatatgttacgagggccattatcaacataacttgttatacattcagggacaaataaattagaaaagaggaaaaacaaggattgttgttagaaccatgaaataaatgaaaacaaagataggaaccataacggactgcaagagaaaaaaggaaaaaagagaagagaaaagaataaacatagacagaaatataaagaaaaggaaagaaaaaaga

SEQ ID NO: 555258 - DNA, 218 bp, Homo sapiens
gttgctagtgagccatgattacgccactgcactccagtcctgtggtgggcgagctgatgactccgtctcagaatccacatcaaagcaaaacaaaaaaccctgttcttgtgactgtgcgtggtgactcacacctgtaacccctgcactttgggaggccgaggcaggtggatcacccaaggtcaggagttcgagaccagcctggccaacatgatgaaacc

SEQ ID NO: 555259 - DNA, 404 bp, Homo sapiens
cggggaaatcgccccgagggcgccccaacccgaaaatggtaatgcaggtttggtagtctaggacctggggggctgataggtactgggagcattaagaaattaaagctccatagggacttctcggcttgctgtgacatgcccgacacatcacgggcaggcaaacttcactgggtaaaagtaccagacaagctgaaccctagcggggccattcagacggggccctgcccttgaaagtaggaaagaggtgcctgaagaccagacataaaatgtgccattgcatagaggacaagctgtcactgctggatgcagctaaataagtagcttggaggaattctgggtaatagacatcagagggaaaaggcacatgagaagaagatgcggttaaaggattccgtaagagagta

SEQ ID NO: 555260 - DNA, 360 bp, Homo sapiens
cattcacagaagaaacaaccaagcattgcaaagagacgtgcataaggcagtgagtcttgctttataacaacccactctcatgttgactgatccagccccatgacagctagaactctctcaggagacagcactaatctattccggagggttcagcccccatgacccaatcacctcccgctaggccccacctcccaacactgccatgctggcagttaaacttcaagcaagagttttggtggaaacaaaccacatccaaaccatagcacctgtcacactcacaagccctaaaaacatgaattctagtgctatgggccagagctttcatcatgtgtgtaatgaacctgcaaacacgctcaagtg

SEQ ID NO: 555261 - DNA, 629 bp, Homo sapiens
  misc_feature (35)..(35): n is a, c, g, or t
cggggaacttggcggatggccccgggcttttccanacatctccctgccttattgggcgtgcaaggctgtgtgcgaggttatccttaggttgaagggaagtccctggcatgcctttcgtgttccccccttgccacgtgtcagtgggggccttgccctcccgtttagaaaacctgccccaatatgatgacatcaagaaggtggtaaaccaggcgttggagggccccctcaagggcattttggggtacaatgagcaccaggtggtttcctttgatttcaacagagaccccccctcctccccctttgacggtgggggtggcattgccctcaacgacccctttgtcaagctcattttctggtttgaccacgaatttgggtcacgccacagggtggtgggcctcatgggccacatggccttccaggaattagaccccttggccccccgccccccgcaagagcccaagaggaaaagagagaccctccctgttggggggtccctgcccccctcagtcccccccccccctgattttcccctcctcccagtttccatgttgacccctttaaaagggggggggcctagggagccgcccctttttttgttccctcaataaagtaccctgtggtccccccga

SEQ ID NO: 555262 - DNA, 181 bp, Homo sapiens
gatcccctgcagcagacacagcactacttggtcagacccctcttcaatagcattcttccagtctcttattaaataattgcttttgagatggctggttgtggtggcgtcacacctacttccgagtaggcccacggcgtggccgacctgtttgagtgccgtgtagttcactgatcagtcctgg

SEQ ID NO: 555263 - DNA, 161 bp, Homo sapiens
tgccccaaatcatctgcctgtttttttttgatacttactgaaataaaaggttttattgcagggtttattttggtttgtttaaatctttgttgtgaaagaagcttttttgtatttattaaaatccaattcccttatgaataaacttgatcatgggaccggga

SEQ ID NO: 555264 - DNA, 322 bp, Homo sapiens
aagtattagttagacacttaataagtttaagaacacttctcacagaataaggtaaaacttccatggctatcattactatttgtacaacagccctagtgttgtcaattaaaatgtgtttgcaggccgggcacggtggctcacacccgtaatcccagcactttgcgaggctgaggcaggtggatcatttgaggccaggagttggtgacccgcctggccaacatggtgaaccctcatctctactaaaaatacaaaaattagccgggtgtggtggtgggcgcctgtaatcccaactacttgggaggctgaagaaaagagtgcttgg

SEQ ID NO: 555265 - DNA, 125 bp, Homo sapiens
  misc_feature (91)..(91): n is a, c, g, or t
gacgtagcccactgatatggtttgtcgtgtctccacccaaatttcaccttgaatgtaataatctccacatgcaaagggcagggccaggtgnagacaattgctttatgggggcagttttccccata

SEQ ID NO: 555266 - DNA, 115 bp, Homo sapiens
  misc_feature (15)..(15): n is a, c, g, or t
  misc_feature (54)..(54): n is a, c, g, or t
  misc_feature (62)..(62): n is a, c, g, or t
tataatagcaagaangtcaagaacaagaagaaggttaatgaaggcaagcagttntaaggaanaggccaaaagttggcggcaaagcccaagtgcaatttaaatgaacctatatagg

SEQ ID NO: 555267 - DNA, 566 bp, Homo sapiens
ttcggctatagggcaggattcagaaagtagagtttgaacaactgactctatgataggacacaacctataccttctctcgtctagtgtagataacacggcaaatgggcctctagagggcagtattatacgccgactacatccaccacgaagcacttccatgcacataccaggtctagcacccacctggaatggaggccaatggactacccctctgctatctagggtacggcggacctagggtgtctagtctagcacaacgtacctaccagtggcctaggacctagcccatagaagtgtggtaggacatagtataggggtagctgtttagcctagtgtagcgctagtagaactatcaagatgtatcacatagagctaggtagaaacattgacgaaccatgtgcctggtcttttgaggactcaggagagaacctggcagctacagctgcagatactatttctcaaactatacctgatcctgcgggcaagctaacaccagttccggaagaacctgcggcagtcgcagcagctccaatgggatgagagctgggagcgacagtgctcccttt

SEQ ID NO: 555268 - DNA, 241 bp, Homo sapiens
  misc_feature (159)..(159): n is a, c, g, or t
  misc_feature (181)..(181): n is a, c, g, or t
  misc_feature (193)..(193): n is a, c, g, or t
ctacaacgccaaggcgatccgcacatgccgtccggccgaacggggcgtgtaaaacccttcttgctgtcctgccacagccgcgagtagtcgccacggccatctttcatccgaatcgcggctgcagatggtcggggagcacgacgtaagcaaggacggcangcggaacacgttcgcgcgccgngcgccatgcggnaaaaagcgaatcgatttcacggaccagaagatcgccttggcgttgtag

SEQ ID NO: 555269 - DNA, 321 bp, Homo sapiens
  misc_feature (263)..(263): n is a, c, g, or t
agagacaaggtttattgtcacccaggcactggagtgcagtggcacaatcatggctcattacagcctagaactcctgtgctcaagtgattctcccacttcagcttcctaagtagccaggactacagatgtgcaccatacacccagccaatttttttactttttgtagagatgaggtctcactatgttggtctcctgggctcaaggaatcctctcatctcagcctcccaaagcgctgggattacaggcatgagccaacgcatctngccaggagttctaacattatattgcgatgatggttgcacacctctggctatttaaaac

SEQ ID NO: 555270 - DNA, 396 bp, Homo sapiens
  misc_feature (90)..(91): n is a, c, g, or t
  misc_feature (107)..(107): n is a, c, g, or t
tgctgaggtcactctacgaggatcccggtcgacggggattgcaagatggatatgaaaggaatcttttttctgtaagtcctaaaaataagnncttatttatctgtacnatttggtttaaggacaaagataggggatggaacaggcatctctcaagactgcttccaagtcacttctcctatctgaattatcacttccccaaatgatggtagagccaaggtaaaatcattgggatgctattatttctttcctattatttattcaatttctccaaatatatggatgaggctatcagagttcttaacagtaacaatatcactctcatttgattagtttacaaagtttaataataatctgcaaggccaggtgcagtggctcactcctgtaatccccggtcga

SEQ ID NO: 555271 - DNA, 181 bp, Homo sapiens
  misc_feature (167)..(167): n is a, c, g, or t
tctagagcatccccgtttagatttttaaagcaaaaaaattttaaaaagaaaacatttggccaggtgcggtggctcacgcctgtaatccctgcactttgggaggctgggactacaggcgcccgccaccacgcccagctaatttttttggtagttttaagtagagtcgngggtttcaccggtg

SEQ ID NO: 555272 - DNA, 414 bp, Homo sapiens
tgagactaacagcaacatacatagtattatactatcagaggactaaagccaagatgtaagttacaaggtaacagactggtggcatcagaatatatccttaacacatgtgtcctgctccatcctccctacaccaggctacttacctgcccttccccagccctgaagaaagcccaggtaaacccagagggttactgaaacttacaccctttccaaaagccttagttaaggctgatgagattaataacttagagactgagtcatcccagtaacattaagaatttaatctacaaacaccaagttagcagggaaagtgacccctgccagtcccttccaatatattcttttttttcttttaaagaaaatacctataagcacaatatattccatttagatgatggggggtcagtatagata

SEQ ID NO: 555273 - DNA, 201 bp, Homo sapiens
tggaagaggtacttgctttgaagtgcacttcggcacattagtatagccacttgagctatgtttcttttggtttctgcatgaaatatgcatgtctatcctttactttttacacacacacacacacacacacacatatttgagcagagttttcatacataggatatacatatatttttatccaatctgacaatctgtgctgat

SEQ ID NO: 555274 - DNA, 706 bp, Homo sapiens
ccgatgacgcagacctgattttcggcgcgatctgcgataatcagcttatcaccgccagcaagctggaccgcttgcacaaggacatgatgatcaagttactgtcggctatctagatcttgtccgtgtctatcaaggagatcgcgagcattggtatctttgtagtaccatctgtaaagcttagccgagtgatgatcgtgcgagagcatactcagacccgtgactatgagtgaaccaggaccatagtattagttgatatcggctacaacaacgttcacgtgactctagtacacattggataatcctatgtgtacgcctaattctgtctacgacatcatcttgggcacgggctatatagtcatgctcgcaactgtctcttgaggtccacagattctacgatcccgccgtgaggccatcgacgcatgccgggcctctccagtttttacgctgttacgatcagccattcatccatggcgcagaactggttaccacaatatggccaatatgcttattaaacagtgtcccacttgaaaccgtctttatccttcaattcgacctaccgttacatttgcatattatgctcgcccacctgctacattccccaaacctatctaacacaccctagatctcatccatccgatgcaccaactttacctttatcacctctcctcctctaggttctactcatcgcttcctccattggacctcc

SEQ ID NO: 555275 - DNA, 140 bp, Homo sapiens
ggatgatcaagttgcacctgttccattgaatgtcgttgaaacttcaagtagtgttagggaaagaaaaaggagggaaaggaaccaaagccttttctttaggagcaggtcatcaagaaggtacgatcaaagtttccgcaaaa

SEQ ID NO: 555276 - DNA, 283 bp, Homo sapiens
  misc_feature (174)..(174): n is a, c, g, or t
agagaacggaaatctactctggcaaggaaatcctcacttaagcttcagtggagccacaagcacttaaaacccatgaaccttcagctggatcgtccttagccagtccaatctctacgaggaactgggcatatggtcctggcggtgggtcacccgtgtagctagaattacttctcncatatcccgggatggctcaattacaggtaccattggcagggcaacactttttctttaaacggcctctcactaagtttcgtttttatctataatctatcagcagccgggg

SEQ ID NO: 555277 - DNA, 327 bp, Homo sapiens
tgtaacctcgggccggtagagcggctcagctgcagttctcattaatcttcccttactcttggttttcacaccacagagtttgtgccacataattgaacatttactcacatatacttccttgtacggatctgcttctttactcttccagtagatctcaaactatgcagaatttgcctgactgtgcaaaagcacttaagtggtggtcagtgaatgattgattcattagtttgttcctttttctcattactcatttttttctttaactgagggagaaaagtgcctggtgacctacatttccctttttttcctcgactccatcatttcact

SEQ ID NO: 555278 - DNA, 1091 bp, Homo sapiens
attctctcctctaggcaattttttttatttttttcctgtgttggcccaggtatgacctccaacgtccggtggcccaagcaatcctgcctcagccgtgccaagtagctaggactacaggcgtatcaccactggcgcccgcaaagtttcatctgggtcggtcgttagattacaaagttggtgtgactcacaaatcactaacctctgttatattggacaagctctaatttcctaatatcttggtctctagtaaagtcacatctgtgtaacccatggagctcaccttttatatattaccctctagaattaaggggcctatgtggtttttttacagtcttatagctggtggtcctggtaaaagattggtccaataaacgagcttaatgaatgatacatcagtcagatttaaggaaggcagtcaataatggatatttaaactgttgggaagaggccttaaggatcaaatctacaccctttcggcttctgaagtatgaaaatctagtcttttaaggacgggaccacaaggaaaataatctctaaactaatggactaaattccagtgcgagtctgatctgacgaacaattagatttaaggtcaaatcatttacagatacacggggcatgcaaattaagtcctccatttacagattaaggggcattgcacatgaagtctccaggagacaatcagatgttgtgggaatgtctagattatataaggtgacacggttgcacttttactaaacataacacctaaacattccaatttgcccactggggacatctcctatagaacatccaggtgaaacttggtagagaccgctaaaccctacaaataccgtcatacgataagttgcccaataggaccggggacacaacacacacctttaatcagattacaggcccattcctccagtgttgaggccttctaccaatgctttccatccgaggcattaagagaacccgtgtaaacaaaccacggtaccccaatgtgaccactttaaaaaagtgtcactccgaaggaagggggggataagcagcgtgtataaccacaaaaaacttcctagtggggattcccacaaaaggtaacatcttga

SEQ ID NO: 555279 - DNA, 333 bp, Homo sapiens
atgcgggatgcagagactttgtagatttcctggcattacgatgatcaagggccgggtgtggtggctcacacctatatatcccagcaccttgggaggctgaggggggtggatcagaaggtcaggagattgagaccatcctggccaacacggtgaaactccgtctccaccaaaaatacaaaaaaattagccgggcatggtggcatgtgcctgtagtcccagccacttgggaagccgaggcaggataattgcttgaacctgggtggtggaggttgcagtgagccgaggtcgcaccactgcactccaggctgggtgacagaacgagactccgtctcg

SEQ ID NO: 555280 - DNA, 292 bp, Homo sapiens
agcttttgactttttttttttgccctaaaaggtatttagagccccttttagattttttattttgactaatcatttaaaaggtaaactaatcccccatttaaataaaaaactggtttatagtgccccaaaattccaaatggccctaagtaataaattatcagctgtgtttatatgtataagcaggcccagattttggtaaatatgtacataaaaaattggtgcccttatttttttcatttttaactcattgggtagtttaaacgttggggaaaaaataaaatccaataatcca

SEQ ID NO: 555281 - DNA, 535 bp, Homo sapiens
  misc_feature (430)..(430): n is a, c, g, or t
  misc_feature (472)..(472): n is a, c, g, or t
acttggtctgataaacattcaagaggagtccactcttcatcatgtgtggagatttcagggtggtgctaagaaaatgaagaagtcttatgccatggccaaaaagaatatgcattacagaaagaagattaagctggctgtcctgaaaaactccaaggtgcatgacaatggcaaaatgggtggccttcatgggaagtgccttttagatgaatgtggtgcaggaggttttatggccagccacttggacaggcattatggtggcaaatgtggtcttatggcttcaacaaaccagacaagtaatcgtgtatgagttaataagagacatgaactaagaaaataaaagtcataagtggaaatagagatggttcagccagttgacataaggtagagcacggacaaagagaagctgctcacctttagtggtggttatgtncggagctagcagaaaggcctccggatttcctccaggactcanggaaggcaggggaaggaggactttgtggtcttagtcccttctcacctctttggcataactccc

SEQ ID NO: 555282 - DNA, 479 bp, Homo sapiens
gctgttaacattttggcatattttccccatatttctctgtccacttaacatggttataatgatattgtacatacagttttacgtcttatgttgtacatgaaattctacatctccatttttttaaaaacttaacatcataacataaccatgttcccatgtgttttaaaactctttaaaccttattttatatgaccaatatgatattccactcaaatataccctacttgggaggctgagttgggaggatatcttgagcccagaagacgaaggttgcagtgagccaggatcgtgccactgcattccagcctaggcaataacagaccttgtctcaaggaaaaaaaaaaaaggaagaaagaaatggaagttcagcaatcctactgcacggttttcttcatctcttttgaaaaacatttctcaaccgcattggtattaaaccaattaaactacgttatttattaaaagccaaaagtgacaaagta

SEQ ID NO: 555283 - DNA, 128 bp, Homo sapiens
  misc_feature (7)..(7): n is a, c, g, or t
gacgtantgccctgtttttactggccgtggtacttactcaaacagagggaactacaatcagaggtggaatgcccaacagggtggaactacaaccagaacttcagaggacgaggaaacaatcctggcta

SEQ ID NO: 555284 - DNA, 331 bp, Homo sapiens
  misc_feature (7)..(7): n is a, c, g, or t
  misc_feature (30)..(30): n is a, c, g, or t
  misc_feature (48)..(48): n is a, c, g, or t
  misc_feature (90)..(90): n is a, c, g, or t
  misc_feature (189)..(189): n is a, c, g, or t
atgaccnaaaagcagccatcccatagcttnagggtgagccttcacagnaccagatggataaagcagcagcactagtggaggtctgcaccntcctgcttttttacctatctagcgtctaaaatttttcaacactgattttaagcaaggtctcgctctgttgcccaggctggagtacagttgctcactgcnaccggcgcctcccaggctcaagccatcctcccatctcagcctcccaagtagctggcactatgaggtgcgccaccacacccagctaatttttgtagtttttgtagagacggggtctcgcgcatgttgcccaggctgatggtct

SEQ ID NO: 555285 - DNA, 127 bp, Homo sapiens
cggcaggttcgtcggacctgacgtctgtgaccgccgcggacacggcgtgtctactgcgcgagagattcttactactatgatactgatgcttataagaggactttgactactggggccaggcaatcct

SEQ ID NO: 555286 - DNA, 278 bp, Homo sapiens
ggcctttgcacctccaccaccagggaagctgatgccaaatcattctacgtatgtatatacgaaactccttaccccccccggggaatagatatagtacccaaaagggaaagatgaaaaattataaccaagaacaataaggaaaactggatatattttaaagttgaattttttctagggtattcgggaagtggcacgaatggaatatcttagtggactgataacaacgttagagtgtaaagagtcgggtgcgcccgtaaaatgtaatgttctctataaaa

SEQ ID NO: 555287 - DNA, 706 bp, Homo sapiens
gcattcaggcggcgccaacgtgtgttgggaacaacaaagtctgacccgccgcaaggaggctgctcagttgcaccttcccaaggtcatcatccctgaaccacccggggcaaaattagcgccgtgcatatctaccccggttcattagaattgccaacacagcccacatcgccgtggcaagtttgcggtaactgaaggagtaagattgaccggcgctctggcaagaagctgtaggacaaccccaagtacctgaagtctggagacgcggccatcgtaggagatggtgccagggaaagcccatgtgctctggagagcattctcccagtacccgcctctctggccgaattcgccgtgcgcgacatgaggcagacggtggccgtaggcgtcatcaagaacgtggagaagaaagagcggcaggacgccggcaagcgtcaccaagctcggcgcagaaggcgcacgaagcgcgggcaagtcgaagacgcgggcgcccgcggcgcgaccctccccggcggcgccgcgctccgaaccccggccacggcccccgccccgccccgcacccgcagcgccgctcacggcgccccgaacccccgcaggagatgtctgacctcagcttgcagaggccctcggtagcaactgatgctcgccataaggtccagtgtaagttcttcaagaggaaaggcgcacaaaagccccaggcttccgcgcccag

SEQ ID NO: 555288 - DNA, 136 bp, Homo sapiens
atcgctaagctgatagcctccactagcacgttgaagtaactctgcacagacataggcttgctcagcaggcactggggaccagtgaggggaagagcgtgaatggggcatagctcaccacctccgaggaagtgggctc

SEQ ID NO: 555289 - DNA, 1773 bp, Homo sapiens
cgtgttcgttgatgctctgagatgcttgcgtttgtgcagagtgccatcgatcgtctgattctgtgatatgtctgcaccctctgtgttgtgtgttatattacactctagtgtcttctgtgtggtgaggaacagacaaatcaattgtggggcttcacttcaaccagcgataggattgcacttgtaggagttcctctgcctttcgtttcctttcttcgcttgcgggataatgtctctgtttgtttctatttagtttggtgcgaccagcagacaccctcccctctgttgtgtggctggatcgactatgtgcgtctatctttccttgaggggagccatctctccttgtggtggaatataccactcacgccccccgcgtcttgtggttgggtgagatatgtcgtcgttcgcctgcttcataatatacttaccctcgcggggggaaaattatatgttggtgcgcccctgtttttgggtggtgttctgccaccacaccacgaagtgtgggtggtcctctcttctcctgctcttggatgtgatttttctctacgggggaatccacaaaaggtttggctggtgggggcgcccacagaataagagaggggtgcccccacgaacgtcgttgttaggccacaacactagtgacgatgtgggtgcgacaacccagatagggcccgcactaccaccaaggagtggaggaggagttctccacacctgtgagggtgccgccccgacacgcccacgcagggcaagaacaacagcataggggtggttctgacggagggggccccgcccgcggagtgaagtgtcacctccctctgcttgttgtttctccagcagagccttttttttaagggtgattctccccccccgacttttatgatgatatcttcctctccagagggcggcgcaccaaccaagatgtgtgggaaatactccttggtgagagtgtggatagttcgcccacagctttgtgtcccagaagaaactctggggaggacacacaaaaagagtggggggacacccccaatccgtggtagcgctcacacgcgggtctgtggaacacaatggtgttcacacacaaggtttgtctcccccctgttttttctcgcttctgggggctgtgtgtcaaactcccaccacacagaggttttttgtgaccaacaacatggcgacagacgaagtgtgtctcacaccccccctgagaagtgtctgttagataattcacacacagagagggaaatcttttctgcaatttgtccgcgtgttcctctggagagggtggtgcccgcacacagtgtttgtgccacagtgtgtgtgtctgtgtattccacagagtgtgtggcgtatacccacacactctgtgtgcgcacatcacaggaacgctccactctgttaattcattcacaaccgggtgagcacacaacgaggtttccttggcctctgttctctttggagaacccgggaggtaaaccctcttcccaacttttgtgtagaaaaggttccaaggcctctttttggggtaagaaccacactcttgcctcttgtggctgctgcccctcgtggctgctgccacaccaccaagctgcttcctgctgcttgctgcaagccccacgctaaaggttgaaacccaaaggagaagagattcgcgagaggaagttcggaacgaaggaataatgggaatttggtttttttgactaatacaccccaaagccacccaattagacccgttttatttgcccaaacacagggaataaaggcgttactttcttttaaaaa

SEQ ID NO: 555290 - DNA, 133 bp, Homo sapiens
  misc_feature (55)..(55): n is a, c, g, or t
gctcctgacaccctcccaagcgcaccgctcttcccatctccttctggggtctccncctgccccactaatggccaagactcatcggatctccttctgcagacaaaggagaaagtcctgtggagcctgcagagcc

SEQ ID NO: 555291 - DNA, 215 bp, Homo sapiens
tgatggctagattctagagcgatccccctttgatcaaaatctctgagtctttgctacatgacacgatgactctctgcatcataacatttcatgctctgcaggagaaccatcaaatctatgatccagagagcctatctgcacgatgcataatcccggaaccccattattgggtaccgatcctctaattctctaactctgtagtccttgccatgttt

SEQ ID NO: 555292 - DNA, 106 bp, Homo sapiens
gcggccgcctactactactactgctcgaattcaagcttctaacgatgtacggggacatgtactggagtatttatttcatctattaaaatgttatgtttcccaaaaa

SEQ ID NO: 555293 - DNA, 947 bp, Homo sapiens
ggccccgccacgttgacacgatacaatgaactgtcacgagttatcatcttgagaagtgcaaagaagccccttgatcctgcagtgcccctctaccaccactactgacaaagaacatggtgctatctggcatgggaccaaatgttcagtttgctatgcgtttgtatgtgtcccctcaaattcaaggtgttgccagttgtgacagcatcaagaggtggggtctttaagagatcactagcgccatgagccgatctcttaggcactgggatgagggcgcccataattaaaggaggtcacaggggagcatccgtggtagctagcctcctggttatcgtgaagcaacacccagtaacgaagagccctctcagtctacacaatgtcgccatgctccttgatgctttgaggatttacaccaatgcctccaaagaagtggttgaagaaacataccattttcctggtacctttacaaaagttaccccaggtctcccttgtacttccttgtggatacgccagcgcatcaataattgaatggatacccattaccttgaaacaacctagaggcatttctttccacaagggaggtcaagtcgcaaggggctttattctggtctccagatatgtcgtgctaaccaacgggacactgagaacgggtggctccagggacataggatgggacaagttcatttgcttagaccttctcaacaatgccgctaatggatcaggattgtctttgcatcatccttgtcccttcgggaggcgaaccacatgctatataggccctaataaatgttacaaccactttagtattggctaaaaatccggcgctggtcagacagcactcattcacaaattccagggccaagctatactcaacctcctcacttaatgccacccccaataacggcagcctcccctgaattgcaacccgaccatctaaccacagccgaaag

SEQ ID NO: 555294 - DNA, 160 bp, Homo sapiens
acagatttctcagcttacgagttctctctgatgcaaggaaagggattatatgacaaggaggagaccaggcatttaagaggtggacagtggcgtttgggctccccatggacatcttttatatttttttggggaggggaggttccagagaaagggggtaaaa

SEQ ID NO: 555295 - DNA, 556 bp, Homo sapiens
cagctaggctggtaccggccggaggttcgttgcatgtgatccgtctgccttggcctctcaaagtgctgggattataggtgtgagccaccgcgcccggccgctaattttgtatttttagtagagacagggtttcaccatgttggccaggctggtcttgaactcctgacctcacgtgattagcccgcctcgtgctcccaaagatgctgggacttacacggctagtgcaccaccaaacttggctacatttctgctttctcttctctttttgtccgtatcttctccagagacaacacgctcctcgcctctgttgcccaaggctggatgtgccacgtgcgcatgacccttcgcccacgtgcaacccattcactcttccgtgcgcgtctcacagtgcatttcctccccgtggttagcgctccccgagaggggctgggcatttcacggggcctattgcccacccaacgaccccagcccttacctccctcgcgccgctctctccacgtaacacgcacccgcagttttcacccatgcttgcgcccgcacctggtctcgaactccg

SEQ ID NO: 555296 - DNA, 449 bp, Homo sapiens
taacacagaattatttatgggtttttttaaaaaaaggacggaagcattttccactgccaatgaaaaatactgaaaataagctctaactgtttgggaagggagggccaccatatggaaattgttttacaaaagtcaattgacaaaataaagcacccaggaaataaagggcaggttcagggcgtaatcctgcccgttgttttggggggcccgaccctgcattattgaaggaaacaggggcctggggttaaattgtaaaatgcaaaggggggggctcacaaacacagtcgggggggagggcccaaaggcaaaacctaggccggggaccgggcccatgcacccatgtcccttaacaccgtttcccagttttggttccttcctggggggtgggttaaaactcccacctgttttccctggctggtaaaaaaggggggtcccaggcctgcaccctt

SEQ ID NO: 555297 - DNA, 108 bp, Homo sapiens
gtcatcaaaccctgtcataaaaccctgtcatcgaaaccctatacaaggaggccactacagccaatttacgcgggtgtttggggggccttcttatattgcttcgttgga

SEQ ID NO: 555298 - DNA, 448 bp, Homo sapiens
caaaatgggaaacccattcgggccgggggtccccctgtttccccccccgtcgaaggagctggccctgaacaagttggtgacctttaggtgcctggcacgcggtttcagccccaaggacgtggtggttcgctggttgcaggggtcacaggagttgccccccgaaaagtaccttatttgggcattccggcaggagcccagccagggcccccccccttttgttgtgaccagcattttgggggtggcaaccaaggattggaaaaagggggcccccttttcttgcatggtgggccccggggccctgccgttggcctttacccaaaagaccattgcccgcttggggggtaaacccacccatgtcaatgtttttgttttcatggggggggtggggggcccctgtttttgagccgcccgcctgtccccccccctgaataaactccttgttccccca

SEQ ID NO: 555299 - DNA, 342 bp, Homo sapiens
  misc_feature (56)..(56): n is a, c, g, or t
  misc_feature (253)..(253): n is a, c, g, or t
actacgatctgacggacggcatcagactggtcacgtggcttgtagcaggcagaggnaaccctttgctttccaaagaactgatataagctccaacgagtcacggcatgtgggaatgtttccatggacactggatcttaacagaattgctatagtgtttacaaactacacaccagagaagccaagaagctgcagctaagcccttaaattgcttttagagggctgaaggaaccaaacctagtttaatccgtgtttntggatattgctcccatgcagaaactttattggaagactccccagactagtgctatttttttagaccgcttccatgaatggtccgtgaag

SEQ ID NO: 555300 - DNA, 347 bp, Homo sapiens
tctctgtgtataccttcatgtgtctagcttccacctaccgaaagagtttaggttggcagacaggtgggtgcttatttatctgtgaaactgaagttttaaacactggcagaaaatgtttgattgccatttccacacatggaaatagttacattgatgcctaatttgccattttctgcaaaaagctgtgccatgctggtgtcaaagactagacagtcgctattcataatgtttatcgcaattccttcatgaatagatcgaggagtcgcttccccaggtcactcgtcgcctataaccatttagctcaagtcggtaagccaaatattcagcttgcttgcgtgttcctatca

SEQ ID NO: 555301 - DNA, 688 bp, Homo sapiens
  misc_feature (1)..(1): n is a, c, g, or t
naaaaaaaacttgaagcctttttgttaataatttgggctgtgaatgttacttggcccaattgttccgaagggtattgtgtttccccaaaaacaagagggttattcattcgggggccccggacacgccagggctatgtaattttcaaacgacgggtctgtaaagaaatcttttatgaaaatattggggccctgaaaaatctccctctgacctcccaggttagggttcacacacctgccttaacagtttttggttttggttcctttgccttatatgcaaagggcccatgtccaccggaaaatttacaaaagcaaaatgattacaaagtgctgttacctttcttgtgctggcccagccaagtacaagtgtacttgacttggcccttaaacaattttattacagattggacatttgctgttcagatgttttttaccagaggaattatctcgggatcctgtgacctacaggttgttttatcatctatttttctctatttaacattcctcagatagataggcaaataggacattccttatgtgtcacagaagtagcgtggtagtggcagtctacagttcatatgatccgttgtatctatgagataaagatcgaccagtcatgtggccaaaagtattacatttgatttgatgttcacttggagtttactttttgtacatccaagataaaataaat

SEQ ID NO: 555302 - DNA, 620 bp, Homo sapiens
agacagagtcttgctctgtcgccaggctggagtgcagtggtgcgatctcggctcactgcaacctccgcctcctggattcaagcaattctccgtgcttgaatcagcctcccaagtagctgggattacaagtgcctgccaccacgcccagctaatttgtgtatttttagtagagacagggtttcaccatgtgggcacaggatggtctggatctccgtgaccttgtgatccaccaccaccttggcctcccaaagtgctgggattacagatgtgagccactacacctggccattttttaattttatattgtattatagtacttctttagttatatatttatttacttttgacgaacggagtctcaacactgttgcccaggactggagatgcaactggcgcaaatcttggttcactgcaacacatccacactcccaggttcacgtgattctcccaccatcaggcctcccaagtagctgggatagcaggcgcacgaccaccacacccggctaattttcaggtattcactgtaatagagacggggtttacactatgttggccagactcgtcttgaactcctgaccttgtgatccgaccagctcagcctcccaaagtgctgggattac

SEQ ID NO: 555303 - DNA, 175 bp, Homo sapiens
aaagagagtggatgaaagcacatctactatggttagatctacaccccacagattagtcttcacaggacaatccaccaccaggaatggagtccagactcataaagtaagctatgggcaactatggaagactaactgctcattcactggactgaagcggtgttttcctttctttctt

SEQ ID NO: 555304 - DNA, 365 bp, Homo sapiens
acttgtaagcccccatgatccctctgaattgttttactttccgggaacggcttttgcttttaaattgaagaagttttaaacagggctttcatttggtcacccctgcaatcccttggggtctagtttggaatttgccaactggaacaaaaaaacccttgaatccggggcatgccttggttttggggctgctgctgcttcccaagatccccagcagggatttaaaaaggaacccggggtgcccaccagatccccgaaattggtgggcttgccctcctggcaaattgctgggtctttccccttgctgttcagggcccctaaatgctgaaatgtggatgcatccccaaataaaagccattccttgggta

SEQ ID NO: 555305 - DNA, 258 bp, Homo sapiens
ttaggatcagcggataaaggggtacaggcatcgtacgtcggaggttaagagattcctggcagatctcgataaccgacctcatcagcaggaactaggcggccgacatgagtacgggaaagctctccaagcgcaccacgatgcgggaagtgtaggcgaagtccaaaatgtccccaaataccttgcgagctgatagtgtgcatctccagctcccggctgcccccgggcccgccgcctggtgcctgccgtcgcgcccctcat

SEQ ID NO: 555306 - DNA, 813 bp, Homo sapiens
gggtcactacacggagggggcgtgggcgggtgtgattcgtgtcctggatgtggtgcggaaggagtgtgaaagactgcgactggctgcacggcttccaggctgaaccactcgctggggggcggctacgggctcactgtgcatgggtcacgttgctcatcagcaaggtgcgtgaggagtataccctgatcggcatcatgaacagcttcagctgttgtgccctcaccacgaagggtgtcagacgactggttgtgtggagccactactagactgcacacgcatgtcctatctcacgctagctgggtggagaacacgggatgaggacgcatactgggatccgagcatacagaggcggctcgtacgtactagtcttgcttccgaaggcctcaaagtctggccgacgcccacctacggggacctcgaagcacctggtatcggcaccatgagcgggagtcaacgagctccttgcgcgttcccggggtcagctcaacgctgacctgcagcaaagctagggcggtcaacagtggtgcccttcccggcgcctgcacttcttcatgccccggcttccgcccccctcacaggccggggcagccagcgagtaccggggccctgaccgtgcccgagctcacccagcagatgttcgatgccaagaacatgatggcgactgcgaccgcgtccagggacgtagctgacggtggcaccggtgttccggggccgatgtccatgaaggaggtggacgagcagatgctggcatccatgagcaagaacagcagtatttcagtggagtggatcccaacaggtgaaggtggcggtgtc

SEQ ID NO: 555307 - DNA, 167 bp, Homo sapiens
ggtgactctagtaggatcccagcaacaatcttcaggggtatggttctgttgttatgatcagaatttaacagctggtgatttgaagtctcctaaaataagaactaaaagtgaaaaattaaatgcacaattaaaacaaaatatctagtttgagttattgccctagcatg

SEQ ID NO: 555308 - DNA, 1016 bp, Homo sapiens
  misc_feature (284)..(284): n is a, c, g, or t
ccatctcaaaaaaaaaaaaaattgaatctatctcaatagagaacaggtgaactagccctcctaaccggaccatgcacaagacaagaaatttctagcctttttttcccctttccaagggtgcaaggtgaggacataagccacacgtggtattctgcctccaaagtgattacacactttggccccgtgctcattctatctgtgaggaggttacgggttcttttccacttacgtgttattgccacatgtgtttctagttaaaaggattttttcaaaggggtgtccanacacctttattgaattctggctcatatcagatttaaatatcgtgaagaatctacagggtgttttatacattttaattttaaatgtgccattcttagaaagggatctgggtcacaaagaaagccttttacattatgccccaccttgggtctcagaaagctagagttcatttatcaaaacttaatttccatttcatatagctcaaaatcttaaaatctagggcatggccaactaaattacttggattctggtttaccttctctgatgacaattccatcaagccttaaataggaaaatgtcgaatctagggtaatttatcactttggtgtgcatcttatctgagtccagccatctggtactgctgtgcattttggaacaccgggggcttaaacaattgggttgaattactaagtgaaaacactaataccagaagcacaaatggtccaggagtgcggttccaggcactactaaccgtatgactggtttttaacctcatttgggaccataactgtgacttggtgagccttcttcccgttccatttcaagaacgtgagaaacgtgcctcaagtggtgcacaaaacgggccaaggggactaagcggacaaccacggacaacatgcacagggcatacgcagacacggaggggcgcgacacaacacaccttccggcgcccgtccttcatcgaggcgaagcatacagacaccaccaatgggcagtgcgcacccaacaggctc

SEQ ID NO: 555309 - DNA, 1342 bp, Homo sapiens
gtcgggtcacctgccttgacctacccactacaatacctcttgggactgtggctcgatttgaggtgtgggcccatcgctggatggatctgtacagaacacggctttgggtcttggccctgctcaacgactgcaagtatggcgcgtcagtgcgaggcagcatcctcagcctctcgctcttgcgggcgcctaaagccccggacgctactgctgacacgttggcgccactgagttcacctagtgcagcgtgagtgccgctatcaaggagctctttccacggatgctgtgtcgttatccaatgtctgccttacaggcctatatagcttccccctgtttggcctctgctcagcccccagtcccatacgtgcgtccgccaaccttcctggagttgcgtttttccgatgtcttcaccctggggttcgtatttggagaccgtctaagcagtgcggtagaagtcagctccaccagacgtccagaatcagctggatccatgagggcgtgtatagatgtgcccgagcgtgttagaccaacagtgggactagctcggacatagacacatatgatacagctggccggtctcagggaggccaatcctctgacgatctcttgggaagcgaccagacccctggctggccagctttgacccctttcggggacaaaccagccatgaaagcttccacctatttctacccctttcgcaagtggcttggtccactgttgcctcgtgcttccaaaccttccgacacactggaagtcccttggagagctgagaggtaaaagtacgtaagaaagggctctaggagggactcccctaaaatttactggagttcccccaaggcctaccagcaagggggatcaagatactataaccattgatgcgagattaaatcccgtgggaaaccgggacaaacaaaaagagcgacacagcagaagaaaacagagcacacagcagagaacaagcaacagacaagaggagagagtcagcacaagacaagtcggagacgcacgaacatgacaagacaacaacgaagaaagatgagacagaagaggagacgcaagcaggaggagcaggaataaataacaggggggggggcatagatagcaaaaaggaatgaggatagggaaggaagataataaggaagaattaagaagactagcatgtatgtgaagaagagagaggagacattacgtaatataagaagggaaaatatatgtggtaaaagaggaacgagagtcggggtaaaaagtggattatatctatagaaagaaaatgcttaaaaaacagacacagaaaaagagagagacagggaagaagtaagagtatgattagttgacgcccccgtag

SEQ ID NO: 555310 - DNA, 316 bp, Homo sapiens
ctggagcagctcctcgtgtgggtgtgctcccagctgaagtgagaataagtacctgattgtggtgaccgatgtggcaccccctgtgatgtggctacaatggaaccctgtgggggtgctggaggatgctgtgaactgatggccaagcgggtggtgctgtcaaagtcttctcgtgtggccatcacacccgaccaactggagccgcgtctgagcatcatctgccacggaccacacgtaccggcgcaacttcacggctggctgactggggccagagccgcgacgcagaggaggccatcagccaggccattcaacgcctccg

SEQ ID NO: 555311 - DNA, 332 bp, Homo sapiens
acctgggctggcagttacgtgcggaagtgaggtcaggtcctttaccagcacttatagaaatgagaaacgatcgctctcataccatctcttaatcactgtccccctcctaagcggtaatgggctgatgacttggtcttgagaattgtccttgctacacccaccccttctctctcatgttacttcaattcaatgtacttgccttgacgtctcggaccttttcgggccgtatgtgatcgtgtttttgtaccacatttcgaggggaaaatgttggattgatggtttaagggcaagagaggaggggctgagtgggttcaccccgaacggttatcaca

SEQ ID NO: 555312 - DNA, 207 bp, Homo sapiens
gccccaaggctggggaggggggcccttttcaggggtggcctggggaccgggggccccccttggggttaggccttggcccccggccccctgggggggttttttcctggggggccccccttggccctggcccccggttccaaaccatttcattggttttttttttggggccaaattaaacccccggtaggtttggccatggcctttgga

SEQ ID NO: 555313 - DNA, 314 bp, Homo sapiens
ggcggatggcgaggagccggagaagaaaagaaggagaatagaggagctgctggctgagaaaatcgctgttgatgggtggggtgtttgggacactttgagactttggaaggtcgcttggaaccatgtaaagaagttcctcgcgcgatcttggaccccttcacaaaacccttaattttgaacccaggcacttaatctcttccagttctttttagagacatgtaaagttctagtcatttgagctcgcggcttaggatgtgagctcctcaaaaatcttggcctttcttgttttagacagattcatgttatagatatgg

SEQ ID NO: 555314 - DNA, 123 bp, Homo sapiens
acgccagtgattaagctaggggacgccgatccaactttgacaggttaactacgctgaatgccaacaactaaaggaagacagacaggtggaacgcctgaatgaggatgtcctcattggccaatg

SEQ ID NO: 555315 - DNA, 305 bp, Homo sapiens
gcacgagatttttacaagtgaacatcaaaaagataaacaacttagttaaaattatttatatattgtggatactagacccttatcagatatataatttacaaatattttctcctgttctgtgtttggtcttttcactttcttgttagtgtcttttgatatacaaaagtttaaaatttttatgaagtccaatttatttttcttttgttgcttgtgcttttggtatcatgtctaagatactgacaaatctaatgtcatgaagattttcttctatgttttcttctcacagtattatagttttaatgctt

SEQ ID NO: 555316 - DNA, 1069 bp, Homo sapiens
gacagtgctgacactacaaggctcggagctccgggcactcagacatcatgagttggtccttgcgcaccctggaatttaattctctagttctatgctcttttatttcatctctttcaacatgtgtagcatatgttgctaccagagacgactgctgcatcttagatgacaagattcggtagtgcattgtccaactacctgtggcattgcagatttcctgtctacttatcagaccagagtagacaaggagtctacagatctcttggaagacagtcttacatcaagttgaaacacgagaagcatcagaagtctcacagctgatataggcagtccagagctcactgataatcctggattgaatccatctagaaccgggcatatgctagacgctgctacttctgagagatcctaggaaccagtgttagactgaaagttatgcaaagttatgaacggccagtcgaattttacacacagtgagctcaagctattcggaataattatgccatgggaaactactagtaagtttcaaacagtacgaatccatatgagaacttggatatggacccgtgacagcggacagacaatggtaggacccacagcatctggcacgcaagcagatgcgccaggacacccctttgcccgacaggaccacagggatggcggacatccatttgacttattcgaccatgggggacaaaggaattgagaccaagagacacttgggcccaaatgaaacgggggaaggcttagaaccgaccgccagaccgggagccgcgaacagactacgtaaaaagcaaaccctccctgaaagagcgcacaaagaccaggcaactacccctgaaagcacactaacaccggacacccaccagccacgccacagcgcgccccacgggacaacatcgcagacttggaaccggcaggcatcccaagcaacacaagcaccccgtcacaacacagccacaggcgtcaccaaaaccacccacaggcaaccaaccccgggcatcgccgccgactaccgcggacagcgaaccccgggcacccccaccggaccccccctcagacggccacagag

SEQ ID NO: 555317 - DNA, 196 bp, Homo sapiens
  misc_feature (55)..(55): n is a, c, g, or t
  misc_feature (192)..(192): n is a, c, g, or t
gctcttcgaccccatcatcgaggaccggcacgcggcttacaagccagcgattganacaagaccgacctcaaccccgacaacctgcagggcggcgacgactgggaccccaactacgtgctgagctcgcggcgtgccaccgggccgcagcatccgtggcttctgcctccccccgcactgcagccgcggggagcnctga

SEQ ID NO: 555318 - DNA, 132 bp, Homo sapiens
tcttaatgtgtgtctgactctcctctgtacctcttctcccatttgagagcctctgctcttaaattctctgctgtactacctccctggtaatgtccctcagctagaattcagtatgtaaaggtagggatagga

SEQ ID NO: 555319 - DNA, 134 bp, Homo sapiens
  misc_feature (65)..(65): n is a, c, g, or t
gacctaaatccccatgagcgatgaaatgtgcagacgtcatgctctgatatgacaaaggatatcancatgagactgcctcataactttttcttggtagatgaactagtctctaaaaacacagcaacacaacacac

SEQ ID NO: 555320 - DNA, 143 bp, Homo sapiens
atccccttataccccacgatcacggcaggcagagacacagaagcaggcacaatttatctgtggtctacatcagagtcatcataactctcatcactatcttagtgatcgtggggttgtaattacaaccccacaatcacatagta

SEQ ID NO: 555321 - DNA, 160 bp, Homo sapiens
ggaaattcggcctttatggccggaatggtggtaataatttggaattaggattaagggttaaccattcttaattggtttggagggctggattttaattggtaaaaatggttaattttcattccttctttaatttaaaattaaggttaatttttaaaaggtc

SEQ ID NO: 555322 - DNA, 138 bp, Homo sapiens
taggaggataaagccaggcgagtagaggaactagtagccatcgctagaacgctgggaggagaacgccacctactagctaggagccagggagaagcatccaccagccacacttagaggcataatccgtgaagcggaaaa

SEQ ID NO: 555323 - DNA, 212 bp, Homo sapiens
ctctcacacatcattctcatttcttcaacagatatttaggtaccaagcacacagtgatgcctatgttatatctcaaactgaatgactcacaggcacccaaactcaacatgtgcaagactagaaatatatatttacataactctactattactctttattctatgttacccaatcagaaaccgtgtcactgacctgactcacctacttcatat

SEQ ID NO: 555324 - DNA, 1336 bp, Homo sapiens
  misc_feature (1250)..(1250): n is a, c, g, or t
agcggctaagctcctcagaatgtgcttcagcccaggagtcggcaggttgcgatgatgacgtccagtatgcgccaccagcttggcgacattgcgacgatgaggtcgttgacaagcacgcgcaacgtatctcacaatactcacataggacaagacagagacagacgatgaacacacagatggattcaaaccagtctcgaggtctctgttaacgactccagctaggaacgtaaaggactcccggtaaatgccaaagggagctgcctgggttcgctcatctgcgccctcccgtggtacagcgcgtacctcatacctggtcccaatcgattgctgcttgacaccattagtgtcccgagtatacagcagcggacaggttgcagctgtccgagccttggggctttcaagaccctggggaagcgaagcgtcccacggggttgtgcccggcgccattttgcaacgaatggaacactgttgtgtctcgcagagatggcatgtcgcgcctatttattctttgcagaggaatactctgaagagaaggagtccgtggatatcaaaaagatactcagcgggatgtttcccctggtgcagagagacacaaaccgtgtggcgaattgtcgcgcgcctgtgagaaaacgtgaatggtaaatcctctgtcatcacacgagaggagtctttccaattcacccttatcctatgcctcaactcaaggggagaaattgtggcgaccttccttggtgggtcgcggcgcaaattccgcaaatttggggcaacgaccatgggtgttctttgggcttaggaaaaagaggaaaaacctttttggtaaccagaagcttagagtggcccaccaaacctgctgctaaatggtcattgtggtaatcgctcaggtgggaaacgcccagggaggtctaccaagtttttggccctccccgccgactaactcctggtggaaaatgctcggttacctaattttcctcgtggacaaaccacgaggggatggaacagaaagcgcggccttcccgaggaagggttttaccaatctctccctccttcttttagaacacagtcaggcaacactcgtaaaggaaaaggggaaagaaatacactattggtagaagaggcggcccccttaataccagggctttccacactgttaacgcgtacaacccggagtcaaattatagagccccccccacgggttatggcacacacaagatggttgtcggccgtccatcctggtagccttctaccttgtntgctcggaggcccgatttataatcctggtggtgggccacacacgcgccaacaacgaggaagggtccgccacgagtcgggcgaaacg

SEQ ID NO: 555325 - DNA, 300 bp, Homo sapiens
gaggatccccaccggatataagcggtagccagatgctgtggcttatacctgtaattccatcactttggagggccgaggcgggtggggcacccaaggtcaggagcttgagaccagcctggcaaacgtggcaaaaccccatctctacaaaatacaaaaattagctgagcatggtggcaggtgcctgtagtcccagctactccggaggctgaggcaggagaattgcttgaacccaggaggtggaggttgcagtgagttgagattgtcccactgcactccagcctgggtgacagagtgagactg

SEQ ID NO: 555326 - DNA, 112 bp, Homo sapiens
  misc_feature (7)..(7): n is a, c, g, or t
gatctancagatcccttcattatttcatgccatatgtcgcatagactgtattattattattactgcaaactgcttttgttttaataataataatacagtctatgctacatat

SEQ ID NO: 555327 - DNA, 225 bp, Homo sapiens
gatgaagctggcagaccctgatcttggacttcagccttcagagctgtatgaaaataactctctgctgttcatggccacgctggtctacggcagccctgagcagactaatgacacactgccactctgggagagtcatgaccatggtcatggaatgaataggcctagatgctcagtgatacttgaaggtcccaaccctggtgctggaccagaccaccccgggaagcc

SEQ ID NO: 555328 - DNA, 350 bp, Homo sapiens
ccgacaatgtctgtgcaagactcggtctcagaaatatgacagtatgtactgttgggagtagtcgtctgatgacagggcatcccaaactgaggtttattcaataagctcggtcacttttgctgatatcattcagggtctatgtgtcttctatcgcttggtacactgatccccattccagcacactgtagctttattgccttctacacttccccatctgatcagtcttgcagttcactcagggggcagactatttcaattcgatagttcttcccgctcgatctcccagctctgcatgtagttcggtgatcacagctcatcgattctctcgtcttccgaaggggggcccttgt

SEQ ID NO: 555329 - DNA, 174 bp, Homo sapiens
gcggagaatgcgatcacgcgctgatgtacttcaaggcggatggaaggccttccttcagacccagctgacctaaacgacctgggggagaaaagacaccaagaacataacacatcgttggttccacgttaactttccataggaatataaaactcttccttcctgttaatgcgacgt

SEQ ID NO: 555330 - DNA, 784 bp, Homo sapiens
  misc_feature (177)..(177): n is a, c, g, or t
ctctgactcttctctttaatctggacgcctctgtgcacccaaatggacactttcacctctcccgcagaaactgcttcgtcacacagtaacttctgacgatttcccccctattggtccgcaccaacctgttgaacagccgtccacctggccagccccattttccttgcggagcccccnttgagaaaaatgttcccatgcccaaaattctctctttgaacttggttacacaccccaaggcaactgaggagaaggaggaggagattatttggaaggatatttttcccttcatgggccagccctgggatacccagggtacccagctaccagtattaggtggccctggctgggcccaacccctgggagttgcaccaagatgcctggcgaaactgtttggcccccccccctgcagacggccctgcccgagacccatgcttcctatcagcctgctggaggaggaggatgaacccttgaggttgaggcccctgtctgaaccctccctggacatctgcaaccctcttgtgcacaggaaagtccttggcctgaagccctggtttctgccaactgggttccctgggacctcccgggtgggggggttcgcggaggcacctagggtaccctcccgggtcctaggagggaaagccccggattcccggagggatccccggactgtgggcaccccatttttgggtttccccgcccctttcccctcctaatttgtcaaggaaaaattttgtttttccccgggtgatttttgcccctccaaattaaaatttgagactcgtta

SEQ ID NO: 555331 - DNA, 300 bp, Homo sapiens
gacatttagaggatcccccggcacgagcacagggctgtagacccagctacttgggaggctgaggcgggagaatcacttgagtctgtaaggtttacactgcagtgaaccaagatcacaccactgcactccagcctggaccacagagtgaagaatttttaatgcttaattccaggccagacaaggtggttcacgcctgtaatcccagcactttgggaggccgaggcaagtggatcacttgaggtcaggagttcaagacgagcctggccaacgtggtgaaactctgtccctactacaaataaa

SEQ ID NO: 555332 - DNA, 1854 bp, Homo sapiens
  misc_feature (2)..(2): n is a, c, g, or t
  misc_feature (683)..(683): n is a, c, g, or t
  misc_feature (1435)..(1435): n is a, c, g, or t
  misc_feature (1618)..(1619): n is a, c, g, or t
cntttattgaatgttatgttacggtttcgtgtcgtcttccgttctttgttttgtgttgtgtttgctcgtcgtggggtgtgttgtttttgacgtatgcctccgctgtgttcctggttgctcgcatcatcgacgaggtggttgtgtgctcgtcccggtgtgcgagttgtttatccgactcggactcattgtgtggtgcgtggtccgatggggcggtggtgtgctgcacgagtggtctctcatccgcctcggagttgtctctgcccgtgtgtctttgtttcctagtctggccttcatgctgttggtttctactcgcggctcatacatcagggtgatgttccgctgtacatggtctgccttgaacacgtgtcgcctccgtgtggcctctcttctttcaacgttatttttcctcggtgccctgtggatgggtgtttcgtgtgtgcgtcctgtctgccacgatggtttgcctcgctgccgtaatggtggctcgcacctggtgtgccgcagcagttggttcctccgttggaagtggcttcgtccgctggtgtgccccaccacagtgtttcggcccctgtgctgatgggggccagcaaccccgcccgcgggttcgtggttcctaagttggtctgacacctgtgtgcgcctggggcctctttcgtggagcggactactcgccttcttttttnagggttttctccggtaaattgcgggagagcctcttgttaaaggggtggcaacacacaaatttgtggccgcgggcccttgttgagataggtaatgtccctctcctctccagagggtgtgtccacacaccatgtttgaaccagccttgggggacagccgccccctctcacaagatgggggtgtatagagagcgcccctcctcggttgttttccacaagagggggcccaccactctcgggggcccgcgtgggaaacactcctcgtcgttggggctgttggctttatacaccggacgctggttgtcccacgcgggttgtccctcgtttcggcgcggctttttggtcccgaggctcccacttgggggacactcctcgtgggagaaagaccccctctgtatccgctgtgtgcaccctttgagtgtcgcctattttcccccccgagtgtgtccctcaagagtctccccgccctgtttataccgccccatctcccctctgtttccccaatatttctccgcggatacacacacacttttctcgcggctcccgagagggtgtccacccactcgttgctgtgtcacgccccgcccctctttcgcgagagggagagtctcggcgcacccctcgtagtacacgagaagccctcgcgtggtgagaacccctcgagacgcttggcctcgggacacaacgcgagaggctgttcacagcccacacacaggagttttgtgctggttgttctcctcgggcttcacacaggngggttcacacacgcgagatctgttccccgccgagagagatgtgagctctcgagactttgggcacttccccgcacagagagagcccacagcccacagggcacccaccacaccctcttcgcctgtggagaccacgcactattctggcgcgttggcacacccgagaggaactgtgagaaaaagggnnggaccaccctcttttcctcgcacttggtggggccacacgagggaccctcgccacctgcgcctttacacaccacagagaagagccacttcgagccccttggccgggtgtaacccaccccacagtcacacagtgtttgttgttactggcggaggtggagcggcaccctggtaactgaggccccccccctgttcccacaccccctggattaactcccagcgtccccccacggcccaaa

SEQ ID NO: 555333 - DNA, 1699 bp, Homo sapiens
gagaagatgcaccaaactttgatggcccagcagcagagggtcaaccaggacagaagcaaagcaccacattcgagacgcctcctcaatttccaacattcacaagcatgcaatttgcaaaaccgcaactcagcacaatgtttgcatgtctcatgcatcaagcgtgcaaacatccccgtcctccccgcaggaggcaggcaacagcagagccatttgcctcacaggcatccaagcattgtttggcgcacaaccatcacaagattccatttggcagcagctttggccaaagcgtgcatcgttcattccaacgacatcttatcactgtccatcaagtgcgatcaaacaaccacgttttgcgacaacagcaagcacagcagcagtcccaacagtcgaaagcatcatgggcagcaggcattcatgggcagttgcctcatgataccagcatcaaatgcagtgcacagctcgggcaacgttcaggatataagaaccgattgcaaccgcagccgaaagatccgttgaagtggagcatgcaagagtagatatgtgacaccaggaaatcgattgcgtacacgtttgaattggttgacaccgtacaagggacacttatgggcaggaagaacaggactatcggtgttccctcgcgttggcaagggactactcggtacagaaggatttgccggatggaagacaagccaacataatgggagtgtcccagtcaggacaaaagggggagataatatagcagttatggaaccaaacatgcggaaaccaccacgacagggaaccgggcaggacgaaaggatcacaaagaactgaccgggagcgcaaaggcaagtgccaagggcaaagaaaggcaagtccgtaacgcgagagagaggataaacaggtgctcacatggacagtcaccggacatgggacgattccacaggcgcgagaatttgaaagacaacagatggacagctagtactctcagccattggggacacagtgcgaagccccaggtagaccaagtgggacaccaacggccccacggggacattgaacgacacaactgggggaggacaaggagagagcacaccccgaagcgaatctgaaagaattgacaacagttcgacgcaggcgacaaaatagggatgcgtggggcaccagcaaaagcagtggcaccaagagagataggacagaggcaacagatcggcgaaacaagatgaagaccccaaaggggcaggatcagaagacaccgaaggaggaaagagacaaacagagcacacgcgcaacatggtaggaacggagccagacgagatacaaaaaagttaaaaacagtgagaacaacggagaccacagtagggggagacaagacgaaggaccacaccgagcaacagcagaactcgaaaggaggtgggcacgagagaagggaaagggaagagaccgcgtggcacgaaacatgcgcagtggtggcaaaggagcgcacactgaccaaggataaacgagcggacgggagaaaacgatagacaccggacaggaacgcgagcggtagagtcgagtcggtacagacgtcgagagacagcaaggatgcagacggaaggagagaaagaaaccaggaggcgagtcacgcaccgagcgcacaacgaggcagccgcgcgaccaggagcagacggagagcacagacagaaccgacgagctgggaagacgagacagggacaac

SEQ ID NO: 555334 - DNA, 88 bp, Homo sapiens
gccataatcacgatggggcgattctagcgctgagtacgtcgtggagtcacctgcgagttcaccaccatggagacggcatgggcagcaa

SEQ ID NO: 555335 - DNA, 149 bp, Homo sapiens
  misc_feature (18)..(18): n is a, c, g, or t
  misc_feature (56)..(56): n is a, c, g, or t
cgagcgctgtaccccgcnggccaatggcaaacctcatctctactaaaatacaaaanttagctgaacatggtggcgcacacacactccattcactgtctccatgactctggagtaaactaacgtctcgagttgccatttgggccagcggg

SEQ ID NO: 555336 - DNA, 340 bp, Homo sapiens
ctacattccagttgttcaccttccatgatgccagtaagaagagagtcaaaggctgacaaatgcacaggtgttttctcacttttcttacatcctaccccctctcagttattcattatggtaatggcactttgtgatgtgcaatttctggatttatgacccattcttgataagcatgaatctggactgcctgtgcatctttgataaggttctagttggatagcagtgacctttctggatgtaattctgggaggaagattaaaaagcagtccagaaagtgacaggtttgggacaataacgtatgaatttggctctgctggcaggcaagagatgtaagccgtga

SEQ ID NO: 555337 - DNA, 331 bp, Homo sapiens
  misc_feature (32)..(32): n is a, c, g, or t
  misc_feature (86)..(86): n is a, c, g, or t
  misc_feature (88)..(88): n is a, c, g, or t
  misc_feature (117)..(117): n is a, c, g, or t
  misc_feature (119)..(119): n is a, c, g, or t
cccccccccccggtgattaaaaaaaaaaaaanattggggcgcccccgcccccccctttactcctccgggggtgagggttggccccngnggggagggggcccctcccccccccccccntnttttccccaaaaatttgggggggggccccccccgggtgttttttttttaaaaacccccccttttaaaaaggggccccggggggggccccccattttttgggaaaaacctttttttttttttttccccaaccccccccccccaaaaatttttttccccaattttttgggggggggtttttttttttttaccccaaaattttttggggggggga

SEQ ID NO: 555338 - DNA, 348 bp, Homo sapiens
ccacggtcagacagctgaaaacagtagagctgggattcaactctggctctgtctgatgcccagaaaacaaaacaaaaatccttaccatgaccttgggattcccgtatgccaaagtcccatcgctaatgctgctcatcatgaccaggtttggatgaggagaattgctgcagcttcaaacaagccaaggaggacttgcgccactttaacttgataaaggattgcatcttaagtgttctggttggtgtatctttttggagacggagtttcactcttgcccagcctgggcaacagagtgagacactgtccctgtctcttaaaaaaaaatagtgacaggaatggtttggcgag

SEQ ID NO: 555339 - DNA, 722 bp, Homo sapiens
taaattagtagatctatgtgatagtatatggtattttatccagaaagtacttgctcaatgataggttcaacttcagcatataattcatatacttttataaaagccttttcatggcattacatagaaggcctttccttggaaatatttccataaaataaacaaagcacttaaatcagtccattcaatagcattgttttaggattattaaagaaatacagagtttgacttccgcagtgtgctaacatggattattctttcatttgctgatccttgtatgtgcagtaggatgttgaacagtgggggtggtggcagcatatttctacatcaccttggactttacctttctgagaactcaacataggttcctaacttttttatgggccctgactggtgcttcagtaaacccacgaataaaaagcagtactccaatctgcagagactctagaagaaaatactttctatgaaccaaaaaacaaaagcacggaaggcttccatccatcttacatctttgacctgctaagaggaacaccattctacacatttctccacattctttctcatatcagaaatagggggattgttcacagcattttgtggaccaagaaattacacatttcctggcactcaacaacggagcgagttcgaaactggagcctatacttatactttcacttatctctgggatccataacatgctccactacccagggatccaagtaaag

SEQ ID NO: 555340 - DNA, 417 bp, Homo sapiens
cccttagttgccaatccacgccaacatctactgttcttgattctttgattatggccattcttgcaggagtaaggtggtatcgcattatggtttcaatttgcatttccctgatcattagtgatgttgaacattttttcataagtttgttggctatttgtatatcttcttttgagaattgtctattcatgtccttagctcactttttgattagattatttgtttttttcttactgatttgtttgagtttgttgtagattctggatattagtcctttgtcagatgtatagattgtgaagattttctcccattctgtgggttgtctgtttactctgctgactgttccttttgccatgcaaaagctctttagtttaattaggtcccagctatttacccttgtttttattacatttgctttcg

SEQ ID NO: 555341 - DNA, 1296 bp, Homo sapiens
ccctccaccagtgctcgtgctccgggcattatggatggcaggctgctgcccgcctactggtattttgtgtgtgccctggggatgtggagtctggtgttcagtggtgctccagtgctccctgccctgctacctgctgcatggacagcactggctgctgcttgtggtggacttggtaaatgtaggcccagtactgcccgatgctgctaggaggacctgagaccgcttttgaactaactggggacaactacaccaccagaatcatgacacctgtctgagacgatgggactccatacctgcagctgacacgaccggacatacgtgaccctgacctgactctgggcatagcccacacaacagccattgtatcccacgcgagaccttgatgcatagcacattgccatgaccatagcccccacaggcatcgcctcccataagaagtatacgcacatcactcaagagtggttcccgtcccaaccatctgtccttgccatgagtgtggctacgcgccttcccgtaatgcgaatagcctctccccaagcatccaattgacgcaatgctcaatccaagacaaagggacgcacccatatgttacaaaccccggtttcgtatcaccctagatagagcacattggcacccttcatttcccacaccaactaggcctgaatgtcgcagctccccaaaatattccatatccccatatgccgttcttgtccccttcccaaacgcgtctcgtactttacgtaccttggtagtccatcgcatgggacatgtgacaaaaccgtttttaccccttccttatcgggacccgttctttctaaccccatcctagggtgcaaccatgcttggagggttacgacccacgacgcaggcgcgacctcttagaagtacaacaagtccttctgcatacatagcacaaagtttcacacaatcaccttcgccacatcccactgcacaatccaaaaatcgcctacatcatctcctaattccttgtaccctatcccaaccacatgcccttgttagcacaataattccctagaactctcaacaccttatcttagcccatcataccaaccccttcccagcaatcacaaaactattgaccaccccttaatctctcttttcccccgaaacaatgaccacacacatccaacccaacagacccaggagactgtacccatactctaacctctacacagcccacatctcccctcttaccctactactgccacagatcaaggaacaaagatacattaccatacacaacaaatttctatcacacaactctcgatatacttc

SEQ ID NO: 555342 - DNA, 987 bp, Homo sapiens
gtggcacatgcctgtaatcccagctactcaggaggctgaggcaggataattgcttgaacccgggaggtggaggttgcagtgagccgagatcatgccactgcactccagcctgggcaacagagtgagactttgtctcaaggaaaaaaaaaaaaaaaaaaaaaatctgggggatgaaaataaccaaaatgaaaatagctagaaaactcagcaagcaggaagcgtcccttttctcacccttttggtcccctggcggataaaatcagtcactattacaaacaactgaaagacgctctgctttaacaccaatgatgcacagcagtacttacttatgtattccgaggtgaccttatatagatggagaagaggctgcattgggcagaactgatgtataggaagacccattggttcaagcttctccctgcgagggacaaatgctctcggtcattatagcctctttaccacagactgggccattctagtgaacccggtgggtaccccttggggttgcccaagaaaaccattcttatctggtttccacttacctcaggagcggaacgataacgcgggtcatccaaaatctgtattgcaacgctatctcatctcctccccaaaccttctcctcctgggaaacccaactgcctatctcatctgaccaaaggtctagcaggataacgcctgacacgactcggcagggcaccctatcgcgcctgggcggaagccctttgcctaaaacccaagaaggccggccggactaaacaagggaggccccaaacgggcgggccggcatccaagcactccaggcccccccccggaacggacggttgcacacacctggctaaacggaggcctatccagcctcttctcccctgccatccacccgcacccgcactgccgcgacgcaacacctacgcctgaaagacccacagacagcccgccaccaacgcgtacgacagaacacaactccctgacaccgtgcccggcgcgacc

SEQ ID NO: 555343 - DNA, 274 bp, Homo sapiens
aatattgtttataaggccgcaatgggtaacccacttatcagaacataggtgcaaatggccactcgtagtttctttgtaaaatggttgacaataaccacgttctttcacatgatttatcttgcctagatgtgtgtctcataaaaaaattaagtggtaaaactttgattaaaactaatgcactttaaactgttaatgtaagcttaggcagggcgatcttattctgagaccgtgcattagtggggccggcaccagtaggcctcataatgattattaa

SEQ ID NO: 555344 - DNA, 182 bp, Homo sapiens
cgtggatttggtcagtagacagtaaatatcactctgttcatttttcctgtccaaaattttgactgatgggagaaaaggatttgtgtgaccagtgctggtgtattgactatggtgtactttctggtactttgtggtaagaatcatattgtttcatccatttcctcctagagtagtcttttctt

SEQ ID NO: 555345 - DNA, 158 bp, Homo sapiens
agttcggcacggggcgggggagcagagggaggtgggctgaggcatcggtggggcaggtgcgacgaggcgttaaggagctggaggggttcctaatacacatttaattcagtttctcttccctaagaggctgccggagttggggcctcctccagcagaga

SEQ ID NO: 555346 - DNA, 1666 bp, Homo sapiens
ccactcgtgctgtccgtgtgtccactggcatgtccgtttatggacgcttatatgtccccccttcttgatcttcttctacttcgcgtctcgtgttcctcgtcgtcaccccgccctatttgctcggtgactcgattgattccaggtgcgtcgtcccggtgctatccattaagtgctcgcgttgtcgccatgccacttgtctcggtgtccgtggtgcctacttgggttacggtgactaagctgttcctcccagtgacacacttacaccgcgatcttttctgcttgcgaaagttctcccccctttctgtgccgcgtttctttcttccgtcggtgtgggaacttccccatcggtgaggcgttcaaacttgttatggatcccgttcggcgagttttccctcacacatgtgtggtcccctattttaatgggatcgctgtgtcttccgctgtacctacaagcctggatacgtggcgcatcgcgataactgagtcgacactcctatgtagggcccctgtttcctgtacccaacgtatcccacataacgggtggtaaagcaaagccccagggtctagagaggcactctgggaatgtcccccatttcctgtgtgatcctccctccatgataagctcccgcttgtcagatgaataccaatcttgtaaaccgcctgggagatcttcatgccttccgtgtggcggtcctagggtgacgcccacggtggatggaaagcacaagaacttgccatttgttctgggactttcctctggaaggaactaccaaggtctattgcttcctgatgacaaggccctaccctatcaacccagctggttccccgttttcaatgggggaccctcaatgccatgggcttccccagtagctcttcgctcaggagatctcgcgccatttctgcttaggatattaatttgcccaccaatcctgccatcggccgtcccatgagatgaagcctctctagaacgggtatgccttgtattagatcacgtatacgtcttcgctttcaacacacagccgtcgtccgcggttcgtttcgcacatccaggtgagtctggcgtctcttgcagtgcaaccggtgtctggttacggtgaggctgcatgaatagcatcgcaaacgtgcgtcgttgattacactcgccgtgacacccctaactctctacacgtatagccgtgcgtcgcttccatgatgtcacacggtgtgcctatcgagaatcactgatacatgtgtgcaatgaagccgacaggacacatacttccatgcctatgctatgtattcctggctctgctcctacgaacatgatgaatgacacgtcctatgcgatagcttggaaagccccatatctaaagaccaggccaggcacttagtgaactcacagcctcgaaagaggcccaatagaacgactcacatagcccccctatgtgaatgtagcaaatgaagtgcacccttgagagatgtacgatgctaaacctcttcgcactagacagattctctaacctggcagtccatgccttcagacctcagtggttgtttcagtaggacctttgacaaacacgtcaaggccccttgttcactctccagatttcctcctacctaatggcctactgacctcccctagacgggatgtctttgggagggaagaaagataccgaagaaagattga

SEQ ID NO: 555347 - DNA, 310 bp, Homo sapiens
taggaatgtctctatttcaggtaagttatctaatttgtcactgtaggccgggtgtggtggctcacccctgtaatcccaacactttgggaggccaaggcaggtggatcacttgaggccaggagttcgagatcagcctggtcaacatggcaaaacctcatctctacaaaaaaaaaaaaaaaaaatagccaggcatggtggtgcactcctatagtcccagctacatcagaggctgaggcagagaatcacttgaacccgggaggcacaggttatagtgagctgagattgcaccactacactggagtgtagtgca

SEQ ID NO: 555348 - DNA, 1061 bp, Homo sapiens
tttgttttgttgtgttgtttttttgttttttgtggtttgtggtaggtgaggggaagggagggaaaaagcggagatgcaggagaacagagaagacaaccccccccggtggaggagtcttctgtgcttatgcgatttctgtttcgagaagtctctgttgggtttttttattgtcgcagtgtgtctcgttcgttctacgatggggtagagagttgccccgatggatcacactctcggtacacatgggggcccatctgccggacaataagggggtaaaaagagaggtcttcctctgggccaccacatttgactcccccggttttgtcccgccgatttatggccccccttatttgttgtgcctcacgctggggcccccatgtgggggaaatcagcattggcccaaaaaacttttgggggccccttatgcccccaccaagtcgcagagtccccccgttgcgatcccgggcacgcacttatggagattctggggtggcgaacacaacaaataggtcggagggttttcgctcttgggcggaataaatctctcgctttccctttggagacaaggcgtccccgggcatatgtgcggccccccgactttggggggtgcacgcagagcttcctaaacctccggctttcacctgcttaaccgcgcgcgcctctcattgaagggtctactgccacttactctgggagtctttatgcagtatgtcgttgtcccccagagggggagacaaggaaactctgttcggtctactgccataggctgaatataaaaagtaattataatatgttaccaccattgtttatttttcacacgtgtcaaaacacaagtattccgtctcgtattacaacccgcacccctgctcccggcgacactcccccccacgtcattcggcgcatacccccccccccacatctcttctcatatatcattgttacacaatcccacaccgccctaccttctcagagtttaataacaacgaagagttcataacaccactccccatttttataccaaactatacccccaactccttatatctttccgatcaaaatacaaa

SEQ ID NO: 555349 - DNA, 427 bp, Homo sapiens
atggcaggagaatggcatgaacctcagtaggtgaagcttgcaggagaatggtgtgaaccccacagggcgaatttcgcgtgaaccccataggcaggctgctgtgcagagcccagatcgtgccaatggattccattcctataaggtaaaagccactgtactccagcctaaacgacgtattgagaccctgttcctaatataattgtcttttaatataaaacataatgtgatccatgtctgagccaattccaactgtagagtttcgatctcttacttcccaggtatctgggctcgtgttctgtctttcccttattgcctcttacattctttgttcccctcatctctgtttgccttaattacagattggatgttttatagggatctaaggtccacttcttttgtctctgggtatatctcgagtttccttatc

SEQ ID NO: 555350 - DNA, 333 bp, Homo sapiens
cgcagagtgggaagacgagtaccggcttcgggtttcccttgggatcaattttacatttaccgtgtacctttcccatttgtggtcttgccatttggcagggggaaaatgggaggcttggcctatcatttgtgaggcagtgtgagcagaactgatgccagcatgtcactggtttgaaagggatgagcccagacataatgtttggggattgtccttatttaaaccctcaaggtctcgcatggtggggcccctaaccaacctacacaatttccctcccacaagtggacttcagtttcttctctgtaaggcatctggccattcgcactccctagtgtg

SEQ ID NO: 555351 - DNA, 433 bp, Homo sapiens
tccgggatactgttacgtaaccttagattttaaatcatgacactggggatatgcacaaggggacagggtaggatatgtgaccaaaatataaattgctttttcccaagggtagtcattttctttaaattcatcctatccactttggcccactcccccaggtacagattatcctttagtcatacaaattcactctccaattccacatactttctccccacttgagggtaattatccaagagggcaacacaatacagctggttgataaagtaatttaaactattggtaactgaaataacaagaacgtaggtaataatcacatagtgtaaaagataccaaatgggagtacatatggatgtcaatctagtcttatatttaccaaagtacctcctaagggtctgagcaggagagtagaagggcaggagctcgagggaaa

SEQ ID NO: 555352 - DNA, 363 bp, Homo sapiens
tgcattctgttggtcgttctagagtatccccctctggatgctaagtgttcgctttgtcttaataagctgtatttaatagttgcagccagctgagttgagaggcaactatgctcactgctattccaccaattgccacattatgtatggctgaattgtgaacagaagaaactgtatcaagttttgtagcattttagtatgaaaaaaaatacagatcatctaagcaataatgaaataattagtaattcacattatttattctactacaattataccagactgagaaactgactatccattatgatatccttcccaaaatacctattaactgacttggggatttaccataaaatccttggtctgagg

SEQ ID NO: 555353 - DNA, 316 bp, Homo sapiens
ataaacaaaccacatagccattctcttccttcactccaacctaccaaaatccacattctctgcctttatccaagctatcctcacgtacgattattcacataagaacattggtaccaccgccggacgcagaggctcacacctgtaatcccagaacttagggaggccgaggtgagcagatcacctgaggtcaggagtacgacaccagcctgaccaacatggagaaactccatctctactaaaaatacaaaattagccgggcgtggtggtgcatgcctataatcccacctactcagggggctgaggcaggagaatagct

SEQ ID NO: 555354 - DNA, 261 bp, Homo sapiens
cacgaggagcacttccatatgcttttctaggcaggacatgccagcgattagattatgagacagcttaaagacagaggtacatttaccagagaaaacacgcctggtagctcggccggccccgcccatgctggctcagttcctgcccctggcgggaaggggccgaggggtttcccgtcccagggacctcccaccacaggagttctgcacaccggactggcctggcagtcagtcccaggaacactgaccatccccttagggagg

SEQ ID NO: 555355 - DNA, 496 bp, Homo sapiens
  misc_feature (27)..(27): n is a, c, g, or t
  misc_feature (226)..(226): n is a, c, g, or t
  misc_feature (296)..(296): n is a, c, g, or t
  misc_feature (344)..(344): n is a, c, g, or t
  misc_feature (390)..(390): n is a, c, g, or t
  misc_feature (460)..(460): n is a, c, g, or t
gctgggattacaggcccctgccaccangcctggatcattttttttgtattttagtagagatggtgtttcaccatgttagtcaggctagtctcaaactcctgacctcaaatgatccactcgtctcggcctcccaaagtgctgggattacaggcgtgacacccgtgctggccaggggttttatctgtaagtccctgactggggctgctgctttttttcagagatggcntgcccagagaagaggaatctagagaggacgtctgggcacagaagcctttgctgagctgtggtggggctcnacccagttttgaactttccctggaagcttttgtttaaaactggttgangggtaaaaaccaacctacttcaaagcctcaagcaatgggcgggacnaaccccttcccaaccaaccaaagctcaaagcatcccaaggttcgaacctaagaactggctggtgctgggnagcgaagaattttcaaggccagttggattcttaagg

SEQ ID NO: 555356 - DNA, 179 bp, Homo sapiens
gtcgacctgagtctgtccacatgacaacttcactgctagcataaccagcattcaagaaaaccaatgtactaaacaaaactgcaaccaaggatcctcacagagtccatttcactcccctgctacctccaccagagcaggtggtggtatccacggctgagagacctgaagatagatcacat

SEQ ID NO: 555357 - DNA, 466 bp, Homo sapiens
  misc_feature (2)..(2): n is a, c, g, or t
  misc_feature (61)..(61): n is a, c, g, or t
  misc_feature (289)..(289): n is a, c, g, or t
  misc_feature (374)..(374): n is a, c, g, or t
  misc_feature (380)..(380): n is a, c, g, or t
  misc_feature (387)..(387): n is a, c, g, or t
  misc_feature (409)..(409): n is a, c, g, or t
cncccatgcccagccctgaataaatcttatgttgaataaaaacccctacgcccagttaccngagttcatccaaagaaatatagctgtattttcaaatttgtcaggtagctggtaccaagctaacaaaatactccttgagaatatagtttcattggttcacatcaatggctagagaagatttgacttccaactatttagtcaattaagcaagtgagcattccaaaacaaaggatatgtaaaagttagataaaaatacctgcagggtttttgttttgttttgttttttganatggtcatcttgctgtgttgcttgggctggtcttgaactcccctactcaggtgatcctcctgtgtcaaggtacttttatttaacncaagtntattatnttggtttatatggacatgtcanatgcagactttgttataatgaaatccttagtgctcaataaaatggtcattgaatcta

SEQ ID NO: 555358 - DNA, 114 bp, Homo sapiens
atgcgatactttgcctgactgtagtatctcaattaatttaggggctgtacttcggcattgtggtcgtgataagcccaagttttggtgggtatgttaaagtggttgagcagttag

SEQ ID NO: 555359 - DNA, 484 bp, Homo sapiens
taacaaatacattaaaaagaatattacctcacagtaggcaattagacaatgccagataatttatacttcagtggctacaatgtctctaaaatacagccactgatgggctggaaggcagtttctaatgtgctcagtaataactgggtgaggacaattttggccaagggcaggagaatgctgcaaactgctgtatgctgcttatgtgaggtgtctgttatcagagagcagaggcacaaaaaagttaattcacaaggttaactacaggtgatttgggtttactatcctagactcacaaggatgtaacatcaagttgaaccttttgagattaaaaacagcatccatccttgattcctaactgcttttgttccttactcttgacaggcaacccttcctgctctattttcatatcctttttttttttttttaaaccaagtctcgctctgtctcaaaataaataaataaataaacaaaaagttggcggccg

SEQ ID NO: 555360 - DNA, 759 bp, Homo sapiens
gtcagagagggtcccagttagagggggttcaggcgtccgtcgctgccttcctgcgctccgtgccctactggtaggagcactgccccgggccgatgcgtcgagcaacttgcccaagcctcgcatgtagtcctcaccccgttcgcaagaccggagtactactctactgcggccgtcgttaatccgcgttgaccctgaggaactgatacgggattttagaaatcagctgagtattaacacttgaaaggccttattcaagtgctctgtaaattggcttttcatttcttggctgcttttttgtgttgatgcattttgctcttcagagagatctctttctaacttaggggtctgtcttcgcatgtattacaagccagaatacaggtgtttggaacctagaatgctgtttgtgcgtctgtcatcaaggagggaacagttgtgcctgtcactggaggtgatgagaccctgttcgagtgaaagtggacgactatgtgccaagtcaacgttaactgtgaagttacacacagtagctgaacttcaaagtgcctgttctgtaaagtttcattataaactgttaccagtagtccttaagttgtttatgctttatcagactggctaatgtgaaagcataatattatgaagtcttattctgccttatgagaccttaacgaaatggatatcatcttacaggctaatgtgaactgatcagtcgtgtaaatatcatcctgtaacgtggggtgttgtttgtgctgcggtggggggggt

SEQ ID NO: 555361 - DNA, 495 bp, Homo sapiens
cccgcagggacgcccgaaacccccgtcgggctaggactaagacagctgcgctgagcacatcccaaaacgtgtgcagccagcaaacagcggggccgcatcaacccaacttaattatgctgggccccgccgagacccgcttgagtaagatagcaggtgccacaaaatgggggcgcgccccccgggggccccccaagtaggagggcaggtgcgtggcaaacaatgggggccccccccaacgcccaaccacaaggtgttccttagcaactctctcacccagcacagatcactaaaatttgctgcttcatgcaagagagaaaagagcgaatggattctgcctgctcagtcacaataaaagcttggcactacatgcagtggaaactttggaggtgacttttccaacgggggggatccgctcatttcagtaatgtaccccatatcaccatccgcaaagttaagtttttggccaaaaaaaaccatttgagaggacaaaaaaca

SEQ ID NO: 555362 - DNA, 105 bp, Homo sapiens
ccggaacagtcgatggctattgaggagtatcctgaggcatgggggtcacgggttgaggtcttggtgagtgtattggtggggttagcgatggaggtaggattggtg

SEQ ID NO: 555363 - DNA, 151 bp, Homo sapiens
ccccaagggggccccccccccctttttttgggtgggcccaaaaaatttgggggggccccccggggggggggttttttatttttttttaacctttttttttccccggggggggttttttttttaaaatttaaaagcccctgggggcccccta

SEQ ID NO: 555364 - DNA, 167 bp, Homo sapiens
ctttccgggtgacaaccctcccctcgtattcaaacacagatgatatataaggaatagacacaaaaaacaatcaggccatgagagtaccaactaaccctctcccacccctatccggcccaatacactcccagaatcaggcacacagcgcttgactgtttgactgttta

SEQ ID NO: 555365 - DNA, 135 bp, Homo sapiens
gttacagactgactgttcagaaagattcttcaaagcttatcccttagaggattcactaccaacctcttagccggccagccgttgatgaacattacaatcccttttcgacaagtgcaaattggggcgtttgccgga

SEQ ID NO: 555366 - DNA, 263 bp, Homo sapiens
actctagacgatcccccgagtgggtccctgcataaatttgattttgccatggctgcttagaaatagtctaattataaggaaagaagtgtacagagagagaaaatattactacactaaaacagaactgttttctacctattttaaaaaatttaggtagggatgttagccatcatattctataattagttacgttaaacttctaataatactgttctcccactcgcacatggatttcatgctatttaagcacatgattgatcgta

SEQ ID NO: 555367 - DNA, 185 bp, Homo sapiens
gcttttctaggacttgtgcctttccatataagatttagaataagtttgtctatgtctaccaaaaaccccagcaaggtttttggtagacatagacaaacttggggagaattgacatctttaccaatatacagtgccttccaattcaggattcaggaacacaggatcaggcatggtggctcgtggcc

SEQ ID NO: 555368 - DNA, 146 bp, Homo sapiens
gttcgctgctcagcaccttgacacgtagatggagtagctctctttgtcggctgcgcttgcgcttcttgccgtctttctggctggttttggtgacggattgctatgagcccttatagggaccgacagcggattttgccgggtcaggc

SEQ ID NO: 555369 - DNA, 702 bp, Homo sapiens
tggtgacaggtgcctcacagaaaaaagaaaaaaaaacaacccgggccacggaaaagcaggccctgggtcccccacgatgaaataatgccttcccattcagcctcctgtgctctgggcccttgttggacccttggagaccctgtggtttcaagccacgggttgggccctcgagcccgcttaggggtacccccgtgcgcctcttctgcgccttgcgccggcgccctgtgcctttgcgagggcggagctgcctttctcctcagcacagacccggaaagcatttgccagggcggacgcttgagtttcctccttctgtgcacagactttcggaaattacagcgaagcggagcagtgtttcctccttcagcacagacccgggcgggcggcccaggggcaccgcgagggcggacctgcgtttctgctcagcacacacccgggagacaccgcaaaggcaagagcagccttctcagcacagaccttgtgggcactgcctcgcttggggactactcggagccgcatcaatggtgaataaaatccttcctgtttgcagcccttaataatcagggtcagagacccgttagaagggttcagtgtggaaatctgggaaaccaaaagcccctctgattcctacccaccgaggtttccccagccaagtgaggcggcgcagtggcagtcaaacggagctcggaaaaagcggcgaatcct

SEQ ID NO: 555370 - DNA, 81 bp, Homo sapiens
  misc_feature (74)..(74): n is a, c, g, or t
gatttgctggtgcagtacaactaggcttaatagggactcgaattcaaaaaaaaaaacgttagaagcttgaattncgagcag

SEQ ID NO: 555371 - DNA, 660 bp, Homo sapiens
ggcctggcccccagtgcccacccggtccgccggacagccatgatcaaggcgatcctaatcttcaacaaccagggaagccgggtctccaagttctaccagccctaggtatataactgggagtaaaatggccaaatcatatgagtgaagatacacaaagcaaatcatcagggagactttccattgtggtatctaagagagatgaaaatgttgtaatttcctagaaggaggattataattggaggatctgacaacaagatgatttatagacattatgcaacgttatattggtcttctgtgtggattcttcagaaagtgaactgtggcatttagatctaattcaagtattgtgtggaaaaattagacaaatgtttggaaaatgtctgtgagctggatttgattttccatgtagacaaggttcacaatattctgtgcagaaatggtgatggggggaatggtatggagacaaatattgaatgagatggttacacaacattgtgcacaaaataagctgaaaaatctgaggctggttagcaggagctccagcccgtgctgtatcagtgtaaagaatatgaatcttcctgagatcccaagaaatattacattggtgcatcagtataaaagtgcaaaacttgtcctctttaaataaatgttaaagggctc

SEQ ID NO: 555372 - DNA, 641 bp, Homo sapiens
gcgcgggcgcggtggctcacgcctgtaatcccagctctcagggaggctaagaggcgggaggatagcttgagcccaggagttcgagacctgcctgggcaaatatagtccgagaccccgttctccagaaaaaggaaaaattgaagaatcaaggggatcaagaaatatgatggaatgacatgtaatagaaaaaatgttgttggtcacgggtccgtcgcgcccccccagaaagagttcctttagaaaccgccttgcgtgttggcccgcggcggggccccccattgcggtaactgcgcatacatcgtggcaccagcctgtgtccccaggaggagagcacgccggggagacaggaagccacgggcgggtggggattccctcagcaatgaaaacaagcacccgggcggggaacacgaggggtgtttgtggaccaagcccccaaaggttggctccacggcaggccacagcgagaggggacttattatcagcgggaggcccagagaaggagcgcgtttgtttaaaatattacccccccggaccgtcggggtgtgtgcctcttaagagacttaagacttaacccgtacaggaaaacccctggtacatccaaaggcccgatttttgtaccttgtacaatggatggtgtacaa

SEQ ID NO: 555373 - DNA, 220 bp, Homo sapiens
atgatgagacgcattctggtggctgctggtatgcttacttgaagacgagtacttttctaggtgggcgaacgagtgacattggctgacatcacagttgtctgcaccctgtctgtggctctaataagcatggttctagcagccttctattccgccaggacctttcccaagtaccaacacgctggttcctacacgtgcattaacccagcccccagttccaggg

SEQ ID NO: 555374 - DNA, 595 bp, Homo sapiens
gaagggatgggagcacccttccgaccagtttcatttctttgggctctgttccatctgtgcagggaactaccttctctatggaaattggacacgattttaaaaataaagcattgcatttactaatgactgtcagtattaagatttcatgtagatcttgttgcttctcagaaaaaagtttcatatacagtaaggttttaaagataggcaaataactagttgtgagcaggcaccatcctttaacttttattaatttgaaatcatttttccatttttaagcagaatagaatgtcccagtaggtgtaagggaaatttcagtagcctccaagactctgtggagattttgaaactatacacgcttctccatctgtcgcctgccccctcctcccagagcatagacttcaaggctggactttgctccatgttaatgatcactgttaatgaaaaagataataggttccaaaaggctgaccacctgtttttggtatttagggtaatgctgctgtcaaagtgaatgagatatattccttcctctgtgttctgaaagtttacgtagggttgggtgtgtaatgggttgaattgtgtcctgcgtctccac

SEQ ID NO: 555375 - DNA, 360 bp, Homo sapiens
caggggagtattttatatcaaaacgaagagcagtttatgggaaagaaagcagcatgtttttatttgaattattcaccctcatgatcctgaacttgttttcatcatgatgtgagtgtactaactaggtaatgaaagttaatgaatattaacttagggaactttgaatgctgagcagccccttagtcccacctggtagtttcaggtgcatttatttttcctaagtccactctgttacatgaatcagacttcctcatttgttcttgcttgactgtagattgattatcgatccagggaaacaaaactagggaaattacctgtaaattataataacttggttaattaattctctccagaaacaca

SEQ ID NO: 555376 - DNA, 113 bp, Homo sapiens
ggttccacgagtcatgtcaacacagcgttttgcttaacacatcaacacagacattgggtccacgtcctgcagctgcagccgcttgcagttacttcctccttgtccgaccgttc

SEQ ID NO: 555377 - DNA, 1288 bp, Homo sapiens
ccccccatccccagcctaccctgccaacaggggcggggcacaacggacacgcgctacagcgctgggtgccagcacgacgggcagcgccccctggctggcaccgaggcccagcagggaacccctctgggctgaaggcagaaaggactgagccttgaggtcagcttcgagtgccaacggctcagactgccagctacctggcaagaggcctgactgcacctggcaccacagctgaccccatcacctcgcggacccatactgggctccgcttatggcccacggtgcgccaaaaacgctttctctcaccttcctgcaggctgagccacacaactcacttgcgcaacagccagcctcgcgcgtctcagcctcactgctgcatggccctcgctgacccccagcccctcccttagctgcctacagccctgcccttgccccagcggcgctgggactggccactgcacacggccagccagcacaggccctagcgctggcgcgcagcggctcaccggcctggcccctttaccctgcctcagcgcccccccatcctcctggcgcgctgctcctgcgcgcggctcacgggcagccagggcagccacctggcccgcgcgctctacacgcgctgctggtacctcagcacaggttctacgcctgggccccagggcccaggctactcgcgccctgccttgggctttctgccactgccctggaagcatgacccctgagcactcgctgaccaccaccttgagctggacacttttcccccgtgcttccctctttttacccctcttacacttcgcgacttctcccccgactcctctgaacatacccactttgcaggaacacttcgcgcttaaccctgccttctgtgcgactagccccctcgctcgggccgtcccctcggcgggccccgcccccctgcacgctcctcccccgcgggggggtcccccgactctatttgcagcgctttcgccgtagcccttttctgggttacccacggtgtgcctcgccttaatctgctgagggccgccgttctgtccggcctgtgcccctctcgcctggctgttccctctaacgccgcttcgtgcttgtgggaacacgcgggtcgcgcctgccgccactcctccgcgcgtacccgacccccatcccttcgctggctggcgcacctatcctcggcccgccctcccctcgcccgcctctaccccccccgcgcccttctgccctccctcctctgtctatagtcgctccctcccgccgcctttgctggccgacctctctgctcccgcgtctgtca

SEQ ID NO: 555378 - DNA, 232 bp, Homo sapiens
tttttttccccccccccccccccaaattgggggtttgggggggggggccccggggccccccccttctttttttttttaagagagggaatttttccccccctttcccccccttaaaaaagggggggggttttttcccggccccccccgggggttttttttgaaaaatttttttttttttggggggggtttccctttttttttttaagagagaaccccccctttttccccccca

SEQ ID NO: 555379 - DNA, 1028 bp, Homo sapiens
ggccaaggcgagtgccgctgcgggccacattgtcacggacgagctggccaccaagctgagcctggcttggctgcagatggagggctgaggtgcggctggcgagaccccggagcagcccgggctgaactgtggcagcggcggcgtgcggcgtggggcacccgactgaggcggccgagtgctgctgggcatgcagcggactgcgaggcttgagcgccaagcctgcttgctggctgctgcagaacctcaagccatgggcatctggcggagccccaagtcgccccagaccgacgacgtcttcaagcccttaaaccgagttcaagggagttctccaggaagcagatcaaggacatggagaagatgtacaaggcagtatgatgccagggctggggacggcttcatcgacccttgatggagcttaagacctcattgatggagaaaccttggggcccctcagatccaactgggaccttgacagaacattgatcaaggagggtggatgagggactttgacagccaagcttagacttacggggaagtatccatccgtggatcttccgaaaagggcgggacggtccgggggagctttccaggaaggaacaggcgagggcttgtgcggttgcttggcgcccggcgtcttcttgagaattcggagggttcttccagtgaaggggtggtcaaggggggtacaaaggaggcattcttttgagggccaaggtccaagtggcgccgatttcacacgttgttcccagtaccccggcatatccgggagggagaggggatggatttccgcagggtgcacaagaaagtccaggggaacggggaaacaagggggcacacggaagagcgacgcggccggggaagggaagggaagtagaagagccacagccggggaaaagcggtcgggacccttcccgacaggggaggccattgcagacgtcaccaagccgttagtaaaggatacgcacagtgggcggtcattggcagagcacggaggcacgagcgcgttgcgtccgtggaccccccccagt

SEQ ID NO: 555380 - DNA, 649 bp, Homo sapiens
  misc_feature (165)..(165): n is a, c, g, or t
  misc_feature (176)..(176): n is a, c, g, or t
  misc_feature (201)..(201): n is a, c, g, or t
  misc_feature (210)..(210): n is a, c, g, or t
  misc_feature (216)..(216): n is a, c, g, or t
  misc_feature (292)..(292): n is a, c, g, or t
  misc_feature (308)..(309): n is a, c, g, or t
  misc_feature (312)..(312): n is a, c, g, or t
  misc_feature (320)..(321): n is a, c, g, or t
  misc_feature (350)..(350): n is a, c, g, or t
  misc_feature (373)..(373): n is a, c, g, or t
  misc_feature (376)..(376): n is a, c, g, or t
  misc_feature (379)..(379): n is a, c, g, or t
  misc_feature (397)..(397): n is a, c, g, or t
  misc_feature (402)..(404): n is a, c, g, or t
  misc_feature (408)..(408): n is a, c, g, or t
  misc_feature (430)..(430): n is a, c, g, or t
  misc_feature (446)..(446): n is a, c, g, or t
  misc_feature (448)..(449): n is a, c, g, or t
  misc_feature (462)..(462): n is a, c, g, or t
  misc_feature (488)..(488): n is a, c, g, or t
  misc_feature (499)..(499): n is a, c, g, or t
  misc_feature (518)..(518): n is a, c, g, or t
  misc_feature (535)..(535): n is a, c, g, or t
  misc_feature (645)..(645): n is a, c, g, or t
tcaaacaactacactttgcagtctgtcccaatgaaatcaaactggacttctcaatccaccactgcaaattggttattcactcaacctatacattcatcattgtattctgcttcatgatagctatttcattttacattttacataaaatttaaaaaaatgactgcnatttataaaantgaaaaggtaaattgtagaaatacncctttttgnccagcnaaattttactaaacaatctcagcaaatttcgtaattcatctttcaatatcacagtcttttaatgtcaatggaaacnataatttatggcttannacntctttttnnacctgccaggaaaatatatgggcgcggtngcggggtaggggggggggggggnggngcncggggctttggtgcttcnttttnnncggnggacaccgtgccagccatcgtnttggttccggtggatngnnagttaagattaantttattaatcaactttggggtctggngccgggatggncctttggcagcgttgccgngtgggcggggcggtgcngcaaagctaatcataatgccaaattttgaccaaatgataaagtggctctgttaccatagtaccagagtctgtctttttgttgggtttctgtttgccataacaaccaaggnttga

SEQ ID NO: 555381 - DNA, 908 bp, Homo sapiens
ataagaaaatgtatttatataacatttactattttgaagactagtgagatttctgtaataatttaaattctttaaaaagtgaaagcttgttgtaaagatatgtctttgtgttattagaaggaaataccaagagaaaaatttctttctttcatgggcattgataatttcagtctttgactgattgtacagcctagaatatactaagctgaataacagctcttggcctcagaatttccagcagccagccactttctgattcactaagtcgaaactcttattagaaccttcagctcggtgatatgtatctagacgatatccctgcgcgcttcggcttcactctcagtttagaaatttatcccacaggctcacccgatgtatatcatacatatacttctgtgtgtctatcataccacatatgtgtgtctgcagcgcgtcagcttctctctacgacattcctcttaccggactcttctcaaatgacaacgccacagggcgtcacagctgtctcatctcgatctcgctccaccaccccgtatatccaccaactttccacacacactgactagtccaccgtgcctaacgtccataccacgttcggctacctacttaacacccttcacgacatcgacgttttacgcccaccacacacaataacccctgtcactactggtcgcccgtccggtctcctcccaatctactggtctggcccggatctactcgaagcacgcatcctcccaaccactgttcactacttccacggcaccaggcgcgcccacaaacacaacaggcacccccacgattccggcacacgccccccccgccaccgccaacgggtcgcgcacccacaacgagcggcaacccaccccacccacacaccagccgcaccttgtacccacccccccccccac

SEQ ID NO: 555382 - DNA, 224 bp, Homo sapiens
gggttcattattgaggtaggcacgatggctcacgcctgcagtctcagcactttgggaggctgaagcaggtagatagcttgagcaccaggagttcaagaccagcctgggcaatgaggtgaaactctgtctctacaaaaaattaagccaagtgtggtagcacgtgactgtagttacagttactcagaaggctgaggtgggaagaccaattgaaccggatagcttgg

SEQ ID NO: 555383 - DNA, 135 bp, Homo sapiens
tgagccggtgaaagccaggatttaaatatacaaatactaatttttatgtatctttcacgtcaaattagaaacacatacttggaaatttactgctggcagtctcaactgtgcttatcatggtagtggctgaaactg

SEQ ID NO: 555384 - DNA, 889 bp, Homo sapiens
  misc_feature (282)..(282): n is a, c, g, or t
gatcccaaaaatgcgctgtcacaacaaacgaagaagatgacgatcgggagatgcggttccagcaggctgtaacaatagggcgcccagtgggtcccgtccagactgatggacacgtcaaggggtggccccccctcgcccggtcggggacccccctctgcggggtcctcccctttcgggggaactaccctcgaggggcccatatcaaccaatacatgggggcccactgcgccggtgggccgcaaagagaaaacggtgtttggcacatggccaaatcaagcgttnatctggcccgggcacaaccccttcctcactctaaaggaacctcccttgcctcttttcaaaagagcccccccccgctattactaacaacactagaagccccagtttcccttgccgaaacaatggggcataaacactgtccccccaaacaaagcaacaaataaccccccttgcccggctcaactttcctagacccctggatttcaccccagtatggtcccctcgaaattccacttttcctgaggcattcccccacaccctctgaccaaaaaccttaattatcacgtcagtcggccaccaaacccccccctttattcttttccgcgtaaacatgcgtgttttccggatccccacccactctcgttacagtttaaatgcaagcgtctccgccattcattacagtcttatcgttaagaaattgttataagataccaaaacccttcccaaattacggggaaaatctaaaactcttgttttatataaatgggccataccactttgaaacacattgtggcaccacatgttattaaaatatcgtggaagctatacaaaaataacaagagtttacaaaaaacccaaaaaaaatttagcgggttcgggccccaaaaca

SEQ ID NO: 555385 - DNA, 310 bp, Homo sapiens
gcggccgcctactactactacctactactactaaattcgcggccgctcgacgtggacactgttacattgtgtaaaaactctctgcaaataaatggagaaaaaaacaaatactctagtataaacatggattaatatgggtttagtttatgaacaggtgatttacagaaggaactacaaatagctgataaacccatgaaaaagccccaagttttgtagtaccaattacaataacaagatactgttttcatctaggaaaatggcaaaattaaactttttgcagtattaagtgttagagatgtaaaataattgg

SEQ ID NO: 555386 - DNA, 283 bp, Homo sapiens
aaacatattcaaatccataacatggggatagatacacggagccgaagatacagcatcagtaaagacaagatgaggtcctgatctgggaaccttttgccaagggaagatagccgctggaaatgagactactaatgccccaagaagtgactgatcctataatggaaaagggaaaaaagaaaaagagaactgcttccttcttcaagggacaaccacatcaaagcacaaatgcactcctgcgtaagtatgtgagatgaaggtaccatctcagccactgtaagaaacc

SEQ ID NO: 555387 - DNA, 388 bp, Homo sapiens
  misc_feature (2)..(2): n is a, c, g, or t
gnacgacgcgatttgaggctgtagtgtgcaatgttagcaccatgactaggcactggactccagcctggggaatgtagtgagaccctgtctcttaaaaaaaaaaaaaaaaaaaaaaggccaggcacagtggctcacatctgtaatcccagcattttgggagtccgaggtaggtagatcacttaaggtcagcagtttaagaccagcctggtcaacatggtgaaaccctgtctctactaaaaatacagaaattagccctatgtggtggctcatgctggtagtcccagccacttgggagtctgaggcgtaagaatcgcttgaacccaggaggtggaaattgcaatgagctgggatcatggccctgcgttccagcctgggtgacagagcgaga

SEQ ID NO: 555388 - DNA, 128 bp, Homo sapiens
  misc_feature (10)..(10): n is a, c, g, or t
tgtaaagtgnctgtgaagactaaaagagatatgtaacatgttggaaatagtgcctcgattgtagtaggtcctctgtggtattatggactaaagctggccttcatcttctacagataagttgcaaagtg

SEQ ID NO: 555389 - DNA, 1369 bp, Homo sapiens
  misc_feature (602)..(602): n is a, c, g, or t
tacaaacaaaagctggccacaggtttataaagacattactgggctactataagcacaggcgtggatctaataaatcatttctccatattatttactcacattattctcgaggaaagtttctcgtgagaagtgactatactcaagaacgagggctatctctgggtgacctcaagcgtggcactctcaaagtagtctctcttatatagaagagttcgtgagtataagtgggtgcagaccatatatacatctcgaggggccttgtgccctttttacattctcccacaaggacaagagttactccactttcttgcggagaaagaaatccagtggtagtgaaccagtgagaaaatatctctatatttttataatgtgacgcgtgggcaaggttttgtgaaacattagcgtggtaccagggagaggcaacgtaggataccccaatgtcgtgagcgtggctctctattcatgtttattctcgtgaagccaatgtgtgccaagaatattctcgtgtatagctgaggaatgtgcaaggtctcgagaagaagagttaaacgcacgcgtgtttaaaccagagtgtctcatataatagcctattatagtgtggnctagggggattggggttctcgtgggagagaacaagaaatcttgggaggggttattattatttataccaacttcccaacaattataagaaaaccgacagaggcgaaacaaatagcgtggtcacatttccataggagtggtggggcacagtggccattaaattccaaataataaaagggtgggccttttcatccaaacaaaaattcgtggttcaggggcccacatttccgttggaggttccaacatgtccccaaaaaacgattaaaaagctgttcttccaatccccgcccgaaaaggagggggggttatatactttgctgttaactaatctggcgaaagagaacatgtgtgggggttgggcttggaacccccttttcccatttagactcttcgcatggtgttcccacaattcccgaggtctcggggggcgcctccactggggcgtacgccatttgtgcgcaattatcccgagaagtggcctttttttagcgcaagagggaggcccctgggggggggaaattccaagagttccttcatataaattttccttaaaaaccgcctctcgtgtgtgagcggaggaataatcttccgcgcggcgggtcttatcaccagaaccctctggggggacccctgggcacaaatttcccccaaagggaaaagaacgttaaggaggggggcgacgcacacaagctgatcgagagggtgccaccacgaaggtagcatgcagttacgaccacagggcggggggggggacacgacaagcaagagt

SEQ ID NO: 555390 - DNA, 103 bp, Homo sapiens
  misc_feature (63)..(63): n is a, c, g, or t
tttatagctcaacgcgctgatagtaactctaatttcgccatatctgtctcatcatcccaaggntttcacattctaggtaagatggaagacattgtgcaacaag

SEQ ID NO: 555391 - DNA, 567 bp, Homo sapiens
gcctgttgagcgaccgggaccccaggtgcacactccaccacgcccagctaattttttgtgtttgggtagagagggggtctcactgtgttgtccaggctggtctcgaactcctgatctaaagcgatctgcctgccttggcctcccaaagtgcggtggctcacgcttgttgtcccaacactttgggaggcccaggcgggtggatcacgaggtcaggagttcaagaccagcctgggcacgatggtgagagcccgtctctactaagaagacatacaaaaattagcagtggcgagcacctgtcatcctaagctgcgttgggaggctgaggctgggagaatcacgtgaacccagcgggggcagacggtcgcggatgagcgcgagagtgcgaccagtgcacgtccagcctggcgcgagcatgacttgagactccgttctcaaacaacaaaacagaacaggccgggggagccctggcccaccccgggcaccagacgggcaccagggaccccgagcaacacccgagagaaaggagccacagaccagtgaccttccccaggacccggatgctccgac

SEQ ID NO: 555392 - DNA, 141 bp, Homo sapiens
  misc_feature (106)..(107): n is a, c, g, or t
gatgacagttcaagcaggcgtacggtccgatcgtgtcacagctcgtaagaacaagttggctctggtacgacaagctaaaatataaaactattaggagtatgaaacnngatgtctcgtgatctggtgtaccttatccctgtg

SEQ ID NO: 555393 - DNA, 758 bp, Homo sapiens
  misc_feature (10)..(10): n is a, c, g, or t
  misc_feature (266)..(266): n is a, c, g, or t
  misc_feature (440)..(440): n is a, c, g, or t
cctaatttgnctgttctcgtaaatcccctgaacaataaaaaaattccggtgctttgccaatccccaacccttggagggttcccctttttcctccataaaaattctgggaaatttggcaaaaatgcccgttggttaacaaggaggtttccctaaaaaaaaaagtaaaatttcccatgttactttcaaagctgtaaatctttctgaaagccttttttccccaaaaatttagttgatgaggatctggttaaaggttcaaaacagagcgnaaacccaagaagactaaagatcttcttcaggcaaatcagtggcgtctgatgtccctgaggaattaaactttcttggacctaaggcgggattcttctgtccaatttgttccctcttctactcaggtgaaaaagcaatggcaaatccctgcaagagttcccgtcataagccaaatncttagaaattcttggcccagccaaaaaaggaaaaggacccgaattaggcttaaaaaaaaagctctaggtgattgggggaaaggaaagaattccctaaaaatttgtttaggggcccgttgatttgtgtatttttgttatcctttaatttgtaattttcgtttccaaaaccaatattcgtgttggcccaatttttgattgccccaaatgtaaaaagactgatggggaaagtatgatgggttttatttttatatccaatcccccggcatggagaaatatcttttaaaagtgttaaaataaatgttccccctgtatttttta

SEQ ID NO: 555394 - DNA, 513 bp, Homo sapiens
atgaatatcttcgtgcacaggctgtcttcccagatgctcaatgtttattacgtggctagactaccacggagtgtagtggacttctttcccaacctcacaatgaaactactgacatacaaccatctagagggctatcttaactaacatacttgtaacaacaattgtgtctctccggatagagtagttgtgtgatcccctgtacaactgcacactcagccaagggataacacatgtccatcttgtgcccgtattggcggacattatcatctggctcaatattattttgctacatcttgataatgaaaactatagcatcagtgtttcagattcgcgcattatcactgacattctaagcacggtatgaacactctttcagtgtggagccgattcgtatttcctcctttgtgggattgtcagtgtcctttgctctatcttcatggggctcagcataaattctgtatgtagctcggttatatattacagatattaacctggtgtgtgtcatatttgctg

SEQ ID NO: 555395 - DNA, 265 bp, Homo sapiens
caggatccttggcatgggcgtaaacatggactttgctctctcccatactagggcgagatgcatcaggtcaaggaggctaagcacaggtagcgggtggcggagggctggctgagcctccccagcgtccatggagcaggagggcattgccctctggggttggcagctggctgttctctcccccaccctaacaagccacagacaacagactgcctcaccagacgatgacacggggtcagaggaagctggcacaacatatttctcaagg

SEQ ID NO: 555396 - DNA, 291 bp, Homo sapiens
gtaccgttactttgggccatgctgaggttgacatgcctgttaatatctcagcagatatgtctaaaccagcagttggacatatcccagcaaaaaatcagtggttcagatgtcattaatacttgtcacacaaacaaaacttgatgaacttcatggcagcaataaaaatcaaatacacttaactaggaataaacattacagtattagatgagaattagcctaaatgttaaaaaaggaaggctataatcttatctatattaacgcttcttccaaaatgtacgttctctctccact

SEQ ID NO: 555397 - DNA, 606 bp, Homo sapiens
  misc_feature (207)..(207): n is a, c, g, or t
  misc_feature (250)..(250): n is a, c, g, or t
ccccaacctcagggctccagggggttccctggctcctcctcagggcgtgcttcccatttcactggaaagaccttcttgcccaccctgactaaaagtagggggctttttggggcctagcgatctctcctggcctatccgctgccagccttgagccctggctgttctgtggttcctctgctcaccgcccatcagggttcttttagcaantcagagaaaaatgctccccacagcgtccctggcgcaggtgggntggacttctacctgccctcaagggtgtgtatattgtataggggcaactgtatgaaaaattgggcaggagggggccgggcgcggtggctcacgcctgtaatcccagcactttgggaggccgaggcgggtggatctcgaggtcaggagatccattccatcctgggtaacatggtgaaacccccgtctctactaaaaatacaaaaaaaatttagccgggggggggggcgggcacctgtagtcccagtttcttgggagattgaggcaggagaatggtgtgaacccgggagcggaggttccattcaccccagatagtgatattgcagtcccccctgggggacaaaaaaagactccgtctca

SEQ ID NO: 555398 - DNA, 224 bp, Homo sapiens
gcaagtctgcagttaaaagtacatctgatgtattctgcagctatgtaaagtgcatttgacagattcaaaatttctggttctatacaatcatttcaatctcttaggtaaaatccatctgataggattctgaattccttccctgtgttatctcgaattccattagggtttctcacaacagtgattgtgtcttttctgtctgaaaggtcgacatatctccatctctc

SEQ ID NO: 555399 - DNA, 943 bp, Homo sapiens
  misc_feature (41)..(41): n is a, c, g, or t
  misc_feature (46)..(46): n is a, c, g, or t
gccaagaggtgagggtgcacgtcttccctcctgtcccaggnaaccntggtggctgcccccagtctactcattgtgcatgagccctgtctgccagcccaccccaggactgggggcagcaccaggtcccggggagagggatgagccaagaggtgagggtgcacgtcttgcctcctgtcccagctcgcctacctgggcagcacgcagacacccctgtccacgaacgcgcacatgaccagccgtagccacatggcatcacccgacccctaagccccaaccctcactccaccacacccacacgtctcctccctctccctctccaccccccatccttgcatcctctatcccctgacactcaccccccatcatccccagcctcatcctctccactctcccctccccctcacaccccacccctcacaccacaccatcgccgcgcccccgcccctcgcccgccgcgcgctccgcctgccgccagctcgcgccaccacactcgctcctcccgacccacccaacaccacaccacaaccacacgcaccacacctcctccgccgacacacccgcccaccacacagcccaccacaaccgtcagcacgcgaccccgccgccccactcgcgcgcttgccctgtgccgctgctgttctttgtctatcgttctcgtcctctgctctcttatgtcctctcttctctcactccactctcctcactcctgctccacctactgcagccacgcgtccacgctcatcgcgcgcgcagcactctcgacgtctgactgtgagtgcgtccctcacctccgtcgggagcatgatgccgccgcttcgcctgtcctctgcactcgccgtctcgcccccccccactcactgcccaccctccacccccctcaccggcgtccagcacacaccaacacccagcagcctctcacggcgcgcttccgccaccctgtcct

SEQ ID NO: 555400 - DNA, 286 bp, Homo sapiens
  misc_feature (41)..(42): n is a, c, g, or t
tgaggtcctgatgtatcgccacacatgaatgacactacacnnaactctaccacagctgatcacgacaacttccatcatgggataagtgcaggatttatggagaagcagatacgtgacccggaaaaatatcaagaatacagactgattcttttggagacatacaggctatgtgatggcacaaatagatggcctctatgtaggagcaaagaagagggctatattagaagggacaaagcccatgaccctgttccagattcagttcctgaatagtgttggggataacata

SEQ ID NO: 555401 - DNA, 100 bp, Homo sapiens
  misc_feature (87)..(87): n is a, c, g, or t
  misc_feature (95)..(95): n is a, c, g, or t
gatcaccccaccctgtgaagaggcagttggtgctggcagtaagctggtttcctcctctccagggttttcctagtaataaaggtgttnctgttgangccgt

SEQ ID NO: 555402 - DNA, 888 bp, Homo sapiens
  misc_feature (68)..(68): n is a, c, g, or t
ccttcggctccgagctgaccctgatcagggccgagttgtctcggggcgctgcgaggcctccacccggngagggtggttaccgctgaggagctgcagtctctgtcaggatgatagaggtactgacaacaatgatctcagaaattgtacaccaggtgaatgccctgtgggaacaggagtctagatgtcagccaaaggtctgtggttgagactaatgtgagtctgcacacgataatggcctcagaatgatgaaggactaaggggactttgaagtaaaagatcttcttagtctaactcagttcttggggcttgtgacacagagacattttctctagctgtgaatttactgacagattccgttgtctaaaatgaaggtacagcccaagcacctgtggtggtgttggactgagctgttattgtggtgtaaaatcaatagaagaggaacaggaatgtcccatgtggcaatgactgtgatccgaataagtcaatataggtttacggtttcagatttgatgagaatggacaagattgtctgggacaaggtgtgtggaaaggtcaaagctaatatgctttcaatttctggaactgtgttattcactccttcaagagaacttgccctttgaagggaaaatagccttattttggaaagctagaggtcacctggaaggcagtgtcattgcaggacatattttaaaggaaactcgggtggggatggcttcatggctttaaatcccaccgagtgtgttgtgttccgagggagaagttgggacattcacgaatgggggagagacgttggggagggtccaggggggttacatgtgtgccccgtgtagaagagggtggtgtcgggggagagaaaaacatcgggcggtaggacagtcttgtctgaaa

SEQ ID NO: 555403 - DNA, 152 bp, Homo sapiens
gagatatataaggtgagtcagattataacagcagcctattttatgctataactgttcctataccactacttttgtaggtgacctatacttactagaccatttgctatgacaactccctctagagaacttgaaaggtccctgtttcaattttt

SEQ ID NO: 555404 - DNA, 454 bp, Homo sapiens
  misc_feature (68)..(68): n is a, c, g, or t
ctgaaggcaggcagggtaggacaatgtctggaggctcacggtttaatagaataggggtccccaacccntgggctacagaccggtaccagaaccgggccacacagcaggaggtgagcagcaggcgagcaagggaagcttcatctgtatttacagccacccccccattgatcccacagcagcctgagctccgcctcctgtcagatcagtggcggctggagattgtcataggagctggaaccctatggtgaactgcgcatgtgaggaggttgcgcgcttcttttgaaaacctaatgcctgatctgtcgttgttgcccatcacctccagataggactgtctagttgcaggaaaacaagctcagggctcccacggatcctacattactgtgagttgtatatttcactatatgttacaatgtaataataatagaaataaaatgtacataaatgtaaaaaa

SEQ ID NO: 555405 - DNA, 362 bp, Homo sapiens
cccaccggatttctttgtctggttccactggggcgtaatgtagtaccctttatccccttccatcttcattaggcagaattcttcccctagatcctggaatgtttatggaggcaagttttaagacctctagcactgccctagcttactatagccaagatggagtaatttacagcccattaggcccttaaaattttgtctgcttcgggtgttctcttggagttctccagctctctttataagaggtttcaggaggctgggtcattatcttcatctgtaatctccaacactttgggaggtctagacgggtggatcacggttatgtttcgggagttgctgagatccggcctgtgtttcgtattggt

SEQ ID NO: 555406 - DNA, 396 bp, Homo sapiens
ccccattgcccgaccatacactctacgaccggataccaatcgttctgagggtacctttagaagcctccgttacacttttggaggcgaccaccccagtcaaactacccacggtacactgggcacgcaatgcgcgtgttagtagccaaatagtaaaagggccgtatttcaacagcgactccaagacaactggcgttgcccattctcagtctccggcctatcctacacatctaatacccggctacaatataaagctatagtaaaggttcacggggtcttttcgtcccgttgcgggtaatcggcatcttcaccgatactacaatttcaccgagctcgcggttgagacagtgcccagatcgttacaccattcgtgtatggacgggctctggggtaccgagc

SEQ ID NO: 555407 - DNA, 527 bp, Homo sapiens
  misc_feature (178)..(179): n is a, c, g, or t
  misc_feature (206)..(206): n is a, c, g, or t
  misc_feature (260)..(260): n is a, c, g, or t
  misc_feature (298)..(298): n is a, c, g, or t
  misc_feature (307)..(307): n is a, c, g, or t
  misc_feature (366)..(366): n is a, c, g, or t
  misc_feature (407)..(407): n is a, c, g, or t
aggaaaagcaaacacaattcaaacaaacactgtcaaggtgattcaagatcaaatatttacaataatcatatggagtatcagattttttttttccaaatcggataccacaaattacagagctggaaatctcttcttgtggctcctcctatagtgcaaaattgaatatagtcttacatgnngaagacaattatatatgtcaggttccnagatgcaaagaggaaacagccgttacaagggccctaaaggaacacagtgctccntacccatatcatttgggttctacccatatgcgcctggnaagtcctcngaatcccatgtcccgtgcatggtgtaggcgtgtacacattgggtacaggagcaaacctnacggcctggtattctatacgagcatgtcctggttattccanaagagaagggagcaaatctctctgttagtattaaccaattccgcactgggtaaccttgtctagtacagacagcgggggtcatttggacacctggggccacacacaaagaaagcagcccag

SEQ ID NO: 555408 - DNA, 333 bp, Homo sapiens
attcgcggccgcgtcgacatttccggcttctggctctgcgcggccctgggtttcggcatcatcgcgctgaacctgttcctcgccaaaccgctgcttaaactgaagatcttcaccgtgacccaggtcctggagaagcgctacaaccccatggcccgccaggccagcgcggtgatcatgctggcctacgcgctgatgatcggcgtgacctcgatcctcgctatcggcaccgtgctgcaagtgctgttcaacctgccgttctggctctcggtactgctgggcggcggcgtggtggtggtctactcggtcgacgcggccgcgaatttagtagtagta

SEQ ID NO: 555409 - DNA, 649 bp, Homo sapiens
  misc_feature (560)..(560): n is a, c, g, or t
gcaatgtgaaggcgaggacctgtgagaaggatgtcgattttatccagcctcccgtgctcctgaccctcggccctaaggttgggaatgtggagtgtggagaagggcatttctgccatgataaccagacctgttgtaaagacagtgcaggagtctgggcctgctgtccctacctaaagggtgtctgctgtagagatggacgtcactgttgccccggtggcttccactgttcagccaggggaaccaagtgtttgcgaaagaagattcctcgctgggacatgtttttgagggatccggtcccaagaccgctactgtaaggaagggctacagacttaaggaactccacagtcctgggaaccctgttccgagggtacccactactcaggcctccctagcgcctcctcccctaacgtctccccggcctactcatcctgagtcaccctatcaccatgggaggtggagcctcaaactaaaaccttcttttatggaaagaaggctgtggccaaaagccccgtatcaaactgccatttcttccggtttctgtggaccttgtggccaggtgntcttcccgagccacaggtgttctgtgagcttgcttgtgtgtgtgtgcgcgtgtgcgtgtgttgctccaataaagtttgtacactttcaa

SEQ ID NO: 555410 - DNA, 706 bp, Homo sapiens
  misc_feature (27)..(28): n is a, c, g, or t
  misc_feature (85)..(85): n is a, c, g, or t
  misc_feature (112)..(113): n is a, c, g, or t
  misc_feature (213)..(213): n is a, c, g, or t
  misc_feature (232)..(232): n is a, c, g, or t
  misc_feature (252)..(252): n is a, c, g, or t
  misc_feature (303)..(303): n is a, c, g, or t
  misc_feature (318)..(319): n is a, c, g, or t
  misc_feature (340)..(340): n is a, c, g, or t
  misc_feature (406)..(406): n is a, c, g, or t
  misc_feature (433)..(433): n is a, c, g, or t
  misc_feature (464)..(464): n is a, c, g, or t
  misc_feature (579)..(579): n is a, c, g, or t
  misc_feature (626)..(626): n is a, c, g, or t
  misc_feature (628)..(629): n is a, c, g, or t
  misc_feature (683)..(683): n is a, c, g, or t
aagacagcgccccggcggccccagccnncaacagccaggccccccggcccccagcgcccccaggccggcccgagcagcacacagngacccacaggggcaacccggagccccnnacccacgccccaaggaaggggaaagaaacgcgggaggaggaccggacaccaggcccccagggagccggggacgaagacaagaaccgacgccggccggccnggggggggcgggcccggcngcaaaggagccgggcggggncccggaagcggccgcggacccggccccagcgggcggggcggcggcaacccnggggacggcggggcnnccgggcccccccggcccccangccccgccaaggccgggccgcagcggacagcgaacccaaccgggacccacccaagaacccccacanccgcgggggcccccccggagccccccngccgggggcaaggccagccaaggaagggggnccgggggaggagaggcggggaaagggggaggcggagggcacccccccaccgccccccccccccaagccaaagacacaaagaccccagacccaaagccaagcccaccagaggggcngcaggccaggccgggagcccccgggggccaagcaaaggcccggacangnnccccccccgggcccccagcccccgaccccccgccccaagaaggagccggcaggnggaaaaaaacaacaaccaaacca

SEQ ID NO: 555411 - DNA, 331 bp, Homo sapiens
  misc_feature (1)..(1): n is a, c, g, or t
  misc_feature (75)..(75): n is a, c, g, or t
  misc_feature (106)..(106): n is a, c, g, or t
  misc_feature (116)..(116): n is a, c, g, or t
  misc_feature (120)..(120): n is a, c, g, or t
  misc_feature (132)..(132): n is a, c, g, or t
  misc_feature (136)..(136): n is a, c, g, or t
  misc_feature (138)..(138): n is a, c, g, or t
  misc_feature (158)..(158): n is a, c, g, or t
  misc_feature (169)..(169): n is a, c, g, or t
  misc_feature (203)..(203): n is a, c, g, or t
  misc_feature (207)..(207): n is a, c, g, or t
  misc_feature (236)..(236): n is a, c, g, or t
  misc_feature (254)..(254): n is a, c, g, or t
  misc_feature (260)..(260): n is a, c, g, or t
  misc_feature (269)..(269): n is a, c, g, or t
  misc_feature (305)..(305): n is a, c, g, or t
  misc_feature (309)..(310): n is a, c, g, or t
  misc_feature (322)..(323): n is a, c, g, or t
  misc_feature (331)..(331): n is a, c, g, or t
nctggaagttagggtacaaaaggcgcataagcatctacaagtgccaaagcatttatgaccttataattttatagngcaagagaaagggcaaagacagggatacaantaaattatantctnaagggttacatntaanangtccttgattatttgttaanatctgctaganaagtaacagggatgttatcaagcctttctagccntttngggcccaatctgacaccgttgcctttccnggttgtctcctcggcttngcgggngctgggggnggccggcttcttcaaatggctccatggccccctgcnggcnngcatcatcagtnngggtgggn

SEQ ID NO: 555412 - DNA, 1692 bp, Homo sapiens
  misc_feature (1496)..(1496): n is a, c, g, or t
tttggccgactgatcccaagtccccaggagggcttaattttttcttttcaactatccggtcctagcggcttccttggctcttttggcccgtatatgcccgaaagaagccggggcgtgggacagcgggccataacggaagaactaggcgaaggtcttgtaaaatttctttcttcttccctccaggtggatgaactccgaagctcttttctactctttctttatagaagcgttatcacgcggagagcgtggcctagtgaaacgcggttccgcggttcacagcttcgtgggtgtgtgccacagatattacagatattctctcccaacacagaaagtcgggtatctccccttctctgtgagtgggccccgagagaggtctatcctcgtgggagaaacagagaggatatagaatatctgagagatagcgcgagataaatctccctcttcacagacgcgcgactctagcaacaccgatagagtgccccgtgcgccatgggagaaaccctctcgcgtgtgagacaacctgtgtgtaacccgcgcgctctcaccctcgtcgggatatctctccaacaagaaaattattgcgcccctacgactagggggcgcccgcagtggcgccaccatctcatctcttcttgtggtgttggaggaatattcggcgcgccggcggtgcgccaaccctctcgtggtggagatgtcgtctcctctcaccacaagcggggtcttagtgatatccgcccctctgttgggaggcccgtggcggcgcgcgctcgcaaacaccataatacgcggtgtgttggcgtgttacaccccctaggaacacccccgtggtgaggtgggcggccattggtgtgacgcccacccgtagaatataggtgaggcgccccctcggcgtaatggtgggtgcaggcatccccccagaaaacacgcgccagtagtggcgaccagcccacgtagctgtgctcacagcattttcgcgcctccggtgtcgtacggcccgcgcctccttgtggggtcggcattgtttgtcgccgtcctgatggggcctccctcatccttccactcgcttccattagagcaggaggtacattctcctttctgacaacaaggcggcgcgccccctggtcgtctcttggtgtgctgctttagtagagtaccccccaagcgtgtgttttgtgtgggccccccaactcggtcagtcccccccgagttattcgcgtcctcctacagtcgtccccccctcttgctggtatcgcgcgcgaacaatgagtcgggtgcgaggcgcgcggctctcttatcccctagacgcgaaacctcaccgtaagtgtgtcccgtcaaatgtattctcccgtcagcggtagcgtcttggcccccccacagaagtgtgcgtctccgagccatcatcattcactccccgcgtggtgtctcacctccccgcggtagtcgccgtcgtaggttcggtccccaccctcgtcagtcagtaggcagaagtagtctcnccctcgtaagaacagcagttggcactcgtcattctatccacatcaacgcacgcatcctacttacgcacgacgagggtcgtcgccagtcgtcattcatcctctcggcaacgcaccatcatctgtcggcgtgcacgtactgggtgtcgaccacatcactcggtgtcatgtgctgtcctcctcgctggtgtgcgtatca

SEQ ID NO: 555413 - DNA, 218 bp, Homo sapiens
aaccccccccccccccccggggggggggggtgggggacccccccccttgggggcccttttttttttttgggggatttttttttgggttttttagggggggggggggggggggggtttttcccagggggggggggtttaacccccgggggctttttccggttgggggggttcccttggggcctttttttttttttgggggaaaaaaaaaaaccccccca

SEQ ID NO: 555414 - DNA, 102 bp, Homo sapiens
ttcgagaccgactgcgggaagtatcggaggaggacagcagagtcagcagaagttgaacggtgggcccggcggcatcttgtggggcgtggtgttgtacttctg

SEQ ID NO: 555415 - DNA, 703 bp, Homo sapiens
gatcatgagaacgagctggagacaaactcagaagagcaaaacagccagttccagaagcctggagcaggtgaagcgagcgcccaggtccacctcatggtccctcctgcagctacgtggccctgcagatttgagcctaggacaccctgcttttgctgtcatgcgatgccgacatgctgggctcactgggccccaaggaggccaagaaggccttcctggacgttctaccacagcttcctggagcaagacacgcgagttctccgggtgccggtccctcccaacgtcagcctttgaagcttgaccagcactagggctgacctcatctccgaggatgtccagacgtgcaggcttcgtgcacggaggtggtgcaagagcacagcagagtagaccgtggagccaggcatgctggaaggacattccagttccaagcggctcatgggcatgacgccctgggagcagcgagctggcccagctggaggctagggttgggcgggaccgagccagctacgaggcccgggagcggcacgtggcggagcgaatagctcatgcacctggaggagatgcaacataccatctctaccgacgaagaacaatgagtgctgccgtggtcaacgccattggcctgtacatgcgccaccttggggtgcggaccaggagtggacgacaaggaagtcgggggaggaacgtacttccggcaaaaaggtga

SEQ ID NO: 555416 - DNA, 100 bp, Homo sapiens
tgacccatcgagacagtggttcaaaaaaaaaagtactcttcgggctacacactttatcagctttagacctgaaggtccctccactctggggtcacattca

SEQ ID NO: 555417 - DNA, 266 bp, Homo sapiens
cacaggcggggtggtcggtggccacaggaaggaagcagcatctccgcatcgcatcctcgtccattagccagtgggcggttgccactctcctgcccctccctcagagacaccatactgccaaaaacaagacgcgtagcagcacacacttcacaaagccaagcctaggccgcccttagcatcctggttcaaacgggtgcctggtcagaaggccagccgcccacttcccgtttcctctttcactgaggagaagctgatccagtttccgg

SEQ ID NO: 555418 - DNA, 530 bp, Homo sapiens
agcggattctcctgtctcctcccaggtagctggggttacaggtgtgcggcaccacgcctggctaatttttttatttttagtggagatgggtttcatcatgttggccaggctggtctcgaaagcctgacctcaggtgatccgcccaccttggcctcccaaagtgtggggagccactgtcccggcatattattacttttagagacgaggtcttgctttgttttccaggctggagtacagtggctcaatcatagctcactgcagtcctagcctgggtgaacagggcaagatcctgtctcaaaaaaaaaacaatttagattggaacagtttcggtgaggtgcagtttgcttcgtctcatatttcacttttttaacaaagaacaagcagcgggagcgcggcggacctcatggcctgtaatccactgaggcttgggagaggccaaggcgggtgcacgattcaccttgagtgtcaggaagttcgagacacaggcctgaccagacattggagaaacctcgatctcatactaaaaacaa

SEQ ID NO: 555419 - DNA, 1350 bp, Homo sapiens
gctcaccttcattcgtgcagtgggaagccatgactctttcttttggaacagtgttatcacccagatgtttcgaacactaaatagagaagaaattcctgttaatgatggaatagagctattgccgcatggttctgcaacttatgaataccaaggagtcccctcatccatgtcctgcgatcctatactaagtgtcatcatgcacatctttccattttgtcacactacagaccagagattccatgccccacggtcatgtctctaagactattcttcactctgtcactatttgaaaacatgttgaagaaagtaaggcaccccagaacccgggacagctgaggaactgtgcaggaggcatgcatagataacatccagtcactccaagactgtgtcgatgaacttaccaacacagatagttgcatgcgccaattgttgacccatgcatatcatacaccatgtagcaagcacactcctatacacaaatgaggctactcgctgcacaccaacatggaagcaaagctgtgccccatccaatgggacaacgccccctgaagaccctccactacaacgccaaaccaaagggcaaacgaccaccacccgacgcagatccagcacagcgctgataaccataacaaagcgagactgaaatggagcacccaggaggaacacaacgacaatcaagcagcaagcacaacagacccacatccacacgacaccagcaggacaagacaccacgagcatggtaacgacattggagaacaagacccacgccgtacgttgataggcagcaaacagaaactcaaataagcccaaatgcaagcgcaaccaccaagcggcaccgcaagaagcgaccacgcacagcgagcgatagacaaacacagggcaccagcacgcaaaccgacgggcgagacaaacagaaggctaggggccaagaggacgaaccaacacacccgcttcgatcgcgccccctcgtgcaccgatggtaccgctaggcacgccacgcgaagtggcactagcagctaaagagaacgtgatatccgaagagcagtagacggcggcacggtcaccacgcacgtgctgctggtagcgcccaggccagtcacgaccgccgtacgcccattgcatgtgcccccccacaaaacagtttaggctagctatagacctcgtatggacgagacagcagagtagcatctgattctctcgctacaactcacttctgcgggtgttatactcgaccgcactatctcgatgttctgctccacgcactcacgggcggagtcatgctaattaagcagaagcaaaacggcgtctgattgctctactagaaccactcgtttgcttgttctaccctgg

SEQ ID NO: 555420 - DNA, 360 bp, Homo sapiens
tccctcagcccaggcagacgggagcaggtttttggccagggtaaacaacaacaaacaacagcagggaagccattttccctgcatcctccctgcagtaaccccggccaggcccttaggaggaacagtggccgggagtgtccaaaaatatcctgtccctggatggaaaataggtctcgtttggatttttttttttttttttttcccggggtagggaaatatttttttatttcacagacaggttttaactcaacccaggtgggaaatggggtccctgtccctccccaagcccaaagcccaaaaatgaggccgtttacatggggagtttccgggctggtgttttagtccttaaaaaaatactca

SEQ ID NO: 555421 - DNA, 257 bp, Homo sapiens
gtccatcaatactatgctcggctatagtacggtcaaccaaggtggcaaagcagacgggtgcgattgcctttggttcccatgatatcttattttggttagatattttcgtgttgcttggcttaatattcgcacggaaaatcaagttcgatccacgaccattaccccgttttcaaccctttaaatcggctaacagttcggtgtttgtactcatcgccaatttgttttaaaccctattatctaccacaactttaaaccac

SEQ ID NO: 555422 - DNA, 138 bp, Homo sapiens
ccggtcatcttctgaatccgtatcttattccatacgaatcccatctctctgcccctatcatcctgatcagtcctagatcggtgtctacctctgtaatctgattgtcgcgtatccctgtccctaatgtctatctcagaa

SEQ ID NO: 555423 - DNA, 384 bp, Homo sapiens
acgcgaggagaataacccgcgtctcgtgtccctcacaggaggcctgaggacgctcccagcttatggatgtcactattcggaggcgagaggctgcaggcggggtcctaggagcccctgcttctccaggcctcttgcctttaagctctttctggaactggattgcctcccactcggactgcgaggagaactaccgcaggtcttgtgtccctcacagtccgcctgaggagtcccagcttatggcatgtcactatcggaggctgagaggcttgccggccgggccctaggagccccttcttctccgcgcctcttggccttttactctttctggactggatgggctcccactccgactgcgaggagcctagcccaggtcttgtgtccctc

SEQ ID NO: 555424 - DNA, 155 bp, Homo sapiens
tcatcagagtgttaacaatccagctcttgtagaagaatattagtatccaagtcctgaattggtacctccctcggagcgagataacttcgtaagaaagaagatcctgccaagcaggaagaattgctgctgaaagcaacatggcaggacttaaagga

SEQ ID NO: 555425 - DNA, 181 bp, Homo sapiens
ccgagatctcatgatcgttcttctctcactagcaaactcaagaatcttttacacccacatagtggtccctgtgtactcctatgatgctgctggtttgtaccaggcagtggttcgaagcagaagaggataatgatactgaaagtggtgctgcataagacggtgaagaattagatacagaaga

SEQ ID NO: 555426 - DNA, 223 bp, Homo sapiens
aatcgagctggtccatcatttacacaatcagaaagttgcttttattgttatgttgttaagaaacaagatcttgctcctgtcacccaggctggagtacagtggcacaatcatagctcactataacctccaactcctggagtcaactcctcctcctcagctccccaagtagctagaactacagacacacactgtccagtctcattgatatttgtgtaaactgatt

SEQ ID NO: 555427 - DNA, 111 bp, Homo sapiens
  misc_feature (51)..(51): n is a, c, g, or t
gcactttaggggcccctacggccggggggatcggcctccctcccccacgantcagcaatacccgcccccccggctgtgatgctccaataaacttttttatgcttttgcgga

SEQ ID NO: 555428 - DNA, 295 bp, Homo sapiens
gagtaggagctagaagatgagatttggatggggacacagagccaaaccatgtcatttcactccagcccctcccaaatctcatatctgcatgtttcaaaaccagtcatgccttcccaacagtcccccaaaatgtcaactctttttagcattaactcaaaagtccacagtccaaagtttcatctgagacaaggcaagtcccttccacctatgaccctgtaaaatcaaaatcaagttagttacttcctagatacaatggggttacaggggtacagggattgggtaaacgcagccattg

SEQ ID NO: 555429 - DNA, 373 bp, Homo sapiens
catacaggccactccctcgcccagggctcccgattccttacagagtgcaagagatcagctcccgagaagtgatcagcctcaagatcaaataacagtggctaccagttcttgctccctgcactcagctacctatttatttatgagcactgggtgaatcacccgaagcatagaacgggttactctagaagctagctcccggcagcatgtcagcaaatgaacaggacagcgagctggcctctggagccttggaagattctcacctccaagcagctgcagtatttgactcgaccttggaacactggccctgagactcaggggtttaacatttcacctccctgaattcccatccagaaatctcaggcgagcagatata

SEQ ID NO: 555430 - DNA, 1209 bp, Homo sapiens
tcgtctctttttttaatgctgctatttgcccttgtggcgcaggcgttgtttgtctatgttttctctgttttttctctcgtgtgctcttttttttgtggttccttgttttttctttacttcgtcgtttcttttttgtgtttatcggttttatgttaatcttcctcgtgttctacttgtctgactgcttcgggtttcttaggttacaattgcgtgccttctttggcctttgctgcttttctccgtttgtctttgtgaatttccggctttaggtccctttggctttctagatctctggtgttttatatgtcccatttttgagctggttcctgtttttttacccctgtttgttctgttggcaatgtcgttcttgaatattgatctttaaagaattccaatattctcgtggtactacttgtgttactaccctgttggtgtgtcccccgcttagctattgattcgctgtttacggcctgtatgcctagttcgtcctgcctctgcttgttccccttcgggtatcttgtagctggttgttcgcgctattcttgtcttgcgatcatttctgcatggtcacactagatgatgacccgcaactcgcttgtccctgggtcaccctgcattccatagccatgtgcttgtccctgtgctccctacggtttcccaggggccaggctgggagcccacagccaccccactatgccgcaggccgccctaccctaccttcagtcagcctatgggactcagggcccctatctgtccatcggtcgccgtgtggccagagtgggtccgtcgtccccaacactcgtgctcgctcagacactttgtcaggatgtctggggcctcaccagcaggagcgcgtgcaagccgggcaggcggtccacctagacccacagcccctcgggagcaccccacctctgtgtgtgatgtagctttctctccctcagcctgcaagggtccgatttgccatcttatataaagactaacctctacttttttctttatgatattttgagtaaacaactgaagactggagactgattaaactgtatcttggggtaacctctagaactggtctatcttggtgtcgtggaacctcttacagcaattcaatacacgaattacgtaatcaactgtctcttgatacttaggaatatttcacgcttttatttcgaccaccagcataaatcataggctactagactattcaacctt

SEQ ID NO: 555431 - DNA, 364 bp, Homo sapiens
  misc_feature (5)..(5): n is a, c, g, or t
tcatntaaaaggcccctagagagggatatgggctgtcctacaaggcccaagggagagaggcctcagaagaaacaacccagcagatacccttgatgttgcacttcttgcctcccagaactgtgaggaaataaatctctgttgtttaagccaacccagtctgtgatactttgttacagcagccctagcaaaccaagagtgagccaccttggaagtagatcctgcagtcccagtcaaagcttcggatgactgaaactttggccaattatctgactgccatcagagaacccaagccagaactacccagctaagctacttctaaattcctgacccacagaaactatgtgaattaataaatgtttcttct

SEQ ID NO: 555432 - DNA, 362 bp, Homo sapiens
  misc_feature (112)..(112): n is a, c, g, or t
  misc_feature (120)..(120): n is a, c, g, or t
  misc_feature (123)..(123): n is a, c, g, or t
  misc_feature (139)..(139): n is a, c, g, or t
  misc_feature (144)..(144): n is a, c, g, or t
  misc_feature (150)..(150): n is a, c, g, or t
  misc_feature (152)..(152): n is a, c, g, or t
  misc_feature (156)..(156): n is a, c, g, or t
  misc_feature (161)..(161): n is a, c, g, or t
  misc_feature (184)..(185): n is a, c, g, or t
  misc_feature (195)..(195): n is a, c, g, or t
  misc_feature (208)..(208): n is a, c, g, or t
  misc_feature (214)..(214): n is a, c, g, or t
  misc_feature (218)..(218): n is a, c, g, or t
  misc_feature (259)..(259): n is a, c, g, or t
  misc_feature (301)..(301): n is a, c, g, or t
  misc_feature (305)..(305): n is a, c, g, or t
  misc_feature (320)..(320): n is a, c, g, or t
  misc_feature (332)..(332): n is a, c, g, or t
tgagccctacccagcacctcagtgaagggggcctgcttgctttttattttggtcccggatcctggggtggggcaaaaatattttttgggctggggtaggaggaaggttgttncagccatntcngctgctgtaccctagnaatangggganangganatggngtcccatgcccaaatgataaacnntgagctgccnaaacatttttttnaatacncccnaggagcccaagggggaagggcaatgcctacccccagggttntttttggggagggagggctgggcatagggacatattttttanaatntattttattaactgncctgttttgggncctgttacccaaaaaaaaaatgtttttaga

SEQ ID NO: 555433 - DNA, 763 bp, Homo sapiens
gctcaggcttcagacagatggggcccaccctggcggctgctgcccgacgtgccctccctgatggagacactcagctacagctaatgctacgatggagaatcatgacaggcccgtacttccgctaccgcacctacctggtcctggctggagcgagcccttcccgcggggtcgagttgcccaggccgtgcggctccctgtctgcgcctgcgtccgtggccggtccctcgcttcttcggcctgcatgttcctgactctccgtctcaccttcttcccgctggaggccgtgcgcgaggacgccttctaacgtcccggccgttggccggcccgacctcttctacatgagtccccgtcattcttcggacttccgtgatgacgtcattctacgctggcctggattgccggcgagttgctggattgcagttgtgcagccggacttttggcgtgccttacctcgcagtggtccgtcccaatagaccacgtgcgcccggaaggtcggggccgcggaccctgtcctagatggccgaactccgcctcaaggcaggattccctcgcataacacggactgagacgttcccattgggtaggatattgaacctaattgcaagatcccgatactcgatatacaactacggactggcgaagcgaggacaacaggaatttcctgccgatgccgggatgcgcagaatggcaattgcgagtaactgggaaacattgaccggtgccaagtggatgagctgggccgcaagaactatactacaaagga

SEQ ID NO: 555434 - DNA, 908 bp, Homo sapiens
cggggacacctcccatttcagttacctttgtgaatagtgcccgaaatatttatcttccctgagttggagccatagacgccatttaacatttacacggtctgttgctcttattgtttcatgtttgcctttgtaagcaacctagtcgacgatatggccggtatttctttgtggcataggatacactagatgtgataagcttgtggagaaattcctgctactgaacaaatggttttccacaaactttagcaacctcgtcttatcttccgtagagccttaatccacaccattaggttaggcaacatttatttgatagcactacggatgtacacgatgcgtttcgctctaaagacagatgcacctacattagagacttaccagggtgtctggagcgcaattcaacgtagtcgcatttctacagcaatttgacgatatggaagccgtatactatgctgacagataacatttgttactggagattttactactctagctgatcccaaattgaaacgacgctactgagagattttaaaagcaaacttgaagtatccgtaatctacttcagagtatgtgggtgagacgcagccaatcaggacaaataaagattaaaagggaggactatgaatctgcttccaataagaggttgccatgtgctagaactccaaagtattgctagatcgtgaaactgaaggcgtgaagatttatatatgtggatgtaagttattagtcccagtagatatcactgagtagaatacgtgtataaagatataagcacccaccattataaaagtagtacatgttcattttagcttaattagaaaaataccagaaagatgtaagaagtcatctgtgccctcacaaagagaaccaatatatgtaaccacataaacattttgttcatgatgtgcata

SEQ ID NO: 555435 - DNA, 432 bp, Homo sapiens
ttacagaggtgtatatatatggggtacatgaaatatttgatacaggcatgcaatgcataataatcacatcatggaaaacggggtatccatcctctcaagcatttatcctttatgttgaaaacaatcctattgtattcttttaattatttttaaatgtacaattaaattattttgactgtagtcaccctgttgtgctatcaaatactaggtctcattcattctgttttttttttgtatccattaaccatccccactcgctgacacccccagttcccaccaccattcccagcctctgttaaccatccttctactctccagctccctgagtccagttgtttaatttttaaaatcccacaaataattgagaacatgaatgtttgtcattctgtccctggccggcaaattcttgatatctaatagcaaagcttccca

SEQ ID NO: 555436 - DNA, 84 bp, Homo sapiens
tccgacataccgaggaccaactggtctacatggatgccctgaaacatgcaattctttcttccaaaataaaacattaaatagaaa

SEQ ID NO: 555437 - DNA, 786 bp, Homo sapiens
cgggggcaattttttccccccctgtatttaggggaaaatgttgtcccgagatcaagactatgcgcgcgttgccttcgtaaaagtcttcaccctttggagggaatcaaataatgcttcgcgccacgtatgaccagcgaggtgaaggacccctctccaacaagtccctacatggcatcactaggtgatggtgtcttctttaccatcgcgaccccacaactggatgtaaactctccgtaattaatgagggacaaccactcccgttaacatggaaaaattgtgaattatcctgttcgtgacatactcaaacctcgttgttcttccccagcaggtttcccactcctctatgaactcctcgggtgtccacacgttataacacgcgggagatcacattctttccccaccgcgtctttatcaaagagaggaggagcagaaaaagcacttctctggtggttgcttgggcgcgagcgtacaatatacgctctctgtcggctatccttaaatatatccggaaagtatcataaagcttggctcacccccctgccggaaaatgacttcacggccccacattcactcaacgcatcgcctggtaattacaggtcgattgtaccggggtattcagctaggtgtagagtgaaaacaatccgggctaggaagaaatctggtgtctattttggaagtaactcgccaccacatctacttcgccctactctctaggaaggtttatgaccccctttgttccagactcacttttaaagattggaggagataaaaacccccaacaaaaca

SEQ ID NO: 555438 - DNA, 214 bp, Homo sapiens
ctcccgtgatagtgtcgagtaacgtcgggcattctggataggccgagcaagtgtcgtgggaagaaaattagattatacgccgataaatatgatagtgcaatggatttaggagtaagtaagatctagaggtgtagcctgacaaataagggaaatcagtgcatgaagcctcctatgctggcaacaacagctcctcttgataggacactcatggaag

SEQ ID NO: 555439 - DNA, 404 bp, Homo sapiens
catgtgtggttggaggggaagagataccatgtatatacctttttcttttcactcttcgaaaatgtggaaagtgggccgggcatgttggctcacacctgtaatgccagcactatgagaggctgaagtcaggaattcgagaccagcctgaccaacacggcaaaacccaatctctactaaaaatatttaaaaatcagctgggcatggtggcatgcgcctgtagtcccagctactcaggaggctgaggcaggagaatcactgtcccagctactcgggaggctgaggcaggagaatcactggaacccgtgaggcagagcatgcagtgagccaagatcacgccactgcactccagcctgggcgactccatctcacacacacccacaaaaaacctacgttaacccgagcgc

SEQ ID NO: 555440 - DNA, 666 bp, Homo sapiens
  misc_feature (413)..(413): n is a, c, g, or t
ttccggggggagaaaaaaaaaaaaaaaaaaaaaaaaacaaaaacatgggtgcggcgcgcgcgccggggcccgcggaaaaacgcttcgctagaaacacacacatcgcggtgggcgcgcgcggcgggcgcccagagagagggataaggagaaccacacgtggggccatatagcgcgggtgtccctatagagagagagatctcgctggggccagagagacaataggggcgcggggagattctcctcaccacatatatagaaacaaagcgcgcccgcggggggggaaaccgcgagagagcggctctcggagagacagaaaacctctcagagagatgggagagtctccgtgagaggagagctctaaatatcagaggggcgcgactcttatatctaacacagagagagagagctctcanagagagcgagcaggcgcgtcgcgagaatttattctcacaaaatattatatacgcgcgcccgccgggcagcggggggggggaggagacacagagcgaggagcgagacacagagacgcaggcacggagacgacccaacaaacacaaagaaaacaaaggaggcaccgacgcaccaagagcaagaagaacaaaagaagaagacaagccgacagcacaaaccaacacacgcaaagcaccaccaagaagaggaggcggt

SEQ ID NO: 555441 - DNA, 525 bp, Homo sapiens
  misc_feature (89)..(89): n is a, c, g, or t
  misc_feature (221)..(221): n is a, c, g, or t
  misc_feature (446)..(446): n is a, c, g, or t
ccagccaagtgagacacatggcacagtcaagtggaggagtgagttgatttggaagcttgtttaactgaacccttgagagacttctcagncatgagctaaatgtcccctgtgcgggcaagaaagagaacacagctcctcccccgactaaggtggaaggctgggccaggcacccaagcatgttgtgtgcacgttggtacctaggtaggtattctactaggttnagcaagtaccagtttttttttctttccacacacacacaccgaggtggtggcacccccgcccgcgattttattttctcgcccccgaaacaacacgcgtcttcttctcggggggggggggccccccccacacgcactttctttgtgtggggggggcaaaaacaccgagcaacaccgggtttttttcttaatttctattggcgcgtttaacgtatgtcgtattaaggnaccagttttagacttctctaattggttattaaggtagcaaggtttcactctttagtaggggcgcccccattgggggctt

SEQ ID NO: 555442 - DNA, 1452 bp, Homo sapiens
gcaagaacaccaatgatgccaacatcctgccagatcattattccacagaaacaagtcaatcgaaagtcagatatctacgtctgcatgcatctccttatgcgccaccaaggtagcagccacaagggcaagtcacatcgctcatagttcagtcacacactgtggcaaacccaaggagcctgagcacaggcaacatccagaccgagctctgtgagctctaggaaccaattggaacagcaacattatgttcagcatccagtgacctccgtggtaccaaaaagactatgggaacagcaaagccagcatctttatttacccgcgacgatatgatgccaccacatcatttagcagcaaacacgtagtgcatgcaccatctaagaaaccatctcatcacagcaggcatgcaccaggcatccagcagatccgcacttaggcaggcaacatgcacagccgccaagcaagcaatgcacatactatggagagaacgactcacaccagccaggagcactggccgatacactggtaactaacaggcaccagcatcagcacaaacaaagcaggcgacaacctacgtgcccataatcaccggacaactaccaaccacactagggcacagggcacgatggcacacgaaggagtacaaaataggaacaacaacaggggaacgaaagacagaatagaaaacagaagcccgacacgcaggcagcaaggatagacacactgacagacgcccacatagaccacacccgagagacgcaacaaagacatacacacaacaagcctacaacaacagctggggcaagctgggacaataataccccgcaaacatctgggagcacaggaacgacccagagaattgagacaggacgacgcaagagagacaaaagacacacaaacgtggagccaagacacacaagagagtgagagcaacacagcggggtagcaaggatctcaacgaccaaaagaagataaggggcaaaagaaaccgaggaaacaaaagaccaacacagtatcgcgcaagacacagcgacgaagagacgcacgcaaggcacataccgcacaagcacagagagtgacgagcgacaacaaaacgcccaagggcgacacgcagatgatgaacagacaaagaacaaccgcatggcgaccagcccaaaagaaagccaggcagaagtgcaagagatgccaacaaaaagagacccacaagcaaggcagaagcggagcaagagggaaaagaagtttcacaaacacagtggaacacaaccaaccaagacacgcagaaacagggaagcaaagacagagccacaagacagcatctcgcaagcagtcaacagaaagcaacggaagcgaaccacaaagcaaaaacaaaagaacatcgacaggacgcccacacactgagataagaacagaaaagctacagcagaaagtcgcacgacaaacaaagaagaaaagagaacc

SEQ ID NO: 555443 - DNA, 287 bp, Homo sapiens
  misc_feature (4)..(4): n is a, c, g, or t
  misc_feature (18)..(18): n is a, c, g, or t
  misc_feature (25)..(25): n is a, c, g, or t
  misc_feature (44)..(44): n is a, c, g, or t
  misc_feature (75)..(75): n is a, c, g, or t
  misc_feature (90)..(90): n is a, c, g, or t
  misc_feature (117)..(117): n is a, c, g, or t
  misc_feature (120)..(122): n is a, c, g, or t
  misc_feature (148)..(148): n is a, c, g, or t
  misc_feature (176)..(176): n is a, c, g, or t
  misc_feature (200)..(200): n is a, c, g, or t
  misc_feature (269)..(270): n is a, c, g, or t
aaanatggttcaaaatanaaaaatnaataaatgtgataaccccncattaacagaatgatgggcaaaaaccatatnccaaaccaaaaaaanaaaaggcacccatatcagataacaagnagnnnaattaactatttgcagaggacatggncttatacatacaaaaccctgaaaactgnacacacacacacaaaaactggagntctaataaacaaattcagtaaagttgcaggattcaaatcaacatacaaaaagcagttgtgtttctgtannccaacaataaactatcc

SEQ ID NO: 555444 - DNA, 125 bp, Homo sapiens
ctccttttatccaagcagtcgcatctcatagacacgttctctggtcgtgaacctcaatctaccacaagaaaagtgtccagtgaccagttatttctacgtggcgggagaagtagtagaagctgagc

SEQ ID NO: 555445 - DNA, 171 bp, Homo sapiens
accacacctagtagaaatgtgtgtgagaacagaaggtgttccaccgagattcacatccagattggacaggttgtgttgattgaaggagatgatgtataacacccgtatgttgctgaattgcttgtagttgttcgaagatgactctgatcctcctccttagaaacgtgctct

SEQ ID NO: 555446 - DNA, 416 bp, Homo sapiens
  misc_feature (23)..(23): n is a, c, g, or t
  misc_feature (65)..(65): n is a, c, g, or t
  misc_feature (95)..(95): n is a, c, g, or t
  misc_feature (145)..(145): n is a, c, g, or t
  misc_feature (175)..(175): n is a, c, g, or t
  misc_feature (187)..(187): n is a, c, g, or t
  misc_feature (192)..(192): n is a, c, g, or t
  misc_feature (194)..(194): n is a, c, g, or t
  misc_feature (264)..(264): n is a, c, g, or t
  misc_feature (324)..(324): n is a, c, g, or t
  misc_feature (338)..(338): n is a, c, g, or t
  misc_feature (341)..(342): n is a, c, g, or t
  misc_feature (370)..(370): n is a, c, g, or t
cggccagtgtgtggaggtgagcnccgggattgccggcattcccgcttctgctggttgcttcatgntgcaggctgcggccgtaagccctcgctcgnattggtggcgctgaggtgccggggcagcaagtaaaatgtcgtcgggcctncgcgccgctgacttcccccgctggaaggcnaaatctcggagnaactnangcgccgggaacggctgcagaaaaaggcgttcgaggagataatcctgaagtataaaaaattgctggaaaantaagatcttcattcagtgttggcccagaaactaaaggctgaaaagcatgaagtaacaaanaggaaagaaataantannggaaatgatggcacatggaatgaaaatnagctaaaagaaatggcccaactgaggattaagcaccaagaggaact

SEQ ID NO: 555447 - DNA, 566 bp, Homo sapiens
  misc_feature (479)..(479): n is a, c, g, or t
  misc_feature (488)..(488): n is a, c, g, or t
  misc_feature (505)..(505): n is a, c, g, or t
  misc_feature (531)..(531): n is a, c, g, or t
aatgctctctttctccgaagatttgccatgacctctgccttgggaaaaaatatttgagattttaaaatttttattctgtagtacaaaaattatgtttttcgttaattggtcctgtggaattggaaggaaatttaatatttattgactctactttggtattattttcagagtgagaagtaactttaagtgtattaaaatttcattcatttttgcatgaaccaaactttccctacacatcgctgtccttgactgtccagagtaaacatgtctaactctggaatgtttcatttccaataaaagtattcagcctgtcattttgggcctaagtaaaatgggataaattagcaatctgaagttaggatcctagccacagagggccatgtctcatttctggtttaagtgcacccctcatccccagcccttaccttcttctttctcttaaggattgagacaatcctcttggtgctcttggtgcaggntgcatcttnggtcacctctttacatngaaggggccacaaacttgggtaaatngggtgggcctggagatggggttggtactaggtaat

SEQ ID NO: 555448 - DNA, 299 bp, Homo sapiens
gaaatccccccttttgaagggcccctttttatgagcccaaagtttgtcctttaaaagttcattttgagggaaaaacctgtaaaataatttgaaaaaaagggataggacccttaaaaaaacccttaaaactgattgttgggaaaggggggaatttgttaaaaagaggaactttgaaaaagtttttcatgccccggccaaaggtattccctagatttttacggagggatcggcttttcctttggaatttggagttcccaaaaaacttttttttaaaaaaaaaaagcccccccttcccctta

SEQ ID NO: 555449 - DNA, 312 bp, Homo sapiens
gaaggatccccctaaaagctacgatcccctcctccaagcctcagaattttcacgaagcaccattcacaatctccgacggagtgtattgatccactttactttgtggctacaggatttcacgggttgcacgtaatcatcgtgatctactattacctagcagtgtgcttactacgacaactaaaattccacttacacatccaaccaccacttcggctttgaagccgcagcctgatactgacacttcgtagatctagtttgactattcctttacgtatcaatctattgatgaggatcctactcttttagtattaa

SEQ ID NO: 555450 - DNA, 280 bp, Homo sapiens
  misc_feature (40)..(40): n is a, c, g, or t
  misc_feature (64)..(64): n is a, c, g, or t
  misc_feature (90)..(90): n is a, c, g, or t
  misc_feature (98)..(98): n is a, c, g, or t
  misc_feature (107)..(107): n is a, c, g, or t
  misc_feature (110)..(110): n is a, c, g, or t
  misc_feature (118)..(118): n is a, c, g, or t
  misc_feature (128)..(128): n is a, c, g, or t
  misc_feature (133)..(133): n is a, c, g, or t
  misc_feature (150)..(150): n is a, c, g, or t
  misc_feature (167)..(167): n is a, c, g, or t
  misc_feature (172)..(172): n is a, c, g, or t
  misc_feature (175)..(175): n is a, c, g, or t
  misc_feature (184)..(184): n is a, c, g, or t
  misc_feature (202)..(202): n is a, c, g, or t
  misc_feature (220)..(220): n is a, c, g, or t
  misc_feature (228)..(228): n is a, c, g, or t
  misc_feature (230)..(230): n is a, c, g, or t
  misc_feature (257)..(257): n is a, c, g, or t
aaaaaaatatatatttccttatgcatgctcgatgcatttncgtccggaaaaaaatgttctctanagaaactacccgtgtgtaaaaaaaanattggcgnaaaatggcnacngtgatggnaacagtgtcntaggnagatgcagcttggacgngaggtaaattgaatacnttacnacngtggtttanagtttgcgttaatgacgntgtatgtaaaaggtcacntgattgcngnaattttgtattcattatggtttccggnataaatgtacgttgatgacgatt

SEQ ID NO: 555451 - DNA, 863 bp, Homo sapiens
gtgagctagtgctgccatcggtgccggtgcagatacggggttgctcttgtgctcataagaggggcttcgctggcagtctgaacggtcaacgcttgaacaatcgcggtaaaagatattgcttcgcgtgggtgacgcggtatcagctgcccaaggggcgttcgtaacgggaatgccgaagcagtgggaaaaagggagcggtggcggaagacggggatgagctcaggacagagccagaggccaagaagagtaagacggcgcaagagaaaaatgacaaagacggcagcaggagagggccctagctccttgtatgaggaccccccatgatcagaaaaccctcacccagtggcaaacctgccacactcaagatctgctcttgggaatgtggactgggcttcgacgccctggtattagcgaatgaacacggattaatgattgtgcgtaagagggacagaagccccagcatagtactgtgccttcaagagaacaaaatgttcagagaacaaaagtaccatgctgaacttcagtgagctggctggactctctcatcacttactggtcatgctccttcggacaaggagagggtacagtggcgtgggcctgctttccccgctcaggtgcccatctcacaagttttcttaccggtcaataggctgatgaggagacatgactcaggaatgtccggggtgatgtgtggctgaattttgactcctttgtgctgggtaaacagggaatattgtaccttagtgcagggcgaggtttggtacgactggagtacggcaagggcgggatgcaggcttggcgcagttcctgaagggctggttccgaaagccctgggtgtgaggaaactcgagtggcatggagac

SEQ ID NO: 555452 - DNA, 489 bp, Homo sapiens
taattacccggctaattctaatttctgtattttttgtagatatggggttttgtcatgttacccaggctggtcttgaactcctgagcttaggtgacccacctgagttggcctgtcaaagtgctgggattacaggtgtgagccaccacacctggcccttttcttttcttttcttttcttttcttttcttttcttttctcttttcttttcttttctttctttcgttcagggtctcactctgttgcccaggctggagtgcagtggtcttatcatgactaatttcaacctggaactcttgagctcaagcgttcctcctgctacagcctcccaaatagctgagaccgcaggtgtgtgccaccatgcccagcttttaaaaaaaaaaaaaactttggtaaagactggattttgccatgttgcccaggttggtcttgaactcctggcctcaagcaattcttcctcatcagcctccctaagtgctgagattacaggcag

SEQ ID NO: 555453 - DNA, 109 bp, Homo sapiens
attactgacagaaggggtagggggtgggcgctactttgtgcccgtgatagcttctctgctaaataggagtccccccccagcaggactttgaagccccattaatgggatt

SEQ ID NO: 555454 - DNA, 450 bp, Homo sapiens
aaaggacatacatataatctactcacattccactcatctccctaagtcatgtaacactgcaaaagcaatgtgtaaccctggctgggtcgccatttcccagcaaaacttataaactatacaaagaggcatgaaactatggttatcagctggccatatctgtcacagatgacaataagtaccaaagacaaaacagaaaaaaagggacagaaaatacaagggagggcattacataatggtaaagagttcaattcaacaagaagacttaactatcctaaatatatatgcacctaacacaagagcgcacagattcataaagtaagttcttagagacttacaaagagacttagatagccacataataatagtaggagacttcaacattttgctgacagtattacatgaattatcagggcagaaaactaacaaagatagtaaggacctcaacttgac

SEQ ID NO: 555455 - DNA, 214 bp, Homo sapiens
acggggtttcagcatgttggctaggccggtctctcctgacctcagggtgatcagcccccctcggcctcacaaagtgctgggattacaggcgtgagcccccttgcccagcccccatcatacagtttgaaatgaaactttgccccaaccagcctttgctgtagcacacacatatatccctgaacctgtttgaaataaagttttttttctttttcca

SEQ ID NO: 555456 - DNA, 197 bp, Homo sapiens
gtgcctactactgggaatcccgatagctgtaagtcttttggttttcctttcttattgaccagcatccttggagctctagatctaggattcgggggatattctaagcgcggagcttgagagatctttatggttgggtatgtatgtgtatgggcgtgttggccccacacacctgcagcaaagacttattgtgatttggt

SEQ ID NO: 555457 - DNA, 1226 bp, Homo sapiens
ggggacagatgccctgtgatggccgcggcctgggctcggcgggccaccccgtgtggtgccctggtgccatggcatgtgctgcctgtctgaaggtgaactgaacttctgctgatggagctgcatgcgcctgctggcctgtgacactcgcatggccgtcaatggcctgagcttgctgagcggctgcagtgcggcgttggatggcctgaggagcctgacgacgtagcgcggagctcgacgccgacgacgaaccgtgggctgacccgggcacatcacagcgacggagatgccatggacaatattaccaggcagaaccaattctacgatacccaagtcactcaacacaacgaaacacgagtcaggctacgagacggagaccactggcacacatggcagcagcagcaggcctatcgtccagaaatgaccgacagcagactgaacgcaccggagcacccaccagcattcctcccgcctgacagcttctcaactcaagccagacaggcagcaattccagagtcgcaaagaggccttatgacgcaaaaccggggcacgggggtactttgagcacccgcgaggatacgcgaggggccgctcctcctcagcctcctgctgacgacggcactcacgactgactttgatgagtaccctcgcttgctatcgaccacctataacctggcacctccacttcaaggtgggcccgagaatcggcagtaggtggctactccgcgtcaccatttgagcgtgcttagcataacctgttggtccacgggagccctgtgcgccagcgtactcgggttcccgcaatgtgggccgcgtgaatgcctcgaggatgacaactccactgtacggacacatcttcggcgacatcgcgatcgcttccagccttactggagcccctgcaccgccccacggctggaccgcaattcgcgttcgtccccttgcacatctggagggaccgcagctaaggaaaagaagacttctacaacactgtgcctattgggaggcgccgctgtacaagcgtcgtccgcaagtcgtcagggtcgaccccgcaccgcgaacagagcctggcgacaacagctgcgaccagccatcgtgagcgcatacaactatcgagtcagtcagactcgcaactcccagcacgcgcggagggcattgagtgagcagcgggacgtgaggagggggcgctctcggcgacaccgcctgcaccgccaccgccaccaacaggagaa

SEQ ID NO: 555458 - DNA, 207 bp, Homo sapiens
acacatctgtattactctgcattcatgtgagttactcaccctgacgctcaccatatgtctaatagaaaacaacctgaaaccaaataattcaatgcactgcttattacaattttacttggtgtctctattattacccctacctacaatgcgctcagatgtaccttctggggtacctgatgctctgacattctgtaactcattgtgtct

SEQ ID NO: 555459 - DNA, 661 bp, Homo sapiens
tatgtgttgtcgtgcagggtcctacccccacggaaatctcgctgattgctagcacagcagtctgaaatcaaactgcaaggcggcagcaaggtctgggggaggggcgcccgccattgcccaggcttgcttaggtaaacaaagcagccgggaagctcgaactggggtggagcccaccacagctcaaggaggcctgcctgcctctgtaggctccacctctgggggcagggcacagacaaacaaaaagacagcagtaacctctgcagacttaagtgctccctgtctgacagctttgaaaagagcaggggttcctcccagcacgcagctggagactctgaaaacgggcaaacgtgccttccctcaaggtgggctcccgtgaccccgtgacccccgagcagcctaacggggaggcacccgccagcaggggcacacgtgacaccttcacagcggcagggtatcccaacagaacctgcagctgagggtcctgtcatgtatagaaaggaaaactaaacaaacagaagggacatccacaccgaaaacccatcgtgtacatcaccatcatcaaagaaccaaaggcagataaaaccccaacgatggggaaacaacggaacagaaaacctgcaacccttaaacgcagagcgcctctcatccccaaaggaacgca

SEQ ID NO: 555460 - DNA, 257 bp, Homo sapiens
acgcgtcaagttacccacaaggtggaagcagcccatggatggatgaatggaataacagaacaaacaaatacgtggtatatccatacgatgcaaatattactcagcctcttataaggaagaaaattctgatgcatgctacatagataaactttgaggacattatactaagtgaaataagccagtcacagaaggacaaatattggatgattccacttacattagcagtctaacccacggagacagatggcgaatgagga

SEQ ID NO: 555461 - DNA, 169 bp, Homo sapiens
ttatcattgcccttatggggtcttgtatcaggtctataatatatagctaccacataaaaggacatgtactgtacttgggtgtagcactgaaaaatgacgatgcttaatgctttttgaaacttatttcctatacattaaatctaacctgatttgtgaaatttatacaatc

SEQ ID NO: 555462 - DNA, 794 bp, Homo sapiens
gccagatcacctggtgagaatgagcaagtggttgtcaatatagctggtcacttctatgctatgcgaggtgcccagagaaaaatgcaggaagattctgagctcaggtaaagcagagaccaacaacagaaggctctgctagggtggaccacctcagtcaagacggaagtcagaggctcaggagaacagcctcaccacagaggcagatggcaagaccaaagacagattgcttaaccaacagatgggcgctgaccccctatccagaatcacatgcacgagtttttacctagccagtctgtttctgaggaccaggcaacttttgaactcctgtctcgtgtgagaatgtatactttatgctctcctgaaagtgtatgacacccagctttaagaacaacacaaagcaaacaaaacaaaacacagggtgggggacgggagggcagagagaagagctctgcacttcccgtttgtggtagctctcacagtataaccagatattctaattcttcttaatattcccccataatgccagaaatgggcttaactgatgcttttcactaaattcatcaaactagattgctgcctaaatccacattgtggcaacttggactcagaaactcacttactcacaaggtaacttaaatggttaagccattagcatagtaaacaactggtgcctcaggcataattctttacctatgcactaacatgagtaaccctaagggaagtgctgaaatgggtggtgggcagggggctctaaaacgctcatttgtaatctaacatacctcaggtattccggc

SEQ ID NO: 555463 - DNA, 436 bp, Homo sapiens
cagctgaaaaagcctaggacagcggtcttgtgagggaccgggatgcaggatttcttcacgcctcccctttgtgacttcaagagcctctgggatctctttttgcaaaggcacctgaatgtgtttgggtccctgttagcataatgtgagggggtggagagacagcccccccccgtgtcccccgtgacccctgtttccatggtgacctgtgtttcctcccccgtcatctttcttgttccagagaggggggggtggatgtctccatctctgtttcaactttatgggccctgggctgcaactttttacttccctactgaaaataaggatttgaatataaatttgttttttcaaatatttggtatgggggggtgatgggttaattaaataagtccattcctgggatttgagggggccaataaaggcctgggaaccttcccga

SEQ ID NO: 555464 - DNA, 492 bp, Homo sapiens
  misc_feature (226)..(226): n is a, c, g, or t
  misc_feature (306)..(306): n is a, c, g, or t
tacttttcacagggcatgtttgctcagatctttgtaattattattgatagtcttccctccacccgtgactaggctgctatcttcttttcagccctggatggtgccttaagcccagtttgcctggcactaataaataaccagagtgccacctgtcccaaatgagggaggtcccaaagtgggtagcctgctactgtgaaaaggctggctaggagtttgtgcccagggnacctgtggaacaaacctccgacagcacagtgctgatgaacagtcactctcatttgatatctcttttggccaagtcactgngcagagtttttaggtgggatggttgtcctctctttttgcccctgtctctggctgttctcaaggatatttctccctggctcacagtttttacactggaaaagtgagattgaggtggacaatcagctttctcaccatcttgggttcctggcgagtcctgttcctgcctcaacccctgtgaaaagctcg

SEQ ID NO: 555465 - DNA, 360 bp, Homo sapiens
  misc_feature (5)..(5): n is a, c, g, or t
agganccccactatcgctaagaaaccctcatatactgctggtggaaatgtaagatcatttagctgatggaaaacagtctggcagttcttcagatggttaaaaatagaattatcatatgacccaacaattctactgctagggtatatacccaagagaattgaaaacatatgtctacacagaatacttgtacctgaatattgatagcagcattattcacaatagcccaaaagtataaacaacccaaatgtccatcaactcatagataaacaaatgtaatacatccatacaatggaatattatttagccgataaaggaatgaaactctgatacatgcctggtgacagagtgagactccatctc

SEQ ID NO: 555466 - DNA, 470 bp, Homo sapiens
tagaggatcgcgtgcgacattttacattgatcaggaaatgaaggaggtattccaatagaaacagatgtcaactaacgaaggaattgtgacccttattaaggaagtagattatgaagaaatgacgaatcttgacttcagtgttattgtcgctaataaagcagcttttcacaagtcgtttaggagtaaatacaagcctacacccattcccatcaaggtccaagtgcaaaatgtgaaagaaggcattcattttaaaagcagcgtcatctcaatttatgttagcgagagcatggatagatcaagcaaaggccaaataattggaaattttcaagcttttgatgaggacactggactaccagcccatgcaagatatgtccaattagaagatcagagataattggatctctgtggattctgtcacatctgcaattaaacttgcaaaacttcctgcatccgactctagatatgttcaa

SEQ ID NO: 555467 - DNA, 248 bp, Homo sapiens
actcctaggcacacgcgtatccgcctgcctcagcttcccacagtcctgcgattactagcttgagccactgtagccgccagatttaggatttctagatgagaattcgtgtttaccagaagtggcgctgttgaccacacacctttgagaatgggttctatacgaattatatgcttcaaaatgtatacactatgaactgagctcagatgaacctataaggggagtgtttattgaatgtattagtttatcca

SEQ ID NO: 555468 - DNA, 101 bp, Homo sapiens
gacggttcaacggaacttagaaggctgagttttataggttaccataggtatacgtgcagtgaacataggacagacgtcctgataccctgttgagacacgtt

SEQ ID NO: 555469 - DNA, 171 bp, Homo sapiens
tgaccccatcagaacacattacctcataaagagttgcctctatttaggaataagacttcctctaactaatttcatacaaactagtgtatgtccttcagttgttttatctaggcttctctgcaagcttggagacagctgcttaacacactattgtcgggtaccgaggctcga

SEQ ID NO: 555470 - DNA, 154 bp, Homo sapiens
tctgatgaccggatgttgctggtaggagaagggtctcagagaaagggggagaggggaaggtcttacaaaggttcctcgagctcatgccatctcctactttcacttgagaccacaaagtctttggtccccaagtcttgatttggtcaaagcgccg

SEQ ID NO: 555471 - DNA, 208 bp, Homo sapiens
  misc_feature (55)..(55): n is a, c, g, or t
  misc_feature (113)..(113): n is a, c, g, or t
  misc_feature (126)..(126): n is a, c, g, or t
atggtggccaccctggggacagtgacaaaggacgggaagacagatgccccgccanaaggagctgccttaaatggcccagtgtgatgctctgccgcccggccacggcccacccnggtcaggctgccnccttaatcgagaaaactacctggtgatgcaatctttttttttttttaatttaatttaattttaaaataaatgctgcattggt

SEQ ID NO: 555472 - DNA, 150 bp, Homo sapiens
tcgatcgctaagcataggacaaatccgatgtctacgatgcggttgtataggattagctatgtagtgcagctagtgtaagagcgtctgtaacgtccgtgtcatcataccaattgagacaggaatagataatgattccgtacgaccttctac

SEQ ID NO: 555473 - DNA, 162 bp, Homo sapiens
tgggtgtgttacattgcgtatttcgggggaggttatatgggttaatagtttttttaacttatttagggggaatgatggttgtctttggttatactacagcgatggctatcgaggagtatcctgaggcatgggtaggtcagaggtttcgtgtcctccggacta

SEQ ID NO: 555474 - DNA, 818 bp, Homo sapiens
cgccgacagcaccagaagcgggccggatcacgaccgcgcccccccttgacgacctaggtagaaccccgtggaaagagccagaggcccccagagggaccacaagaggcagggggaccaacggcaaaacgggtggcccgaagggaaaccaaggggacaaagagggcgaaaaaaggggacaacgggggggacaaagaggaagcagggaagagcacagagacacgagaaacgaaagggaccgcaaacggagggggaaggaaacaaagaagaagagagaacaagggcaccaggggggaacgaccgaaagcgcacaaaggccgaaaggagagcaggaagcggaaaccccgagcagaggacgaaacagaggcgaacggggaaaggacggagagccgggagggggacaacacccgagacggggcaggagcgcgggcccaacaggacgcagagcccgaaaagccgacaggcaccaaagggagcaacagagggggacaagggagcgaggcgcaggggcaaaaaaagcgcagagcggggcagagagcccgggaacccaacagggggcacagcgaacccaaaagaaggggagagcaacgaagagaaacgacgacggacaggaggccgaagagcggagaacaacggacaaagaggacacaacaccgcacgcggggaagagacacaccgacgcgaagccgaggccagaagaaggagcaaagggcgccggagccacaccaggagcgggaaaaaagagaaggagcccgaagcaaaccgacgggcgcagccgaaaggggcaacaaaccacgaccggccaccgggggaacccagcc

SEQ ID NO: 555475 - DNA, 943 bp, Homo sapiens
  misc_feature (426)..(426): n is a, c, g, or t
agcgggtcgtataccttcagcaggagaccgggttaccctgtgatgtgtgtccgtgtcggccctcgtgctgccggtccgtgcggtggtgcccactgtcctcactactggtcctactcactggacctggcgtgcactccctggacggcctttcactctctccttgggattccgactagcctgtcgttctcacgccgggcgtcatctgcgctcggcgcggtgacttcatgcctaggatttcttcaggctcgctgtcgtgcgagctcacaatggtaggaaaagatggggtatcatccgaagattccgcaatatctgagaggacgatcgaacagttgaaacgctctcttagacagaagtgtgatccgatccaaatacgcatagatagacgagttgaagctccttggggagctctagagttgccctagcgcngggaatggagttagccggaagatgcgctttagctgctcgcattgctcctaagccgattcgcgcatagggctaacgaagggccccattgattttagcgctcgctccaaagctactttgggacgagaaggagactacgcttgtgcgaccctttgcgggggacttgaggcgtgaatgtggttgcgacagttgcattcctgccctgaacttaggtcccattggggatgaagaacccagttgacaacctcttatgaagccgtacgtgtgcacggtttacgtcaccttgttgcagggacctattgtgtctcgtgaacctctggaaggccgttagaaggagttcggggaagcgcgatgttttcttcttgacacccacggagttttttgtgaggggttacacgtctcgacggactgattctttatactggccccaaaacgccaaacgcttggggggaataggccaggaacaagcgcagtccttgcaggggaattggcctgtggaattgctagttttacctagtgg

SEQ ID NO: 555476 - DNA, 617 bp, Homo sapiens
  misc_feature (421)..(421): n is a, c, g, or t
  misc_feature (469)..(469): n is a, c, g, or t
gcggtgtcacgttgtaatcccagctctcagggaggctaagaggcgggaggatagctggagccaggagttcgaagaccggctgggcaatatagcgagaccccgttctccaagaaaaaaacaacaaaacccagcaaaaaaaactttttgggcgcccctggcctaggaagaggtttaaaaaccacatttgggtggggccggaggccccaagaggtacggtggaacctggggcacaaggtgtgccaaaagacacactgggggccaagacaacgggggctgggtttcccaccaaagaaaaaaacggccgcgggggaaaaccaacacagcgtcgtgtggagacacacaacaccaagaggtgagagattcacggacgagcacaaacggcggacccataaaacaccagcggggcgaccaaagggagagntgcggaattaaacaaaaatgtagccacgccgcggcgggtggaggaganaaagcaatgcctaggcaactacaagacaagacagcaagacgaagagagcaaggctacgcacaggcaggcaaccaacggcactacacgaagcacaataccaagaaacaagagcaagcagatgaaagaccaagctgagaagcagacaagt

SEQ ID NO: 555477 - DNA, 144 bp, Homo sapiens
cagctttttttattgtaaaaagaaaaatcaactcactgttcagtgctgagaggggatggaggccaggtgcgtaggggcctagatgcacgtttgaaccaggaacgaggttgtaaccggacgggcagtgcctagcttatgttgcga

SEQ ID NO: 555478 - DNA, 1005 bp, Homo sapiens
tttgcaaatagtaacgacaaagatgatcaagttttaaattgccatttggcagtgaaggtgctatccccggaagatggaaaagcagatattgtgagagccgctcaggacttttgccagttagtagcccagaagcaaaggagacccaaagatttggatgtagatatgttagtttactcagttcaaatggttgtcctgatcctgatttagtactgaagttcggtcctgtggacagcacacgaggctttcttacctggcacatcagattgactgagactgtctctttgccttcccatctaaacatcagttatgaggactttttctctgcccttcgtcattatgcagcctgtgaacagcgtctgggaaagtcgtggtcattggttgcataattccatttgagcttatggaggaaaggaccaagtgactctgattttagaaagcacctatgaaaccctgtacacacctatgaaaccctgtacacacctagttcataatcttcataatttatcaacaaacacaaaaaagtgtcttacttgagagtgagtgtgtgcgtgtgtgcgtgcacacatgtgcacgtttgtatgtgtggaaataaacataaatggggacgtgttggagaaggaaatacatagacctacaactttgagcatatagcagtgatgttttaggaactgaaatgtcacacttaataaagtcttcagcccagctacttccctgttttcgtggggagaagagggcctgattagaactgttctggttgtgtttggcgggaggggaataaattttgttcagtccttcttagtgaccaaactttaatttttaagaataatatattgacttactgaactgaagcattctgagttgaaaggagctccagaggaaaggagttctgtgttgctcacatgttaaagcttgctcaccttcagagcagaggaatacctatctacagatatccgcccattttcatctctcttcattatagtcaaacagtgtgacttgagagtgttg

SEQ ID NO: 555479 - DNA, 124 bp, Homo sapiens
gttgcccttgggccccagaattcggcccggggttgcggggttccccaaggagctcacctcccattgggggcccccccccccccccccttaccggtgttccgtgttaacgttccccccgtgggga

SEQ ID NO: 555480 - DNA, 898 bp, Homo sapiens
tgagcggtgtgggctggactgcggcggacgtgggtgaggtgcgcggctgtaagagagcgggacgcggggtgccctggcgcgtggtgggggtccccggcgcctgtccccacggcacccaagaatgggcctggccagcggtacccctcctgcggatgccctgcggtggttggggggggcgctggtgtctcctggcgcctgctgactgggccctgtggactccccatgcggcctgcgatgctggctgcccagtcgccctgcaggcctgcttgtcacctgtgttggctgctgtgctgaggctaccgcctgtggcgcccacgttcgctcaagtgagcctgtgccgcgtcccatgtgtgttcaccctaccttgctgctctagcctgcagctctggtgcctgcgccttacagttccctgcggcgcgtggggcttgctgcgtgctgctgggccagcgtggccgacgggctcgtgcaacagcctgctcgtaggagcttacgcgagaggccagacacatggcagccccggaccagacttgcttgcggcaccaggataacaggacccaggcaggcacacgggctctaggcaaccctaggtcaggggacaccggtccttgccggtaacattgatgtcaccatttcccacgttcaatcatttctaaggaaccgcgttgcgcacgtggggggctaaggtgtcagtgcagggccacaaaccggcccccagaagtttggatgcatggcacccattacattcttaacgtaaatagaggaccccgtaaccattccgagtgaatcttattcccaaggattcagcgcaatggagcccatcaaacaacaaagaaattctcgccagacgtcaagcccaatacttccccggggaagactccaatcacccacacggacacct

SEQ ID NO: 555481 - DNA, 340 bp, Homo sapiens
attttgatttgggccccacccctccttccttttcccttgggctcttaggccggaaactctcccaaacaaattttctagaaaatataccccccccttcccgtcaaggggtaggggggggggcaacagggagaaggttggtcccgctgagtcctaagcccatgggacctgtgaccaaccggtcctcatttcgttctcagagcccccccttctaggacaccaaggagctcccattcctgagtcgcattatcactatccttggagccgggtagggagaggcagaggagaagccggagagggcccagaccacataacaccgcgatcatacataaggcacaggagt

SEQ ID NO: 555482 - DNA, 83 bp, Homo sapiens
tgggccccgtggagcctcagtgcccgtttggcctgctctctcgctgacaataaagagcccttgcgttgcactgaaaaaaaaaa

SEQ ID NO: 555483 - DNA, 394 bp, Homo sapiens
tggtatttttagtagagatggggtttcacctggttgggccaggagggtctcgatctctggacctcatgatccgcccgcctgggcctcccaaagggctaggattacaggcgtgagccaccgggcccggcccaaagatccctttttaaacagtgcatttgggagtcggtagtggtgaccttttatttttccctaggcacggaaaatgaagatgcgggaagtgactatcaaagtgataatcaagcaagtgggattcatcgtatgataagggcctgggtgagtgattcagctttattcaataccagagaaggacgtgcggggaaggtacacaacttcaggcggggctggaatctcaatacatcttatccacggtctccttggagtgacttggccacac

SEQ ID NO: 555484 - DNA, 246 bp, Homo sapiens
tgtcacccaggctggagtgcagtggcatgatcttggcctacttcaacctgggtgacagagcaagactcagtcgagaaaaaagcagtgtaacaattcctcacaggactacagaactaaatagcagagcttaccattatgacccagtcaacctctagttacttgtgttatattaccctatagtaaatatagagttagttcgtcttaaataaggacacacacggtgctacatgcattattatattgcag

SEQ ID NO: 555485 - DNA, 490 bp, Homo sapiens
ggatctggcagacgacctatatgatgttggttccggacaagaaccaagatattcttcgagaaaaggtcaatgaggaaatgtatatagaaaagttattggatacaatggtgacagcagttccatgaaagtcatttgcgtgtggttagagctgattagatttgagacctctcaagctccattatttaccagctgaagacgctcatcaagattgtgaagaaaacgctacagggacttatcgattgcagggtgtgtaggaaggaagcactgaactagtaagactgtatgatactgtagcacagtacgctttacaccaagatagcagggagggcccacagcactactgtttcagaaggaggaggacttcagggtcattactatgacaagacagtgactgaagaagaacgaaggctgattatcatcacaggctatagcgcgaatggaagcgaacgaccgttggattcgagcactaggtcggatacttatcttttaa

SEQ ID NO: 555486 - DNA, 106 bp, Homo sapiens
ctgaactgggggacatgggtcgttggtcagctccagtaagcccaggctgtcatagcggtcaggtggtgtgattgtgatggactgggcggtaaattcatcatcgaag

SEQ ID NO: 555487 - DNA, 911 bp, Homo sapiens
  misc_feature (911)..(911): n is a, c, g, or t
ggagggtgtgtggttgtctttctaattaggtgtatagcctattcactttcctagaataaatctcttaacctaaattggagtagtctgcatttggcaactcctctagcagcttggtagcctagtacaggtgttgtttaaaagaaaggaaaagcaggaaggaggagtgaattttattaacgatgttgccaaagtgtatggagattgggcctcgtgaagaacgagctttttcagtgttaagttgtctttaccttaagattcagagaatactgttagaagtatgattaattttaagtccgtgtctgttacatcctgttggaaaactggtattagcatgagttggaaaaaggacaacgaaaggcttttcatgtaaagataagatctttagctatctctaagccgtgtccttttttcactgcattttttctagttttgtgtcattgttatcattaggatagggtaagtgaagtttgctatgctgctagcatcctaagatgatacctttgttgaaagaattgtgaatagcatgattccatttctagcagaggctgagttaggacaggagtgtcatgtggagaagtcttctgtgtcggaatagcatttaatgactctggtcacataagcaaacacatagggacgtatctggtatgaaaattcacagaattttagataggctaaagcaattgatatgctcactgctgtttcttagggttcccccatgcttttcatggtcttccagagagaggttgcagattctattccctacattaatgatggatgggtttgagggaggtacacagcggggaggaggtggggccactgagggggggtagttaacatataatcaggggggagagaagagggacgaagagcattatatgggacaggaacacatgtggggtaggtcgctatan

SEQ ID NO: 555488 - DNA, 472 bp, Homo sapiens
  misc_feature (301)..(302): n is a, c, g, or t
  misc_feature (356)..(356): n is a, c, g, or t
ataatttagaccccatacaagtttataaagagtcattgttattttctggttggtgtattattttttctgtggtcttactgatctttgtatattacatacatgctttgaagtttctggaaagtagatcttttcttgacctagcatatcaatgacaggtgcagccctttgtgatgtgattaggggtctaatgtgaaccaatggattggtattggatgagttcttaaaccttttcccgtaacatttggtttcttccaaccaggcatttggtttaggaaacccttggttaaggacggactcactnntctttttagttgaggccttctagttaccacattactctgcctctgtatataggnggttttctttaagtggggtgggaaggggagccaatttcccttcatcactccttataagcgagtagagtatatggggggtctctatagagaaagagcccttttgcgcccaactctct

SEQ ID NO: 555489 - DNA, 131 bp, Homo sapiens
ggctaggattataagcatgagccactgcacccagctgaagcccaagtttttttgctttttgcattttggggtttttttcttttttctgttgcccaggctggagtgcaatggcgtgatctcggctcactgca

SEQ ID NO: 555490 - DNA, 607 bp, Homo sapiens
  misc_feature (33)..(33): n is a, c, g, or t
  misc_feature (49)..(49): n is a, c, g, or t
  misc_feature (52)..(52): n is a, c, g, or t
  misc_feature (55)..(55): n is a, c, g, or t
  misc_feature (83)..(83): n is a, c, g, or t
  misc_feature (94)..(94): n is a, c, g, or t
  misc_feature (101)..(101): n is a, c, g, or t
  misc_feature (123)..(123): n is a, c, g, or t
  misc_feature (126)..(126): n is a, c, g, or t
  misc_feature (235)..(235): n is a, c, g, or t
  misc_feature (309)..(309): n is a, c, g, or t
  misc_feature (432)..(433): n is a, c, g, or t
  misc_feature (444)..(445): n is a, c, g, or t
  misc_feature (464)..(464): n is a, c, g, or t
  misc_feature (468)..(468): n is a, c, g, or t
  misc_feature (581)..(581): n is a, c, g, or t
gcacccggcgccaggcagcgggggcgggagggngccgcccggggcaggnggnganagaagagggccaggcaccacgggcggcncccgcccgggnggcgggnggcggctccgccgtgggcaggnggngaaggaagagaacggggggccgccggccggcaccctctccggaggcgggaggcgggaggcagtgaggcagcaacagcgcgagggcgaggcgactggggagcggccccangcagcgacctcgccttccgctgcgcctcctcccagaacccaagaagcctggaaccgggggcggccagcccgganaggaggagacggcaacccagccgcgctttggccggcacccccccgggaggcgggaggcgggaggcagggacgcagcaacagcgcgaggcgactttggagcggccgcagagagcgaccgcgccnnccgcggcggtnntcccagagcccaagaagcncggnacctgtggcatccatctctgaaaggagaagacggcaacccagccgaggcactactgggttggggtctccacgaccgagctggtctcatcaagtggcgtccaacaaggggctcncacccgggttgaggggttgctggagc

SEQ ID NO: 555491 - DNA, 525 bp, Homo sapiens
  misc_feature (318)..(318): n is a, c, g, or t
  misc_feature (386)..(386): n is a, c, g, or t
  misc_feature (427)..(427): n is a, c, g, or t
ggcgcacgctaccgattcggcgcggctcatggtccggttcgggctcgcgagtctccgtctggggtagggcaggttcttagactctgtgagtaaagacagcttcatcttcccagttcatcatggcttcaacatccagataacaacgaacttgatgcaagtgataggtttgccaaggtcagacctctcatcatccggatgaactagcaatttccagaagcatgcacccttggaagagttctacagctttggcgagtctatgtgtgagtactttgggcaccgggggtccaagcagctgcacagggggaagcctgtgcgacnttggctacaagatttcggtgtgggacaaccagcagaggctacttggtgtggtttgagccctcacaggntacactgtttaccaagccagacaggagcttggatctaggangcagtatggtaataaaatttgtggatgcgcttcaggagcgtggttttctgccatatcacatattttttgacaaggttttcacaagtgttaaactgatg

SEQ ID NO: 555492 - DNA, 242 bp, Homo sapiens
gacgattacagaccgagaatcagatataccgggagtagagcaacacaagcgtgtccacatctccactgaatccgtgattcgcagagtaaatcttgttatgtagaacattatgagctaactctaaaggttcaaccaacaaaacttacatattctcgagtatttctttaaagtctaaatagtttatctctgatcaaggatggagaaaggacaaaaaaaatactgtcctgaattgattctcacag

SEQ ID NO: 555493 - DNA, 105 bp, Homo sapiens
ttggagctagagcagtcgtacacacacgtacagtgttgcaggtgggtgatgttgcgatcgatagtcatggtggacgtctcgcagtactctgagatgtacttgtaa

SEQ ID NO: 555494 - DNA, 271 bp, Homo sapiens
tcgctgtgtatcctcgcgagcgtgtatctctcgcgaacgtgttatcctcgcgaacgtgttatctctcgtcgatcgtgttatccttcgcggacgtgtttccctcgcgaacatgttatccctcgcgaacgtgtgatccctcgggaacgtgttattcctctggaacgtgtagtcgctcgcggacgtgttgtctctcgctgaacgtgttatccctcgcgtccgtgttagtctcgtctggatcatgttatccctcgtgcccgtgttgtccctcgga

SEQ ID NO: 555495 - DNA, 374 bp, Homo sapiens
atcacactgaacatgaatataagtaaatcatttatttgggccaagcttggggattataacctgggagcaatgattcaagttgtctggaatgtaaactttagcagcagttacaagtagatttgtaaaggcaaaaaagaggggcagagagtggactggtacaaagttgtttgtcagccacttaggctgggcacggtggctcatgcctgtaatcctagaactctgggaggccaaggcagctggatcacctgaggacaggagtttgagaccagcctggccaacacagtaaaaccctgtttctactaatacaaaaacatattggacgtgttcaggcagatttcccgtttaacatctgcatgtttctcagggacctgaaa

SEQ ID NO: 555496 - DNA, 1036 bp, Homo sapiens
agcggaattcgggagttagcgggaagcactctgatcgaactacagagggtcaaggtcagtcaacatggtctcgagtgcgctgtgaccaggtccggtttccggtagccaggaccttcttcgaaacgtcggagatggcctaaactggctcacaggtgtttgcaccatcgagatgaaggcatggacctactgtcgacgcaagttattacccggggatgcctccgggatgtggcctgagtcggtgatcagggcttcgtgatcaactaaaatactacgggatgtttgatggattggtagacagtctttacggtgaactagaaggcatgtactcgagcgaaaattgatgacgcactgcgcagccagagattgtaagagatgacattacggtaccagacgtcaagtaagtgaacagtcggcaggttctctccctggtttgacacaatagacattgactgtacataacaggcattccgagttgaaaaatcgtatgttgcattgacccaagaccaaaggacatacctgaactgtacagatgtaaagatgactaacatctaatgtactttttataggcagtcattgaaatagtaaagacgcttgtaacttggggtcaaattgataaactagggaaacccgaaatatttggttagtctggatcgcaatgccttggtataatcatgtcgaaatgatggcgagactaggagagatcgagtgtgactgaattgttgcctgtattgctagtttggggcgacgtggtttacttatagtggagtgtctacctcgacttaaataccgcggggtagttagtggaaccgactctgactcgtttgtatttacagatacggaaaaacgtgtctggccgagaacattgccatgcccgctactttgcatttgcctgcaagaaatcctcttggtcgtggaccaaagtttattaaatgcccgagtattagggacttttaaaacgtaggccctttctttcaccggggctttgggtgaaagagcatgcattaatagggttcccagacaagttgactgcaccaga

SEQ ID NO: 555497 - DNA, 1019 bp, Homo sapiens
  misc_feature (296)..(296): n is a, c, g, or t
  misc_feature (649)..(649): n is a, c, g, or t
gactggagggtgatcttcgcctgggacgcgtttgctgggccttgagtctgcccaagtctctatcttcccacggggccccggtcgatgtcgggatcgatgttgcggacggaggctggcggcctgtctcctcacctgctctgctgcaggggacatcagacggaagatctatagtgtgaccgtgatcatcgtgttctttagtactcacttgataactcctctgtctcacggagtagcaggcttgaagggtccccgagggtggaccgtggaagcacgtcatcacgtggtcgaaaaccggnagagatagacactagacatgtactatgactttcatacgcagattccacataccgaccgagtctgatcgttcgtccaaagcaggaagctccatatatcctggccgacaggacagccgtgcattcctggcaagcagtcggaggagcctctaaaggcccgttctacatcttctgccttagtctcagttatgtgttgtcttacttagtcatttgtgttcttaattctaacactagccttgctcaatgctacgataaacctgtgaacgaaccacgctgtacccaccactagatctctggacagttcacacattaattctaacacaatgaacttaggcggtctgaactgagaggttccntatggaggtgcttggggacaatcgtcgacacatggattgcacaattacctacttgtaaacagctcctcactcaattgccgatgcttactcacgtacttgcgtcattgttccccggaaacggttgaacgatgtggtccgggcttaccagtggcccgcggcgtagcttcctctaccgatcaccagagctttgctcgcgccttcgtgctttgtacgcccctcctaataagcgtggttgcttgcgaatcccttacacccgacctggcgtcgttcaccggggcagagctcacttgcatcggtctatagaccccccttcccatcgttggcaccaccttgacaaccctgtaatttcgcttgttcaatcttgagccat

SEQ ID NO: 555498 - DNA, 1105 bp, Homo sapiens
cggacgcgtgggtttccggtccatgaagcagcagtatgagcagaagatcacagagcttcgccagaagctggtggacctgcagaaacaggtaactgagctggaggccgaacgggagcagaagcagcgtgactttgaccggaaactcctcctggccaaatcgaagatagagatggaagagaccgacaaggagcagctgacagcagaggccaaggaactgcgccagaaggtcaggtacctacaggatcagctgagcccgctcacaaggcaacgagaataccaggagaaggagatccagcggctcaataaggccctggaggaggccctcagcatccaggcctctccatcatctccgcctgcagcttttgggagtccagaaggcgttgggggccatctgaggaagcaggaactagtgacacagaatgagttgctgaaacagcaggtaaagatctttgaagaggacttccagagggaacggagtgaccgtgaacgcatgaatgaagagaaggaggagctgaagaagcaagtagagaagctgcaggcccaggtcaccctgactaatgcccagctcaaaactctcaaagaggaggagaaggccaaggaagccctcaaacagcagaagaggaaagcaaaggcttcgggagagcgctaccacatggaaccccaccctgagcacgtctgcggcgctattcctattgctaccaaccatggcagccatggtactcaccatgcttacaggactggtccaaccgtaaacctaacccttgcctgggaacacacgcaccacagcgacgaaaacccggagatgtcactggcggaaacacgaggggcccggggaggaatagaaaaagatcacagtgggagcgcgcaccacaaggaggcaagacaccagcacaggtcaacacagcgcaaaaggaaaagaacagaacggaggggggcaacaggagaaagacgagccaggagaagagaacaacacggacaacgaggagagacacaggagagcaagcgcgaagcgacagatggagcaacaagcacagcaacagagaagaagatgagagctcagaacacaacacaaggcaagaaatagaagaaggacgatgaaaacaaa

SEQ ID NO: 555499 - DNA, 459 bp, Homo sapiens
  misc_feature (135)..(135): n is a, c, g, or t
aaactttctaaaattaacctgcattacttttataatggattaaattaaaccacacaaaaaattagaattgattctactgactatttttaggatcatgggctggtacatatgacaaggaacaggcatggattaggntaagggttttttgggttgggggcagtgatggagaaaatcctccagctttttggtatctttaagggtgtggaccctttaatccaatactttctacagaacaattagcacacaatgaaaacttaataacatcaaatagatgacattgccaattcactcgacatttagtatgcacatactatgtgccaggcactaggaggaaataaccaactttgtattctagatcatttaaaaaaaaaatcaaaactacactttgtccctatcatcatatatgaaatgtagcacattgattccctcaattttccttccattgttttcagaaaggca

SEQ ID NO: 555500 - DNA, 210 bp, Homo sapiens
tattataggtctggcccctttttgtgaaaatatgcccagcggcaaggccaacaagcccagggaggattgttcgggtcatacaccaaaagcttctggccattaggatgacagcctacccatatgtcccccgaggaagggtcaatagataaattatccaccagcgtatccggctcaagttccttcaactgagttaaattcatattaatgtgt

SEQ ID NO: 555501 - DNA, 252 bp, Homo sapiens
taaaagctatggtgaggggggcaacaaaagagcagttctgagttcactcttgattgcccacctgtagagattgatcatggtgctgcgatttgagcagtttttcagaaaggtcaagtgaacggaaagctgggaaccttggtggaggggtggtgacatcgaaaggagcagagcagatcaccgtgacatccgaggtgctttctccaaaggtattgaaatatctcaccaaaaatatttgaagacggcagcgggggt

SEQ ID NO: 555502 - DNA, 259 bp, Homo sapiens
actggacattcccttctacatagtctatccctgtttctatgtctcattcttttaaaatcttaaatatggagcgcttttctatgatttaaatatgctttaaaataagtcactgttgacacggtcatgagtttccgagtatagtattctttttatcttatatttactcgtccgtggaaaagataatcaagggctacattttagctgaggatactgaactctttttcctcattcgggtgtgataatacataacccacaggca

SEQ ID NO: 555503 - DNA, 895 bp, Homo sapiens
caattgtttacttaaaggtataagtggtgttcttggaacctcttaattcgggatatcagagggctccccccattaaaacggggctgtgtcctttgcccctggtgtaccggttgtgaaaccccatttgtttggggggcaaagttccgccgcctactattgggggtaaaaccatttcatgacccccccccggtctcccgtgacagtcctgcctttcaggtaccgcaaacactgggtgccaccggcgtgttcgcactgaaatataattcccactgcgttaacgggattacagggtataacctttgatcgactagcgcacgagatatctatggaaaaaggctagtatggtacacacaggtttagctacctgtttgtaagaaaatctaagtgaagatacaactgggggccctctccttatgcgtaatcctcaaagaagtatttgggggccaacatacctcgctcactgctttagtaaaatagggttagtgacaaccaagtgtagcaccactggcggccccacgcacaaggagtccacattgtgagtaaaatggggggccacacatccctcctgggatttgggagctaaacaccagtcaaagacaacaaagggggcgtaactttctaaacaacgccctttttaattggtgcgggtattctgatatacacatggtatcagcatctgtttggactccctagagggtatttcatgtttctgtgataacaacgtaagtccgacaacgacacacacacaagggtataacatgctttttcgcacgcacgcaccgctccttcatcgcgttgtcgccttgattaggcctctcctacgccccttctggaaaaaccgcagcgtttgctgaggaccccctcaacccggtaaaaaaaatgcccccaacccaca

SEQ ID NO: 555504 - DNA, 365 bp, Homo sapiens
ttcccccttatgctaatattcagctcatcatagagggtctggtgaatcccgtgtactctctggggcttccataaatgattcaggtaacaaggtaccaaacgttggaacatagcctacctctgtttctcctgtgtttactgtatattatgcagtcgcagtacccgaagatgagaaatcttccacttccccaccagagagtctgctaattataggagaggtgtggatctgtttgttccctctacctcattttgagtgagacggtcccagtcatctattgtcagtcttatttcctcacacagtgacgggaccttgatgctgaggattgacgagctgcttccactctgggttcgcatttgtctcagtta

SEQ ID NO: 555505 - DNA, 137 bp, Homo sapiens
ggtttgggtaatctgaatcaagtgaacatgggacatcaacacatgtccttaattatacatctaatatcgatgtagactgtataccaaggccggggattcttaatttcagaaatgagctttgattctgcacatacaaa

SEQ ID NO: 555506 - DNA, 124 bp, Homo sapiens
taaggatccccgcgctgcggcttagtgaacgcatgcacatgacccccacggctagtgttgggagagaagaaacaggatctctttgatgttagctgtggatccgttcacttaatgccgctagcgc

SEQ ID NO: 555507 - DNA, 129 bp, Homo sapiens
ttcctggtcgggtcacagtgggcccacactatatctagtccttagggaggcaacggcaggtggatcacaaggtcagcagttcaagaccaccatggccaagatggtgaaaagccatctctactcaaaata

SEQ ID NO: 555508 - DNA, 316 bp, Homo sapiens
gttgaagaattctactttgtgggtatgagtgtcattctgtgctctaggcctttactgttcaggaggaaaacactgtataatttctgtgttctaatctgggagttggtgagaggaatgtcgtagggagtgagtgtggtggtcattaccaggaccaaaggcaaagcatgagtctggagctcttggagtttgaagccaggaatgaaagtccgagcatgatctttgatcaagtgagttgggcaagttaagataaaaagctaaaatgaaggagccaaaacaaacaaacaaataaacaaaagaaacaaaatcacagagcaag

SEQ ID NO: 555509 - DNA, 485 bp, Homo sapiens
taaactataaaattttaatttgacccataacataaagcaatacatcttccaaatgccttttataacctttattaaggagttggttaatgcttcaagaaaaccctgttaatctgacacaggggcccatatactggtcttgcatcagtgtgcctttgacagtaatgattatagagaaactgaacttattttatctcttaaaagcagcccttaaaatcccacattccaacctctttcacaacagtcacgggaccttgaagagttgaatggctttaattattggccctgtgtctcagggatgccgtttattttgattagcatcttctatggggcctggagataaggctttaattgctgtcagtgttaagatttagcaggacttgtccttttagacccaggagtcaaaaccctgtaacttaatgtcacaagtacattaggagtagatacagaaagatacatggaagtaataacataaaattaaaaaaaaa

SEQ ID NO: 555510 - DNA, 313 bp, Homo sapiens
  misc_feature (38)..(38): n is a, c, g, or t
tgtgctgaggagatctagaggatcccggtgggttcttncagagcgtggtcttgcagaggtccttcacgtcccttgtaagttggattcctaggtatttgattctctttgaagcaatgtgaatgggagttcactcatgatttggctctctgtttgtctgttattgatgtatatgaatgcttgtgatttttgcacattgattttgtatcctgagactttgctgaagttgcttattggcccaaggagattttgggctgagacaacggggttttctagatatacaatcatgtcatctgcaaggaacccacggggtacc

SEQ ID NO: 555511 - DNA, 308 bp, Homo sapiens
atctagaggatctccagtgtactccacaaacagagtctgtttgagtaagttagaagaatgcctctcttccctcaatgagtcacaatacatagcaagcattttaaagtcaggttaatagttgaaagatcttagatgcaaagagttttaaatcattagttcaagaactagtcagtgagtgattgaataaactttattaaaacatgcttagtgaattagtgaatattacaacacaatttttttcctattactttcttggagtttcaagaaagtttctagctgggcacggtggctcatgcctgtaatcccag

SEQ ID NO: 555512 - DNA, 286 bp, Homo sapiens
tcgtgtggtgagttaccagttcccactgacttccctgctctatcttggcccgattcatcacggagatacctcgctcgccgacgtgctcgtgttgcactggttaacgcggtcggctgcactcaagccactggtctggaagttgcccttaaccccgcacaggtaggccgtggctgtggctccactgtctgccacatgtttgtctacattgtactgtcttgtacagagccacactatgtgaatgcggtccatgagccaggggatatctcaatggctgcgttggcccaaa

SEQ ID NO: 555513 - DNA, 156 bp, Homo sapiens
agctaaatactttcagacatctttgtctttggctccatgttacaggatgcgtgtagacatcgatgtaattgaaattcccctttttgtcaataggtgcttctctgtacagtctcatcccacttcctctatcttgtaaacctgatccccgaaccaaat

SEQ ID NO: 555514 - DNA, 140 bp, Homo sapiens
cggcgagcgcccaagtgctcggattacatgcatagccactttgaccggctaatctcctctttatttcatcagtatgttttttacctccagacattgtaatttttgtttaggctagttttatattttccctgatctttaac

SEQ ID NO: 555515 - DNA, 500 bp, Homo sapiens
catgtgacccttgatatgtgcaaggaattgcgagattgtttctgtccagatattatgtacccagcacagtgagacactgagcaggtggtccttctgccataggcagcccagctgctggtccagaaccgtggagcccatggtgacctgtgctgagcacgtagttcatgctgacgtcccaaatcttggaagtttcgtccccataatcagagatcaaattggtgctgtcgggactccaactaattgtgtaaatcccagcgtcgtgggccttgcttccgaccagcgcgcacaccttctccccagtcttcccgtcatagatgtatctgtggccgtcagcactggctgtggcaaatctgttcccatcaggagagaatcgcacacagttgacaaagcggctgtggtcgccaactgtgaacttgaacttgaatgggggtccctcaaagaatgccgcgcagttatcaatcgcttcccgtggccagccggtatggccggctctgcttgat

SEQ ID NO: 555516 - DNA, 436 bp, Homo sapiens
ggggcgtgctgcgtcgggctgcacggacgacagactggcggtctccacacggacgttacacgttcctcgtaacttttccgcttgtcggacacgaacttgaacgaccggaccaaaacacggacgctagcgcgaccgggctacaggtctacgctggtggccttgaaccgctgactgacacgactactgaccacttaccaacggtcggaccacggccactgactcactgcggcgccagccaacgggcagccaagcttactgacaacaccacggacactacttcgtaggcgcttgaaacaggtacgacactcgctggacccttagaagtacccgcagacaacgcctccttcgcgctcaggctctacgctttgtggtaaaccacacacaattttcacttaattgcacacgggcacataaactttaaattcccaagtgggcg

SEQ ID NO: 555517 - DNA, 516 bp, Homo sapiens
  misc_feature (9)..(9): n is a, c, g, or t
  misc_feature (26)..(26): n is a, c, g, or t
  misc_feature (53)..(53): n is a, c, g, or t
  misc_feature (67)..(67): n is a, c, g, or t
  misc_feature (126)..(126): n is a, c, g, or t
  misc_feature (236)..(236): n is a, c, g, or t
  misc_feature (307)..(307): n is a, c, g, or t
  misc_feature (319)..(319): n is a, c, g, or t
  misc_feature (348)..(348): n is a, c, g, or t
  misc_feature (484)..(484): n is a, c, g, or t
tcttgtggnaattgggcttcttgggncaacggccgtttttaacagcccatganctatcgaaatgggncagggcgaacttggggaattggcaagccggccgaattttccgcgggaagttatgttgcncagttgccgcaatccgtttcaggacggtgcaattgaagcaaggagccgccgtttccagtccgttctattcgaaggattcgtacgttgcaggttgcgcaacgacgccccgncgtgacgccgaatagttgtttcatggtccgggaaaaattgccgaatcggcgaacccggcccatgggcagcntcggtcagggtntgccccgagcgccagtcccagcgccactncaagcgccgccacaacaccaggcgacgtaccggcaaacccagttggttggcgaacaaacgttccagctggcttaacgaaacgtgcgccgcctgtgccagggcttgggccgagaccttgccactcagttgctgatcncagccgacagcgcgcgctccaccctggcatct

SEQ ID NO: 555518 - DNA, 424 bp, Homo sapiens
  misc_feature (43)..(43): n is a, c, g, or t
  misc_feature (85)..(85): n is a, c, g, or t
  misc_feature (302)..(302): n is a, c, g, or t
  misc_feature (320)..(320): n is a, c, g, or t
  misc_feature (344)..(344): n is a, c, g, or t
  misc_feature (411)..(411): n is a, c, g, or t
  misc_feature (422)..(422): n is a, c, g, or t
accagtatgtaagtaccaaggaatcgtggatggcagattactntaaagatgacaaggacatagagtcagctaaatcagaagactngatgggctcttcggtggatcctccatgttttggacaaacagaggtgaaaacccccaagcgccggcagccctttgtcccctttgctctgaggaaccacacggggtgcactttgtggtttgccaccctgaccaccacacccaccagagctgcactctctcacagtgggagtccagggggtagttccagaagggaacgggaacattttcttcgatgatantcacaatgttagtgaatnggcgaggaagtcctttacaggtgnaaggagatttcccttttgattttgaagcaagagggaaagtttaagacacaggacacacccttggacntccgggtttcntc

SEQ ID NO: 555519 - DNA, 464 bp, Homo sapiens
ttttgtttttgagaaggagtctcactgtagttgccccgtggtggaatgcagcggtgcaatcctggcccactgcaacctctgcctcctgggttcaagtgattctcaggcctcagcctcctgggtagctgggactacacgtgagcaccaacacgcccagctaattttatatttttagtagagatgaggtttcagcatgttggccaggctggtcttgaactcctgaccttagatgattcgctcgcctcagcctcccagagtactgggattacaggcatgagccaccacacctagcctacatgtattttctcatcctcttattttttaccccgttctctagtcatatatatttcctatataatacattatggtaataatactgctggattggggagttagacgttgtgctatgcttacagaggtaatcattgaactgtaataaaataaaggcagtattggagaaaaat

SEQ ID NO: 555520 - DNA, 1360 bp, Homo sapiens
gttctagatcgcgagcggccgtcctttattttttatatttattttttttaaagcccccaataatacctttaattatcatgtccggctcaaaggcaggaaggagtgtggaacggaagtggaagggctagcgggaggcacggaaggggggccaggggcaaggtggcaggagggcgaagtggggggcacgcggggggccaccggggcagggcgccgcagaccgtgtctccgtgggcgcccggagttgtgggggcacaaaatgtagaccctgtgcccaccctgtgtctcccgcccacgggacaggccgccccgacatctcctctcaacaaacagcgcgcacatgtggacaggccttatcgggcctccgatctctcgcgtggaacgagtggcggtgtgcacaggggccacaagtgtggttattgacaggcgtctcgcgcccgcgtgtggggcccccgggaagaactcctgtgtcccccgaaagggacccccaaagccccaaagggaagcgggccctcaaccactctcacctcacagtgtgtgggtgttttcaacaaccgtgccccaaacccaaccagggggagaggcgcagggcgagggtaccaagggggggctccccacaattccccaggggaacggcaacaatataggcaaagccccctttaaccaccccctagtggaacaggaggcgacgagaaagacggggggagatccctaccctcccgcccgcgggaatcccaaacgcatccagaaggagatgggcggcacaaccacgggagcgcggtatgaaaatcggcgcaaaaacagggaaggggaccaggggccgagaaaagcgagcacaacggtgcggcggcctcccggaccaaagcgccaggaccgcagccataggggcacgggcgcccccaaggagacgcaacgcgggcacgcgcttcccccaaaacactcccacagccaccaccatcacccccccagacgaatagcgaggccacctcacgagagacagaaccactaagcgcagaaccacatggcccacgaggtgcgcccaccacaacggccgcgacccctaaaaacacccggagagaaaagagcaacgaaaaagggggcagtaccccacacaacaacagaagtctagaacgtcccgtaatcacaaccccacacttgatacaacagataaagggcaaagtaaattaagctagaaacatacaaaagcaccaaacaagactaccacaaagaaaacaaacaaacaggcccacacaacgccacccataccatagagacaccgaacacatcacactacactcccctaacagaaacactgaacaacaccacacccatcaaaataccaacaacattagtcacaacatat

SEQ ID NO: 555521 - DNA, 237 bp, Homo sapiens
agaccggggtctgcagaggctcacatgctgtagtcgatctaggtattatctcttgaagcaatgtgaatggagtcactcatgatggtctctgttgtccgttatgggtataagaatgctgtgattttgcacatgatttgtatcctgagatttgctgaagttgttatcagttaaggagattttggtagcgacgatggggttttctagatttacaatcatgtcatctgcaaggaacccacg

SEQ ID NO: 555522 - DNA, 309 bp, Homo sapiens
tccccgattttccccagtctcttaaacagaaaaatgactgatataattatctttgggaaactgacccttaatttttttaaaaagggggaatattaatgtttcccccaaactcaccacagctataacgcaatgtgtttggacacgcaattatacatgcgccgtttgtaacacttttttttgagagttattggtcatctggtcctgggtaccctatgtcccacgatagtgtgaaacacctgctcttatacgaatattatcaatataatatctcttattattctcttaacacaaaacaaaaaaaagaggcgc

SEQ ID NO: 555523 - DNA, 89 bp, Homo sapiens
accgtatacattatttaaatgtatttaactgttaaatgcgcgtacccaccaaataagtgacaactaggacctttagtgaaacactgtga

SEQ ID NO: 555524 - DNA, 107 bp, Homo sapiens
atcgtagtagtcccattattctcatgtctcggactaccaccaggcactccttcattcaggatctcacatccttcttagggctcccactcctttatagcctgcttcta

SEQ ID NO: 555525 - DNA, 878 bp, Homo sapiens
cggaagtgtcgtatgtcggtgcctcgagggttctctttctcccctggctggtccggctctcgagtggtggcgtgacgaggggcgagtggtgtggcggcgcttgtgctcctcggttgggagggaaccaggccgcgaacccaggccgggaggggggttcggcctgggggggaaagggactgtacatgatcatctcgtaagagcccttttatgtatctaccgagggtgatgtgacaacgacgggagagggcgaagggtgctctgtacccaagccaggcagttgcccgtgcgttgtccaggtccgctagacgtgcccggtgggtctgggcaaggccgtcggggtgcagaagtgggaggcgcacgcaaggggtaatataggggtaactccggtggagatacccacattgcagttgtggagtttagcaagtcagggaggggcagaagtgcaaggcagtgagatgtgacctgtctggcccatattgcgatgctcaggcgtgtccttggcccgcagtggaggttgcagaaatggcgggtggaaaccatctgcgatcgcagaagagtggttggttacactagccgcttgggttgcaaagctccttgcaaggaacattgctgcgggatggtgcgggacggcggaggagtctaggaactaggagctaaccaattagagctgtggatatggcctgaagatgctatcaaggtggggatcgtccgcggtaccgtgtgaaagagaactcagtcggtaatagggggaacgccaaatcctaggctatgttcaaaagacttccaagcgggggcacctgcgaggataagaaacggtgtccgaggagcggattggaaagggcgtccaggaaatgaaagggaccgatatggtcagacca

SEQ ID NO: 555526 - DNA, 776 bp, Homo sapiens
gctgagtcgttggggcgcagctcgctcagcgccaggatgacgtcggtgaagcgacgctgggtacgcaggcagtgccacgcggaaccggtacggcctcgttcaccttgacgctgcactccccgcgcctagccagcacctctgcctcccggcccctgggacaggaaagtcctacttgacccgcggagagccctagctacagccctggcggctcgtgcggtgtgccgcaggtagtggacgtggcaagggatggtgagggcgcctgacgagcacgccctgcagttggcgctgtccgccctgctgatgccgcactgctgataatatgctgcggtcctctgtcgaacgggttggagccggctggtaacttgaacggctgtcgaccctcagagtcccacccaggtggctctccgaagccgcccgctccagcgatccctccattccctgtgccccagggagttccccggtgccgccccgcgtaggacgcagcggagccacggcgcccagcggggcccagcggtgtccgtggccgtgccgtacctatctctcgttcccactcccactgcggaaccataagacacaccacacaccagcgagaaatcagaacacactctctacaatactccacaatatccccactaaaaagatgttcctacccacagtgacagaaactctcaaggaacaaccacaagcgggacctcctcatatagtacctgtggctatccctcgaacaatggttcatatccaacgtatccattcttccaaacaacatttcccctatg

SEQ ID NO: 555527 - DNA, 402 bp, Homo sapiens
  misc_feature (41)..(41): n is a, c, g, or t
  misc_feature (48)..(48): n is a, c, g, or t
  misc_feature (61)..(61): n is a, c, g, or t
  misc_feature (74)..(74): n is a, c, g, or t
  misc_feature (86)..(86): n is a, c, g, or t
  misc_feature (115)..(115): n is a, c, g, or t
  misc_feature (133)..(133): n is a, c, g, or t
  misc_feature (140)..(140): n is a, c, g, or t
  misc_feature (142)..(144): n is a, c, g, or t
  misc_feature (148)..(149): n is a, c, g, or t
  misc_feature (151)..(151): n is a, c, g, or t
  misc_feature (153)..(153): n is a, c, g, or t
  misc_feature (157)..(157): n is a, c, g, or t
  misc_feature (166)..(166): n is a, c, g, or t
  misc_feature (169)..(169): n is a, c, g, or t
  misc_feature (174)..(174): n is a, c, g, or t
  misc_feature (183)..(183): n is a, c, g, or t
  misc_feature (192)..(193): n is a, c, g, or t
  misc_feature (197)..(197): n is a, c, g, or t
  misc_feature (199)..(199): n is a, c, g, or t
  misc_feature (206)..(206): n is a, c, g, or t
  misc_feature (229)..(229): n is a, c, g, or t
  misc_feature (237)..(238): n is a, c, g, or t
  misc_feature (241)..(241): n is a, c, g, or t
  misc_feature (243)..(243): n is a, c, g, or t
  misc_feature (252)..(252): n is a, c, g, or t
  misc_feature (254)..(254): n is a, c, g, or t
  misc_feature (270)..(270): n is a, c, g, or t
  misc_feature (276)..(276): n is a, c, g, or t
  misc_feature (279)..(279): n is a, c, g, or t
  misc_feature (299)..(299): n is a, c, g, or t
  misc_feature (312)..(312): n is a, c, g, or t
  misc_feature (335)..(335): n is a, c, g, or t
  misc_feature (337)..(337): n is a, c, g, or t
  misc_feature (362)..(362): n is a, c, g, or t
  misc_feature (381)..(381): n is a, c, g, or t
  misc_feature (386)..(386): n is a, c, g, or t
  misc_feature (389)..(389): n is a, c, g, or t
tgcactgatggtgccaaagggccctgagtcaaaaggaaagncaagggnggagtggaaaaanaaatggtgaaggnagaactgctcanaccagacaccaaaagcacgtcctcaaganttcactagcacgcagctnattccanannnggcnntnanagancctaaaaanagnagacnagcacaaanactggaaanngcangnaaagtgnaggaaactgccagcacaaggaanaaaagaanngtnanagacacccnanagagggtaagtttcanaattgnaanttgagagctccttcaattanattgactttcttnggttttccttgtgcattaggtananattttttgaagtatttttgccaacnaaaatgaagtctgtaaatnctgtnaanaaacaaggagttc

SEQ ID NO: 555528 - DNA, 115 bp, Homo sapiens
taatatataacagtaagtatagtccactgatgctttaaatacagaatggtatttttgagcagagtagagatgaacttctatgacagtggaacttaactcattcacaggagaaatg

SEQ ID NO: 555529 - DNA, 636 bp, Homo sapiens
  misc_feature (497)..(497): n is a, c, g, or t
  misc_feature (549)..(550): n is a, c, g, or t
  misc_feature (555)..(557): n is a, c, g, or t
  misc_feature (582)..(582): n is a, c, g, or t
  misc_feature (588)..(588): n is a, c, g, or t
  misc_feature (595)..(595): n is a, c, g, or t
ggatctaatggttttaatttctaaaagttatttcttatgcttaagataatcccatttcatgaaaatttgatcttatttcataaatgtcatgtctattctcaactctacagaggttcttataggctttattgacatcatctgttgttacctacattttcataatttcctctaagttcatggttttgtttgtataggactctgtttatgataaggtactactcaaactaaatttgagttttggatataaatttatatgtatacacagggctttacaaagtatgataagctctatggataaagaagacagagcctatataatacaacaggcatgtttctgataaagaggcaggtattaggagtatgcctaataccagtgtgatagatgcttttctggtaatatcttagagctattgacattgttcactgaagatatgtgggggttagtggtacaatggcttcttctgttgactttcctctctatacatctactggtccanacattttcatttcatctacaaatagtgacatctcatctagtgtcagtgctannatgcnnntatgggtacttacaggatagtaaancatgcnatttcancagcatgtaaccagagatccttatatatcttagagaagaaa

SEQ ID NO: 555530 - DNA, 935 bp, Homo sapiens
ggaagccagaaatacgcagatcgacaaacaacagaattccaattcggggagacccccacatccttgttgttggagatccaggcctaggaaaaagtcaaatgctacaggcagcgtgcaatgttgccccacgtggcgtgtatgtttgtggtaacaccacgaccacctctggtctgacggtaactctttcaaaagatagttcctctggagattttgctttggaagctggtgccctggtacttggtgatcaaggtatttgtggcaatcgcatgcaatcttgcatcaagatggcggcaatcaacatcaagccttgtcggcaagccatggagccagcaacagctattcagtcttgctcacaggctggtgtggtcttgtcagccttcctgcaagcaacttccattcattgcctgctgcacaatcccagttggaggcacattcacaatacaagccaacaaccagtttctcgagcaatttaacaaatggggagtgcactactatccagatttgattaggtcttcatcctgttagatactccaaatgagcatcatgatcacttactctctgaacatgtgattgcacataagagctggcaccgcagagaaccattagcagtgccacagtagctcgtatgcatagtcaagattcacatacttccgtacttgaagtcgtgtctgcgaagccatcatccgaaagactacaggtggttcctgggagaaaccataagatcgcattcccaacaaactatggccaacgtacatggctatggtacggcacctgtgtaccccaaggtctcccaagaacaggagaagtcatgcacgacgaacccctgagtcccggaaccagagcacgaggcaacaacatcacacaccatacaggagaggacccggaagcgtgagaacaccagcaagcggaatccaagcaacccaaaacggggaaca

SEQ ID NO: 555531 - DNA, 921 bp, Homo sapiens
  misc_feature (8)..(8): n is a, c, g, or t
agcctgcncgaagcgctgttagtaagactgtaaggagaaaccctggagcacctcggtggacagtggggtaaaaaaggcgtgccaaacgggggtgggagagcgcgccacggggataaaaaaggtgggggaaaaaaaggcgacccgcggggttgccaaaacccgctgggggaaaaaaaaaggccgggcaagagcaaccccccacaagggccccggggttcggggaacagagggtagaacggttcggatcacagagccctctatacttgggccacccaccagggggcacagaagggggccccctcaaaccgggattgcctcaaaggagggtgtttgcccccccgccaaggtggtcagaaaagataacgtgtttggccccacgcccccggtcgttgtctttggggacccctcagggacgattaaggtgcctatgcgtatatagaagatgctcggtgttactttttttagaaggcacatactcgtgcagcaactcaccccgcgggcctgttttcatgggaaagcggcctccacccctgcaccgcggatccattagacccgccttatgttctaaaagctcgaaaatagctatttatgttcacaagaaatatgtgccactgtttttatattcagaccacaataacgctgcctctaatcaataccgcacgtaacaacaccacgcaggctgtgttaattcagcaatctctttgctgaaaacgctgccccccttatgtgcgactatgtgaatttttcacaaatcaccacaatcccccctcaacactggatacgccgatattgaattctttctaacaactcgttcttttctacaaaaccccagaaatattatctctttaaacattctgtcaaacgagtttggaccaccaagcaccaattcaagattttgaaacctcctgtcccaacaaaaca

SEQ ID NO: 555532 - DNA, 474 bp, Homo sapiens
  misc_feature (36)..(36): n is a, c, g, or t
  misc_feature (66)..(66): n is a, c, g, or t
  misc_feature (76)..(77): n is a, c, g, or t
  misc_feature (80)..(81): n is a, c, g, or t
  misc_feature (84)..(85): n is a, c, g, or t
  misc_feature (89)..(89): n is a, c, g, or t
  misc_feature (101)..(101): n is a, c, g, or t
  misc_feature (131)..(132): n is a, c, g, or t
  misc_feature (172)..(172): n is a, c, g, or t
  misc_feature (183)..(183): n is a, c, g, or t
  misc_feature (189)..(189): n is a, c, g, or t
  misc_feature (194)..(194): n is a, c, g, or t
  misc_feature (198)..(198): n is a, c, g, or t
  misc_feature (211)..(212): n is a, c, g, or t
  misc_feature (226)..(226): n is a, c, g, or t
  misc_feature (231)..(231): n is a, c, g, or t
  misc_feature (234)..(234): n is a, c, g, or t
  misc_feature (257)..(257): n is a, c, g, or t
  misc_feature (270)..(270): n is a, c, g, or t
  misc_feature (273)..(273): n is a, c, g, or t
  misc_feature (276)..(276): n is a, c, g, or t
  misc_feature (285)..(285): n is a, c, g, or t
  misc_feature (289)..(289): n is a, c, g, or t
  misc_feature (292)..(292): n is a, c, g, or t
  misc_feature (295)..(295): n is a, c, g, or t
  misc_feature (303)..(304): n is a, c, g, or t
  misc_feature (309)..(309): n is a, c, g, or t
  misc_feature (337)..(337): n is a, c, g, or t
  misc_feature (342)..(342): n is a, c, g, or t
  misc_feature (386)..(386): n is a, c, g, or t
  misc_feature (400)..(400): n is a, c, g, or t
  misc_feature (474)..(474): n is a, c, g, or t
aaaacaacacatatttcatgttagttttaataaganattccctatcctctgccccagtaaaacctnaaccgaagcnnagnntgnncggnttatatcaatanaagtgtgtagtggtgtagttgtgtgtagtnnaagtgtgttggttgtttagactagggggtggggttacagngtcgggggggncgtggntgggngtcnggtgtacttggtnngttctcttgccccntcacntcnttggtgagtagctaatttcagcngctggcttcatanggnggngtcaggggngggnggnggntcctcccnnttccngttccacttcctcttctccttctgtctnctggncacttaggtcttactgagatggttttcccacagtaaaggggggngggggcagagtacnaagggtcaggggtgtgactccttcccatgactcaggcctctgtgctagtggtgacccttatagggagggggggn

SEQ ID NO: 555533 - DNA, 488 bp, Homo sapiens
  misc_feature (38)..(38): n is a, c, g, or t
  misc_feature (377)..(377): n is a, c, g, or t
gtgatctgaggtcccctcacgcttatacttctttcctnttttaggttcctgaaagtggtttcagacaccccaccacagatccaggaagttaagagaacaccaagcaggataaatccccaaaaaaagaaagaagaaaaagagaagaaatgaagagaagaaaaaaaaaaaaagaatgaaggaaaatgaagagaatctgagggacttcggggatagcatcaaatagaagaaaacatgctttatgggaacctcagagggagaagaaagaagggggtagaggacctatgtgaagaaataagggtgggaaacttcccaaatctgagagaatgggctatacaaattcaagattctcagataattccaaccagaataaatctaangggatctaggggatctacactgagacatataatcatattataatgaaacggtctagtgacagagatctggaaagcagcaaaaaaaaaaaaggcaccccggtatttacaagg

SEQ ID NO: 555534 - DNA, 377 bp, Homo sapiens
ttgagcgtacaacgtcggcctgtgtagcgctattcgttttctaagctatcccatgggaataagcctgcgacgatccagacacggatacagggaatatttaatattttgggatagagcgcctattggagaatgttgtgtgttgcaagtcagcagtgctttttctgatacttaaccccagaatgatataggtctatgcccatctggtctctagcagtgctggaccagtgcagctttcctgatgtgggggcctgcctctttaaaacttgagtatgaaagagcagctcagaaatgtgtgtgctttcatagagtgaatttgttcccaaagagccacagttttttatttagtcattttttcgtcaaatgttcatcaacaacaa

SEQ ID NO: 555535 - DNA, 382 bp, Homo sapiens
ccgcatcgtcctggactcgcatttcacagttgactcatggaactgtttattgcatggagttacaacaggattctgaccagtaagttctccttttagtgtacagatcctttaacgttaattgaagatgcttcagattcgacaccaacaaggtgctaacccctttgatctggccatttgctcgattttcacaatacattttatctcccaaatatcatttactcccaaagaatgaactgcttcagttaagtcttcatctgtggtccacgcatgttagatttccaatatataatgcaattctctttccattatatgtctagacaacatttggtgctgctcctttacccattttatcaccaacagttggtgggagagtatccatatt

SEQ ID NO: 555536 - DNA, 159 bp, Homo sapiens
aagcgcgacttctgagtctgttcacagcgaggatttggagtctccaggtctcatcagggagtgattgtcagcggacgctctgccctgtctggcttcaggtccaggaaagctttgaagcagtcaagccttgtactatgtaccccaatgtgtccatgtctt

SEQ ID NO: 555537 - DNA, 119 bp, Homo sapiens
gtacctgacgacgaggagtgaagaacctttacgcctcggcagccctaccggcagtggatcgagaacgtgcgcatcaagctcgactcgattcccgcgcaggcccaaggccccggccagtt

SEQ ID NO: 555538 - DNA, 511 bp, Homo sapiens
  misc_feature (449)..(449): n is a, c, g, or t
tggcgtggttaggataccaggagctgatgaatgtcaagtggccctggaggtggagatcgccacttaccgcaagctgctggagggctgaggaatgcagattcagtggagaaggagttggaccatgtcaactatctctgtgtgtcacaatgcagtgtttcctcgtggatatggcaggtggcatgtggctaatggcgtgtggcctcggttggaggtcttggccggcggcctcgggtggaggtcttgccgggagttagccagtggaagctactactccagcagcagtgggggtgtcggcctaggtggtgggctcagggtggggggctctggcttcagtgcaagcagtgtccgagggctgggggtgggctttggcagtggcgggggtagcagctccagcgtcaaatttgtctccaccatctcctcctcccggaagagcttcaagagctaagaanctgctgcaagtcactgccttccaagtgcagcaacccaggccatggagatggctcttctaggg

SEQ ID NO: 555539 - DNA, 240 bp, Homo sapiens
  misc_feature (79)..(79): n is a, c, g, or t
  misc_feature (124)..(124): n is a, c, g, or t
gggctggtaattttgtatttcagtagagacaggtttcacaatggtctcgatctcctgacttcgtgatccacctgctcgngctcccaaagtgctgggattacaggcatgagccactgtgccgtgncaagaattagttatttttgtattgatccatcatggtcactgaagagcatcatctcacatagcaggtgtatgacatgtgcctgttcaggggcacaagactcgggcttctggcgaggg

SEQ ID NO: 555540 - DNA, 1434 bp, Homo sapiens
  misc_feature (116)..(116): n is a, c, g, or t
  misc_feature (129)..(129): n is a, c, g, or t
  misc_feature (132)..(132): n is a, c, g, or t
  misc_feature (281)..(281): n is a, c, g, or t
  misc_feature (284)..(284): n is a, c, g, or t
  misc_feature (298)..(298): n is a, c, g, or t
  misc_feature (300)..(300): n is a, c, g, or t
  misc_feature (312)..(312): n is a, c, g, or t
  misc_feature (318)..(318): n is a, c, g, or t
  misc_feature (320)..(320): n is a, c, g, or t
  misc_feature (331)..(331): n is a, c, g, or t
  misc_feature (334)..(334): n is a, c, g, or t
  misc_feature (339)..(339): n is a, c, g, or t
  misc_feature (360)..(360): n is a, c, g, or t
  misc_feature (579)..(579): n is a, c, g, or t
  misc_feature (697)..(697): n is a, c, g, or t
  misc_feature (867)..(867): n is a, c, g, or t
  misc_feature (919)..(919): n is a, c, g, or t
  misc_feature (942)..(942): n is a, c, g, or t
  misc_feature (1039)..(1039): n is a, c, g, or t
caagatatggccccagcctactttatcctgggaggcaaccagtctggggaaggtgtgtgattacacgagacagaaaggaatcatggatgtatatgaactcgatgctaagcagggtngatggtatgtggnacnaacaaattatgaccgttggaaacatcccttcttccttgatgatcgcagaacgcctgcaaagatgtgtctgaaccgaccagccaagagaatatctcatttgaaaccatgtatgatgtcctgtcaacaaaacctgtcctcaacaagctgancgnatacacaaccttgntngatgttaccaanggtcantncgaaacttacntgngggantgccctgacccttgtataggntggtgagcacacgtctggcctacagaatgcggcctctgagacatgaagacaccatctccatgtgaccgaacactgcagctgtctgaccttccaaagactaagactcgcggcaggttctctttgagtcaatagcttgtcttcgtccatctgttgacaaatgacagatctttttttttttccccctatcagtggattttcttatttacagataacttcttnaggggaagtaaaacagtcatctagaattcactgagtttggtttcacttggacattgggggatctgggtgggcagtcgaaccatggtgaactccacctccggtgaataaatgggagatncagcgtgggtgtggaatccagcacgtctgtgtgagtaacgggacagtaaacactccacattcttcagtttttcacttctacctacatattggtatgtttcctggtataacagccttttccttcgggttctaactggcggttaaaattaatatatcattatcttggcggtnattggacagcgatataattttattacatatgattagagggatgagacagacnttcacctgtatatttcttttaangggcacaaaatggggccctgtgcctctaaatagcactttgggggttcaagaagtaatcagtatgcaaagcaatcttttatacaataatggaagtgtnccctttttcataattactctacttcccagtaaccctaaggaagttgctaccttaaaaaatgcttcccacgttctgttaatttagtaaataaacaagtcaaagacttgtggaaaataggaagtgaacccatattttaaattctcataagtgcttctgtataacaggtttagttgtctcaacgatagggtttaagcattcgggttactaaaattatgttactgtatttttcagaaatccaactgcttatgaaaagtactaatagaacttgttaacctttctaaccttcacgattaactgtgaaatgtacgtcatttgtgcaagaccgtttgtccacttcattttgtataatcacagttgtgttcctgacactcaataaacagtcattggaaagagaa

SEQ ID NO: 555541 - DNA, 187 bp, Homo sapiens
ggggggggcccccccgggggggggggggggcccccccccccccccccccccccccctttttgtggggggggggggggggggggggggcttttttttccccccccccctccttgggggggggggtttccggggggttttttttcccccgggggggcttttttttttttggggggttttttttttttta

SEQ ID NO: 555542 - DNA, 752 bp, Homo sapiens
  misc_feature (116)..(116): n is a, c, g, or t
  misc_feature (129)..(129): n is a, c, g, or t
  misc_feature (132)..(132): n is a, c, g, or t
  misc_feature (281)..(281): n is a, c, g, or t
  misc_feature (284)..(284): n is a, c, g, or t
  misc_feature (298)..(298): n is a, c, g, or t
  misc_feature (300)..(300): n is a, c, g, or t
  misc_feature (312)..(312): n is a, c, g, or t
  misc_feature (318)..(318): n is a, c, g, or t
  misc_feature (320)..(320): n is a, c, g, or t
  misc_feature (331)..(331): n is a, c, g, or t
  misc_feature (334)..(334): n is a, c, g, or t
  misc_feature (339)..(339): n is a, c, g, or t
  misc_feature (360)..(360): n is a, c, g, or t
  misc_feature (579)..(579): n is a, c, g, or t
caagatatggccccagcctactttatcctgggaggcaaccagtctggggaaggtgtgtgattacacgagacagaaaggaatcatggatgtatatgaactcgatgctaagcagggtngatggtatgtggnacnaacaaattatgaccgttggaaacatcccttcttccttgatgatcgcagaacgcctgcaaagatgtgtctgaaccgaccagccaagagaatatctcatttgaaaccatgtatgatgtcctgtcaacaaaacctgtcctcaacaagctgancgnatacacaaccttgntngatgttaccaanggtcantncgaaacttacntgngggantgccctgacccttgtataggntggtgagcacacgtctggcctacagaatgcggcctctgagacatgaagacaccatctccatgtgaccgaacactgcagctgtctgaccttccaaagactaagactcgcggcaggttctctttgagtcaatagcttgtcttcgtccatctgttgacaaatgacagatctttttttttttccccctatcagtggattttcttatttacagataacttcttnaggggaagtaaaacagtcatctagaattcactgagtttggtttcacttggacattgggggatctgggtgggcagtcgaaccatggtgaactccacccttctggggaaataatggagttttaacccgtggtgttaaatccttccagtttggttaaagatacggggcaaagaaaa

SEQ ID NO: 555543 - DNA, 368 bp, Homo sapiens
tagatcctacgcccataatccagtttcactactcattattcatcgcgcgttaatctaactttcttcccacaacactttctcggcctattccggaatgccccgatgttactcgtactacctcaatacatacaccacatgaaacatcctatcatctgtaggctcattcatttctcttacagcagtaatattaataattttcacttatttgagaagccttcgcttctatacgataagctccttaatattatattggtaggatgaggtcatgcatgatctgtttcatgttttttttgattgcccgcccctccttcaaggcatccatattgttgtagaatttgtcttccgcctagaccatctcagaggctgtt

SEQ ID NO: 555544 - DNA, 324 bp, Homo sapiens
cctcgctggaaaaaagagtagcgtgtgaccttaggaatcaatggggctggactgaatccccgagaattagtacctacagacccagttcctgatgaattcccgtgaaaagcatagctataagaaattgaaacaatgataaatggccccttgagagaatcatacagtattatgggcctgctacttaggcacaagatggctcgtggggataccggatccccattatatgatcaaccgatcatacggtacaagctgtcttaaaaataatcactgcaccgcaggccttgactatctggccgcagaactcagtggaatgctatcttcaaa

SEQ ID NO: 555545 - DNA, 925 bp, Homo sapiens
gaatactgctgtaggaaaaaaaaaaaaaaaaaaaaaaaaaaaaaaaaaaacctaaatttaaatttttttccccccccaaaatttttttttgggccttttttgggcctttttaaaaggttggggttaaagaatcttcttaaagggtttaaatctaaggagactggtatccatctatatgatgggggaaatattctgttggagaagaaatatccttcttcaaacgggcctatgggggtaatgttttcttctctctggtgaagaagaatcgatccttgatgaatacaattccgggtccacaatggtgggttttatttgtcacccattgttggtctgcaaagaataggggcagaacgcgggttttgaaaatctccttggaaatagtaacgtgctcctcaaaacctattgcggtggtgtgtatggacgcactccttttttctcttaaccatatgggggtgtgcgtccacacactctgtggtggggagcgggggtggaaaaatctctctcgaaaaatgggtgtggggaggaagtgcgtccctccttttactacccacagagggctatatcccagaaaattgttaaaaccagctatttttcgcctctattccaagaaaagttgggcattcccccctcttttagatgtcgtttgaaaattttttttaccccgctttgtgggggagaattattctagatatacagtgtgatacagtaagctgggagaaaaatatttttccacccattctttttaaaaggaattatcttcacaacatatttactaccgcggggcaattttcttataggttcaggacaagctgtttttactccacaacttgtttttgggggctgttataaattgttatatataaataggcggggcttataaaacaacgagttgttattagaatcgctgctttttagaagaatttgg

SEQ ID NO: 555546 - DNA, 395 bp, Homo sapiens
gacgacggttatagataagcttgattccctataccccacagtgagaagcggtaagctaaaggagacagacggcgtagcctttaaaaacaattcaactatcattttaattgttgctatagtaaagttcacaattaaaataccctggaagttcaaatatggaaatgagcagttatggggtcatagggctacaacaatataaatggcagatatcagtgcaggggtaaagggtagtaggctactaggcgggcatgactagacctaagattttgaatagccagtatgtaccaagactacaatgacacctatgggtaacgtaggtttcatagacagtacctacagcttctatcatacatgtatgaaatgagtagctaaacacctaccaatagagactatta

SEQ ID NO: 555547 - DNA, 235 bp, Homo sapiens
ctgtaaaagtgggagctggatggaatgtgtctgtagaggagtgagcttgggtggaatgtgtctgtagaggaggagctggatggaatgtgtctagcagaggaggcgctggatggaatgtgtttgtaaaggatgagactggatggaaaactgtctgtagaggaggagctggatgaagtgtgtctgtagagaaggagctggataaaatctgtctgtagaggaggagctggatggaatg

SEQ ID NO: 555548 - DNA, 272 bp, Homo sapiens
aaagacaaataatgcgtagaggcagcaaagcagatctggtgagtgacataggagatactgtagaggacccctacacatcattagtgaagttgctacctctgaatgatcgccgatatgcttcgtacgatgccacatacgaaacaaaagagtctaagcaacagcaagacctcagtatttcatattctgggctcctgcaaagtgcaccctttacacaaagcaagcatgcatttatcgctcagcgtctcaaagcatgcccaattaaacaagcacaa

SEQ ID NO: 555549 - DNA, 358 bp, Homo sapiens
ataaaattttggtctccccaacctcttacttcaacccagatatttcctttttattgatcccaggtctttagataaacttaaccaattgtcaaccaaaaaatttttaaatctgcctataaactggaagctccgcactccgctcccctcccctccccgcccttcgaggttgtcctgcctttttggacaaaaccaatgtattttttaaatggacttgaagtttcatgtctccctaaaatgtataaaacccagctgctccctgacccccttgggtacatgttttcagggtctcctgagggctgtgtcatgggttatagtccctcaaatttggcttaaaataaatctctccaaatattttcca

SEQ ID NO: 555550 - DNA, 542 bp, Homo sapiens
ggtctagaggactccccagcgacatttgctgtgggtgcagcaagtctatagaaggtgtatatcagtacaaggagaagcaatatactggtctcctcgagctccacaacagacattaaattatatgatcaaggcgtgctcatgctctcacctggaagaatctgaagccccatatacaaggcattatccaagatgttatttttccattgatgtgctatacagatgctgatgaggaactttggcaagaagacccttacgaatatttacgcatgaagttagatgtgtttgaagatttcatttctcctaccactgctgcccagacactttagtttacagcctgtactatgaggaaagaggtactgcaaaagactatgggatccggttaccagattcttacagaaccaaatgctgaccctcgaaaaaaaagatggagccctgcatatgattggctctttagcctgaaatacttctgaagaacaaagatctatacagatcagatggaatacatgttgcggaatcatgtattccctctcttcagcagtgaa

SEQ ID NO: 555551 - DNA, 386 bp, Homo sapiens
atcaccatgtatggcagacactacttcatgtatacgtaaacaaacttaacataagaaataacttcatagtatacatgtaacagaaaaatatcattcacttatacttccacttccctttaaagtatatctcaaattatatttcctgacactccaatcgaaagcatacactcttaatcatggcaccgggtcgggtacacattggagaccaaaatctggtgacaccatctatatatgtacttagccatattcttaaatgcctggcaacacagtcgatatttcccagctgaatatgacattaaaaaactaaattacaaagcgatagagatactaaagcccaagtagagggactacatcattttgaagcactctagaagggggatgtgcaa

SEQ ID NO: 555552 - DNA, 117 bp, Homo sapiens
  misc_feature (39)..(39): n is a, c, g, or t
gttgggtcttgacaagcctgatcacttcatgatcccgtnacctggcacaggaggtgcagccaatctctatttgatttttggcaaccttttcttgatgtataatttacctattagaaa

SEQ ID NO: 555553 - DNA, 347 bp, Homo sapiens
cactggttggcagaagaacagaattggagacaggacacgtcttactgggatgtaagtcctgatgttccccattaagaaaaaaggccaggcataccaacactttggaaggctgaggcggacggatcatggggtcgggatattgagaccatcctggctaacaggtgaaacccggtctctactaaaaatacgaaaaattagctgggcatggtggccggcacctgtagtcccagctactcaggaggctgaagctggagaatcgcttgaacttgggaggcagaggctgcagtgagccgagttcgcgccactgcactgcagcctgggcaacagagtgagactctgtctcaaaa

SEQ ID NO: 555554 - DNA, 175 bp, Homo sapiens
tgggttccttgcagaagtttcgaacatgagtttcagtttcagttttgaagatgaaaaagttctagagatctgtggtacaacaatgtcaatatagtttgactactaaaatggacacttaaaaattgttgccctctcctctggctcgcattttcactctgccatgccctgctctgca

SEQ ID NO: 555555 - DNA, 101 bp, Homo sapiens
tcgcgataagggtgatgtgggcacaccggtactggtgtggcactcagtcattcccattctgatctcagaggctggagaggcagcagagggtccagtggtag

SEQ ID NO: 555556 - DNA, 424 bp, Homo sapiens
aaggagggtacttactccagcaaggaggacatgattagtgttccagcatgaaacctttgaagtgggtcagcaggaaaggaagaaaaagcaaaagcagccagacatgggagaatcagaacatttcttgttgcctaggttattctggtagactttgaaatgccagtccctattagtttggtgggtaaacattctcattattttctgtaattggcattattattggaaggtaattaacgacagtaacattttcgtataacactcagacctggatgggtcttaatgacttcccttcagtcttgcgtgaagttgttttctgtttgatttttgagtgcctgaaactacttagggttctggctgtgagtggactctgctggccctgctatgttttataatataattgcattgaccatgcctgtcaaattgt

SEQ ID NO: 555557 - DNA, 1885 bp, Homo sapiens
gagagggccatggtcatccctgatcggatgtttcgggctccatctgccacaggactgtgatgctagtcgctcatgttccatctccccagacacgtgcaccggtctggggtctcctgcacgctgcagactccattctattcgggcccgagagatccaaggcgcatggggtgcacacgttggttccgccacatgtagccgtcgccgggtcaccgctgcccaggcattctagcatgtgcataagttgcattggcattgaatggctcgttggtgctgcatcatgacgagacggcactgtgcgatatctaccctggtttgactggccaccttgagtggcgagccgtgcgcgcgtggagagattgttagctgccggagaccgtgggttcgtacgaccccagagtgtcagtgtcgcatgggatgctgtccgacgctgctcttggattgctctccagactagctaccgtgagctcggccccatctttggcgatagcggttgggcgcgttgtccgcgccgcaactgcttttgggcgccatgtgcacaagccatctccatccatatttacagatcccagtgcgcaaacaatggcatgggagacgtgacgccaaggggaggatggacaccgagatgtgaacgccgacgaatatgtgggccatgggcggggcactggtcgttggtacattggcgttaccttgtgtgggaccgacagcggcaccgcggtgccgtttttgcctggggattgggcgcagggaaacccggaaggttgtaccacttgggggttcttcggaccgacttcgacgaaagtttcatgtgcatcgcttaggcccccttgcactggtcgggccgtgcgtactgacagggcccatgggtgtcctaaagcaaggccggggcccatttggctgctggtcgaagagggcgctgtggcccggaaagttaggccaaaccgcggtcgtagtggcctttcgcttgccagccatggggacttttaacagcaaggcccccgcaaggaactcccatcggggcgtaggaccgtaaggcaggagacagccacacgttgacaagccttgggtcgctgcaccccaacatgaaattgcggacccacacggcatcgtggggacttggctagacaataacacgtgctcactggcgtatgtaaatccaccgcgacacacaccgtacaatgtagaggcccaagtgacacagcccctacccgggagcaactaaccaacaatgggtcgaggaccagcagggggtaatagaaagagaaaacaccaagaaagaggcaccccaccaggacaggggtgatcgtaaaacggtgtactctagtaacccacacatggatgccctgtaaccagtggtgtcacaaattgatcacatgagatgcataaaacgcaattataaacagctttaacatataatggtgatgctccaggatgtatctattgtgagtacatagttgacttccaactgcgtaccaaccgggtgtgtgatcacactagtgcgcacgagcaacacacaattagctgtgtgcaccagtgcataataagactaaagcgagtgacacacactcaacacgatgcaagatcgagtgacacactagagagcgcacgcggaacaccaaagaagatcagagccgaaaaaagaaacctatgacagacatcgacacaccataccagagcagaccgacagagactaaactacaccactcaccagccagcactcagcccaacacacaaacaaccgaaggtctcatctcaatcacacatacggagaatcaaccacagtcgaaggcagagaatagatcatgcgaggcacacacgagctcacccatgtcaggcgacgaggagacgacacgtactcctcagaccaacatgcacatatatcttcaag

SEQ ID NO: 555558 - DNA, 336 bp, Homo sapiens
  misc_feature (8)..(8): n is a, c, g, or t
aggatccnccgggttgttgtgtgggtagaagtcgagacgctgcgcggcacggccgtagaggaaagctggaaagcaccatgctgcgcactgggagggtgtcagtgcttgctagatggcgatgaggaggaggattgtgagatcacgcacacaggtaccgcagtcaccgccgcagacattgctgcaaagaccgttttcccatcttccaggcacggtcagtgcggacacaaccggtgcagatacgattggtgcagatatgattggtgcagacgcggttggcgcagacggtgtcggtgcagccacgattggtgcagccacaactggcgaagccacgcttgg

SEQ ID NO: 555559 - DNA, 800 bp, Homo sapiens
tgaagcctcactacaggcaccgtaagcttaaagtaggacaaccatggagcctttctgtggcaggagagacaacaaagcgctataatacctaaaggtcaagagaagtgtaagcctaacctgatttaaatatagtaatagaggactatagcctaccaactcacctctttctaggagatagaagcataccgaatggaatagctatgaagtaacccctagggctatctactataacatattaagacaatgctgtatatttaataaagcatgctctataaataataaaaggcccaaaatctacaagacggtagctatgaagagggaagggaaaaagtggaggaaatgctgggacaaccaactatttccctaagacttatatccagacagcactgtataaaaggcaatggtacctacccacacaaagacaactatctcttgaccacatacgccaaccaccgtaacctaattagatactagcaacaagacccttgcaacccctacacctccgattgcaaggccaagtaaagcattgggatacctatgtagggacatagaataccataaatacggataatcaaagggtcaaacgaataggatgtcgaaggatctataggaagggatggaaactattgtaaagaaacaggccaattaaatttgccctgcaaaaaggtcaaacagaaaggagaatcacaaaccaacagctaaattagctctataataattacttatccagtgaactaaaaacaaactaaaaccagtaagtggagaaatacatgtccagaaactgactgctgaataggact

SEQ ID NO: 555560 - DNA, 154 bp, Homo sapiens
acctgtgccgggcctaaacggaactgatggacctggcccggacatggtggaatcagttcagcgtgacagctctgcagctgatgcagagccaaccgggactgtgtgtggcttccacctgggactacctaggataggtgacggtggaacgctggtc

SEQ ID NO: 555561 - DNA, 499 bp, Homo sapiens
  misc_feature (377)..(377): n is a, c, g, or t
  misc_feature (401)..(401): n is a, c, g, or t
  misc_feature (435)..(435): n is a, c, g, or t
gacgaggaactcagcgacgtgctggaacgattctcgccaaggttccacggtgtggtagaggttgcgccccggcagctcaacgtatttcgcgcccgggatgtgatcggcgacgtacttgccatcagcgggtgggacaaatgagtcgttcctatgctggacgataagcgttggcacgcgcacggtcggaagcagcgcccgtatctccaattcggacaccaccggcatcatgacagcaacggtccgcgggctcgctgccagccgttcgaatcgcgcccacgtcgcccggatctcctcattccacggcatatcgggattgagcgctcgttcgaactcgcccgttccccacacggccaccatcgcatcgaagaacgtctcangagtaaccccgttgtcgcgctcanccgccggatccgcgtagacctggagtccgaccanagccgtggtgcgcgacggataagtggccgcgaacagcgccgcgggcgcgaaagcggcattcggg

SEQ ID NO: 555562 - DNA, 505 bp, Homo sapiens
gcacgagacaactactttgaaaacctttattataggtgaatgcaaaagtaattgcggtttttgcactgttggaatttgccatttgatattggtatacattcttaaataaatgtggttatgttatatatcattttaatgcgcatttctcgctttatgcgtttttgctaatgacttattacttgctgtttatgtttattttagactatggaaatgatgtcagacaaaaagcgaatttgagtgactttcttattcgagttcaaaatgggtcgtaaagcagtggagacaacttgcaatatcaacaatgcatttggcccaggaactgctaatgaacgtacagtgcggtggtggttcacgaagctttgcaaaggagacgagggacttgaagatgaggagcatagtggctgaccattggaagttgacagcgactactcaagaacaataatcaaagctgattctcttacaactacacgagaagttgctgaacaattcaacattgaccattcta

SEQ ID NO: 555563 - DNA, 283 bp, Homo sapiens
gcatgtcactttgaaaaaaaaaaaagtacctgtacctgtaatataatatagactccaatgtgtttgttgaatggataaatgaagtgatttcataaaatttattcgatttaataaaatctacccccaactacagccttgtgaagtatgaattgttgtgcccattttaaagatgagaaaactaagactataagggttaagtgacttgtccagataacaaaacatgtaagagtaggaattgagagtaaaatccaaatgtggctgggtctaaattcaaggatcttaa

SEQ ID NO: 555564 - DNA, 203 bp, Homo sapiens
catgttcaagtggcgaagggggcgagacatccaaatcgctatgagcattttgtggggcgactgccgttatcgaacgaggtctggggtgtgctgcaagacgtgagaacgaacatgctatgccccggtcccctccttgcattaaaaaatcctgctgccccagaacgtaggtcttggaataaaatgaataattctccttgtttcca

SEQ ID NO: 555565 - DNA, 704 bp, Homo sapiens
ggtagtccctggagtgcgttcttgatgccgcactgctacgatgaggtctgcgacggaaaacttcaagtaaatggatgggtgcacactcttcaaatggtctccagcctgcagctgtgaccctggagcctagaggtggcctccatcctgcaggtgtactcgtgccgcccaccatggaactcggacacgaggctgcagcttccatcggccatctacgaggattgcatccagagttgagtgtgaagtctggacgtggtgcccaagtccaggctcttctggtacgcacagtgccaggatatcgtctgtggaggtctcatcgatacagtgagagagaggtgatcggtcgatagggtctggtgtccatggacatagtgactgtgctatatgcggaggggcgcttgcaccgtgtgtcctgcgatgcgtgtgaggatgatcggttagcgccacgtactctggaccttggatgctgggccgtgcgagccctacgtccaggtctatgggacccactcttgggatgctgggaccacagttctgtcctgtggctgtgtctcaagctggcagccctgtggctaggagggcccctgggaagcctcctggacagactaaagcaccccttgcagatggggaggactgggctggggggactgcctggggtggccggtcactggaggggtctcagagagtgaggcgggtcacccctggcggcg

SEQ ID NO: 555566 - DNA, 1592 bp, Homo sapiens
ttcgctcagccggcggggggtgacttttgtttttcttgtgtgggggaccgagtttgtccctcatcatgatggcgtgtgggttggctcccccccttgggtgggtggaacacatactcttggctgggttgggttagtgttgtctctcgcctgttgctcgtgctcgtcgtgtttgctcccgtcggccctaggggactgtttctctgtttgttggtgggaggaggcgggggtctctctgctctacggtgggatgtctgctgtaatgggtaagggtctgttgttgaatatcccaggtccgcccttgtgtgtgtgtcgctgcccccttcctgctggggcaccgtcgtgatgacacggtgttgtgggcctctggggtcgggccatcggactcctccgctttggtggggtcccctccgtgtgggtgtgtgttgccccttcgttgttggtctccgaactgtgcgatagatgttccgccctggggcctccccccatggggcgtttgttgggggcgccttaatacgcgtgtctctctccccccctcttgtttatggcttcgcgccttactctctttggtgtgagggtttcctccacccgtttgtgtagtaggcctctgcgctgcatgacagcaagacggtgttttgtgctcctcacagggcggcactgcgcgcttgtcgcgtccctttttttcctcggggggcgcgccctcgtgtggcggccacccctgttgggagaggagagagtgttgtgccgattgcttgctgagagttgtgcgcggcgccacactggtggttttgtgtcgcccgctgttttttgtcgcgcgaccactccacaacttgtgtccccccgacatgtgagggcgagcccctccacgtctcccactgtgggggcgcgactattgtgtggcgccccccgggtttctctttagcggtcgtcgcctcgcgcgtattttgggagaagatttagtagtatccgccctctggtgcgttgtgagacgtgtggtgcccctcgggtgtttctctcccgccgcgcccgagggtgtgtgtgacaccccccttctgatgaagcgctctgtgcgacacacgagtgtgtgtgtgattccgagtttctctggagcgtctccacacgagagactctctggtgcgccacacctccgcactcaggcgcctccctctcttccccggcgacccttctgtgtgtgtgtgtgagaaagcggcacacacgcagacacaccactcgcgagagtgctctcgcgcgcgagacacacacgcctcggcgctatccgcgcgctctcttcttttcacacactctccacctcggggagaaaaactgggcccacatggcgcccaacgctgcgtggccgctccacctggaactcttgtggtgttgaaggaccatcgcacaggattgagacgagttgagagattgatcctcgcgttcccttcaccccaccaccctggagagtggggtatacccgccccttgaaggccgaagcctcgccctcggggccaccccacaccccggcctggggcccaccctttccccagacctccccctgccccaaaatctttttccatttaaaaattttttggaacctttta

SEQ ID NO: 555567 - DNA, 1149 bp, Homo sapiens
ctgagattgaagaccctctttcatttaaattgaaatttgtggaaagtatagtgtcaaagtgctaaacatatacatggggaacattacgtttagatgagaaaatattttattaataagttcagacagagtgtgatatggtctaggctgggtccccaccaaatctcatcttgaattgtagttcccataatccccacatgttacccagtggggggtaattgaatcatgggggcggttagcccatgctgctattctcatgatagtgagtgagttctcatgagatctgatggtttgatccaggacttatcccccttttgctcagcacctctccttgctgctgccatgtgaagaacggatgtgtacgcttcccgttccgccatgattgtaagtttcctgacggcctccccgaactatgagtcaattaaatctcttatcgtttatgaatagccaagcactgtgagaactggactactcaaatacgagtgtcttactccatttagcatcgttcataaaggaatatctgaggctgggtactccaataacactacgaccacttcatccggactcacggatacttcaggctctgcaacgaagccatggcaccagccatctgcctcctggctgagcgacctcattgaagtttcctaaccatgggagggaggccaacagagcagaagcccaagcaatcggcaccatcgcgcacacgacacggcgcaccaagacgcagagcggcaggagtgccacaggcccaatagcgcgcccagacatccacaggacctaacaaagaaaatcccctcactcgcaacacaatgacaccaagaactactgacggatcggcccccagcacaaaccgcctccaccagcccaactgacaaaacagtagcaataaaccacgacaattgaaaaacacatctcaacagggcagcacggagatgaaaacaccagcgaagacacgacgcaacgccaacagatcgacacccgcacgtccgaccccgacaccagacaacgaacgaaaaaaagaaagcgaagccaagcagacatacgagggaacacaacgcagacaagcgagcaaacaaaagacaagcagtgagcatcacaaacatgaacgcggcaccacagcaagaccgagagaaagagtcgaccgcaccacgc

SEQ ID NO: 555568 - DNA, 370 bp, Homo sapiens
  misc_feature (60)..(60): n is a, c, g, or t
  misc_feature (214)..(214): n is a, c, g, or t
gggagaaggggtggcgaggttaatggataattaagaagtttagtgagcctgtggtgtttnggatataaactagtgctactagcagtggtagggatcctgctagggtgtagaataggaaataaagtcctgcattgagtcgttctgtttggtttcctcagcgtgtgatgataattagtgtgggtactagtgttgcttcgaataggatatagaatangattagttcggtggcggtgaaggttataattaggaatagttgtagtaggattagtatggtaatatatagtttttttcgggttgtggtttcttttgataggtgagattggctagctattagtataagggggaggagtcatgtgcctagaactgtacg

SEQ ID NO: 555569 - DNA, 1243 bp, Homo sapiens
tagtccccatagttagacgtagtatacttatgaagtggtatattaaagtgaacacagcacatatacattatctatactgcttttatgtcatgactctaatactagggtatgttctggtaaactccataccttataggtctagaagacaacaaattacctctaacaccaggcttatccacacgacagaactagatcacaacagctcacggacctctcactaattccttgctacagtgggacctagatacatgcagaacctgcaattcaccccacttccaagaatgacccaccacagccagaggaactcagcgctaaagaccaacttgaacaacttgcccctacgagctgacatcagactgcataccagttgcggagtgacacctcaaagggacatatcaaggattgcccattagcgagtcaacggagtcccctgagccgtactctaggaatacctactttagcgtagaacgctccatagggagcagaccttcgaaaggctcaggtatgagctgctgggtgcagccgcgctttagggccctatacgccaaatagacgcgctacacaaagttaagaagtacctactgaaccgatgaacccaacagtcgggcacataattcatagcatgagacaaataccaggatagtgcttccagagacgggtccgcgacgatcgctaagacataatgcgcaacacagagactaaagaaagacgacagaccaaagccccagtacactaaacatccaatcaacacaccctctataaaaaaatatcattaaacataaaaacataaaaccaaaaaaaaaactaaataataacacataataaacattattattacctatcgccctactcccaagctcactcaccattactgaacacaacaccatgtctaatatcaaaatacactattaagaagaataactccaaaatctaagcagacgctagagcatcaccaaaacagaactcgcctgcagatactcacccagaggaggagccacaagcagatacgacgaggcacgaacaaaacgaggctcataacagggaacgcacgatcacagaacagcgcgcaagcgaggtgacagcgggggcgaagcgagagacgccaatggagaccgcaggagcagacgagacgaggaaagtgcatgagaagaagaaaatgagccgcgggcgagggcggctgaactggaggaggagaggggacagaaccagcgagagcagcggaggcggagcagcgagtacccag

SEQ ID NO: 555570 - DNA, 490 bp, Homo sapiens
ctcggtaccggatattcctttgtcttcattatgaaataatttcaactttttctcaaagaaatcataaaactatccacaatttggaaaatgaatggaaattacttaagctaaggagcaggaaaaaaaaacgaacaaagaaaaaggaacagaggcggggcacagtggctcacacccgtaatcccagcactttgggaggccaaggtgggaggactgcttgagctcaagagttttcatcagcctgggcaacatagggagaccctctctctgctaaaaatagagaaattagctgagtatggtggtgcctgcccctagtcccagctactccagaggctgagatgggaggatcgtttgagcccggggggtcggggctgcagtgagctgtggttgtgcctctgcactccagcttgggtgacagggtgagaccctgtctcaaaaaaacaaaaaccaagacaaagggaaacaccgtggtgctgactgtgtaataaccact

SEQ ID NO: 555571 - DNA, 150 bp, Homo sapiens
ggtcggtgaaggatcccaagatggctgggcgaaaacttgctctaataaccattgactgggtagcttttgcagagatcatacccccgaaccaaaaggccattgctagttccctgaaatcctaggaaagagaccctcacctccaggttggtt

SEQ ID NO: 555572 - DNA, 229 bp, Homo sapiens
agcagacagtggtcagtcctttcttggctctgctgacactcgagcccacattcccgtcaacctgctcaaggatcaattgcaggtcttccacttcttgcctttcttttcctcctttcaaccatggttttttgcacccggtctctctcaatacacttctctctctagacacgccgcccgcctctctctcttcatgtcacaccttccgggcagattccacaggatttacata

SEQ ID NO: 555573 - DNA, 119 bp, Homo sapiens
agcctgcccaacttatatagcggagagatatagtcagattctggcgtatgttccttctagagcagggtcctcgctgttgtgcccaaggtagtggtcaatcaacttctctcgagaggcag

SEQ ID NO: 555574 - DNA, 273 bp, Homo sapiens
  misc_feature (144)..(145): n is a, c, g, or t
  misc_feature (151)..(153): n is a, c, g, or t
  misc_feature (220)..(220): n is a, c, g, or t
  misc_feature (246)..(247): n is a, c, g, or t
gaaaaactggcgcctggcacaatcaacgtgctcagtttcctcttcactcagcagcatgttggggatcccgcggctgatggggaacatacgtcagattccgggcactgcagggtgctctatcacttcacctcagcagcaggtggnntgtctnnnactcctattctcctcatatcctcaaccggccctttcggcaccgtggatcagacgcaagttatcggcngctccaggaacgccgaccactccacnnaggtatcatacggcacgagtggggtt

SEQ ID NO: 555575 - DNA, 578 bp, Homo sapiens
  misc_feature (125)..(125): n is a, c, g, or t
  misc_feature (510)..(510): n is a, c, g, or t
  misc_feature (513)..(513): n is a, c, g, or t
ctgacttgaaactgggaagagtccgccaccacgcccagcttattttttgtatttagtagagatggggtttcaccgtgttcgtcagggctggtctcgatctcctgacctcaggtgatccacccgcntcggcctcccaaagtgctgggtcaactatgttcttgagtaagaactcctgatgcctgattgttatgtttatgaacaaacaaggtgaagggttcagtataagttggaaatcctagagcaaccatatctgttactttccatcctggttatatttcttaattagactgcgaagttctgaatgaagtcctttttaaatagagcagttaatgccatttctgtctctgcaggtttcacaagtagtgtttctaaatgagctctataatctgaaaccggttcatctttcttttgcccacaagattatgtgattgaccaatcaattttttgtggaaaagccctagggattgaatttaaaagatcttcagcaattcttccagttcctttttgccnccncttggggttttggagtggtctttagtatcctcaggctgtttccattctgatgttggagcggccgc

SEQ ID NO: 555576 - DNA, 401 bp, Homo sapiens
gcggacgcctactactactaaattcgcggccggtcgacgataaaaagtaattgaattatattgtcttcctttctaaatgaagaaattgctattcctttttctataaaaaaattctatccattttactcagtcttgaagggaaaaagaaaagtggcattgtcataacagtaatactttatgtcagaagagagctttatcttgtttgatttattttaatttttgaagggtatgtgcatttatgtgagaaataaaggggtaaaacataaaaatcatagttcccttttagtgctttgttaaacacttttcatgtactttttcactgaatcctagaagttaaagaacgtgttaacttgttttctagataagaacatagaaacttaaaggggcccaaggtcacatag

SEQ ID NO: 555577 - DNA, 238 bp, Homo sapiens
taccccataacatcccatagggaatggaggttatgggggacactttctcttcagagacgtgtagggaccaaaggggaatcttcgagcctgccactgactataccaccactaacatctaggatacagcgagtagaactctggacttggaaaaggtgctctctcggacccatttctagatttgccatcaatctttcacacatttggtcaaaatgggacacaaacgtggaagcatattgga

SEQ ID NO: 555578 - DNA, 1162 bp, Homo sapiens
cggacctgaaggtctcaaatatgttgagaacgaaagtatgaactataaggaacctcgagatgtagatttattttgcaggaaatacgaggaacactaggaacacgaacgtgtttgcacgcatcacacgtgtaaacgacaatgactactgacggactttttaccagttttactgacacactgacacatacactggcactttacaacacactgacacacacactcgtaccgtttcacaactaagttttgttaacacgggacctgcacatgctcttgcttcatcagcttccttgagatctttgggtatttgcaccatctccatttcccaatctctcttttcgccatagtacgacacatcatgctcagtctcctcacacttgatatataacgtcgaaaaacatccaacaccattgatttccattgctcctttcagagccctctatgggcgggaaccttgactatctctcgtaataccacaagagtaagaaacacactcggctcttacttggcaaccacaacgtaaccaactgtaactattccaaacaattattaagcacaatggttgcctacccggacacttatataccggcaatttaacgttccttctacacgagcagctccaaaagccgtcccgttccaacaacaacaagagcggggttacgtttaacacccaaggaccacacggcgcgcacgccgacgacaagacaggaggcgcaacgcgccactctgcccctcccggcgtcacactcatgccccacgttgtataggtgggggcgacatatactactctcgcctttcacacagacacaactgacacgcccctcttcatgttggtgccccccccacacgcattctcaatgctcacccaccgcaaggcatgctccgcaaccgactatagatggtcttactacgggggagtaatgtacagcccgaataacaacccactatagaactaccgatagtaccaaagcgaccgccagatctagcacctccacattggggcgcgacaaacatcgccgccaaaactctatctacagcgccttagtacaaagcgccacactagggacgtactatacccagaggggggacccttccgctggacgaccgcagggtccctatctgacggtgccaattaagacgatctaacagtcataggcccaggcat

SEQ ID NO: 555579 - DNA, 190 bp, Homo sapiens
aatgtgcgtcacgagacctggagaagcacatccaaggcggtgggctcctccatggtacagctgctgacctgtgctgctcaaggcgacgaacactacacaggtgttgctgctagagagatgggccaagctctgaaaacactgtcccaggccgtccgtggagtggatgcattgacaaccgatcccgcagtgg

SEQ ID NO: 555580 - DNA, 266 bp, Homo sapiens
ctaagggtcctaggatatagaagtggtaatgagcacgtggcttcaacttgaagccaccagcgcattaacccaaagcaagagtcaacctgtcctttgaagctctgaagccaggcactgtgtttctcctactctagtttatcaagagtcatagaatggcatcttcttccaagtagaaggctgtttcatcgtgcactgacaaatctatgtgtgtagttcagcccaccttcatcactggatctcatgccagaatattctatgatcatttg

SEQ ID NO: 555581 - DNA, 332 bp, Homo sapiens
gcttatgtaaaatgagggcatgcctgtaataacttatcctcgataggcgatgtacaaggacggggtatgctttttcttttgtcagggggtacagaaagagtgtgagcgttgtattataccatagccggctaataaaagagtactgcggcaagtactattgacccagcaatggggcttcgacatgggctttagggagtcctaagtggagtccgataaagaggtatctttactataacaagctattgtgtcagctagtcatattcagtagttggccccagagtttgatagttcttgggcagtgatactacctcccaagggacaaggactgtgta

SEQ ID NO: 555582 - DNA, 687 bp, Homo sapiens
ggtgagactgaaacttggcagaagacagagcaaagctaaaagagctggagaaacacaaaatccagctggatgcaggtgcagtgaatggaagagcaaaatgcaggagcatgcagtgccgacctgcagctgtgcgcctcaaggaggcgagaaagtgaatgccaaggaggcgctggaggcaaacggaacgctatatgcgaggagatggctgatactgctgatgccattgagatggccactttgggacaaggagatggctgaacgagcgggctgagtccctgcagcaggaggtggaggcacttgacacgtgagcggtgtgtgactgagctcactacttgacttagagatcctcaaggcttgcgcattgacagacgaagtggctcagattggcgctgcattccatgtaatcagctcaagcaggcttgaggagcatgaattgcccgcctgacagggatgcccatggtgaggatgcgggatctttcttccttcagagcaagccaggagcatgtgaagctccagaagctcaatggaaaagaagaaccaagaagctgaaagcttgacgagggcaacaggcgcggagcgctcttcgagtaggatgcttaagccatggcacgacagcacccattgacttgagctcaaggagccagctggcatgctgctcttgggttcttacgcgagatggtggcagca

SEQ ID NO: 555583 - DNA, 523 bp, Homo sapiens
  misc_feature (25)..(25): n is a, c, g, or t
  misc_feature (73)..(73): n is a, c, g, or t
  misc_feature (137)..(137): n is a, c, g, or t
  misc_feature (158)..(158): n is a, c, g, or t
  misc_feature (166)..(166): n is a, c, g, or t
  misc_feature (184)..(184): n is a, c, g, or t
  misc_feature (186)..(186): n is a, c, g, or t
  misc_feature (196)..(196): n is a, c, g, or t
  misc_feature (200)..(200): n is a, c, g, or t
  misc_feature (272)..(272): n is a, c, g, or t
  misc_feature (282)..(282): n is a, c, g, or t
  misc_feature (305)..(305): n is a, c, g, or t
  misc_feature (330)..(330): n is a, c, g, or t
  misc_feature (448)..(448): n is a, c, g, or t
  misc_feature (508)..(508): n is a, c, g, or t
aaaattaaaaagattttttgtgaangaataaagggatataaaaatgaaaaaataataaaaaagataatatatnaattaattatatataagaaaaattatagaaggaatataaatggggaaattttaaaaaaaaaggnaaaatataaaatataaatgantataaggnaaataaaagaaatgagtntnagattaaggnagtnaatttattttgaaaaaggaagtggaataagaaaataagtgtgtgaaaattagggtgggagatattaaaaatnaaaatgaaanaaaaaaggaataattttggaganaaaagtgtattatatatggatagangtgttatataggattgaaaattattaaaaggaaggggaggaataaagtaaagatgggaatataaggtaatgaatttagggagatgaaaatttaatttgggaataaaatgaatgaatgnaataaaaaagggaaatggaaaaaaaagttttgattgagttaaagaaaatgaaggtgaatntttaaaattaaaagt

SEQ ID NO: 555584 - DNA, 260 bp, Homo sapiens
ggtagatattgatgccttcacctagatcaatgctaatatgatgagtcttcagtgacatgaaacattgacaaacaacttcgcatctgggtcacttacaacaacgccatctatccaggcattaattcatggcctaaacagacattattactccataactataaactatcggaaaaatgaactggaacagaagatgtagctaaaatatgcatacgaagagtaggatgagaaggtatgacacttcaggactacagtgaacattg

SEQ ID NO: 555585 - DNA, 298 bp, Homo sapiens
  misc_feature (212)..(212): n is a, c, g, or t
  misc_feature (241)..(241): n is a, c, g, or t
  misc_feature (268)..(268): n is a, c, g, or t
aaataagtcctcacatttagggtcaattgattttcaacaagtgtgctaagataattcaacgagaaaaaaatagtcttttcaagaaatggtgctgagacaactggagatccacatgcagaagaatgaagttggactcgtacctaacactatatacaaaatttaagtcaaaataaatctaacctgagagctgaaattataaaattctagaaagnaaacataagcaaaaatcttcatgactttnaacgtggcaatgatttcttagatatgncacccaaaaaggcaagcaccagaagagaag

SEQ ID NO: 555586 - DNA, 534 bp, Homo sapiens
  misc_feature (472)..(472): n is a, c, g, or t
cattatgcaatcttggagtggggctgaactagctacttttctcagagagcaccatttttattggcaagaacggatagataaccacggatctacagatgtgggtatgtggcagacatttcctcaaaaatgaagtaaccctgtcgcttcaagaaaaacaactcagtattggtggtaccagaaaacatttacgctttcaagtgaaaaagcgattaaaatattccctttcccaactactggtcggtgtgaggtgggatttgcttcgggtacttcaacccagaaaacacggcaacatacggaacacaggagcatatatgagaatctagctgacttctattaagacaaacattaaagagatcggcaaaaatgtacaaataaggccactcgtaacattttggtctggattaacatttttatgtggggaaaaacaaaaacaaaaataaataaatttttattggggggccaggcatagtgnttcacacctgtaatcccagcactttagaagggcaggtcagatggatcatctgaggtcaggag

SEQ ID NO: 555587 - DNA, 213 bp, Homo sapiens
caggcggatcacaaggtcaggagatcaaaaccatcctggctaacacggtgaaaccccgtctctactaaaaatacaaaaaattagttgggtatggtggcatgcacctgtagtcccagctactcaggaggaaactccagaagcagacagggccctagatataacggcatctaagtcctgtataagagtctgcacctagattgtgagcagcgttgg

SEQ ID NO: 555588 - DNA, 729 bp, Homo sapiens
  misc_feature (535)..(535): n is a, c, g, or t
ctgtggaggctgcgcggctgcgaaggaggcggcggcggtggcggaggaagaggagtggcggcagcggcggcggggacccgtgcggggatggctggaggtaccgctgggcctagcagactcctcccaccaccagcacctccggccccggcggcggtcgagccccgctgtcccttcccggcgggggccgccctcgcctgctgcagcagaggacagaggagggacagacgaagagcacgaaggcgggcgggcatgcagagagccctgagctgggctgtgagagtcgagagacgtgtggtgctggacaagtgggcatccggtgcctcctgctgccctcagcctgccgagtgagcagcagcagctcaacggatttgattagccccgaactgcggcacctccgggacggacgactcccatcaagagcaaggtcctgagcgtagcagaggtggcgagaccacagacaaccctgaaggaggcacccaagaagagagtgacgaacaaaaaaggatgccggggtacacatcgacgggcgaaaagnggacccctacacatcaccctctcgtagtaaatgcaaaggaaaagtgcgaagacacacaagagacagcagggaaggcaagacgtgaagacaaagcagaatccaagaagagagccgaaaaatgaacatggcaagaggagacagagcaagaagcgaaagaagacaaaaaaatagagaagtgaagatgaaaaaagaaa

SEQ ID NO: 555589 - DNA, 333 bp, Homo sapiens
cagcaatacatacgccatgcctctgtgaaccctgtattcgcttggagtgctcggaaggagaccccctgtagcctatcgccccttcccgctctgtccctggtgtactcactgcgtatgggtataacctctgactggtggctaggatgttatcccaaatgggcaacacatggcaaagggtccccattgtgggtgcgcttgtgatgtgcaggagccttcgtccactggtatttcttccctgtaattgccgggcccctcaccccagtctgacaggctgttgctgtgcctgctcacacctgctcctgcaggcacactgggctacggacgaggaaggag

SEQ ID NO: 555590 - DNA, 202 bp, Homo sapiens
ataggaggtgtatgagtaggtcgtagcggaatcgggggtatgctgttcgagttcataagaacagggaggttagaagtagggtctggtgacaaaatatgtgtgtagagttcaggggagagtgcgccatatgttgttcctaggaagattgtagtggtgagggtgtttattataataatgttagtgtattcgccattcagcctcg

SEQ ID NO: 555591 - DNA, 200 bp, Homo sapiens
cggagcaacgggagcgcacacccggctagttttggaatttggagtagagatggggttcaccatgtggccaggcgggtcttgaactccgtgacctcaatggatccacccacctcgggcctcccaaagtgctgggattaaaggtgtgagccactgcacccagccttctctcttggctttgattttttttcgtggatacgtct

SEQ ID NO: 555592 - DNA, 86 bp, Homo sapiens
acctcgcttagtgctccttggtgtgattccgtcctgcgcggttgttctctggagcagcgggtatccctacccgatccgaggtcaac

SEQ ID NO: 555593 - DNA, 121 bp, Homo sapiens
gtaccggactatttgtggttctggcctatcgattacgcagtgcaaacttttactttacagatgaggtgggaagaacagccatgatctagtaaaaagagacctgccagaaccacaaatatcg

SEQ ID NO: 555594 - DNA, 200 bp, Homo sapiens
gcatccaatgcatctttgtccccaagtgcttacccagggtgggtgcagggaagctccatgaatgtccaaaaattagacatgaatcttgagtccttggaaggaaaacatggtttcttcccttcatatcttggctttagttagcctgggttttctgtcctcccagccctagttccctgtctcagcttgctatgggacaggac

SEQ ID NO: 555595 - DNA, 450 bp, Homo sapiens
  misc_feature (8)..(8): n is a, c, g, or t
  misc_feature (124)..(124): n is a, c, g, or t
  misc_feature (141)..(141): n is a, c, g, or t
  misc_feature (165)..(165): n is a, c, g, or t
  misc_feature (195)..(196): n is a, c, g, or t
  misc_feature (447)..(447): n is a, c, g, or t
gacatatnttaggtggtaaatccctccattttacaggtctttgggaagttctggtggccaggaaatccaaatttgataataggattttctcaactgaactcagggcagagcacagttggtctgngtgggcgccctgtgtgncaggtgccttcctgcaggtgggancacttcctctgcagtcagtgggggaagtgnncatcaggggctgggtgtgatttcagatctgcaccgggagacatgctgttttcactggggttgtggcagtcccgggtgaaggctggtctaggtcataattgttcatctcctccctgtctctgctctcagtcatggagttggttatgctttttgaatactttgtgaattccatccggctctcctcagggtcgtcttccgggtttgggtgcgccagcttcagcttgttcaaggtgtggcgcttgaaaatgaagntaa

SEQ ID NO: 555596 - DNA, 472 bp, Homo sapiens
  misc_feature (3)..(3): n is a, c, g, or t
  misc_feature (21)..(21): n is a, c, g, or t
  misc_feature (143)..(143): n is a, c, g, or t
ttnaatagaggttagacacanggacccctctgccatctccaggttccttccctgtaaaatgaaggagtcaaagtggataattttatggcattgcccagctctattccaaataaaagtgatgattcttacaagccctgtccaanttcctcggcttctgattataccctgatcttagaaaatatgtaactcttggctgggcacagtggctcatgcctgtaatctcagcactttgggaggcggaggcaggcagatcacgaggtcaggagattgagaccatcctgggtaacttggtaaaaccctgtctttacaaaaaatacaaaaattagcctggcatggtagcttgtgcctgtagtcctaactacttgggaggctgaggtgggaagattgactgagccaaggggttaaagttgcagtgagccgagatcatgccactgcactccagcctgggacagagtaagaccctgtcacacac

SEQ ID NO: 555597 - DNA, 653 bp, Homo sapiens
ggcaaattccttaacttcgctgagccttctcttttcctgtgttaactagggaagatgagactagactctccagtgtgtatgcaaagcacccttacgctgcagagatgctgcaaatagggagtgtcttttttttcttcctttttcaattttatcctctgtgcttgccctagagcttgttatcaatttctcttagctttgtcaattgtggtggggtgtgggggattgagatttggctttcctgggaagatgttccaaaactgtctttgaaataatactctcctcctctgcagatcagtggacagggtgttgaagggtcggcataggtggtaagcatgattgatggcccccagagatgtccatgtcctgctccccggaacctgtgggtatgtcatgttacttggtaaagaggaccttgcagatgaaattaagtgaagaaggttgagatgggagagtattctgggttacccaggtggatccagtgtgttcacagggtccttttaagaaaaaggcggggctgggggcagtggctcatgcctgtgatcccagcactttgggaggccgacggcgggtggatcacctgaggtcagcagttcgagaccagcctggccaatatggcgaaaccccgtctccactaaaagtgccaaaattaactg

SEQ ID NO: 555598 - DNA, 592 bp, Homo sapiens
tgtttccctttgtctagcacgccagacaggccagtctctccggctgggggcactgcgtgggcaacagcgaccgcgcctccgagcggcgcaccgtgagggcgcgcgtctgcgctggggcctcgcgcgcgttccacgatgaagactgcgcgtttgagtgtccctggcaacgccacgcttccgccttctggaagcctgcactccagcttcgagtgtgagagacccgtcccggtgggagggacctgggctgtgggggacggtaggggaacaagggcgtgggactggggaagcttctgggaacatttgctctaggtattcagctaaactaagaaaaattggtccaaggctcggcacaaaaggatcttctcattccagtcctttcgcccacgcagggaacgatgcctctggaggtggtggtggagctgcagatccgggcggtaagagatcgatgaactccccctccttaacctcaagtcggactctaaatagtctcaggtggttttcaacaaccctcccccacatcccccacttaccacaaacacatcattatcttctgggacagatcgcacctttgtctttaagacaaagggaaaca

SEQ ID NO: 555599 - DNA, 288 bp, Homo sapiens
actacatcgttacacttaccgcatggttctgttcgggttgtacggtagcactgctcttcttcatcctctgtgggatattgcggagtctgctccgattttgcgtcgctgggtttggtttaatccacctcacctgcctgctatgatggatcagcttgagcgcgtgaggagacggcttacgtttcgtgagggagagatttggtatctgattgagatgggggctagttttagtcatgtgagaagaagcaggccggattgtcagaggggtgccttgggtaacctctgtgactc

SEQ ID NO: 555600 - DNA, 1794 bp, Homo sapiens
acgaaggccggagaatggatttatcaggagtgaaaaagaagagcttgctaggagtcaaagaaaataataaaaagtccagcactagggctccttcacctaccaaacgcaaagaccgctcagatgagaagtccaaggatcgctcaaaagataaaggggccaccaaggagtcgagtgagaaggatcgcggccgggacaaaacccgaaagagaggcagcgcttccagtggtagcagcagtaccaggtctcggtccagctcgacttccagctcaggctccagcaccagcactggctcaagcagtggctccagctcttcctcagcatccagccgctcaggaagctccagcacctcccgcagctccagctctagcagctcttctggctctccaagtccttctcggcgcagacacgacaacaggaggcgctcccgctccaaatccaaaccacctaaaagagatgaaaaggagaggaaaaggcggagcccatctcctaagcccaccaaagtgcacattgggagactcacccggaatgtgacaaaggatcacatcatggagatattttccacctatgggaaaattaaaatgattgacatgcccgtggaaaggatgcatccccatctgtccaaaggctatgcgtacgtagagtttgagaatccagatgaagccgagaaggcgctgaagcacatggatggaggacaaattgatggccaggagatcactgccaccgccgtgctggccccctggcctaggccaccccccaggagattcagccctcccaggagaatgttgccaccaccgcctatgtggcgcaggtctcccccacggatgaggagaaggtcccgctccccgaggcgcaggtcccccgtgcgccggagatcacggtccccgggccgccgccgccacaggagccgctccagctccaactcctcccgataaacaggccactgaagctctcgcccctgtaacttataccccacccagctcagttttgtcacttttctagccaaaggaagaccagtaggaaagcaaacccttgactctggcaggatttgcaggcagcaggcagcacccctctgacggaccccggctgcagaagtgctgttggtttggatgctgtgtgcctgtcaagattcctccggttttctggctagaaagctcatcgtttccggtttctaagagtcagttcatgcagagccaccagggaaaagtgaggctcttgggggtggtttgacccctgcttacctgggagcacacttttcccttccccgatgacctgggatggtggccaggccgtgcccttgctgttgctgggcagtgtccttttggaaagggagctgccccaggctttagtgcagctgccaaccctgttaggcctgccgtctcgaggcctcttctgacctcaatggtcacaccccctcaaagaccctctcacccatggtagttgctgctcgtggttctgtctgtccgtgcaccgatgcacacaccgcaccccaccactgtactctgaaattggcgagtgactgtactctgaatggcgagtgagttgtggagagccagctctgcggagtcatcacgcagccatggttgtgcctgccgttcatggtggtctttcaggttatcttggcaacatgtacattgcttttattttttttcttttttgctttcattgtacagtctagtactataaaatttctcttttgagttttatacctttgtagcattttagatgacattgtgtttgtactttgttgtgtagagtggaagaattgtgttgaataaacccaagatcggaatgcca

SEQ ID NO: 555601 - DNA, 1244 bp, Homo sapiens
ggccaagaaaaagcatattatctacataatcacaatcacatttacaaatatgagcccatcactaaccttcctatatttaagctatgtattatttccagcataatttgtgctataattatttagacacaaacatgtgtaggtcacaccatattattacgagatttatactagcattacttaaagcataaaaaacgtatacataacatactgcattgtcgggcactgcattacttcagcattccatccgtgcaggcagatggtgtaaccatagggtattggaaatataaatcccatgggaagtcagctgaagaccactataatgcatcactcaatacctgtataaagccctgtgctgtactgatctctctataaagactggctggaaaacagacaacggaatgatttaccactattactgctcctaacttatggattcaccatagttaactactctaactccggatattaccagagaacaatgttcctatacaacgactattgatctatgagcacaggcatgcattatgggattatttaataaagattcacagggaaaaattgacaaaattatggaatgagtcaaatatgataagggtaagactttaatcaatgataatgaataagaagtgaattacataaagaagttaaaattaatgaaatatacgtaggcacaagggacaacggttatgcattgtatcaccaattgctagtattacacatcgtattactataacagggttacttatacaactacattacacaagtgtacacctaaaagacgagcatttgacaattcatagggaaaagtgtacaccaaccatcataaccgtgcatgccaactattgaagtaagaacaacttaccgagcccctacgcatataaccaacaaacaaaacaggtggcgcgagcacatagagaggagggcacaatgaaaagagagataaatacaacggcacacagtcagtaggagtatttaaggtgcgacaaacaggacatatgtgctagggacaacaaaaagaggggtccgaaaaacaaggggggaacaaatgagagaagtatagcaacggcgttccgcgacagtcagacaagaggatgcaacacagaaatgaggacagaaggaagatgagaaggagcaaagcaaacaagagaatacgtcagtaagagtaaagaaataagaagacaagaaaaggagaggagtaagaagagcgaagaggagaggaagggaaagacgaaggaaaacgagaa

SEQ ID NO: 555602 - DNA, 1769 bp, Homo sapiens
acgaaggccggagaatggatttatcaggagtgaaaaagaagagcttgctaggagtcaaagaaaataataaaaagtccagcactagggctccttcacctaccaaacgcaaagaccgctcagatgagaagtccaaggatcgctcaaaagataaaggggccaccaaggagtcgagtgagaaggatcgcggccgggacaaaacccgaaagagaggcagcgcttccagtggtagcagcagtaccaggtctcggtccagctcgacttccagctcaggctccagcaccagcactggctcaagcagtggctccagctcttcctcagcatccagccgctcaggaagctccagcacctcccgcagctccagctctagcagctcttctggctctccaagtccttctcggcgcagacacgacaacaggaggcgctcccgctccaaatccaaaccacctaaaagagatgaaaaggagaggaaaaggcggagcccatctcctaagcccaccaaagtgcacattgggagactcacccggaatgtgacaaaggatcacatcatggagatattttccacctatgggaaaattaaaatgattgacatgcccgtggaaaggatgcatccccatctgtccaaaggctatgcgtacgtagagtttgagaatccagatgaagccgagaaggcgctgaagcacatggatggaggacaaattgatggccaggagatcactgccaccgccgtgctggccccctggcctaggccaccccccaggagattcagccctcccaggagaatgttgccaccaccgcctatgtggcgcaggtctcccccacggatgaggagaaggtcccgctccccgaggcgcaggtcccccgtgcgccggagatcacggtccccgggccgccgccgccacaggagccgctccagctccaactcctcccgataaacaggccactgaagctctcgcccctgtaacttataccccacccagctcagttttgtcacttttctagccaaaggaagaccagtaggaaagcaaacccttgactctggcaggatttgcaggcagcaggcagcacccctctgacggaccccggctgcagaagtgctgttggtttggatgctgtgtgcctgtcaagattcctccggttttctggctagaaagctcatcgtttccggtttctaagagtcagttcatgcagagccaccagggaaaagtgaggctcttgggggtggtttgacccctgcttacctgggagcacacttttcccttccccgatgacctgggatggtggccaggccgtgcccttgctgttgctgggcagtgtccttttggaaagggagctgccccaggctttagtgcagctgccaaccctgttaggcctgccgtctcgaggcctcttctgacctcaatggtcacaccccctcaaagaccctctcacccatggtagttgctgctcgtggttctgtctgtccgtgcaccgatgcacacaccgcaccccaccactgtactctgaaattggcgagtgagtggagagccagctctgcggagtcatcacgcagccatggttgtgcctgccgttcatggtggtctttcaggttatcttggcaacatgtacattgcttttattttttttcttttttgctttcattgtacagtctagtactataaaatttctcttttgagttttatacctttgtagcattttagatgacattgtgtttgtactttgttgtgtagagtggaagaattgtgttgaataaacccaagatcggaatgcca

SEQ ID NO: 555603 - DNA, 1066 bp, Homo sapiens
  misc_feature (1065)..(1065): n is a, c, g, or t
cagccacgtgctgagttgcatggagaagacagagcagtgtctgctggctctgctgcaaaaacacctccccggccacccctacgtgcgcaggaaacgcaggaagtttcctgataggctcgctgatgatgaaggggacagtgactcagagtctgttggacagtccagggacggagacagaagaagtaaagaggcagggccctagtgagggagctgaggagggggacaggagaagccctcaaggggtgtgggggaggcaggaaagctgggaggatttaaaggagaagtaactggagcatccagaaatgcctgtcatgccaagcttgggcttctcctgcagttccccatggggcctttttccagcaaaggcaagctcttggggagcatcatgctagcctgatgagccctgcccagaaaagctcgcagcagaagtaggtctccccctgagagtgggagaagcctaggcatggattctgtgagctctgcccgtgctctcctcctctccctcctcctcctgcctcattacagcagttgccaagccccctggcctcaaagagggtgctgtacccccacagtaggaaaggagcgtcatctggccacgctgggtgaggtgtggactcttttgaatttatatttatacaccagtcctatttctttacgtccgacttgtctctttcctcttcttcctctcagggtgacagtatcagcgagtgcctacagaattccggttccaccagatctggggacagggggggcccgagtgatcgggcccatacggacacctttcgagaagtccgaagacctcactgtggagcctacggcctacccagtaaggccgtatagacaaacggaaataagcgactccaacaaagggggcgggtacacaagcatgaacgagaaaaggctgcgcaaagagtgttgaacgaccccccacataacaaagctctgtggcaacaaagaagcaacagtgttaaaacgggagtacaagagccgatataacagactagtgagaaagaaataggtacaagaaaagaggatcgccgcgcgggcgacgagtgtcgtcgtcana

SEQ ID NO: 555604 - DNA, 143 bp, Homo sapiens
ccacccgaaggggacggcacccccttaccgaagcaccgacaaagaagcaacgaagcaacgacccgaaccgcacaacacagccctacacgaagaactacgaaggactccgaactacccagcgatgcaacattcccaagggtaaa

SEQ ID NO: 555605 - DNA, 698 bp, Homo sapiens
tgtttctattctgtcttcagtttccgcttcctcgtctcccatatgtctgggattacaggcgtgatccaccaccctggcccttgcaatcttctactttaaggtttgtcagagtatttctctttttatatccacaccgtacatctgcataaatgttatttcaagcaaaggaaatgagtacctgtcaatactgtataatattagtcttcctacattaatatacgtttatttctgatctatacaaattttcagaaggttattttctttatctattgctaaactgatgtacttactatgggatggtggtcctagtcccatgaccttggggtacaattgtaaacctagagttttatctatactttggtgtaactagttttggcataatagtcaatttctacttctggaagtcatctctattccactgttggtattatataattcaaggagaatatgataatacactgccctcttgtggtgcattgaaagaagagatgagaaatgatgaaaaggttgcctgtaaaaatgggagacagcctcttacttgcacaagaaaaatgaagggattggaccgagctggaaacctcctataccagatgctgactggcaacatggtggtttatgcatctcagacagtatccacaatagctgacggatgggtgtttcagtatgaaatattttgttagcttaccatcttgcgctgc

SEQ ID NO: 555606 - DNA, 410 bp, Homo sapiens
aagcaccgaatgtgtcgaatcagtacaaatccgcaaagcatcaccccgacaatcccacccaacgtgttgaatgccaccacggcgccgacatcatggccgacccgctcattgccgacacaaaggcgcaaggccagagggaacgcagctcccaacagcagcgtggggacaaacacgatgctcaacgctgcgaccgcaaaccttgagctcatgcccagcaactcactcgcccccaacgacagcacccaggactccaccagactttgtgccaacaccaaccaccgaccgagcagtgctatctccagcaaagccaccaatccagtcccggcgatcagcaagccaaatactcccctggggtcgcggatacgatcaatccgacgggccagtagcaggctgcccaagaaacagcccgg

SEQ ID NO: 555607 - DNA, 448 bp, Homo sapiens
ttatttttcgcctcctggttttaaaaaaatttttgtaaaaaaaatttggcggggtttttcccatataataaccctacagaaagaagttggcctccaaggttccttttggttgaccagaggttatttttccctccccggttcttacacccacgccggcccaagaaaagtgcccccccaaaatctgtaatattgggagcgccccccccttctttttctgagggggggttataatttgaaaaatgaattgtaaacaaaaagcatttaccttggtttgggttccggccccttttatcttagaaaagatttttgtatagaagtttgggaacccccccccccttttgggccaatatataaaagctgttttttttttccccttaaaaatgttgattaaaaaaaatgggaggtaaaatattcattaatgaaacattcaataaagaaaattctgttt

SEQ ID NO: 555608 - DNA, 199 bp, Homo sapiens
ctggtggtcgatctagaggtcccccacccagctcaatggaaagactcagagaacaaggatttacttcagcggtatcagcagctagatttcagactacacaagggtgagtagcggtgccaaattcttaaaatttcttggggggggggtgtgggtcaggtagcagtttttatgtagatctatatataaaagtccacacctc

SEQ ID NO: 555609 - DNA, 273 bp, Homo sapiens
ggctctaatggaaaaagtgggtgataggcaagaaaacatgggcaatgtaagaggagtgatggacaaaagaacaaaaaggaaattgctgcaaaccaaaaatgctaactgaaatgaagaatctctaagggctcatcaataggatggatatggctgaagaaagaatcactgagttgaagatatgtcaatagaaacttcccaaactgaaatgcaaagagaaaaaaacggaaaaaaaaatcagaatattggagaattgtggggcaaaagtgttacatg

SEQ ID NO: 555610 - DNA, 101 bp, Homo sapiens
agcccagtaaaggcgccattccccattttacagctggggaaactgagttacagagcttgtctgcactgagtcatcaggagcaaatgctggatcagataggg

SEQ ID NO: 555611 - DNA, 306 bp, Homo sapiens
aggcggcgtggatcattgagcatggctaccactctggccatgtatgtctcccacagcagctgactctcgttgactgcttcctgtgccaaagattccactttctcctggaaatgctggataactgccttcttatcagctttaggcaagtactttgacaagaggttcagcctcttcccattctctcatgagctggaacaattctctctcggtgctttggactcaagcctctctttggattactaggaaatgggcatgtccattactcatccccaggtgtctcgagatacttgtcaacggaatcagggg

SEQ ID NO: 555612 - DNA, 1121 bp, Homo sapiens
  misc_feature (736)..(736): n is a, c, g, or t
ctgcttcccaggaaacttcatttcacattggattagactgcccaggagggcaacgctgggctggggcagccgggcaactctgccaggcctcgctgcccactgagctgccttccacagctcgctagacccccatgattgtggctgtgaattgtgccagccaccctgataaacacaccactgcctccaccccatgacacacggaatttggggggagggaaggaagaactcaggtatgctcaaattatcaacaagaaaacccggaaaatttacattgttgatgagcactgtgatggataagtttccaggaagaaaaacttggttttcgcctgtgggccacagccatgcctgagatccgcctaatgggaatggagccggcaatttcctgctgccttgctttctccgccagcccctggcccacagtccagcctcagaaggctgaggggggtgcttcggtttcgtttcttttttctcaacgggtcgacattttaaatttctcagtatccaaggcattatgaggacttaggaaacagatgcatttaatctaattaaagcaaggacggcgagtgagtgaaaaattacattttcacttgggttctgaacattcagttgcacatccaagaataatgatgtttttaaagccagcccaataaacttgagattgcaagttttcagtggctcctggataagatgccacttcgatcatcctagacaatgtgccttttgaggagctgctcancagctttggggactctggataaaggcaaaccaggcttatgatttcttccttttgcctttcgtttcacagtagttcgcaggtttgagagtccatttcataggcctgtttcatgacaacatacgctcctaccgggtgatgggaggatttggcctctggatggtggatactcaagctctgggcgtttgcccgctgtgctagcctctgcggtgatgatgcggctcccgggaacatccagttcaattctcatcatccgtcgggctcccacgctggtctttgttatatcgtccatgcccgcgcgtaaggggcccatctattccttaccatatattcctcttcctctgcagttccgactttcccagcgtcaactgctttagtcatatatact

SEQ ID NO: 555613 - DNA, 621 bp, Homo sapiens
gcatgcagcgctgaggagcggcgaccagcacggcgggccatgaacctcctgccgtgtaaccctcacggataacgggctgctctacgccggcttcaatccaggaccacggatgcttgcgtgtgggatggaaaatggattccggcgccatgaacctccgtgccgtgtaaccctcacggcaaggggctgcatctacgccggcttcaaccaggagcacggatgctttgcgtgtgggatggaaaatggattccgagtctataacactgatccactaaaggaaaaagagaaacaagaatttctagaaggaggagatggcatgttgaaatgttatttcgctgcaactatttagctttagatgggtggtggaaaaaaggcgaaatacctcccaagaaagtaatgatctgggatgacctgaagaagaagacgtgttatggaaatcgaattttctacagaagtcgaaggcagtcacaagtgcgggaggatagaactggtggtggtcgaggactccaggattaacggtgttcacattccacacagcaatccccatcaggtgtgccacgtcttccgagacctgctgttaacccaaaggcctctgtgtcctgtgtccaatagtaacaatccctc

SEQ ID NO: 555614 - DNA, 344 bp, Homo sapiens
gcattccggcagctcacttatcctggcggagcaggtcagtgcatagagttctagtttcctgtggaaaatgtgcaccttgtgaaacctgcatgacagtcccctacggcagggtccccagcggatccgccgcagacgcaggcacagaagacaagtatcctccagcacgaagctggcctgcccgggcccaggtgtgagggactgttctgatcccagaagcgcacgatagacgcttacctctgcggtctcggcgcacgcgtctgtccctggacagacctcggagccgtgcccagactaacatgcatattgcggtggtaacaaggatacagttaaaagggtcaatcacg

SEQ ID NO: 555615 - DNA, 923 bp, Homo sapiens
taatgtcaggctgattaaaaagtgctggcttgtgggcagtcacacagttggtttccaatgaggagtaatttgacttggaacatcctgtccatggcaattaaaatttgtcatggcaaaaaaaacccacagctggcctgccacagccaacacaaaaaccagaaaatggtaatgaaatgaaggaataaaggtggggttaatcccttattataaaaaggaacaaaaaataattcttcagcagtcttacccaaagacttcaagatacaaaattccaatgtgtttggaccccagccctgtccccatctcctccaagagcagaggtaggaaacagttgaccgcaaacaagcaattctgtaaaaattacctaaaaaccctacaattttgattaaaatctaaccttctactaatttccggctctttcaaaaaattttactatcacaaaggcctgctttagatgacatgctattcctaccagaaaatagccccaaataccccctctgtcagataacattgctcaatgttgcccacgcaactcttatctctaaacctattgtggccacgtgtcgtctttctaaaccaaagcccccggagatcaagtgactgctagtaccgtgtcgcttggtaacataaattcccgtgggcgcccccttcctcccgaaggtgttggggccgcggcggaaacccccaaaagggtctttgaagggccttaattccccgaaataaccctcttaagaaaacactttctttggccctctctcatcacaagggaaatggtctattgttcaaaccccactaatttggttcccaatttgtggccccgaccggagaagtttcttccctgtgaaacacctgatttctccaacctcttctgttttggtcgttcctacaaaaaaaacatcgcgtgggtgtcaaacagccgcggcaga

SEQ ID NO: 555616 - DNA, 140 bp, Homo sapiens
tggacagctttataactgtagttacgcatatctgcacgaggcttgtgcccagcatatgcatacgatataagtaggtatcgttcattgcccgactcgatgaactgctggtgaacggtgatcatgatcgcagatcatgggga

SEQ ID NO: 555617 - DNA, 855 bp, Homo sapiens
  misc_feature (242)..(242): n is a, c, g, or t
gcttagacataggaggcgtttcgtggcgcggagcagctgggtatgtgtaattgcattgtatgctgtcatccttaggaacaggccatgttgcatgacatatgcgactgtggaattgcgtcaggccaaatgggaaatgccgcagggtcttgacacacactatgccgtctctggacacgaaaatcttctcgaggaatgaagagttggcatgactaagtcgttgtaaggttggggtagatcatatntgacccatgtgaggtctccaatgacgtaccttggtcgaaggttcacttcgatacgaggataaacgacctttgacaacgggcatagggttagtcataggcaccattagcatgggaattcggggtggaacatagctcgtgggacggtgatccacccctagggactcaataagggggatcagaggttacgcacattacatgggggctaactaggtggagctctggttcaacagcacttgcgactccattgcccttgaaccgcgtttttaccctatttcaagggcgtttcctcgtgcgcgcgaaaatagagtttcagtgcgatacaccacttgtagtcaggccttctcgcaatagtgagtatcgatcccctccccggtattatgggacggcatcccacctccatagggcctaatgtttggtgtcagtagtttcaattttgcggttgcgcctatgtaaggctcgagagttgcctatggggattggcgttaggcgcaatccccatagggattcacacccgttaccagtgtcttctcaccgtttccacaatgctccgacaagtacgctgccattatagcacgcgccaatttttgtggacgcgattgtcatcattacactc

SEQ ID NO: 555618 - DNA, 974 bp, Homo sapiens
  misc_feature (289)..(289): n is a, c, g, or t
  misc_feature (296)..(296): n is a, c, g, or t
  misc_feature (314)..(315): n is a, c, g, or t
  misc_feature (318)..(318): n is a, c, g, or t
  misc_feature (936)..(936): n is a, c, g, or t
tcccgcccggtgtaaaagagaacggcgccgacccgacagggccccgtgagaaggggaacccgccctctcggccaccaatgggcgcccttccaggccacctcatgcgaagtaaccccctgccaaaaatcgcaccggaacagagccaccccagggggaacggaccaagttctgcccccagacccactcctctagcacgtcacatctgtccgggccagccagagtgctatagatctctctaatgagttcccatgttgtaaaggagcgaattaaatccattaaaataggaganactaacntgatgggatgtggtaccnncancagcagctactagacattcttctacaaaaggagtcaagacatgggggcggatggtgaccatgatgtctcggaagtcgatggctgtgactctcccagtcctagcattgtcccgttgcacaaaggcttgctttgcgtgctccagttgtatttccaataaaaactgagtaaattccgcatatgtcaggtgtctttttctttcttttccaaaatgtagttgcacaaattctgaatcccagttaaatggaatatgttgatgaattgtggtctgtccaaaaacttgcttaacatcctcaaaagttacttctcctttgccagctttgtcaaacagctgaaaggctaccataaacaaagcatcaggggcacacaggacagattcaaaggcaacaaattcttgaaaagatattaatccatctttggtctgatccaccactccacttaaaagttccacagtctttggattaggctggctttctccaaaaatgttcaagtatcgagtgacaaagtcattgggggacatgaaaaattcaccgtttttctcaatgcttgcatacttcaaaaatattgttctaagctcagctggatctgctctcttggttaaagccaccttggcggccgccntgattcgccccggttgcggcagctcgtgcgctcgtgcc

SEQ ID NO: 555619 - DNA, 166 bp, Homo sapiens
  misc_feature (55)..(58): n is a, c, g, or t
ttacattgaggatcagtcatgtaaggataaaggataatgggggtataagtaactnnnntctttttctcttatctatgtacctcaattatacataattacgtaaatactaacgttgtatatctgctgtcaactagagtatgctagggttcttggcataacattccct

SEQ ID NO: 555620 - DNA, 338 bp, Homo sapiens
aaaaaacccccctttctttgtttttacttttgggagattccccccccccgggggcctttttggggggggggttttcccccgtgttttcccccctttttgaatttttccggggggcccggttttttttttaaaccccccggggggcctcttttttgggggcccccctttgggaaaatatcggtttttccctttttttttgggggggggggggggggcccccccttttttttggttgggggcgtctcccccggggatttttttaaacgttttttttcccccgtttttttttttttttttttttttttttggccctaaatttttggggggcccccccaata

SEQ ID NO: 555621 - DNA, 174 bp, Homo sapiens
ctagacactcttcccccgtgagtacttatcctctaggtctcaacttagtataacctccttcaagagaccccactccctgggccattttttaaattatggtaaaatggacaaagcataaaatttaccattttaactacttttattttatttatttttttgagacaaagggaaaca

SEQ ID NO: 555622 - DNA, 574 bp, Homo sapiens
  misc_feature (536)..(536): n is a, c, g, or t
tgctaggattataggtgtgagccaccgtgcccggccataccattttaactttttaagagctagacccaccaataaaaactgagtaaattccgcatatgtcaggtgtctttttctttcttttccaaaatgtagttgcacaaattctgaatcccagttaaatggaatatgttgatgaattgtggtctgtccaaaaacttgcttaacatcctcaaaagttacttctcctttgccagctttgtcaaacagctgaaaggctaccataaacaaagcatcaggggcacacaggacagattcaaaggcaacaaattcttgaaaagatattaatccatctttggtctgatccaccactccacttaaaagttccacagtctttggattaggctggctttctccaaaaatgttcaagtatcgagtgacaaagtcattgggggacatgaaaaattcaccgtttttctcaatgcttgcatacttcaaaaatattgttctaagctcagctggatctgctctcttggttaaagccaccttggcggccgccntgattcgccccggttgcggcagctcgtgcgctcgtgcc

SEQ ID NO: 555623 - DNA, 879 bp, Homo sapiens
  misc_feature (841)..(841): n is a, c, g, or t
gtgtgtcatacctggcggagcggggatgtttagaacaaggtccttcatgtaccattctgaaccaccatcttgtgcagcagctctggccgcaaactactccatgggaacaacgtgaagacaagaagtatagggtgcataagtaacttctgtgtgtaggcagattattcgcttcttcgttctatcagtggaaagcactactgatgatgcaggaaagaaacagaagtcctgtctggctctcacatgctatgactctatgaaaacagtcatgccacatctccctcaccttaaaactaaatcagagtatcaaaactactaagccagaaacttgttttttttcgaataggaagatgtttgaactggagctccaaaacattgaagtatctttactaaaagggatatactatcttctataaagaatttccatacactttattttgttcctagaaaaaaaaaaaagaaaatgctcacacaagtccacacttacacagacgtgcacagaagcatgctccttactcaaaagttacttctcctttgccagctttgtcaaacagctgaaaggctaccataaacaaagcatcaggggcacacaggacagattcaaaggcaacaaattcttgaaaagatattaatccatctttggtctgatccaccactccacttaaaagttccacagtctttggattaggctggctttctccaaaaatgttcaagtatcgagtgacaaagtcattgggggacatgaaaaattcaccgtttttctcaatgcttgcatacttcaaaaatattgttctaagctcagctggatctgctctcttggttaaagccaccttggcggccgccntgattcgccccggttgcggcagctcgtgcgctcgtgcc

SEQ ID NO: 555624 - DNA, 370 bp, Homo sapiens
  misc_feature (8)..(8): n is a, c, g, or t
aggtaagnaaattggtaacttgggaaaatggcaaaaaaggtgtaaggggggaaaaataagtgtcagtattcaacactgggtacattaggtactgattatcttttctattctcagttgaaaatacttaagatttgctttataaataccacaattatcttaacactcttcagagcttatgacccatatgacctcatctctaatttcatacaaaatctccataagctgtataccatataatgaaagaatcagacaaatagtgtaaatgtgtattttaagtattctaagcaagaaaaagagagttgaaaaagtgtatgtttctcaaaaggtaaaaatatgtgaatacagagaaaacactctgaagtatttatgt

SEQ ID NO: 555625 - DNA, 990 bp, Homo sapiens
  misc_feature (1)..(1): n is a, c, g, or t
  misc_feature (952)..(952): n is a, c, g, or t
ntgccttagagcatctaagaagattagcaaaaatcagcccttgatatacttcaaaatctaaaacaaaattaacatgagatcacaaatctgtttttccttttatctttaaaaagctaatgtatttctcgaagatattccgtattacccagacaacaaattaacctacccactaaaactagccaaaacacactctttgtttgagtttagtaatgtatgtgatcacattaaaatgttagtgtttgcaacagaaaaaaaacactacataacttataagaattgtttttataattccttatttactgagttaaaccacttcattagggcaagttacaacttacagctactagacattcttctacaaaaggagtcaagacatgggggcggatggtgaccatgatgtctcggaagtcgatggctgtgactctcccagtcctagcattgtcccgttgcacaaaggcttgctttgcgtgctccagttgtatttccaataaaaactgagtaaattccgcatatgtcaggtgtctttttctttcttttccaaaatgtagttgcacaaattctgaatcccagttaaatggaatatgttgatgaattgtggtctgtccaaaaacttgcttaacatcctcaaaagttacttctcctttgccagctttgtcaaacagctgaaaggctaccataaacaaagcatcaggggcacacaggacagattcaaaggcaacaaattcttgaaaagatattaatccatctttggtctgatccaccactccacttaaaagttccacagtctttggattaggctggctttctccaaaaatgttcaagtatcgagtgacaaagtcattgggggacatgaaaaattcaccgtttttctcaatgcttgcatacttcaaaaatattgttctaagctcagctggatctgctctcttggttaaagccaccttggcggccgccntgattcgccccggttgcggcagctcgtgcgctcgtgcc

SEQ ID NO: 555626 - DNA, 332 bp, Homo sapiens
  misc_feature (170)..(170): n is a, c, g, or t
  misc_feature (254)..(254): n is a, c, g, or t
  misc_feature (261)..(261): n is a, c, g, or t
tcccagtccactgcagccagtgctgaatgaaccctgcccagaggtgtctgtagtgagcttctgccctagtgacttttgagccggccaggttgcagcgcggacacactcgcaggtcgctggggccccatcctaagcctaacttacactaaacaacatttaacaacacaaancaccatatcttataaaacacttacttaaatacgtgctacgaaagcaggcacctacccccctagatttttacgccaatctaccanaaataantttaaaattacaacacaataacctcccaaaatataagcacctatttaagtatacggaatgggcccaacatt

SEQ ID NO: 555627 - DNA, 551 bp, Homo sapiens
agaagaagtcaattgacaacagctagaacatctaggtcaggcactccaggccgacacgacaaagcaggtgcaaaggccccagggcgggaaccagcgtggcttgttcacagaacaaggaggtagatcgcttgcccttgggaccaaaggaaggctctggattttattctaggggcagtggaagccgttggagggcctcaggcaggaacacaaggtgtcgtggcagaaaggaagaaggggccgggcacggtggcccacgcccatcatcccggcactttgggagggaggccaaggcaggaggatcgcttcaatccaggagttcaagatcagcctgggcaacacggcaagaccccgtctctactaaaaccctaaaacttagccaggcttggtggcatgtgcctaaggtcccaggtcctcgggagactgaggcgggaggattgcttgagcccaagagtttgaggctgcagtgaactattatcacaccactgcactcagcctgggtgacagagtgactctgtctcaaaactaaataaataaacaataattgtgttaaa

SEQ ID NO: 555628 - DNA, 238 bp, Homo sapiens
  misc_feature (141)..(141): n is a, c, g, or t
ccggaccatatagacatcgttgaggatttgccctatgttcatcaggatatcagtctgtagttttctctttctgttatgtccctccctggtatgggtgttagggtgatactggcttcatacaatggtttaggcaaggatccnctctttttctgtctttcagatatagtgtcaatatggttgggtaccaatttctttttgtgaatgtctgtatagaatttatctggtgagtcgtgtctgg

SEQ ID NO: 555629 - DNA, 874 bp, Homo sapiens
  misc_feature (1)..(1): n is a, c, g, or t
  misc_feature (836)..(836): n is a, c, g, or t
ntgccttagagcatctaagaagattagcaaaaatcagcccttgatatacttcaaaatctaaaacaaaattaacatgagatcacaaatctgtttttccttttatctttaaaaagctaatgtatttctcgaagatattccgtattacccagacaacaaattaacctacccactaaaactagccaaaacacactctttgtttgagtttagtaatgtatgtgatcacattaaaatgttagtgtttgcaacagaaaaaaaacactacataacttataagaattgtttttataattccttatttactgagttaaaccacttcattagggcaagttacaacttacagctactagacattcttctacaaaaggagtcaagacatgggggcggatggtgaccatgatgtctcggaagtcgatggctgtgactctcccagtcctagcattgtcccgttgcacaaaggcttgctttgcgtgctccagttgtatttccaataaaaactgagtaaattccgcatatgtcaggtgtctttttctttcttttccaaaatgtagttgcacaaattctgaatcccagttaaatggaatatgttgatgaattgtggtctgtccaaaaacttgcttaacatcctccatctttggtctgatccaccactccacttaaaagttccacagtctttggattaggctggctttctccaaaaatgttcaagtatcgagtgacaaagtcattgggggacatgaaaaattcaccgtttttctcaatgcttgcatacttcaaaaatattgttctaagctcagctggatctgctctcttggttaaagccaccttggcggccgccntgattcgccccggttgcggcagctcgtgcgctcgtgcc

SEQ ID NO: 555630 - DNA, 349 bp, Homo sapiens
tatcgccctaagtggctcccccattctcggcccacggcttctctgctaagatgctcccattctttggatcggcatctatcataaaatttctcgaatcatgtgcccatcgtacttacgataagagtccttgagggtgtgcactgtgtattatctaacccctgtcattcgctggactgggggcagatgttagcatcaatcaggcttttcataactcacttgccaaaacaaaaaatatcagcctaaaaattatgaactaaaaaataacgactagaaaaaatgcactgtatgtcccattttgctgccgaatgaattcacatgagaacctactaaagatgctagataaactata

SEQ ID NO: 555631 - DNA, 125 bp, Homo sapiens
  misc_feature (107)..(107): n is a, c, g, or t
gaggatcgcatggagaccaggctgaggatcaggtggtgtcgctagattgggaccttcttggctcaggtgatggatcaggtggtctcccgtaggtcaggaccctcttnggccagtgaagaataagt

SEQ ID NO: 555632 - DNA, 98 bp, Homo sapiens
  misc_feature (67)..(67): n is a, c, g, or t
tcgatacgacttttcggtcacctctgcgaaagatcagtcccactccccctcccccttctgtcgtctntagcagccgtatagtagtagtaggcggccgc

SEQ ID NO: 555633 - DNA, 187 bp, Homo sapiens
aatctacacatagccattagttactactaacccttaaaaaaagaaacaggaaaagaaaggcgcaataaactagatcaggtacagaaattatagctactatacttcactacaaaagcagtctatacagtatcatatgaccttagattatgaaaacaatccagaataaaaatctttagatgacataagc

SEQ ID NO: 555634 - DNA, 294 bp, Homo sapiens
aacaggtggaagctgttgagttggaggctaagagtctcaaaattatttcaaggtgtctgtccttctaattgagttatggtgaatggttgcatggatttgaaaaaaggcaaagatgtatggctggacttcagggtcagaggaggttaaggttctagagcacaagttgaaagagctgatgaaatgcacacattgttacagctagagtgtgaaaatacaaatccgtcctcagaacagtaggaatgattttatctacatttgattacttaatcatacctctcctcatggctaatagtt

SEQ ID NO: 555635 - DNA, 988 bp, Homo sapiens
  misc_feature (570)..(570): n is a, c, g, or t
  misc_feature (654)..(654): n is a, c, g, or t
  misc_feature (767)..(767): n is a, c, g, or t
  misc_feature (900)..(900): n is a, c, g, or t
  misc_feature (988)..(988): n is a, c, g, or t
ggaggcaaaagaggcgggccaaaaggaggggaccgggagggaagaagcaaagggaagaggggaggcagcaggcggcggcgccgcgggaggagggggcggcgcggcaggcggcggggcaggggcggggggcgggggagcggcggccggggggcccaccagaggcggcggcggcggcggaacaccaacagcagccggcgggccgggcggaccgaccacaggcgtcgggccggcaaccgccgccggcgcagcggagggggcggggagggccgcggcggcagcagcggccggagccacccggagcgggggaggccgggccgggcgaagaagggggggccggcgcaggggcggggcagagggggggagcggcaacaggaggcgcaaggggggcagggggggcggcgggaggacgcggcgagggagcggcgggcggggggcgcgaagggcgcgggggagcgcggggcggggcaagaggcggcgaagagcgggaggaagcagcgggggcaggggaagaggggagggacgcgggagggaagcggcgggacgccaagggccggacaaggcagcgaacgnccggaaagcacgggcaggccaaaggcagaaacggcccacaggcccaccaggagcaagcggcaaaaggggcagcgggcggacagnaagcagaggaaggccagggagggggcggaaggccgggaggagaccaggagccgcaggagagaggaggcacgggccccggcgcgggagacggcgacgggggcgcagggggccgnggccagcccgcaggcgcggagaggcagagaccggggggagagcaggccaggcgggaaggggcggaagggagcaaaacagcggccgggggcggcggggagccggcaacgggagcggcaacgaccaaaggaaggncaggaacggccgcaagacgaggaccgggagacaggaccagggcggggagggcggaggcagccagggcagaacagagggcggagcgggn

SEQ ID NO: 555636 - DNA, 859 bp, Homo sapiens
agcggaactttgagaccagcctgggtgacataatgagaccccaagtctacagaaaaaaaaaaaaaaagacggaaaataacacagataggtgagcaagtctaaaaaaattttctgtgcctatttcagtctcagtttttttctgatagaaagtcagtactacagtatgtccatacaatatattggtatagattgaaaatgtccttgatgacatttacaggcatacctccctttattgcacttcactttatggtgctttgcaggctgttttttacaaaattgtggcaagcctgcatttgagcgggtctaccggtgccgttttcccaagagcattgtgctcactttgcgtccctctgttacattttggggaattattttacaatatttcaaacgttttcattattattcatatctggtaatgggggatctacgatcagggctctttggacgttactatggtcttggtttgggggtgccacaatccacatccacttaagatggtgaacttaataaatggtcgtgagtcgtgggtcagactggtccacttgaccagtggttcctccatctctctccctctccttgggcctccctaattccttgagacacaacaattttgaaattaataacattaccatgtcctctaagtaacgctgaaccgcgacattgtgtcctatgtctgactcttactttaaactcaaaagcaagaaagtgcttgaaccttaggaagcacttgttgaaagccaagaacggctgaaactgaggttcctgggcaaacagccgctgattgaatgccaagacatttctaacagggaacttcaacaatgctactcccagggccaacgttggtgggtcacacgttata

SEQ ID NO: 555637 - DNA, 418 bp, Homo sapiens
gagaacgcgagcccgtggcaccaagtgggagaagacggatgcagctgtcgaaatgaatcggattaaccgagagcagttctgggagcaggccaagaaggaagaacgagctgcggaaggaggaggagcggaagaaggccctggactagcaggctcaggttcgagcaggagcggatggagcaggagcggcagcgagcaagaggagcgctgagcgtgctgctaccgggagcgggagcagtcagatcgaggatgcacaaggaggaatacagcagactttagaagcggacgcaggccaagtaggcggttgaacggagcagtctatcttctggtgaccatcgggactgacggaggaagagacccaccattgaacgaagtccagagtcggaggtggaggacggcccagtcagctatcattgcccca

SEQ ID NO: 555638 - DNA, 1015 bp, Homo sapiens
tgaatcgcgactgggcatacctattgactcttatggcgagtgcaatgatagtgctaggttatatacatactgtgacactcagacccaaggtggggttagagtgctcacgtatcgagggggaactcaaaagccacatctcgggtagagcagacacgactaaaattagctcattcacgcgaaggatgcccccttaagaagcccgacacacagtctatcagtcatggctctacatctggcgactccgaacttagacatctgcaccaatcgctcgtgtctactatgagacccacccctactccatatgcaagcccctgggatagagtctgccaagcttatgagcccatgctctgaatagtaattcataggtccatccgtctgagacgcataagacacgcccatatcatcacagtaatctggatcgaaggcatgaaaggatcaaaggatcaaatgcataacgacgcctgaaattctgtgagcgatcaatgtgagacgatgatatgccctgatggaattgcttcaatatgaaggtcacgcgctaagcgcgatcagtgtctacgtgatcgaacgagtatacgtaataacgtggctccatttaagctgctccatctcttatcgaaagacaagaaacatctctgattactccgtgtcatcatgacgctgtgggccatagataatgatgtagctccgacagtagcagagacaaactgaagcccccttgacttggcgaaggggagtcggagctagtgctcaagatctcaacatggaagtacgccgaggccccttcgacctaaacttagtagcgaatacaccaagattaatataataaaaccttacgataaaagttgcctaggacaaaatatgaggctttccccggatataaaatatgtgtggcgcacctgagtaacgcgggttagatcagaagaaccgagcgctagaaaaaaacctgaaaaaacaaccactctatataggcgccgatcacgctccaaaaaaagtgggagggcgcgttgctttcttt

SEQ ID NO: 555639 - DNA, 850 bp, Homo sapiens
cccaaaatctggggaaaataaaattggggaaccactctttgtgtttcttttttataaaatagaaggcccaaaatggtgatacactctgaaaataattttgtgggcggtgtatgggttttaaaaattgggaatatgtgttcttcctgggggaccctgttaataactggagttgtgtgtttgccacaaattatgccctctccgggggaaactcgcgaggggttttggtgtgagattttacacacgagacacccactttaagcccccaagaggcccgctggggggaaaaaccctctcttctcacaggctccccacgggggggtttggtcacagggccaccccaccgtataaccacgtggcccttgccttgtttaacacacttcacctttttatcgcacagctttgtggtgttaattttacacactcgggcacctgttgttaatgtggagatttggccacttgagccaccacgggggttttggagagtgttctgctctttttgttgtgtctgtgtctgttctgttgtttcgcggggagactcgggggaacttcctctccccaagagtgtcaccactttgtgagcacttctgtttcttcttcctgagactcgccactttagagaaaacacagtgtaacacggtgaaaatggtggttctcacgtggttaaacgggataatttctgctaaccggcttcctccctgatgagttttgaaaaaacacctactgtaacgaagcttctggctggtcctcttttatcctggaagtggtttttctgtgtagccatatccctgatagtcccctttggaaaaaagtactcttcctcctaaccaggaaaactttaatccctcggccc

SEQ ID NO: 555640 - DNA, 153 bp, Homo sapiens
cgattcactgaagaataaatagaactcagaggcacaagctagttctgagtgtgcagataatggttctgcagctgggggaagcaactcacccgccgtggagtacaagcgtggcggtggagtacaacctgccggtggagtacaacctgccggtgg

SEQ ID NO: 555641 - DNA, 1385 bp, Homo sapiens
aactgggtaaaccgcacaaccttttgtacctttacttacgacgtaacacgtgtacactgacgtacctgtggaaacccaaatttggacatactgcaacacttcgtacggacgttacctacggttacgacaacttacgtccataccattccactacacgcctgactgacgcttcgacaacttgcaggttggacgacacgtggaacttacagccttaccagtcccttttgtctcacgactacccttacaacacgttaccttctactttacaacacggccatttactatacagtctatacgtccttgacacacttcaacacattactacgacttacctcttggcctcacggctctcacactacccttttactaacgcgacgggtggtcaccacactgtacgcgggtacccaacggcgtccggcactcggtcgactcgggcgcctgggcctcgtaccaccttggcttccttggtcgccaccggggtcgctgaactcgtgacacacggcactgggtaactctcctaacggcgtacgggccgtctgtaaggactctcacccctacactcgcacgacaatacttccctacataccgaccttgaacgtgacacacactccgaacgtcaaactcatcatacggggccatttccaccaagacggtccccctggttgcacgtcccttcgggtcccctcgttgacacacacgggcctcggtcccctccaggacacatccccttggcgtcccccttgtgtcacccccaacatcctttccaaggcccacacccctcagggaactctcagtgcccccccacaacaggcctgacccgcctcacctaccccaatcgactcctcaagataaccccgcggggataccgcacaaatcaacctcacgcacgggttccaatcacagcaacccgtggccaccaactcacagcccaggcgagttacgaacggtcgcgaaataccagcggcaaggacgcacgcctgactcgcgctgcgaatcacacgaccacacatggctaggggcccgaccccacgtccagaaccggtacgcgaccgccgtccaaaacctgggcgctgtaaccacaagacctcgctgctcccgcaccggtgaagaaaaccataagacccgtcccggaccgaccgggccccccaacaacgagacgccagagacaccacacggcacaacagcaggccccacacgcaccgaccacccctcaaaagggaaccctgtccaagacaacaacctgcccaaccacgcgcgacaacacactcgacaccgcacaacccgacaactacgacacgagccacaagtccaccgcccaccaagaggacccgcacactgcaactgaccagaacctagaccgtcacacagcagatccgagaaaacgc

SEQ ID NO: 555642 - DNA, 358 bp, Homo sapiens
agaatttagtagaagcaggtatacttctatcattttgatgtttttgttaatgtttccaaacaatgtactttgaaatcagaatcacttcttatcgttttcatatacttctgatgcttttcatcacattagtgatcagaaatgaggtgtaattccccaccccctgcccgcaggagttaagtaggattttactgtaagttgaagggagttttgccctaacttatgggttgtggatgcatgagtgtttgttgggtttgattggctgtcgatggattgtggtttggtgtctttgttggcttttttatgctcctttgtatgattattaagattcttccttgttttagttgtgtgaaccctctaa

SEQ ID NO: 555643 - DNA, 321 bp, Homo sapiens
  misc_feature (1)..(1): n is a, c, g, or t
ntagccgtcctatatatccccaccactagaaaatcattgatgaaatatatcacattatggaagaaaaaacatatatatcatctcaagctgatgcaaaaaatatatttgacaaaattcagcactctatcgagaaaaacctttagaaaactttaagaaaatttggctgggcgtggtggctcacacctgtaatcccagcacttggagaggccaaggtgggtggatcaattgaggtcaagagtttgagatcagtctgaccaacatggtgaaaccccgtctctactgaaaatacaaaaattagccaggtgtggtgttgggcgataa

SEQ ID NO: 555644 - DNA, 420 bp, Homo sapiens
  misc_feature (279)..(279): n is a, c, g, or t
  misc_feature (305)..(305): n is a, c, g, or t
  misc_feature (346)..(346): n is a, c, g, or t
  misc_feature (349)..(349): n is a, c, g, or t
  misc_feature (356)..(356): n is a, c, g, or t
  misc_feature (361)..(361): n is a, c, g, or t
  misc_feature (366)..(366): n is a, c, g, or t
  misc_feature (384)..(384): n is a, c, g, or t
tgggtggatcacctgaggtcaggagttcgagactagcctggccaacatggtgaagccccatctgtactaaaaattcaaaaattagccgagtgtggtggtgggcacccgtaatcctagctactcaggaggctgaggcaggacaatcactagaacctgggacgtggaagttacagtgagccgacatcactccactgcactctagcctgggcaacaagagtgagactccatctcaaaaaaaaaaaaaaaacaaaaaaaacacacaaaaaacctaattgtggngggatgaagaggattcccagcaaaancaaaaaacaaaacactacactacttgtgaaagaaagggtantantggtgtntgacntggtncacccggaactattattnacatagttattttaagggcaaatagtattcccccca

SEQ ID NO: 555645 - DNA, 443 bp, Homo sapiens
gaattcggcacgaggggactaggttttgctatgttgcccaggctggccttaaactcctggcctcaaggtgatccttctgtcttggcctcccgagtagctgggactagaggtgtgcaccgtcacacccagcttcaagtctcttattataaagttctggccacgcacagtggctcgcaactgtaatctcagcactttcggaggccaaggcggtcagatcacctgaggtcaggagtttgagaccagtctggccaacatggagaaactccgtctctactaaaaatacaagaattagctgggcatggtggcacacgcctttagtcccagctactcgggaggctgaggcaagagaattgcttgaacctgggaggcagaggttgcagtgaaccaagatcaagccatttgcactccagcctgggcaacacagtgagactccgtctcaaaaa

SEQ ID NO: 555646 - DNA, 613 bp, Homo sapiens
ggtggcacacacctgtaatcccaggtactcaggagactgaggcagtagaatcacttgaacctggaagatggaggttgcagtgagccaagatcacaccactgcactccagcatgggtgacagagtgagactccgtctcaaaaataataataataatagagttgtagctgggtgcagtggctcaagcctgtaatgccagcacttcagagcctgaggtgggaggattgcttgagccctggagtttgagaccagcctggaccacatggtagaccccatccctacaaaaaaaaaaaagtcgggtgtggtggcacacgccttgtagttcccagtttactcaaaaggctgaagtgggaggatccctagcccaggaggtcaaggctgcagtgagccatgatggcaccactgcaatcttggggtgacaaagactctgtttaaaaaaaaaaaaaggtgtcgggggttaaaagttatcctcaaggagggtcctattctccagtagaagaaccctttttttctactaacctgacgaatggcgagtttaactaactgttgctcgctgcatagagtatgcggagataaggacctaggttgcacctacctgtgagaactgtcgtcaag

SEQ ID NO: 555647 - DNA, 1366 bp, Homo sapiens
  misc_feature (1366)..(1366): n is a, c, g, or t
tgcgctccctgggtggcaagatggtggcgcgcaggaggaagtgcgccggcgcggggacccgtgaggaacctgtatccccagcccactgggctacgcagctattccaatcaagttctctgaaaatgcaacagtgcttctcacgtaccatctattgtgacgagcacacgtgcgtccgagcaatggcaccagagtccaacctggaccatcaagacagatggacatactttcaaaggtacctcaaaatggttgacccaccaattactggcagacaagaagtcgagaagccactgttcaccgcacatcctgtgtccaccatgtgggaccatacgtaccagtgcagtcagaagttagcacggagaaagccgggaacctgggcttgagaagccccaggacggagtacaaagggaccgcaaagtaacaaagacatcccacaagagccaggtaccggggtatacccacgggtacgacataatagtaggaaggacccaggcaaaggccccagcgctggagagatgtcaaagaccgggcccatatgagccaccgtcgaaaagcggccccccaccatggccatggcgatagtaccacacagaggatagaacggccaacacccattgggttggaacagcaagatggggcaatattccacacaaaagtgtgagacatcagagtgtgaacctaaccgccaaggacccttctcttggttgccccccgagaacccactatgaagtggcaccactatgtacagcgcagctgggcgaactcgttgggaaccaaacagttatcacacttagggacaaggggagccaaacatcatgtgtacatccaaggaaaaagacaatcacgacacagtaaaagagacaaagcgaaagcgaactaaatgcggacgccacaaagaggtgaaagggaaaaagtacaagcgggagagaactaccccgatggaaacccgacacagacatagcagaccgcacatgtgcaagatgaaagaatagagagtggacacccactacatgtgagatgacaccgacaggatagcacagagtgagggctacccccacggaggaacaccaacagagacaacgcgcaacccaacacaacgaaaacaggacagcagaaacacaccatacagaacgaaaaacggagaaagacatcacaagagagaacgaacggacagaacaccgtgaaacaaacagaaaggcaagacggacggcaacaacaggatgtaacgaaacaccaccatgtgcgcagcaaccacaaccaagagaaggaagaacgaacgaacccacagaaaccaacgagagaaaacagaacataacagccggcgagcaaagtagccggagcacaggaaaagaagactgaagaagcagan

SEQ ID NO: 555648 - DNA, 221 bp, Homo sapiens
gctccaattacaagcacacgaaggaaggatccatcacctccaccaggatctcgatcagacacgggctcgtactcatgccacacaacatgatcacactgacttctgagtaaggagtctaggcagagaacgctgcagccgtttctacaagagcagccagagatctccgtgcttaggtgctgtattttactccaggattgcggatccaagataaacccaccaga

SEQ ID NO: 555649 - DNA, 367 bp, Homo sapiens
acggttcactgagttgttatgctgaaccgtcctagtgacaattattttaaaagagggccagaggctgatgcaggagaatcgcttgaacctgggaagcgaaggttgcagtgagccgagatcgcgccactgtactccagcatggggacagagcgagactcgtctcaaaaaacaaaaacacacatacaaatacaaaattagccgggccgggcatggtggcgcatgcttgtaatcccagctacacaggaggctgaggcaggagaatcgcttgaacccgggaggtggaggttgcagtgagccgagatcacgtcagtgcactccagcaatgggtgacagagcaagactcattctccaaaaaaaacggagataa

SEQ ID NO: 555650 - DNA, 368 bp, Homo sapiens
tgaacattcgtgtcctttcgtacagggaggaatttgaagtaaattgaaaccgacctggcattactccggtctgaactcattatcatgtatgactttaatcgttgaacaaacgaacctttaatagcgcctgcaccatcgggatttcctgttccaacatcgatgtcgtaaacaccctattgttgttatgaaactctagaatatgattgcgctgttatccctacgtgtgatctcattccgttggtcaatattattagtatcaattgaatataatatattcgctttgactggtgaactcttagcatttactgctcgtacgttgggttctgctcctaggtcgtaccgaccgaaattttttatgcatgtttgtt

SEQ ID NO: 555651 - DNA, 386 bp, Homo sapiens
agttatattcacgagggacatccaacttccgccaggctcggtagttttttcgcctcaacctataaatcttcccattattttgctacatacgcgggtgttctatttaacctgttcttaggtagctggtctggtttcggggttctaagctttggctctcctggcaaagtttttcatagttaacacattacgcagaaggtatagggtttagcccttgttatattaggctcggcaatattttttcctctttcccacacggttatatatgtattgccacagatctctatctctatcgcctagacttcatttgggtaaatggtttgtctaagcttctcgagtaataagttagagtgtgtttgctatttcaaatcaggcacgctctcgtgcca

SEQ ID NO: 555652 - DNA, 879 bp, Homo sapiens
tcctgagtgtcgcgtggatgtaaaacccatttcacaagaagaagattgagagtgagagagccctcatcagccagtgtggaaaaacagtggtaaatgtcagctacaggccagcttatgaccagataatctgaacaccagaggaaatcaaaaagatactagagggcttcatgtttctgtaaactaggtggcccagttgaaatccttcccttcctctatccttggaagtgcctaccatgcatcacaaggtgcgagattcctcgcacagaccgtgcacagtcatcagcgccgtgctgagatgtctcccgacggactcgtccggagggcctagtcagtgacccacgctagcaactatcaatatggatccctgtggaagactaggctaacacggatgaaattagttcccatgtttctaacgaagcaatagacttcattgactgtgtcagggaaaagggaggcacaggtcctaggtccaacggtgaggctggggatctcccgattacacctccaccatctagcatggcttatcttatgaagatcaagcagttccgcctgaaggaggccttcgatgacatcaggcagaggaggaacatggtctcgcccaagtttggcttcatgggccagctcctgcagtacgaatctcagaaattcgggggtgtccaaagggactaatgctgcgaggcccccctatcgtgcctaagggggaagcagacactgtcttcactgatcgggcgattccgcgacagtcgagcactggaggttctgggtggctactggacataccctgcctagatgccggcacccggtgctaaccaatcaagagcccagagatcagaaaggccttgtgaacagccatcgggtcacagggtggagaacggccgc

SEQ ID NO: 555653 - DNA, 802 bp, Homo sapiens
aactaaccccgctaataaaattaattaagccactcattcatcgacctccccaccccatccaacatctccggatgatgaaagcattcggtctcacctccttggcgcctgcctgatcctccaaatcaccacaggactattcctagccatgtcactactcatgcagaacgactcctcaagcacgccgcttattgcgatcgaactcgcccctacatacagctgcggaggacgatagaagttgagtgggcgtgagatcagtccgcgtgagccgtgtcgacgcacacatggcgcctcaagtattcatttaatcgtgtccactctctcctacaccatcgggccgaggtcctaatgttatcggaatcattgctactactcacgaaacctgagacatcggcattatcctcctgcttgcaactatagcaacagccttcataggctatgtcctcccgtgaggccaatatatcatgctgaggggccacagtagattacaaacttactatcctgccatccctagtacatgggacagacctagttcaatgaatctgaaggaggctactcacgtagagcagtcccagccctcacacgatgctttaccttatcacttcatcttgccctgtcagttattgcagccctagcagcactccatgctcctattcttgcacgagaagcgggatcaaacaacgcgcctaggaatcacctcccattccgataaagtcaccttccagccttactacacaatcgaaagacgccctcggttagtgctcttccttctctccttaatgaattaagatattctcaacagact

SEQ ID NO: 555654 - DNA, 1010 bp, Homo sapiens
gggtcaattctattttatgggttctgaggagggaggattcacccaggggattcctttttccctatacacttctccccttcccccaaatattgtgaggcttctcttcccaactatacgtgccatatttcagcatttcttctatattcttaaccctctccttctcccctttcatacttctccatatatacatactccttacccgcgtgggccgaggcgagttcaccccgagaggggccgagggcccttcgagcctgtgtgtgcggcggcgggtgtgtgtgccgtggagccacccagaggcagagagggggaggcgtggagcccgcgggcgcccgagcctctctctccaggtgtcctgtgaggcgcagggacacacacagcggtgtaacacagaggggtgtgacgccatttcagagagagagcgctctctctgtggcggtgtgccctctctctgtgggcccgtgtgtgtggcgcagagattctcccacacgcgctctcccgagcggcgtgcgcgcaggcgagcgacaaacgagcggggggtccccgccaccgcgagggcgcaaacccccgaggggagccgacacacgacacacagggagaccaccacgtctcgagccagggcgtgcgcgcctccactcgtgggcgcgagcggtcctcgaggggccaacgcgcccatatatgtgggcgcgtgaaccctcgtgggttcagcgtccacgcgtcgcgcccatctgtggccccgcgcgcacacggcgcccttgtgcgggcgcgcagtgcgtctcccggcgtgcccgtgcccgcgtgcgcccacaccacacacgtggtggccggagtggtttccccccgccccacatgtggtgcgccgccagcgtaagcacccgcggccgcacacgcgggtgtggagaaggggagacctccccgtacacacgcgtgtggaccacacaagcgtgggcacaaaagccgcggcgaaaagtcccccgcggcgaacacccgttttgttctcgccccacgcgcac

SEQ ID NO: 555655 - DNA, 103 bp, Homo sapiens
tcaagcttctaacgatgtacggggacatggctctcccccctagcccgggagaccaggggccttcctcttcctctgcttttatttaataaaaactaaaaccaga

SEQ ID NO: 555656 - DNA, 156 bp, Homo sapiens
cccgaggctagcaatgatagcttgtggggtggggagcagcatcaccagcccacgagatttgacgtgggcttggtctacggccagcagtggaacatggaggcagcatgagttagcagcaggcacacgtacactgctattgaaacttctaaaactagg

SEQ ID NO: 555657 - DNA, 436 bp, Homo sapiens
  misc_feature (33)..(33): n is a, c, g, or t
cgagctcggtttcccgccagttacaacagctgnacaacagctggtgggtgacttgcgccttgccgatagcacggtcaagtttggggatagcgatgcgttctatcaacttgacctcaagagcttgtcgggccaaggcacttttgtcatgggcactgatttcgctcagggcctggcggacttcctgaatattacgggtgacgcaaccggccatcacgacctgttgcttaccagcagcggtacagaaccggtaaacccaggtgatgtgcatatcgttcacacgggtggcggtgacgcacagtttgcgctggtaggcggtaatgtggatgttgaggcctggtcctatggcctccagcaagacggtaatgattcggtccttgacccgaataatcgcactgacagcccaggcacgcggtcggtattggccttgttcaacact

SEQ ID NO: 555658 - DNA, 857 bp, Homo sapiens
acgctgtgacgcggtggacgtcggaggcagcggggagcggatcgtggtccgccgggtcctctccagggagcgtagaggcagcagttgggaccccccgccgccggacgtcggatcgaagaacgcaggaatggggccggggaggaactctgcacacacacagtggttccggggacagcgagcgcattgaagccatcaataagagcgatgaggaggaatcctatccaccctactatcactcgagtcctgtcgtggtgatactagagaggtgaccgatacatgatcggtataaccatctcgaattgtcatctaagggtcatattcccgaagcagagagagagagtatctaatgtagactcactagagtcgaacatccgcaagggaccactgaaggaggatcactaatattagctgtgaagtttcctggtgtgccgactcttaagagctcggatgtgtggcggaagcgatcattcgcttgccttcctccatgctcagaggtggcatatctttccgtgtagcgcaatgattctttccaactgcgtacaacggatgcgcgcagcacaaaattggcgcatgacttgtgctttacaacagctggcttcatagtagggacctgtgacgtggtgagcgttgggcatccgagaacttacatgtcgtagacccatcaatagtgcctggatgaatcatatcatagaccccggattctggaactcaagcgagtgaggctgagccaactggtcttggagaacctacgacggaggtactggcaagctcgcgagccccgtgtgtctcacctggagagtacacgggggggcgccgccgggtgcagcggtcagcgtgcgaagcccggtctggccctt

SEQ ID NO: 555659 - DNA, 150 bp, Homo sapiens
cgagtctcatctgggacaagaatctaaagtttgtgatgcttcacaaactggagcagttcaatggggaagtgcactcatacgatctgggtatgaaccacctgggagacatgaccagggaagaagtgatgtctttgatgagttccctgagag

SEQ ID NO: 555660 - DNA, 178 bp, Homo sapiens
tagtgagttaggtctgtggtagcctgtcgtggtccttgtgctgtgtagacgcctagggtatgtataacattaagtgattccaaggtgattttagtcccccctgaaattgtcagctgcctatgttggagtgtttcgaatgttattagaatgttctcggtactttggaaaccccatcggc

SEQ ID NO: 555661 - DNA, 119 bp, Homo sapiens
agcatctccctttccatccacagacaatagctgttgtcagactcgagccaaatatactggagtcctcactgagctgaagttaccctgtgaaatggacttcagtggaaaagatgtcagtg

SEQ ID NO: 555662 - DNA, 1559 bp, Homo sapiens
gaaaacccatctctactaaaaatacaaaaattagccaggcatggtggtgcatgcctgtaatcccagctacttgggaggctgaagcaggagaatcacttgaacccgggaggtggaggttgcgttgagtcgagatcacgccattgcactccagcctgggcaacaagagtaaaactctgtctcaaaaaacaaaaatttactaggagaaaaatagttgaacctatctagtgataaaggggtcaatctcaagaagacttaaccaattaaacaactggtgtttgcacctaacaacataccttcaaaatacttgaagcaaaaccggacagaactgaaaggtagaattttccggaaaacaataattatagtgggagactttaacacctcctctctctcagtaatcaatagaactagtagaccggaacaatcagtaaggatttaaaagaactgaacagcaccagaaaccaatatctaatagacctattttggaatactctgtgttacaaacagaaatactcaatctttccaagtgcctttaaatattccccgaaatgattttttccgggaccattatattaatcttaccaatgtggcaggtctcgcaataattccagttgttcctcgccaaatggatttactgaaatcactggcggaaaggtatttgaacatttcatcctcttagttaagacatcttctgggcaggagagccattgccgttgacccctacttgcgggaggcagacacccagcggggggaaccgccgaagtgacacgatttaacacgcatactctctctagcaacactacgatcgaaatataaaaaaaataaagggtgactgctttcctcctactatatttttcagagggagcagagacaaggggaagcagacgagaaaagaacggaacaaagaagaagaagaaaaaggaagaagaggaggaaaaaagcaaaagggaagagaagaaaaaaaaagcaagagcgaagaacagcagggagaggacgaaagaagagaagagggaaagagagaagaaacaacagaaggaggagagggaagaaggagaagaaggaaacaaaaaaggaaagaagaggagaaagagagaggagggcagagaggaagccaagagaagacggcagaaggaagacgggaagaaggaaggaaaagggagagagagaggagggaggagagagcaaggaggaagacgaaagaaggaagaaagcagagagaagaaggcaaagcgaaaggggaggaagagaaggaaacgaaaaggagagcaggcgaagagagagcacaaaagaagataaggatagagagaagaaaagaagaacaaccagcaaaacacagcaagagagagaggaaagcagagagagacgagaaagagaaaaacgagcaaagcgagagagaggacagaagaaagagagaagaaaagagaggagaagcagacggaagcaagagacagaagcagaaaagagagaaggaataagaaagaagagcagcgaagaaagagaagggaaggacggaaaggaagacagagaacgagaagaagaagaagaaagagcgagaaaaagaa

SEQ ID NO: 555663 - DNA, 948 bp, Homo sapiens
ttcccagctactcgggaggttgaggcaggagaaatgcttaaacccaggagtcagaggttgccgtgaggccatcgatagcacaactgattccagccatgggcgtgacatagcgatactatgtctggtgaaaagcaatgcagcaatgctgaccgtctatgaacaccgcagtggtttcaatcaatttttccccggagttctggtgaacctcaccaaaggtgaggatgtccaaaaattaatttcttgagttcctggacataattttgagaccctttatggattacatgatgtggacccctatgtaagagggtcggagtcaagaattcaggccaaaagggagaaatgttgggttgtgccactacatggcgtgtggagggttcaaacctggggggtgcgtggaacgacctcatttctagtggatatttttggctcgcgcacatatgattgggttcctcacgggctttttttcttgagggaaaatctttcattctttgccccgcgggggagtacaaattctttgccactagaaattgctgcggggagccgggaaggcctaataatttaaaaggcttgtgggactaatcacgttgttccattggacaaaacgatagggagaggaaaaggccgttagttaatgggggagattaaaacgagctggctgtggagcacgcacgaggaccagcctttaatgcgggaggagcaaaggagctgattatttggtgaccaaaaagaccggcgggaactcttcgaggagaggcggccctgttttggcgcgaacaatgtttcaaagtttgaaagaaattacccactggtgtccttcttgtccacggttattgcctgacctaaacgcgtggggtctttaggccgcaatcggggtttacaagccttgggcaggggtggagtatagaccacagtgttttgttacacaccactattcttctctcctacagg

SEQ ID NO: 555664 - DNA, 233 bp, Homo sapiens
taaaactgacctagaagctatcagcaaccacaaagagacagaagaaaagactgcttctgaggctctctcatggaacctactgatgatggtaataccacgcccagaaataacggagtcgatgatgatggcaatgatgacggcgatgatgacggcactgatgaccccaggcacagcgcgagtgatgactactcaacacgagccaggtctttctgaaggccgagagagctaaataa

SEQ ID NO: 555665 - DNA, 370 bp, Homo sapiens
  misc_feature (205)..(205): n is a, c, g, or t
aaaacaaaaagcagaattacaaactgttattacaataattctaatttttatactggctcatgcactttctactaagatttttatttcttcatacagctcagaggtattgtccagtatgcttacatttcacttcagaggactcccttaagcatttcttgcagtgcaggtctagtggcaaatagcaaagctaattcccttagctttngtttatttgggcgtgtttaaatttctccctcactttattccctcattttactgctgaaaaactaattttttctttctttaagagacaaggacttgctattttgccaggctaaacttaaactcctgggctcaagtgactctcctgcctcagccttccaagtagcta

SEQ ID NO: 555666 - DNA, 266 bp, Homo sapiens
cgcatcacaggagtataatggagagctctgaagagcctccctcaagaagagagccaggacacccccatttacacggagttggatgaggatttcgaggaggaacccacatcccccatatggtcactagtgtggccaatctaccactattgaatgggtccagctgagggcactaatctctagtggccagagggtgaatgacctacagtctatatggaagaatgacaaatggggacgtgctggaccctgggtcagtgcggaaatgaggg

SEQ ID NO: 555667 - DNA, 512 bp, Homo sapiens
cggacgcgtggggtgttgcgaagcggcctgggccgcacccaggcactgctggagctcagtgtctgagtagagccccttggtgctggacatcagcagcttccggtaacaaagtaccacaacccgggtggcttaaacaataggcatgtattgtctcacagttctggatgctagaagtcaaggatcacggtgtccgcagggttggttcctccttagggctgcaagggaacatctgtcccaggcctctcccctaccttctggtggtttgctggcaaactttggcattccttagcttgtggatgtgtcgcccgatctccaccttcatcttcacatggcattctccctgtgtgggagtctctgtccaggtttcttctctttgtaaggactgggccaggggcctgccctactgcagtgtgactgcatcttaactaatttcatatgcaacaaccctaattccaggtaagggacagattctgagatactggagttaaaacttcaacatatgaattttaggg

SEQ ID NO: 555668 - DNA, 669 bp, Homo sapiens
ggaactgcttagagtagtgggttctccagtcctaggacctatggtcacatcttaatctcggcttttcaaatcagagtaggtatccttgggccaaattacatttggttccatgagagaggcaggaatattctcttggatggtgggcctgtagccagttttgtccaaggaagtaatatccccactgtttctctctggggaggataccaaaccagtatcagattggctgtcccagccttgacttccttgttcggtaatgggggttgactgggaagaattctggaaggagatgtgagttgattctccatcagagtcactgaaaagctttggggactgagatccccctgccactgtggaggaagggaagttttccaaactctaatctgtgatttcatcattccttttaaggaatacttccaactggggtccatccccatcagccttttgcaggtgaagtccagagcccagatctccttgcagggaacttgggattcctactccttctttacttccactgtgggattcttcacaatctacaaagttggtgaaacgggagttctgcatccactctgcttttgaagaacctggggtttgtctcagtttctcagggctgcttttctgaacctgcgcgccatggatacctcaggttggttcccggtttggctttgtgct

SEQ ID NO: 555669 - DNA, 156 bp, Homo sapiens
gaacagcggaacgcgaggggtgtgtgtcattcgcaaactccactgaaccttgattgaagacctacagtgtggcagtccatggcctggggactgatgatgtctaccgtagaacaagcctcacgaaagacagtctcagcagaaggctaggaagatgaa

SEQ ID NO: 555670 - DNA, 110 bp, Homo sapiens
gaattccctagtaattgcatgctagcaaggatgtggaaaaaggggaatccttgttggtgggaatgtaaattagttcaccccctgtggaaaacagtagggaagttccccca

SEQ ID NO: 555671 - DNA, 559 bp, Homo sapiens
ctgggagtctgggggcataaaggtcccagcacggtccttcccggcccccgccagccttggtcctgaggctttagccaccccacggccctctgggagacaggctgtctccttaccctgcaggagaaaggatcctgcacccatgggtccttaggcctcctggccccaaggcctgcttgctgccccagtccttctgtaaggcctgtggggggcccccaagtggggttcccctgcttgaagagtgccatctggccccatccccatccttagtgccacaggtcctaggtgtggatgcttcagtacccaccagaaattccatgcccagctgccagcgggatctcctgtcctgtagcctctgccctgtgtggcccctcacaagcttgtcatgtcgctccttattatgagccaccagggctccctattactttctgctcctccagccctgacctcagcatgctgctcagacctcttgagcccccgtgcctcgggggagctggctcccagccccacatgctgcagtctgagatccgacccgggctgtcccaaggaggcgtgcgcagaa

SEQ ID NO: 555672 - DNA, 385 bp, Homo sapiens
gggggggaccgggtttccccctgtggccccgacgggttttaaattttgggggccaagggggctttttcttttagtttcttgggggggggggacggggggggggggccccccccccggggtatttttttgttttttttttttttgggggggcacgggtttcccccggttggccgggggggtttttaattttgggggtgggggggtcccttccccccccccccccaaggggttgggattaagggggggggccccggcccttgggtgggtttttaaaaattttttgttcccccaaaaaggaccccccccctttttttgggcccccccctcttccgggtttttcctttttaggggggggggggggttttagggggggggtgggttccca

SEQ ID NO: 555673 - DNA, 241 bp, Homo sapiens
ggcaggtgtacgagcagacaagtgtcaacgcagatgacgtgaagggactggagcaaggtcgtccgggcctatgagcctgtgtgggccacttggtacgggcagacgacgtgtcgaacacccctatcatggcccaggcaagtacacgagaagctccgaggcatggcgtgaagtccaactgctctctagatagcggtggcgcacgagcacccggtatcgattcactggatggctctagtgactc

SEQ ID NO: 555674 - DNA, 532 bp, Homo sapiens
gtttggcagggcgtggacgtttgggccaccttggggccttcatcggacaaaagaaaccccgcagacccccgcccggacttatccgggttatttctgtatcgtggttgaaaaaaactttattcacgacagcgactcggtgaagagtcccccgcgagatatccttcttgtttccgaacagacgacttcctttggtgggaggacaccgctggacactgtttttataattaccccggaagatgcgcttaaaagaggctctaacactccaccctcctccagggccaggggggggggtttttgcccccaccccaaagcgtttggacactccttttggaggggttgttaaacatccacttttttggactttgagtggggggtggcgcagccctctcaaatccctggcgtaagggttttcctccccggggagcttctccagggacctgcgggctcgcctgaaaacgttggcggacactgtcctggtgcccagcccaacgtggtccaacgtttttttataataaagtcctcgttttcgtta

SEQ ID NO: 555675 - DNA, 263 bp, Homo sapiens
tttttcccccccccccccccccccccccctttttttttttggggggaggtttttgggggtttctttttggccctttcttttttggggggggggggggttccccccccctctcccctttttccccgggggcccccggggggttgggttttccccttttgggttgggggggggggcccgggggttttctcccccggggccccttccttttaattagggggggggggggccccccctttccccccccccccccccccccctttgga

SEQ ID NO: 555676 - DNA, 411 bp, Homo sapiens
tgtatatgtacaattgactgtcattcagctttaaaaaagaagaaagttcggacatatgctactgtatatatggaccctcaggccattatgccaagtgaaatgagccagtcacagaaagagagatacagtatgattttacttgtatgaggtacctagaatagtcaaaaccttaaagacagaaagaatggaggttgccaggggccccggatgtggggagtgtggaatgtggaattactgtttaatgggtacagagtttctgttttatatgatgaaaaaagttctggatatgaatggtggtgatggtaacagaacaatgtgaatgtacttgataccactgaatgctacacttaaatataattaagatagtaaatattatgctatgtgtatttctctacagtaaaaaataattag

SEQ ID NO: 555677 - DNA, 216 bp, Homo sapiens
  misc_feature (73)..(73): n is a, c, g, or t
  misc_feature (86)..(86): n is a, c, g, or t
  misc_feature (97)..(97): n is a, c, g, or t
  misc_feature (157)..(157): n is a, c, g, or t
  misc_feature (181)..(181): n is a, c, g, or t
  misc_feature (208)..(208): n is a, c, g, or t
  misc_feature (212)..(212): n is a, c, g, or t
gaagctcccgggtatgccaggcccatactttgaaaagcctgatctcataaaatcaagttatcattgtcttgangaacagttacccncagatcaagtnaatgcatcacagtccacgggtggtactaacagaactactggtctaaaacaacactaatcntacagtccgttactaagtttcccncttaaaccaaacctaaataactaactncctntcct

SEQ ID NO: 555678 - DNA, 434 bp, Homo sapiens
cgtctcttacaggatcccccctcaaatgtggactcagcgaaatacagcgaatacgtggtcacgggaccggcctccgccaatcgctcgtcctgggctctgggtggataacatatgagcattatttggttgacttgattcgcaaactccagaggaccacgaccaggataccactgagcccccattcctacaccagtgcctcacatgctctctccccgatgccgtccgggtctccagaagagcctagaggaaccttttcctcatccccttcgaaggacaagatgagtcaggatctccgcgttggaggaagagggagtcgaattgaggcttcctctctttgaataagacccaatggtggtcgggcttcgggtcacgtgacaccttctttgtggctcctaatacaattactcttttcttttccagcttttatcttagca

SEQ ID NO: 555679 - DNA, 394 bp, Homo sapiens
  misc_feature (59)..(59): n is a, c, g, or t
  misc_feature (157)..(157): n is a, c, g, or t
  misc_feature (191)..(191): n is a, c, g, or t
  misc_feature (252)..(252): n is a, c, g, or t
  misc_feature (288)..(288): n is a, c, g, or t
  misc_feature (319)..(319): n is a, c, g, or t
  misc_feature (337)..(337): n is a, c, g, or t
agagatatgccatggagagcaaagtggtggaaattctaaaagactttaatgatcagatnaagaaattgtttagaggagcataatatacgtgctctgtcttagtttgagaatactgaccacagtttggctctcctagccctttgcctgagcaaaaccnacaacccttctcacacccagaccatgttccaagncacaacccattgctcagctttctaacctgcctgcgaaatgtgctgcctgttacacgagggnaagcagatcagtgaggcaaggacaactaacaggacncaaaagcaaggcagtggattccctttgcttnatttcttcccttcttagngttcacttcgcaatgaactaagcccattctggctttcccttctggcggcttcttcgc

SEQ ID NO: 555680 - DNA, 224 bp, Homo sapiens
ctaaatgttataatctggcgtggcagctcacacctggagggctagcacttacgggaggccaaggcggacggatcacttgaggtcaggagtttgggaccagcctgtccaatatggtgaaatcctgtctgtactaaaaatacaaaaattagctgggtgtggtggcaggcgcctgtagtcccagctactcgagagactgaggcaggagaatggcgtgaaccatggag

SEQ ID NO: 555681 - DNA, 222 bp, Homo sapiens
ttttttgtgttactttttcacaaataaatccaagcagataatgaaataaacacatttttttagtgtcccatcctgggttctctgccaaactgaatgtattattcaggaagaatacagagtgccttcatttaacataaagttgaatgaaaagtcaatttgcacttctttataataactctggtttagaattagaaattgttaaaaccttgataattgtcattt

SEQ ID NO: 555682 - DNA, 927 bp, Homo sapiens
cttcggcctgtgaaaatgtggcccatcctcgtgctgtgttgttacccaggttttacgcccctcggggcccctgggtctcgctctctcgatgcagcgggtttgctgcgagcttgcgtttttataactggtgcgccacacacatgtgtgcactgagctcacaggtgtcgcctacagtgctctatgtatgaatgtatatgcccaagagagagcttcgtttggggccctccaggggctctgaagtaattgaaaggcttgtgtggggccaaaaataggggggacatgttgcccacacccggtaaatgagggcaccacacgtgtctccttttctgaatctcaggggaagtgttaacaccccgtgcaacacacacactgttgggtgggaagaacaccaagagaaagttttcacatcttggtttggtggattgggcaaacagcagaacctgtggagttccccctgtcggagactggggtgtggttgtttttttgcgcttggaccactcgttttgtcttttaaaatgtggggtctccacttactgccatttatcaaagaggaaagagccaaaactggggacaattttaagtccccacagagatagaacctgtccaccccctgtttcccctgttaccacacaggtgtaacatctgggaaaaccaaggcgctttggctaaactggtggaaactatcaggacccaattaccaatgaccagatacgatgagatccccccgtcactggggtggccaatgtcctgggtcctaaatctttggctcgtattgcccagcttgaaaaggccaaggtttaagagacttgcccctaatactgggtttaatgtaccctgttgaattttttgtacattaaaatgattgaaataattaaaaaaaagattaagatactcgagcattaactcgggcgagaagagagtggtgcg

SEQ ID NO: 555683 - DNA, 149 bp, Homo sapiens
cctctgacttcggcctggccaagaagtagcgggacgcccgcaaccagggggggacattccctaccgggaaaacaagaacctgatcggcacggcccgatacgcttccatcaagacggtgctgctcttggccagcccagatgatcagcagc

SEQ ID NO: 555684 - DNA, 611 bp, Homo sapiens
attgaaaaaaaaaaattttttttttgggaggaccacaaaaaaaaacaaaaaagggaataaaaagtcataaaaattatctcccaccgcaatcaaggtgattaaattaaaaaaaaaagacttgccggggtgcccgttttggcccctttccttgttggccaagagctattttttggggggggcggcattccccgcttctttggcaattttctcttttggggggcggctaaacactggcgggggggtgtatttccctcggtggggtagaaaaaacctggggtaccccaaataaaaggccttccggcccacctctcttttgggggtgggaaaaaaagggaagcccctgtgaagaccctcctgaagggggggtcccctttgaaagtgaatgtaaatttcccccttttttttttcaaaaatgggaaaatttttataaaaaagatttttttttaaacccgggggcggggggggaattcttttttaaaaaaaaacttccccccgaggggggggttttttttcagggagaaacagggtctttttttaaaagaggggccctctccccggcggggggggtttttgggggggggggggcgcccaaacatttattgcggccctta

SEQ ID NO: 555685 - DNA, 315 bp, Homo sapiens
agccggactaaaacgctggtgctggctggctggcaggatgaacagcgagtctaagaactgtgcctggctgcgggtgctgagcctgcaggcctgggccacagcctgtgatggccgagctgcgagcagttcgacaagacccagatgataaaggaagccagaggacccctcccactcctgtctaaagcaggccatcagcgatcagcaaatgccatcaacacccatggaggcccccgtgaaggagaagcacgcccggctgcatcattctgggcacacaccacgagaatgggggctttcaccttctggtcctatgccatt

SEQ ID NO: 555686 - DNA, 216 bp, Homo sapiens
aactaagaacggcatgcaccaccacgcgcacacgaggagccacacaacgggccacacgaagagccaccctaagagccccgccatgagcacgctaggtgcccgcaacgaggcacaacgagccacactaagagccctcccaatgagccgcacaacgagccacgctaggagccacacaaggagccacgcaaagggccaccccacgagccccactatgag

SEQ ID NO: 555687 - DNA, 294 bp, Homo sapiens
  misc_feature (123)..(123): n is a, c, g, or t
  misc_feature (142)..(142): n is a, c, g, or t
  misc_feature (236)..(236): n is a, c, g, or t
ctttttgccggctgggcgcagtggctcatgcctgtaatcccagcattttgggaggccaaggtgggaggatcacctgaggtcgggggttcgagaccagcctggccaacgtggtgaaaccctgtntctactaaaaatacaaaanttagccgggcatggtggcaggcgcctgtagtaccaggtactcgggagactgaggcaggagaattgcttgaactcgggaggcagaggttgcagtnagctgagattgcaccattgcactctaggcaacaagagcaacgtgacactccatctcaa

SEQ ID NO: 555688 - DNA, 1064 bp, Homo sapiens
gagcggccacaatcacagctccgggcattgggggaacccgagccggctgcgccgggggaatcctgtgcgggcgccttccgtcccagtacccatcctcgccgcgctccagcacctctgaagttttagcagcgcccagaaaggaggcgaggaaggacgcggagctgtgtgacgacgcgacgtggacgcaacaaagctcaccctaaaacatttatttcacaggacgaaaatgaaacacacggggggcgcgcaacacaatggctgggcgcaatttatacgacaacacatagagcacccaagaagctgtgcatcgctccggctgggcattctagctcgtgttcgcaaatcatcgccctttctaggtgggcaggctagcattgctccagggcccacaacgtgcagtgtcctacagtgtcgcgtgaacctgtgtgcgctgcccgtaacgacaccatcacaagacacacacatgcgcttcgctgccttggggacccacatcatctgtgacaagcatccgacgacattgacagaggcaattccaaggcgaccttgaacgccaatgacatcgtcgtcctctgttcacatttcccctcccccacatggcgcatgagtccttggttaccaattcagtgctgcgtctatccttgcaagcctggaccattgcccttcacagctacaaccaacaagctcacgagaaacctgctctgaagtctccattggcacggttccctggccttaccgtgcatgacggcattcagcctgcagtgcacctgccctcggcccccatgcacacaccaagctcacacgggcacactctaaattgccacatgccacattctccaaagaactccgaagccaatcaccggggcggtaacataagaccatagtgactggcaccatccctttaacatgcaacacatcgggcgcaagcgcgtccactaacgttacacgcgctccgaacaacttcggcagatgcctgcgcaactcgccccggctgacaatctcctggttggcgactctgccacatcacaccgccaacgtgcagagagacgaacacccaaacgcggcgg

SEQ ID NO: 555689 - DNA, 371 bp, Homo sapiens
gggagccaagatcacgccattgcactccagcatgggtgacagagcgagactccatctcaagaaaaaagaaaaaaaaaagaaagaaagggtattcaaataggaagagaggaagtcaaattatctttgtttgcagatgacacgatcctgtatctagaaaacccccattgtctcagttcaaaagcttcttaagctgatgagcaacttcactgacaaaagtcactcagggccaagccttaactgaaatggctgattaacctagtgagagcagtactgggtcaaaactgatcaaaaggcagtcatattcaacaaagtactggaagttctggccagagcagtcaggcaagagaaataaagggcccggtacatgcaag

SEQ ID NO: 555690 - DNA, 280 bp, Homo sapiens
cagagatgatgccactgcactccagcctgggcgacagagcaagactccatctcaaaaaaaaaaaaaagctgctgaattcaggcagcgcctttaaaatcccgggcccaggtgattccgaaactcgggggcaccggggttagtgcctttcttaggcccggccattaccctcttcctccatttagcactgggccaaggtctctaacattctctttacccagttttaacaggggcgtggtaagacgctttcacccatgggaacaggtacaacctggcggggggg

SEQ ID NO: 555691 - DNA, 113 bp, Homo sapiens
actcttggttgtctatacactgctaggcatgcttaggcatgtaataaatattttttttcttgagacagagtctcaccctgtcacccaggctggagtacatgtggcacaactca

SEQ ID NO: 555692 - DNA, 837 bp, Homo sapiens
cggaagcggctagtctccgtgctcgacagctgggtgtcaggccatggggcagccctgggctggctgggagcactggacggtggcgccctgtgcagctgcctctcgtgctcacctgctgctgtgggcctgcggcctgtgggcctgtgagctggcttactgtgctaggtgctcgtgtccctgtggcctgcctgcctgctggtgacccctggcaccgggtccttgcagcttggctgctggccagccttccagcttgctcaaccgtgctatggcaactgtgggggcatctatcctgcgactcggaatacccaggcatacctgtggcagtagatagcaggcccggcctgtggacttgggcctggtggctagcggcttactagctagccaatgccaaaagcacaggtgccggccaacgcagcgggacaactgctcatgccttgccagccgtacttgcataccttgcgtactgggaaccacacacttagccagactagctagaggccagctagcgtagggcctttcggccaaactaacacgagccctataccttgtagcccttgctagctatcagttgagccgacaccgggcatgaatccagtagcgcatccccacgaggataaatacagtagggaagccattggatatagggagaggacccacaatgaacaagactatgggtacaggagaaaccccatggcagttaggacgaaaaggcaccaccaaagaagacaggcaacgccaataccaagccagttgagaaatagatacgcatcacagatccccgatggcgattatacaccctagtggctaatcgaatagggtatagacggacacacaatg

SEQ ID NO: 555693 - DNA, 100 bp, Homo sapiens
aactatctgaaaaagagaagagtgaactcagtactctacttgattacagctctgatcaacaaacctgtcagctctggcaaaaaaatggtgatgtagcaac

SEQ ID NO: 555694 - DNA, 208 bp, Homo sapiens
ccactccgctcccccgcgggtctgttctgtgtgccagtggacggtattgtcccaaatatggccgttggtacaatagcggggatctgacgatgcttttctctactatgtgtcactaacggaccgtttatcatgagcagtaactcggcttctgctgcaaacggaacatgacagcatagaatgttcacagcgtgacagtctgaagatgcag

SEQ ID NO: 555695 - DNA, 226 bp, Homo sapiens
cgtctacagtgaatggtattacataggtgacacagtaaagatattgattagctcagggggtgggggtgttaaaaggacataagagattaggtacagacttgccaagctataccatgagcctagctgaagatggaactcttacacttgtactaagtagatgaaaaacgatccaagtccttccaagaatgtgtggcagcacaggaggagggacactcaacactgcttc

SEQ ID NO: 555696 - DNA, 880 bp, Homo sapiens
gaagtatgtgctgtcataactaaaaaaaacgaagaagaatccacttgtagcgtcatacaatacagagtatttgtcgtcgtgtccctgtacaagaagcagatcagagatttctcatgtggggctacagctattgttccagatggtcaccagaggttcaacaaactcatctggatacatcattactatgtccacattcaccttacaaatcaactgcgtgacgactgcagtcagtgcttctcgagattagacacagatgtacacccccttgataacttcgcacagcagtaaggagctacaacagctttcatccacgacacaggacctcgtgctcagaagccatctaaagagtccaagatcactccgtatcaactacttgacgccattgaacttcagccaagtactcatcagccgccacacatagaagccagcctacaggttcactccaatgtgctcgcttgatgtcgctcgtgtgatgctgctgctactcactcactattactacttcatatcattcctactcactaggaaacgaccacccacgaccatcaacaaccactaagaccgcaagcgagcgaacgaacaaacaccaaataaaatataatagaaatacaaaacgtaactactatctcgtccaaccccacaacacaactcttatctcaactaaacagaagtcgacaattacgtcaacttatagcataaaacgactaacacaaatacgaacgcaagaagcagccatcaaaaacaacatactagccaacacacatagaaggactacgacatgatacctccatccaccccctgaacttataccagtcatactaaccctagcaaataacttaaattaagttgacagtcagctttaccgtacccaccaacgaca

SEQ ID NO: 555697 - DNA, 224 bp, Homo sapiens
ttctcgtatgtgatatggtctcgtgccggtttagctgatgagtttacacccgctttgagctgcagtcccaagcatagcccgactccgtgaaagatccgggtccgtggcgccgggggccagttaccggcctcacaccgtccacgggctgcgcctcggtctcttccaggtgggtgaggggggagagtcaggaataaggggatccccagaagtgcgcctgggtgcgt

SEQ ID NO: 555698 - DNA, 506 bp, Homo sapiens
  misc_feature (26)..(26): n is a, c, g, or t
  misc_feature (67)..(67): n is a, c, g, or t
  misc_feature (72)..(72): n is a, c, g, or t
  misc_feature (83)..(83): n is a, c, g, or t
  misc_feature (107)..(107): n is a, c, g, or t
  misc_feature (131)..(131): n is a, c, g, or t
  misc_feature (301)..(301): n is a, c, g, or t
  misc_feature (310)..(310): n is a, c, g, or t
cctaaaaattacaacggcccccgggncaaaacaacacccctaagacccttgggaaatgtaaattccngtttnccccctaacanttgccctcgggtgatggaaacagncccacggaaggattggatattagnaaaagaacagaatgagagaaatgtttaataaatgttaggcacccccagattaaacaggtccaaaatccatgaagcctcagagcaataatgaaaaggatcctcctgtttcctggcataaaaactgccttcctctgcctacacaggggcccaggaagagctgaacgaactgnctaaaatgncttccccatagtgtctgggattataggcatgagccacgggcctggccctgaaaatcttaaagtttagctttgggacctctcccattttctcagaaatctcatttggatccaactgtgttttataaacctgtgagtccacattacaatgttttgctgtctcatgactacaattctaaaatgaaagctataaggtctt

SEQ ID NO: 555699 - DNA, 114 bp, Homo sapiens
tctgtgcaactcctggctctaggtacatatcaaaagctaagtcatctagcggagagatatagtcagatttcctgtgcgtacgtaccttctaagagcagggtccgctggtgtatt

SEQ ID NO: 555700 - DNA, 771 bp, Homo sapiens
gatgacggctaggtacgaggctggggtggttaatcggccgaggactgtgctcagctgctgcagctgagaaggagccagtcccagttccagtccaggaaatagagattgactccaccacagaattggtgatgggcatcaggaagtagagaaagtgcagcctccagtgccctgtgaatggaaatggcccatggattcacagtgatgtgcagaagctccatggtgcagattgcatggtgcgtgctgaagtccactaggtgaaccaccgaattcttcccatgtgattcatggagcagttccagataaaatccctgacagttacaactgtgtgctgtcctgacgagaactacacctggtcacaggactatacttgacctggagtgtcagggtgccatgatacccaagcacgtggtgaagggaaagcaggtctcagttggcccttagcagcagctccattcgtgtggccatgcttggaggaccacatggggagtgctgtccttcatgtgtaaggggacagctcacccgaaaagaatcaacacttgagcagatctcttctgggaagtctccaagccctggcgcacgttgccgtataatggggtgcacgccgttggaacgcccatggttggggccgaaacgtacttttggttgtgcacgcgccaataccattgggatcgggaagaagagatggacccaagatctataccctatggaccagagaatccccccacaattgcgaagcctgcctccccaatgtgtggcccacccaggtcgggc

SEQ ID NO: 555701 - DNA, 1093 bp, Homo sapiens
cagccacccatccccatcaccgacctggaggacaactatcggagcgcctcagaaggccaacgatggcctcaagttctcccaggagctatgagtgccatcggagccgggacagccagtatcacgtggcgagaattcaacaccctggcaggctgaccaagcccccagaaccgctactgccacactgtcactcgcctacgactcacctctcgagctcattcctctaccctctactcgactggcgtccccgggacgctgacctaccctcaactgccaccctaccagtcgcacctggcctaccgcaacgcaccacagtgccctacacctcgccaccgcacgcggcccccttgccccgacgaccaccggcccgactctctgggccgacacggccgctgcgcaaccagcccgccactgcacccacctgctccctccacgcactcgaccacccggcctaccacgcgcacccaacgtccccggccgctacacccacgcctgcactccacgcccaccctgccctccacgcccccggctgacccaacgccgcacgcatctcctgtctgcggcccctcaactccccaccggcctctgaactccccctagcctccgccgcaccaacacggccggcgcacccccatgcgcccccaccaactcacaacctagacggcccgccacccctacaccgccaactctcaccaaccaaccgcacctggcccctcccacaagcctgcaccaaagcgccgatcagactcacccgcccgcacccgaccccccccacgccctcccccgccccccatcgaccccacagcaaccccaccgcgcccgccctccccccccgccacgctcacccccccaaaccaccccccccaactcccttggggcaccccaccccatcacgcgaaccacgaacccacaaacgggcccccctgccagccaacccccccccatacagcaacccctaaccgggaccccccacggccgcactccaccgcccacgctaggccaccccttccccccgcacccacacccacccccccgccaaccccgccacctggcgcccccccccaccccatgcactctcgaccccccccaccgcacc

SEQ ID NO: 555702 - DNA, 546 bp, Homo sapiens
cgataactgagatgaggcaggtacatgctggctcacagagattggccccattagtctgagctgacgatttctaatgttgtttggggagtttgcgtggcacgaactggagtgaacgatgatgcagaggtgatcagcactagtggaacacaacaggtgggactgtccatccttgtccaaagaagcagcacagcaggaccacggagaaagggtgggggcaggaaacagccggactccctctgaccctctccgtcgccttggagggcccagacatccaaatggtcacttcccaacgctcttcagaggtcaggaagcggggagggacaggggagagcggtcatcaccacagagaacttcggaggagggagggcagagcattatgacagaggctgaaatgcaagtctggtggccaacagaacgtagcttcccaacttctcccttcgctggtctctagggtctcacagccacttgccctagttctccttctctggccctggaaccaggaggaccttgaccacattcttcttctcctgcctctatgtcattttc

SEQ ID NO: 555703 - DNA, 118 bp, Homo sapiens
tatggttgtcacgcaggaaaaccagagagagcaggaaggccgcatggataggatccgagttgtcccagcagctgaatgagaaggcgcacattgaagccacgcacgtaggtagcccgac

SEQ ID NO: 555704 - DNA, 554 bp, Homo sapiens
  misc_feature (52)..(52): n is a, c, g, or t
cttaaattttgaattcactcaacattcattcagaaaatacataataaatacntactatgtattaagtgccatactaaagttgggcacattaaaaaaaacagtgtccctgctctgaaggagctcacaatttgaagatatacattaagaaaactctattaattggtgatacatgccttaaaaataatatgtggccattagagattgttcaagagacctttaacagaggatttgatttttaattcattctgaaagatgagtgctgtggcagacagaagacacagaatgtgcataagcactatgctatgaaaaatatatttttagagcatgttgcagtttaagagagaagccattggtgaaactgctgtaattctttgactattttctccaaatgtggaatcaaagagacgtcttgaggagctctggatgtcactcctatggattattctagacacttggctggctccagttccaggaaaatgggctgagtcaacagcaatgaatataaaaccatttatgaataataagcaataaataatataatagtgaagaataaa

SEQ ID NO: 555705 - DNA, 823 bp, Homo sapiens
aacgctaggtacgaggctggtttaattcggccgaggctcgggagctcctgacggacggagcgcccccgccccgcctggcggctgccgcgctgccatgcccttctccaacaggcacaacgcactgaagctgcgcttccctggcgagtgacgagttccccgacctgagctgcccacaacaaccacatggccaatgtgctgacccccgagctgtacgcggagcttgctgctgccaatgagcacgccagagctgtgcttcacgctgtgacgactgtcatccagacatggctgtggacaacgccgggccaccctgtacatcattgaccagtgggctgcagtggctgtggctgactgagtgagtcctacgaagtgttcaatggatctcattcagaaccccatcatcgagggacctggcactggctggctacaatgcccagactgatgatgcacacagaccgacctcaaccccgacgaaccttgcagggcggcgaaagaccttgtgaccccaactactgtgctgaggctcgcgtggttgcgcacggtgccgaagcataccggtggcgttacttgacatccccaccggacttgcaagcctgcggtgaagacgccgagcccatcgaggaagcatcgcggtgggaaagcccatgtccagcacttgaactggcgatcactggcgggtccgaatactaccgcgcctacaggagcattaactgaggcgggagcagacagcaggctcatcgaacgatcagctacctcttcgacaaagcccgtagtcgcccctactgctggtctcggtcattgcccgcgacaggccgacgcccgggta

SEQ ID NO: 555706 - DNA, 126 bp, Homo sapiens
ggccgtcctcatcattctacctttgatggctactcaaatcaaatcaatataacttggggtcaggcatggtggctcacacctgtaatcccaacacttgggaggccatggtaggtatgatgaaggacg

SEQ ID NO: 555707 - DNA, 323 bp, Homo sapiens
gatttactggggacaacaacctgaaatcctgtgcttatgtcaacatgggagtaagctacttcagttgcaataatagctagcaatgttacataacttaaaagtttaaggccgggtgcggttgtcacgcctgtaatcccagcactttgggaggccgaggcgggtggatcatgaggtcaggagatcgagaccatcctggctaacaaggtgaaaccccgtctctactaaaaatacaaaaaattagccgggcgcggtgcgggcgcctgtagtcccagctactcgggaggctgaggcaggagaatggcgtgacaccgggaggcggagct

SEQ ID NO: 555708 - DNA, 465 bp, Homo sapiens
atctgttaatagttgttcagctcagagacaccacgtcgtgaaagagataccaagaggctggagtgtatccagaatggtagtgacatgagagtgagaaacagctggacaactagaatcatttaagaaagaaaaatgagtacaggatggtcgtgacaactctcttgaaatacttgaggaattgttatatagaaaagagagtcaaattgctctgttgttctagaggacagctttcttttcttttctttttctttttttttgagatggagttccactcatgttgcccaggctggagtacaatggcgcaatctcggctcactgcaacctccacctcccgggttcaagtgattctcctgcttcagcctcctgagtagctgagattacaggcacgcatcaccacacctggcaaatttttgtattttttagtagagatggggtttcaccatgttggccaggatggtcttgaac

SEQ ID NO: 555709 - DNA, 111 bp, Homo sapiens
  misc_feature (85)..(85): n is a, c, g, or t
tgggtgcatgatgtgggacttcccaaagcattcccattagtacaagatgactgatttgcccggtcggggcaatgactatcttctntctttgaagaaacttggaaggcagaa

SEQ ID NO: 555710 - DNA, 350 bp, Homo sapiens
ctccatacagcaacgtcatctaaaatttccttcgacatggattcaggcttgcctacagcagtatttctgcaactcttgaatgtacctatcagtggaagagctagtgaaaatgcagattctagttcagcggaatggccctcgattcaggaagttaaacaaggggtcaggtgatgctgatggtgctcgctctctggaccacactgtgggagacagaaagggtgttggcctatgctgtccaatagacggagccactagctggaggtacgcgatgtgaggtgcttgaacatggccggtaggtctgacacagagagtttgccatagtgtaaattacagcaccagattttgacata

SEQ ID NO: 555711 - DNA, 130 bp, Homo sapiens
  misc_feature (80)..(80): n is a, c, g, or t
tcgaattcaagcttctaacgatgtacggggacatgcgctggttccagcagaaagtatgatggcgatcatcctttcctggnaaataaattcccgttttctatccaaaagagcaataaaaagttttcagtga

SEQ ID NO: 555712 - DNA, 509 bp, Homo sapiens
gcttggttgttggtgagtgttgaatgagaggatcaggttaaaatcaaaatccctacctggctaaatgtggctctgctgcttggggtaggagattgggccacaagtccagctgagtgccaggaggaggaaggggtaaaaagggagtggaaaacccctccaaggacccactgaccctgctgacagacttcttattcaagtgtgaagaaatctgtcagaatctgagggaaccaaagacaagaaaaaagtacaatgtttggacataaatttccttaattcttgtaaatgtattaggattctaataatcttctataaggaggatattaaatatccttaaataatttgctgtacttgggacagtggtttttcttcttcagtttagagctagaatctcagttacctatagttgcctggagtcaattggtagaatgggtctgaagccattgaaaattgagcgtggatatgaatacagtttaatgtttacatgtgatttctgccacagggtaccgagc

SEQ ID NO: 555713 - DNA, 1255 bp, Homo sapiens
gtcctttctctctcccggtgacagcatgagtcttcaccactcgctccatcttctccaccaactcaccggtccctgggctctgtcacaggcagcccagcatactggcgacccgggacgggatcagacagcgacgagacatgcgctcgtatgcaaggcgacttgcgaggagactacttgagttccctggactcatcctgtgatcccgatcgcatcagacttccagagggcgggcgatgggggtccaggtgggctctggcctaccgagtgatcacgcgcggcgagagtcattggcaatgggcaatagtggaagggccgatcccatgaaacagcagcaacgtgcatgcaccatagtccacatatgccgcttgacacagcagccgtcctgggcccggctgtcccacgcgtggggaccagtcagatgcagcgcagccctggggagagcatcggcgaacaaaccagggcagagcactgtggaagcaagccaacacaattcacagggcgacagcacacactgggggcatgcacagcacaggggcacccaccaagcggaccaaagcaagcaactcggtgaggcacaactctaaacgtcccgaaacgcacttccaactccgcaaggggacaccccttggaacgggtgccctccacggaacttcgtttccagccaaagaatcaccttggttggcgaaccgaaagtctgcccccatgcaaatccacgttccacatcgcaaacgaagtttcgccccacaattgggccagctggtccttcggcataagccatgcagacggacatacagcaacaacagcgtccaaatgtaagtcgaaagaacccaaggaaggcatagagcccacatcgggccagggccaaagacgaacatcgacggcaacagacacacgagggaccgagtacccaaaatcgagggcccgttccacggccccagacggggcacccggcgtggaccgcagcccaaccccacaactcaattcgcagcgagcgggaacacatggccacggcacctcggcgacggcgcagcacggcaaggacaagtcgggaacgagccctcccacccgaacaggggcacggcgcaaggccagggccgtgccgaatccaacgtgcgacgcgcacacggacgacccgaacgagaaccagtacaagggacaagattacagacacatgtggcccgttaccacaacgaccaccacaaacgtgcagccacagcgactcacgtgagcggactggcacgaccggcggcggcag

SEQ ID NO: 555714 - DNA, 346 bp, Homo sapiens
  misc_feature (58)..(58): n is a, c, g, or t
  misc_feature (95)..(95): n is a, c, g, or t
  misc_feature (127)..(127): n is a, c, g, or t
  misc_feature (324)..(324): n is a, c, g, or t
  misc_feature (337)..(337): n is a, c, g, or t
ctgaaagagttctgcctcaaaaccctattctgaaaaaggaacttgtcaaaacattttnaccttaaaaaaatttcaggccgggtgcagtggctcanacctgtaatcacagcactttgggaggtcgagncgggtggatcatgaggtcaagagatcgagaccatcctggccaacatggtgaaactccgtctctactaaaattacaaaaattagctgggcgtggtggcgcacacctgtagttccagccactcaggagactgaggcaggagaattgcttgaacctgggaggtggaggttgcagtgagccgagattgcaccaccgcactnccagcagagcaanactctgcct

SEQ ID NO: 555715 - DNA, 318 bp, Homo sapiens
tgaaaggaactgtccgttccgacaaccggtcccgagcgaactgtatgaggaggacgcgtcggaagtccaagaggaagaagggcggggtccggaagtcccgtctccggacgtcccgagccggcatcctcttccagtcccgggtcccgaagtcgtcccccgtgaacaattaccgtaactccaactacctgcggaggaggagtgagaccggaggtctgtccttccactagggtcactgtcgccccccgtgacacgccgcgtcgcgacactgccagcggtaccgttagaggagtactcttttgaagactcacgttcgtaccg

SEQ ID NO: 555716 - DNA, 417 bp, Homo sapiens
cggcggaatcacttgatgagctcggtactagttccatatgatcgtatatctctgtatcggtaccagtaccatgctgttatggttactgtagccttgtagtgtattttgaagtcaggtagcgtgatgcctccagctttgttctttttgcttaggattgacttggcgatgcgggctcttttttggttccatatgaactttaaagtagttttttccaattctgtgaagaaagtcattggtagcttgatggggatggcattgaatctataaatgaccttgggcagtatggccattttcaccatattgttcttcctacccatgagcatggaatgttcttccatttgtttgtatcctcttttatttccttgagcagtggtttgtagttctccttgaagaggtccttcacatcccttgtaagtt

SEQ ID NO: 555717 - DNA, 471 bp, Homo sapiens
  misc_feature (86)..(86): n is a, c, g, or t
  misc_feature (260)..(260): n is a, c, g, or t
  misc_feature (332)..(332): n is a, c, g, or t
  misc_feature (360)..(360): n is a, c, g, or t
  misc_feature (408)..(408): n is a, c, g, or t
  misc_feature (415)..(415): n is a, c, g, or t
agggttattgaactgactgccttgtttctcatgcaactccagcattttccccagaagttgaactatggatagcagcttggtttggntttcctaaatcttaacatttgaagcagcttcttgaggctggcaactatcctggtttctttcttggagggggtggtttgttttttggggcccaacgtctgtcccaagtggtggggtgagagtaagttaactttggtgccaggtgagacgcgggggctctttgctttttctccctntcatggaaagattggagttttctctgcagggcactggggaaaaggattgctgattctgactgtccctgttcngagagattatgattgttttttgacctangatttggaacccctctaattgttgaagttccctgtgacagctctcctnctgcttntccttctcctggggcttagcatccccccaatgagagctctgcttccttttccacct

SEQ ID NO: 555718 - DNA, 1224 bp, Homo sapiens
  misc_feature (54)..(54): n is a, c, g, or t
  misc_feature (66)..(67): n is a, c, g, or t
  misc_feature (80)..(80): n is a, c, g, or t
  misc_feature (82)..(82): n is a, c, g, or t
  misc_feature (88)..(88): n is a, c, g, or t
  misc_feature (116)..(116): n is a, c, g, or t
  misc_feature (119)..(119): n is a, c, g, or t
  misc_feature (535)..(535): n is a, c, g, or t
  misc_feature (666)..(666): n is a, c, g, or t
  misc_feature (668)..(668): n is a, c, g, or t
  misc_feature (683)..(683): n is a, c, g, or t
  misc_feature (706)..(706): n is a, c, g, or t
  misc_feature (710)..(710): n is a, c, g, or t
  misc_feature (712)..(712): n is a, c, g, or t
  misc_feature (736)..(736): n is a, c, g, or t
  misc_feature (739)..(739): n is a, c, g, or t
  misc_feature (742)..(742): n is a, c, g, or t
  misc_feature (750)..(750): n is a, c, g, or t
  misc_feature (752)..(752): n is a, c, g, or t
  misc_feature (768)..(768): n is a, c, g, or t
  misc_feature (770)..(770): n is a, c, g, or t
  misc_feature (773)..(773): n is a, c, g, or t
  misc_feature (780)..(780): n is a, c, g, or t
  misc_feature (782)..(782): n is a, c, g, or t
cagcgcccttttgaatgacacagcattattttgctttttctagcctcttatatnctaatttattgnngctatgcctcatntncatgcngctttgccctgccccacccccttggcanatngcccccactgctaaggctgctggcttcaggagggttagcctgcaccgccgccaccctgcccctaagttattacctctccaattcctagccgtactccctgcagccctctcactttttttctcgtttcagtaatttatatggtgttaaaatgtgtatatttttttatttcactattttcactagggcttagggggcctgcgcccagagctggcctcccccaacagcgctctgcgcttgggtaggttttgggtggcggttatggcaggcccgggctggctgcttgggatggcgaggcttgggccttggggccgggtgctgggggcacagctgtctgccaggcactctcatcaccccagaggccttgtcatcctcccttgccccaggccaggtagcaagagagcagcgcccaggcctgntggcatcaggtctgggcaagtagcaggactaggcatgtcagaggaccccagggtggttagaggaaaagactcctcctgggggctggctcccagggtggaggaaggtgactgtgtgtgtgtgtgtggtgtgngngcgcgcgcgcacgcncgagtgtgctgtatggcccaggnagcntnaaggccctcggagctggctgtgcntgnttntgtgtacnanttctgtgggcatggcngnttntagagcntngacacccccccaacccccgcaccaagcagacaaagtcaataaaagagctgtctgactgcaaaaaaaaaaaaaaaaaaaaaaaaaaaaaaaaaaaaaaaaaaaaaaaaaaaaaaaaaaaaaaaaaaaaaaaaaaaaaaaaaaaaaaaaaaaaaagaaaaaaaaaaaaagaataaaaaaaaaaaaaaaaaaaaaaagaaggacggacgcgatttatgaaattaagatagataagaaggaggaggacacattagtagaatagagagaaatttaatatataacaatacaacaagattatatataattgtagatagagtagaataaaaaagcagaaagagatataaaatagtaaagaggatataagcaaaaagagaagtctagacaatgatgatgaagagagcgatagaaaaaaaaaaagaaactaaaaatgaaatagtaaaagtag

SEQ ID NO: 555719 - DNA, 314 bp, Homo sapiens
gtgaaacagtgaattgctgaaaaccaaaatgtctgaacttgggtctaatgtgacctcttaatgagaagttatacaatacaggaatttgttacaatgatgagaatattcatctctagtgagagaacatgaatgagggtctttctgcttagtgcacgtgtagacattcatcacaaggttgaggaatgtgtgaagatagcaatggcaagtttaaactgagatgtttcaattgaacatatggatccttagtttctctgtgtaaattctctgttaaatgatgagggtctgtagcacttggctttcgagttagggggggt

SEQ ID NO: 555720 - DNA, 243 bp, Homo sapiens
gaacctgggctcataatcattttgacgttacgggttactggtgtgggtttcttcatgcttcatgtggactcagatttaagccttacaaagggaaagcctctgagcgtgagacgtaggactgcatgaaggtcactcgtgatgacagctgacatgctcacacattacaagagtagagagggaccctcctaagacagaggaactccagagatgagtgtctggagcgcttcagttcagaacgtggct

SEQ ID NO: 555721 - DNA, 793 bp, Homo sapiens
gacccacgcgtccggacccacgcgatcgcaggcccaccatcaccaccgcctctggaccgcacacccccatcattccaccatgtgccctcaccaccacactacacagacacaccagcacgctgcagggctcccatggagctgagtggggagcagtatttcccactgagccatcagttacccaagctcacccccgcccgaccacaacagcaaatacacaacactgacccatccgtggacccaaaggcataacaaatcccaccattacaacagcaaaccacatagcacactagcatagcagatcacccagcctaccactaagcgtagggatagagggacacatcagcatccatccatcggcgagcccattcccctggagatatccaaggatagagcatacacgccactcatacatcagaccatcaccataacacacactgatcaccacacatcactcgcgaaataaccacaaaaatcagagttgacggagcccaattggcagaacgggaggtcaccacacccatgcgacccctcctaaaacaatctggggagcaccccaacaactgacacaaccaccaaatacatacaacatacacaataggcgacaaccacagcaacaccttaacacctacccacagaccttggacccccaaaatagaacgaacagacaaccgcacaaaaagaatagctagaagccaacaaaccaataagacaaagcacagcgaagacaacagaacaatacgaccacccacccacatgggcgaaaatcttacgaccaaccaaaagaaaaaacaag

SEQ ID NO: 555722 - DNA, 452 bp, Homo sapiens
taccaccatgggcacttgcggtttatcttggagggcgccaggctgcagcaggattgcttcatagtcatggccagcactactggctcatactcttgctctgggggtggctgtagcacccggatgccccagtggatgccgggaatgggctcggcctcctccagggacacccacaacactgactgctccttccctgcagaaggcaggaacccaactttcagggttggaggtaggctgggtgtggaaaactgtgccaccatgaggtcctggtcaatagtgagcacatttcagctcccacctgaccctccagctgtgagggaggtcacagtgcccacttgggtgtccacagcaaacaggtcctgccggctgcgctgagccgagtcaaaaacactctctggctgtcagctgaccagaatcccaaaggcaaaaggatgcagaaaatcccaaagaagtac

SEQ ID NO: 555723 - DNA, 319 bp, Homo sapiens
tggggggggtgagccccggaaaaaaaagggggattttcaacattccctttttaaaaaaaaaaaaaaaaaaatgggggggggcaaacccccctggtctggtttaaaagggggggtttttacgagagaagaatactcttacagcaataaggcggggggaccaactgcgacggggtggggggaaattctttttttcctcgggggggggagcgttattatttgacaagagggagatttttcctcccccacaatagtgggggacgtggaccactacactatattgcctctcgacgcctggtggggtgtgggtactccttttatc

SEQ ID NO: 555724 - DNA, 335 bp, Homo sapiens
gagtgtagagcgacctaccgaccttatctcactgttcagagaaagcaaaggggttacagttacataaaacatgtggtattggattggaatgaaagatactgatatgatctcataggctttatatatataaatatacagacagataaagaaatagctacttatagaaagtacatggggtgtgtgttgtgtatagtgtctattgtgtacattacatatattctactaccctcttgtctgctgaaaagggactataaaattacatggtacttccagttaccaaggagccattatatagcgatcccaatggctttctaaaattaaccatttttccccaa

SEQ ID NO: 555725 - DNA, 256 bp, Homo sapiens
atatctcaggacggctacggcccaatgtgttcgttcatctcatcgacagcatggccgatgtgtcattcatctcgcggacggcttggctgatgtgttcattcatctgcacgatggcttgtactatgtgttcatccccctccggaccgcttggccaatgtgttcattcatttcacgatgcgcttggcccatgtgttcattcatctcacgaccagcttgtaccgttgtgttcattcctctcccgacgcgctcggccgat

SEQ ID NO: 555726 - DNA, 432 bp, Homo sapiens
  misc_feature (11)..(11): n is a, c, g, or t
  misc_feature (41)..(41): n is a, c, g, or t
  misc_feature (53)..(54): n is a, c, g, or t
  misc_feature (69)..(69): n is a, c, g, or t
  misc_feature (115)..(115): n is a, c, g, or t
  misc_feature (159)..(159): n is a, c, g, or t
  misc_feature (272)..(272): n is a, c, g, or t
tcatgattggnggccactgtccaatcatgatgccgacagtncaatcatgatgnngacagtggcccggtnactgtcggcatcatgattgggattccgttcaaagatgattccattntggcccattcaatctattccttcggttctattcaatgatgattncattcatgtcgatttggtgattccatttgacttcatttgatgatgattccttaagttcattagatgattccattcgattccatttgagatgattccattctagcccattcaancattccattcgattctattcaatgatgattccattcatgtcgatttggtgattccatttgacttcatttgatgatgattcctttcaagttcattagatgattccattcgattccatttgatgatgatcccattcgagtccaatcatgatgccgacagtgg

SEQ ID NO: 555727 - DNA, 226 bp, Homo sapiens
actacgaccccttacggtgctgacagtggtatcatagttgatgatgagtgttttgtattctattttggtgcatatgtgatatgtttcataaagcttcataagaaaaaaagattttaacttaatgaatatttgagtggactgcaattgtgcactcactaccataatggccctgtaatacaaaagcttccaggtgaatcaatgtagagtgatgtggatgtgatctatc

SEQ ID NO: 555728 - DNA, 195 bp, Homo sapiens
agcagtactacagactcatttcattttgtccagtgtgggcagtggtccagccagatttaaggttgtgtttccagaatatgtgacaattgggaaaggaaagacatttgacaaattatgtgggaatactcatggggaattttaaagctcgtagaactattcaggctttccagttgttgagtctgtattaactgcttg

SEQ ID NO: 555729 - DNA, 158 bp, Homo sapiens
cctgtcatcatggcatcagtggactgcgagcccagcaggcgcccggctgagagcttccctgaccttgtcccgtgaagcccagaagttcgccttggccagggaagtggtgtacctggaaaggcatgtaccacttgcccgtgcacgccctggctggcccc

SEQ ID NO: 555730 - DNA, 655 bp, Homo sapiens
gatgaaatagagactgccgttagtctatagtacttgctttgaaatatgaacgctcacatctgtgattatccatagttgtaaaacgaaacattcttcatgtcctggccacttgttatttgagccgacttcagtataggggttcattggaaatatgtgaaacagtctttccattcacttgctctttaaggggcagaaatggctgcttatttgtggggcaaacaacagtgtggacgtagcagcagcctgcactggtgtggcattttcatgcagccaagcatgggatccgaacagcgaggggtgatgcataggaatggcgcatacttcgtgtgtgtaagggaggtcagaagaggggaccaagtgctttccacttactcatagtaacagtaatcgctccatgagtgcgtccagttaggtataatgctttctgttatggacggcaataaacattacgaaaggaagatttatgccaacattttcaagtctccactattagtatggcatcattctggagcacttcagtcacactcgttgtgagcgtctttaggcgtgttctaagaactattatactctatcatttctgctgcgtgtgatgactttcatggtgaataactaacgctacaacaaataaacgaaacactcaggttaacctccaacc

SEQ ID NO: 555731 - DNA, 470 bp, Homo sapiens
taaaatactgagtttaatttcacatgtatatttatggttccccccaccatttccagtgtgtcgtgaccaccggttactacatagtgttcctattcataacatctccatacattacttaaaaccaagcaagggggtggagtccactctttaaaaactaaacgaggcttttgggacaacaaaattctggggcaaataaaaccgtggaaacaccattttactcaaacccgcggatagggaacagtttcttcactcgtgacatttatataacaagggaccaccccagaaatattcaaccgtggtatacagaaaatgtgaacattaagggacggagagaacatttttatatatacacccaagatttgtgagtattaaccccatattagtttctttttaaagaggagagaacaatctccactcacaactgtgtcgcaagaagcatctcttgtggaccaatagggccctctttggga

SEQ ID NO: 555732 - DNA, 409 bp, Homo sapiens
  misc_feature (53)..(53): n is a, c, g, or t
  misc_feature (409)..(409): n is a, c, g, or t
taattgctaggaattgcggcagccatgagtgagtgttcactgcctgctgctgngtccgcagtcccagctgtctgattcacttccctgtttattgcttgctctaccgtagacagacagacagacagagcccacattggtgaaggctccagcccaggcagagaggatccctgaggacctgcaatttaatttcgagcactggctcaatgtcatggtcccagtgcctccctgagttacacagagcaactctggagttattatgtatacctgatcccaatgttaaggggagggatcattcctttacggtcacatggtccagatccctcagtctacaattaagtaactgggggctcagtgaggcatcgtagcttactagatgcccacagagcagatagccaggtacactctctgn

SEQ ID NO: 555733 - DNA, 123 bp, Homo sapiens
tgtgtgtggtgactcttgaggatcccactctgactgagtccctaatggctaaataccggcacgagacctgatagtcaacaatgtacctgttatgggaaagcagtggaactcggtcagagtgtg

SEQ ID NO: 555734 - DNA, 1321 bp, Homo sapiens
cagtgggagtagcaggattggtggttgatgtgtgaaacacgatgatagtaggtagtcgacgcgtacactgccagtagatgtggcttggtgtggggaagctttggtgcccacgagtgtggacctgcgcgggcgtaggaagcagcgtcggactgcgtttgtgcgggggatcaccccacctcgccattggcggcggctcgcctgtgccccttggttgtgggtggaactgcggggccaaaactgtggctggggcgcttctgtgcgagtaataggggtcccacgaagtaagcgttggtcgcgggggccacacaaagatttttcacttatactggatgggggtgtggaaattcatcatgggctcgccctgaccccgttggggtcgctgtttgttgcacaggaattctttgtgggcatgcccgtgtagacagcgccgacgcgctgtgtcactggttgccccgtgtgggaggtgtccccacgatacccttgtgtccgtcccacacatgtcaagctattcgtggcattggtgccgcccggtgcaagggtgcccttggaccccgtgcctggtggggagttcatgccatgcggcccttgtgtcccacccgcgggcacgaattcccggatttcaccgctatcggccccacatggaggtgccgctctcctgttcgagagtcggaatataaagcataaagggtcccccgagtgttatcacacccaccgcgcttgtcttcacagtaatatttcccccgaccacggtgtgagcacaggcattcaccgggcggtaacccttgtccaccgcgggaattctggtgctctttctgttgcccccgcaatgtgtgtgaatgaaggtgaaacgctgtaaccggttctggggcccaccacaccccgggcacaactggcacccacctatctgtggaggacccacccccgtaacccgggcgaagttccgcgaaagaactgtgcgtgtcaccgaacgccggaacttcgaggcccacacactcactcgaacacattctggcccaaggccacgcaaagatcgagaagtttatcccgggcacaactgaggccgggccttctccgcgaacccttccggcccacattctaatcgggcacccgcgggctccggcccgggaacccacggacccacgccacccgcgaccacaatcacatgctgcaacccacagggcgctttgactagtgcgccccccacatcaccgacgagctgtggggacaccgcgccgggtcctggcaacccaatttgcgcatgacggtcgggcggagcttctgtttttcccagcccatcatgtccacccaagggaaacttcca

SEQ ID NO: 555735 - DNA, 364 bp, Homo sapiens
ttgctcccatagaacagacacgaagggagaggtttagttgttgagataaggtcttgttctgtcacctaggctggagagcagtggtgcgatcacagctcactgcagcttctgcctcctgggctcaagggatcctcctgcctcagcctcccaagtagctgggtctacagacgtgcaccaccatgcctggctaacttttgcatttttcgtagagatgggctttcaccatgttgctcaggctggtttcgaactcctaggctcaagtgatccacccgccctggcctcccaaagagctgggattatagacatgagtcaccacgcccagcagagggggagattgtatgtattctgatgggagaagactgcg

SEQ ID NO: 555736 - DNA, 870 bp, Homo sapiens
gagtgctgacattacatggtctcgccacctccgcgtactcagacatcatgagttggtccttgtctcccccgtgtaattctacatttcatctacgttctatgtctcctgggtgatgttgctcctcgttccaagcaatgctgcttctgtcagtagttgttggctagccacgatgcagcgaatctgtatgacatcgtgtaaggaatgaaacgatttcggatagcttatttgtcccagattagcctgttggctcttgcatcattttgcctgtcgtccattatcaaaacctcaatgtagacatatggattctatcgagtccttcggaatacagtcttacacttcgatgttgactgacgaagatcaatcatgaagtctatggtcgagctgattcaacatatgcctaatcccatatttcagcgtataatcaataccctagtagtcgaacatctatgccaaaaatcccttacagttagtgactacgaacgggcgttggcttaacttgtggtgtagaagttcgcagggaggccaattgctctagcaagcaccttgtttatgttgaaaaattagatagatagcctacctcttgagctattctaaccaacaagttgtagcactccaccgctaatttccgatctatctctctggccatcggagatagattagatcctaagattcgatatagatataggtcgaataggctgattccttgtgcaataccctctgaatagaacgcacggatagagagtaaggcacccaattgtcttttggaaaggccaacaatgctcgcccactgtgtagacccactttggcccaaagggaccgaccgggttcgcttaaaacttccaatagaagccctccagtgtagggggacca

SEQ ID NO: 555737 - DNA, 1529 bp, Homo sapiens
  misc_feature (942)..(942): n is a, c, g, or t
cgatgattgtgaagctatgagtcacgtgattgaccgagacgatagaatagtagcaggaagacaaagtactatactaaatagttcccagtaccaccacttgcatagcacgtcatagtaacgagagcgaaggccataacgcaggaagaagccatatgtaccagcataggctgacagaaccagagtaggatgcatgcagcggataacgctgattggcatgtgataggctgattgacgagaacagatgaacacacggtgtcttgatagacgaccggacttccactgggatatgaccatggtatcattataggagaagcccaatgttgccaacgacaattgactcctcgaggaatgcttggacctattgaacatcttcgcactagcattagactccgcgacctcgcactcgccaggacaaccgtggcctctagtagagcactagcgctatacagacccgtggaagctgactttggccgcacactctgatgggattcctatgatagccacctacgcgacaatagcctatcgttacaattcacaccttgaactatgttgcctacattgagccccccataactgtgaatacttgcacgtaacgtctcgagagacattgttgcggaccacctagtgtgtaatagaccactcaagcaatcttcgttacattttcaaggcctccctgagtccactacccaaccaactggctacccaaagagaactggagcttgcacagcccaggcggctgagtttattcggaccaacccaagcgccaaacaatatagggggcggcccacctccgacccgttggttaaccccttcagtctgccaccacgttcctcatgttcgtacacctggaacgaccaaggcatcctaacacgcaagtgccattttcaacccagcatactttctaacgacagttagagcacaccaacggacacgtgggctccnccgagtgagtctttccacccatgcggtgaaagcttcgtcgcctcaacgccgttaactagagaaactaaacatcccgcaatgaggtgccgcacgcttgcacacacctttctgttttcctacgccctacaccacttcgttcgtacgccacacctactttacgcaaacggtgaacacgaccctcccctcccttatcagtgtatcgccaaccacttaggcgccacgtagacataacaggatgtggggtcgcgcagctagagtttaacatgcccctttcgccgccattactgtacacacgcaccacgcccaggtaaccaacactatacacacacccttcttccatctacgcaacccatatgctccaaccactctgataagccactaactaggctacctcacaattcacaacaacgtaacaacaccctaccacatctaaccaaagacttacacaacacacccgatacatatactcagactacggacaaaacacacatcacttctcctaacaccatcacgaatcaacaccaccctgctataaccattatccacacataaaccacgatacacacctcacaataaccacatcaaac

SEQ ID NO: 555738 - DNA, 591 bp, Homo sapiens
aacctatggactatattgaattaaacttttttttaaattatggattctaagaccgggagtgatgggttactttacaggggggtgaatggattactgtatccaaatggtgtttgagagaataagtgctagtagtaatatgttgattgcaaaggtttgcatatctacaaagactagactttgggagcttgttttatttggactttgaaagccattctttctctcatactccgtttctttccctccggccccccaaaatttacaacttcagaacttgtgacagaaatctatttgcaagcatttacaattgctattggaatagtagcattacagtctttgtttacaactcgggggcaactcagactttactagactgtacactaatgtcaacagtgcattgcgtgtgcttccatgagccaatgttccacccctctatccatcatatttatcttgcccttgccttgcgttggcatagaacatctttgagactcagactgacacctgctatactctctatacctacactgatattagtgtcttttgatgacaactgtgtgagagagctctggtgtaagagctctacgttgaggccaa

SEQ ID NO: 555739 - DNA, 507 bp, Homo sapiens
gggcatcacaaccagcctccccctggggggctgggtggaaactgggccaaggacaaaaaaattgtgtgcatgttgagcaacccccacgccatttttggggggtggggtggcctggaccccaagttttccctaatgtatgccaaacgggcctttgttccctgggacgttgggggggggatgggggaaggggggttttcaagggcccggggggacatggcggccctttaaaaggattataaggggggtgggggggattttttttaaggaggggggggggaaaaagggggggaatactaaagtttaaacgtcccaaagggggcggttttacagggggggctttttttgttttaaccattgaaaaggggggggttgaccagttaatttgtagggggcgggggagggttttaaaaacaatttttgccctagggtttaaaaaaggaagggtttgttacagcccccagggggccctttttgggggggggtttgaaaaaaggattcccggtttta

SEQ ID NO: 555740 - DNA, 847 bp, Homo sapiens
  misc_feature (137)..(137): n is a, c, g, or t
  misc_feature (153)..(153): n is a, c, g, or t
  misc_feature (160)..(160): n is a, c, g, or t
  misc_feature (214)..(215): n is a, c, g, or t
  misc_feature (223)..(223): n is a, c, g, or t
  misc_feature (281)..(282): n is a, c, g, or t
  misc_feature (304)..(304): n is a, c, g, or t
  misc_feature (334)..(334): n is a, c, g, or t
  misc_feature (402)..(402): n is a, c, g, or t
  misc_feature (412)..(412): n is a, c, g, or t
  misc_feature (416)..(416): n is a, c, g, or t
  misc_feature (435)..(435): n is a, c, g, or t
  misc_feature (438)..(438): n is a, c, g, or t
  misc_feature (469)..(470): n is a, c, g, or t
  misc_feature (478)..(478): n is a, c, g, or t
  misc_feature (480)..(480): n is a, c, g, or t
  misc_feature (488)..(488): n is a, c, g, or t
  misc_feature (490)..(490): n is a, c, g, or t
  misc_feature (493)..(493): n is a, c, g, or t
  misc_feature (503)..(503): n is a, c, g, or t
  misc_feature (520)..(520): n is a, c, g, or t
  misc_feature (528)..(529): n is a, c, g, or t
  misc_feature (546)..(546): n is a, c, g, or t
  misc_feature (556)..(556): n is a, c, g, or t
  misc_feature (558)..(558): n is a, c, g, or t
  misc_feature (565)..(565): n is a, c, g, or t
  misc_feature (584)..(587): n is a, c, g, or t
  misc_feature (668)..(668): n is a, c, g, or t
  misc_feature (674)..(674): n is a, c, g, or t
  misc_feature (677)..(677): n is a, c, g, or t
  misc_feature (680)..(680): n is a, c, g, or t
  misc_feature (689)..(690): n is a, c, g, or t
  misc_feature (694)..(694): n is a, c, g, or t
  misc_feature (724)..(726): n is a, c, g, or t
  misc_feature (733)..(733): n is a, c, g, or t
  misc_feature (743)..(743): n is a, c, g, or t
  misc_feature (754)..(755): n is a, c, g, or t
  misc_feature (759)..(760): n is a, c, g, or t
  misc_feature (765)..(765): n is a, c, g, or t
  misc_feature (773)..(773): n is a, c, g, or t
  misc_feature (775)..(775): n is a, c, g, or t
  misc_feature (780)..(780): n is a, c, g, or t
  misc_feature (784)..(784): n is a, c, g, or t
  misc_feature (788)..(788): n is a, c, g, or t
  misc_feature (791)..(791): n is a, c, g, or t
  misc_feature (794)..(795): n is a, c, g, or t
  misc_feature (815)..(815): n is a, c, g, or t
  misc_feature (818)..(818): n is a, c, g, or t
agcgggccttaggggaacgtggctttccctgcagagccggtgtctccgcctgcgtcctgctgcagcaaccggagctggagtcggatcccgaacgcaccctcgccatggactcggccctcagcgatccgcataacggnagtgccgaggcaggcngtcccancaacagcactacgcggccgccttccacgcccgagggcatcgcgctggcctacgnncagcctcntgctcatggcgctgctgcccatcttcttcggcgccctgcgctccgtacgctgcgcccnntggcaagaatgcttcagacatngcctgaaacaatcaccagccgggatgccgnccgcttccccatcatcgccagctgcacactcttggggctctacctctttttcaaaatattctcccagngagtacatcnaacntcctgctgtccatgtattnctncgtgctgggaatcctggccctgtcccacacnntcagcccntncatgaatnangtntgtgccagcnagctttccaaatcgacngtaccagnntgctcttcacacagggntctggggaanancaaggangagatcatcaattatgaannnngacaccaaggacctggtgtgcctgggcctgagcagcatcgttggcgtctggtacctgctgaggaagcactggattgccaanaacctnttnggnctggccttnntccnttaatggagtagagctcctgcagcctcaannntgtcagncactggctgnatcctgctggnncggnntcttnatctacgnangtctnctgngtanttnggnnccaatgtgatggtgaccagnggncaagtacatcgaggaacaataaaactgag

SEQ ID NO: 555741 - DNA, 347 bp, Homo sapiens
cttctatttacggtaacgctctaagactcctgcgtccacttttatgtacctggctttcctaggctgggcgcttgaactaagtcatgaagccaaggagtgcagatctagatagcagagaagtcagtctcattctaaaacattgcaactactgttagagtccaccccatgaagctgtaacagattgtgtatctttgactgaattctataagtatctattgttcagactaaaacaaatgttgctagctaggttggctgtcgcaggtctcagtaggacattgacagactccagctttcaccctctggagaccttggacttccgtgccacaatgcatatatgagacccgcaa

SEQ ID NO: 555742 - DNA, 484 bp, Homo sapiens
gaggtggagtctcccaaacaacctaatcacttaaaagtaaaatatgagtggctggcaagatggcctaacaggaacagctcaggtctgcagctcccagtgagatcaatgcagaaagtgggtgatttctgcatttccaactaaggtacctggctcatctctttggtacaggttagacagtgggtgcagcccacatgagcacgagccaaagcagggggggtgcatcacctcacacggtaagctcaaggggtgagaaaacaacctcccccaccaaagggaagccatgagggactgtgcaatgaggaatggtgcattccaacccagatactatgcttttcccatggtctttacaacccacagaccaggagattccctcgagtgctgacactaccaggcccctgggtttcaagcgcaaaacagggcagccgtttaggcagacaccaagctagctgcagaaggttatattttttttttttttttcccatac

SEQ ID NO: 555743 - DNA, 597 bp, Homo sapiens
taggaacaaagatgaaatagaagtattgcccaattaatagtagaaagaagaacagagaaaagaagtactagaatacagcatagatacgacagacgacacataagcatagcgaaattggtgcatcagaaaagacgaaaagtacaagaagaagaagattaaaaccttactaataaggaaagggaagataaggaagaaatccattgagtatccttagagaaagaagttaagcagagacagaatcagataatgataaagcagttgagcattaatggcttcctccctagtaggttcacaataggctacaattcagaaggtcgtttaggaagagcaaagagtccttggtgaaacttcagcaagaggaattgaacaaatattcccacatgatagcgaatgatccacagtttaagtggtgtgaaaaataacatccagaaactgtgaatctcagtatagtagacattcatggcagtttaggaatttgtaatctcatgatatttttgatgtatttatctattgggagggggggtgggtaggggagttaattagtgacttcgtaacaataagaagttattatctagattctaagaaactccaaacaat

SEQ ID NO: 555744 - DNA, 977 bp, Homo sapiens
  misc_feature (974)..(975): n is a, c, g, or t
  misc_feature (977)..(977): n is a, c, g, or t
actgacttttccctgggtactgcaagaaagccagggagggcagatcttaccagttggctggattagtgtccaatgttggatgttccggttggatttggcaaagggcctcctggactgcagccgcacgagggagagagagagaggaagaaaaaaaaagggaggatgagggaaaagtgaagtgagagaaaagatggggcatgtggccagagaccctcaggatccaggaattaactcaagatgagctgctgttgcccactgcttcctgggttgcaagagagcctctgcccccagcactcatcccgggtttgggcaccaaatgtaagagttaaagaaaggaaagaaacacaaaacgcggctggcagttaaagacaggtttattttagacaaaacctgagaggcactcctggccgatttcgttaagaagtgtttccttttacagactaagaatatatatggttttagggcgagggggcttatcacaagcttggaatatttatgtgtgtggagaattttatggcggggttggaatctcttgggaggaggggaggttatcttggggcagacatctttccggcccagagaggggtttattttgaggctagtgtttttcttcctttagcttgttgatgtgatggatacattaattgacaaatgttaaccagttctggcatacctggaataaatgtcattggtcgtgactgtataagtatttatacatggtggatcagggtgaaatgtttgtggcaatttttgaatctgtgttggagagattggcggagttccctttaataatgatggcacagtttgggtaattttggttgaggtacagggccgggggtgtggggtcgggtgtatccgatggaaggggggaactgagggagttacacctggggagggctgttgaaaaaagggggtaatagcgcacataggaatagtaagggaagaaagtgcttttaccagactgtttgtgtganngn

SEQ ID NO: 555745 - DNA, 115 bp, Homo sapiens
gaatggattggccgccgccatactccttcaggacgcgccgttgtcgctgccataatatgggcggtctaggtgagctcgccaatctactattactggtgtgcagtcgtgatgagga

SEQ ID NO: 555746 - DNA, 729 bp, Homo sapiens
gctcactgctagctccgcctcccgggttcacaccattcttctgcctcagcctcctgagtagctgggactacaggcgcccgccaccatgcccggctaattttttttgtatttttagtagagacagggtttcaccatgttggccaggctggtctcgaactcctgacttcaggtgatccacctgccttggcctcccaaggtgctgggattacaggcatgagccattgcacccggcctcagctttactttcctaacagggatctgatagctaaaggaaaagcctttgccagtcacgatggctcaggcctgtggtcccagcactttgggaggctgaggctggaatattgcttagagcccaggaggaggctgcggtgggctgtgatcgcgccactgcactctagcgtgggcaacagggcaggaccctgtctcaaaaaaaaaaaaaaaaaaacagaagaagagaaaagccttacttcagatgtagagcagactgagctcattcatcatgatttcttcgggatattactggcaagcagattataagctcatctttgggtgaaaattggcgggatcttctgcagtccaagttcaaccaaacagggctttgatcaaacctttagagggcttcaacccggccttgaagactttccaaaccttcaaaatgagcggcttccttgacccagttaaaaagttaaaggaaagtttgtcttgcatatagagaggaaagccccttgg

SEQ ID NO: 555747 - DNA, 834 bp, Homo sapiens
gatgccgctgaacaagcatcgttaaggtggtctcgtttcaccctggccgtcatgtcgtaagttgcacgagtctcctaaagagccacgtaacagctgaagaggctcttcgaactccgtagggtcgagcttcgaaccaacggatgagagcctgcaggagccatttggacgcgaatgagggcaacgctgcagcggacatgtgtgctaatgcgagatccaagatcaccaagggctccatggtgctctgggtcagtcaccatataccactgtagagtgacgctgcgatgccgctatgacatgcatggccgacagctcagggtgtagtggagacgattcagctgaggaaaccgatggacgcagcatgcactccagaataaagagttgcgtactccgaggcagagtggcaccacatgataacatgtgaagatcaccagtactgtggccaagctgtgcagtcggagtaaagggcactaaccggaaccatcacctcaatccgtcattacctcccagggaaccagggcactgggaaaccacctagcaaaggtgggaatgcgacagatccttgcccgtgaggcagctggcacaactgggacacaaccccaggggtgactcgggaacaccggggctaatggccctcgagaccggacacccggtcactctcacgacaaagagaacaaggtccaatgcccgacaagtagacgagacagaaggacacaagtgccacaagcccgttccgcgtagatgcaaccagctcacgggcccgaagccaaacagcacggggatcatgcgtgccataccagggccacaaaagagtcgaaaggcagagcccgcggaaaa

SEQ ID NO: 555748 - DNA, 634 bp, Homo sapiens
  misc_feature (307)..(307): n is a, c, g, or t
  misc_feature (394)..(394): n is a, c, g, or t
ccgcgctgagcacgcccgcccaagaaaccaactagcccaacagccaccaccaccaccagatgaggcgcacgcccagcaacacccccgccacgccgcccaacggccccgatacgctggccatgcacgccaagcaccgcgcctccgagggcctgcatttgagcaacagccccatgacagccgcagcctgcgccccaccagcaaacagcagctctcttctgggcctcgcccccgcccagccaccaggcgccctggagcccgccctccgcccccaccaccgtccaccaccgccaccgcccacagcccacgnggcccccaggagcacagcaggggggcgcccagcagaaacccatggcgccattgaccgcccagaaataagattgaacccccccggccnttggcttgaacttggggcaaccccaggtttgtgggaacacagaagggccaggaagggggaacccggggagggcagggggtttcccgaagatcgcactgaaagattttataaaagaatttttgtgggtcggggggacagtaaacttcctgggccacgtgggtccttcaggagtttttcaggcaagtttttcctctgtttttaatatatacctataatatatatgaatagataaatataaaa

SEQ ID NO: 555749 - DNA, 856 bp, Homo sapiens
tagttctagatcgcgagcggcgccttttgtttttttttatttatttattaaaaagagagaaacccggataatgatgtcggggttgagggataggaggaaaaggggggataggggtatgaccatgagggggttccccgggggaacggagggtttatgttgtgaagggggggggtgagtgggccccatggtgtgggggtcaatatgtacaaaggagagtaatagggctggtgcactcatgtattgttagagccctggtaaagtacgggaacaagtggatattggactcgaggacaacggtggtcctaccaccagaagaagttcctccccagtgcggtaaacaaggggggcgggggcggaaaagcgcagacgagtcaagcagaggctcgtgcaaaacagctcatccaaaaaaaaactaactacggggggaaacaagagtctgagaagtcctctgaaaaggagggactcatagactgccacaggtgaagaggcacgcccagaactaaggaggttgcgactaaggcacaaaatacggaacgtgcgagcgatgagtaaccccggggggcgcaacttagaaaactgacgtcggcccgggaaaaactacaggggcggtagacctgaacacgcgggctggtccacaaccgacgggcacgtgggcctgactagcaagagcattgccaggaccaacaacaaagggcccggagaggatagacaagaaacataggcacgttgttaatactaatcgccacaaggagaaaaccaggacggggcaaggcatgggattggccaggggggagcaaacgacggtgagcgaaaaaccaagcgccagtaaaagacgtggaagacaactgccgaagcg

SEQ ID NO: 555750 - DNA, 357 bp, Homo sapiens
  misc_feature (336)..(336): n is a, c, g, or t
gctattatccttagcaaattaatgcagaaacagtaaaccacatacttcatattctctcttataagttggagctagaaatgagaacttacgaacacaaagaaggaaacaatagaaaaaggagcatattggagggtgggcagtggtaggaggtagaagattaggaaaaatatttattgggaatgaggccttgtatctgggtgatgaaataatcagtacaactaatgcctgtgacataagtttacctgtatggcaaacttgcacacctacccctgaagccaaaataaaagttataaaaaaggtgatggtctcacctattctctttggggaaggctccanaagtaacagctacctctagtt

SEQ ID NO: 555751 - DNA, 975 bp, Homo sapiens
aagagagagatatagtacaatttgcaggctagagtcatttatgtgaaactgggatggggggcatcaataaaagcaagccaagaggagtgctgctgagaaattactatgcctatatgttagtaatatatctccaaagaagccacattgctttaacaaatgtagtaggacattctttagagatgtacttggcattccttgaggagattctcctggtgaaaagatcgacttactgaaaagaagcctccttagtattcctaatacagattacatccaggctgcttagtgaaattgccaaggaacagaggtttagtataacatatgtgcatataggatgaactgagcgccaagtggacaatgatcaatgtcttgctgaactgtccaccagccccatcacagtctgtcatggctccggtatctcctgtggccaatgcacaaaagtgatgcagctcacaatgctttgcaagtatttaaagatcatagcagaaacgaaagtaaatctggagcaacttaaaaaatctttcagtagcacataggaagttcccctctggccccttcccaagtaaaacttttaccgtagatgtttatgtcttgtactaaatctcttcatagattcatcacactccagatttaattatctcctcatagttgttattaaagcccctttaaaatgggttcactttggtatcaggaatacgtatttaataacgttgttccacaagagaagcatgtagacccattttacggtggcggcctcgagcagaaactgcgtttggtggggatgactaataaaagtgtaacaagattcatatgaggagtaactattggcaagtcttaagggacacgaacgcaaatagctggggcgacagcctaaagatgagagagagacgaggaggggtatcaaaacgaggagattaagagggaaaaaaaggcatacacggaggagtacagcacacttgtgctctttgccgcgcgtga

SEQ ID NO: 555752 - DNA, 327 bp, Homo sapiens
gctttgaggcagccctgggcgttatgagaacactcacatatgtggaggatgcaccggtgacaattcatatgggcatgaggagtacgtaggatgctgcttctgcgggactgggaatgcgctgtttctcaatgacctggtctccgagacctgaacggatacacctaatgcagactttccatcttgatgacttatacttgtgccaacttctcaaaggaatccactgtgcatgaccacacgacttccataacgggggctatgacgggtacactatccgacgctctggcaatctcatctgacaagtgggccgatggtgggctgacagcgtct

SEQ ID NO: 555753 - DNA, 112 bp, Homo sapiens
ctgtagtcgctcttgtgacaaatacaccagagaaggagggaagaaataaagaaatcaggactggaggagagctttgtgcctgtttgctgcacccctaggtcatccaagagcg

SEQ ID NO: 555754 - DNA, 129 bp, Homo sapiens
tcaagaaagttgcaaatatttgaaagtaacaataaagtgtaacgagtaatattgactaaattcacagcagtccctatggtagaaaggcagtgaattcatttctctggtagacggtcgggcagaacctca

SEQ ID NO: 555755 - DNA, 189 bp, Homo sapiens
ggtcttgctcaatccggcggcgatcgcgaggagcgtcttacccgtaccggctttacccacgagcgacacgagcttcacctcgtcgttgaggaggagatcgatggcgaacgcctgttcggcgttgcggggatacacaccccacaagccttcctgcggcttcatcacggttaccaccgcgttctgcacgag

SEQ ID NO: 555756 - DNA, 107 bp, Homo sapiens
ccatttctacacgtcaatcaattgaaatctatcgggaaaagcacatcgcatccaagcctgcatgcttggtgtcgcacacattgcacacgggtcaccgcagctcgcac

SEQ ID NO: 555757 - DNA, 230 bp, Homo sapiens
cctgatgtcaaagaatgtggacgatatgttgaaaccaccgggccgggagaccatacctgagagaattgttcttataatgcgaggactacctggcagtcgaacgacacatcttgcaaaactttttcgcgctaaggaggccgaatttggccgcccttcacccagaggtctaatcctgcatgcctacttcaccactcaggtggaaaatgaagaaaaagagccagtttctggca

SEQ ID NO: 555758 - DNA, 104 bp, Homo sapiens
agaggagtatgtcacagacccagagcagcgatgggaccacctcgtcttgaatatgaccttgtccagaaggctggatgagagaccttctgtccctacccagaggg

SEQ ID NO: 555759 - DNA, 162 bp, Homo sapiens
tgcggtgcatttcccatcccgacactctgggatgcatgtctagtgatatcatatttcctccactggaaatagaactctttttttgtatggtttgttttgggacggagttcgctctgttgcccaggctagactacagtggcccaagtcttggctcaactgcaa

SEQ ID NO: 555760 - DNA, 774 bp, Homo sapiens
tactagaaatattgggttcttttaatcagctatccagggggtaataaaataaatttaaggggcacctaatttaccatttaaaatagttcattaaaagataatctacaaaacaaggttatgcctatgggtcaaaagtaacaccttttttttttcacaagaagggagaaattaagggcataatctcaaaattgagtggctaacaagggtgggtccattgtggacactctacagagtgatccgtgtaggcatactcggcgggcacgagtgttggaaaaccacactccacatagattaaaatttagtgggtaagataaaaaagaaaagatacactttctcagaggtaggtggttggaaatttaaagaaaaattatccaccattatttttacaagcagatcttttaaatggacatagttttagccattaaaagagtgggtggtttggggaaacactctatcctccttggaaccatttctcacataaattttccaggggtataaattaccgtgaacagaaataagttccggggtccgtgtacaatttatgggctccctggagttacataacgcccctcccagccccaccaaagctcaattgggcggggttccagcagaaattagacggcccaaattttaaccagaattcatagcatcccaaagtttcagaacccctttggtttcctccttgggtgcttacccccaaggtttctgggcgactggatggccgattgtcgcttttggtgccccggtttatgggctaccttcatgggggaactg

SEQ ID NO: 555761 - DNA, 168 bp, Homo sapiens
agcacgtcaggccccactgcccctaaatagtttgaatcttgatgttttggtttccaaaggacttctgattctagctacagtagctttgttcattctcctgcgctcactatacacagaagaccactttgcttttctctgcacaccaccactggcaccctagcatggaag

SEQ ID NO: 555762 - DNA, 82 bp, Homo sapiens
gaggacacacaggcctgagcaaagggcctgcccagacaagattttttaatgtttaaaaaccgaataaatgttttatttctag

SEQ ID NO: 555763 - DNA, 1160 bp, Homo sapiens
taatagttaaaaaattttattcctaatagctataattacagggctggtttggtcgaaatgaaaactgaaaacaagttatacaaaacagttgattactaatcgtgttcttgaaagcagtaagaggttccaggaacaccaaatagaccagttctgaggtttccccaaaataaatttaacagctccagcttcagggttaatcaaaatacaaaaagaaaaaatgtaaaggtgtgacttattccagatggcaaatcgagacccttgcaggctagagggaaaaaaagctacatcacacacagagggtgggggtgcccccgaggggcatgggggctacaagggtggaccgccgtgcccggctagcacgcgactccgtgcctggtgaggccccaaacatccgtgccaaaggggttcgtgaccgagcacaagtcgtggggacgaaggacccacctcgtggccacacggagaccgagggacacgaaggggccctgggacccaaaggcggcctgaaggagggaagggggccatgcgagacaaaaaagaggagaagagaagagaacatcccagccctggcaccctgggaaacagtggacaacaacagggaaacaagcacgtgacaactcggaacagccgggaggcatccaaggaccaagagaaaacgcggggaaacactcactggggacccgcatggcagaacatggaccccacacaccgcgtgcgccaaccgaacgaaccacagaaacccgaaggcgaaccacacctgccaggacaaacgggacatcaagccagcaacatgtacacctacatcacagcaagggtccccacacggagggcaccgacgaccaacatgaaaccaagcaaagaataaacagcaggccagagtcagggcaaaaaaccaacaacgaagcagggtacacaccaccaacaaacgaaaagaggaggcgaggtcaaaaaaaacaactatgaagcgaaggcagaaagaacagccagataaccaaaaacgcgtacgatactaaccacaaaaaaacactaacaagctattagaggtcaagcacagaagagtaacaccactcaagagcgaacaaaaacaccacaacaccacaagaaacacacaacagcgcgacaactgaactggactctcgctatgctatgcacaaccaggaagt

SEQ ID NO: 555764 - DNA, 332 bp, Homo sapiens
cagtcagaattgtgtaagctgaaccagttggaatgtctgtggcgttggctatggtttgtactgttaatcatcagtactcttcaattagggcacaaacaagattttttttttccttgcaaattgatgtagtttgtcttctatagtgggcttcatcttcaacatcatctcatcttttcttaaaataaattattcatttgtaaactgccaatttcttgtggcattgcccccactaacattttgtaaagcagcaatgatttcctgattttcccaccccaactcccccacctcgggtgtaagcgacaggaagaaataataataatttaagattcaaa

SEQ ID NO: 555765 - DNA, 164 bp, Homo sapiens
caagctcgacatggtgatctccacgcgcgcctatgccaacctggaaggctttgcgctgcgcacctcgccggtgtggtggatttgatcggcgcaatacattcactcgccgagcgaaccgctgccgatgattctggtggatgagccgagcatatatcgtagctatg

SEQ ID NO: 555766 - DNA, 288 bp, Homo sapiens
gaggggcacaccctgcagtgcattaaaagccaccatcaaatgtggacctggactcagtttccctctgttccctcccaccctcgagtgtggacgtggactcagtttcgctgtgctctcgcacaatctaaagtggggacggggacagagtccctctgtggtctctcacactcaaaagtggacgcggacacagagttcctctgtgctcgctcacaatcaaaagtggacgcggactcagagtccctctgtgctctcgcacactcaaatgtggacgcgggctcagagtccctc

SEQ ID NO: 555767 - DNA, 134 bp, Homo sapiens
ctaggctaacctagacgaacctacgccaaatccatttcgctatcatattgcatcggcgtaaatctaactttcttcccacaacactttctcggcctatccggaagtgccccgacgttacatcggatctaccccga

SEQ ID NO: 555768 - DNA, 507 bp, Homo sapiens
caagcagttaatacagactcaggttgtgattgatgcaggacgaattcgctgtctttcccagcctgctcaccaaccccaaaactaacatacagaaggaagctacgtgacccatgtcgaatatcacagccggccgccagggacccagataacggcaagtggtgaatcatggattcgtcccatcccttgtcgagtgtgctctctaaggtaggattgaaggacacaaaaggaagctgtgtagggccgtgacacactataccagtgttggcaactgttgaaccagatagggtaccttgtgcacttgtggggataatagacaccgttgatgacacctcttaactgccatggatacccaagattaatgcgggttatccctggatgcctttcctattatctttcgggctgctgagccacttacggtgacacgtgcgaaatttagtatagtgattgcagattgtggaggtgtagaccaagattgcagctctacaaacccatgaaaatgaggtctgt

SEQ ID NO: 555769 - DNA, 442 bp, Homo sapiens
cgacgaggggccaagcaggttacataatttgtgtacaccatttttacttattacaagattttcaaaaattctgtgcatattttaacaaggccaaatgttctcagtagcttaagaaataaaaatgtgtggttttctcttcactttttcattcaacaaatatttatgcaacatctaccatgtgtatgagacacatttctctattttctacgttttaaaatatatgcctataccttttgtatgaaaaaaatgctttaaattttcaaaataacaggttaaaagatacattatttaagcttaaattttttaaacataagattatttcactgcatgccctgtccagcagaaaatataatgctatagaatcgcatctggatagcacttcagtttgttttaacctcacaataatcctgtgatataagcaggaaagtgactgactgacatt

SEQ ID NO: 555770 - DNA, 102 bp, Homo sapiens
agatcaccataggataagcacggagactaccatacgaaaagttgatagagcagacgttcgaatggaggcacccgtaggtagtaggcacccgcgtaggtagta

SEQ ID NO: 555771 - DNA, 325 bp, Homo sapiens
  misc_feature (91)..(91): n is a, c, g, or t
gcaaagtggaataagcctatcacaaaaaataatattacataattctacttatatgaggaatctagagcagtcagtttcccagagacagaanatagaatggtggttgccaagggctgggagaagagggcaatggagagtgagtgtttagtgggtcagagttttagtttgggaaggtaaaaagttctggagatggatgatggttatgggtgctcaacagtgtgaatgtacttaatgccacagaactgcacatttaaatgtggttaaaatcatcacttttatgttatgtatatttaccacaataaataaagaagttgatatttcttat

SEQ ID NO: 555772 - DNA, 319 bp, Homo sapiens
gatgtatcccctatacatggcaaaggactgaaccccctccctcaaagcagcgcaggaaaagcctgctttggacccgggaaaaaaaaagcccttgctaacttcttccactggcagaaaccttcccttgaaaacaaagattttaaaaaatccctttctttttcttccgcccttaaaaacaaaacaaaaaaaactgtcccttttgcgcccaaatttttcgagggggcccttttattcatctcctttattttgatgtttccctaatgggtaatttcctttttataagcatgatcttttaaaaaaaaatttggcttttaaagta

SEQ ID NO: 555773 - DNA, 343 bp, Homo sapiens
gcagagtaactaacaacaccctaatacctcagtcacagggacaaagagtaatccaatgtacacacagggataagtagttgaagccacaattaatagaaggtacaaatcagattcattaaatgctatgatagttaaatcgagaataaatcgtctgaaatttcatcttggtgagttcgttggatatcaaagttgtatacgcacatttagtgggagctgttataaaataattagaagaatatgaagtacctgtcagggttacaaacgataaaaatattaatttaaaagaccctatttggtaatagattagatatatacaattgatggtgatgctcaaagatctttg

SEQ ID NO: 555774 - DNA, 202 bp, Homo sapiens
atgactcgaccgtatctcttagctggattctctctattgtactactcaaatcccatgagaagccttgattgacacgatcctgaagaccgaacctttatggctattcaagacgagtgtacctagagcttctccatcagcatcttcagcgattatcaccaaaggcttatggtgatcattggcgatttcaagaagcaggaacagg

SEQ ID NO: 555775 - DNA, 589 bp, Homo sapiens
  misc_feature (4)..(4): n is a, c, g, or t
  misc_feature (172)..(173): n is a, c, g, or t
  misc_feature (193)..(193): n is a, c, g, or t
  misc_feature (196)..(197): n is a, c, g, or t
  misc_feature (199)..(199): n is a, c, g, or t
  misc_feature (207)..(207): n is a, c, g, or t
  misc_feature (211)..(211): n is a, c, g, or t
  misc_feature (256)..(256): n is a, c, g, or t
  misc_feature (274)..(274): n is a, c, g, or t
  misc_feature (291)..(291): n is a, c, g, or t
  misc_feature (299)..(299): n is a, c, g, or t
  misc_feature (306)..(306): n is a, c, g, or t
  misc_feature (311)..(311): n is a, c, g, or t
  misc_feature (316)..(316): n is a, c, g, or t
  misc_feature (325)..(326): n is a, c, g, or t
  misc_feature (353)..(353): n is a, c, g, or t
  misc_feature (383)..(383): n is a, c, g, or t
  misc_feature (387)..(387): n is a, c, g, or t
  misc_feature (397)..(397): n is a, c, g, or t
  misc_feature (399)..(399): n is a, c, g, or t
  misc_feature (405)..(405): n is a, c, g, or t
  misc_feature (416)..(416): n is a, c, g, or t
  misc_feature (569)..(569): n is a, c, g, or t
agtntcctggagcacagaccgacagtatccattctcttcccttcccttaccaagcgaacccctgaattctagctgaatatcttggctatacagtctcccctcaagctgaactgtagctgtgggaatcagttctggtccacaggaattaacggaagaagtgtgtacaattttnnaactatgctctttagaagantgnngnggggtgtntttnttcccttcctcctgtgatgtgatggctggatggagctggaatggncattttgcaccatgaggnatctgatgtcctgcgtnggggaganctcaggnttcanttgcncactcaggnntacccgttgctctgccagctagatggnacacttcattgccacctgttcatccccgcncgcnacttctcggntnatgttnaggttcatttnctctgctttcttggtcttctcgtccatctggcgtggctgtgcccatccccctgggggggaccgtgcctcctgggaaatgctacctccgggatcgcctgggagaggcgggagaacaggagcaactcagccaggccgtgtggactccggcgcggnccaagccctgtgtgtgcctc

SEQ ID NO: 555776 - DNA, 126 bp, Homo sapiens
ggatccccggtacattcagcagaggaagaaagccgtctcaactttggtccagcgtaacgtgaacatctttaagtttcatcattcttaactgttgtaaaattacagcccgaactgcaacgttgctta

SEQ ID NO: 555777 - DNA, 422 bp, Homo sapiens
  misc_feature (8)..(8): n is a, c, g, or t
  misc_feature (95)..(95): n is a, c, g, or t
  misc_feature (414)..(414): n is a, c, g, or t
ctgcttcntcccttaacattcaaaagttttagggtaacttccttaaaattggccaacattgcttcttgttgcccaaaggaaaaaccgaagtgtcnaagcttaagaatagacgtccttcccaacaaaagaccaaactgctatttacttatttatttgacaaagtcttgctctgtcgccccaggctgcagtgcactggcgagatcatggttcattgaagctttaaattccctgggttcaagcaatcctcccacctcagtctcccaagtagctaggactacaggcacatcaccatgcctgcagtcccagttactcaagaggctgaggcaggagaaacgcttgaacccaggaggcagagattgcagcgagccgagatcatgccactgcactccagtctgggtgacagggcgacttcgnccccagaa

SEQ ID NO: 555778 - DNA, 439 bp, Homo sapiens
aagcggcaaagctgacggccaacttacacgtagtcagctgcaagaatatcagaaatcaagtacaaacaagatatggacaggtgttacagacatgcaaagctatccttcaagcgcaacgacattttcaacgaaatcacgctagcctatattaactcagactgttttacggtcaacaccaagctttccactctcgcggcttcagctgaaactagctacttaacctcacttgagctctccctttcccaccaggcaactgcttgggcaactggccagcaaccagcaacagcagcctactcacctccctctaaacttccttcttactgccacagctgcttacatcccaacccaccttactctctcacctgtgagcttctacctgtgcgacactgctactgcagcagcgcaacacctgcactgctcctcttctaccacactgcgc

SEQ ID NO: 555779 - DNA, 763 bp, Homo sapiens
ggggaagtgctctaacttttcttaaggttagttgctagcccttcaagtgcactgagctatgtgactcggatggtctttcacgcggcagatcggacattgccaggaactaccatggagcatggtttagacgggaattcgatcgcgatatcgacggggtcaaaacatcggtatatgttgaccccgtccacgtcctccaaggtcacgaccttggagcctcgtgtgagctggacttggaggaggacgggcttggacagtgggagagcagctggtccagacctaggcctctggagcacacacatctcaagacggcagccatgatgggcccgcgaaggcctccaggaatagggccctagccagaggcactttgtgctgaagtctcttgggtcgggcagtgacagtgtaaggtaggaaggcacttgagaaatatgtcgttccctagagcgaccttttgcaaccatcctcgtggggtaaagacgggacgaaaaacctctgggttctatcaattaagtcggagttaacattgtgaaaactttttcctgtgacagtggggtgacaaacatgcaaagaaagttgtactaaacacaaatcatcatcaccagaaagcgagcaattgggtcgcaaactgatcttacgtaggggccccgtgcattaggacgtttacttggcctaacagatctacaaaatcataagctcttcgctaaggatacttgactgtctctatgagaaacattcctttcggccatggaggtgcgtcagatcatat

SEQ ID NO: 555780 - DNA, 371 bp, Homo sapiens
  misc_feature (66)..(66): n is a, c, g, or t
tttagccaagccaagcaccacgtttcattcaggtcataaggtttggagttagactaggttaagttncaggctctacaattaactaacagtgtgactttgggcaaagtttttacttaatttttcttgtcttcatctgttctgaagaaagagaggaagccctatgttgtaggactgttgtgaggattacacgagttaacatatgctaatgctgcacggtggctggcatggtttatggtcttgtccaaaggccattttgttggactattacaccaattttggacttctcaatataaaatggatgtgaaaatgtgaagttcaaatagtggaatcactgggttaaaagtaggagttaggaggaaattccaggttgg

SEQ ID NO: 555781 - DNA, 343 bp, Homo sapiens
  misc_feature (286)..(286): n is a, c, g, or t
  misc_feature (330)..(330): n is a, c, g, or t
ggcacgaggagagagctagcaccattaccctggtccactcgctgacatcatctacctgcttaaaagtgctagtagttctcggttgcctcatcaaggtagcatctcattctcaggaaggagttaggccctcctcaacttgactccaggaccctctggggttgacctctcgtgccccttcccacacagcatggaggagaccagcatttctgccctgcctcatgctactttcccatcctgaaatggtctccccagccttgtttacccagcgaactcctactcagtcatnaaggcccagctccaacagccattcccttcttagagtattgtctngagcccagtgaaa

SEQ ID NO: 555782 - DNA, 318 bp, Homo sapiens
cagaggaaaatgaaagtaatccaataaaattctacctgtggccggctgcgatggctcatgcctgtaatcccagcactttgggaggttgcggtgggtggatcacttgaggtcgggggttcgagaccagcctggccaacatggtgaaaccctgtctctactgaaagtgcgaaggttggctgggcatggtggtgggtgcctgtagttccaggtacttggggaggctgaggctggagaattgcttgagcccgggaggcggaggttgcagtgagccaagattgcgccactgcattctagcctgggtgacagagactcttaaga

SEQ ID NO: 555783 - DNA, 536 bp, Homo sapiens
tcagatgtgtaagaggataaacagacactcgtaatgaataaaaatcctcctgcacgcggactcagagggagggactgaccacgaatcgtaaagtgggcatttagctgagcatggtttccactaatcattgttatttttctgagccagtatataatagttaaggacaagggagccctgcttgcttctgtttgggcttagagtccaggcttggctactcattagctgtatgactcatggcaagttatttaaccttcctgatccccaaatttctcatcaatacaatgagggtatgagagtagctactttctatgaacataatatgaaaaaaatatttagtgaaaaaaaatgcccgtgagatactttccaaaatggacggtgttgtttaaccgttactggtatatttttttggggtataaaaaactctcaaaaaaaaggttgcccttacatttaatcccctttttgaaccaataactcgattaaaaaaaaaggcccccccccggggtatttttggataaccccacgccccttttgggggc

SEQ ID NO: 555784 - DNA, 104 bp, Homo sapiens
gttaacgcagtgcaacggcatgaagaacgtagcacacagaggacaacaacaatgagcagaagtcgtagtcatgaacgaaagagacgcaacaagtagggacacgg

SEQ ID NO: 555785 - DNA, 832 bp, Homo sapiens
ggcagaagcttctgtgagtaatagattccactaggatgtttcaccgtgccttatcaagaccattctcagtctacttttttaagctaccgtatcttacaatcatggaaaagttgataaatggctgaatatttaataaccttgtgcttgtatgtaaccgaacaaagtggtttaagagccaacattatagagtatgacaatgtgagctgaacagtttttaatggcgcaagcagatctggtctggtgtatgacttgtaagcttaatttatggtgtaaagatggttacatgattatccttagcttggtaggtgggagacaaatagagaatgcttgtgacgtatgtcaagaacaatcttatctggtagaataagggtcacatgtattatacgagctatatatagcatttggcccagaaagacagcttgtataacggctttgggaagtaactgctcgtgtacagtgtcttaagagctgagagtctgtgaggtgaggtaatattcttcatgctagagtgtcaagatgggtggtattgtagaaacgtggtcacaagatccagaggtcttaaaggttaggggggaaaatctatatggggaatggatctgtgtctagcatataccagatgtaatatatgccgtggaaagtgggcattgtgcacggactatggttgtcagaaaggccagttttatcaatatggcgtgtttgaaattagcaacgggtctactaatgaaatcgggtggtagttttttacgaactataatttgtggcaaaggtagaaagaaaaaaataacaaaacatggtggtcgcacgtgagctgaagaaaggttttcgaaacccc

SEQ ID NO: 555786 - DNA, 1068 bp, Homo sapiens
ggttctcgtggccgcggcagcgcggtctctgcggaggcggctggggtgctgcggccatgccggacctcttcctttccacgagctggcccctgctggctgccctgttcctgctgggaatggctgggctgggatgtgctgtgactgctggcctaacctcgactgtcgactacctgcgccgccctgccgatggtgaagctgccttataaagcctgctgccctgtgcctgtgccctgaagccactctgcctgccactgcctgcccctgcttgcccctgaactgcgggtgccatacgcatgcctccttgtgagtgactgggccggaccctgtgactgaccctggcactggacagacctgggactgaccctggctggtggctgctgcctcctgctgtgggctggggctgtgtgctgtgctgggtggccttggtgagaggcccttgtgctgcggggtgcatagcgtgctgacaatgtgcctcgggcgcgtagtactgacaggacacagatcgcctcgagaacatgtaccgtagcagccaggctgctgcgtgtgaacggccatccagaacagaatacatcgaacagacggcgcggcagaccgaacaccagtactacgcaggatcccgcaacgtgaaagtggatcagtgaccagaacaccgatgaccacaaccatgccaaccagccacgaccatggccgacaccagggggaccgctgacaggcccacggccaggcgaccacagccctcacccagagaacgcgcccgaacagggcccaaagggctgatgcaggccaacgactggcgcaatcaacggcaggaccaacacacgaataagaccagcgcaaaccagaggcaggcaaaacacccacaacaaaacacatcaagcaccgccccaagccagccaccatcagctagactactaactatagaagaccactaccagacagaagagacaaaccagcaagaacacacaccagacaacaccacccccacacaacaaactacgcactccaactaaacaactacaagccaataactactagactagtctccaccgtgacagcacacaacaagaa

SEQ ID NO: 555787 - DNA, 343 bp, Homo sapiens
cagcaagaatggcatatcaggaaacatgcattcttttcattcgaatcttcagaataaccctgagctgccgaagaccagcaaaagccatgatgactttctgcttaattcaggtgcttacaggattcttcagagtgtgtgtgaacaacaagctttatagtacgtttttttatgcgatacaaatccatacagagactatggcttggggtgagaatgtactgattactaggtctacagacaattaagacacagaaacagataggtagagggtgtcccgcatctggtggtttgcttctcatggtgcttgtctgtgcaccatattatttctgatttgcccttcttgctg

SEQ ID NO: 555788 - DNA, 101 bp, Homo sapiens
  misc_feature (16)..(16): n is a, c, g, or t
gtgactgacgcatatntctcccacttcatcagtttacaaagataaggggtaccttctaacttcacaacacatacattagctccaggcttcagtggctgacc

SEQ ID NO: 555789 - DNA, 480 bp, Homo sapiens
  misc_feature (57)..(57): n is a, c, g, or t
  misc_feature (195)..(195): n is a, c, g, or t
  misc_feature (343)..(343): n is a, c, g, or t
  misc_feature (409)..(409): n is a, c, g, or t
  misc_feature (420)..(420): n is a, c, g, or t
  misc_feature (467)..(467): n is a, c, g, or t
tcctcttgttcttttttttggcaaagcgtttttttttcttggtgcgcaccacgtgcncttgctgcggactgcttttcttggcaagttttggggttgttcaagggggtatggttaaggctgtgttactggttggtgctggttaatgcttcacaattttttttgtctcgttgcttccttttgtttccgatttagtgnctgctgctgtggtatctgtttgcaacaacgacaacattattaggttttgaactatgatttagtagcaacttaggttcccaattttaaccccttggcagcaagatccaagttccctcatttgcacattagcacctaagtgtcaaggggntaaataaccagcacaaaagatactgcacttctgattgtagcatttggcagaactgaaaggaaaggnagttgtgctanatgttcaagggattgtgggccacataaagatgacaccaagaaaagantaaatgtcacatg

SEQ ID NO: 555790 - DNA, 388 bp, Homo sapiens
atctaggccggtccttctactgccttactcctatggctagtatttgctcgcctcttcttttcttactgtctcccgccgcttctggattctccttgaactgcttgcaaaaaatatattccgcaaaattgtgacgatccatgagcaattcttcaacagacaacttacttggggtcaaagaggaagttactcgcccatctccttatagagggtctccctgttcgaatgccttatccgcagcttgtaatactttttcgtgtgcatccttcacaaagctggtcattttttcaacaaacttgtctttttcatctgtggcagctgggaaattctgaacatcacgttccacatcagaaatttgtttcttcatctgatctaggttcttttgcaagtt

SEQ ID NO: 555791 - DNA, 606 bp, Homo sapiens
gcgccgagtctgggcgcggggacgcggggtcggcgcgacgcggggccctctgccgccccgcgctcccatgtacgccttttactcgttgctcatctacctcttgctatcagcctcttccgcagggatggtggcgccgtggcggccgcggagcccggggaccccgcccagagatgcccgaatgccccggggtcgctcggcgccctagtacctgcccgcgccagagtctgtgagaccgagactgacctggcctggcctgccagctccgagacctgaggatgggtcggaaggcgcagccgagggtcgctcggccgcggtgtccctggcataggccctacttgtcgcctcgccgagtttcctctccgtccagactgggggcgtgcagagatgctgcggggtgcccggcggtagctgggtgctagtctggcgaggttccccgtcactgttgatcgatgtgaccagtacaggatcttgggcccttctggtcatggcttcagatagtcaccagcggggaggcagtgccctgctccaggggacgtcagtcctagtgctcctcgggtccggtcccccatctccaagatggtatccaacattcccagagaagaaacg

SEQ ID NO: 555792 - DNA, 362 bp, Homo sapiens
tcatggtcgtggttgtagtccgtgcgagaataccaaaaaaaaaaaaaaaaaaaaaaaaaaaaaaaaaatttttgggcggcctgggcccgggaaattttaaaaccaggtgggggccgggggcccaagtgggttaggtgtgaaacgtgtgccactaacgtggctccccaaggaagaaccggggccaggacaaggttgctgtggtttcctctcacaaatataaaaaacgccgggggggcaaccggaagggttccgtgaaaaaactccaagaagagggagctcggaggctacacaacgggactccatactcaccagagagcccagaccggacgcgatattactaaaattaacgcccccggcgagga

SEQ ID NO: 555793 - DNA, 664 bp, Homo sapiens
gcacgagcctgcaagcgattgacccttgagactatgaaaatgatgttagacaaaaagcaaattcgagcaattttcttattcgagttcaaaatgggtcgtaaagcagcagaaacaactcgcaacatcaacaatgcatttggcccaggaactgctaacgaacgtacagtgcagtggtggttcaagaagttttgcaaaggagatgagagccttgaagatgaggagcgtagtggccggccatcagaagttgacaacgaccagttgagagcaatcatcgaagctgatccccttacaactacacgagaagttgctgaagaactcaatgtcaaccattctacggtcgttcgacatttgaagcaaattggaaaggtgaaaaagctcgataagtgggtgcctcatgagctgactgaaaatcaaaaaaattcgtcgttttgaagtgtcatcttctcttattctacgcaaccacaacgaaccatttctcgatcggattgtgacgtgtgatgaaaaagggattttatatgacaaccggggacgaacagctcaggggttggaacaagaaaaagcctcaaagcacttcccaagaccaatcttggacccaaaaaagtcaagggcactattggagggccggctgcgggtctgaaccaccaaaactttttgaatcccgggg

SEQ ID NO: 555794 - DNA, 342 bp, Homo sapiens
atcatgccaagtgaaagaagtaccgtccctatactcacctatagtccccaccactcaggaggctgaagcaggagaactgcctgaggccaggagttaaaaaccagtctgggcaacacagcaagaccccatctctaaaaaaattaacaaacattagccaggcatggtgtgtgcacctgtcgtcccagactacacgagaggctgaggcgggaggactacttgagctcatgagttcaagaccagtctaggcaacacagccagacctcctctctaaaaaacacagacaaaaacatttatatgcagattctagaacacaaatcaaatctatcgtgacaaaaagtagat

SEQ ID NO: 555795 - DNA, 110 bp, Homo sapiens
ttccccaattatatttagtacaagagctcaaagtacctcacaaaattaaaatgcttgtgctgggagtgctggctcacacctgtaatcccagctactcgggagacgctgag

SEQ ID NO: 555796 - DNA, 165 bp, Homo sapiens
aggaggcgcctgtaccggtcatgtgcattctgggactgagtcagtaccctggagcctagcccgcgtgtcaggtacagattcgccgtggggcagtgctgctcccgaatgatcaccaacagcctgaaccatgactctccacccagcacaccccccaggcgcccggac

SEQ ID NO: 555797 - DNA, 995 bp, Homo sapiens
gcgcctgcggcagtgggggtgaccgaacggctcgcggccgcgtggaggctgatcccagccgcgcgcgagtcgtactcgtgagtgggggtcccggcggtggttgtggtggatgtggtgcgagcttgtcaggtggctcttcgcgcattatacagagggccccaatggtgaagaggcggggccgctgctgtctttgccgaccgcatgcagctccgggagcacgagggcgtggtgtggagtatacgccggtctttagcgagatgcgtgacggcggcccaaggacacaatggatgaacttcgcatactccgactcggtccttggatggcgcgcccgatcaatgtcggtgcgcgatgtgaatgcactcggggttaatgccatggtagtgaccctgaatctgggagcaagatgcatggagcataacggtgtagttggagcaaacagtccacacgcctcatacacgagtattgacggtcctgcccgatggaggcaggtctcctgagcggagctggatcgcggggcgcgttggctcgaggagaggacggaagcaggcttgagtctgagggtgacgccagtgtgcagcctggaccgtcggaggcatgatcgaatgagcacaggctggggccggagctgctatcgagcgacctgctgagtgaaggagtacagtttctcaagtgtgggaggaggtaccatgaatgctgagggacgtccgggtgctcaagactcggtgcaagcctattggggggacgccactccgtggaagcagggaggataggagacggtggcaccactgagttgagaatagcgtggaacgtggaaggggaggtcgccctgtgcgcgttgcaatgcggtcagagaagaatagtgacagcatccgggacgaagatccggttgaagggcgtcagccacgaagacaagcctgggcccacgggagagtgggaccaagtcggaagatacagggttggtacacggacaattttcggaagtcgctaacatcacg

SEQ ID NO: 555798 - DNA, 182 bp, Homo sapiens
gggggattgtcttaaactatatttaagacaggtgaaactgatatgctttcttagtttgtcttatacagatttaactagctaatataccgacttgtgaatgttttccggttgctgataaaactattgatcggctacagtcgagtagcaacctgtcatccgtgggattggtgcaccatttttct

SEQ ID NO: 555799 - DNA, 449 bp, Homo sapiens
cgagtctgaagttgtagaacaagatcaggtctcaacatcgtgttatagatcttgctcatgagatacttcctggaacgcaataaactgagtctttggaaaccccgtagagaagatcggagaaaattggttcagaacgagcatttaaattaagtcagcaaagatccgaatttaaaattgggcaataccttgtctacatatatctttacactcaaattgtaccctggacaacagtagtctagtctcctggaagacatggtgcaaactgacatgcacatgtgttggtatactcatagtccaagtgggtgcacaagtgatggtccaactttgtgccatggtaaggattctcagggttgtttggccagaacaagagaaataactgcggacaacacatatagttggaaaccatgcgcttgtgactttttctgtagcctatgggagtggaccgagtg

SEQ ID NO: 555800 - DNA, 429 bp, Homo sapiens
cctactccgcctcatcctccttgtcatcacgtggcagcgtctcatccgacacgagggtcagttgttcctccagatcatatttgtaggccttctactcattcatggtctcgtctcatcatcgccctcagttagctgatgtgacctagtagctgagcagctcctcctgcacagtgctcagacagtgtatgcacacagcgctaggtaatatcatcagcgactcagtgccagttcacatctgctgccatctctgccgctcggtctgctggagcgagctcgggctccggactctgtctccgccgcgtgctacaccgtggcctgccatccagccaggaatgtcatcagccgcgcagacctcagcaccttcatcgtactgcctgtgctcgtccagtctgctcctcctcaagtacgtctctcgtgccgaattcctgc

SEQ ID NO: 555801 - DNA, 185 bp, Homo sapiens
  misc_feature (32)..(32): n is a, c, g, or t
  misc_feature (36)..(36): n is a, c, g, or t
  misc_feature (45)..(45): n is a, c, g, or t
  misc_feature (47)..(48): n is a, c, g, or t
  misc_feature (50)..(50): n is a, c, g, or t
  misc_feature (53)..(54): n is a, c, g, or t
  misc_feature (182)..(182): n is a, c, g, or t
ctgcgtgtgcatctcgacgagctaccccgagngggnaacatccantnngncanngcaggttcaagtgcatggttcaagtgcatggttcaagtgcatggttcaagtgcatggttcaagtgcatggttcaagtgcatggttcaagtgcatggttccccgggtgggtcacggcagctcgcaatcngtc

SEQ ID NO: 555802 - DNA, 332 bp, Homo sapiens
  misc_feature (294)..(294): n is a, c, g, or t
cctgatgtcacgctcgagcatcactcgctgactccggcggcatgatgctggtgaaatggccgaagcagttcgacgtcatcgtcaccgacaatctgttcggcgacatgctgtccgacatcgcggcgatgctcaccggctcgctcggcatgctgccctcggcctcgctcggcgaagtcgacgtcaagagcaggaagcgcagagcgctctacgagcccgtgcacggttcggcgcctgacatcgcaggccaaggcctcgccaatccgatcgcgatgatctcgtccttcggcatggcgntgcgctattccttcgacatgggcgatctcgccgacaag

SEQ ID NO: 555803 - DNA, 374 bp, Homo sapiens
agtatctcatcgtcatcagaaaatgatgaaagtgtctcatacagccggacgctctcaaactcttgcttgctggcctacactcgcaaagcacttgacgtgcgaggacaaaactccaacgggagggctctaaatgttgtatgaaagctgccagagtaattcttttcatcaacatgcaccatcaaccatttatgtccttccccagaaccttcatctgcagcataaggttcagctttgaaatacatgtactgcatttctcccctactcttgccactctcatcatattcactatcagttccagagtcttcttctgctgtatcccatgtttcttttttcccttcatttgctttcgttcttctactacttgtgatactgta

SEQ ID NO: 555804 - DNA, 575 bp, Homo sapiens
  misc_feature (230)..(230): n is a, c, g, or t
tgaaattgggacggggaacacttccccaatctcggccccagttctttctcaaaaataaggagcttcttggccttgcgcccgctattccagtatgcacccgtaggcgtccttcatttcttttgcctctgtgtcaggctgttaacgggcgtccgtgagggccctggcgcctgggtgcacatggtgaggtgctccagcaccctccaaataccggtcaatacacgtctaggggnccaaggaggcaccggggccaggatgattaaagagacagtccgaggactaaccccaaaagattgagtaaagagaagagcagaggcgcgagacgtgaggacgagggacccgggctcagcacccagggtagaagaggcaaggactcgtaaacgggaagacgggggctcagaatgcgggtgggcctggtgaccccgtggatatcaggggtgaagcgacaccagggggcaaggcaataagaggcagagctggaggtcagtaggtgtcgcaagcactcgcaggccttggaatggccgcaagacggcatgcctccttccattcgtcccccgggcgccaatctgtaaaagcgt

SEQ ID NO: 555805 - DNA, 956 bp, Homo sapiens
gtctcggatcgcgttggcttgtgggtgtgatcgtccgggtctgtgtgtttgtgcgcggcaattattcctgtgggtgtggtcaccggtaatttgtcctcgtggcgcctataatttgcgtgttcgggccgggtttgaatggtttcgtttgtctgcccccgttccggtggccgatttgtttgattgctgccacgcgctttggccgctagggttactttgttggtgcttgcagccgataggggcgcggtccggcgccttgtttgtgccaacttcgtcgccatggagggtgtgggtgtcgccagcacccgggtgccgtgtgtggccgccgcctgcccctgaggtgccgcgtgccaatggaccgctgtttttgccctcaattaggggggtgttcacttatcgcggaggtgtgccccctgttgttctcggggtcacccccctggtgcccccatgctttgtgcggccgatgtcccgttccgggcataactaaattgtcgttcgggcggttattcgtaacctttgtggtgccggcacacacagcccatgtgttgggcggcctcattttcccgcgtgatttgcccccgcgccgtttttcttcgcgtggtttcccccgcgaggcactacacccacccatggtgacactgtcgtatcaatctgtgaggcggctactttcacatttttccgtacaacccggtgaaatagtgaaaaatgttctcatgaagatgtgtgagaaacgccttcttccttctgagaagcgcgaaaatcgccttaatatgtaggagaagacccgctcgccattaacgctggggtgagccaataatggggagcgccccccccgctgtcgccaccagttcggaggaccccgtaattccaattaaaatcttttccgcccaaaaggagaagggattgacccccccaaaggggttcaaacccacccccgggcccccagattttttcaaaaa

SEQ ID NO: 555806 - DNA, 373 bp, Homo sapiens
ccccactgtggcactatggatttgacgttcttcacctcattctcactcgtattgttccaggaccagctggtactgatggcggtgaggggccccacgtttccaggcaatgtcgtgactggaaccggtgtactggacccagtgcacagtccccgcattaatccacacgaggtctccgggtcgctgcatgaagcggtacacaggaatattggatgcatagagatcatccaggattggtcaccaggaacccgtcaagtagtccacgccgtgccgatcacagacagcgctgatggtctcccagtagtgctcgtgcaccgcgaaccactcgcagtcgcctgggccaatgttgatgtcgacggagcagaagttgttattc

SEQ ID NO: 555807 - DNA, 615 bp, Homo sapiens
gagagaacgagcctcggggaagatgcctttctactatcattttaagaacaaggtcttttaaaatgccctgcagaataaccttacgaagcaatactctaatctacctattccttggacaatgaagcacatggtcccatggagtgtacaaggttgtggccacaaccgaccctgtgataatgtgcgcagaccctacatagaattcacgtatgaaggccgtttgtcaaggggagcagtatacacagagctgtagttctatagctgtgaatacaagtctatggttcaatgacaggcatcttgggcgtctcgcacaatccgtgggcctttggacaaagacgacatggtgtctagaagactgacttacgtgtgtacatgtaagtttgtaagccagtgagctcacgatgcactgatgcctgtacactaggcatcctgagatcacacattgctagagtgtctcgtttgtagaacgcgagccatcaatccgattctaactgttcacacacctaacgatttaatctgtggtgcggacttatagctgtttcggccttctctgtggagctcacttatgaactcgaagggtattgttactccctacgggtgaactctcaatgctggcct

SEQ ID NO: 555808 - DNA, 1170 bp, Homo sapiens
  misc_feature (7)..(7): n is a, c, g, or t
  misc_feature (10)..(10): n is a, c, g, or t
  misc_feature (879)..(879): n is a, c, g, or t
  misc_feature (886)..(886): n is a, c, g, or t
agcgggngtncgccgggggcgctggggggctctgcggcgggcggcgcgcggccggggcgcggcgcggagcggagctgcagggcggcggcgggagcgcggggcgcaagagccgctccgccgggagtgccggggaagttcgcgctggcagcatggggcggtgacgccgcaccggccttccgcgcctgccagccgggcgagagcaggcggaggagaaggaggatgcatcctcaccgacggctcgcctcccggggccggcgcgcaggtgccttgcagagagaggagtagcttgctggctttgaacgcgtggcgtggcagatatttcagaaagcttcaagaacaagctggagaagggaagagttattcctccatattcacctgcttcaactactattcttattgggaatggacaatggaatgttctctggttttatcatgatcaaaaacctccttctcttttgtatttccatgaacttatccagtcactttggcttttcacagatgccaaccagttcagtgaaagatgagaccaatgacaacatcacgatatttaccaggatcttggatgggctcttggatggctacgacaacagacttcggcccgggctgggagagcgcatcactcaggtgaggaccgacatctacgtcaccagcttcggcccggtgtccgacacggaaatggagtacaccatagacgtgtttttccgacaaagctggaaagatgaaaggcttcggtttaaggggcccatgcagcgcctccctctcaacaactccttgccagcaagatctggaccccagacacgttcttccacaacgggaagaagtccatcgctcacaacatgaccacgcccaacaagctgctgcgggctggaggacgacggnaccctgntctacaccatgcgcttgacatctctggagagtgccccatgcagttgaggacttcccgatggatgcgcaccgcttgccctctgaaatttggcagtatgcgtacctaaatctggaatacgctacgtttggaacaagggtccacaagtcggtggtggtgggggaagatggtcccgagtgaaacgtacaactgagggcaaagggggctgaaacatagaacagacgggaatacagttgcaggcatcagctgaaagaaaggtatgcacagaaactccgaagaggggacaa

SEQ ID NO: 555809 - DNA, 307 bp, Homo sapiens
cccccccccctttccccaatgggggggggggggggccgggggggggttttttttacacaacccttttttttttcccccccctttcccggggggccccccccccctttttttttccccctttaaggaccccggggggggtcccccccccgggttttttttgtggcgcggggggggggttctattttttccccggggacccttttttccctttggcccttttttggggcccttttaaccccgttttttccaaaaaccgggggggggccgggccgggttttcccgggtttttttcccccccccgccccca

SEQ ID NO: 555810 - DNA, 563 bp, Homo sapiens
tagaggatccctgaggtgaggtcaatggtattctagttctagtcttgaggatcaccacactgtcttccacaaggttgaactagtttacagtcccacaacagtgtaaaagtgttcctatttctccacatcctctccagcaccgtgtgtttcctgactttttaatgatcgccattctaactggtgtgagatggtatctcatcgtggttttgatttgcatttctctgcatggcccagtgcatgcatgcagccattttttccatatgtctagttggcatgcatacaatgtctatcttttcagcacagtatctgctccatcatcctttgccccactttttgcatggggttgtttttttctatgtaaattagtttcaggtactttgtcgcattctggatattagccctttgtcagatgggtagatgctacaaattttctcctattctgtaggtcgtctgttccatctgctggtcagttcttttgtctttctcaaccactaaagcatccttagaaaccacgaggaagcttatcttcttcaattccattcatcatcaataaaggtattcaa

SEQ ID NO: 555811 - DNA, 850 bp, Homo sapiens
gggttctagagtggcatgcaccttgtccctgttcccatggggggccccttgccttggtgccctgtcgttgccctagcgacaattcaccatgttctgtgttctggtgtgtaagtgtctcagtgtgtctgggattttactgggtgaggtttcctaggtttatgtgttcacccagggcctgataggtgggatttttgctaggactgaccgggctgaaggacatatggtcttcaggatgtaatcttgggggacagtttggcaatgtcaagggagaggttttagctgtgctgtgtttccctaatggtctcggttggggctcgttggatggttcttctcgtggattgccagtgagtagtagctctgtgagttatagtagactaatgtcagaaactgggggacgtccgcacagggttaagtgcatttggatgcgcagtttcagtcgagggttcctgtttaatcgcgcgcctgcatcccgccttcctcgtatctccttttgcctatctggatggtcttctcagaagcctcggccctagtcgctccctggccttggtcgggtgccagagcccacctactgctgatggcagctcttgctactcgtcatgactgtgttgcctgaaactcaagatgtcttgcagagggttatgagttagagtagctggcctggggagagggtgcctacctgggtttgatctttagcggtctgactttctgccagagaagatgttttacagatgtgtcaaagctgatgtaaagtggttgggggaggaaatccagacccaaagtgtatagtcagactgggtgtacaactgcctatgtagatcctctggtcttaaaacgatctcagtattacccc

SEQ ID NO: 555812 - DNA, 273 bp, Homo sapiens
ttatataacttgattattgagaaacatgtggtacgatgccaggtacaaagttgataaacgcaaaaggatattagtaaaaatctccctcccatgcctacccagataggaatccagctctcctttacataagcagacgagtgtgtataatttcagagattatttatgctcgtggaagcaaatgcatctacatacagttgaaccttgaacaacacaggtttgaacgggatgggttcccttattcacagattggtttccaacttttgcaattctatt

SEQ ID NO: 555813 - DNA, 152 bp, Homo sapiens
tttaaaagggtccgtaggcgggctaataagtcaggggtgaaatcgttcagctcaactgagcaaactgcctttgaaactgttagtcttgaatagttgtgaagtagttggaatgtgtagtgtagcggtgaaatgcttagagattgcggtgttga

SEQ ID NO: 555814 - DNA, 110 bp, Homo sapiens
acgacaggcgactcctgtacagtatttcaggcatactacttttaattaatacacattaaaaagtttctcaaggccaggtgcagcgtgcactcacacctgtaattccagca

SEQ ID NO: 555815 - DNA, 110 bp, Homo sapiens
tacagagtgaatgttcagagtgatgtattttattccagtggaacaagcttggatctatgttagtctcagtgtccaactaacacttgtgatttgtctcagtattttatttt

SEQ ID NO: 555816 - DNA, 300 bp, Homo sapiens
acgcttattgtgccgcactggtgggtcaggccctgtattcaccatagaggtacggcgttacgatacccgcgatgaagtgatcgaagccttgaagcaggggggcgtggattttctcggttccgccaatggctacgaagcggccgacccgcaactgcttttgtctcgctcctacgccaacgatcaaccgaccctggtgactcgcagcggcgatagccaggtgttgaacgacgacctggcgggcaagcgcgtagcgatgctgtatcactatatgcagcccgacgccgttcgggcgttttaccc

SEQ ID NO: 555817 - DNA, 834 bp, Homo sapiens
gctcatccctcttggactgattttgatgtaaggtttcatattcatataatataatctcgtttttaaggataatctttttagagaaaactctttgtgtttatctaaaatttagggacttggttaaaatttggacattttggaatactctggttttttttcttttattcattctgctgaccagggatggaatggtctagtttttaattcacttggccggctagtacaatgatgatataagattattttaaataagaatacttgacgacatagatatgctaaaacagaaatgagtttttcttgggtgatggtttttctttgggcaaccagggtgaggataatgggataatcttatgctagaagctggagatgatgctggaaaagtgaaatgggtggacatcaatgataaactgaagctttatgccagtcactctcaattcatcaaacttgtggctgagaaacgagatgcacactggagcgaggactctgaagctgactgccatgcgttgtagctgatggtctccgtgtaagccaaaggcccacagaggagcatatactgaaaagaaggcagtatcacagaatttatactataaaaagggcagggtaggccacttggcctatttactttcaaaacaatttgcatttagagtgtttcgcatcagaataacatgagtaagatgaactggaacacaaaattttcagctctttggtcaaaaggaatataagtaatcatattttgtatgtattcgatttaagcatggcttaaattaaatttaaacaactaatgctctttgaagaatcataatcagaataaagataaattcttgatcagctata

SEQ ID NO: 555818 - DNA, 1711 bp, Homo sapiens
ggcggcgcggcgtaaagcgccattacgcagagagaaagttacgaggttcgtggccgcggtttccccaggcagctggcgctggaggcttcggcgtcacgtgctggtctggatttttctcgatgcactggggaaagcggtggactcttatcgtgggagggctcttgatctgtgatttatagataggcacagctactcccgttcgggaacccaacggcagacaggtcctagtgcccatcagatacccgcggccgggactcggagctgtggggtgtggggaggcggaggcaccaactaagagcgacctagcatcgcaaagccgccctcggggcgctcatggcgggacgcctcctgggaaaggctttagccgcggtgtctctctctctggccttggcctctgtgactatcaggtcctcgcgctgccgcggcatccaggcgttcagaaactcgttttcatcttcttggtttcatcttaataccaacgtcatgtctggttctaatggttccaaagaaaattctcacaataaggctcggacgtctccttacccaggttcaaaagttgaacgaagccaggttcctaatgagaaagtgggctggcttgttgagtggcaagactataagcctgtggaatacactgcagtctctgtcttggctggacccaggtgggcagatcctcagatcagtgaaagtaatttttctcccaagtttaacgaaaaggatgggcatgttgagagaaagagcaagaatggcctgtatgagattgaaaatggaagaccgagaaatcctgcaggacggactggactggtgggccgggggcttttggggcgatggggcccaaatcacgctgcagatcccattataaccagatggaaaagggatagcagtggaaataaaatcatgcatcctgtttctgggaagcatatcttacaatttgttgcaataaaaaggaaagactgtggagaatgggcaatcccaggggggatggtggatccaggagagaagattagtgccacactgaaaagagaatttggtgaggaagctctcaactccttacagaaaaccagtgctgagaagagagaaatagaggaaaagttgcacaaactcttcagccaagaccacctagtgatatataagggatatgttgatgatcctcgaaacactgataatgcatggatggagacagaagctgtgaactaccatgacgaaacaggtgagataatggataatcttatgctagaagctggagatgatgctggaaaagtgaaatgggtggacatcaatgataaactgaagctttatgccagtcactctcaattcatcaaacttgtggctgagaaacgagatgcacactggagcgaggactctgaagctgactgccatgcgttgtagctgatggtctccgtgtaagccaaaggcccacagaggagcatatactgaaaagaaggcagtatcacagaatttatactataaaaagggcagggtaggccacttggcctatttactttcaaaacaatttgcatttagagtgtttcgcatcagaataacatgagtaagatgaactggaacacaaaattttcagctctttggtcaaaaggaatataagtaatcatattttgtatgtattcgatttaagcatggcttaaattaaatttaaacaactaatgctctttgaagaatcataatcagaataaagataaattcttgatcagctata

SEQ ID NO: 555819 - DNA, 1183 bp, Homo sapiens
gctcatccctcttggactgattttgatgtaaggtttcatattcatataatataatctcgtttttaaggataatctttttagagaaaactctttgtgtttatctaaaatttagggacttggttaaaatttggacattttggaatactctggttttttttcttttattcattctgctgaccagggatggaatggtctagtttttaattcacttggccggctagtacaatgatgatataagattattttaaataagaatacttgacgacatagatatgctaaaacagaaatgagtttttcttgggtgatggtttttctttgggcaaccagggtgaggataatgggataatcttatgctagaagctggagatgatgctggaaaagtgaaatgggtggacatcaatgataaactgaagctttatgccagtcactctcaattcatcaaacttgtggctgagaaacgagatgcacactggagcgaggactctgaagctgactgccatgcgttgtagctgatggtctccgtgtaagccaaaggcccacagaggagcatatactgaaaagaaggcagtatcacagaatttatactataaaaagggcagggtaggccacttggcctatttactttcaaaacaatttgcatttagagtgtttcgcatcagaataacatgagtaagatgaactggaacacaaaattttcagctctttggtcaaaaggaatataagtaatcatattttgtatgtattcgatttaagcatggcttaaattaaatttaaacaactaatgctctttgaagaatcataatcagaataaagataaattcttgatcagctataaaaaaaaaaaaaaaaaaaaaaaaaaaaaacaaaaaaaaaaaaagaaaaaaaaaaaaaaaaaaaaaagaaaagagaaagagaagacaaaaacaaaaaaagaagagcggcgggggcacaacaaaatatcacagcgggagagacagacgaaaacgaacgccacaagttgaaagaagcgagggcagcaacgaaggggttgaagaagaacggcgagaggcatcaacgaaggcgtggaagaccacaacggatcgtgaggagacacacacctcggggggagatgagagccccacgaaaaagagggcgggacaaaaaagggtggagagcacccaaatcgggaaagaggcgctaaaac

SEQ ID NO: 555820 - DNA, 278 bp, Homo sapiens
ttacggaatgcagtggtgtgatcttggcttacagtaactcggcctcctgggctcgagccatcctcccacctcagcctttcgaatggctgcaagcacgtaccaccactccaggctaattttttatttttttttggtagagatggggctttgccatgttgcccaggctggtctcaaacttctgagctcaagcggtcggcccgcctcagcctcccaggatgctgggatgacaggtgtgagccaccacccctggccctgtccactgctttatatttggctcc

SEQ ID NO: 555821 - DNA, 2060 bp, Homo sapiens
ggcggcgcggcgtaaagcgccattacgcagagagaaagttacgaggttcgtggccgcggtttccccaggcagctggcgctggaggcttcggcgtcacgtgctggtctggatttttctcgatgcactggggaaagcggtggactcttatcgtgggagggctcttgatctgtgatttatagataggcacagctactcccgttcgggaacccaacggcagacaggtcctagtgcccatcagatacccgcggccgggactcggagctgtggggtgtggggaggcggaggcaccaactaagagcgacctagcatcgcaaagccgccctcggggcgctcatggcgggacgcctcctgggaaaggctttagccgcggtgtctctctctctggccttggcctctgtgactatcaggtcctcgcgctgccgcggcatccaggcgttcagaaactcgttttcatcttcttggtttcatcttaataccaacgtcatgtctggttctaatggttccaaagaaaattctcacaataaggctcggacgtctccttacccaggttcaaaagttgaacgaagccaggttcctaatgagaaagtgggctggcttgttgagtggcaagactataagcctgtggaatacactgcagtctctgtcttggctggacccaggtgggcagatcctcagatcagtgaaagtaatttttctcccaagtttaacgaaaaggatgggcatgttgagagaaagagcaagaatggcctgtatgagattgaaaatggaagaccgagaaatcctgcaggacggactggactggtgggccgggggcttttggggcgatggggcccaaatcacgctgcagatcccattataaccagatggaaaagggatagcagtggaaataaaatcatgcatcctgtttctgggaagcatatcttacaatttgttgcaataaaaaggaaagactgtggagaatgggcaatcccaggggggatggtggatccaggagagaagattagtgccacactgaaaagagaatttggtgaggaagctctcaactccttacagaaaaccagtgctgagaagagagaaatagaggaaaagttgcacaaactcttcagccaagaccacctagtgatatataagggatatgttgatgatcctcgaaacactgataatgcatggatggagacagaagctgtgaactaccatgacgaaacaggtgagataatggataatcttatgctagaagctggagatgatgctggaaaagtgaaatgggtggacatcaatgataaactgaagctttatgccagtcactctcaattcatcaaacttgtggctgagaaacgagatgcacactggagcgaggactctgaagctgactgccatgcgttgtagctgatggtctccgtgtaagccaaaggcccacagaggagcatatactgaaaagaaggcagtatcacagaatttatactataaaaagggcagggtaggccacttggcctatttactttcaaaacaatttgcatttagagtgtttcgcatcagaataacatgagtaagatgaactggaacacaaaattttcagctctttggtcaaaaggaatataagtaatcatattttgtatgtattcgatttaagcatggcttaaattaaatttaaacaactaatgctctttgaagaatcataatcagaataaagataaattcttgatcagctataaaaaaaaaaaaaaaaaaaaaaaaaaaaaacaaaaaaaaaaaaagaaaaaaaaaaaaaaaaaaaaaagaaaagagaaagagaagacaaaaacaaaaaaagaagagcggcgggggcacaacaaaatatcacagcgggagagacagacgaaaacgaacgccacaagttgaaagaagcgagggcagcaacgaaggggttgaagaagaacggcgagaggcatcaacgaaggcgtggaagaccacaacggatcgtgaggagacacacacctcggggggagatgagagccccacgaaaaagagggcgggacaaaaaagggtggagagcacccaaatcgggaaagaggcgctaaaac

SEQ ID NO: 555822 - DNA, 339 bp, Homo sapiens
ggaggcagcgctctcgggaacgtctccacatgtggagacgggagggggggtcacgtgtgtcttggggtgtccgcgcgcggcagcgtctccttcccgttctccaggtatctgcggagccactccaggcacgtgccctccaggtaggctctccgctgctccgcctcaggggccgcctcccattggcgcggggtgatctgagccgccgtgtccgcggcggtccaggagcgcagatcctcgttcagggcgatgtaatccttgcggtcgtgggcgaacgggttatacccggggaggaggcgccggtccggccccaggtcgcagccaaacatcctcggggggggg

SEQ ID NO: 555823 - DNA, 496 bp, Homo sapiens
tagattcttgccatcatttattaattgaagcacagagattagaggcaaaatgatttaaggaatttatgtcccatagacagggagtggtctatcctccaactagaaaaaaaaacaggtgaatctgctttcgacctgggatgctttctgttattcttatggatgggtgagacgcttttaaatgagatgccataagcctaagggggcttgacttggaccaacaagttttttaccctcctttctatggcttgtttacttatgggcaggcttgcattacttgtctacaaaagctgaaaaatcatccattaccgctttcagaagctcttttggtgccttgggcttgtgttcaacaagcttaacacgagcagttgtgttccagatcttgcggtccttataaacaagtgtgcatatatttgccttgaaggtgaatgttgtattttttaagtgtccaggaactgttgtttgattgactttcagagataaccagggtggcttcctg

SEQ ID NO: 555824 - DNA, 1374 bp, Homo sapiens
ggcggcgcggcgtaaagcgccattacgcagagagaaagttacgaggttcgtggccgcggtttccccaggcagctggcgctggaggcttcggcgtcacgtgctgaaactcgttttcatcttcttggtttcatcttaataccaacgtcatgtctggttctaatggttccaaagaaaattctcacaataaggctcggacgtctccttacccaggttcaaaagttgaacgaagccaggttcctaatgagaaagtgggctggcttgttgagtggcaagactataagcctgtggaatacactgcagtctctgtcttggctggacccaggtgggcagatcctcagatcagtgaaagtaatttttctcccaagtttaacgaaaaggatgggcatgttgagagaaagagcaagaatggcctgtatgagattgaaaatggaagaccgagaaatcctgcaggacggactggactggtgggccgggggcttttggggcgatggggcccaaatcacgctgcagatcccattataaccagatggaaaagggatagcagtggaaataaaatcatgcatcctgtttctgggaagcatatcttacaatttgttgcaataaaaaggaaagactgtggagaatgggcaatcccaggggggatggtggatccaggagagaagattagtgccacactgaaaagagaatttggtgaggaagctctcaactccttacagaaaaccagtgctgagaagagagaaatagaggaaaagttgcacaaactcttcagccaagaccacctagtgatatataagggatatgttgatgatcctcgaaacactgataatgcatggatggagacagaagctgtgaactaccatgacgaaacaggtgagataatggataatcttatgctagaagctggagatgatgctggaaaagtgaaatgggtggacatcaatgataaactgaagctttatgccagtcactctcaattcatcaaacttgtggctgagaaacgagatgcacactggagcgaggactctgaagctgactgccatgcgttgtagctgatggtctccgtgtaagccaaaggcccacagaggagcatatactgaaaagaaggcagtatcacagaatttatactataaaaagggcagggtaggccacttggcctatttactttcaaaacaatttgcatttagagtgtttcgcatcagaataacatgagtaagatgaactggaacacaaaattttcagctctttggtcaaaaggaatataagtaatcatattttgtatgtattcgatttaagcatggcttaaattaaatttaaacaactaatgctctttgaagaatcataatcagaataaagataaattcttgatcagctata

SEQ ID NO: 555825 - DNA, 1316 bp, Homo sapiens
ggcggcgcggcgtaaagcgccattacgcagagagaaagttacgagaaactcgttttcatcttcttggtttcatcttaataccaacgtcatgtctggttctaatggttccaaagaaaattctcacaataaggctcggacgtctccttacccaggttcaaaagttgaacgaagccaggttcctaatgagaaagtgggctggcttgttgagtggcaagactataagcctgtggaatacactgcagtctctgtcttggctggacccaggtgggcagatcctcagatcagtgaaagtaatttttctcccaagtttaacgaaaaggatgggcatgttgagagaaagagcaagaatggcctgtatgagattgaaaatggaagaccgagaaatcctgcaggacggactggactggtgggccgggggcttttggggcgatggggcccaaatcacgctgcagatcccattataaccagatggaaaagggatagcagtggaaataaaatcatgcatcctgtttctgggaagcatatcttacaatttgttgcaataaaaaggaaagactgtggagaatgggcaatcccaggggggatggtggatccaggagagaagattagtgccacactgaaaagagaatttggtgaggaagctctcaactccttacagaaaaccagtgctgagaagagagaaatagaggaaaagttgcacaaactcttcagccaagaccacctagtgatatataagggatatgttgatgatcctcgaaacactgataatgcatggatggagacagaagctgtgaactaccatgacgaaacaggtgagataatggataatcttatgctagaagctggagatgatgctggaaaagtgaaatgggtggacatcaatgataaactgaagctttatgccagtcactctcaattcatcaaacttgtggctgagaaacgagatgcacactggagcgaggactctgaagctgactgccatgcgttgtagctgatggtctccgtgtaagccaaaggcccacagaggagcatatactgaaaagaaggcagtatcacagaatttatactataaaaagggcagggtaggccacttggcctatttactttcaaaacaatttgcatttagagtgtttcgcatcagaataacatgagtaagatgaactggaacacaaaattttcagctctttggtcaaaaggaatataagtaatcatattttgtatgtattcgatttaagcatggcttaaattaaatttaaacaactaatgctctttgaagaatcataatcagaataaagataaattcttgatcagctata

SEQ ID NO: 555826 - DNA, 1658 bp, Homo sapiens
ggcggcgcggcgtaaagcgccattacgcagagagaaagttacgaggttcgtggccgcggtttccccaggcagctggcgctggaggcttcggcgtcacgtgctggtctggatttttctcgatgcactggggaaagcggtggactcttatcgtgggagggctcttgatctgtgatttatagataggcacagctactcccgttcgggaacccaacggcagacaggtcctagtgcccatcagatacccgcggccgggactcggagctgtggggtgtggggaggcggaggcaccaactaagagcgacctagcatcgcaaagccgccctcggggcgctcatggcgggacgcctcctgggaaaggctttagccgcggtgtctctctctctggccttggcctctgtgactatcaggtcctcgcgctgccgcggcatccaggcgttcagaaactcgttttcatcttcttggtttcatcttaataccaacgtcatgtctggttctaatggttccaaagaaaattctcacaataaggctcggacgtctccttacccaggttcaaaagttgaacgaagccaggttcctaatgagaaagtgggctggcttgttgagtggcaagactataagcctgtggaatacactgcagtctctgtcttggctggacccaggtgggcagatcctcagatcagtgaaagtaatttttctcccaagtttaacgaaaaggatgggcatgttgagagaaagagcaagaatggcctgtatgagattgaaaatggaagaccgagaaatcctgcaggacggactggactggtgggccgggggcttttggggcgatggggcccaaatcacgctgcagatcccattataaccagatggaaaagggatagcagtggaaataaaatcatgcatcctgtttctgggaagcatatcttacaatttgttgcaataaaaaggaaagactgtggagaatgggcaatcccaggggggatggtggatccaggagagaagattagtgccacactgaaaagagaatttggtgaggaagctctcaactccttacagaaaaccagtgctgagaagagagaaatagaggaaaagttgcacaaactcttcagccaagaccacctagtgatatataagggatatgttgatgatcctcgaaacactgataatgcatggatggagacagaagctgtgaactaccatgacgaaacaggtgagataatggataatcttatgctagaagctggagatgatgctggctcaattcatcaaacttgtggctgagaaacgagatgcacactggagcgaggactctgaagctgactgccatgcgttgtagctgatggtctccgtgtaagccaaaggcccacagaggagcatatactgaaaagaaggcagtatcacagaatttatactataaaaagggcagggtaggccacttggcctatttactttcaaaacaatttgcatttagagtgtttcgcatcagaataacatgagtaagatgaactggaacacaaaattttcagctctttggtcaaaaggaatataagtaatcatattttgtatgtattcgatttaagcatggcttaaattaaatttaaacaactaatgctctttgaagaatcataatcagaataaagataaattcttgatcagctata

SEQ ID NO: 555827 - DNA, 772 bp, Homo sapiens
  misc_feature (772)..(772): n is a, c, g, or t
gaaaccttggggaaacgggcccttgcagaacgaagtgtcataagagggaggagatcattgaggtgacccagaaaagtctcttgttgaagaagacagacgtacctcaagggagtagatataaagaggaaagcacactctcttcatttgagagatgctgagctaactttcgcgaatcaggactagcatgacctcctggtaccccatctgagatgtgcatttttagcaaggtacgaggggtggatcaatgttgaagagagagagaggctccaattgggcgacgggcacagtgcaacacggagggaagagcagaagcggtggaagcaacatgatcggggtaacgacaacggaaatggacaatgaacagcattccatcacacaatggcttacccccacaagggactctggaggggcaccatgaggcaaccccgacagcgacggatacaccatcgagacgggacacaaaagggaacctagaacaacccgcgccggagtacacactaagtgcaacacggagcgcaaccacacataaccaacgtagcacgaagcgggaacaccaacctgggtcacaacacgcacaaccaggtaccacttacagcgtgcgcagatcaccctccaccagcgttcccccaggcaagcaggacgaacacagtgggggaactaaaatccaggggaacccgacacctggcacataggacaaccatccctcgaagcaaagcagaatcagggaggacaagcctaaacccataaatggggcactggaaagaacagtccn

SEQ ID NO: 555828 - DNA, 205 bp, Homo sapiens
taggaggtagcgtcctaaggtcgctatggatttctctacaggataatgaaaggttctacaagttactgctatgtgatccatgcacagctcttttattattctaataccctactgaatttgctgattttctttaaattcagtccatttaatagggtattgtgaatccatcatatgttctcctattttgcctacacactacattcca

SEQ ID NO: 555829 - DNA, 989 bp, Homo sapiens
agtctttcggccgccctttttttcaagctatgcactttatgattcaaaacagcgttgtcaggatccataaactttttcagaagctccggggcaggtgttaaattttcggattcccaggcatctctcctagagattgtccagatggaaaagggatagcagtggaaataaaatcatgcatcctgtttctgggaagcatatcttacaatttgttgcaataaaaaggaaagactgtggagaatgggcaatcccaggggggatggtggatccaggagagaagattagtgccacactgaaaagagaatttggtgaggaagctctcaactccttacagaaaaccagtgctgagaagagagaaatagaggaaaagttgcacaaactcttcagccaagaccacctagtgatatataagggatatgttgatgatcctcgaaacactgataatgcatggatggagacagaagctgtgaactaccatgacgaaacaggtgagataatggataatcttatgctagaagctggagatgatgctggaaaagtgaaatgggtggacatcaatgataaactgaagctttatgccagtcactctcaattcatcaaacttgtggctgagaaacgagatgcacactggagcgaggactctgaagctgactgccatgcgttgtagctgatggtctccgtgtaagccaaaggcccacagaggagcatatactgaaaagaaggcagtatcacagaatttatactataaaaagggcagggtaggccacttggcctatttactttcaaaacaatttgcatttagagtgtttcgcatcagaataacatgagtaagatgaactggaacacaaaattttcagctctttggtcaaaaggaatataagtaatcatattttgtatgtattcgatttaagcatggcttaaattaaatttaaacaactaatgctctttgaagaatcataatcagaataaagataaattcttgatcagctata

SEQ ID NO: 555830 - DNA, 705 bp, Homo sapiens
cgcgcccagagatgggctccaagggcaaacgaaagcggctgtgctagctgcctcagcccgcacgcccacgtgacagactgagatgcggtgcgcgcagagtcaatgtcactctgccgagacccagtccttcaggatatgagtgcggagcccggagagcagtctacagcaagcgggttacgtggtgcacagcggctgcgcaggcggcacgtgctgaggcaaggtgtgagctcctgcgcgagccggcgaggactggagcgggaggtggcccaataagcaggcgcttaccggcagcgaggctggctcctcaggctgacctctcgggcctgcggcttgggcgcgccaagtggcctgccccaggctttccctgggggtccgtcggccccagactggcattcacgggtcccagcccacgtgggtgttgacacaggcgcccctcctgatgctgggctgcggttcatccgtcgtctcattcatgccgagttggtgggacccacccagctggctccgtcctgcgtgacctgagggccccactgcggttctggaaaggatagggacttattgctgtactgtgattctgtcgtcgctcacagtggcgtgctctggtgcggccctggagcggtgccactcctttctctcccgggcaggcactcgctgtcacttctgagtcagtgttgggatcgagtgttaactgtgattctcaggtgc

SEQ ID NO: 555831 - DNA, 312 bp, Homo sapiens
ccgagatgcgggtcacggcgccccgaaccgtcctcctgctgctctggggggcagtggccctgaaccagaactggggccgcttccacttcaatgtggtatttctaaaacccccatgtccccggcccgcccggggggagcccttttaatggaagtgggttaggtggagcgaaacccagtttgttgagtttttgacagacagcccgcgagtacccagaagcagaccgcgggcatatggatagataaaggtggagccgcattatttggaacccaaacacagttttatagcgagacacaaacgattttcgtccgaca

SEQ ID NO: 555832 - DNA, 1256 bp, Homo sapiens
ggcggcgcggcgtaaagcgccattacgcagagagaaagttacgaggttcgtggccgcggtttccccaggcagctggcgctggaggcttcggcgtcacgtgctggtctggatttttctcgatgcactggggaaagcggtggactcttatcgtgggagggctcttgatctgtgatttatagataggcacagctactcccgttcgggaacccaacggcagacaggtcctagtgcccatcagatacccgcggccgggactcggagctgtggggtgtggggaggcggaggcaccaactaagagcgacctagcatcgcaaagccgccctcggggcgctcatggcgggacgcctcctgggaaaggctttagccgcggtgtctctctctctggccttggcctctgtgactatcaggtcctcgcgctgccgcggcatccaggcgttcatcctgcaggacggactggactggtgggccgggggcttttggggcgatggggcccaaatcacgctgcagatcccattataaggggatggtggatccaggagagaagattagtgccacactgaaaagagaatttggtgaggaagctctcaactccttacagaaaaccagtgctgagaagagagaaatagaggaaaagttgcacaaactcttcagccaagaccacctagtgatatataagggatatgttgatgatcctcgaaacactgataatgcatggatggagacagaagctgtgaactaccatgacgaaacaggtgagataatggataatcttatgctagaagctggagatgatgctggaaaagtgaaatgggtggacatcaatgataaactgaagctttatgccagtcactctcaattcatcaaacttgtggctgagaaacgagatgcacactggagcgaggactctgaagctgactgccatgcgttgtagctgatggtctccgtgtaagccaaaggcccacagaggagcatatactgaaaagaaggcagtatcacagaatttatactataaaaagggcagggtaggccacttggcctatttactttcaaaacaatttgcatttagagtgtttcgcatcagaataacatgagtaagatgaactggaacacaaaattttcagctctttggtcaaaaggaatataagtaatcatattttgtatgtattcgatttaagcatggcttaaattaaatttaaacaactaatgctctttgaagaatcataatcagaataaagataaattcttgatcagctata

SEQ ID NO: 555833 - DNA, 302 bp, Homo sapiens
  misc_feature (141)..(141): n is a, c, g, or t
  misc_feature (266)..(266): n is a, c, g, or t
  misc_feature (280)..(280): n is a, c, g, or t
aaaagtgttgtaagagactcctgaggaagacacacagtttatttggaaagaagctctgtgagagccaccatgccctctgcccatgcctcttgggactgaccaggagcagctcatgggcgtgagagtgggaaccatctcccngcggcagtggcttccgcgtgccccgtgagctggagcggttcccaacaaaacagacaggaagggtgtttgcgaaatatgatcaactggaacccctggatcaagcggctgaattccctttttccctnacccaaaaaaagcnacaccagaccgaaaaaaaaaaa

SEQ ID NO: 555834 - DNA, 1977 bp, Homo sapiens
ggcggcgcggcgtaaagcgccattacgcagagagaaagttacgaggttcgtggccgcggtttccccaggcagctggcgctggaggcttcggcgtcacgtgctggtctggatttttctcgatgcactggggaaagcggtggactcttatcgtgggagggctcttgatctgtgatttatagataggcacagctactcccgttcgggaacccaacggcagacaggtcctagtgcccatcagatacccgcggccgggactcggagctgtggggtgtggggaggcggaggcaccaactaagagcgacctagcatcgcaaagccgccctcggggcgctcatggcgggacgcctcctgggaaaggctttagccgcggtgtctctctctctggccttggcctctgtgactatcaggtcctcgcgctgccgcggcatccaggcgttcagaaactcgttttcatcttcttggtttcatcttaataccaacgtcatgtctggttctaatggttccaaagaaaattctcacaataaggctcggacgtctccttacccaggttcaaaagttgaacgaagccaggttcctaatgagaaagtgggctggcttgttgagtggcaagactataagcctgtggaatacactgcagtctctgtcttggctggacccaggtgggcagatcctcagatcagtgaaagtaatttttctcccaagtttaacgaaaaggatgggcatgttgagagaaagagcaagaatggcctgtatgagattgaaaatggaagaccgagaaatcctgcaggacggactggactggtgggccgggggcttttggggcgatggggcccaaatcacgctgcagatcccattataaccagatggaaaagggatagcagtggaaataaaatcatgcatcctgtttctgggaagcatatcttacaatttgttgcaataaaaaggaaagactgtggagaatgggcaatcccaggggggatggtggatccaggagagaagattagtgccacactgaaaagagaatttggtgaggaagctctcaactccttacagaaaaccagtgctgagaagagagaaatagaggaaaagttgcacaaactcttcagccaagaccacctagtgatatataagggatatgttgatgatcctcgaaacactgataatgcatggatggagacagaagctgtgaactaccatgacgaaacaggtgagataatggataatcttatgctagaagctggagatgatgctgggagatgcacactggagcgaggactctgaagctgactgccatgcgttgtagctgatggtctccgtgtaagccaaaggcccacagaggagcatatactgaaaagaaggcagtatcacagaatttatactataaaaagggcagggtaggccacttggcctatttactttcaaaacaatttgcatttagagtgtttcgcatcagaataacatgagtaagatgaactggaacacaaaattttcagctctttggtcaaaaggaatataagtaatcatattttgtatgtattcgatttaagcatggcttaaattaaatttaaacaactaatgctctttgaagaatcataatcagaataaagataaattcttgatcagctataaaaaaaaaaaaaaaaaaaaaaaaaaaaaacaaaaaaaaaaaaagaaaaaaaaaaaaaaaaaaaaaagaaaagagaaagagaagacaaaaacaaaaaaagaagagcggcgggggcacaacaaaatatcacagcgggagagacagacgaaaacgaacgccacaagttgaaagaagcgagggcagcaacgaaggggttgaagaagaacggcgagaggcatcaacgaaggcgtggaagaccacaacggatcgtgaggagacacacacctcggggggagatgagagccccacgaaaaagagggcgggacaaaaaagggtggagagcacccaaatcgggaaagaggcgctaaaac

SEQ ID NO: 555835 - DNA, 115 bp, Homo sapiens
aaccacaggacatggcaaaaggatgagagaggggaaaaggcctcaggatgggacataaagtgcaaaagtctcttacacgtctgcctgtgctagctggagtacaggatggagagcg

SEQ ID NO: 555836 - DNA, 605 bp, Homo sapiens
attaatcccctggcccaacccgtcatctactctaccatcttgtgcaggcacactcatcacagcgctaagctcgcactgatttttatacctgagtaggcctagaaatacaacattgctagctttatattccagttctaagccagacaaaaataacacccctcgttcccaccagaaagcgtggccactcagagtatttccttcagcgcaaggcaaaccgcattccattacatccttctaaatagctatccttcttcacaaccaattatacttctccgggcaccaattggaaacaataaaccaaataacttaagcgaaaatcaaaatcacctctatccatgccaattacattccatcacatggcgcttatcacgcacatagcaaacctaaggggaatcagccccccttttcaatttcttggagtcccacgacggttaccccaagggaacccccttctggacatccggagcctgtgcttcattctcacatgacgaaaaacattaggccccccatcttcatatcatattacccaaatcttctcccttcagtaaaccgtaaggccttctccttcactctctcaatcttatccatcatagcacggcagttgg

SEQ ID NO: 555837 - DNA, 1530 bp, Homo sapiens
  misc_feature (456)..(456): n is a, c, g, or t
tatctggtctgcccggatggtgatgtgcagtccagaaaggtggggccgcttgggatccgacttgtctcccattagatgactggataatgggccaatatgagctcgatgcacatcgctgtactatgagaggtttctattgcctccacggactagtgcaatggtcgagtgtggggtggtaagaggcacgtgtcagacgatgcactaagacacgtgcacagatacgtgagggctaggaaattccgtctctagcttgaattgcctacgatgagatttaagatatatacacttaagcatgcgtactaggacactacagcaaagtaaaggttaattgacaaagcaagcgagggggggtcgactgcttctattcgcataagacctccatctccgtgttagtggcaaggtttcgtgagaatagtacttggtcgccgcgaagaaagtgcaacactcgatggaatngtggtacagttctctgagttggcgcgagatttgcgcaacaagataaagattgttgcataaccctgttggtaggcaataacgagtacgcgggacgaaatcgcttttgggaagaattgccaccatttaaattgaggcagtggtctctaattctagaaaccagcgttatggatgttgtcttgcaccgggtggggacaaaacgaacaaactatggaactacgagtcggacattaccttctatgacactaaaatagttattagaccattctttcgtgtgaaattagcgcaaagggcaaagggttaggtcctcttaagactaagtatgtatctaccggagtggtggggaagtgtaagacctgggccccaatttaatccacaacattgccatgcaaatccgccgcagtcccctctaattgtcaaattcaaattcatttagtaatccattagatcaagggtggcaccccacataatttcgcgcaaatttcgacccacagtcgcaagaaattctagtcctccttgtggaggaccctttttaacccaaatattggcgctacataagtccaagtcgggggggtgtttgccaggtcgggcgaaccatacatttcccgccacaatgcttataatccacgctaggttacaacttttttttggtgtgacagagcgccaatatttgaagcgaagggagaaccaggggagagagaccctacggtgagacgcactctaccactaatcctatattaccatggtgttttaggatagcattgtgtgggatcaggtcgggatccgcacgacattaattggaccaaaattaccttatgtttatatacgaagctgggtgggcaaattggtttggggaaggttgcctggtcagtgggatatgggaaccctcaattgacgaagggcgtgccctttggacaaacttttgcacggggggaaggtattacatagcgtttcgtggggcacaccacattctggcggagtggagagaacgctgtgcgttgtatatatgcgagaaaaaatagctctcaccaattttagaacattaatcactggtgggtagacattgagattccgcgg

SEQ ID NO: 555838 - DNA, 2250 bp, Homo sapiens
ggagagaactagtctcgagtttttcgttttttttttttggaaaaagtcatggaggccagttggggttggtttaaaaccagcttgtgggggtggttcgacttccttcctttttgtgtctagaattttattgtttatacgcgggttctctcccgacgtgtgtggtgtcatagcggtctggggttgccatccactactagtcaccctcacaggtttcagtggcagtgttccttactacctacttaggcactattcgcgcctatcgaaagccgaacagcgccttactcaaattcagtgaacaattatcttcataactatctacttgcgcgggtaacgaagaacacgacgaactggacgccataccaagatagatcacagatcgtccccatggtggcgctgttacccgcatccgaggggaaagctccaaaaagacaaacgatccggagaccaatccaccagcaataccggccaagagacaacgccgtacgtcggacaacacaaacagtccagactcaaacacgcccggaatgacaaatattagacacagagagaacagcgaacaataggggcagaaacagggactacggaacacaacgggtagactcaacccaagctacaaactacgaggcacacaccaccgcggacacaccgaacgcacacccatatacagaggtgaacagactacaaaccacacaacattcaaaccaacagcacaccaacaacgagaaagacgcaaccaacaaaaccgaaaaagaaaagataaactatgtcactaacaccaccagccaaactacaaaacaaagaacaaaagaaataacaagaatagcaatcatcaacacaccaactaacacaacacacaataattcgcataaaatagctcaaaatataaaagacaatcaaaaacataacaaccatacataaatctacacaaccaacacacaaataaaacacaaacatagattacaattatttattagaatacctactttcttttcttctgcatcgtcacacatcataacactcatatcaaatatataacttaatcaaaataatagacaaagatatttctggttataatgaataatagtatataatgtgataatataagaagtagtaaagcatctcagtactaatatctctaatctcactaccacaatcaaatacaaaataatcctacaatatagaaataaaggaaataaacaactaattcatgtaacgtaaatcaagaatcattacaaaacataacaaagaaacgtcagaaagtaacaaataaacacgaactatgacagactaaaaaacacaagaataataaacaaaacgaggaagaccgtataacaagacagtgaagagacgaggagagaaaggtagagacgacagaggacttagcgtgacggaagcactaagagaacagtaatactgaagaaaaagctagaaagaaaggacaaaagtaaagagccgcgaaggaagaacggaagacgagagataaagagttggagcaatagtagacgacagagctagtaagaggagagaaacagaataacagagatgaatacagaggaaaagtgactggaaagagagagatagtgtggaataagacttcgagtagagagaaggtagagtgagacgacaggagaaagagaggagagcgaacagagacgaagacaggaagaatagcaaagagacgagaaagatgtagagtagttgatagtaggacagagaagagagacgaggcaatgatcgagtaagacagatagatgagatgaggagtcacgagaacatagctgaaggcagcaaagagattcgggagaagagcaagtgatgaaagagaggaagacagagcgaacgaatgagcgcagtaggaagaagtgtacggaaataggagagagaacgagagataagaagagagggtagagacaggaaggaagcaaacagagagaagcataaagcaagaaaagacgcagagaaggagacgagatcagagacaagcagatacactagagaagcgagcagcagcggagagtgaacgaggaagggagaactagtgaagaaacaggaaagaacaagaacgatcagaaaagagagggcgcaggaagggagaagataaacaagaaagaagagacaacagaaagaaagccaaagcgaaacgacgagcaaagaaggagaagaaacgcaacagaagaacaagaagtgtccaagacaagaaagtgacgaaaggagcatagagaacagagcaaagaagagaaaggagaagta

SEQ ID NO: 555839 - DNA, 788 bp, Homo sapiens
  misc_feature (22)..(22): n is a, c, g, or t
  misc_feature (62)..(62): n is a, c, g, or t
  misc_feature (92)..(92): n is a, c, g, or t
  misc_feature (156)..(156): n is a, c, g, or t
  misc_feature (165)..(165): n is a, c, g, or t
  misc_feature (172)..(172): n is a, c, g, or t
  misc_feature (272)..(272): n is a, c, g, or t
  misc_feature (276)..(276): n is a, c, g, or t
  misc_feature (287)..(287): n is a, c, g, or t
  misc_feature (296)..(296): n is a, c, g, or t
  misc_feature (326)..(326): n is a, c, g, or t
  misc_feature (365)..(365): n is a, c, g, or t
  misc_feature (369)..(369): n is a, c, g, or t
  misc_feature (471)..(471): n is a, c, g, or t
  misc_feature (489)..(489): n is a, c, g, or t
  misc_feature (538)..(538): n is a, c, g, or t
  misc_feature (584)..(584): n is a, c, g, or t
aatttaagagaataatttaaanttatttagataatgattttttagaattaaaaaaaattganaggaaaaattgaagtattaaaataaattgnggggggtgggggtggggattatgtttaatatatatgttgttttttaataaattaaaggatctgngtgcaagantttttanatgagggagtagtgcacttttatttagtaggagtaaattagataaaatatatagttttataaagatagtgttattgtgttgttatttttaattatttatnaaanttttatttganttgtaaaanagttttttttaaaattgataatttccagangatagggcttagaattgtttaaataatttattataaatnattnggtttttatttattcatagattaaaaaaactatgaagaattatgttatttaagtgggatatttaaaattttttttataggaaaataggtttacatgtttgtncctagttagctaaatttnccaccccccaactttaaaacagattacaggatgttcaaagttttaaatnagagtacctatattacagtacagtgtggatatgtttccattaattnattttatgtctcattctattatagtatcaaattagcaaaaaggcacctgggtacattcttcagaacagttttggtcatttaaaaaaaatcacacatttataagcagtgatttcaatcatgtttaaaaacaaaaatattaaacaaattcatttcctaatccagatgatacagaatccaagaaatttctgtaggcacttcactttc

SEQ ID NO: 555840 - DNA, 875 bp, Homo sapiens
atagtacttgccgcagtactcttgaaactaggcggctatggtataatacgcgctcaccactcacttcctcaatccccgcatggacagaagacacatagcctaccccattccttgtacgatccctatgaggcataattataacaagctccatctgcggtacgagcaagacagacctaaaatcggtgcattgcatactcgttcaatcagccacatagccgctgcggagtaacagccatgtctcatcgcaaagcccctgaagcgttcaccggcgcagtcattctcgataatcgcccacggacgttacatcctcattactattctgcctagcaaagtcaagagtacgaacgcactcacagtcgcatcgataatcctctctcaaggacttcaaactctactcccactaatagctttgggatgacttctagcaagcctcgctaacctcgaccttgacccgccactattaacctactgggagaactctctgtgctagtaaccacgttctcctgatcaaatatcactctcctacttacaggactcaacatagtagtcacagcctatactccctctacatatatagcacaagacaatggggctcactcaccagcacattaacaagataaaagcctcattcacacgaagaaaacaaccgtcatgttcatacagctataccccaattctcctcctaatcctcaagcccgacatcattaccgggtttgccgtccagaaaaaaaaaaacaaaaagaaaaaaaaaaaagttgcggcgacacgcgcccacagaaggctataaagacacagaagaggaggagcggccacaggaggcaaggacaacgagaagacggggaacaaagaggaccgggagcgagacaaagcggaga

SEQ ID NO: 555841 - DNA, 185 bp, Homo sapiens
aagcgttctaatcaggttgcaggtattagaggtactattttcatacctctattctctgatcattctatttaaagcatatgttcttggaaaatagtctgaaatgcagtgttttagccctacactttggaatagggcccaggaatctaaaacgaaccactgcctagaacctagcatctggggaaatc

SEQ ID NO: 555842 - DNA, 427 bp, Homo sapiens
  misc_feature (154)..(154): n is a, c, g, or t
gaaatctgatgtaaacatcactgcacagaaggatatacatgtatagactgatgaaatgtgacattaatttagagaaggggccaggtgcagtggtcatgcctgtatccagcatttgggaggctgaaggaggtggatcattttgaggtcaggagtntgagactagccgcgacaagatggtgaatacccatccctacaaaaaaatacaaaaactagccgggtgcggtggtgtgcacctgtagtcccagctactcgggaggctgaggcatgagaatcacttgaacccaggaggcagacgttgcagtgagctgagatcatgccactgcactccagcttgggcaacagtgagattctgcttaacaaaaaaaaacaaaaaggtttttagagagggaaagacagtggtttgaccccaccattgagaaccacggtt

SEQ ID NO: 555843 - DNA, 206 bp, Homo sapiens
agagcaggagtgcgagatgatgtgctcatagctcactgcagccttgaacaccttagcttgtgaacctcccacctcagcctcctgagtagccaggactataggcaggcacatgcctgactaatataaaaatacatggtagagacagcgtctcaatatgttgcccaggatggtcttgcactcctggactcaagcgatcctcctacctt

SEQ ID NO: 555844 - DNA, 1511 bp, Homo sapiens
  misc_feature (562)..(562): n is a, c, g, or t
  misc_feature (865)..(865): n is a, c, g, or t
gatgtccggtggaccggtgactaacgtcgacatgcatccggcttcccactgtggtatggagagctgagttgggcatgtgtcgctcgcagtcacagcactccgtacggcagtcctatccttcactcttcgcttcccccaagtcatgcagtgcgcttattaactggacaatcgacggcaaaacgtgagatgtgaagtcagctgaaggagtgcatgcgacagagactacaatggagaggggagggcagggcgtggcaccggatgcttgtccccggcaatccctgtctgagttccctttcatccgctgctgcaagcatttcacttatcgaccatggggtgtaatatcaatttatccatccaatgtatgagctcaaaatcagaaattcactgttcaattctatagactcctaccatgggtaattcggcacaattcacaattgggtgaccttgaccttgcataatctgtatgtttagggacaccggaagtaaaacagcggagagcaaactcctaggctctctgtgcaaattggttccctccaagtaaattatggaacaccctactttnatatggcaaaggtttaccaccacagcgctcgcaggccatagggggcattggtcctcttctttaccagctataggaaacatatggtctcggtacctatagttggtataacaaaccgattttccgtaaaggacccattctaaattcgaaattactcttatggtatgtccaattttactaagagacaagatttctattggtccatacacatgacatggttggtcccgcaatcttttatcagagcctttaatttaaggaaaaggtagggcgttcatatacttcccgagataggcgagctttattttntccaccaatttcttacataaggtcaagctggtttcattgcaaccaacaggggcgtgggtggtataacttttaacgagaaattttagggagttattgaaaattttctggcggaacttttctagaaggtcaatttaagattattatttgccaatattgttgatagggcaaaaacacttttagtatctttaccctccactggctttaagagttcgtttcctgaattatatcccagggaaatcgcggggaattgaattacccgtgaataagaattggtctccctttctgggggggtcaagactatcacaactttattttttcacactttttctcggcggaggattatcgatctttccacacgcacagtccaacagtactccttagttaagaggtgcacaataggcgtaaactggtttcttccaactttgtcatatgtcagttgggcgctaccagtagtttttaacgagacaactccggggatgtattgccaactatcattagacactgtggaatgtacagaaacacgcgtcgtcaccctaatgtaaatgatattggcgcccataagcacacgggatgaagaatagaccatctccgtacaaaactcttgcggctatatttatgcaaacaaacacacaagacaggggtaccc

SEQ ID NO: 555845 - DNA, 286 bp, Homo sapiens
acaatgtctagagagtgatctagtgggtttttttgagacagagttactctatcgcccaggctggaatgcagtggaaatctcggctcactgcaacctccgcctcccaggttcaagcgattctcctgcctcagcctcccaactagctgggattacacgcacccaccaccatgcccggctaatttttgtatttttagtagatacagggtttcgccatgttggccatgcttgtcttgaactcctgacttcacgtgatccacccgccttggactccagcgtgctgatacaa

SEQ ID NO: 555846 - DNA, 321 bp, Homo sapiens
aatctagagtatcccgccctgcacggatactcatctagcatcgaagaggccttagcccagagaaggcttcaacctttctgcccccaaatgctcaattgactgcattttatatattttattatagtgcagacagtttttggttcatctcagtttctcttactttgctgctgcttttactagagatggctggaccagttaatgagaaacacccgaattttcacagcaatgttcatatgttccacataccacagagtttctattttggccttaaatcatactgttttatccagcatgattcacctggattcgagattatttcat

SEQ ID NO: 555847 - DNA, 94 bp, Homo sapiens
tgaccacaacaagcaagcatgcagcttactgcttgaaagacagggtcttgcctcacccaaagcatagagtgcagtggcctttgaagcttactac

SEQ ID NO: 555848 - DNA, 444 bp, Homo sapiens
gtttgtatcatgtacacaagaatgaacgcaagggacaaaggtagtgccacgctccctggccactgggttcctggcaaacatcccagccactaggtgccatatctcccttcaatgtactccttcttcccctgagttgcagaagcgtttcaagacagttatgacatggacacatgcatgagctattatacataattactaaaagctgattctgtcatcaccacattttgtctcatcagtaggagcgaatggctggcgggacggtgtgcttcctccagtgctcctcaaagggcttcttctgttgcccctggatgggcttggagtaatcgtactcatcaatccgcaccttgtagtcttccctggcatgcgcgccccgtgactccttccgtgcctctgctccgtagatggtctgcagcgcacacagcatcaggttctgcagctccaggg

SEQ ID NO: 555849 - DNA, 156 bp, Homo sapiens
  misc_feature (12)..(12): n is a, c, g, or t
agaggatccccncatcatcgatacagttggtgatgataggcctacgaacaccgacagctgcttggatgatctcgaacgcgtaggctgcgcagcagctgatcgatcacgatcaccagcgaggcgatgatcgccatctgcacgataatgcgcacgctg

SEQ ID NO: 555850 - DNA, 374 bp, Homo sapiens
tgttcatgagctttaataaaacagctctgagtagtaacagtggatcaaatttaggcttcttgatgcaggcatggtgtagattactacttctgtattgtcccaggagctcagcacattccttgccagagatgataaggagctcaatcttgaatacttgttcaagcttttgaataaaaaaccacagttcctcaaagaagaagaagaattgcgaaatcaccggaaataaccgaaaacttccccctgtttgactttcaacattcttgaatgcaccaagatagcctctttctgtgagattaataaatgaataaatgcctccatatttttcaatctgtgaagttaacaacatgttagatttttttgcatattttaaaact

SEQ ID NO: 555851 - DNA, 385 bp, Homo sapiens
ggtgatgggtggtgcaggttccagctgtgaaagtgcttgagctggagaggggatctaccaggtgcggactctgtgtccatccggggtgggcctcctaggcctgcatcggggttgggcagcctcagttcttgtgtgcgaagggacctgctcgtgctgtggccaccaccttgccatcgtgcacatccatgaccttggtgcgcatttggcggctggaggaggtcacatctcgtggattcattgcgatccaaaaggagcacactgggagagagtgagaggtgggcgtcctcggccctcctaccaggccggcggtagcgtggcgatctccgtgctcctagccgcgtcttccacggtcctagcacggtatcttgtacgtccttggttctcg

SEQ ID NO: 555852 - DNA, 270 bp, Homo sapiens
atgggaaaggaggcgcggacttcgtatgtcagtagttctttgatgtgaaaggggcagcacagtcatttaaactagatccaaactcttatgcatctatacaaagttaaacagctaaaagaagtaaaataagaaggcaatgacttgctggaatgtccacgtgcatattgtggggcgcacgcctcattacgattcgccgtgctgtgcttctcctgttcaatcgtttctggaaggcagtggatttttctcttgcatctcgtctcttctcttgta

SEQ ID NO: 555853 - DNA, 1058 bp, Homo sapiens
  misc_feature (856)..(856): n is a, c, g, or t
gggcggcggcggcggcggcaggagcccgggaaggcggaggcgggatggcggtcggacggggcgcggagaacgcacgcaagcggccagcggtcagcattgtacggccggcgagagacgtcaagtaccccggacgcactcgcgaaagcacccggaccggagtgcacttaccaggacacgccgctggtgggtcgagacatggacacacggatcggaggcctccactacaccttttgctcatgtcggggaagcgcttaagcatgcggagagccagtcccgtgtacggggtaccggtggccacctgcgaaggaaattccctatggactccgggggaggcgttcttgggagttctatgggaaaatttctcggggtggcgacgcattcgcatacgcggaaaggcgctcgcactttccataagctccttcgtaagctgaagcttgtatgggcgagtggggcggtctaagtgggttctagggggtttgccacaggctgggagcgagggcggagttctgtgtggcaccatctgttatcaggctgtccccagtccagtattttacatgggagggccacgtggatgcgccaaccatgcaatggggccaatttgggggtgcggggctttcgaaaaaatttttggacttgccctgaaagcgtggcggacagaccttatccccgtgggtgaaacttttcgtgtagcccccgttacgctcccaagttattctggtaaccaaatggggtcacaggttatcgggtagtccggttcatccagttacacttctggtggtgggagggaacggcctacgatctatagtaatctacagcttagtagggcgaaaaaggggcatagtgggctagcggcgtnagaggcaagtttggcaccactgttggtggcgaccttgggcatcaatagtttgtggccaactgtgttggccagaaagctttatatcattaggccccaaggttaaaaggcccgggggggaccaactgtcgcaaaatattccccattgggaacgggttgggagttaataagctcccatatgggttaaaattaaaaagcagagata

SEQ ID NO: 555854 - DNA, 626 bp, Homo sapiens
tggctctgtccccaggctggactacaggggcacaatctccactcactgcaacctctgatctccctggttcgggcgattctcctggcctcaccctcccgagtagctgggaactacgaggcactcgcccaccacgccccagctaatatttggtaattttgtgtagaagaacggggattatcatacggtgttgtggcccaggcagtggtctagcaatactcctgaactctcggtgaatatcgtgaccgcgcctacacccacctccccacagagtgtgcgtggcgcacacggtgtgtgtgagcccagcccggcgaccgcggccacgcgtgtgggagaggaacagaatattataaagaagatgtgacacacttgtgacaatatacctgtggaaaattgtgggtctttatttatgtgagcgtgtacacaacacattttttacaaaatgtggttcaatataggtatgtgagaaattacgtgtgtataatatcttcactatttgaatgtggacagtggggagttttttattcactattagagtcttggtggggacaccattaaaatatatcaaaaaaaagtgtcgctcaatggggttggagaaaaaatttggtacgagccttccaaaaagtata

SEQ ID NO: 555855 - DNA, 157 bp, Homo sapiens
tgaggaggagctgagcacagactccagagttctcttcagtatgatcagcatatacgtggacgaaggccacaagaaatggatttaaactcctacagccctataactaatgcatgtaagttctcataatgaagtcacgaagtgatatgtcctacacctc

SEQ ID NO: 555856 - DNA, 390 bp, Homo sapiens
gtcgacctgtgctgtgctgtctgtgctttgctgtctgtgttgtgctgtgctgtctgtgctgtgctgtgctgtctgtgctgtctgtgctgtgctgtgctgtctgtgctgtgctgtctatgctgtgctgtgctgtctgtgctgtgctttgctgtgctgtgctctgctgtgctgttctgtgctgtctgtgctgtgctgtgctgtgctgtatgtgcagtgctgtgttgtccgtgctgtttgtgctgtgctgtgctgtgctgtctgtgctgtgctgtgctgtgctgtgctgtctgtgttgtctgtgctatgctgtgctgtgctgtctgtgctgtgctgtgctgtgctatctgtggcagtatctctcactaacctggaacacactaattgtcgacg

SEQ ID NO: 555857 - DNA, 121 bp, Homo sapiens
acggtacctcatcattcaaataaaacaaataaaaaagtattaggcgaagattaaaaaattttgcattacatatttacacgaaagcaatgctaaaatctgaaatctgccagtgtggagagag

SEQ ID NO: 555858 - DNA, 317 bp, Homo sapiens
cagcacatctccagcacacaagaacttccatacgcctgaaccacagcagccaggccttcctcgagaacctcgtcccccaggagcttgctacaagtgccagaaatctgaccaccaggccaaggaatgcctgcagcccaggattcctcctaagccatgttccatctgtgcgggaccccactggaaattggactgttcaactcatctggcagccactcccagagcccctggaactctggcccaaggctctctgactgactccttctcggcttagcggctgaagactgatgcttgccgatcgcctcggaagccccgtagac

SEQ ID NO: 555859 - DNA, 734 bp, Homo sapiens
ctttaagaccttaagttgggggacggcctttgttatatttaagaaactgggttctcccacaaatgctttgagacagttccaagaattccatttttgggtaaaccattgggaattcagtacgcaaaaccagattctgatataatatctaaaatgcgtggtactttcgctgacaaggaaaggaaaagggaaagaaggaagcctaaaaccatggaacaggctccagctgctgcaaacaagaagcctggtcagggaacaccaaatgcagctaatacccaaggcactgcagcgccaaatcctcaggtccctgattatcctccaaattatatcctatttcttaataacttaccagaggagacaaatgagatgatgttatccatgctgttcaaccagttccctggattcaaggaagttcgcttggtaccggggagacatgacattgcatttgtagaatttgagaatgatggtcaggctggagctgccagagatgctctgcaggggtttaagattacaccgtcccatgccatgaagatcacctatgccaagaagtaacatgtgatgccaatgtggaaggacttggttatttatagtgtttgttttgatcatattcggtcaagtcattttaaatggttggaagtgaaggtgaagttttgggagaagagttgtctaattttttttagttttgctgaactatgaaatacggagccttaattttgtacaataaacttttatttgta

SEQ ID NO: 555860 - DNA, 280 bp, Homo sapiens
cctcacgggagcaccctatgcacgcacacacgcacacacacacacacacagactcgtgtatatcaatacaatcaatatatgagaagttttatttattgctgataatagagacaaggtactctctttgctgcccagactagtcttgaactcctggcttcaagcgatcctctcgcatcgtcctccccaggtgtcgatattagagggatgagccacccttccaatctatgacacgttttatatatgacgtgacatgatctctgcatcagtcgtgtacctgatc

SEQ ID NO: 555861 - DNA, 162 bp, Homo sapiens
gtgacaggaattcattacgaagccccccaggcggaaggtacatggtcatgaactggattacggtcctcatgtatgcagcatgggcatggggtgctctgtctccatcaagctgctgcatcaccatcggccagcgcctctgtacgtgtacaacgttcacgctcc

SEQ ID NO: 555862 - DNA, 102 bp, Homo sapiens
  misc_feature (2)..(2): n is a, c, g, or t
tnaaattcatgatgaccaataaactggacacggcccttggggcttcagcgcggtcgtatctgccatgggggctcacactagcgtctgcgaccaggcaaccgc

SEQ ID NO: 555863 - DNA, 610 bp, Homo sapiens
  misc_feature (50)..(50): n is a, c, g, or t
ccagccaatcgatgttacaatttcatttatacatcagcagtttaaactcnaaggtatcatgtgccaccagcaaatgactgtcggtgattcactatgagcagcacatcaagcagcagtttcgtataatatgacatcttgtccccatgttaggtctggcaagccccacgagttgtggacctcgtactccttccgaagagctatatgacacctcagcttgtactcccagtctcctcctttctgcgtcctgtaggatgctacatgatcgtccagtatatactggttcacatcctctgatctggtgtagagcatatgccaagtagtgagcgagacatgggttcaagtccagatgcctcaccagctgtgcaaccttaggtaagttactaaaccactctgagcctcagttctcctatctgataaatgagcactatgggctcgttataaatagcatagaatgtatcaatagcatttactcagtcatggaactaatatttactaacagcatatatgctgtaatagatgccaggcattggatatacgtaactctggtcagtctcttgtggtcctctgggtgttccaatgcttccctctggataactcagctatctttctg

SEQ ID NO: 555864 - DNA, 402 bp, Homo sapiens
tgttgtctgctctgctctgagtatctggatcaggcgccacacacaccagtaattttgatttagtaagatggggtccaccatgttggcaggatgtctcgatctcctgactcgtgatctgctgcttggctcccaaagtgctgggattacaagtgtgagccacccacccgggcagaacctttaaatttaaaattgtacagtgtactttcctgccaagaagcgtaggaggaagatttaagtaatgtctttccagttttcggttaagaacttgctttgtattaaaatagtccttcaagtctacagccataccaccctgaacgcgcccaatctcgtctaaaatagtccttcaaatatgtatctcttatagccttcagttatcccaacaaaattatctaaagatttgtt

SEQ ID NO: 555865 - DNA, 353 bp, Homo sapiens
ggccaggcggaggcccccagggcgggaggccaaggggctgtggtagggccgggctgctgaccatggtggcgaatgcctgctgcctccctccaggcctcagcttggctctggaaaagtccaggtgtcccttgcagcttgtggagggtctgtgtggcttgcacctgctctcggtggaaaggagcaccctggccatccccgcacctcgagctttggcctgtgatacagcctggtgtctttggagcctgcgggcaccgtgccccgctgtgttttggtacaaatcatccgtgtggcccggctccgtgctcggtccctttccccccccagtgtgcagattaaagcaagtcagatcatca

SEQ ID NO: 555866 - DNA, 607 bp, Homo sapiens
agtctctcccatcagttgttttaagttttttctgcaacttagattaactctgcttattcctgtgaaccaaccagtgatctctggctgctgctcacaagaaacaaaaggaatgggtaatgtaaaaatctggatcaatattctaattctgggcacatactggaatcagctagtaaccccaaatcagcttggttccaacagttgcccagttcatggaaaaccttcttatttaatttactggggatagttttgcttattttgctttactgttgaggagtatattgctgttgtactctttgtgtaggaatgcaggataagcttactgaatgttttcttaaactgaacaccttttaatcttccagatatcaccttttgttggagttatgaatagctctcaccatactgatgctttctgactgagctcctctctgaaccctgaatacaagagaccctaagagtcaggcaggaatatcatcgcccctattcaccctgaaaaagttacagaagatggatctttatttctttgtaacccctaggattaagggttctctaataaaagggatgggagaaatgtcagaggtgtactgatgggagcaagatgcggggtacc

SEQ ID NO: 555867 - DNA, 180 bp, Homo sapiens
  misc_feature (179)..(180): n is a, c, g, or t
tcgtctcactggtgcccggaacaccaaatggtgtatgttacataaatggaatgtataatatgaaacctttgggaattggcttttttttcactcagcataacgcccttatccacgttgtgcatattatgggttgaattactgtcccacccaagaatatgcaaccaatgtgggaggccggnn

SEQ ID NO: 555868 - DNA, 233 bp, Homo sapiens
  misc_feature (55)..(55): n is a, c, g, or t
attagcatatggatgggatcattctcagtgttctcgagagacttcattccttggngtatggcggcaagtaagatcaatagaattaggaaatttgcctaaactaagttgtgccttccttaactaaaaaggcatgggctttgtcctcggtgatcagtttttaagccttcttccttccagctccttattaaaggcaaggtgatttagtagggaattgttcaaaggttctgcctctg

SEQ ID NO: 555869 - DNA, 392 bp, Homo sapiens
  misc_feature (4)..(4): n is a, c, g, or t
  misc_feature (70)..(70): n is a, c, g, or t
  misc_feature (110)..(110): n is a, c, g, or t
ttgncctggatgtcaatagttttcagtgcccataaagaaaacaagctaaaagaatggagtttgtgttttnaagtaagcaagaatccctcttaaagctgggcatggttacncacgcctgtaatccccaacacttttggaggctgaggtggcagaagcccctgagcttaggagttcaagaccaccctaggcaacatggttagaccccacctctacagaagattttttaaaaattagccagttgttgtggcgtgcacctatggtcccagctactgaggaggctaaggtgggaggatcgcccaagcctgggacgtcaaggctgcagtgagctgtgttcctaccattgcactccagcctgggtgacagattgagaccctatctaatctaaaaaaata

SEQ ID NO: 555870 - DNA, 327 bp, Homo sapiens
aaaggctggtactagctatctagaaccaaagaattttagagtgggcaatcttttaaagtagtaggcccttcttccaattaaaagatgaggaaactactggacatggtggctcacacctgtaatcccaacactttggaaggccgaggcgggtggatcacttgaggtgaggagttcgagaccagcctggccagcatggtgaaaccctgtctctactgaaaatacaaaaattagccaggcatggtggtgtgcgcctgtaatcccagctactcgggaggctgaggcaggagaattgctggaacctgggaggcagagctgcagtgagccgag

SEQ ID NO: 555871 - DNA, 141 bp, Homo sapiens
ctagtcaggagagttgacgaatgagtgtgaggcgtattataccatagaccgcctagattttaagagtactgcgagcaagatactattgacccagcgatgggaggctatcgacatgggccttagaggagctcctaacgtgga

SEQ ID NO: 555872 - DNA, 307 bp, Homo sapiens
  misc_feature (143)..(144): n is a, c, g, or t
  misc_feature (171)..(171): n is a, c, g, or t
  misc_feature (196)..(196): n is a, c, g, or t
tgacaaattcttgctctggggccgaggctggagtgcagtggcatgatcttaggtcactgtaggggccacctcctgggttcatgcgattgtccggcctcagcctcccgaatagctggcatttcaggtgcacaccaccctacctnnctaatttttggatttttagtagagatngactttcaccatgttggccaagctngtcgccaacccccttcctcatgtaatccccttgcctcagcctcccaaagtgctgggattatagtcacaagcaccacacctgccaaggttaggtaaattatgtattcttaat

SEQ ID NO: 555873 - DNA, 367 bp, Homo sapiens
tatcggttcatgcatatcatcagatcctgctctaaagttacttcctggtcctggtccgaaatttccaccgccaccgacgttgaatccccgaaagccgaaagtggcctccgtcttccactcctagagactctgaacttccggcatttctggtctagacaaagcctttcttacttctgcattatgaccattgatggtatggtatttctgcaatacgattttatccacaggatcatggtcatcaaaagtaacaaagccaaagcctcttttctttccagactgcctatcagtaattatctcaatggtatcgatttttccatattcctcaaagtaatctctaaggtgatgttcctcagtatcttctttaatt

SEQ ID NO: 555874 - DNA, 546 bp, Homo sapiens
taataggtgaaaagaattcaaagttaaaaaaatattttcatagacaccaaaaattattagactctaaagtctaagctcccttatctgtactccctcttgttcccgcatactctggggaggcctatattaaacacaagatctttaaatacagagatagcatagtctatattgtgcaagttattatcatctggctgagcaattcactgagagcaaagtatatggagtaagggggcagggaccagagagagtagaggcaggattgaagctttgcccactggagagcagctacatgaggacagaggagacaggagagcatctgcaaataaccagcctcgtcctgaagctgccagtgccctatgagacagttggggtggggtatactgtttagaataggtaaactaaaccacagaaattgagaggtttgctagcacaagcaaccattcagcagcagcagaaatggtctccagttgtaccatgcattctctcctccaggctgtggcacatcaccttactccatcctggtcttccctgtattcctcatgtctg

SEQ ID NO: 555875 - DNA, 102 bp, Homo sapiens
ttcataaagagtgttacaccgtgcgctccaaagtaccacaaagcctgctccacacctggatggggtgcatgtagtctttggactggttatttctggttttga

SEQ ID NO: 555876 - DNA, 226 bp, Homo sapiens
actgcccccctagcagccacggatttttattttatgagaaaaaggtgtgactatggtagaggcaattacaaggccaacacaaattgaaatatcacaaaaagctttaaaaaataatgtcgccgtcgtgaagcaaacatcaggcgcagacaaatctttttggctgttaaatctaatgctacggttgggggtaatccaacgtctaaagcagctgtcgcgggtggtgtct

SEQ ID NO: 555877 - DNA, 891 bp, Homo sapiens
tgggtttcccccaagggtgttttttaacccccggggtttccgggggccggggaaggggggggccaaaaacaaagctcctcggggggggggggcgcctctcgggagacccccatatcattcacgcctcccgggggcctccaccaggagcacccccataagagagagggagaaagaggcccaggttggtcgtgtgtcccaccctccctcacaggtgtcccaaagaaaacatggtgggagcggcagggtgtccaccacctccacagcgttgtccgaccacagacaaaacaacaaatagtgacacacacagcgtgtctgtggagacaccctcaaagggcgcggcggagtgggcgaaacaggcgcgcagggggcgcgaggagagcggcgccgagagcacctggcgctcaccatggggcacacaagggcaagtgcgtgtgctcacaggggccacacccaacaaaaaagctcgtgcgcacccccgcgtctgagagaaaaagagagatggggaaaacccgcgcaccacacgagtggtggggaaatcatcccacagtgagtaacacctccccggcagaggcgctggaggggggttgtggagagggcacaaaaagagagagagcgccctcttatgatcacgagggcactctatacatttatctgctcgctctcactgctctctctgcactcgcactctcccccacatatactcggtggcacccagactcggggaggctcacccgagggggcgacaccgcagggggggcaaacaaacagaggaggggtggctccccagagaaaaagaacgggcggagggctccccccccatatataagccgcacacaaagacacgtgtgagaaaacatcgaggagggagcctagcggagagaaaaaatccgg

SEQ ID NO: 555878 - DNA, 213 bp, Homo sapiens
gagaagcccctaggccccgtgcatgtcactaacatgcctggaacctgtgcacccaggtgtggaggtcaccactgcatggggtcctggcccctgtacaggagacctggagatgctgtcactcatggaggggtccaccgctagggacggtgtacaactgctcatgctagcatgacatggacgggaatcgcgcaaagaaagacaaggttgccctgt

SEQ ID NO: 555879 - DNA, 902 bp, Homo sapiens
ggcaacccgattgaacaacaggatcctcattctacccagctgtcacgatgaaatgaaaccaggaccctactgacatgtgacaatacggcgaccgagcatgcgtgcgcatgcacacgtgaccccagctcaacccctggaaatggtccctcgtacttgcgttccaggacaccttacacgccacaagccagttatagcgctcattacaagtagcaacccgtagtataacacggcttcagtggcagacaatgacaccccgtctttacctgtgtgtcccttggccttataccgaccgggcacactccatacacatcgccccacccgtgatcccagacagcttacttgcgactacataggggcctaagcgcagaccctcttacacaaatggtgatggtaaaacagccgtaagatccatcccaacatgtcccctcacacacttatccaaacgcgtggtggacccgcaacaacgatgcagggtgcccagttccgattcattaaagtgcccgccgcctctgctacgttaatattggacaaacgcgttaagaccaatcactaaacgtctacaacgttcagtccaaagtgccagtctggcccattacacaataaagtctaacactcgattgtgtgggcccctctcactggggcatactccccgggcataacgtagatccgctttccaaagggaaccccaaccgcacacattggcgagcaccataaaaaagcgaggtcataacaaacaatacgcgcccaatatctcgtcccaagaacaactacctttgtccccacaacagtttggctcaaagccctaaaggggcgacttccttactacaaacaaagtgagtaagcacactataaccactcgggcactctcttagccccccatatattgattccccaacctcgtg

SEQ ID NO: 555880 - DNA, 99 bp, Homo sapiens
tcccagagactacttctatgtagcagacctggcaggtgctgagattgatgtaccatcctacctggctgacctgcccggaattgcaacgacctcatgtac

SEQ ID NO: 555881 - DNA, 395 bp, Homo sapiens
gatcccctaggtccgatcgttatgtctaatcagttgcgggtgatcctttcagtcatccaacatcatcatcatgtggctgtgctgcaatcagaggcagacaggttaggcaatatagttccataataatagtcacatacaatcatcaatggtatcataaggtcagcaaccaaaagaggttgttaattcagcacatcatcctttaagaaaaatgttgcagcaaactcagtcttgatatctgagctctctgggctcccttacttgtgagtaagggatcatgctcaccactggagaagcttacaccgggactaaatttcttttatcttattttttggctatgccagagtacggctacggtacgcacaagggagttggatcagggtgtaaatcgcaggggg

SEQ ID NO: 555882 - DNA, 1122 bp, Homo sapiens
catgtggttggtttgtgtcgagtgtctgtcgtggtttcgcgggctcgtcgcggcctcggtggggggtttgtagcggttttgtgtcccctcagccgtgtcgcaggtcggcgttgtttgctgttcctccgtcgccggggccccgtgtcgtggcgcgcgcttggtggcccccctctgttgccgcggttctaggtgcccttgtgtggcttagggtcccttcccggttgtttattcttgtgtttcgtcggtgtgtcctctcgtttctgcgtttgatcggggcactcgttgtcttttgtgttgggcttgttcttttcttgttttttatgtgtgctccgttgggtcttcgtcccatgtgtttctgtccctgggtgtggggtgccctgtgcgtgtggttgtgtggttgtccgggccccttttgggctcctccttcgctcctttgtgtcatcggtggtgtgtctgctttgctcgcccagtgggcccctttgatcttcttggtctgttgtctgtctcctctctgtgagctcccctgtgaaagggtagatggtgctgtgcttccccttgttgaccactgcctcattgtctggagggtgtctgctccctgtctgtcttcacgggtgatgcgccttgttagtgttatgccccctgggcctctcctgcgtcgtgtcctgtcgcgtggtgtgcgtcccgggttctgaggatttggaaactggctagtgagccctggaaatatataattttgagatcctttcctaatctcccgactatacttccttcgccacgggaagagtgcttgggacacagggccctaagttttttcctagtacacaccctaccacggtacccccctttttttctttcttttttttttttttttgtagagtccagggtcttgctttgttgcccacggctggtcttgaactcctgggctcaagtgatccttttgccccaacctcctgagtagttgggattacacgtgtgagcccccacgcccggccagatacctcctaacacaggcatctccccgtccctctccccaggagccagcaccagtttctcaacttaactttatttcaataatttaatagatacctctcaaataataaataatataaaaaaacataaaaa

SEQ ID NO: 555883 - DNA, 675 bp, Homo sapiens
agcacagagcctcgcctttgccgatcctgcgccctgtccacaccctgccgccatgctcaccactggatgatgatatctgccgcgctcgtctgtcgacaacgtgctcctgtgcatgtgcaatggcctggcttcgcggtgcgacgatgccccccgggccgtcttcccctccatcgtggtgtgcgccccagtgcaccagtggcgtgatgtgtgtggcatggtgtcagaagtgattcctatgtgtggctgactgaggcccagagcaagagagtgcatcctcaccctgaagtaccccatcgagcactggcatctgtcaccaactgtggactgacatggagaaaatctggcaccacaccttctacaatgagctgctgtgtggctcccgaggagcacccctgtgctgctgaccgatgtgcccccctgaaccccaaggccagccgcgagaagatgacccagatcatgtttgacgaccttcaaccccagccactgtacgttgctatccaggctgtagctatccctgtacgcctctggccgatacaatggcatcgtgatggactccggtgacggggacacccacacatgtaccatctacgaggtgtatgccactcccccatgccatcctgagatctggacctggcatgccgtgactgactgactacccatgaagatctcacgacg

SEQ ID NO: 555884 - DNA, 562 bp, Homo sapiens
cgctgagtcgctaggcttacgggcgcctgctcatatggtcgctaatttatgagttttccgtcagcgccggggtccatcatgctggtcaggctggtcttgccgtcctgacctcaggtgatccgcccacctcggactcccaaagtgctgggattacaggtgtgagccaccgcaccttgccaaaggtattttcatatagatatatacacatactatagtaaatctgctaactggcatttcacaaatattacctgctcaaaatctcccatagtaatgtattaggtaaacaatcttctaatacgtatatgtgctaaatacaatttccatcaagtagcaagcagctaatgaaatataagattctacacaacaaaaatgctgggatctatcctattctatctatctatcattctatctacctacctacctaccgattgatcgatcgaacgcactaccctccactatttagttgatacacatattccacataaagatagtgccttaaaatgccacttaaataaactttctagtgctgaacaaaacaagataatttataccattagggcat

SEQ ID NO: 555885 - DNA, 439 bp, Homo sapiens
ggcaatcagttggcaaactggtacaggtacagaatatcagagtctccaaatatgcaagtcagaatgctgggttatcccaacaattaaccatcaccccagtgtcttcaagtggtggcaaactctagccagatgctcctgtgctgtcgtggtgccccaataactttgaatactgcctagcttgcatcagtgcctaaccttcagacagtgcgcgttgccaacctgggtactgcagatatacaagtgcagggagtgcccgtaacaatcacaagtgtagcaggtaagttctgacatcttataaagtacctttaaaatagtattacataacaataattgctttactctcctaatactaaggttagccgtaacactctggagtaaccacacaatcatcaggacaccagaactagcaatattatactaacaaacatagctctgtagt

SEQ ID NO: 555886 - DNA, 191 bp, Homo sapiens
gcccctgttgctttgacggcactaggtgtcctttgtggttcatgtgggttagagatgacaggcaacgctattctcacacaaacagcctgtcctcggtgtcaacatgcctttaatccacaattgccatctacatcaacagatttattttttgctaaaataaacgtatgacaactgtagaaaattaattccat

SEQ ID NO: 555887 - DNA, 840 bp, Homo sapiens
ggttgaaccaatatgtctgaggtaccttctgatgttcataaatcttagggtccagagttatggaagaagttaagactgtgacggctatgtcacctccaatgggtaggcagtgataagactgtcggctatatgaccattctgtgcctaggatttctctttctttttaccttcgcaaaatgagaaggttgggacgaatggctatttctcacgggcctgggtcccccaggtctgacattctaggggatctgcaggctcctgactaaaagctcagaacatggcttaggaactgcatagggggcttaagagacgacaaatatgccgatcgtcgtatatcagtgaactgtgagggaatgaactgacagatgccagaggttaccgaagtctgtgtcgcttacggacttcaggttgtggacaagtcccggtgtcgtgaccgatcttcgagcaggggcacaagaccagcgccgcgggcggctttatcgtgtgtcgtgcgtgcgtgctgcgcgggtccctcggcggcccctgttgacctggctctccgcggggcgtctgtacgttctccctgggtccttgaccggactccttgtccacccgctgtgtgaccctactaggggcgtgtgaccctgttcctcatgttcgtttatctacgggctgggttggagaaggaaaacggctcgggtcttcacgaaaattcaaccgctggcccgactatactgactctttggttacctaagttacgcactcaacagtggacaacgagaaaacccccgagcaaaaacacgggaccagtctctcgtcccacaagttcgaagatacccagggtgactgagttaatacatcacc

SEQ ID NO: 555888 - DNA, 316 bp, Homo sapiens
  misc_feature (25)..(26): n is a, c, g, or t
  misc_feature (129)..(129): n is a, c, g, or t
  misc_feature (153)..(153): n is a, c, g, or t
  misc_feature (187)..(187): n is a, c, g, or t
tagaggatcccgctgatccgcttannagagagaggaggactggcctgtgaagactgaggtggtgatgtgaaggtcttttctccatcaaatcttgcgccagttaccttgtatagtatttagattgttgtnatcagttggtcatatggctttatngaaggctggtttagcatatttagaacttattggnatgcattaggattcttcttcttagagtattttaattccagtatgtacttatgcttgtcttctctacctgcccccagtcttgaagtggtggaaatgtgtgtgtgtgcatgtgtgtgtactttccttaagc

SEQ ID NO: 555889 - DNA, 219 bp, Homo sapiens
gtagggtacatggtgggtgctgcagaagcactgtgttggagtaagagttttgcggatgtcaggtacacttcatgatggagttgaaggtagttatgtggatgccacagggactccatgcccaggaaggaaggctggaagagtgcctcagggcagcggaaccgctcattgccactggtgatgacctgagcgtcaggcacctcgtagctctttctccaggga

SEQ ID NO: 555890 - DNA, 262 bp, Homo sapiens
agatggcaggtgcagcctcagcttccgctcgagctgtgagaggggctctggggtcactgccagaggagtgtgcgaatcaaacctgaccaagggctcaagaataaaatatgaattgagggcctgggacggtaggtcatgtctgtaatcccagcaatttggaggctgaggtgggaggatcatttgagcccaggagttcgagaccaacctgggcaacatagtgagattctgttaaaaaaataaaataaaataaaaccaattttta

SEQ ID NO: 555891 - DNA, 170 bp, Homo sapiens
ccacattgagataaaggaaaacttcgctatgttgcgatttgttcccgtataaggatatatctggaactatggtgccatccctcagcacttgggaagacccagggcacaagtgatgaacatactggctgttgtggtgacaattacccaattgatgtgtgtgaaattggaag

SEQ ID NO: 555892 - DNA, 192 bp, Homo sapiens
aactattatggtgtcatacaagctagcttcccttggctccccttgaacttttgccatgagcggaagcagcctgaaactcttaccagaaccagaactgtgtcaaacctcttttccttataaattacccaccctctggtattcccctatagcaacacaaatggactatgacacattgctacttactgaaatgat

SEQ ID NO: 555893 - DNA, 834 bp, Homo sapiens
gccttctcgggggtcatgatgggcagcaagatgggtctgctagtagggtcgtccagtgtagtcaaacccaacactccattaataaggtttcctgacagaagagacaatcttaaacccaagtgtatcagaagcttggagatcagcagggttaccatctcatcttctgtaatttcacaaccattctaagggaagtaaatcaccagattgtgctgatgtatcaggggtccaccagacgaggagaattaataaaaaatacctcagaaatacagagggaacgtgtgtgtctcaagcacgacatgaatttatccaacggtgaggtcctgaataaaccatgtggggctggctgttggtcatcagacaataagattgtgtctttaaaataaagggattttccaaaaatgacctgatgagaaacttggtatattaaaacaccctttaataactattcttgacacacactgacttctgggacaacaaaaacaaacaaatgaaaaacaaaatttgtgtggggggggcgctggcctaggaaaaagtttcgaagaccccaatcgtggtggtggcgccggggcccaagagtagtatagatgaccccatggcacacacggctgtgtcccgaagaagcacccggggcacaagcaaagggtgtgtggtttcctaccaaaaaaaaaaagcgcgggcgcgaacaccggcgttctggaccaaactcaagaaggggttccgggggccaatcgtgctcacacaggggccaggaagctgaaaataccagccgccgcgggagagaacataaagacaaacgacaagcagagcagacagcaacaacagctctgagaacgc

SEQ ID NO: 555894 - DNA, 449 bp, Homo sapiens
  misc_feature (72)..(72): n is a, c, g, or t
  misc_feature (275)..(275): n is a, c, g, or t
  misc_feature (417)..(417): n is a, c, g, or t
acctacagaaatagccataaccttcacaatacaaaaaggatttctcaaaaaggaaaattattaatgtttagnaattatagaaaattatgtttacataaaaaatcacctaccttcccatcaaatttaacagctcaattgttatgtatgaaaagggaaaaataaaagctatctgtgcaagagccactacaatggtggtcactccacggcctccccaacactacttaactcttactagttcattagttgtttaacaatacaccgttccttcttttccnaggggagtttactgttcttcgagccaagatggagcgtccactccaggggttttcaatctgacatggaactgcttaagtgtcagttcaagctgcttctgattcccggcgaagtaggcagcaactgcgctgtggaagaggaccnagttggttgcgtagcactttgaccttattttc

SEQ ID NO: 555895 - DNA, 91 bp, Homo sapiens
agggcattatcgattcagcgaggagtaattgatggcccgacagtggccctgcaccctgaaaaagttcctcacgtcccccactatttcgggt

SEQ ID NO: 555896 - DNA, 177 bp, Homo sapiens
ccccccttttttttttcggggggggggggggttttagggtttttgggggtttttcttttaaaacccaccgggggccccccccccccccttttgggttttttaaaacccccccccttttttgggggatttttgggggcccgggcccccaagggttttttttttttttttttttgggga

SEQ ID NO: 555897 - DNA, 556 bp, Homo sapiens
  misc_feature (49)..(49): n is a, c, g, or t
tcttaggtgattctgcctgtttgtctgtcattgtatattctgtttactntgcttcaaactggccccaagatgttatttttgtggtttctggctttctagattctatttttagatactgcccattgagcaataatggtgataatatagagagaaaagaaagacctttcatgggccagttgtgttggaataggaaaatcaaacgtaagcacaatttaagtatgtagcagttattcctattttgtattctaggaataaaaagatactttaattttttatgctagaattacataattacataatcagatgttttaattttaccatataacctttaaaaatgattcatttttgaggatatttaattggataccaaagctaaaatccatatactgtaagtgggttgcctttatagattgcgggacacaataacatgaatgtattgtgaaagcacttttagttacctcactttcctcagtcttggaatgtgtattttgtgggataatgattatcagaaaagcaaaaaattacaacgaacaaataaatttatataatatatcca

SEQ ID NO: 555898 - DNA, 752 bp, Homo sapiens
ggaggccttcattcactgatttcccctattctcaggctacagcctaagaccaaacttcacaagaatcacagctcaatgctatgaagcgattacagatggtcaagaagaaagctgcccaaaagaaatcaacgaagtacatgtgtgccagtaggtattggtatcatattgagcctagaagatgagaaggcttattattatgatataatctgaaatacactgtaattctagtaaacagatcctgccataattcaactactcacaaaaccacggcgcagactgcgccattacttactacctattactcccgcccgcatgagctgcagcctcgctacgcagcagtttcttgcgcctcgcgtgagtgcgagccgagatggcaccccccaggcaacaccggagcaagcgctaaccgaccaaaatcactaacacccgtctatcgtcacccagcccacgcattcccaactaagtcccacttcatagtaataccgcgaatcactaactacgagagttactttgcccaccacgactagtttcccgctaataatccgtggtgccccccgaatagtcggcgttatcccgcgcaataaagcagcactaatcttcgtgaaactcagagctaccctctcgtcctaactacatgctcgcaattgctatagtggactgccgactgacgacacacggtttgagcagttactctccaattagcaggaactactcacaggtgaaccacgagaccaaacatttacttaaacctc

SEQ ID NO: 555899 - DNA, 128 bp, Homo sapiens
cgtcgtagtagagctttgctaagcggaatacgtaatgagagatgtaagtccgtgggctgattatgacattgactgtcgccggtgaagcttcagggaggtttggattaaaatggctgtaactacgaggg

SEQ ID NO: 555900 - DNA, 209 bp, Homo sapiens
cgtcttctgacaagtagcagcgtatttaagttcatgtgaatccccagattatccctaagtaaatattttggtttcacagaaagctggtcctttggtttttctgtgtacacgtgcgcactggcgcatgtgcgtgtatgtgtgtgtgcgtgcatgtgtcattggctaccaggtgaagtgtctcaggtctcgggcttacggctttagctctt

SEQ ID NO: 555901 - DNA, 385 bp, Homo sapiens
tgaccccccttcccccacatgatcaggcagcctctcagtcctcggagatctcagatcatcgtgcagtctgtcttgttgacacatgcccccatccgtgtagttttaatggctcaggtggtctgagaggtgtaaggtgccaactctgattgaaagatgcctgtgaggaatcaaaggtgccacacagggcaatcttctctctgttatctgcacagcggagctgcccaagccctccatctccagcaacaactccaaacccgtggaggacaaggatgctgtgtgcttcacctgtgaacctgagactcaggacgcaagctacctgtggtgggtaaacaatcagagcctcccggtcagtcccaggctgcagctgtccaatggcaacaggacc

SEQ ID NO: 555902 - DNA, 736 bp, Homo sapiens
  misc_feature (199)..(199): n is a, c, g, or t
  misc_feature (237)..(237): n is a, c, g, or t
  misc_feature (255)..(255): n is a, c, g, or t
  misc_feature (277)..(277): n is a, c, g, or t
  misc_feature (280)..(280): n is a, c, g, or t
  misc_feature (282)..(282): n is a, c, g, or t
  misc_feature (288)..(288): n is a, c, g, or t
  misc_feature (294)..(294): n is a, c, g, or t
  misc_feature (301)..(301): n is a, c, g, or t
  misc_feature (303)..(303): n is a, c, g, or t
ggggtcgggggcgtctggctgcccttcccagaggcgcgccctgctgctgagccagatgcagtagccgtaatctgcgcggaggcacagagccggggagagcgttctgggtccgagggtccaggtaggggttgagccaccatctgaccgcaagctgcgtcgtgtcgccggttctgcaggcaccatgagccaggacaccganggtggatatgaagtgaggtggagctgaatgagttagangccctgagaatgcagccngatgaactgcggctgtcttggnggngnccagtntccctngcgggancncgagataaaatattagtgacgaagtaatgaaccaccagtctgtgagttactactgacagtcgaaaacggttcattctgacgagcgaatagctctttcgggcgcttggccacaatgcgagagagactggaagtcagtctgacatgcacacgcactccgtacgagagtggccccacgcaggattagcatatagcttttgaatctggccattcgaccggcttgtgacgttgtcatagcctcggtcatgatcatctggatggatgcgtggtctttggcaccgatgatgcaattagctgagtcggagcactggtgtgccccgtcacgtacaggcttccaagaattagccggtgctcagttctgcatgttcgagcatgcgtgtgcgcctttgactgccaccaccccgcgtgcgatgtagaactagctggaagctggggt

SEQ ID NO: 555903 - DNA, 297 bp, Homo sapiens
aggcatatagtgttcttcttatactgtagtgtcttactcctattaagttattagggtaatgctggcttcatgggtggaaattaaacacacccttggtaaacagcagtcttaaccattgcgccaaagacgaaatcaccatgggcaccttagctgatgttttgacacgaatgaacacacaacataccaaaaaccttgggatgcagaaaaagcaccactgagcgggacgtttctagcagtaaatgcctccattcaacaactacgacagatctccaaaagactaattgtacacctcaacct

SEQ ID NO: 555904 - DNA, 409 bp, Homo sapiens
tcccgggtgtaacgcgatctcctgtcctcagcctcccaagtagctgggattacaggcatgcgccaccacactcggctaattttgtattttagtagagatggggtttctccagttggtcaggctggtttcgaactcccaacctcaggtgatccacttgccttcgcctcccaaagtgctgggaatacaggcgtgagccactgtgcctggccttttttttttttgggaaattatttcttcactctttcccccaggccttaagttgcagtgacattattatcagctcacgtgaaattctccaccttccggggttacaagcaatttctccgcgcctaagccccccattagttagctggttataacgaggtttgcaccaccacgcccggcatatttttgggttttattagataaa

SEQ ID NO: 555905 - DNA, 134 bp, Homo sapiens
ggactgtgacgctagggcacatcgcttaatcttagcgtctagttttctctcaaaatgagcacattaggctaaatgatttccgagatttccagactagatcctagacgtactactactttctaccatacgttgac

SEQ ID NO: 555906 - DNA, 816 bp, Homo sapiens
  misc_feature (199)..(199): n is a, c, g, or t
  misc_feature (237)..(237): n is a, c, g, or t
  misc_feature (255)..(255): n is a, c, g, or t
ggggtcgggggcgtctggctgcccttcccagaggcgcgccctgctgctgagccagatgcagtagccgtaatctgcgcggaggcacagagccggggagagcgttctgggtccgagggtccaggtaggggttgagccaccatctgaccgcaagctgcgtcgtgtcgccggttctgcaggcaccatgagccaggacaccganggtggatatgaagtgaggtggagctgaatgagttagangccctgagaatgcagccngatgaactgcggctgtcttggtgtgctgtgcacatgtcacctgtgctgtggagcctgatgaagaattgtgtcttggttgaagatacaatggtgtgctgtgaatgactgatggctggagtgctggcatgcctgctgggctaatgttcactgtgtgcccttgtccaatggaggagctgctgaagtgtgtgcaggcagcccctgtgcttgggtactgcacccgctgggcactgcttgctgctcttctggctcggctggctctggcatgcttgcttggtgcctgtggtcataatctgtgcgagctgcctggcgtttgtcgcagagactaccggacgcagaatgtggttggcacacggggcgccctctacctgcatcggctgaccttcagtgccttccagggccactggtgcgggcaacctggcggggtctgaaggggcgtctcgattacctgagctctctgaaggtgacgggccttgtgctggtgtccacttcacaagaccagaaggatgatgtcgctcagactgacttgctgagatcgaacccaatttggctcaatgagaattg

SEQ ID NO: 555907 - DNA, 197 bp, Homo sapiens
aaaaaatttttaaattaactggggggggtgggggggacccgtaggcccaactgctcaggaggcttaaacaggagggtccctttagcctgagttccaccctccagttagctatgggggcccccctgccctcccgcctggggggcaaagccaaaccccgtcttttaaataaatttttaaaaaacctttttcccttggga

SEQ ID NO: 555908 - DNA, 577 bp, Homo sapiens
atgggtcaaagtcagagtgcgtggtcatggtcctgcgacggtggcaagaatggatgacaaggacaacgaaacagaaatatgaacctcctgctaccaactacgatgtggcggaaaaagaacgaagaaaacaaagggaccaggatgctgcctagcgagaactgccacctggtgtacgaccgtcacactcagttgccggtataacacattacgtgaaggttacgagagagattaaagactatcgtgtctcgatggaggagagaattccattatcacagatcaggaacaaatggaacaccattagtaacgaaaatgctacagacggaggacacatgatcaaaagtggatgatctgagggggaccccgatgtacagtcggaaccttggaagagattattgatgacaatcatgccatcgtgtctactatctgtgggctcagaacactacgtcagcattctttcgattatgtaagacgaggatctgctggaacctggctgctcggtcctgctcaaccacaaggtgcatgccgtgataggggtgctgatggatgacacggatcccctggtcacagtgatgaaggt

SEQ ID NO: 555909 - DNA, 417 bp, Homo sapiens
aacacatacattttcttaatgactaaaatgctgagatttttaagcttagcttctgatctactctccaaaaaggaatgttagctacataaatcattatgtttgctattttgacctaaatacaacaatatctaatttattatgttactaagaaccctaacattgcacatgaagggatgactccaacggcactgaatatgagctacatgtctccggtgatttttccaaatattttttacaggacttactgagactttccttttttcattcttttagcccacatgttttttaagaacattaattggccgggcgcagtggctcacacctgtaatcccagcactttgggaggctgaggtgggcggatcatgaggtcaggagattgagaccatcctggccaacatggtgaaatccgtctctact

SEQ ID NO: 555910 - DNA, 229 bp, Homo sapiens
ttgacaacaatctgagagctactatctaggcatgtgatatatactaggggtatacacgccaagagcaaaacacagtatcagcctgctaggaacatgtagttacagagctggtaaggtggtaaaacatagggcaaaactagtgcagtgtgagatatgggaggtcgttctacatacagctccaggccaggtttaacggattagtgaagggggtacgcggtacagagtcaag

SEQ ID NO: 555911 - DNA, 1020 bp, Homo sapiens
catacaagcagcaggaaaaaacacaaaatgtaaggctgggattacaggcgtgagtcactgcgcctggcctgaatttattttcatttataggaaatacctccaacacacaaaaagatgtaataattagccgggcgtggtggctcatgactgtaatcccagcacttgggaggccgaggcaggtggaacaccagaggtccggagtttgagaccaggctggccggcatggtgacgacctcatctctgctaaaatatacgacatcaaacactatatcataaatccatcaaaacgtgttggcgtggaccccttcgtcgcccacccaataatcactgcctagatgaccaacttgcttgtcgcgcgcgcgtggccacgcagtgttagaccagaacacgtagcgaacaaggacggtcacccaaggaaggccactccgggactcgccagagagcaggggcgagaggcccacaccgaaaataaaacgcacgcgggggagaacccagaccgatcttggcacacaaacaccccaagagagggacatcgcgaagaccaaacggggggcaacacacaccagcgaggccacagcagaggcgcgataatacagaattaacgccggcagagcgaagagcaacagagcagaccagacatgcacagacagacacacgcacaccacgaacacacatggaacaggacaagtgtcagatactacaacggaaagacacaccagcccaagcacacgacagtaaaacacacgctaccaagaaacaacacacacacaacacaaacagcgcacatcaccgagcagagcacaaagctccaatccagcacatgcaagctgaaggagcaacccacacgcacatgagataacacagctgcacagaacgcacaagccagactgacgacagaacagataagacaaacacaacagacagtgaccagcgacagaaaacacagacacagtacgagagcgagaacgcacagcatcgaccggacacgggcatcgcaaccgagagcaccagcaacggaat

SEQ ID NO: 555912 - DNA, 111 bp, Homo sapiens
taggataccccatatgtgtttctcatgttagtaagcgattgatctatgaataaaggcttatctacatttatcacgacttctagtaagcctctacctgcacgacaacacata

SEQ ID NO: 555913 - DNA, 312 bp, Homo sapiens
atgacaactagggtcagttttgcaggtgtaaagccatttaccaagatagttgtaggtaaagaagggcagatttattagagaaatagtgaaaatatgttgcagtgggcagctcagcagagaaggggctacctgcaaagaggcaagggctggaggaaagttttatagggtcctgctgaagggtgctacgtgtggaatgaggtcattgtgcccgcaggttgtttgtgattagctgtctctaacaattgttcatacaataattgttcattattgttctcaacttggggctctccccaacctggggacccttcctta

SEQ ID NO: 555914 - DNA, 350 bp, Homo sapiens
ggtgaaatcccaaacaacccaacatgaggaatgaaatagaagcccatcactgcagatacccacacatattcaaaagataataagggagctgggcgtggtggctcatgactgtaatcccagcactttgggaggccaaagtgggcggatcacttgaggccagaagttccagaccagcctggccaacatggtgaaacctcatttctactaaaaatacaaaaattggccagatgtggtggtgcacacctgtaatcccagctactggggaggctgaggcacaagaatcacttgaaccatggaggcagagattgcagtgagccaagatcctgccactgcactccagcctgagtgac

SEQ ID NO: 555915 - DNA, 472 bp, Homo sapiens
accccgcccccaccataggctaggtacgaggccgggtggcgcgacgttcctggccgaataaaaaactcttccttctttaatccggtgtccgaggagttttgtgtgcgactcgtcctgctacatttcttggttacaaaaacctcttccttctttaatccggtgtccgaggagtttgtctgcgactcgtcctgctacatttcttggttacaaaaacctcttccttctttaatccggtgtctgaggagtttgtttgcgactcgtcctgctacatttcttggttccgtgaccgggaagcgaggtgattgaaggacggtcgaggcagccccttaggctgcttaggcctgccctgtggagcgtccctgcaagggactctggccagcttgagcgacgggcatcctgagagcgctcccgggtaggcaattgccctggtggaacacctcgtcagagcagtgtgtggcaggcccccgcggag

SEQ ID NO: 555916 - DNA, 774 bp, Homo sapiens
  misc_feature (62)..(62): n is a, c, g, or t
  misc_feature (65)..(65): n is a, c, g, or t
ccgcttaataagatgagtttcataacccaatacacataataatgatcctgtgagcaaatatncgncactctcctatactgatgtatatatgagtttcacagtataaacagatgtagctttggtgttcgaccactctccatacacatgtacaaatagaccctaagttatagagggcggcatggactcgctcttgctgggcacaacactttagagaagctgtcagaattggcacgaggcctatgtgtgccagtgtcaaaaagtctagtacatataattatatacagtacataataattattattttagagagtattccttttccttatttaaaaaattcactgtcaaacagcctcaggcaggtctgtcaggaggtatccagcaaaaggcattgctctctaggagatgacagtgccacgtgttactgtccctgaagaccctgcagtggggcaggatgtagaggtggaagtcagtgacattgatgatcctgaccccgtgtaggcataggctgatgtgtgtgtttgcattttactttttagcgaaaaaaggttataaagtaaaaaataaaaataaaaaattttaaaaacagaaaaaagcttatagaatgaggatataaagaaaatattttatatagctgtacaatgtttgtgttttaagccaattgtctttttaagagaatcaaaaaggttttaaaaattaaaatgtttataaagtttaaaagtttgcagtaagctaacctactgaagaaaattttttaataaatgtagtgtagcctac

SEQ ID NO: 555917 - DNA, 272 bp, Homo sapiens
catgccctgcgggtgacttggccatcaggggatggttacagatgacgacaagccggagtgggcacaggaaaaaaaccagggtttctggtggaactgacctgatcctgcgggctgaaacggtatgacttagtcagatttcccatctgacatgccatgtcatgtgaaatgggtgacttagatccggcttaacttccatcagtcccaatcctctcctccctagcagtgagagtttagaggaagcccctcgaatgggacagtccttcctgccttca

SEQ ID NO: 555918 - DNA, 218 bp, Homo sapiens
tgaggatctgtctgcgctactactaccagagcgaggcgggtctcacacttggcagaggatgtatggctgcgacctggggcccgacgtgcgcctcctccgtgggtataaccagttagcctacgacggcaaggattacttcgccctgaacgaggacctgagctcctggaccgcggcggacaccgcggttcagatcacccagcgtagtagtaggcgggcag

SEQ ID NO: 555919 - DNA, 1243 bp, Homo sapiens
  misc_feature (391)..(391): n is a, c, g, or t
  misc_feature (528)..(528): n is a, c, g, or t
  misc_feature (697)..(697): n is a, c, g, or t
  misc_feature (736)..(736): n is a, c, g, or t
  misc_feature (772)..(772): n is a, c, g, or t
ccacggcgttcggctataggagaccgtccaggcattgtatccgctctagttcagtcgctgcccacataatcatcatagactcgactctcgaacgttagggcttgcatcggcttcctcagtttgcgctctctgcgggggtcgtgccctgaggtcccaacactcctcatctataagggctcccgcaaggcctctggcgaatcctagacaccgatctaacacgataaggtaagacctcagagctaatatggagttacatcacgagttagcaagcagaccaaggtcacacacgtgcatccgcacaccacctagcacttctgcctctcactaaccatgaaggtcattcctcgttttacatttcaagtctctttctcatgtgtggccctagccagantggttacaccacttccacttccagggcatgtaccctagagcatccaacccttcgaatgtgtaaccaaccactacatactcgagccaccacacatgaatgcgtaaagtcaaaagaccacgtcaaagcccaagtggctnggcgaatgcgcggcacgtatgagtggaagcaagagtgatcgcaagtgagttgaaagtgacgggcgtgtggcagggtgctttggggggtattttatataggggattgcctcatgaaggcactcaacttttcctactaggtcgagcgaagagagcaagcgatctcgtaagngcactctcccttgtgatgctccccccattccacgtaagnttaagttcactgcgaggaggaagcctcactccaggnctctgagggtgcagtttcaaactcactttggtgagagcgccatgggagccaggtcactgggcatgagaccgggcggttccacctaatgtgacagtcgccccggtgccctaatccttcacaatcggactcgctcactctgtcacattttggaaagatgcttgcctgatcgcgtaaagtgggcataatgccctcccaattttaaagcgaatccgcgtgcatgagccagcatataatccaatcccatgtggctccttataatatgcgtaacaccctcccataaacggtgcaacgtggaaacggcttaggaaaagggactgtttcgtgcggaccatttatacttaacgattggcccttggccgtttgattcggcgggacggggcattcccgttacagtggcattacttaacccttgtggaaacggaataatatcttgggttgacttttaaatcaaatgggcgtaccacaaagtgc

SEQ ID NO: 555920 - DNA, 166 bp, Homo sapiens
actttaacgagaatgctaatacaccagctgcccgtcttcacagattcaatgaacaatggtgaaaagacagtacagaaatgaggcgtctcagaatagaggtcaatgtggagctgaggacagctaagaaggatgaccagatgctgacgaggagaaatgtaagctcatt

SEQ ID NO: 555921 - DNA, 274 bp, Homo sapiens
agcgcaatgattcctgattatgatgtgtgtatggtgttatgttgggaggaagggtgtagaataagaaatagagggaaatttggaaatacaaaaggagaggaagaagaagaggcatccgtgctaggaagactgcatcagttcttagttaagatgatgtggctcctgagagtggcgatactacatgtgaagaaacctgaatcacagaaggaacagaccccagagcttgggaagaaaaaacgtggcagaggaaaagcccaagttaaagcaacaaatg

SEQ ID NO: 555922 - DNA, 143 bp, Homo sapiens
ggttcaacacagaatcaaaagattcgataccataaggaggtgctgcttcagtcaaggcagcaatggccaaagcactgatgggccgaactttctgctgctcatccacaagacctctagtcccaactactaaggaggctgagcag

SEQ ID NO: 555923 - DNA, 706 bp, Homo sapiens
gggtagaagcagagtctttagacccgacggttcaaggccagtggatgtgggtggggatgatccacaggagaaggtagttacctctgaataacgaggcatggacatacggcggttctgtgaacgatctggctagagtcatggaagtaccacactgtctgaatgagtcaccagagggtgtacaataggagtgcttgcagatggctctcacgactgtagcatggcgtggtagtctagaaagtgctctgataatagctctgaggcagcggaggttccaggttctccgctaacggatggtgcatgtctagatggaacccgttgcaggctttggtacggggaagatcatgagtcctattgataccacagacttcttatagaaaagagtgagagaaagaaaagatggttcaggagtagaggagaaggtcagggcgaaaggtggttccatagtcgaggaggagactaagctgtctgtagaagagtcggaggcagttggagatggggttgatagcaatggtaggccaggggagctagctgagaaaatcgacccttgaacgaacaaagggttcaaggaattaggcttggcgttaaattggacaggaaaggaacacaaagaagcagaagaaaggaaacgagatgagaaagaagggtgaaatgaaacctggaagtgctcaggaaggacggatgattaaagaaaacatgaataagacgc

SEQ ID NO: 555924 - DNA, 1019 bp, Homo sapiens
gtctttgaggtctttgaggttttttggaattcacttgctggagactacagctggcacaatccagcccagggcgccgccacgtccacacgacgggaaaggcaaagtacacaaaggaaaaagagaacaacggaacaggagagcggccaaactgagaaagaacacacaagcaaacggccacaggcaaaaacacaggccatcacaatgaacacaacagacacacaagcagaacacactaacaacagacaaacgaacacagacaacaaacgcacgccaaaaccacacagaacacaaggcccacaaaacaggaaccgaacaacgacaaaaaaacatgaaaaaaggaaaagataaaccacaaccaggacaaaaaacggaaaaacaagcaagacacaacacagaagcaaacacgacgaagaagaacagcaaatcaagagcgacacaaaagaaagaactgagaagtaggaaaagacgagcacaaacggacaggtgcgacaaacgagcacgcagaaaaagacaacgccgcaaggaacgaacagaacgagagcgcaaagaaaaagaggaagaagagcaagacgagaaacagaaccacaacaacagacaaaaaaaagaacacagaaaacaaagaaaagcacaacagaaagaaaaagagaaagaaacagggcgaagaacgacgaacgaacgcaacaagagcgaaacacacaccgaagaagacaaagagatgaggaagcaaagcaaagaagcgcgaacagagagaacaagaacagaaaagcgagaaagaaaccggagaacaaagagaacgaagcaacataaacactagaacacacagagaaaagaagccaacaacgagaacgagacaaacagagaaacaaaccagacgaagaagaacagtagaggagaagcgcagaaactacagcacgggaggcaagagaaagcacgacccgagcaccaaagagcagaaaggaaaaacgcaaaccacgacacccacaagcgagcagaagcgacacaaaaaagcaagaccacac

SEQ ID NO: 555925 - DNA, 808 bp, Homo sapiens
atctcgggaatggactcagaagtatgccagtgtgatgctaccttaaaagtcagaataacctgcattatacgctggaataagactttgaatgaactgttccttttttgattttcttatccggctgctcccctatcagacctcatcttgtttaatttctatattttgtttagctccctccattcattcacatgcgcatctgagaagactgttaagttcttccagcttggacaataactgctgtgtagaaactgtaaagtagttacgaagagaacagttgcccaagactcagaattttttaaataaaaaaatggagcatgtgtattatgtggccaatgtcttcactctaactggtaatgagaggtaaaaccattcctcagtgtctaacatgctgaagaaatcatctgagggggagggagatggatgctcaggtgtcacatcacaggatacatgcgttattctagcagcatccatgctgtgtacgccttccactgttagagattggaggttacatgatatggctgttatgctcataaactgatgtggctggagaatcggtaatgaatttattagcatcaggagaaccggaaaaatgtggaccgtattctagtgcctgtcactgagggactgacctgtgctggttctaccgagactggactgggaagtcaaaccccccttggtatcccaatagggtccaacatttggatctcataatgcaggggctggaggcacagaacaatttcaccccgctaacgcgcgaaatggggggggcacggggccacaaaaccgcgacgggattgccaaggggact

SEQ ID NO: 555926 - DNA, 709 bp, Homo sapiens
gctcgcgcagtgctccgccgcagtctcagctgcagctgcgagggactgagccgtgcacccggaggagaccccgtgaggaggcgacaaacttcgcagtgccgcagaacacaacgccagaccctgggtagcctgcagcatggaccagcctgttccatgccccgtgactggacagccctggatccatgagcccaggcatccatgcagcatttaggcagatgttctcggaaggagacagctcagaaggacctgcagcatatattcgcgatgcgcatcagcgggccgaccgcgcccactgcagggcgttgctcggcggcgccctcaacgatcccattgccacctccacgtaccttgctggacacacggacgagcccgcacgggctgtgcatgggactcatccgcggagtccaacgtgggcacatttccatgtcccgggtgcccagtggagggcacgagggtgctgttggcagccgggggcagtgcggcgttcaaagggttgacaccgaagggccactaagccggggaataccggcgcgtggccagctggcccgtggcggatacccccaagagcggtacggcaccaagccgaacggtccgtccccgtgggcaggctatacgccgaagcctaggagcacccacaaggacatccacgggtacatcgcatctcagatgacgaaacggtccaacgacaccggggccctcgaccgacaag

SEQ ID NO: 555927 - DNA, 203 bp, Homo sapiens
ggacagttattaaccccgaggaagctcacaccatcataccaggacttagcagacatttatctatcaacagtgagtataccacttaaatttcgtcatatttctcagaatggtatccttcagtcttttccacaatatacgtatatggaaattgctaatagcattcacattactattccataaacacccgaattctatcgtaaacc

SEQ ID NO: 555928 - DNA, 415 bp, Homo sapiens
  misc_feature (4)..(4): n is a, c, g, or t
  misc_feature (36)..(36): n is a, c, g, or t
  misc_feature (44)..(44): n is a, c, g, or t
  misc_feature (105)..(105): n is a, c, g, or t
  misc_feature (124)..(124): n is a, c, g, or t
  misc_feature (163)..(163): n is a, c, g, or t
  misc_feature (271)..(271): n is a, c, g, or t
acantgtcttccacagtggtggaactatttaccccncccatcancggtgtaaagcatccctatttttccacaacctctccaacatctgttgtccccggacttttnaatgatcgccattctaacnggcatgagatggtatcttaagactcagaggtgtccctcnccatggaaatctttagtgaaaggtgaaagatttatgtgatctgaagagaagccagagtataattttctactattttcaatacaaagatgtgttttcattacaattagnggaatataggcttctgtgagctagcctggaagcaaacataatcattattgttcattgtttctgtgagaaaatgtaatgctgtttctaaatattgacctaacaataaactctgaggaattcatgattgtaactggaaaaaaaaaa

SEQ ID NO: 555929 - DNA, 262 bp, Homo sapiens
caggagaatcgcttgaactcaggagacggaggttgcagtcagccgagatcacaccactgcactccagcctggccaacagagcaggactctgtctcacaaaaaaaaaaaaaaaaaatcttttcctccttaagtcaaccgggtgcttctagggatgactccaaataccttgactcattacgagcaatttaatttacctagtttattccaccaagaattaccggttcaagcaaggtgtccatggaagacaaggagccatgggccc

SEQ ID NO: 555930 - DNA, 589 bp, Homo sapiens
  misc_feature (40)..(40): n is a, c, g, or t
tttagtcgtctgatagtcttgggagatgccagcctatagngcgtttgtttgtttgtttgtttggggagaggagtctcactctgccgcccaagctggagtgcagtggtgccacctctgctcactgaaacctccacctcccgggttcaagcgattcttctgcctcaaattcccgagtagctgggactacaggtgcacgccaccacgcccagctaattttggtatttttagtagggacggggtttcaccatattggccaggctggtctcaaactcctgaactcgagatctgcccgcctcgacctcccaaagtgctgagattgcaggtgtgaaccaccgtgcctggccctctctttcttttctttgatttatttggctggatatttggtggagcctttttttttcttttttttggaaacactcccatcacctagcctggagtgcagtggtgggatctcggctcactggagcctcgattccctggactcaggttatccacctcagtctcccgagtagcagggactacaggtgcgtgccaccgtacccggctaatttttgggtatctttagtagagacggggtttggccatgttg

SEQ ID NO: 555931 - DNA, 254 bp, Homo sapiens
gacggggcagccgggcagagtggccagcgagaggcactcctcacaacccagatggggcggccgggcagagggctcctcacctcccagatggggcagccgggaagaggcactcctcacctcccagacattgggtggccaggcagaggcactcctcacctcccagatggggtggctgggcagaggggctccccacttcccagacaaggtggccgggcagaggcgttactcacctcccagatgatgggctcaaacaa

SEQ ID NO: 555932 - DNA, 804 bp, Homo sapiens
acccaggctggagtgcagtggtgcgatcgctcactgcaacctcagcctcctggatttaagtgattctcctgcctcagcctcccaagtagctgggattacaggtgtgcaccaccatgcccggctaatttttgtatttttagtggagacagggtttcaccatgtggccaggctggtctcgaactcctgacctcgtgatccgcctgcctcagcctcccaaagtgctgggattacaggtgtgagccaccacgcctggcccagtccaaaatatttaaagatgtttccttagtgtcttgaagttttgcacaaaattctttttttgagatggagtctcactctgtcacccaggctgagtgcagtggcgtgatcttggctcactgcaacctctgcctcctgggttcaagcaattctcccacctcagcctcccaagtagctgggattacagacgtgtgccaccatacctgggtaatttttgcatttttagtggagagggagtttcaccatgttggccaggttggtcttgaactccctgacctcaggtgatcctcctgctcggctcccaaagtgctgggattaccggcatgagccaccgtgctcagcgcaaaattctttatggacttttcccttggccatgttatgtccgggagcctagtctgcccccaatactttgcccagattggctggtgtggtcattagcgccggtacattagccctggtcttgttgtaacctgtttctcaacaaggtggccttaccccaggggtctttttggcccccttttcgggctttcaagcgaggtccttctttta

SEQ ID NO: 555933 - DNA, 271 bp, Homo sapiens
gttatattcactgtccaggtgccagccccgcgtgggggctcacgcctgtaatcccagcattttgggaggctgaggtgggcggatcacctgaggtcagttcaggaccagcctgaaaccccgtctctactaaaaaatacaaaaattggccgggcgtggtggcgggcacttgtaatcccagccactcaggagactgagacaggcagcattgcttgcaacccaagaggcagaggttgcagtgagccaagatggcaccagtgcaatcccagctggg

SEQ ID NO: 555934 - DNA, 122 bp, Homo sapiens
cagtatccccgctcgggtagcctgtgactaacagtcaataaagtgattggcttagtgcgcgaaatattatgctttgttgtttgcatatatagagtcatgggtgcattcatatgctatcgcat

SEQ ID NO: 555935 - DNA, 225 bp, Homo sapiens
attcttaccgtctatgtgaggtcacctggaggcctgcactagcagagaataggtcggaccgaaacgccgtctgcccgggaactcccagaagtctggccttctggctagcagctatgcggcagagcggagccccgcgagagcccagaggctcccgcctgcagaccgaaacgacaaagttgccagggcaaccatctcatgctgagatcgcggaggtaacgcctcgcg

SEQ ID NO: 555936 - DNA, 537 bp, Homo sapiens
ctgacaagcagaaagctaactttgatttgataaacagctcttcatatgccacaaaaccgaaactattttacagtgctgagaggtccagataggtccaaacatgatgattcttaaatgagtgctttggttaaataggctttgacttggtttttggcattacttgtataattatatcattccaacgagtcactacaggtaatccattcaaaacatgacttgcttaaaactattacaaagcacttaaccttggccttgcctggaaatacccttaaaaagctggccaatagcaacaaaatgttcctttcctttcatttaggcaaaagaaattacatgggttcccaaaattaaaaattcatttttttacatggttaaaaaaacaaaagtttgccataaaccccttaaaaaaaaaaacaagtttctaataaatatctggccctggggaaaaaggcgcctttattaaaaacactggaccctggggaaaactctttccaatgggcttgggaaggcctatgaactttatgaatctattttttggaa

SEQ ID NO: 555937 - DNA, 235 bp, Homo sapiens
tacaggagctaagaggcacaaggaggggcatgatattgtatgcactgaacctccacctcctgggttcaagtgattctcgtgcctcagcctcccgagtagctgggacgtatgggcgtgcaccaccacacctggctaatttttgtatttagtagacgatggagtttcatcactgttgcccaggctgctctcgaactcctgagctcaagcaatctacccacctccttggtgcctctgg

SEQ ID NO: 555938 - DNA, 809 bp, Homo sapiens
agcggagtcagtgattttggggcagagaattttgcaacacgtggtagtgaactgtgagtgagtttgaggggtctgaacactgaaagagtcgaatgcgtttgtgtggcagggtgtcctggtggatatggtttctgtcaaggttccagattctcataaatcgtgtgagcgtcgccgacgacctctgcagatcagacaggggccctttcgactagcctctgctgaaaggacctagaaagaatcccttaggatgaagctgagtcttaccaaggtagttacatggctgtcgcctagggagaaacatagataacctgggcaaaacaggggaccactaccaatggatattccaggctgccttctgtataccaagactggctccgacccaaagctcaaccatcacacgctgcgataatatccacggggttccctgccatggcttcagcgttacagctgtgcatcccgtagcagatcatcatgacggtctatgacagaatatcaagaaaggcagtaggacaagtttataggcattgccagaatcagatcttgtactgcatccctggcacgaatcgcagatcaagcactctggcacgagctggttaatgtaacctacgaagacgtcctgagtcctggtgatgagacgtgggttggcaaagggacgaagattgggaacctggacctggtgttcccaaaggtatcaactggccacactaccaagaacgggaccatttcataacccagaaatggtatcccagatgcatactccggatgggcagaaagtacatcggtacgggccgacgaacgaatcacataaa

SEQ ID NO: 555939 - DNA, 845 bp, Homo sapiens
  misc_feature (23)..(23): n is a, c, g, or t
  misc_feature (114)..(114): n is a, c, g, or t
  misc_feature (132)..(132): n is a, c, g, or t
  misc_feature (139)..(140): n is a, c, g, or t
  misc_feature (142)..(143): n is a, c, g, or t
  misc_feature (146)..(146): n is a, c, g, or t
  misc_feature (152)..(152): n is a, c, g, or t
  misc_feature (180)..(180): n is a, c, g, or t
  misc_feature (193)..(193): n is a, c, g, or t
  misc_feature (195)..(195): n is a, c, g, or t
  misc_feature (205)..(205): n is a, c, g, or t
  misc_feature (220)..(220): n is a, c, g, or t
  misc_feature (232)..(232): n is a, c, g, or t
  misc_feature (245)..(245): n is a, c, g, or t
  misc_feature (247)..(247): n is a, c, g, or t
  misc_feature (276)..(276): n is a, c, g, or t
  misc_feature (285)..(285): n is a, c, g, or t
  misc_feature (289)..(289): n is a, c, g, or t
  misc_feature (293)..(293): n is a, c, g, or t
  misc_feature (300)..(300): n is a, c, g, or t
  misc_feature (304)..(305): n is a, c, g, or t
  misc_feature (318)..(318): n is a, c, g, or t
  misc_feature (349)..(349): n is a, c, g, or t
  misc_feature (353)..(353): n is a, c, g, or t
  misc_feature (362)..(362): n is a, c, g, or t
  misc_feature (368)..(368): n is a, c, g, or t
  misc_feature (374)..(374): n is a, c, g, or t
  misc_feature (388)..(388): n is a, c, g, or t
  misc_feature (393)..(393): n is a, c, g, or t
  misc_feature (415)..(415): n is a, c, g, or t
  misc_feature (418)..(418): n is a, c, g, or t
  misc_feature (427)..(427): n is a, c, g, or t
  misc_feature (429)..(429): n is a, c, g, or t
  misc_feature (432)..(432): n is a, c, g, or t
  misc_feature (435)..(435): n is a, c, g, or t
  misc_feature (438)..(441): n is a, c, g, or t
  misc_feature (453)..(453): n is a, c, g, or t
  misc_feature (456)..(456): n is a, c, g, or t
  misc_feature (467)..(467): n is a, c, g, or t
  misc_feature (473)..(473): n is a, c, g, or t
  misc_feature (478)..(478): n is a, c, g, or t
  misc_feature (561)..(561): n is a, c, g, or t
  misc_feature (576)..(576): n is a, c, g, or t
  misc_feature (610)..(611): n is a, c, g, or t
  misc_feature (702)..(702): n is a, c, g, or t
  misc_feature (725)..(725): n is a, c, g, or t
  misc_feature (730)..(730): n is a, c, g, or t
  misc_feature (742)..(743): n is a, c, g, or t
  misc_feature (749)..(749): n is a, c, g, or t
  misc_feature (754)..(754): n is a, c, g, or t
  misc_feature (763)..(763): n is a, c, g, or t
  misc_feature (768)..(768): n is a, c, g, or t
  misc_feature (772)..(772): n is a, c, g, or t
  misc_feature (774)..(774): n is a, c, g, or t
  misc_feature (777)..(777): n is a, c, g, or t
  misc_feature (781)..(781): n is a, c, g, or t
  misc_feature (832)..(832): n is a, c, g, or t
gttttgcttgggtatataatgangttgagctatcccatctttcttctctatggaatatagtcacacaaacaaaaaagatgaatctcacccggggggggtctttatcagaaatangccccaatctggttaggnaataganngnnaancatttnctcctcctaggcctaagattcttcatgnaaaaattataagncngaataaagancacttctaagtttcnataattcagggngaaatatcaattnanacatcaggagggaggcgggcggcggggcnatcctttcnggcncccngaggctnggcnnggccacatggctngcttagcgcacgtatggcacatgcctctctncggncgcccccgnggggtntttccnctctttctctctcngcgangacactcacaatgtcccaaaangcntcccttccntngcnttnggnnnnggggggcgcggncgnagagcggtgtnacggcnaatcnacggcgggcatcccccaccaggaaatacatctttgttgttgtcactacagcataaactaatgaaagctaattaaatataagantttgctaataattgnggatccgtacacaattaaacttaaaaccaaaaanntctaatagaaaactcataatttaaaatgtgacataagggggaataagttaaaaagcaacttttaaaaattacaaaaatagtatttgtagtnaaataaatggacttaaacatgtnatagnatttttcctgtnntttttnttttntttctttgnttgantatncnagnaagnttcaacattttttcaggattgttcttcatcattaagatattccaggttatntttccccattata

SEQ ID NO: 555940 - DNA, 1115 bp, Homo sapiens
ctcgcatggagactcctccatctctgtcttccctgttgtgacagtctcagagcctacgttctttcaatggctgggctacaagatggtgacaggctgcccaacctggtttgcaacgccacctcagtaagctgagacgtggtaatcgccatggcaacggggctgcattaaaagcattgtgcgcacaaagtgaaaggctgctgcctggcagagttcagtctggtctcactgcacctgttccctaattaagatgcaccttttggttttgtcttttgaaaaaaacaaaatgctccctttatcgccacgaggcaaaagacaaattaaggccaagatcctttcatgcccaatatgggcctgcccggtggttggacgcatgggggatcatggcgcagcaacgtgagaaagtgcacagtgatttgctgctgttacatcctgagaaactggaccggctgtcactcaacagtcctcgcaatacctggcagagtggcgtgtggcgactggctctacgtcccgcacacatgccgctcctgatactcacaacgaacgcaacagactgcactgctttcccagccacagagcctacctggcacactctaacgcctaaccatagaaccttctgccatcaacaggccacaaaacccactacttccctgctctatgcaggcttctgaccttggttcccctagaatcctccctccttatcagtatctgcgtctaggcctcgggggacacccacaccgccgctctgtccttcgtctgccctcaccacgaccgcgcttctcactgcccgccgcacccactacgctccatgtgcccgtcactcagccatgctcaacactgcaatccccatcggcaccaccctcagccgcgacacccacccacccgcacaccgcaacacaaacccccacaaccgcaaccacccaccacacgaccacaacccccacacacaccaccaccaccccgcatcgcacaacatcccatccacacccacacaccacccaccgcacctgcaccacaacacccacaacaccacatccagcaccaccaagacccacccccacaccgaccaccccatccgcacagacccccccgccacacacaccacccacccgccgccc

SEQ ID NO: 555941 - DNA, 226 bp, Homo sapiens
agctgagtatctgttttgtgtcaggattatcattattacaggtttctcatttattgcatagaggtgttatagtattctctgatggtagtctgtacttctgcgggataggggtgatatcccctatatcttttttttttttttttttttttttttttttttttttttttgaaaaaaaatttgtggttttgcccccagggggggggagacggggggggggacccctcaa

SEQ ID NO: 555942 - DNA, 140 bp, Homo sapiens
agataccatagtcgcaagcctcatcaaaatatatagtaatcccacagttgtcccacattctgttccaactttacaaggaaaggaagaaataactggtggttatgtatcactgtctatatactcataaaataagtgaataa

SEQ ID NO: 555943 - DNA, 231 bp, Homo sapiens
ctgagagacggtgaaatggagcgtctgtgggcactggtccatgtcactcctccagccaagtgtttttgttgttgttagtttgtgttagcgaccgactctctgtcacccaagctggagtgcagtggcacaatctcggctcactgcaacctccgcctcccaggttcaagcgattctcctgtctcagcctcccaagtagctgggattacaggcatccaccaccacgcacagcta

SEQ ID NO: 555944 - DNA, 650 bp, Homo sapiens
catcctggaactacgctccctgcaaacccacagcagcgctgcggtgaccctgaacgccaccccagccccaaacacacacgtgaagctcagcaaagcgtgccacctgccggggtcccagcaaacacgcccggagggaagaaccggcggaaagcactttgtttaaaacagaaaaaaaagtaaactctcccggggcccagcctagccctcgggttctcctccttcccgagctgaatggaggaaggcgccgcgcggggcgggtcagggcggggagccgagcgcgctgggcgctgggtgcgcctcggccggcccgggcgcgacccacgggccaactactccccggggccggcgggaacagggcgcgccctcgcctcaactcgcgcgcaggccggcgccccggtgggggtgggaagagtccgggaactcacagccgcttgtcctcgggctgcagttgccagtgcatggccagcgagaagccgaagaggctcccggggtctccatatttccggatcacgttgtcctcccgagtgtccaagttgaaggctgcgccgagccgggacaggagccccgccgacaggtagagcaagcacagctgcccggcggcggccatgggcggacgcacggggaggggagcggggacctgcagcggccgc

SEQ ID NO: 555945 - DNA, 294 bp, Homo sapiens
  misc_feature (5)..(5): n is a, c, g, or t
  misc_feature (32)..(32): n is a, c, g, or t
  misc_feature (38)..(38): n is a, c, g, or t
gtaanccctcccgttctgttggctctctgcantggaancgcttactgccgcggggcccccacgagcaacagccgcttgtcctcgggctgcagttgccagtgcatggccagcgagaagccgaagaggctcccggggtctccatatttccggatcacgttgtcctcccgagtgtccaagttgaaggctgcgccgagccgggacaggagccccgccgacaggtagagcaagcacagctgcccggcggcggccatgggcggacgcacggggaggggagcggggacctgcagcggccgc

SEQ ID NO: 555946 - DNA, 303 bp, Homo sapiens
gagatccccgactacatacttccggacgaagcctcgttttttatcaggcccaaaaccgaacagttggtccagcctatggtcggcgcagcaagaacagatatggcgtgaagagacggccaagcagcaccagcgtgcctttgggtgataaggggagagaaaattgtgaccctgtgagaccctgctcctgactcttgatgttcacccttataactctctggtcccagtagctagccagtttgtcacagctgttatgtcagcttaatttggtttgctctgtctgaaggatgaagaagcgcctggaat

SEQ ID NO: 555947 - DNA, 378 bp, Homo sapiens
catcctggaactacgctccctgcaaacccacagcagcgctgcggtgaccctgaacgccaccccagccccaaacacacacgtgaagctcagcaaagcgtgccacctgccggggtcccagcaaacacgcccggagggaagaaccggcggaaagcactttgtttaaaacagaaaaaaaattgccagtgcatggccagcgagaagccgaagaggctcccggggtctccatatttccggatcacgttgtcctcccgagtgtccaagttgaaggctgcgccgagccgggacaggagccccgccgacaggtagagcaagcacagctgcccggcggcggccatgggcggacgcacggggaggggagcggggacctgcagcggccgc

SEQ ID NO: 555948 - DNA, 1273 bp, Homo sapiens
  misc_feature (671)..(671): n is a, c, g, or t
agcggggtggctgggcgtgagcgagagctcggcgggcggctggctgctcgtgtggcggtggcgcggctggttccggcccagccatgtgcggacgaggccccgcggaagggcagcttctcggctgctcgtgtgtgcctgcaccaacggcctcatccatatgccctgctggcccttggccgctcgtgcccggcccaatgcctggtggggcgcttgtgtgcggcgtccaatgaatgctggtcatcaatgaacttcctgagacatgacctcgtgcttgccctgacaatcttaccatctgcatgggaaccacgttaggccggaaaggcttgcctactgagtgccggttgcggtgcctgttgccaagcacgccagcaatctcttccgactccatgtggttaacgagaaacgcattccagaagtgggaaggccttcattaagcaccagagaggctgttgtttgctgacaagaagttcataccgttggatcttcctatactaccaagagtaatggatcatatacgccccgcaatgatattggcctttcgttaacgcaaaatgggcagagaccttttcgcccgtgtttctataggcggccccattgtggtttcggacagactagacaccccacaagagggggtttcatccgaatggtggcccaacacatatgggcgaatnttcccccgttattttctcctctgggttatgcttcacacgcaacgcggaaacaagcggcaaacatttccgagccgtgttcaaggagacgttaacgcgtatgtagggtttatccttgtctatggtttcatctgtgtgatcagcgttccagttggtacacagcgcgaaacgttcgtagagcacaagcccaccgagtgttttagccgcgagctgggtcgaccaacagcgagggcaaacgccaccagaactccgtttggtcccctacgagagcagacccaagcaccatcgttttgggaacactttccccaacctttggacaaaggtttcccgaaagcggcaacagagggggccgcacatttttccctttttttcccccatttggtgagttcttccccgcttactcaggccgagcaaccaccacagtgggcaaagacgccgcacccgatttataaaatgtttgggttttagggccgctgttggcgcaccaggggagcacagacgacagtttaccgccaagacacctgcgccccttcttatggtcccacaccatatttccccccaaagagtttcctatttatggggtcgagagggaaaaattttttcgg

SEQ ID NO: 555949 - DNA, 246 bp, Homo sapiens
  misc_feature (46)..(46): n is a, c, g, or t
  misc_feature (224)..(224): n is a, c, g, or t
tgatccatgaaataactgataagctcaacttcgttaaaattaaaanattctgctctgtgaaagcgcttaccaagagaatgaaaagacaagccacagactgggaagaaatatctgcaaaatatctaatgaaagactggtagccaaaatatataaaaaactttaacaggaaaacaaacaacccacttaaaatgggccaaagacctttatagacacttcactaaagnagatatacagatggcaatcaag

SEQ ID NO: 555950 - DNA, 264 bp, Homo sapiens
cttcgctcgccccactagagaacactcaccaagacctcaacccctgacccccatgcctcagggtactcaggaaaaaaaaaagaagaaatagagaacaatgatcaaaaaaaagaaaaaaaaaataaaaaaaaaaaaaaaaaggggggggtttttttgggggcgcgcgggggggggctcatttggggggtggggggtttttttcccggggagaggggttaaccccgggggggggttccccgggggggtttttttgaaaaaaaaaat

SEQ ID NO: 555951 - DNA, 391 bp, Homo sapiens
gacaatggaagggcagaccagtggatggaccagcatggcgtgagctaagaagcagcagctgggccttgttcttggacggtctcaagggatgacatagggaggagactgcaaaactgatgagaaaatattaggctcgactctatattcttcaggcaaggcccgaggggatccactcaccaaacaaatttctgataaccaatactgcttcaagaactgggtcctgggagatggtatcgtcatggcgtacgataacgtcctgcagaaactcctggaggaatatgggagtgatgacacaaggaatgtgaaagaaaccacagagtacttaaaaacatcatggatcaatctcaaacaaagtattgctgacagacagaacgccttggaagcttcagtg

SEQ ID NO: 555952 - DNA, 135 bp, Homo sapiens
tctgtgtatcctccctattgcttttctacagcatgtagtcagcatgcgtctcaggtcccaagctccctcactgccaccggagactgtgtggcccccacgtctccccatctacctactacccttaacctgtattct

SEQ ID NO: 555953 - DNA, 133 bp, Homo sapiens
cgaaatgtaagaatgtcctgaccattgatttaatgaccagcacattttaatatgctgacagcaagaatctttatgacaagtctccaaataggttgactgtaacccaaatacagagtgttgccaaatctgtctc

SEQ ID NO: 555954 - DNA, 563 bp, Homo sapiens
gtatgcaagaacaccaggcaggccatgtcggatgacacagtgactggctgtctgctgcacactgcacgaagtgattaccaatgaacatggagaacgccaaggccttacgggatgccggtggcattcgagaagttggtcggaatctccaaaagcagaggagataaacactctccaaaagtggtcaaaggctgcatctcaggtcctcaacagcatgtgacagtacccgagatctgaggagtctctacaaaaaggatgcatggtcacaataccactttgtagcctcgtattcaaccatcgagagggaccggcaaaggccctactcctcctcccgaacgccctccatctcccctgtgcgcgtgtctcccaacaaccgctcagcaagtgccccagcttcacctcggcaacatgatcagcctcaaagaactggaaaacagactacgagtgcaccggcagcaaagccaacctaccatggagctaaaaggcgaacacacttccaggacagatgccatgacagctcaacaacactggaatttcaacttgtctaggaactcttatggtgcgcc

SEQ ID NO: 555955 - DNA, 447 bp, Homo sapiens
caggcggaaagcttggtggccaagcagtctgtgtgcttccccgctgatggagaacgttgcgttgttcacaatagggcctcatgggtgtaaccgcatggcaaacccatggctggggcagctgcctgttgccgtctgttttcagtaactgctgctctgttaactgttctattttgaaactacgggtgttgttttttacaacaggtatgtttttgtttcaaaaaaaaggattgcttttctcaaattttttgcaaattgtattgtcaacatgggtcatttaaagtcccggataaaaccaaaacctgctgtgggacctttgtacaagtttgattctgtattttttattccagtgtggcaaatgtgcccctctgtattttttgaaaagtgcggaaaaggttgcttttaccccctgtttttaatgtaacagtaaaagttttcacatttttttca

SEQ ID NO: 555956 - DNA, 262 bp, Homo sapiens
atcccagcactatgggaggctgaggctgagaggatcacttgagcccagcaaggttgagaccagcctgggcaacatagtgagaccccatctctacaaaaagttttaaaaccaggtatggtggtgccctcctgtggtcccagctactcgggagctctgaggtgggaggatcacctgagcccaggagactgaggctgcagtggggtgtgacttgcactattgctctctagcctggacaaacagagtgagacccttatctcaaaac

SEQ ID NO: 555957 - DNA, 200 bp, Homo sapiens
ccacagatgtgcctgaccagtgtcctgctgtgtgacctgctgtgtgtctgaccctgacaagggacgtgcagtggctggggcgagaacgacctgtggcgtctcttttacctattggagccgatgatggtggccaatgttcctccacaatgcacgaccttggacctcaatctgcctgagcacaccatggtggtacgaagagg

SEQ ID NO: 555958 - DNA, 476 bp, Homo sapiens
  misc_feature (103)..(103): n is a, c, g, or t
  misc_feature (145)..(145): n is a, c, g, or t
  misc_feature (175)..(175): n is a, c, g, or t
  misc_feature (184)..(184): n is a, c, g, or t
  misc_feature (239)..(239): n is a, c, g, or t
  misc_feature (301)..(301): n is a, c, g, or t
  misc_feature (333)..(333): n is a, c, g, or t
  misc_feature (351)..(351): n is a, c, g, or t
  misc_feature (420)..(420): n is a, c, g, or t
  misc_feature (450)..(450): n is a, c, g, or t
  misc_feature (457)..(457): n is a, c, g, or t
  misc_feature (476)..(476): n is a, c, g, or t
tgttgaaagaggaacgttctctcaaatatagtatctaaattaatcctttcacggccattgaaaggattcagccatttctaggaccattctcattttctagatnaggaagcacggattcagagaagcaaatgacctattcactatnaaaataataaaacacaggtcttttgacttnaaattctgntttaagttatctcttttttttctatatagctattataattaccacaagaattacngaaattctgtaagtcccccagtataaaagatgaggaaatgtcttatatcaatttagtactgngaaaggtttaagctttagagcccaatggatgnttttaattaatgaatgancttttccaatggtttagtctggtcttaccctgctattaaaggatatccccagactgggtacttataganggaggttaccgacttacagttccccatggntgggganggcttaccaatcatgggcn

SEQ ID NO: 555959 - DNA, 1985 bp, Homo sapiens
  misc_feature (283)..(283): n is a, c, g, or t
  misc_feature (298)..(298): n is a, c, g, or t
  misc_feature (301)..(302): n is a, c, g, or t
  misc_feature (353)..(353): n is a, c, g, or t
  misc_feature (573)..(573): n is a, c, g, or t
  misc_feature (586)..(586): n is a, c, g, or t
  misc_feature (607)..(607): n is a, c, g, or t
  misc_feature (717)..(717): n is a, c, g, or t
  misc_feature (761)..(761): n is a, c, g, or t
  misc_feature (867)..(867): n is a, c, g, or t
  misc_feature (973)..(973): n is a, c, g, or t
ggccgattctaatagtttgccaagctctgccgagtctggctggcactacagcggtcctgaaggctgtgtgctatcggtcgtgctgccaggagcatggtggtcagccgcgtataggatgagccgcattggcacaagtgagggtgagggagacccactgactggatcgttgtgcgtgatcaggcggactgtcctagcaagcgttcatgcacagctggcgaatggacgggagagagatgctgtcaaactgtctccatggataatctgaagagactgtgttcctggnagtgcaggttcaaantgnngaaggcaagtgtgaggtgacggaagtgagtaagcttgatggagaggcatcnattaacaatcgcaaagggaaacttatcttcttttatgaatggagcgtcaaactaaactggacaggtacttctaagtcaggagtacagtacaaaggacatgtggagatccccaatttgtctgatgaaaacagcgtggcatgaagtggagattagtgtgagccttgccaaagatgagcctgacacaaatctcgtggccttaatgaaggaagaaggggtgaancttctaagagaangcaatgcgtgaatgtacatcnagcaccctcatagacatgcagacggttcatcctcatgtggacatgtattctattaaccgtacacattgaagtgagacgatggtcaggtaggatcaccatgtatgtgtggncagacgcgaggtgatctgagagaagcttgacgtgaggctgcaantggcctaaaagtccctggaatccctatcagataaacctccagggtccatagagcacctgattgagaagatcacatatactgcgccacatctatggtgagtattccncttgctgtacacgtgaacagcctgtgtccctgatcggatcagccaagaaaggaggtcttctactagaagttgcttttagcacaaaccacatagtagcctgagttgnccagagggcacctgtataggcccaatgggctacgcgtggcagaacatatacggaacggcatgatcacgaatggatggggaaaaggagttacccagacaattggctatgaatggtcagaacggtctactgagggagaattgtaacttgaattcgtggggtcccctttgaggaaaacaatgatttgctcgacgtcgatagagttgcgacggagctgtttagaagatctccttttggggcccaacgaagtgcggacacccgtcttggccccgatcaactccacgcaatgtggaaccccttatcaagttccgaacaacagcaaacccggggaccacgacctgtgcattcttggttgtctactgggcaacgggtgccggaaagggcctaatcccccttgggatgcccttgaaggggaaacgaacaggcgaggagcaccggaaccaggggggcttgggcaaaggcaggtggttacctaaacctttgtgggaacgcgtgccgtttgaataagcaagcacccttcttgggccttaattggggcgccacacgccggtgcatcttataagggggcccgagcaggggccagggcgggacgtccccagaccttgtcttgggaacacctttccagctcccaaagcttcctcttccctggaagcgtggcggccctggccgcacctcaccacgggaacattgtcacattcggtgccccaaaccatgccgtaaccctgtgggtgagcccccaggagggccccccttacccttgtcgaccatatataccagcgtgggcgctctgctcgcacaggtcaccccggacgcgcgcgccgccaacaacgcggcagcaacctcctgcaacggcgcgcacatgtcgcacaaaaccccatgtcagcgacagaacaccaacacacccgccgaccccaactctgcgcgcgcaacgcgctgacacagcaccgacataaccagcccgtgacgaccctctaaagcgagatcacaccgctgccgccctattgacattaacgcg

SEQ ID NO: 555960 - DNA, 244 bp, Homo sapiens
actaagagaatcccatagcttgtagtaatgctctgaccagcgagatgccattctcttagtgatggcggcgtagggtttgagagaagggatttggtccactttcagtggagaagggtgcagtccagacagcttgactgcttttaaatgaccaaagatgacctgtggtaagcaaccctgggcatcttaggaaagcaggtcctgtgagaagtgcatgttccccagaaggggtctctggagggacaaa

SEQ ID NO: 555961 - DNA, 1966 bp, Homo sapiens
  misc_feature (264)..(264): n is a, c, g, or t
  misc_feature (279)..(279): n is a, c, g, or t
  misc_feature (282)..(283): n is a, c, g, or t
  misc_feature (334)..(334): n is a, c, g, or t
  misc_feature (554)..(554): n is a, c, g, or t
  misc_feature (567)..(567): n is a, c, g, or t
  misc_feature (588)..(588): n is a, c, g, or t
  misc_feature (698)..(698): n is a, c, g, or t
  misc_feature (742)..(742): n is a, c, g, or t
  misc_feature (848)..(848): n is a, c, g, or t
  misc_feature (954)..(954): n is a, c, g, or t
cacgagataaggcgtccgttatcatcgggctgcttatttaataccttgcgtcgctacatacacaagcgctgcgccgctgcacctaagcgtcgagaggctatggctacggtgctccggagctgtagcgcggataggagagcgatggcaagtggggtgaagggagacccacgctgatcggtggagagcggcggacgccaccaagtcagaattgtcactggcgcagaaaactcaatggtccaggataatagaaacactgttcctggnagtgcaggttcaaantgnngaaggcaagtgtgaggtgacggaagtgagtaagcttgatggagaggcatcnattaacaatcgcaaagggaaacttatcttcttttatgaatggagcgtcaaactaaactggacaggtacttctaagtcaggagtacagtacaaaggacatgtggagatccccaatttgtctgatgaaaacagcgtggcatgaagtggagattagtgtgagccttgccaaagatgagcctgacacaaatctcgtggccttaatgaaggaagaaggggtgaancttctaagagaangcaatgcgtgaatgtacatcnagcaccctcatagacatgcagacggttcatcctcatgtggacatgtattctattaaccgtacacattgaagtgagacgatggtcaggtaggatcaccatgtatgtgtggncagacgcgaggtgatctgagagaagcttgacgtgaggctgcaantggcctaaaagtccctggaatccctatcagataaacctccagggtccatagagcacctgattgagaagatcacatatactgcgccacatctatggtgagtattccncttgctgtacacgtgaacagcctgtgtccctgatcggatcagccaagaaaggaggtcttctactagaagttgcttttagcacaaaccacatagtagcctgagttgnccagagggcacctgtataggcccaatgggctacgcgtggcagaacatatacggaacggcatgatcacgaatggatggggaaaaggagttacccagacaattggctatgaatggtcagaacggtctactgagggagaattgtaacttgaattcgtggggtcccctttgaggaaaacaatgatttgctcgacgtcgatagagttgcgacggagctgtttagaagatctccttttggggcccaacgaagtgcggacacccgtcttggccccgatcaactccacgcaatgtggaaccccttatcaagttccgaacaacagcaaacccggggaccacgacctgtgcattcttggttgtctactgggcaacgggtgccggaaagggcctaatcccccttgggatgcccttgaaggggaaacgaacaggcgaggagcaccggaaccaggggggcttgggcaaaggcaggtggttacctaaacctttgtgggaacgcgtgccgtttgaataagcaagcacccttcttgggccttaattggggcgccacacgccggtgcatcttataagggggcccgagcaggggccagggcgggacgtccccagaccttgtcttgggaacacctttccagctcccaaagcttcctcttccctggaagcgtggcggccctggccgcacctcaccacgggaacattgtcacattcggtgccccaaaccatgccgtaaccctgtgggtgagcccccaggagggccccccttacccttgtcgaccatatataccagcgtgggcgctctgctcgcacaggtcaccccggacgcgcgcgccgccaacaacgcggcagcaacctcctgcaacggcgcgcacatgtcgcacaaaaccccatgtcagcgacagaacaccaacacacccgccgaccccaactctgcgcgcgcaacgcgctgacacagcaccgacataaccagcccgtgacgaccctctaaagcgagatcacaccgctgccgccctattgacattaacgcg

SEQ ID NO: 555962 - DNA, 834 bp, Homo sapiens
gcagaacaagcccgacagttggctatgatgcttagagcacgaatcacttcagccgttacacacgctttctctccatgcgttggcgtttaagttcttgatcgtgcaaggcaccgacgttaacatcaccagctattagatagaagaacgcgaagcaacgtgttgagctgaagttcaggaacgcagtgagcgctgtatgcggacaacgttgaaccgagttctcgcgagatcacatagtacctgtcgatgtctggttccgttgctgctgggactactgatgcagccgtgtcaggcttaaatcgtgtgctgacctattcatgttgatttgtgaacactatcggttgacacttttcctctaacgtaatcatgctcggaaccttgaatagcagcctagggtatgatgcaagcataggcggacgtacctccgtggaatgccataagtcagattaccacgctgcaaccggagatgcagcacttacttaggagaatcgcctttcctgaaagccaagttggcttgctgctgaaacgcgtgcggacaaggtctgcctagacgccacgtgttcgactagagtctgagctaagcaaccatgcggactcgagtaatttccagcggttcatccttgtcccgtccgagaaacttggtcagacacataagggagtaaaccttaggaagccttgtgaaagttattcaaaggtttcataaacccggctccccgtgctatttggatcgggaaatgtgacatgcctgtttgcaattcaaccctttgaatctggcgccttttgtcgacgggtgcaggaccgtccaggatagtccttgattgtcccaaacaggattcg

SEQ ID NO: 555963 - DNA, 341 bp, Homo sapiens
gtaagccccccgtgaccagcgcccttctcaagtcagggttcctgctacattgcacagttacgcggtggcccgtgaggagtaacacctggcacccaaacaggtcaccacagtccacacctagtccacctgccctccctgcttacaatcagttcttcctccagagctcaagtgatccacctgccttggcctcccagaacgctgcgatcacaggtgtgagccactgtgccgagccctacgttaattgtggaaaagtatggtcatctcagtctgactagcctcctgaagagttgtactagccagccttatttccaactgaagcattgggtttgccgtctggagca

SEQ ID NO: 555964 - DNA, 1007 bp, Homo sapiens
gcatgccgtgcgtatcccgtggatctgtgtcaagtctggattcgatgctcggcgagtggagattcgtttggtcctcgcgtacatgacagacgctgcacaattaagggatgtcagtccctactatatctgattccaaaaattctcacgcgtacaagttttgaccttttgaggccaggagtctctaggcgagacttggcatggtaggcaattaatttagcacgcatcgtcacagttattccatatagtaggctcaaagcatacagcgtaagtgttctgctatgtctgtctagatttgaacatatattcatagagatctgataccttttcttgctgtgcaatacgcggagagtataataaatccaataaacgcattgtatgtgttggctgccatcgtattggagtattgtacatggttcctttcatggaagtgacacacagtgatacttaattgcggacttgctaatactatttaagcttgaagatatgtactgactgggctctactaggaccctacggcgtctataattttctccacaaatactgctgttgaaccggtcttgatcaacttgaacctgcctgactcaagtgataggacgcaggtgtctaagatagcataaccagtcttaatgtttgggtcgaaaggcgatattgacttttttccaagccacggactttgggtaatctcaccatgcacgaagtgttcttgccttgtgacgcttcgggaaaccggctgggcaggaggagtgtttacagaataagagcaaatttgtaggtggtacccggtattgatgaattcacttgtggagtattgcaccttcataaatatcattggcgtcgcatgggtaggtacgcaatcctgaaggaaacgtggtaaggcgggaaatatagttgggggacgtgaaaggccacaagggtgcctagatatccattgaccaaacaaaaatcgtacgtagcacaagaaaaggtatcacaaatttacagacaacacttttatactgggtgaaaac

SEQ ID NO: 555965 - DNA, 135 bp, Homo sapiens
acacttcaggtcaggtaactggagaacagtcatcaaatcagtcgctacccaccagcatttccttccttccttctttccttccctccttcctttccttccttccttccttccttccttccttctttctctttcttt

SEQ ID NO: 555966 - DNA, 504 bp, Homo sapiens
ttatgtcggacccaccatctgtaaactacacacacacgcgcgtggcacacacacacacatctgttagatcctgttagttaagggctgtgagttctgtattttggctgaatttctggtctagttttttagtcagttattgagagaggggtattaaagtcttcagctataaatgtgggttggtctctttctccttttagtcctatcagatggggggtcacttattttgcagctctgttcttgggtgtatacacatttcagattgctgtatcttctcagtagattgaccctcttaccatgatggaatgtccctctttgtctccagtaattttctttgctctgaagttacttcatctcatattaatataagccattcctacttacatttgattaatgtttacatgatgcattttttcctccctttacttcaacttgtctatatcacatttgaagtgagtttcttgtggataagcatataggtgggtcaagggtgcgtcagaacataag

SEQ ID NO: 555967 - DNA, 219 bp, Homo sapiens
  misc_feature (4)..(4): n is a, c, g, or t
  misc_feature (12)..(12): n is a, c, g, or t
  misc_feature (15)..(15): n is a, c, g, or t
  misc_feature (35)..(35): n is a, c, g, or t
  misc_feature (39)..(39): n is a, c, g, or t
  misc_feature (72)..(72): n is a, c, g, or t
  misc_feature (76)..(77): n is a, c, g, or t
  misc_feature (81)..(81): n is a, c, g, or t
  misc_feature (106)..(107): n is a, c, g, or t
  misc_feature (113)..(113): n is a, c, g, or t
  misc_feature (116)..(116): n is a, c, g, or t
  misc_feature (129)..(129): n is a, c, g, or t
  misc_feature (141)..(141): n is a, c, g, or t
  misc_feature (145)..(145): n is a, c, g, or t
  misc_feature (153)..(153): n is a, c, g, or t
  misc_feature (160)..(160): n is a, c, g, or t
  misc_feature (162)..(162): n is a, c, g, or t
  misc_feature (175)..(175): n is a, c, g, or t
  misc_feature (178)..(178): n is a, c, g, or t
  misc_feature (188)..(188): n is a, c, g, or t
  misc_feature (194)..(194): n is a, c, g, or t
  misc_feature (202)..(202): n is a, c, g, or t
  misc_feature (212)..(212): n is a, c, g, or t
tganagttgacnatnaggtatattggggaaggganaaanggaggcaccttcatgagtgcctcccaagggcantagnntctnaaaattgctgggggttaaggggaannaggganttnatggggctcctcnaaaaaaaataanctcnagggctgnttggatntncccaccggtggcntgnagggccacgnaggctnaactaatngtcctggatncccattt

SEQ ID NO: 555968 - DNA, 463 bp, Homo sapiens
agaggcgaaaggtattacacgagattggtgctcacaatcgacgtccaaaagttggaaataaagatgttggcagtgtacccaaccacatgttctggggctcccatgaaacagaagttgatatgaggcccaggaagcttcccagacaagactttattaagtcttatggcccgaaagtttgggcagaagagaaacggtgcaggaggaagaattcttgggtgactccccaaggggaatgccttgtggtgtcttaaggagggttgacatacataatttatgagctacatgagttgtcattgcacgtatggggtggacttaagggttgctcaaacgcatactaacacatactttgcataatcagaaaatggcagataagcccctccctgggtgacgactttagtattatcataagaaccgggtcttctcctggacctgtgcaccagcagtgtgttgcccgcgtttgaag

SEQ ID NO: 555969 - DNA, 1075 bp, Homo sapiens
  misc_feature (325)..(325): n is a, c, g, or t
  misc_feature (344)..(344): n is a, c, g, or t
  misc_feature (359)..(361): n is a, c, g, or t
  misc_feature (368)..(368): n is a, c, g, or t
  misc_feature (380)..(381): n is a, c, g, or t
  misc_feature (383)..(383): n is a, c, g, or t
  misc_feature (388)..(388): n is a, c, g, or t
  misc_feature (425)..(425): n is a, c, g, or t
  misc_feature (430)..(430): n is a, c, g, or t
  misc_feature (439)..(439): n is a, c, g, or t
  misc_feature (441)..(441): n is a, c, g, or t
  misc_feature (467)..(467): n is a, c, g, or t
  misc_feature (519)..(519): n is a, c, g, or t
ctgtgccccagtggtgatcatctgtctgcgtgggctcccgtgtcgcccgcttgtttgcccggcattaccggcgtccaagtctttcgtgttgttttctcgtgtacctttggtgctctcccttcgcgcctgtgcacgctgcatgctttctcgaggctgtgcaacggacaccgtgtcgttctgggggtctgccaggcatttagcgtggttgtgtgtcgatccttgttgctgggtacttctaggttccggacactttgtattcactgggaatatattagcacaaaatcattctttgcaactcaaaatacagaagggactctaccatatnttagctcagagcacaaganggagtgccttatccnnncacttgnctggcctgtggnngntggcntgtgggcccttgggcccaggctggggacagagccctngtttngtgacttangnattttgatgtggtcccatgttctctnacagggccagctgagcagcacaggccaggaggccacagtgtaagcaataacngatctgccacatgcagaagcaaatatcaggcctgtcgcacacgggcggcatttaaataggaatttctatttttgaaataagggatggtctatgaggcatacagtagatttgatgtgatccttttctccctcccttcctataatggatcgtggtctgtgtgactgaacccacacagagtgtcatgggtgacagtttctggttgaagtagctccacgctgggcttctgtggacagcagattcttttccttctcacaaggggctcatttaaaatttggaggctgggtgctgtggctcacgcctgcaatcccagcactttgggagactgaggcgggcggatcatgaggtcaggagatcgcgaccatcctggctaacagtgaaaccctgtctccactaaaaatacaaaaaattagccgggcgtggtggcgggcgcctgtagtcccagctactctgaagactgaggcaggagaatggcgtgaacccaggaggcggagcttgcagtgagctgagatcgcgccactgcactccagcctgggcaacagagtgagactctgtctca

SEQ ID NO: 555970 - DNA, 349 bp, Homo sapiens
  misc_feature (49)..(49): n is a, c, g, or t
tcgagacatgacgggcggtactactacatggacgtgtggggcaacgggnacacggtcagcgtctactcagcatccctgacagccccaagtcttcccgctgagcctcgacagcacccccaagatggaacgtggtcgtcgcatgcctggtacagggcttcttaccccaggagccactcagtgtgacctggagcgaaagcggacagaaacgtgaccgacagaaactttccacctagccaggaatgctccgttgacctgtacaccacgagcagccagctgaccctgccgggcacacagtgcccagacgggaagtccgtgaaatgccacgtgaaggactacaggaattccaggc

SEQ ID NO: 555971 - DNA, 383 bp, Homo sapiens
gttcatttgagttcgctgctgatcaagacatagccaagactgcgtattttacaaagaaaaaattggtttaatggactcacagttgcatgtggctggggaggcctcacaatcatgatggaaggcgaaaggcatgtcttacatggtggcaggcaaagagcaaatgagatccaagcaaaaggggtttctccttataaaaccatcagctctcatgagacttcactaccacaagaccagtatggggaaaaccgcccccgtgattcatttagcccccaccaggtccctcccacaacacgtgggaattatgacagctacaattcaaaatgagatttgggtggggatatagccaaaccatatcagcaaataaacgtacaaactgaaatgag

SEQ ID NO: 555972 - DNA, 473 bp, Homo sapiens
  misc_feature (21)..(21): n is a, c, g, or t
taacttcttgttccccatacntgccccaccaccaaacacagggagggactgtctgtctttggaaatttcctcatctgaccaagaaagcatctttccaaaagaaatgcaattgtcttaaacaccctccctagaggtctcatcaaataaccaagaaagataaaccaccagaagagatgagactgggaatcatcaccacacccagacagacttcatctattcttctgagagcagctccaagagattgctggaaggactttatctgcttaataagacaagctttgttcctgtacagctccgcccctcaccttcctgtaatatctgcctcccacctccccagtccatacatctcctccctcctgtatgaaaaagggtatacaagcttctgtgccccattgggttattgggaaatcattctcctgtgattcccctgtgccatgcacactaaaataaaattttgtatgccttttctccta

SEQ ID NO: 555973 - DNA, 254 bp, Homo sapiens
gtcatgataacatgcagaacataatgaatgatcttgtacatatcaaaaaagaactcacgccgaactttcacaaattaataatgcggccgggcgtggtggctcatgcctgttatcccagcactctgggaggccaacgtgagctgatcacgaggtccggagatcgataccatcctgggtaacacggtgaaaccccgtctctactaataatataacatacttagccgggcgtggccagaaggagcgtggccagaagg

SEQ ID NO: 555974 - DNA, 111 bp, Homo sapiens
gcggccgcctactactactactgctcgaattcaagcttctaacgatgtacggggacatgggcttaggatgtgaatgccagggagcaataaaggtatccgtggtgaaaaaaa

SEQ ID NO: 555975 - DNA, 297 bp, Homo sapiens
attggacttcgctagggttggtgtccgtcgtcaccgtcgtggccaccgttctcattgtctccgtcgtttcgggtggggcattaatgctcgatcgggcgcatgcgcgcgcgaaggctgacagcgacggtgccgccgggttggtggctctgggctggacggcgattggcgtcgcaggcctcatcgtcttgtatgggttatacctgcttatcccgtattttcactgacgtgaagtgcggaagctgccggacggttcgccgtccggcatttttcatggccggagggggccatctgaggatg

SEQ ID NO: 555976 - DNA, 136 bp, Homo sapiens
tgtcgtcgtcgaccgtaaggccgcccggatgaactcggctatgccggtgagtagaaccagttgctgttcttcctctcgccgacctgcaccgatctgcaaatccctgttgccggcgatcaattccatcgccagggtt

SEQ ID NO: 555977 - DNA, 248 bp, Homo sapiens
gcgagcagtgcattggaaaaggaggcaagaatattaaggctctccgtacagactacaagtgccagtgtttcagtcccagacagcagtggccccgagcgcatattgagtatcagtgctagatattgcaaacaacttgggagaaattctagaaggaaaatcatcccataccttgagaagagggcctgcagtatgccatacagcgcactgtttaaccgagccgagctcccggctcgcaatctagatagcta

SEQ ID NO: 555978 - DNA, 166 bp, Homo sapiens
tgggcttactgtcaagacatgaataagaactgatctggctagcctgatgagtgtaccacgcagcccatgcatatattagtgaccaaggcgatcaaagacatcccgaaactggcaaattcatatccatctggtatgcaatatatacactcagctaggcaaatagaat

SEQ ID NO: 555979 - DNA, 234 bp, Homo sapiens
  misc_feature (118)..(118): n is a, c, g, or t
aacacacaatgactgaggggagtacaagccatttgaaagagaaaatctggttttccacattagcaagattcaagtacagccagaatcaatgtattcagacatgcaaggttaaggattnataaaaggtcacctgcagctcagaagaagatgaaagaagactgcagggcactgaagcaactagataggggagaaaaggagtctttgttcatagacatgaggtttctggtcacaaca

SEQ ID NO: 555980 - DNA, 324 bp, Homo sapiens
gcccccaggaattttgggccctggttccctgaaccctgttttccaaaaccctgccccaggttaagggtggccaaaaaaggtccccatgttcccccccccaaaaaagggggtcggcccaggggtgggcgacacaggcagcttttttggcagcctcccggcagcaaccccagcctttccaaaacaacaggggcctccagggtggggccccacctaaaaggcaggggtcaatttaacaaaaccccaacgttgacttttttccctgggggggctttttttgtaacatgacctgcgaaaatttatataaaaacgagggttcccattaga

SEQ ID NO: 555981 - DNA, 275 bp, Homo sapiens
aggatcccctgctgctgtcgctcatgtagcaagttattagttcttttaaactttggttacatccaccaatacatgccttcattgcaataatcagccaatattagaaattgaatatttgaagtaggtagcaactaacaactttgttttgtagcaacgtaggggtctcaattctacttccacatctacacccactacctacttgcagaagcagaaaacaaagttaaacacctgtaaccaagtgtgataaacactcacgtgtgctccatgtatcatta

SEQ ID NO: 555982 - DNA, 338 bp, Homo sapiens
  misc_feature (6)..(6): n is a, c, g, or t
  misc_feature (138)..(138): n is a, c, g, or t
  misc_feature (256)..(256): n is a, c, g, or t
  misc_feature (295)..(295): n is a, c, g, or t
  misc_feature (334)..(334): n is a, c, g, or t
  misc_feature (336)..(336): n is a, c, g, or t
tcccantttcctccccacatcactctcctcaccccctttactttttattcatcatccataatctctcatcacaacaaattcaacacacatctcaccacattacttatcactctctccaaactaccaccacaatcctcncctttatccattcactctcaccattcacgaatcaacaccatcactattctccatcaacaaaacgaacaactaaacctcatacaacaacgcttgtaccaaataaataacgacattacanacacacacaacactttaacacaactcaacaaattctgtntcctttctctcttcccatctaatataacaaacaactttnantc

SEQ ID NO: 555983 - DNA, 668 bp, Homo sapiens
  misc_feature (572)..(572): n is a, c, g, or t
  misc_feature (609)..(609): n is a, c, g, or t
tcaagcatcatcccacatctattgaatgagccctctggatgatttgcagaataccctttgaggaaagctgctaaaaaaagagggaatagcctgtgtggaggaaggctgtgaggtggagcatgcctgtgtgtttgaggaagagcaaggaggccagtgtgtctgcaaacagggaacaaagaggaaagccatataaatgagttcagaaaggtgatggggcaaggccaggtaggatatggtgggctacaaatggactttgacttaactctgaaacatgaagctgttgcatggatttgggcagcatagtatgggatttgacttattttaaaaagcattaacctgacacttggtgaggatggattgtatgaggccaattgtatatactaccgatatgaattcaagtatttcaatctttcaaatgacatgatgaagaattgaaccaatgtggtaaccagtgtggtatcatttaagatggtaaagtggtcacatttttacatatattctataaataaaaccataagatttatttaatttggatgaactatttgattacattaactatattaacaattgangaaaaactccaacgattttagactcatcaactattangacataacttctacaacatatacattatatgctattacttgttatacgatcattcatct

SEQ ID NO: 555984 - DNA, 248 bp, Homo sapiens
cattctctaatatctcctctgagattaaatcactacatttggtcctttcaaaggggcattttttaaaatttacacgagacatttaattctcaaactgtagaatattttgcaggtcacagtcattaccttttccttgttttaaaaactaacagatatctgcatctacacaaaccttctgaaaataagtgtgattaataataaaaggagcaagctgggatgttcataggcatgctctgggtagtcacaga

SEQ ID NO: 555985 - DNA, 1043 bp, Homo sapiens
  misc_feature (866)..(866): n is a, c, g, or t
aatttattaaataataatgctttatttatatatagagggataagagcttaatcggcgacgactctcttatctagccaccgctacacattatctgatcttctgggatctctactaagatgctggcagcccagacagctggtctggccctgtacgagccttcaggggctgggtatgcttcatgatctgtgcattgtcactgactgtagtaaatcatttgcactgggaactcggcctgaaatagaatgcccttaatacgtatctgaagatactaacttatcacactactgtagtgttgttgctttttattcgtgtatttaggaacatacttaattttgttagcttgtgcagtaaaattattaaggcttgagatactactttgtagaattatattaaattcactgctagctaactattttatataggtctattaaatacttatattgaaataacagttagtaaatgtgctttaattataataattatgtcatactattgtatcaatgtcctcagaattgtaactattatttcattcatagatagtaccatataaatcaacatgtagattatacagacttgtaacaactacagcaaggtgtacagagtttatcgaaaacaaaatgtactctgagtagaacattataataggtgacaagtgaacaagtgatcagttacagtattgctacgatatatactataatgatacgctataatcgagtccgtatactttgtatcgtacttggtattgttttcgaaccccatctcctacatcgaattacaatcctttgatatacgcaaatacctatagaccgttctcactattactcatactcgcaccgcaacacgaagcagcatgttaaaaatcattnatcagataagacttcaatcgtttatcatatgttatattaaatttaaattaaaccataaacactaaatatatagacatgtaatcttatttattcaggacattgtgaggttatatagttgatatcaacacacagtagatatgttatatgatcatgagatgtctaccctatatactttat

SEQ ID NO: 555986 - DNA, 160 bp, Homo sapiens
actatggtcctcaggtgaactggcagcgggtagcgaggacaaattcaggacactgagcttgtggagacagaccagcaggagatagaaccttccagaagtgggcagctgtggtggtgccttgtggagaagaggcagtacgagtacagcattccatgtacag

SEQ ID NO: 555987 - DNA, 363 bp, Homo sapiens
  misc_feature (14)..(14): n is a, c, g, or t
  misc_feature (19)..(19): n is a, c, g, or t
  misc_feature (38)..(38): n is a, c, g, or t
  misc_feature (42)..(42): n is a, c, g, or t
  misc_feature (112)..(112): n is a, c, g, or t
  misc_feature (167)..(167): n is a, c, g, or t
  misc_feature (196)..(196): n is a, c, g, or t
  misc_feature (269)..(269): n is a, c, g, or t
  misc_feature (316)..(316): n is a, c, g, or t
taagacttcaagtnaagtncatttaagaaataaatttntttnatccagaaaggcaggaaaactcaaagagggggagggtggttctagggtataggtcaacttaaacatttcntggttgacaattggttgagtttgtccaaagacctgggattaaagaaaggaatgtntgggttaagaggttgtggagaccaatgtnttttatcacggcagatgaagtattcggatagggtagcaggcttcagagagaagaggctgtaaaattgtttctnatccagacttaaagtctgtgtttgatgtttaatgcaggagaggggtnattgagggcatgtcccggccttccacttccccttatggcctggaccc

SEQ ID NO: 555988 - DNA, 162 bp, Homo sapiens
ctcgtataccactcataggcaactacaggggttacccactaactggcaggcactggaaggttccgcagaactgaggcctacaagggcttttttttctacttcactcttagcaaattcttttttgacgccctcttacaatttctattttcgcccactgatatt

SEQ ID NO: 555989 - DNA, 385 bp, Homo sapiens
ccagcatgatctcaggctccagagtgaggttcatatcctatgacagacccggctaaaagctgcccaccaaagggattaagagtcatcagtaggtgtcactaaggagggtgcatccacttctgagcaaactctagggtgacccactcgccagctgcctggcaccagctctgcagctgctcctcaaaagccttgaagtccacatccggtgccacacggaagtcaaagctggcgctcatggtggcaggtatcacgttataggccacgccaccctctagcttagtcaggttcacggaggtcacggacccctctttcaggtgggggttcgactgcagcctctgccattccttctcccggaatgccaggatggagtttacaaccttgtgca

SEQ ID NO: 555990 - DNA, 116 bp, Homo sapiens
tgtaacattcgtgtcctgaacattcgtgtcctgaacattcgtgtccagttctagattctatgtcttcttgcactgctaagactcgtgcccaactgacgggaggacacgaatgttca

SEQ ID NO: 555991 - DNA, 394 bp, Homo sapiens
ttggcccttaacaagttggtgtccttgaggtgcctgggccgcggcttaaaccccaagggggttttggtttttttttttcaggggtcccccccccttccccccaaaggggggttgaattggggttcccggggtgggtccccccggggccccccccctttttttgtgaccagctttttgggggtggccccccgggtttggaaaaaggggggcacctttttttgtttggtgggccccggggccttttttttgggttttccccaaaaaacctttgtccgtttgggggggtaaccccccctttttaatgggtttgttttcctggggggggggggggggttttgttttttttccgcccgccttttccccccccttttttaattccttgttccccccagca

SEQ ID NO: 555992 - DNA, 136 bp, Homo sapiens
tcgtagcagcgtcaaacatacgaccgcaatcatagtcgcatataatcctctctcaaggacttcaaactctactcccactaatagctttttgatgacttctagtcaagcctcgcaagcctcgccttttattcccccc

SEQ ID NO: 555993 - DNA, 782 bp, Homo sapiens
ggcactttgtttcgtcccaaaaaaggagaccaagcctccagagatttctctcaccatatcgttttgcggccttttgaatcccacctggtcatgctgcagctggagactcctgccagttttaatgagcgcgtgtcccagatctgccttcctcccgagcgctacatcgttcctgatgggaccatctgtgcaattgctggatgggagcaactaaaggaaagggagatgaaacggtgctgaatgtggctcagatgccggtgctcagcaataaggactgtaaccagtacttcaagggccgcgtgcgtgagaatgagatgtgcaccatggcattccaggctggagtgggagcctgtgagagggattacggaggcccgctggcctgtcagaacagtgactgctgggtcctagagggagtcattattcccatgcgccgctgtggacacgcaggacaacccaacatctttatccgcgtctcggtttatgtggactggataaagaaagtcatggagatgacctaactaacagagaaattcatctgctcatatataaagtagacagaatgtaatatacttaaaacttaatatacctttttttatgaatatacaagcattttgtatcatttaggagattaattgacttaatattcaagtttgcagttgtgaaacatatatatataggctacatgtgcacatatatgtacactaaaactaacaccacaggtctgagttttcttgaattttgtaatatttctaatgttaataaagtgttaaaatggcaaaaaaaaa

SEQ ID NO: 555994 - DNA, 175 bp, Homo sapiens
tgggtccttaaccctgctgttgggcaggctctgagatctcagcagacggaaatgaaagcctggcaaatagggaggctgagtgggagagtcacttgagcccaggagtttgaggctgcagcgagctccgactgtaccgctgcactccagccaggggaatacagcaagatcctttgac

SEQ ID NO: 555995 - DNA, 405 bp, Homo sapiens
ggttggtgaggtgtacatccctcttcccatcatatcctatatgtgggggagggcccagatgatggctcccatgagcctgcggggatgcccatcccacacaccccacccagctgttctaaccctgctatccacagccctggaggaactggggctcctggaaggaggaggaggctctccatctgtccaccctaacacataccttcccacccaccttccagacccccttggttggcaccctctcctccggttccctctcaccccatggctgtgaatgacaggacagtgtcacacgtgtgtttgccattgggtttaatttaatggacgtgcagtttcatttgtaatttgtgcattagccacctccttcagtggcaggatgtgagtggctacctggctcaactggagggg

SEQ ID NO: 555996 - DNA, 460 bp, Homo sapiens
aatactccatactgcttagaattaatccttgcaagatactcaataatttggtgcataatgtggaagcagatgaacggatacattcatagtggttagagtctttgatctcttccttgtcagttgattttcggcttatggacaaaccctctaaaccatgttgcacagcagtgtcttcagacttcccattatatttctgaaggttgcagtagcgctgatgggattgttgcttttcagcatcagggacttccttattgaatggtgtctgataacattccgtctccaggaactcagcgagatcggagtatgcattcagaggattcagtcccttctcaagagctttattcgaatagtccatagcatattgctttagtgcttcaatcatctctttatttccactagcttcagattctcctgtattctgcatttgtcttacttttgccttgtagcagcaccaccagga

SEQ ID NO: 555997 - DNA, 144 bp, Homo sapiens
accgaagccaccgccgccgccaatgctgaagaagccgcccccgccgctactggaacctgaggagccaggggtgatgacaacatcacccgtggagctgtcatgaagtgtgttttgagccatacagattctccttctctgtatggc

SEQ ID NO: 555998 - DNA, 294 bp, Homo sapiens
  misc_feature (27)..(27): n is a, c, g, or t
acagcatgatgaagtcactgccagtanttagaaggttataaagtctgtgggatggtacaacagctacctcttccacccgattgctgcttgtcagaactttcctgtagaatctgattgggacgaagaccctgacttattcttggagcgcttagtttccctgacctttggattcaccctctcgataccaactagattatattaacaaacttaccaatgtggacgattcaacatgtcattggggtccacgtctgacagaggaacatttcggacggggtctcaaagatactgacaaat

SEQ ID NO: 555999 - DNA, 1005 bp, Homo sapiens
ggacgcttgtctcaaactccacatacagaaagccaccgaccattattccggtatcctacacccattccccactctctattacactcccacccctggtccctcagcgtcggagtcaagacgcaacagggacacttccggttctaccttgatagcgactggtgaaaccgtagtgaagaatatccctaaactcccataatcgggtgcggattcctatggggaatggcctatattgttgacactcttccaggccttggttctggaccttgagaaatgacggctgtggaagctagagatagcgatgcttttgagggtaaatgtatgtagtgtacttgggggaaggggagggatcaactcgaagaagatggcaagtggtttagacgttcatatttcactttttgctatctctgatagcgtacaaacttgtgagttactatacatggctgtagaatagcttctcacagtctatagccatatcgtgaaaactaaatcttgaagttcagctcttaatacaaaatcagtacttctgagaacatgcagcatttaaccttgtttgcaaaatcgtttttgctcagatgcatcttttttccaggccactcacattgttaaaacggtggtatacttgtaagttagaactgaaagggctcaacttagcattgtgctgtgaccagtatgcgaagtctgtgtcggcttgcccagaattgactttgcgggttgtatggctaaatcacagtcctaaatgatgaattgttgcatgatgcactatgtctggcgtcaacatgcgattttcttgaaaatagttaatttcagaattacgggccaacttgcgatgtcggctatcatgaggcatcatcacaacatttgtattcaccagggtgcagggcttttcacgtagaattcgtcctgatgcacccggagactggattcggattgggaaacctgcttctacggtactacaacctggaccctgggaaggggactcagtttactcgggactgggaaccgagt

SEQ ID NO: 556000 - DNA, 207 bp, Homo sapiens
caaccagccagaacgcctgaacgcaggcacatatcttcctattctacaccctagttaggctcccttcccctactcatcgcactaattttacactcatcaacagccctcacggctgcactaatacgattcttactatctcagcgtctcacgtgtcccgagagaaagcgtatccacaacctccgtggagtctcaaacatacgttagagt

SEQ ID NO: 556001 - DNA, 221 bp, Homo sapiens
  misc_feature (28)..(28): n is a, c, g, or t
  misc_feature (112)..(112): n is a, c, g, or t
  misc_feature (130)..(130): n is a, c, g, or t
  misc_feature (143)..(143): n is a, c, g, or t
  misc_feature (189)..(189): n is a, c, g, or t
  misc_feature (218)..(218): n is a, c, g, or t
aggatgccaaatctgtcaagatcaaganaaataaggacaacgtgaatttaaagtttcgatgcagcagatacctttaaaccctggttcatcattgaccaagagaagggcaganaaactgaagcagtccctngccccccggtttngcagttgaaggaactgaaattgaaccagacacacttgattgggacntgtattattttaaaatactaaaaatcctngcc

SEQ ID NO: 556002 - DNA, 619 bp, Homo sapiens
  misc_feature (2)..(2): n is a, c, g, or t
  misc_feature (505)..(505): n is a, c, g, or t
anctcaagcagttcgactctagactactgcaagcttattcatgcaggccgaaatcttagctgactcaggccaatataacctatagtgagacgtgttacaatagcactggcctgcccttttacataacactcaaatgagaaatcactgatactaacaaactaaatgctcaggaaatagataccgctttgaaccatctctgcccaatcatcaaacaagccctatcgacctccatccatacagatgctatacctgacaggcgagtggaaacggccaggcctaaccatcagatcaattggccgccaatggttctgaaactacgtgatcacttaactacagggactaattttgcactactacatactaatcaaaagattccatcgaccaagcgacctgtgacgtcccagactggaacaagagagcagtactaaagaacgaagactccaaccgcataggactacataccaagatgatggcgatgatgaacttggtgaacattaggcttatnaacagattctagggccggggtctaaaaaaaccaatttgaaccctaaagggcggggggatactaaggtaaaagggtaagactgtgaagcaaccacaatagaatgccaaaggccag

SEQ ID NO: 556003 - DNA, 332 bp, Homo sapiens
gcagtatccacagagacaggtgagcaacagcaggagagaccgaacaggaccaggatgatgtgtagctccgacccctctggggatcaaggtcatcaggatgaggactgtactgttggcggccccagactggatgacagccatgaggtggatgtgttacagactggcgggctccaggccatggaggacaaagccacgggagtgaggcattcaggatggcggagaaggactggttctgagcgttggtccagacgctggtgtcgtgagtccgggggctcttccccagctcagggggctcaagcacccactccagctgtgcccaggtcttgcccatg

SEQ ID NO: 556004 - DNA, 669 bp, Homo sapiens
gcccatgatcgcctaccagggccctctcagcactcctagtgacctccgaggcgtacccatgtgattatgcagttccactccattaacgctcctcatactaggcctactaaatcgaacgcactgaaccatataccaatgatggatgcgactgatttagatcgagaaagcgcataccacggacaactaacgctaccgatgctgttctcacaactatggtccttcttgatatcgtgcgtagtacactcgctattgtataacctcagaagttttggtcgttcgcaggattatttctgcacgccttgtaccactccagtcctagctccctacccctccaagttaggaggggactggtcactccgaagcagtgcatcaaaccacggctaaagagtccccgtagagagtcccacatccatagaacacatccgtattactcgcatcagggagtatcaatcacctgagctcaccatagtctaggtagaaaacaaatcgaaaccaaattaacttcaaggacactgcttagttacaagtgtgttactgttgtctctatttatagccgctcctagcggagtcctcagaggtacgttcgaggtctcccttcagccaatattccgagcggcatcgtacggttcaacatgtttttgtagccacaggcttcacgggggaacttca

SEQ ID NO: 556005 - DNA, 152 bp, Homo sapiens
gccctgcttctgcatgaagcactgacttagaagctgagaagtgtatctgtaccttttgccatttcctggtcctctctctctctctctctttttacttttttggagatgtatttacactccagccggggtgataacacggagaactctgtctc

SEQ ID NO: 556006 - DNA, 160 bp, Homo sapiens
gtgggaccaggaagtgttgcagatctcagattattcatattagaaaatatttccatacagataatgacatatcttaataatggaaaccaagtataaacaggaattcatttatgtttcatacacaccttatgcatgtagcctgaaggtaatgtcagagata

SEQ ID NO: 556007 - DNA, 196 bp, Homo sapiens
aagactagcctgggcaatacagtgagaacctgcttcacccaaaaaaaacatgtaaggtcaggccgcggtggctcacgcctaaaatcccagcactttggaaggccgaggcgggcatatcacctgaggtctggagttcgagaacaaacctgaccaacatggagaaatcccgtctctactaaaaatacaaaattagccg

SEQ ID NO: 556008 - DNA, 378 bp, Homo sapiens
tttctgttgcctaggttggagtacagtggtgcaattttggctcactgcaaccgccacttcccgggttcaagtgattctctcctgcctcagcctcctgagtagctgggattataggcatgcaccatcataaccagatcattttttgtatttttagtagagatggggtttcaccatgttgcccaggctggtctcaaactctgggcctcaagcgatctgcccacctcggcctcccgaagtgctgggattacaggcatgagccaccatgccgggccccataaataaattttaaaaaaggctttctaggaaaaacactgcatacacacacaaaaaggattctaaaaatgtggaattttagggagcagttgaaaggggatattt

SEQ ID NO: 556009 - DNA, 203 bp, Homo sapiens
  misc_feature (9)..(9): n is a, c, g, or t
  misc_feature (21)..(21): n is a, c, g, or t
  misc_feature (58)..(58): n is a, c, g, or t
  misc_feature (67)..(67): n is a, c, g, or t
  misc_feature (75)..(75): n is a, c, g, or t
  misc_feature (77)..(77): n is a, c, g, or t
  misc_feature (84)..(84): n is a, c, g, or t
  misc_feature (86)..(87): n is a, c, g, or t
  misc_feature (90)..(90): n is a, c, g, or t
  misc_feature (135)..(135): n is a, c, g, or t
  misc_feature (139)..(139): n is a, c, g, or t
  misc_feature (141)..(141): n is a, c, g, or t
  misc_feature (148)..(148): n is a, c, g, or t
  misc_feature (198)..(199): n is a, c, g, or t
  misc_feature (201)..(202): n is a, c, g, or t
cacacaaanacagctacaggnagtaccctgggggctcagctgagagagagtcacaganaggccaganggtctcangnaggtctngnnggncacagctgggctcacagaagctcttgggccctggcatcctgggtnaccngngttcttnggtattggggacaggacagagagctcattctataaccacagttgtctttnnanng

SEQ ID NO: 556010 - DNA, 189 bp, Homo sapiens
cgacagagtgagacatcttgatctgctggtttgcgtcacggaaaagatgagcgccgcttccttcatcgacaggcaaaagtccggcaccatcaagctgccgctgtgcgggtctcatatcctgctggcaattctgaagtgtacgagcctactgcgcaaaggctgtaggctcgtgaaacaaagtcggatggc

SEQ ID NO: 556011 - DNA, 136 bp, Homo sapiens
ctgagggatcacaggatggagagacagaggatctttggggaggtaggtctggagggagctgacgagcctagccactcagggctcaacagcagggtgaggctcaggtggaggtagggggcggccgctggctgggggg

SEQ ID NO: 556012 - DNA, 668 bp, Homo sapiens
  misc_feature (273)..(273): n is a, c, g, or t
  misc_feature (564)..(564): n is a, c, g, or t
gcatgcggcggacgttgcagtgatctgagatcgtaccactgcactccaacctgggtgacagagtgagacactgtctcaaaaaaaaaaaaaaaggacaattgggaaaatttgaataaggtctatataaattagataatagcattattatctagtagtagtaactccctctgttaatttcctgattttgataattgcagtatggttattgaagacattaaaatagggaaatatgggtaatggggtacatgggaattctttgtattattttgtagntttttttttttacaaaaatgaaattatttcgtaatgaaagataaacattttaatatttagaggatatttggtccttaaaacacagttctcaaaccagttgtcttgaattctatatggaacattgagaggggtataaataaaggtctgaaaggtaatccaagggagagaatacggtcatggggtcttaaggttctgtttttggttggcccagtaaagcctcttcctcatccctcttttcacttaccactagagacggaactaaacccatgcttcaagcttgtaaaagcctanaccaaaccaaccaaaccaccacacttccaaataggtgattggacaacttggccaataatggcttacttagaatgcttttgctggccgaacaatggggaaagggc

SEQ ID NO: 556013 - DNA, 197 bp, Homo sapiens
gccgcccagggcgtcaaggtctacaaggacggaaaattcactttcaacaccgaccaggccgtcgagatcattcagaagtatgtcgagctttacgccaagaaggctatgccgccggaggtgttgcagaacaattacctcggtaactcgaagctgttcctccaggacaaggttgcgtggaccactggggtaccgagctc

SEQ ID NO: 556014 - DNA, 81 bp, Homo sapiens
tacctctgtgctagaagatcggcccagaagctggtatttggccaaggaaccaggctgactatcaacccaaatatccagaac

SEQ ID NO: 556015 - DNA, 97 bp, Homo sapiens
atgtagccagcatcactgtgataccaaaatctggcagcacacaccaccaccaccaccaactgcatgccaccatcgctgataaccatagatgcaaaag

SEQ ID NO: 556016 - DNA, 451 bp, Homo sapiens
atctagagattcccctctagagcatccgccagggtgactgattctatttattactgtaacattactatctactttaccatgctagcctctaaatgtttattgtcttctcgctctaatgataccaaatatattacatattaaaaaattgaaaaagaggaacagataggaattacaaaggcatacattgcctgttaacagatttctttattttctcttggtctattctctaccatcattttggagttcgggcagctgtaaattttgaaaaattgacattttcagaaatttaagaaaggagaatcagagcactaacaaccatgctaagcacaccattacgactactacaaaatttacacagaatttcttagtgagtgtgtccactgattggaaatatataactccactgaatatagaatgttcaaatgtatatactagcatatgtatatattgg

SEQ ID NO: 556017 - DNA, 1349 bp, Homo sapiens
ggaacctggcgacagttggtctcagtgtccgctccggggggcctcaagaacctggaggcagtccccggatggctgctgcgggtggatacgccagaggaggaggccgtggacttgtctctggtgtggtagcatgtcttagacagctgtatctgcgaggtacaactgacgttacacgatcaacacatcgatttccaacagattatcgcgacgcaggatatatcctgccggtcgctagccagcatgtctgcgggaggaatgccatggctgggccaggccccactcagcgctgaagtcagtagatacctgaggaattcggagggcagcatgtctgggaccagcggctacaggtgccccgtcgtccggaggccaggacagtgtctcgtgtgccgtaataggcaaacgagaataggtcctgtcagatagaccgaatacctatgtcgtggaaccggagtgatagagagctattgaagggacttgattccaattctggggcacccttgtgatggcgcccccttggtgtggacaacactgatcaagtacatggatcacgtcgacgaatgggcgtcgcttagccaaagtcttgtctattgccgctaggaattgaaaaccctgtagactctggtcataagtagagaagaatcaaggggactatcgcactgtggcgaaggacctatggtcgtggcacgaacgctgaatcgaagacacagcacatgatgggccaaatgccactgtgagcacaatgagtcaccatgtagagggaaacaaatgagttcaaccggtgacaccgggaaggcataccttaatttggcccttaattagatagttgccaatttgtaagtcacaattggttaatatgaggaccccataagagcatccggtttgtacatttgacgagtgcgaacggattccagcagaacgagtagaacatgatcgagacatattcgagcgccaaacataaacttaaaacccctagagtaagccacagataccttgtggacacatgtagccgtggtaatacaaccttcagaacgcgcaggcaacaagcaaattcattccaccctgtgattggcacgcaagaacatttgtgggttgagcccttttggcggccagaaggccccaagagagggaatgggccccatttcgcgaaggtgtggacgtaaccgtggggagacacacaagcaaaacacgggatagagatttgtatcattccccgggaacaagtatatcaggcatacgtttgagatcaatccgatcataaccaacatgggaagcaaaattccatctcgatgagattacgagcgcattctcacacttgtggagaattgctgaaaacagcattgatgaacaat

SEQ ID NO: 556018 - DNA, 119 bp, Homo sapiens
  misc_feature (2)..(2): n is a, c, g, or t
cnatgaggtggccacgcgcttacacgcgtggcacgtggacgacatgccaagcgctgtccgcctgagtgaccgcacgcgcacaagttcgggtggaccggtcaacttcaagctcctaagcc

SEQ ID NO: 556019 - DNA, 485 bp, Homo sapiens
  misc_feature (199)..(199): n is a, c, g, or t
ccgccccctcaagtggggcggccccaaactgattgaagtggggtaaatctttttggacgtgaagttggccaaccccgtggcccaagccccagcccaattgggcaaactgccctttccatgcccacccccatttaaaaaggaaagcattttgctctttccagatttacgttggcccttggcagggcccaatgcccttttnaaaatccccctgtcaggacccctaggggtttggaccggggtggcctgtgcctatccccttttatggacccctcccacccccctgtattcccccccctggattgggggcccctcccttggggaaggtttccccatgtgcctgccccaggaaacaaacaaaaaaggcaccagggggccttttttgctcaacaaggggttttgccccccccccttcctttttgtttttaaaagccccggggtggggggcaaacccccccccctcctccaataaaatagtagcctcggca

SEQ ID NO: 556020 - DNA, 124 bp, Homo sapiens
tattttccacaggggtcagaccggatacttatctatctatgattaaatgtacatttttttcttcaaatagcaccatttataaattcaatgatattcataaaaggacaaaaaaggatcatagaaa

SEQ ID NO: 556021 - DNA, 668 bp, Homo sapiens
cgccgtcgtgcgcgccgcaaaccaaggggttagcaacgagacagcgtccccgccgggaaagggaacccttgactccccactacgcgccctttttccccgatgggaacgaaccgtcggcccccactcatggagggtgaaagcggtggaccatcactcgccgccacctccgggcggcgtccaagttttcacacacacggcggcccacaagaggcgctccttatgccccttgtccacaagaccggcggcaaaaaacctcgtgagacagaatccaacccacgcggctgtgtccaacacacataacacttgtgttggtagaccccgccacggaaaagattctaaggaagacatatttccaattagaaaggagagagcactgtccctcgaagttttccggcaatgtctctccacgtactttgatgcaacaccatgtgtatctcaaagcgatttctagcgagccccgaaggaggtaaggaccgtcaagccccctgggtttatcatagatgagccccaggtcccccgattgtgcggccacaatataaagtcgccacgcagcgctcccactcacccccatatggcgaaatgggacaatccccccccccgctgtgcccgcatgcaaaaaattttgtcggcgaccaacccacaaaaaggagtttgctaccacataacaa

SEQ ID NO: 556022 - DNA, 135 bp, Homo sapiens
aagactgctgaaagatgacgactggcgggaggagtctgtctccatgtggacaaggatcaggtgtcaggtggagttctgcatcgagcgatgcgcccgaaaaggcagtcgatacttctacttaaaatgtagggtcaa

SEQ ID NO: 556023 - DNA, 535 bp, Homo sapiens
  misc_feature (242)..(242): n is a, c, g, or t
  misc_feature (509)..(509): n is a, c, g, or t
tgagatggagtcttgctgtgtcacccaagctagactgcagtggtgcaatctcagctcactgcaacctctgtctcctgggttccagcgattatcctgcctcagcctcccaagtagctaggattacaggcgcctgccaccacgcccagcctcgcaaagtgctgggattgcagtcctgagccaccgcgcctggactttttttttttttttttgaaaggggttggggagacatattctctgctagngattctcctgcctggtctcgaactcctgctgggatcacaggcgtgacagccacgcccagccacctttagagttttcttaccacctggttttcctctctcaatatctttctctcatttcctgctttaaaactctagcttggggtctgggcacagtggctcatgcctataatcccagcactttgggagactgaggcgggtggatcacttgaggtcaggagtttgagaccagcctggccaacatggtgaaaccttgttctctactaattnttaccaaaagtttagtccagaccgta

SEQ ID NO: 556024 - DNA, 178 bp, Homo sapiens
cgtgcgggggagctgggccggatcctctctgtgcctgagagtcagaagggagcctgcaggctaccgggatgctgtctgcagtgggcaggctgctgcgcgtgcaggcgcttctctgggctgtctgctgagctccggaaccagctggacgtggccaaggtctcccagccgggccgggccg

SEQ ID NO: 556025 - DNA, 389 bp, Homo sapiens
  misc_feature (5)..(5): n is a, c, g, or t
  misc_feature (17)..(17): n is a, c, g, or t
  misc_feature (60)..(60): n is a, c, g, or t
  misc_feature (94)..(94): n is a, c, g, or t
  misc_feature (216)..(216): n is a, c, g, or t
  misc_feature (222)..(222): n is a, c, g, or t
  misc_feature (306)..(306): n is a, c, g, or t
  misc_feature (330)..(330): n is a, c, g, or t
  misc_feature (363)..(363): n is a, c, g, or t
ttttnactttgaacagnggatcattaccatccacttcggcaatcttcacgcggcagacgncatcttcatcaatattgccaacatagcgcaaaanttttccttcatcacgggccttcgccacgcgcgcggcaaagagatcgtcgagttgtgacagattcgccataaaagcggcaacatcaccctcggcgttaaactctgcgggcagcacaggttcantttcantatccgccagctccagttcacgtcccgtttcacgagcgagattcaatagtttacgcgccacatccataccagaaagttcatctngcgggtccggttcggtataacccnattttcccgcggccatttgggttcggtctcggnggaaactcatgccttcggtctaactt

SEQ ID NO: 556026 - DNA, 234 bp, Homo sapiens
gtactgtaactatgggctgctctactgcatcagtgacaggacatggacaaggtcgagacattcctgcgacattgtgaagatgccgatctgtagcgggacagctgtggctaccaggtgccgatagaatagcgaggtagccgctcaatagcgaggtgccgctaaatagcgaggtggacgatgaatagcgaggtgccgatcaatagcgaggtgtcgataactagcgaggtgccgata

SEQ ID NO: 556027 - DNA, 137 bp, Homo sapiens
catggatgcatgggtgcaggtggatgtgtattcaccaactggcggtgcatgcctccctgtacctgttccgtacgacacgtgagcaccgtgctagacctccaaatatcgtatcagctaggcagcctgggatcgactac

SEQ ID NO: 556028 - DNA, 126 bp, Homo sapiens
agcatatctgatgattgtatagctgatatttcaacacagtcttaagtttgcatttccctggtagctaataacactgagcatcttttattttttaaattaagtcttgctatggaaacttctaaaact

SEQ ID NO: 556029 - DNA, 241 bp, Homo sapiens
cggaaagatgtgtgaccgtggatatgtacaccgggtcttgtgacttccagggatgaaggtgtaactcagaggagagcttctacagaggtgaatgtggtcaacgaaatggaataggaaattccacaaatctgtccttccacaaaagcagcaaataaggtggcaaaaactcaaatctatgggaactctggaaacgaattgaaagtttacagcaatcaggtgaatacctaagaataaaagctgg

SEQ ID NO: 556030 - DNA, 217 bp, Homo sapiens
tcaactgcttatattccacctcgtgtgtgaagtggaggtgcaggtggcataggaatgaggatgtgacactgtacagttaggagatgatttcttcccccccccccctttttttttttggaaaccagggtcttgtctctgtcccccaggtggaagtgctggggcccggtcaaagttaaaggcagcctcagacttatggggcgtcacattgagccttccc

SEQ ID NO: 556031 - DNA, 225 bp, Homo sapiens
gccgccaggtttctcagatcagccgacgcggtttacattcgacgttgattaccgggtcccgggtacctcctcagaatttccaggcccggctcggactcttggttacctccctggcctccccacccggttccgcgtccttagacagctctcccggaacggagctcccagtggcctccttgggctcctcagcacccctggcacccaccaagcctcacccccggaccc

SEQ ID NO: 556032 - DNA, 317 bp, Homo sapiens
ccgagaacacgcctgaactggcgatagcgcatagcaggcgcaggatctggctgcgccggttcatgcctttgaccagcggaggattgccataggcggtgggcgggttgctcaagcggaactcctttcagacgacggccggtagcgccgggccatgcccggcgaaacgggatcacgctccagtctggccgggccggggtcgtcacgtggtgaacccgatctcttccgcagtcaacgccgaatcggtcagaatccgcccattccctttcttggacgccccatggccggtgccagcctgttcgccctgctcgacgatatcg

SEQ ID NO: 556033 - DNA, 1032 bp, Homo sapiens
  misc_feature (36)..(36): n is a, c, g, or t
  misc_feature (144)..(144): n is a, c, g, or t
  misc_feature (168)..(168): n is a, c, g, or t
  misc_feature (173)..(173): n is a, c, g, or t
  misc_feature (209)..(209): n is a, c, g, or t
  misc_feature (229)..(229): n is a, c, g, or t
  misc_feature (231)..(231): n is a, c, g, or t
  misc_feature (246)..(246): n is a, c, g, or t
  misc_feature (250)..(250): n is a, c, g, or t
  misc_feature (273)..(273): n is a, c, g, or t
  misc_feature (277)..(278): n is a, c, g, or t
  misc_feature (304)..(304): n is a, c, g, or t
  misc_feature (387)..(387): n is a, c, g, or t
  misc_feature (412)..(412): n is a, c, g, or t
  misc_feature (633)..(633): n is a, c, g, or t
agacttggggactccaaggctgaaaaccgagcaganataaccgtgctggtgtcggacgtcaatgacaacgcccccgccttcacccaaacctcctacaccctgttcgtccgcgagaacaacagccccgccctgcacatcggcagngtcagcgccacagacagagactcnggcancaacgcccaggtcacctactcgctgctgccgccccnggacccgcacctgcccctcncntccctggtctccatnaacncggacaacggccacctgttcgcnctcnngtcgctggactacgaggccctgcagnctttcgagttccgcgtgggcgccacagaccgcggctccccggcgttgagcagcgaggcgctggtgcgcttgctggtgctggangccaacgacaactcgcccttcgtgntgtacccgctgcagaacggctccgcgccctgcaccgagctggtgccccgggcggccgagccgggctacctggtgaccaaggtggtggcggtggacggcgactcgggccagaacgcctggctgtcgtaccagctgctcaaggccacggagcccgggctgttcggcgtgtgggcgcacaatggcgaggtgcgcaccgccaggctgctgagcgagcgcgacgcngccaagcagaggctggtggtgctggtcaaggacaatggcgagcctccgcgctcggccaccgccacgctgcacgtgctcctggtggacggcttctcccagccctacctgctgctcccggaggcggcaccggcccaggcccaggccgacttgctcaccgtctacctggtggtggcgttggcctcggtgtcgtcgctcttcctcttctcggtgctcctgttcgtggcggtgcggctgtgcaggaggagcagggcggcctcggtgggtcgctgctcggtgcccgagggcccctttccagggcagatggtggacgtgagcggcaccgggaccctgtcccagagctaccagtacgaggtgtgtctgactggaggctccgggacaaatgagttcaagttcctgaag

SEQ ID NO: 556034 - DNA, 166 bp, Homo sapiens
ccgttggacgctttcatccctcggttgctatggatggttctaacaaaaactacacatatgtattcctgatcgccaacctattcccccaccagactaaggacatttcccagagcttcatagggcctggtccctggagaggacaactttgacatgggtccattcttgc

SEQ ID NO: 556035 - DNA, 186 bp, Homo sapiens
tctcaatctccgaccctctggattggactacgtacatgacctaagcctgctccagtgctgagaggaattcgttccagctagttatgttacgtatcactgacatgacttgccacaaaacacataatttgaatcaacacaaccacccacagcctaattattagcatcatccctctactattttttaac

SEQ ID NO: 556036 - DNA, 163 bp, Homo sapiens
ctagtagctggctagagtgtgcgtgccaccacagcccggctaattatacttatatttaagtagagacggggatttcaccatgttggctagtgttggtctcgaactcctgaccttgtgatccgcccaccttggcctcccaatagtgctggtgattacaggcgtg

SEQ ID NO: 556037 - DNA, 165 bp, Homo sapiens
ccatcttgctctcatcacgcgtctttgcctaggggaagtgcaccagagagcaagaggcattctttacttattaaaatgttggggcgagaacaactttttacgtggttatgctgtcctcctacgctggggctgctaagggcagttcaacttctaccctgtgttaca

SEQ ID NO: 556038 - DNA, 111 bp, Homo sapiens
aagaagggatatgtgggtgattgaagagtatgcaatgagacgataattaggtctgttgtgtcgtaggcagatggagccgtgttataagttatgccgtcatagggactagta

SEQ ID NO: 556039 - DNA, 1635 bp, Homo sapiens
ggggccatcctgtcccaccatgcagatgcccctagcttagagcctccctcaattccccctggccaccaccccaccatcacagtgctgggacgtcgacgatcatagatcttgagactcgatcccataggagacttcggatgatatcaagatcagaccactggctgcacttacagtcaaaccagaagataccccctacctctcaggttgacttggagtggtgacacgtggttgtatacgcacgcccagcgcaccacagcaatgccatgcacttagacaatgtcatgaacatgaatggtacacacgtgaggtactgacgccgtatgtaggcccaaatggagcacatagactaagaaatcccagtacatgccaatgcacttcacaagagcaaatgattgaactgaggcaccatgaatgaagtcagagatgaaccaccaaggagcaacaccatgtacccttgcatgctaccaacagagcatgagcaccatgtacagataacattgatccaccagagaccgaagagcaagaggcatgatgaacccaccctacaccatacagcgccagcaacatgccacagaagaacaatcacagcacacggaagaaggaacaaccgaatgacctaccaacatgacacccactggacaccactcggaaaaagacacaacaccagagcacgaatgcactggaccagaagcgagattacaaccgtggagatcgggaacagacacccaacacaacacgaggaaacagaataacaacatggagaccaacaagaataaacgtaaccctcgacatcaacagacaaccagaaggagaaatgacggaagacattcaacaaggaaaaggatcaaacaggggacgacaacttgcaggaccatccaaccaataggcaacaatgcaccaatgggcaccgcacaacaaagaaccagacacagacaacaccagcaacgacaaccgcgacctcaccctatccacaaccgaacggcgcacgcaccaactcaaacagagtcgaacgaaacacgcaaaccacagcgagccgctcatcacgacgcacaacctcatcacagggaccccaacgagcaccaccacccacaagaacgaactaagagtagcacctaccagaccacaaataaagcaagcggacgaacagcaaacatagcggacaagaacaagagaacatacaagacaggacacaacatgacgcccaataacgagccaacaaatagggaaccaagaaaagaaacactatcaccgacacagtcaccccagcagaggacaaagcggagaaagcaagtaaagcggacagtacatatcaaagacaagatagggaacgcgtgacccacaacacccacacgacacaccagagatatcaacattaatacaaaccgaaacgctcacagcagtccaaccacagaacccacacaataatcaaaataaacacaaacaaaaaaccaaaccacaaacttacaaccaacaccaccacagtaaacaacacacctaaagcacaatagtcaacacaaaaaaagaaaaaaaaacaagcaaaaacacaaacacacaaacaaacaaaacaaataaaaaacaaaaaaatcaacaaacgacacaacaatatatcgactaacaacacactacctacataat

SEQ ID NO: 556040 - DNA, 404 bp, Homo sapiens
actacgtcgcgaagctctaggtcaggcctccctcaacttttcaagttacttatgatggtcaacgttataatatttaggatcagatggacttttgttagagtcctggctttgccacctactggctgggtgacctggaccacgttacttgtgtctgtgaccattgtcccctcctagtggagctggcactccatggctcttctggttgttatactacatgcaaggcacttaatacagtacctggcattagttagagcttggtaaatccctagttcctcctgtaaggtactgttatctttgatgctgctgccattgtcaccttatacccatgtcaactcatttgtcacctttctaaaacatgttgaaattattttcctatccctagtttcttagcccagctcggacgg

SEQ ID NO: 556041 - DNA, 381 bp, Homo sapiens
tctcctctcactttttcctacctagcggaagacgatgggggactcgaggtcgtgctctcgttccgttcccagaggatcctagtgcttaagatcggggtttatttcctctattagtatcaaacgtatcaataaggatcttagattcgtagttttagatttgttgcagcacaagttcaataagtaatatgcagtattccagctcccgacttaggagagtcgagtaagtcggcgaaattatctcttccttcccaaatattgccctaattaattctctttcggagttaattcgcagcgggccgaccgtcgatagtacggctcctttctttcgtaccctagatacattagccatcgaaagtctagccccgcgaccctctagcgtcg

SEQ ID NO: 556042 - DNA, 1405 bp, Homo sapiens
ggaagctggattcagcgctgtccgcgacctcacctttagcgtcctgtgagggacggcccaggtggcaggatagtcctggtctaggccttctccatggcctcaacacgtccctaaactatgtaggaccagctctggttccccgtgctctggagctacctagctccatgagctacccatgaaccacgatgcaccgacctgggtgcccccacaagcggcacgcactcaggaagctaggagaccccacaggaaggccgagccgcagactgacaaggtagtggtacctagtagcacgtatcaccaccgacaacggccgaccgcaagcccacactcacgccacatcgccaagttgcatgtcgacagtgcaggctccagcaactgagacagagcaggaccgatcatgctatccatcaccttgggcgacagggccaacaccccttgccaggcagcaaccagaattggaccccttgatcggaaccgcacagggcccgacacacccacaggaaccatgaccaagagacgatcacaagccaatcaccacgaaagcacgccacatgaccacagctcaccacacctggctaggccaaccacatgccacgacacgacaatgattgaaccggcgcaatggccgagcacaccaagcacgaccgcattacgccacagccccccatggcgccacacaccaatgccaaaccccgtccaacacgaaaatacaataccacgatggcaccagcagaagcgcacacaccccatccaaacacataaacccaggacccaataacggcacaacccccccccataagacaacgcaccccacgaacaccaccacaccacagaggcaccttactcacaacagccatcaccctctgccgaccatcaacccaagccacactacccacctatctccccacactaccaaaaagtacaacaccccaacaccctttacactcacaccacgcccccacccttacacacgaccaccgatcacccatccacaccacccccaatcaccccacaaacctatgggacgattagaccaccacccgcactccaacatgcacaacccagaacgaaaccgcccccagtaatgaggaacgaaactatccccgttcggacgggaccatcaacaacagaaacccgcgcgcacctctaggagccaccaacagccagcgggcggcaccccccacatcaccacacaggaaccatgggcctcacaacacatcagtaccacacacattagggtgaactatggcgaccacgcataaacactgacacatcgccgcacgacaacgggcgcgtgctaacgaaccacacgacaacagccagaagagaacaccgcaagtaggccacgacacccaacaccaccgccacacacaaaaccaacaccaacgcaccacaccaaccaacc

SEQ ID NO: 556043 - DNA, 366 bp, Homo sapiens
  misc_feature (11)..(11): n is a, c, g, or t
  misc_feature (44)..(44): n is a, c, g, or t
caagggtagcnatccgtattggtaccataacaacagctgcggcnacagatagcaatggctgaagatcagcccatttcctgggagactttggttgtccccccactgcctagtaagcaatgagtatttaaaaaaaaaaaaaagccaactgattcatcaaatgtaattcatcatatagattctaatttaaattctaatacaatcaataagaacctgttagtctgaaagactgtatctttctagaccctgttaacttccttataaactaggaaggcctaggactagacttacaatataccttggagactagagttatcttgtcctttgagacacctggaaaacagcaatgagaagcctaagtgtcctgtg

SEQ ID NO: 556044 - DNA, 356 bp, Homo sapiens
caggcggttctctggaactctggcactttgaattccgaatcactggattaaagtcgtctgctgtgctagcggtgtctgtagctcgcagtaatgttacattatcattgccagggttctcctcctgctctagctgttgctggtatatcttctgcagctcctcaagttgagtctgcaggtcccttactttcggcagtcatttcttcttcagcgagcagtcagggatttcttcatatctgttggctgtgcggtttaagatgcatcatctttctcagcaattttttttaggtaactgattggtctcttcttgatggctttctaaaagtgcaggctccacctcctgggcacacattatggag

SEQ ID NO: 556045 - DNA, 447 bp, Homo sapiens
  misc_feature (36)..(36): n is a, c, g, or t
  misc_feature (39)..(40): n is a, c, g, or t
  misc_feature (46)..(46): n is a, c, g, or t
  misc_feature (55)..(55): n is a, c, g, or t
  misc_feature (60)..(60): n is a, c, g, or t
  misc_feature (99)..(99): n is a, c, g, or t
  misc_feature (119)..(120): n is a, c, g, or t
  misc_feature (130)..(130): n is a, c, g, or t
  misc_feature (142)..(142): n is a, c, g, or t
  misc_feature (166)..(166): n is a, c, g, or t
  misc_feature (172)..(172): n is a, c, g, or t
  misc_feature (196)..(196): n is a, c, g, or t
  misc_feature (216)..(216): n is a, c, g, or t
  misc_feature (280)..(280): n is a, c, g, or t
  misc_feature (283)..(283): n is a, c, g, or t
  misc_feature (326)..(326): n is a, c, g, or t
  misc_feature (344)..(344): n is a, c, g, or t
  misc_feature (355)..(355): n is a, c, g, or t
  misc_feature (412)..(412): n is a, c, g, or t
ctggggggctttggtggcccgactccatgtgagtgncannagttgnagcagcctnccgcnaccctgttggccaacccagcctgggtgagttggacccancaacaactgcctgggggacnngggcatcctncagctggtgganagcgtccggcaaccgggctgcctnctggancagctggtcctgtacgacatttantggtttgaggaaatggaggnccggctgcaggccctggaaaaggacaagccatccctgagggtcatttcctgaggcttttcctgntgntgctttccctggacgaccggccttaaggcaaccctggggcccnccagcccctgccatgctntccccctgcanatcctaggtttgaaaaaaaacgctcagatccgcttatttttgccagtatattttggnccctttataatcattaaagcccttttttggcagga

SEQ ID NO: 556046 - DNA, 545 bp, Homo sapiens
  misc_feature (13)..(14): n is a, c, g, or t
  misc_feature (151)..(151): n is a, c, g, or t
  misc_feature (154)..(154): n is a, c, g, or t
  misc_feature (228)..(228): n is a, c, g, or t
cacccactggtgnntgccaacacgtgtagggactcgtgcctggccgcaccctcatgcttggacctagcgctgctgaccgagctgtgccagcgcgtgagcttttgcactgacatggaccccgagccgcagaccttccaccccgtgctgtccntgntcagcttcctcttcaaggcgccactagtgccgcccggcagcccggtggtcaatgcgcttttccgccagcgcagntgcatcgagaacatcctcagggcctgggtggggctccccccacaaaaccacatgttcttggaacacaaaatggagcgcccagggcccagcctcaagcgagttggacccgtggctgccccctaccctttgttgaacaagaaaggaccggtaccccctgccccaaatggctgccccggtgatgccaatgggcatttgcaaaaggagcccccaatgccccccccctgaggccccggtcacccagtttttgggtttttcctccccgctgccccccccgaccctcccttgaaggcccccccaaataaaggggctgcccctca

SEQ ID NO: 556047 - DNA, 1317 bp, Homo sapiens
ttgtgtcgtaattggacgccgacattgattctattcttctcatgatgatgtgtttgttctctcgtgcttcctccctcccgccttcgttgttttactatgtgattatatctactaattatcatgtaacttcattaaatataggggcgcgcccctccccgtgcgtgttagagatgtgcttcgtaaccaatccgccctctgttccacaagaaaccaaccgcccctcttccgtacggctcgcgcccacaaaaggggggccccccacagagaaaaactgggggtggcgagcccaactggttctaaaagaaaaagatttgggttaagagaatggtggaagaccacccccgctgatgcttcgactatattaaaagaatatttgggaaaaacccctctgtccacccacgggccccacggggaccccgagtgggcatcctgaagggttctcccagggtctcttgttgttttgaaggtgagttcctttctggaatttgcgcgaattgattgagagttgccattttagaagaatttcccaagctggatgttctgagaggatgtctccagggtttaaaactgcccctgactatacttgtcccatgcgccatggagtctcttacccccggtgaccacgaaatgtgggtctcccatggcgtccacaaaaattgcgccagcaccacactgaatttgtacagactttcaccgcttgaaatggtctcacacaaaactatcccgcaatggtttacactctggctttttcgcttctcgtttttctcgtgtttgtggtttttatactataaatatactcgcctcaccacacttcacgagatactcgcgagaagacacctctctctatgggctccacgccacccacaccacggtgtcccgccccacatttccgcgagaagagaagagtgattgtgagaattccactgagacccgcgagagaggtgccacgagcccacaatgagcctctgagaaagagaagtggtcccactataaattgagttccccgagcacgccacttgggaaagagccactatgagaaagggcttgcccacttctattttatcctcctcccctcgagagttcttcgcttatgagaaagttagaaatggctgagaagagagccccacgtttgaattgggaaagctcactggagcttcactggtgaaggccgctagtttctggaaaagcccacctcggggaacgagacacacggtgctataagttgaaacgaggctgatggaatatgaaccccccgtcccagaaatctgttttaagttccgacttccaatagtggccaattaaaagtgctatttgtga

SEQ ID NO: 556048 - DNA, 992 bp, Homo sapiens
  misc_feature (19)..(19): n is a, c, g, or t
  misc_feature (67)..(67): n is a, c, g, or t
  misc_feature (78)..(78): n is a, c, g, or t
  misc_feature (235)..(235): n is a, c, g, or t
  misc_feature (246)..(246): n is a, c, g, or t
  misc_feature (259)..(259): n is a, c, g, or t
  misc_feature (281)..(281): n is a, c, g, or t
  misc_feature (288)..(288): n is a, c, g, or t
  misc_feature (314)..(314): n is a, c, g, or t
  misc_feature (338)..(338): n is a, c, g, or t
  misc_feature (343)..(343): n is a, c, g, or t
  misc_feature (345)..(347): n is a, c, g, or t
  misc_feature (371)..(371): n is a, c, g, or t
  misc_feature (373)..(373): n is a, c, g, or t
  misc_feature (387)..(387): n is a, c, g, or t
  misc_feature (391)..(391): n is a, c, g, or t
  misc_feature (409)..(409): n is a, c, g, or t
  misc_feature (417)..(417): n is a, c, g, or t
  misc_feature (423)..(423): n is a, c, g, or t
  misc_feature (445)..(445): n is a, c, g, or t
  misc_feature (453)..(453): n is a, c, g, or t
  misc_feature (468)..(468): n is a, c, g, or t
  misc_feature (499)..(499): n is a, c, g, or t
  misc_feature (547)..(548): n is a, c, g, or t
  misc_feature (561)..(561): n is a, c, g, or t
  misc_feature (563)..(563): n is a, c, g, or t
  misc_feature (566)..(566): n is a, c, g, or t
  misc_feature (669)..(669): n is a, c, g, or t
  misc_feature (779)..(779): n is a, c, g, or t
  misc_feature (816)..(816): n is a, c, g, or t
  misc_feature (908)..(908): n is a, c, g, or t
  misc_feature (932)..(932): n is a, c, g, or t
  misc_feature (978)..(978): n is a, c, g, or t
gcaagacacctcatgagcnccagggcggcgatgtcctttcacgagagcaacaccaaagacttcaaanacattccagtnacaaacagaacaattcacttaggacattcacctgcctctcccagagcccccaatctaatgccgggggccacagagaagggaagggggcagggggcctttcgtggaccagggggcctgcccccagttttctcatgcacacaacagtgcaataccaagncggggactttngaccaagtataanaccacagagagggccaagatgngcaaggntgggggggggatgggaacacaaaggngcacgcagccacagatacacaatnggccntnnngggggggggcatctggcgggggtngnctccaatccaattngtcntcccggggggctctgggngggggggncggggnggcgggggcgaaggccatgggngggggggnatgggatccccgacntgggccaggggagcggagcagggcttcgagngggaaggcactctgtgtcaagggagtagatgcacagggctcagcgggnngggttctcactgngntcnaggctgcgcctttccaggttggcacaagacaaagggcagaggaatgctccccgccttgccgggcacagtgttagaaaggaaattcaagatccctactgcccanccagccacacaagaacagcacgaggatgaggtagcccctactgggcatctgcagagaggacaagacagggggcacagacacaatcaaaagcccaggggaaaaggcttganggtatgaagtcgacctctccaagtggtattgccacangcacagcggctccctttccatcttgagtcttcttccttctgctcctggccacccccttccccacctataccttcttctccctgatgtggggnaactgatctctccccagtgcctanttccattttgaaagtctgtcttcttttcttccccacctcctactgnctcattgtgtcttt

SEQ ID NO: 556049 - DNA, 737 bp, Homo sapiens
  misc_feature (9)..(9): n is a, c, g, or t
ctatgagcngcggggcagaagaacgatgtaactcgctggtgctgcgtgagcacggtggccgtcggactaatcctagcactccgcactcaggcacctgagacaagaactctctgagcgagtgtgtggagccaggcctcttgtgtagacaagcactgcatcgtgtacgcaggtgacactaggtccttgcccaccgatatacacctgcttttcgagcagataatatccgagaactacagcctgggaagtgggcaggcaccctgaatacgtttgcgccattcttgcccaagctaggcgaccggctcccctaaatcaaaaggatcttgacagccaagagtgccagcttattcaccatctacttaacaggtgacatgtaaaaaggcgggaacagccctagccttatctgatggtatatactaggtccgatattcctccgggggggtcctggactcaaaggaaaattctcaagccgtggggcctctgtcgccatgcatggcttgaaaagggaaaattaactcccccaggcgccaaagcaaacacgatggtgaatggaaactgttggaggtgggatattcaaataccggagctatgaaaagaacctcccctttgtggcaaacctatatcctcaagaaataataaaccgttttaaaggggcgcgccccaagtgggtgtttcaaaaaaaatccgaattttcacaattcaaaaaattgggcgcccattgggcaataatctaccaactg

SEQ ID NO: 556050 - DNA, 1804 bp, Homo sapiens
  misc_feature (593)..(593): n is a, c, g, or t
atccaagataaggaaggtactccgtccgtgtagctagcagagtgttgatcttttgaccgggataagacgagactgtgaagatggctcgtagccatgtctgactagcaacatccagaatgagtccaccgttgcacctgggtgctctgatttaaaagtgggatgcaggatcattcgtgaatgacctctgactggtaaagacggagtcgactctcagtcatgctggcatgcgcgcgacgtgcatgcgctagttgcagcacctcggtcgcaaaggcaagaggaatcgcaataggcacaaaggaatagggcaatcccatcgccatagactcgaggcgatgaggcgtgtgagtccttcttggcttgggtggaaagagccagccatcgagtacagggcaattgcgacacggccacaccccatggtttgctagggagctataccaaagctagtccgctgaggccacagatgcaagttcgcctacgcaccgtgattgacccgtaggggctcgcttgcactgatcactacctaagcacggcgcatcgggcacgaatacgctcaccagatgcataatacacgctcggagacaacggcaagccancatttagagacctaaggcgtatcacagagcacggcgtaatagtcacgttaaccttctgtcacatgctatgcgcaaagccccaagatgtttggaatcagacgcacgatttgtgcgagccacatcggacacaacagaggcgggatacgaagcatatccccaaaagcatcacaaagggggacaagcggtgccggattttctaccacagattgcaccgtatgggaggctccgacggtagaatagaaaacggagggtaatggacatacagtaatagatagctggataggtagtggaacatggagcacattcgctcggtgaggggattaaacgaacttgggcagaagccagaccatgtcttcgccaagttggttcctttgggggaaaacgtgaaaaggcaaaataagggagagttcacgcaagatgtgaaatacgacggtcatagtttcaaaataaaaccccaccttataggcccgagatctgcactaggttagttttgcgcccgcaatcgcacgttactcacctaaatcataaaagcgaacgcctctgtggggacacttacgcgcatacggcaaccgtgtgccgtattacactgacgcatggacaacttgggaattaccgaccccatgggagcaatcctaacggagtcctcaacaaatcgcaacaccgctacacttttagaggcatttgagctttaccaagtataacagtgtttgaaagacacgagtcacacgcacttttgtgcgaacatctaccaccggcgaataatcttgccacgccaccaaaccatggcgtgtgccacaacggcggtgcagcacgacgagcgacaggaatacaccaagagtaaaacgatactcaggggacaaacggcagaacaaaatcaccagcccgaccacacatggggacagcgcacaagacaccaccggacacagcagtagcgcttgaggcaacctgcgcgacaccaagtgcaccacttagctaaaacagcacccactaacagcagccctggccacaacacacgagactgcaacgagacgacacacaccactagcccagcagagacgcggtaacgcacacagcaatcagcacaggaaacacacgcacaacggacccacaactccacctgtcactcacccaatgcacgtacgcacagcgcacaacagcaacaacgatggggaacaacgcagccgcgagacctgcacagccatgagacacaa

SEQ ID NO: 556051 - DNA, 420 bp, Homo sapiens
  misc_feature (402)..(402): n is a, c, g, or t
  misc_feature (407)..(407): n is a, c, g, or t
tgcaggatgctgagagcagtgacccttcaatattgggccccaggaacctcagcttgctcctgtccctgctgataagctcatgcctgtaggccaagatctacttctgctcctgagtggctactgaccccgactggaagcactgcacataaattctgccctctcagtccacatctggcgacgatcgagcaagacgtcatcacccaacaggctctggctgaaagcagctggcaactgcaaaccctaagagcagctgcggacatagatttgaactgaagcatagtcaagttattgtcagccctgatatcctcattgccaactatcctcatgaccaggactgttccctgctagtagccacactgctttggaggcattcccaagcaatgtccagaacatcccttctgngactngcaggtgctcagc

SEQ ID NO: 556052 - DNA, 103 bp, Homo sapiens
ttctcgaggatttctgagcttacatcagctagcctacccataggaggatgcccaaagcatcacccgtaaatccctaaagtccactctaaaaacatcgtattat

SEQ ID NO: 556053 - DNA, 1103 bp, Homo sapiens
ttcgggaagtgaaagtaactgtgaaacagtgcttcataaggcgtggcatacaaggccttggtattccaacagccaggcgaggatgaggcccagatcccacactccactcgcaggcacccattgaataagatgtcctcactgggtgaccaaaactggtggtaacatagccaaggttacttttacttgggtaggatgactgccagaaggcactggctacacagagctatccagaccttacacatgacgtcgtgctctccagaggatgcgccaggtgtatcagataagcatgcacacaagacaggtgtgcgcccacacccaccctgggctgggcagcaagaggtcatagctcaccatacatgccacccagacttcctcagcctccttcccacacatccgaatcttcaagccggatgaacaagagaccacagccccctcgcacgcacgacctacggacgccgcaccacgaacgcatgctcctgctacacaccaagcccacccccctccgacccggcgggccagcatccccccgacgggcgacagcccgcgccccaccctactgccccaaacacctgcccgactcacaacaaagatgtacagacaccacccccaccatcacaaatgaacaccccctcacggctcccccacctccaagcacgcacgccgccaacagcacaacaggccacccccactcacctcctaccacgtcgacaagcaactggcacacatcacacccgcacacccaccaccaggccgcaacacccaccaccacccccacagcacacacaccgccctacccccacacagagaacatcccaccagcgcaaaagaccagaacacaacccccacccaaaccacacacaccaccacacaaccagaagcacacgatcgacccaaccggcacaccacccactcacagtgccgccaagacacgcccgaacccccccccgcacgaccaaaagcagaacgaagaagaaaaaccagacaccgcccacgaacgacaaaacacccgccagaaacaacaaaaaccaacagcgggacagcacacaacagacgaccgagagacacacaacaacgcacagacaccagaccacacgccgcagcca

SEQ ID NO: 556054 - DNA, 211 bp, Homo sapiens
cacacacacacacacacacacacacacacactgggtattttagaatcctgtgctaataaaattactctgaaagtatttctcctctgtacaaagttaacttgctcatagtgatgataaactcctgccagtgcctagccctagcagtgctgaggagtgcaggtgatcccacaaaagagtactgtttcagtctccagccaatggaaacaacaga

SEQ ID NO: 556055 - DNA, 212 bp, Homo sapiens
agccggcgcctggtggtcttgcacactggctggtgggacacggcaggagcatcactcacattcaaaagaagccacttgagggcagtcaaggaaatgccggacgtgcgctcaggcagggcacacgtggagctatgctagatgggcaccagggaccactactctaagcaagctgacgcaggctgggaggcggtttccaaaggcatccactgcat

SEQ ID NO: 556056 - DNA, 401 bp, Homo sapiens
gtagtctacgaggatcccggtgttcccttgtctggctatgagtacgaatgaatatacacacgcatatgtctctatagagaatgatttatatgcctgtggggtagtatatccaggtaataggacggctgggtcaaatgatatttctggttctagatccttgaggaatcgccactctggtctatccacaagtggttgaactaacttacgttcccagcaacagtgtaaaagcattccgtatgtctccacaggcttgccagcttctatagtttcttgactttttaataattgtcatttctgactcgcatgagatggtatctcatggtggtttggattggcatttctctaatgatcagtgattagctgttgaggtctggttttattttaggagagaaagggaaaca

SEQ ID NO: 556057 - DNA, 330 bp, Homo sapiens
agatactgtgctcgaagtagaggttttactctactcatcactgcgatttgcacattgctccgtggacactcggaggcctgcgttctgatccctataaatggaagcgtgctctgagcctgtctgcctccctcggctgctgctggtcctcagtaccagcgcccgggggtgtccacaaccacttgggacagatgattgtggattttcagacttatgcttgactgggtctttcaatgacaggcttggcttatctgtggcccagacatttgttatgcccagaattgctatttatgttgctttgtaggctctataggatcctcattgtctttgctt

SEQ ID NO: 556058 - DNA, 999 bp, Homo sapiens
gagtaagatcgagcgaggagcccaagagcgagcgcgcagaagaagctcgagcgcctccgcgcgcgacccaacctcggccgcgcgctggccggaaatccgcccgggctccccgagaaggagccccgccgccgggacaaccagcggggataaccgcgaccaaccgacaacggaaggcgcctggagcgaagagcagaggaggcgggagccatgagttgaggcggggcgaagggcatccaacaacaaacaacaaacaaacccttccccgccaggactcccgaagggaggcacaccaagacgcggtcgcctccaaagtgaccccggcgcccaaaagacccggagtggagcacgcggtatgcacccccagagggggggcgcacccccgggacacccgccgggcccacatcgaacggcgaagaaaaaacccccggagtggacagtacacgccacgacccctatcggagacgacacacagagggacagaccggtgcgagcacgcccacacattgtatataagcacgcccagcaacgaccgggacggaagacacgcgcgcgacaaacgaaagaatgtctcgcgcgacagcacagcaaacgtcctcgtgtgcaagtgcgtacacaaagacgtgccacaggcgtcacagaagagccaactcgcctctacataccaccagacccgcacccaaaaaggaaggagctagctaggccgcaaccacagaagcgggcgccacacagaagaaagccctagcgccacgagcaactattgtcgcgaccaggacgcacgaagacagtacacaacctagacaacaatggtaagtagtgagcagcacgaagcgagagcgggagccaccagctgcaatgggcaccggcacggagtggaactcgtgtggcaaaggtacagggccacgacagagcggtcgccggccaatagcaccgtggagaaacagtgaccgggcggcgctgccacccccaggaggcgggcaacatcgcgccagaggtcggacc

SEQ ID NO: 556059 - DNA, 1439 bp, Homo sapiens
  misc_feature (360)..(360): n is a, c, g, or t
  misc_feature (642)..(642): n is a, c, g, or t
  misc_feature (1179)..(1179): n is a, c, g, or t
  misc_feature (1437)..(1437): n is a, c, g, or t
gcaagccgaacatctctggccccagatcctcatcctcgaggtggccaactctcagattgtcatagaataatgcaactatcttaatcctcggcactcggtgctcggcggtcccagatgctcatattcacacgcatgcttggtacgttcgcacatgcattctgggtcctatgtggccatggcagccactcaaaggtcagaaaagtgatagatgcatgagtggccccaagaaccgttgtaggattgcccaatacccaatgcttgtagacccaggcgttgaggtaccaagatcgcttcgtggagatggagatcatttgcaggacccaggaggcatccctttaggattgcgagtaagtatgcacncacgaactactatgcacgcgcaagctcttggtacactgcattcggtcacccaattcaagaggtagatggccaaggttggcgtccaacttaccgctttcaccaacgggttgcattacgggtgtttcaccttaggcaacagtaacgccactgcaagggaaggttaacccagagcttcccttgcctaggattcctttccccaaggtttacaagcacaaggagcctattagaggcacgttggcaccacggcttaccccctgtttggtttcgggttatcgatacgcnggaggttcactagcaaattagtgcgggcagcaaaaacgcaacctctttggaattgggaccgccacgccacacggggggggacctttctcaacatcaatggcggtcacgaaaaggaaacccttttcccccaatttttttccccaacggaggttatttccccccccccagggggcgcggcaaccagaggcggcgcggcaaacggccccccctattatgtgtgccgccgcccccgaaaggacccccaaaagcgtcaggcggccaaagcgcaaccccgacgggccattgcccatttcccccgtttgaattgtcccccttgaccacacacttacaggtgagttgcggcgcgcaggcagaagacttatactacggagtgtacatatcacccccccaaacgagggagaaaaactctcgctgcgctgtacgaggcattcaggtatacgcacgagcagattacgcggggcaccttacccttttttgcacattatctcatccaggggcgcgacaaacccacaagtgctccccctcctttgaggttanaaccaccaagataggcgcgacccaacttttaacattaccagtttcccaccaaagagaggattgagagacaattaccggccaaactttcccctgtggggcactttgcgccccttctgggccaacacgcgggtcaaatttatacactggaaacgccactatttggcagcacactgcgacacattttaaacagacgggacaccccgtatatttaacccctttatagatagggagggagcgccccccccccccccgcagggnaa

SEQ ID NO: 556060 - DNA, 934 bp, Homo sapiens
gatattagcagcggttattcggtgagcgggtggtggtttattcttccgtgaagattatgtggctccgaggacatctctagtgtcttcagagttcttcctaagtctggaaatatttaatgttcataaaacatgttctcgaatatatgactcccaggaaccaactatattttctcccaggaagagatccgacgttataccaaagttggagatgatgccgatgggaagcgtcattggcactactgcgaagcaccgtgctattgggcaattttagcaaactgtatggtgttcttgcttgtcagagagcagagaactgcaatggtccgactatgcttctctgtatgagagtctttaagcgctggaagaatgatttaggaaactccaatgcaggacatggcttgctagtgtggcgtggcattccttctgctgctaatgttctgactaattgacactatacggctctcttgctctaaatgcgtgatttattccagctactcgggatgccatgtacctctggtgatgctggttggattactgcgcgtgtgtgttatctagcacatcgttgtacgacatattttggatcgacccccgtgccctttgttgtgttcattgcgtgttcgattgggtgtgataggcgctatggctgccatgcttctctcgggtaggtggccctaggtggtgccttactgcgggggttggcccgtcctgttgcattggggatttaatagcgccgcgggtgtgtctactgttggaccagactatcatccgcggcacagcttgtagcccgagtgcttgcacggcgagtgtaaatacccgttgttgttacccccgctgggattggcagggcccaacaggggagggggaggcggggctccaccaaaggggggccgcacaacgacacacctgctggagaaacaccagaagggcatctggcccg

SEQ ID NO: 556061 - DNA, 116 bp, Homo sapiens
  misc_feature (3)..(3): n is a, c, g, or t
ccntagaggtatgtaacatgatagtaaatagcagtctatcaaaggagttactaggtttccctaggtctctagattcctatgcttatgtagagtattaagagcaaattgagtgggat

SEQ ID NO: 556062 - DNA, 591 bp, Homo sapiens
ttgcgagaattgcttgaacccgggagcggaggttgtggtgagccgagatcgccattgcactccagcttgggtgacaagagcgaaattccatctcaaaaaaaaaaaaaaaaaaaaaatctgaaatatggaccctggaagagccataaataataaaaatatttcctacaaaatactgtgatgtttacatagaaatcattgtgttgtctgcacagcctgttccaaatagtcacaagctcgtctagtaatgaaattctataaattttagttattgagacaagttagaatgaaagagctgaatgaaagttctcttggccaggtgtgatggctcacgcctataatcccagccctttgggaggccaagacaggtggatcagtcgagtccaggagattgagaccagcctgggcaatgtagtgaaaccctgtctacaaaaaatacaaaaattagctgggcgtgctggcgtgtgcctgtagttccagctactcgggaaactgaggtggaaggatcacctgagccctggaggttgaggctgcagtgagccatgatcatgctactggactctggcctgggtaatagagtgagatcatgtctca

SEQ ID NO: 556063 - DNA, 937 bp, Homo sapiens
ctccgtacttcctcagttgtaccctagttctaatcgcatatggcattccataattgctttacacgaacgagaaaattcataggctatatacaactacacgaaggcccacaatcattgtaggcccgtacgggctactaaaaccgcttcggtgaggcctataagaacatctgcaccaaggaagccccataaagacgcaacctgcacaattcgtaccaatcactccgtctaacagttacaccggacacccagagacatgtatgacttcatcaaccaatccgcgtcttgccgtactagtgaaacccaagcttcaccattacctgagacctgcgcttgtgtctagatcgtgcccacgatatcgtgcttccgtattggcattatcataggacaaaccctgaggtgctgagctcgggtggacgtgtaggatcatcctggatcaacggctaaaacagttaaaatgtcaagaagtattgaccatgattcgggcgcaaatgggaggagcagccacaaaaataattctctatgatggagagtcaaccttaagccgatgctattctaactatctaagcgataaaaaatgaagtggagtcggatccgttgaaaaccgtcatctcaacacgcgttatcggacaaggacaaggaactatctcagattacgtcgcatgggagtacaatgatgccatggtccagtaaattatgggttgaaatcgttcccactatcatatgtcatgagagtcgaagacgtataactgggtatcagaactagctagaagaggagaagttacagaactaaatcgtcaaagtctttaaaactctcgaaaatacgtctgtaaggcgccaaaacggacctagttatttatatggcggaataaacaaaatgtgattataagggaagatatgaccttagcaaatataattttttcctaggaaggttatttaa

SEQ ID NO: 556064 - DNA, 282 bp, Homo sapiens
ttgtctttaggcatagttggctggcaatggtggtgaaatgcgagcaattaatctttagatgaggaatggccttcctttaaccagttgaagggtaccatctggcacgattcaaaaacttgtagtgtattagtgtgggaatcctccaagttcaagtaaagtttcaggtattttatcatagcaccgactgagtgataggtgtcggaggtagttgacctggaaaaattcctgaaagcagtcattctttagcatgacattatcacttaagtctagatggacaagatt

SEQ ID NO: 556065 - DNA, 126 bp, Homo sapiens
cgaatcgcagctcggtccctccttccttccttcctttctttctttcttcctcccgtccttccttccttccatctctttaggaacgggactcctctacgacgtcgaccctgaggcatgaacgctggg

SEQ ID NO: 556066 - DNA, 218 bp, Homo sapiens
tagaatcgagctcgtgtaccttgaacattcgtgtcataagtaaaaaccctcacactacaatcttcctaggaacaacatatgacgcacgtctcccctgtaactctacacaacaatatttgtgtcaccaagaccctagcttctaacctccctggttcttatgatattcgaacagaatacccccggatttccgtctactaccagagacacgaattgttcag

SEQ ID NO: 556067 - DNA, 329 bp, Homo sapiens
tccagatttctggtggacacatccactctgaccatcatcgcgaccgacactcgtatgggagcttactatttctgtcaggcgtcgcacgacaccactgttggtgtacggcgtgtgtacccagctgaccgtcctgggatcacgcccaaggctgccccctcggtcagctctgttcccgccctcctctgaggagcttcagccaacaaggccacactggtgtgtctcataagtcacttctacccgggatccgtgactgtgagactccttggcggatagcagccccgtcaaggcgggagtggagaccaccacaccctccaaaccaagcaacccct

SEQ ID NO: 556068 - DNA, 213 bp, Homo sapiens
cgcccccgtcctatgatgcaaacatggttggtccgccgcggatcccgggaggtcgccatattgattgcgaagtttgtgcggacacccgagtcggacataagcgcgactacatgtcgcaaaactcctggggtcaagcgatcctcccagcttggcctcccaaagtggtgggattacaggtgtgagccaacgcccgcggcctatcgagtgagactg

SEQ ID NO: 556069 - DNA, 374 bp, Homo sapiens
tacgaggctgagaatcaccacaacatacatgaatgggaagcctccctttgattcatccatttgtggtgacagtgctgctgatgtgtctcagtcaatacaaattggacaaaaatcacaaactacggcgataacgaacacgaagatgaacataaaatattactccctgctggtgcacggccttgtcgtcacacctcttgtgtccaagatctcaagtccttcagataaaaagattctagctatgaacaagtcttgtccaaacactggaagatacacagaccaactgttgaaacacaacgttggtgatttggtgtgggccatagtgtccggttacccttggagggcttgcatggattctgcagatatactccttcaca

SEQ ID NO: 556070 - DNA, 423 bp, Homo sapiens
  misc_feature (8)..(8): n is a, c, g, or t
  misc_feature (10)..(10): n is a, c, g, or t
  misc_feature (12)..(12): n is a, c, g, or t
  misc_feature (406)..(406): n is a, c, g, or t
cccaattngncntgcaacagcaaaactaacattaattttttcttcttcttcacaatttcatgggtagatttgttcttaccgtagatcttagcaacctcagcatatgagttttttcttttgagaactttcaccttttctcttaaagaaagcactttacagcttctctttggcatatctcaactgccagcatcactgctcttgaactttggggccattattaagtcagaaaagggttacttcaaaacaagcactgagataccaccagagtccatctgataactaagatggtaactacatgactaacaggccggtgacgtatagagcatggatatgctggacaaaggggtgagtcatatcccaggtaggatgaagcagggtgacttgagatttcactattcagtacggngcacaatttaaaactta

SEQ ID NO: 556071 - DNA, 987 bp, Homo sapiens
gaaagattaaataatgctactctacataagataatactgtgtctatgaacctcaacggagtgactgtacccaagaccgtatagatctattgatcggaataccatgaaaagcaatgcaaaaacctagaaaagactaatacctttctggggctgcccaaaactgtatcagcactgcttcaggatgatccaacacttacccaggtcgttgcaagagcagcgatgatagtttactttaaagaaatatatcttgccttgtctccgttccttcaaaggcatgcacctttgctttgaacaaattagtcctcaacttcagcctctgattgttctcctggtttcccaaccgcgtagaaagtagcattaacatcctacaaatattaaggagagttagtagacacgcaaatcgtgagcactaattctataaaatatcacttttgggacaatttggtaatccaaaatctctcctttcattctgtcagggtacctgtcccttgttcagatgatgataccctaactcgtaaacctgtgcggttcacaagggactgacgtgtccttgaccaagacaccagtaggtattcaaaaggttgaggtaattagtagtgtaccctacctatgctcttcaggggacgctaatcaactgtaagcagtaaaagcagaattattgagatcagagcaatgaagtaatcgctgcacacgtgaaactgatgaccaaagagatgcacctgtccacaaaatgcgttcaatgtacgcactgaggcagggattcgccagaaggggcagattcccacgtggacgatgcagaggacaacggggtgccaccaagaccagagggacaaaccccacggggggacacttacggaggacgatgaacaaccgggggcaaaggaaggaagaaaggaaggacgcatccaaggaggaaagcccagagaaaagcggaagaaacagcgaaagaaacaaaaaggagaaaacacaaaagaaggacaaaacacaa

SEQ ID NO: 556072 - DNA, 1004 bp, Homo sapiens
cacgcgtcggacggcgatgggacggtcgccgcaaatccagctgctgctgccggtgggtgtggtggcggagcggcggtgactgaggattgaagagccacagcacgaggagctgcaggcctggacagccagtggcgccagatagaaaactgggagagtgggcgagaacgtccactgcgggccggcgaaagcgtggttccttgtggagaagcactggtataacgcagtgggaggcatacgtgcagtgaggggaccaggactccagcaccttccctggctgcatcaacaatgccacactctttcaagatgagataaactggcgcctcaaggaaggacctggtggaaggcgcaagactatgtgtcgcgcgctcccacagagtgtgcgtgctatcacctgcatcatgctgagttgatggttctaagagcatggccagccaaccattgaacgcacggtcatagaagcctgcccaacatccagaaggtcgaagtgtacccagtagaactggctgcttgtccggcacaatgattggggcacatctcacacctgttcagttcagccataccgattctatggcctagttattgcgcacagctcgggagcggtactgcttggagcccaggacgacactcggctttggggcacagaactccggaaggctctaggataggtggtatgacacaacactccacgggtcctcgatggcgggccctgagactggcagtgatcaccatgagacccgcagacgagtgcgatgtcccggcgaaagctggatgtgttatgaacacacattcgaacagggaagcccacaggcacgacggactgggcacccaatatcggtgcacagcactgcacccgccggaccgccacatggacggccgcggcaccacaaaccgcgggaaaccagaacaaggcacgtgccacgcaacactgaagagccccgctcacagaaggggctaacacaacacgcaagaacacacagaagcaacgcacctaccgttcctaattg

SEQ ID NO: 556073 - DNA, 327 bp, Homo sapiens
  misc_feature (247)..(247): n is a, c, g, or t
tctctgcacagtgggatcctctcatgaatacagctgtcttgtatacggactgagatgcgggcttccgttcaatcctctccttagtgacgtatcaacaggctcgtggcatctctttctgcaaaggcacctgaatgtgtctgcgtccctgttagcataatgtgaggaggtggagagaccagcccaaccccgtgtccaccgtgacccctgttcccatgctgacttgtgtttcctccccagtcatctttcntgttccagagaggtggggctggatgtctccatctctgtctcaactttatgtgcactgagccacaacttctaataaaaggt

SEQ ID NO: 556074 - DNA, 516 bp, Homo sapiens
aacatggtgtagtcggttgttgcacccggtggtgccgctcgtctgtttttggcggtcactcgcagtcccctgtggcgcgcgtggggtggggcgcctgctttggggtgctgccctctcttgtaggggcaattgcctaactgcttgatacatcttatcacgctgcctttatgcactgaatcctgcgtatggtgttgtgcgccgcgtctcttggcatggagctcggcacattttgcattaatgtaggacacttaatattcattccctcacttttattgcgaaacaccatttgtctgcttttcactcctctcccagtaaaaacctcgtcaacatcactggtctcccccactctccctattcgatatccaccgccgttgatatcaaaggaatgatattcacaggggctattcatttttctcagcatcttattattttgttcatctgatagtgcaagacttcttttgccattcattagacataaacacgcgatctcagaaagaccctgaacgcgacaaaaca

SEQ ID NO: 556075 - DNA, 830 bp, Homo sapiens
  misc_feature (342)..(342): n is a, c, g, or t
ctttggtctcctttacatttgcttcttctgcttcaattttttgaagcatattacctccggaggagttctctgctctgcaagacccagagggaggaagagtttgccagcccgggatggaggcttcaccctggaagacatctagcatgctgagacgaaaggaccgtggcagcaccagctcagccttggcatgcgaccttctccctggtcatggagtagttccccaggagccacatgggcagcttccacctcatgaggcctgtgtggagctcggtcccagcgagtgtagcgcctaactccaggctacgcttggcaggcaatgcagcctaagtctatcctcttccnactagagctgtcctcctgtggataccggccgacgagacctctctagcaggacccgcttgccttcccgagcaggggctggcggaagccaaggtcttccagctccctacttcctaccaaacctagttctagattaacttttgtcatggattggggtacgcagtccccatgcgaggtccccaatagccagggcattgttaagccctcctgaagttgaatcagaggagacatcggcttgcaaggaggtgctgcgtcacgcactctcttggcttgcgttacatgcaacacgacgtggggcttcgggcgagaagccccgcagtccttccggggccattcgggggcgctgctggagcaatgttgcccgtggtgttgggactccggagcatcatgcagtaaatgcctggtgaatgaagccagtcgccatgacagttttcctgctccctctctcaggctgaagcccttagcagagaatcaatagccatgcccatggc

SEQ ID NO: 556076 - DNA, 236 bp, Homo sapiens
tatggaaattaaggaaagcacaaaaatataagaataatgcccttataaagaagtcattatatgaaaaagatacttgcacacgcatggtgtatagcggcacaattcgcaatggcaaaaatgtggaaccaacccaaatacccatcaatcaacgagttaataaagaaactgtggcatatgtatacgatggaatattactcagccataaaaaggaatgaattaatggcattcgcagtgac

SEQ ID NO: 556077 - DNA, 254 bp, Homo sapiens
ccgcctcagccccgggtagctgggactacaggtgtgcacgagcacacccggataaatctttgtatttttggtagacagaaggtctcaccatgttgcccaggatggtctcgaactcctgggctcaagcgacctacctacctcggcctcacaaagtgtgcacattgtaataacgtgatttcatatctggagaatcagcaaccaaccagccaagcatgttgcttatataagagagagctgagaaagcaaaggttggt

SEQ ID NO: 556078 - DNA, 301 bp, Homo sapiens
aacggtgtggctgtgcaccttactcgagaggaatggggatacctggacctgttcgagggaccgctacaggagaagtgagtgtaccagaattatggtcaatcgtggtctcactgggtaaggacttccttattattcgggtttatctattttgaatttctttactctcttgtatcgtcctaactataaggtctctgagaaggtctgtccagtgtggcttacattccaggacttaaaacctctgaatcctttatctttcacatccgtactggcccgggggatgctctagagtctcacctgaaag

SEQ ID NO: 556079 - DNA, 1119 bp, Homo sapiens
  misc_feature (470)..(470): n is a, c, g, or t
tggggggacttctggtttttattcctaggatatcttgatacttctcattattttcacaatctgcttgggaaggaaaaggtatggtagaaaactgtggacattcctgtgttctcccactgtgcaagggcgtggaacatgtggttagggatacccagcttgttgacaggacgtggcaaggcaacaagatgcctttgtgccgtggcgtaggattacagccaacagccctttgggcctgaattcacctcctcaagggggaggtcctccatgtggaattgaccagtgatttcccaacatgtggccaagaaaacccattttattcccactcagtggggcaagattgatcagagagagctgcactttttccctcccgagttaacctcaaaactgaagtagggccgagacagaggcccactaatagaggtacctatgcagagaaaccgtctgcagaggtgttgaccacctcttcgtgntccacgttcgctacaaaggagacacctccaccgagcaatcatagtccgagagaaaaatatccccaacccgtcgtggaagccgggggtctccgcagggggttagggcacgccatcgggggcagcgtacaagacgcccaattatcctttcgcccattaccacccaaagatcacctgccacagaaaatccaattctgcggcgcgcgcttcgagagtctactccacccttttttctggcacacttgactctctcacacaagaccccctactgggcccacctaggggccttatactcctccccacccttttataccctccccacatcaatggtcctcccccgcgcgaactacacgctgtgggaagacgccccaaaaaacggcgcgaccccgcaacacgagcaacgtcgctggtttgccccccagaaaggtcttcctccccgggccttcacacccccgacaccgaaccagtccccgaacggcacagccgtcaaaacgccacacgacccacggggccccacaacaagcgcgccgcccagaaaccacgccccaatagagccagctcgcattcgggcacgggttgaaacgccccatacctatcaggcaccccctactggacgacgagacacctgtctccagacgcgcgcacacacgtg

SEQ ID NO: 556080 - DNA, 391 bp, Homo sapiens
cagagggagaggtgggcacatcttgcgtgtgggctacttagctgtcctaccttgggcttcagagtgtccgaagcgacggggccaaagtggatgcccagcacagcacagctcctctaccaaaaggtggtgagatggcttttttaagtgaatccctaatcccattcctccctacgggatgggacctcccaaccagggtctccagccacctacaggtgccttcaggctggcaactggcccctgtctccctgggacaggctgccatcttggccgtttggcagccgtcacttgtgacacctccaggtactggaaaatccaaagtgactagggacgggaacaggccccaggcataccacagcagctcgcccctgagttagcagctcgcccctgagtg

SEQ ID NO: 556081 - DNA, 240 bp, Homo sapiens
attcccagagtcacagagttgacaggagatcctggtcactcatgggtcaggcctcagtcactggtttcccagtggaggctggacgtgaccccggctggaacccaaaggggcagacaggaatgggcaggagaatggagctgctttcccccaggccactgagaccccacagcttgtagctgggtcgcagtgtagacaggagacggttgtctgcagcaccacaggcctggggtgaggagtcct

SEQ ID NO: 556082 - DNA, 1133 bp, Homo sapiens
gacaaccgacactcaatgccgatgggtacttctcacccgtagcccacaggaactcagcacattgcctgtcctctacctgtgcgagttctgcctcaagtacggccgtagtctcaagtgctcttcagcgtcattgaccaagtgtgacctacgacatccatccaggcaatgagatttaccagccaagggcaaccaatcatccattcatttgagatcgatggacgtaagaacaagagtcattcccagaacctgtgtctttaggcacaagtgtctcctataaccataagacactgtactatgacacagcacccttatactcttactacgtcatgacagagtatgactgtacacgggcttccacatcgtgggctactacctccaaggagacagaatcaacggacagactacacacagtggcctgcatcctaaccctgaactccctaccagacgccggggctacggcacgctgactgatcgacgtaacacatcatgaaactctccacaagaggacagggcacacaccagggcacccatgaagaagcccctctaccagcacacattgggacacactatcctatcgaacagctcacggtcaccaagaccaccccggagaatcctgaatggaggcatgaagtacgcacagacggacaacaggaccacagacccacccaacaacagcgatcaggcacaacaacagcatagacaaacgaggcatcagacatccaacacgacaaacacacaccaaacgaaccacaacaacaagagcagacaagccacaccaggcaaagagaaacacagggaagagccaaagccgcggccacccgacacacccagacacaccacagccccacacgcagtgtacacaccaacagccggagcaacaacaaggcgaacagacgacacaaccacaggccccgaacaggcaaaccagcccaccgcacggcagaagaaaaacccgacgcacgaacacacacaaccaccacggcacggaggagcagacagacgacaaacgaaacaacccagccgacacacgcagaccgcagcaccgccaaccaccaacaacgccaccaacgacaagagaacaaaaaacagaagaagcgccgcacgactaccacaacccagcagctcgcacaacg

SEQ ID NO: 556083 - DNA, 232 bp, Homo sapiens
gctcgtggtgaccaagcgcgatcagccagggtggatgatgttgtgaagtcgatgtaccctccgttggaccccaagagccacccgaagagccccgcaaagagctccaccacgagccacgccaagagccgcacaacgagccacacaacgggccacccgaagagccacacaaagagccacccaacgagccccacgacgcgccacccgaagcgcaccccaggcgcctcacgatgag

SEQ ID NO: 556084 - DNA, 99 bp, Homo sapiens
catagtaggtactcaacaaataatagctgacaagtttgatagccagaaaacggaaagctgggatggaacccaagagtctgatccaagcttttacaatct

SEQ ID NO: 556085 - DNA, 269 bp, Homo sapiens
ccttctacgtctcatcactgaagcccgcatcctgtcactcccttgcttgcaactctccaatggcttcccactgctgttaaaacacaaaaaaatctagatctctttgctctgccctataagttaagtagggtggccctgtcatttactgaacaagcaggggaggtacctcgagagtcaaagggaatgctagaaacaattccgccagaacagggggtgtaaaccagggctgcccctgttcaaggccaccagcagtgatgagacgtagaagg

SEQ ID NO: 556086 - DNA, 204 bp, Homo sapiens
ctagcaggatcccatactatgcacagaacccggctggagtcctgtgacatggcctggggagctgggaaaggctgggaattctgtcaatattccctaggacttgcaggcttgagtgactggtgctgtctggagtaggcttcatgctcttgcgagcgaatctcaaccctgggtatcagggtttcgatgacacaagtactgcgccca

SEQ ID NO: 556087 - DNA, 877 bp, Homo sapiens
gggctgactctcttttcggactcagcccgcctgcacccaggtgaaataaagcagccttgtgctcacacaaagcctgttggtggtctcttcacacaaacgcgcatgaaatttggtgccatgactcggatcggggtacctcccttggggagatcaatccccagtcctcctgctctttgttccgtgagaaagatctacctaggacctcaggtcctcagtactgaccagcccaaggaacgtctcacccaatttcagaatctggaccccagctgaaagatcggactgttcaagctcatctgggaggcaactcccagagcccctgtgaactctggcccaagcctctctgacgtgactccttgcccagatctgtctcggctatacgcagctgaagacttgagcatctgtcccaagtcgccttggaaagccccctagaccatcacggatgccgagcttcgagtaacctctcacagtggagggaaggcgcatgacaaaagaccaaatcaaaacaagaaaaattcctttggtagcacgaataatctagccaaataaaaagggactttgtcttctgggactgaacttatatttaggttctcaaaaggctggcatctcaccagggctttcctgcaggcaaggtcctgggcggctacctaagctgatattttcggttcatcacattatttgaaggggggcctccgatttccctttactctttccctctgtaataatccttattagggttctaggcttaaataagggcaccgcctgagcctggcgcgcggtccacggccccgggattgtccccgttgcacagttgccgtacgggcaacccacacggtggagcccccggggcgccctggccggccccgccccggggccccgg

SEQ ID NO: 556088 - DNA, 121 bp, Homo sapiens
gaaagaggttaattggctcatagttctgcaggctgtacaaggaggcatggaataatctgcttctggggaggtcttaagagagctttatcaatacaagagggcaaaccgggataaggctctt

SEQ ID NO: 556089 - DNA, 152 bp, Homo sapiens
cgaggaaagtaaaaaacgcagcgtaaaccatatctggcctggcattggtggtttcatggtgctgacaggggacaatcccacacactgcacgaaaaaggggcctgctgcacaggcggaggtgttgaggtggggatgggcagccctgacgaggt

SEQ ID NO: 556090 - DNA, 1370 bp, Homo sapiens
  misc_feature (890)..(890): n is a, c, g, or t
gttccagggctcccactgcattctcaccattcatggtgcagttgtcatcaattcatttcacattcatcatcattcacacactctcttcaatcaatcagcacacatcacacagtgcaccaatcaacatgttccatgttccttgcaatccatcccgcacaacccatctcccgcagcccccaggtcccattgcacacaccacattagtctttccaccaaaactcagctctcatggtgcccaaacacaggttgtgggcactcactgcatcaacacacagttcacaatcagcagtcaattcacatttcacagggcctagagtcccttcatttccaacattcctctccacaggcatcagtttcccccactattccattacttattctttctatccagcagcccagcacttctttcaacacagcaatcagtctcatcatttagtcagtccgactcactaggcacagtctcaggttatctcgtaaccctcccactcattctcatcaaccttactccaggtcccgaaggtttacccattagcatctcaacttggtccagcatactagcatgcaagccactatatccagagcaactctaccatacgtatcagataaatacacgtatatcccaaaccctatcaccaaatcccatatctcctatgttcacaagccagcaccagcagcacagcttttctcacacatggtcaaaacagggtatatctgaaacagctcaattaaagttcgccaacctttaagctgcgatacaacttcgtgcgcattccacccttgacaaccacatggacggttacccatcaccatcctgggctaggcgcactaccaccgggacctcccaatcttcacatttaggaggttgtcccgggttgatggcgtaggtcgcntcagcatcttaatggtgggctaaactaaaacataccaaccgcggggtaacacacccacagtgcacaagacccaacgtcattgaaaacagcaaagagacgagccagaagggtacacagaactagcgacacacgccacaccaaacacggtaccacgccagcgacccccatgggctgccccaaacgggggcaacccactaccatcaccgtcaggccgtagacgaccagcagaccactgtcccccaagtgacctccacagagcaaagttacatgggaccagggggtacacactgagatcccaggcaactcaagcaacccgcaccaaccacgcgagcaacacagcagcccactgacaggcggcacaaggcaacacacggggcgcagacaacgaacacacgcaaccacaagcacaaacgacagcaacaccagacacacaacagacaaaccagcaccaaaagcacactacacacacagacacctcaa

SEQ ID NO: 556091 - DNA, 1252 bp, Homo sapiens
  misc_feature (239)..(239): n is a, c, g, or t
gcgtgcacagaataataggaaggggtaagactatctccctcaacagactgtctggcttgagtgatgggggtcacatggtggatcgagagcatcttatgtttaccaaactcccagtctagttgggcatgactcacatctgggtgacgcagggaagagtagacactgttgatgatcaatatgtgcaccatgtgactcactagacagcatgttgtactagtggcgcactacagatttgatgngatatcctatttctttcgcccaagtagtgtcaccaacgtgggcgtgtgacttccgtgggataccctcaacattgatcctgcaccgcatgggaatgctacgttcgttgcacgcatatagttcggccgcgaggcgcttaatcgagtctagcttgttttgccttgatgggaaaatcacctcgctccatattgcatagtttaccaagccgagcaaagtctgattttgacccgtgcacattttcctctgtgcgtaccgcgtactttcagaacagttaattcagggctagcctaacgtgggcccgtgtgttataactagccgattgcacctaagctcagggggcagagtccaccactcaagaacgggtcacgaacgtagaggggtcccttcagggggataatggccgtcgggagaaattggggcaaagtgcccacacttcggccagtctcttggagtcgacttcagagtctagcgccctgcgaaaggtcttcacacgacgaagagggagggtgctttcagtaaagtcttaagggccagcgagaacgcaatcattccggagctcaggttgttgacccaggcaaaggtgaaagctattacccaacgggtcaaagacgggcgagtaacggcgggtaaccccctgggggagaaattgcacttacaggctcccattttgcagggcgcccggctgcaaactcttggacaaccctgtgcacggaatctcccttagggcccgtccgcttagacccaatttggtagtatacgcgtcgataacgaggcaatggcacgcgcgcgtcggcatacagttggaggtcgagtgagggagctcgatcactatacctccgaagcgattgaaaaccaggcaccgtaattggttggccatagggcctgaggtgcaagggtacttgcggacaatgcgagggaagtctatgggatattggggtccacacatgaagggtgaaggcgtaatcgaggtgcaagaaaatcggcgtccccaggttaagtttaaggccccttggcg

SEQ ID NO: 556092 - DNA, 776 bp, Homo sapiens
gacatgtgtatgctcaaatcatacagttgatcttgtggcattttctatccccatcctgagtcatattcttagcattaactcaggagtgatctaaggggctcacgagtaatacagactttcctattgctcaattccaagaactttagaggaaccagcaacaaagcccagtcaaattctttattatacaacacctgtgaactccagaatacaagtgcgtaaaataaatcagcagcagcatcaagactagcatggtatcagcaagggagggctcagagaatccagatatcagactgccagcatcctgatcatctctaaaggttctcattcaattggtgaaacaatttaaagtaatcatttggaaagcgagtctaaaatcgtgagaggcaatcttatatgaagacttcgagaagaggtgtggatcagtgcgtgggggtgatcatagcccgtggtgaactcttcaaactaacgtgatactccttttgcagaacaaaagttcttgactgaagagaactagcagctacagtgataacaggagatcataaaatatatattctatagttataagtctgacaatgtaaactaaagcacatttctctgaaaatgcaagaagggagataatgcaagtaaaatagaatatatttactgatttgtcctatagggtattttcaggaaataaaagttattacttcatattagatgtctgggagaggacaataagagagatattcaaaattatttatagtagggagacaataggaatagtatccccaaaataa

SEQ ID NO: 556093 - DNA, 325 bp, Homo sapiens
ggtccatcacatcctcgtctcacgtttcacacagagtagagaccttccgaatcctgtgagcgctggtccctacaactggtgtctgtaaggactcgttgtatctcctctgagagtgagctggagggctctttctctagaatgaggggcaaggaagggcctgataccattgactggggtgaccagacagttcgggactttgggatgtctcaaatcattaagtgtctcactgctgttgagggcagcggaaggctgtccagtgcggcctgcatggatactgggggtgaatttaactaagctctggggctcaggatgaaggtgcacatac

SEQ ID NO: 556094 - DNA, 420 bp, Homo sapiens
ggctggtccaccgtctctgagtctaaagcactcctgtgatctgctcctgagactaaagcaccccaacattataacaaaagactacaccaagggctgtggtagttaataagtcaggaaccatggacgaaaacctacacacacacacacacacacacacacacacacacacacacgataaaatcacgtcatacgccaaagggctgtgatagtttataagtcaggaaccatggacgaaaacctacacacacacacacacacacacgaaaaaatcgtgtcatagcgccacgccgtggcttacaaacatggatcctatacatcatcaaaagaatatacaactcacatatagtgctatataactagactcacattcagccactcgtaatcacgccagctcattatcatgttgtgtgaatatgtctc

SEQ ID NO: 556095 - DNA, 909 bp, Homo sapiens
cggtgctggcacagcacctgaggcccctcagcccggcgagccggaaccacaacgccggcccgtgtcgatctacagcagcaaattatgaccattatagatgaactgggcaaggcttctgccaaggcccagaatctttccgctcctatcactagctgcatcacaggcatgccatgagttacaccgtccatgctggtgttatattcctcgacagacacgttcagccccgaccggctggtaaaaggagccattattggctttcattcatatacgttgcgatacaacgcaagctctttgtactggtattatcgtgaatcgctcataatgacggtagaaccactcttggatcctggagctttggtacatccaatgacgtctgctgcaaacgccatgggccatgggcgagaactcttccaggtactagtgttgcaggacacggagcgagtggaagccgtaccaactggtcaattgacctgaccctcacagaagctgctgaaattcctgaataagtcactacaatctgtgagaccacgagtcccacaggtgaagcaagcatttgtgatctgttgcaaggcttcttctgcccatcaacatcgggcccctgtctccctctctgagggcaactcgacactctcgtgctgctgcagtcgatcccacgcccgctgctccgagcaaggtaagctgtccacccaagagacgccgagggcagcacatcaagccatactcctctagtgaccgagaatggggactcccccaggtcctggtagcccaaagctgctggtacagccgccatggggtgggtgtaattcctcatcccccaatacaggcaaccaagactccaagcagggagaaacaggaatagccagaataggtgaggtctagaaccctgcccttaacagtctgcctacagca

SEQ ID NO: 556096 - DNA, 362 bp, Homo sapiens
gtccgcagctctgtcttctttctcaagtgctcactctgtcattccattataaagcatcctacatattttcttctcctctctctcctatcggaccctgtgggtcctcacatttggttaaggaatttggagctacactccggattcttgtctgtatacctcccctctctaggctcccatgtgtgtctttttattctcatgggtgatgccctcacccccaactccatataaattccctctcattcttctcactttgccttctacttcagtttgacaaatacccactcacagatttcacaattcccttagtctatattaacaatctttctccattaggcttgcgagatcactcttttaataatggt

SEQ ID NO: 556097 - DNA, 683 bp, Homo sapiens
  misc_feature (23)..(23): n is a, c, g, or t
  misc_feature (49)..(49): n is a, c, g, or t
  misc_feature (62)..(62): n is a, c, g, or t
  misc_feature (103)..(103): n is a, c, g, or t
  misc_feature (116)..(116): n is a, c, g, or t
  misc_feature (119)..(119): n is a, c, g, or t
  misc_feature (125)..(125): n is a, c, g, or t
  misc_feature (129)..(129): n is a, c, g, or t
  misc_feature (134)..(134): n is a, c, g, or t
  misc_feature (136)..(136): n is a, c, g, or t
  misc_feature (143)..(143): n is a, c, g, or t
  misc_feature (147)..(147): n is a, c, g, or t
  misc_feature (161)..(161): n is a, c, g, or t
  misc_feature (163)..(163): n is a, c, g, or t
  misc_feature (167)..(167): n is a, c, g, or t
  misc_feature (170)..(170): n is a, c, g, or t
  misc_feature (174)..(174): n is a, c, g, or t
  misc_feature (178)..(178): n is a, c, g, or t
  misc_feature (193)..(193): n is a, c, g, or t
  misc_feature (198)..(198): n is a, c, g, or t
  misc_feature (200)..(200): n is a, c, g, or t
  misc_feature (207)..(207): n is a, c, g, or t
  misc_feature (216)..(217): n is a, c, g, or t
  misc_feature (220)..(220): n is a, c, g, or t
  misc_feature (231)..(231): n is a, c, g, or t
  misc_feature (661)..(661): n is a, c, g, or t
  misc_feature (668)..(668): n is a, c, g, or t
ggtgaaacaatcagaagcacctncccagaagctttccatcatgttcatngcattcaaggttnttcatgagcatccaagtttttagtcccatccccagtgcttncaaaaacccccanganaaacantaantttgntnttaagancagnagggaccctacttntncagncantaanagangttttttatgggttnttaancngatgacnattagttanntcngcatagcaggnttagttttgttacccaaatgtatactgcagtagcttaaatacaatttgaagtcttgtggttttatatagctagcactttattactcttttgaactgaaagcacactcccttataggttcatgtaactgtcctgtaataaggtgcttataaatggaacaactacacagcctagttttgccacaacctttagcatctaaaaaagttttaaaagcttctaaatgtctaatataaagggagatgcttatagccacaacatctattttaccaatattgtttccattacactaccttggattttgcatgagtgagtatagtaacccaagatgccataaaaaaaaacttgatcgttttctgacttaatcagttactgtggtttcactaaaagctaccgtggtggagtgaagtcagtcagggataggccggatatatngggatcntctagaggcgaccgc

SEQ ID NO: 556098 - DNA, 2058 bp, Homo sapiens
  misc_feature (237)..(237): n is a, c, g, or t
gtgcgttggcgtcggtgggaggcagattgtatggtgtcgttgatgatagttcgataggtctgtaggcttggttgtttgtcgtgagtatgtatgctgctgctggtgagttgtagatgtgttgctgtgctggtctggtaggttggatggttgtacgcgccgggcatgttgtataatagaaccccgctgtggggtggttggaacaaattaccaactccggtggtgtggggaggtccaaancctagttatgtgtatgtctcgcgtgagagggggtccgacccacaccagggggggttgccggacaaaaaaatacataaccggtctttggtggttgtattcatccctccggcccgccccctgctggtttgtgtggtttgtagcccgcgttcttctctgttattgtgtggtttgattaaaggctcacgacgtctggagggggggggcatattgttgtgtgtgctatcaactgcaaggtgggcgctggccgttggtgtttgtgtgtatctctacttcgttgtgggcacgcgtacacagatgtgtttgttttgtgttggtggggtagaacaccacccccctcggttgttgtgtatgttggttcgcggtgtgttggcgcgacgggtgtttgttttgtctgttcctgacctgggtggggagggtgttactctcgtggctacgtcgtcagtgtgggtctcgcgacacatggtgtgtgtttgtgtccgggggaggtagagcttctcgtgtgggggttggttgtttttcaccgactgagttgtcctgcgctttgtttgcagagaaggatgatcgttctgtgtgggtggggtccccccaccccccgtctggggggtgtacatcaccactagccgttgttgtgttgcgcggggagggacgtctcgtcgcttcacgcgcggtgtggttgtgtgtggtcctcctctctgcttctgcgcccccaccccccacacctagttgttgtgtggtgctgtgtagggtggggtggggtttgttcttcgcggcgggagagacacacccacacacccacaccgctctgtggtgcacacagcgtgcggagtagtgtaacgcccctgcgcagagtatagtttcgtcccctccccccactactgccggagggacttttctttggcgcaggcggcgcgctgctgcagatgaatagaatgctgcttctccacacactacgcagtaggtttagttgagacattaactgcgtgctgcgcagcacaacacaatgctgtgcgccccacacctcatcgttgtgtgtgtgagaggcgcgctgtgtgtgtgtgtgccctacacagcgcgtgttgtgtgtgtgtgtgctgcctcacacgcacgcgtgtgctctccgcagcgttgtgtgctgcccgctgcgccaccgcgcgcgtgtgatgatattaggagagcagcgcgcgcgcgctatattgtgtctctctgctgctctctctctgggctcgtgtcacactctctaccctcgcctcatacacactgtgctgctggggggccaacacacactgctgagagaagagagtagagagtgagagagagacgccacacacctctcagctgtgtgtcgtccacacactgatgattatataagtagtgtgtgtgatgatgtgtttgtgtgtggtgcgctgagattatctgctgctgtgggtggcatcacaacgcaaagagaaaaactaccacacaccagcaggggagcgcgtgcgtgtggagaataacacacgcgcccccggcgcggcgggcaacgtcacgtcgtgtgtgtgtggggcgaccctgcgtgcgcgcacacaaaaaaaaacatcgcggcgcacgcagaatggtgtgcgcgcgcgacccagcagtgaatataattacaaacaaaagtacacaccacacgcggggcccactcctcccccgccccgcttggagtgctgtgagagagacacacacacactgtgtggagaggaagtgtgtgtgtgtgtcccccacacgcgtgtgtgtataaatataaataaaatatattaatataatatatataatataatatatagaatatatatatataat

SEQ ID NO: 556099 - DNA, 1308 bp, Homo sapiens
  misc_feature (23)..(23): n is a, c, g, or t
  misc_feature (49)..(49): n is a, c, g, or t
  misc_feature (62)..(62): n is a, c, g, or t
  misc_feature (103)..(103): n is a, c, g, or t
  misc_feature (116)..(116): n is a, c, g, or t
  misc_feature (119)..(119): n is a, c, g, or t
  misc_feature (125)..(125): n is a, c, g, or t
  misc_feature (129)..(129): n is a, c, g, or t
  misc_feature (134)..(134): n is a, c, g, or t
  misc_feature (136)..(136): n is a, c, g, or t
  misc_feature (143)..(143): n is a, c, g, or t
  misc_feature (147)..(147): n is a, c, g, or t
  misc_feature (161)..(161): n is a, c, g, or t
  misc_feature (163)..(163): n is a, c, g, or t
  misc_feature (167)..(167): n is a, c, g, or t
  misc_feature (170)..(170): n is a, c, g, or t
  misc_feature (174)..(174): n is a, c, g, or t
  misc_feature (178)..(178): n is a, c, g, or t
  misc_feature (193)..(193): n is a, c, g, or t
  misc_feature (198)..(198): n is a, c, g, or t
  misc_feature (200)..(200): n is a, c, g, or t
  misc_feature (207)..(207): n is a, c, g, or t
  misc_feature (216)..(217): n is a, c, g, or t
  misc_feature (220)..(220): n is a, c, g, or t
  misc_feature (231)..(231): n is a, c, g, or t
ggtgaaacaatcagaagcacctncccagaagctttccatcatgttcatngcattcaaggttnttcatgagcatccaagtttttagtcccatccccagtgcttncaaaaacccccanganaaacantaantttgntnttaagancagnagggaccctacttntncagncantaanagangttttttatgggttnttaancngatgacnattagttanntcngcatagcaggnttagttttgttacccaaatgtatactgcagtagcttaaatacaatttgaagtcttgtggttttatatagctagcactttattactcttttgaactgaaagcacactcccttataggttcatgtaactgtcctgtaataaggtgcttataaatggaacaactacacagcctagttttgccacaacctttagcatctaaaaaagttttaaaagcttctaaatgtctaatataaagggagatgcttatagccacaacatctattttaccaatattgtttccattacactaccttggattttgcatgagtgagtatagtaacccaagatgccataaaaaaaaacttgatcgttttctgacttaatcagttactgtggtttcactaaaagctaccgtggtggagtgaagtcagtcaggggaagggttggtattatgtttagcggttgtatttgcacgcatgaactatttgtagatatatcagaagggggtttactgatgccagaacagatagattctagggaaaaatacgtgctagaaaatgggatggcctcgatgcaggagacatggctgtgttgatgtccagatggtggccataaaggacatgttctgaagcactgttcaagaatacgcgactatttcagatgaagcgagaaacataacagggcgaacattcatagcttgcgagagttgatccgtataagttgtggggcaaaaatggccttatatgtactgacggagttaaactgtgaattttttacaaattgcattttacggggggtgacctaaggtaacgagccattcaaggacgctaggaaggttgggcgaatcctgggacatttggacagtgggggatttgtcactggaacttaaaggtggattacagcgctcttgtgtgaggtcgtttcgcccatatgtgtttcaataattagaactattttaaattaagggctataattgaaattagggagtccataagaacttcatatcgagctaaatataacacataaaaagtagagggtaaaagagagtaggaagagagggttcaaattaagggggggcaaagggggttttttatgggagt

SEQ ID NO: 556100 - DNA, 343 bp, Homo sapiens
catgagctatgcagcaatgcagctcaaaacgctttagccatagccacacccccacgggaaacagcagtgattaaccgtttatctaataaacgaaagtttaactgagctatattaagcccaggcttggtcaatttcgtgccagccaccgtcggtcactcgatatatcccaagtcaatatacgccggcgtatagagtgttttagatcatctcccctcccctttaaagtctatatctcacctaatttgtaaaaaactccacttaacacaacttaaaccacgaaagtagctttaacatatctaaacactcaatagcttagatccaaactggtattacataccccact

SEQ ID NO: 556101 - DNA, 686 bp, Homo sapiens
ggcagaagtcctggtaatctggtccttgttcccgtctgataccagcttccttcagcagcgcaggcggtggtccctgaggcccgtggaaggagtcaaacttgcgggaattttgcagtttatctgcagggctgtgtgtttccagcaagacccaaagctagaaaaggaggaggaagaaactgacccgatcagtgccagaagtcatgtgtattcaaagaagaataagcaagaaagaaacagaaggaaggacgagaggtagacagatacaagatgaaatcctgtcaaaaacctggaaggaaaaccagaaaatgagagtgaaccaaagcatgaggaagagccaaagcctgaggaaaaagccagaagaggaggagaagctagaggaggaggccaaagcaaaaaggaactttttagagaaaggctgattcaatctctccaggagtttaaagaagatatacacaaacaggcatttaagcaatgaaagatatgtcagagaagtggatgaaatagatgagataaggagagtcagaaaacaaacttatagtgatgcgttggaagggttaatcgaaaaccatccttaccccttatttaatgtagtttaccttggatttctatctgatattaacaattaccatatagctgcttttattagcatttcctgatattcctttgtccatatttctacttataac

SEQ ID NO: 556102 - DNA, 715 bp, Homo sapiens
ggagcgtacgatgaggcaggcaggggcggcaaggatggtgtagcagacgccaggtctatcatctcgctctgtcgctctggatctctggtggcctagcggggacaccgtggagtgagcccaggtactgcgcagatgtgcacctgtgagtgtgtctgcagggccgagagggtcacactcattcagagctggcttgaaatctcagacgcggagattctttgtatacacacttctcaaacgagtgagagtaaactgaatgtagacttgggtaccaggcagatactctagggacagggctcactaagacgggtcatttactggggatgttccggggaatgcggggtccctggaccgagtttcagatggacagggggtctgatatacagatttcactgcgtcaacctattgagacagtgctgtgaaggctgacagatgtgtgcagcttgattgagctgtgaacatatattatggtaagtggcgtaaaggtttggtcgggggaccaaaggctggagattatcagaggtgtggattgtacctatctggtgttcgagtcttactcgcggctatctgatgatgcagtagaaatctggaagtggctctgtagttgtgatctgggtgaataggttctatcctcagaagaagggcaaagttagagggaaggtggataagccctgcaagttgggtaaatccccaggagagtgtcgatggagcaaggaca

SEQ ID NO: 556103 - DNA, 606 bp, Homo sapiens
ggcagaagtcctggtaatctggtccttgttcccgtctgataccagcttccttcagcagcgcaggcggtggtccctgaggcccgtggaaggagtcaaacttgcgggaattttgcagaagtcatgtgtattcaaagaagaataagcaagaaagaaacagaaggaaggacgagaggtagacagatacaagatgaaatcctgtcaaaaacctggaaggaaaaccagaaaatgagagtgaaccaaagcatgaggaagagccaaagcctgaggaaaaagccagaagaggaggagaagctagaggaggaggccaaagcaaaaaggaactttttagagaaaggctgattcaatctctccaggagtttaaagaagatatacacaaacaggcatttaagcaatgaaagatatgtcagagaagtggatgaaatagatgagataaggagagtcagaaaacaaacttatagtgatgcgttggaagggttaatcgaaaaccatccttaccccttatttaatgtagtttaccttggatttctatctgatattaacaattaccatatagctgcttttattagcatttcctgatattcctttgtccatatttctacttataac

SEQ ID NO: 556104 - DNA, 929 bp, Homo sapiens
  misc_feature (124)..(124): n is a, c, g, or t
  misc_feature (139)..(139): n is a, c, g, or t
  misc_feature (176)..(176): n is a, c, g, or t
  misc_feature (189)..(189): n is a, c, g, or t
  misc_feature (193)..(193): n is a, c, g, or t
  misc_feature (241)..(241): n is a, c, g, or t
  misc_feature (277)..(277): n is a, c, g, or t
  misc_feature (326)..(326): n is a, c, g, or t
  misc_feature (333)..(333): n is a, c, g, or t
  misc_feature (338)..(339): n is a, c, g, or t
  misc_feature (346)..(346): n is a, c, g, or t
  misc_feature (348)..(349): n is a, c, g, or t
  misc_feature (351)..(353): n is a, c, g, or t
  misc_feature (358)..(358): n is a, c, g, or t
  misc_feature (362)..(363): n is a, c, g, or t
  misc_feature (365)..(365): n is a, c, g, or t
  misc_feature (484)..(484): n is a, c, g, or t
  misc_feature (530)..(530): n is a, c, g, or t
  misc_feature (538)..(538): n is a, c, g, or t
  misc_feature (545)..(546): n is a, c, g, or t
  misc_feature (563)..(563): n is a, c, g, or t
  misc_feature (570)..(570): n is a, c, g, or t
  misc_feature (582)..(583): n is a, c, g, or t
  misc_feature (783)..(783): n is a, c, g, or t
  misc_feature (797)..(797): n is a, c, g, or t
  misc_feature (921)..(921): n is a, c, g, or t
ggcagaagtcctggtaatctggtccttgttcccgtctgataccagcttccttcagcagcgcaggcggtggtccctgaggcccgtggaaggagtcaaacttgcgggaattttgcaggttggtgtnaatgtaggtgttgantggggatttctagtgtgggggggtttaaggcagaganttgtgggagtgcnggtnaggtccgtccctccaccctccacctccaggtctacgggaactgatganccttgggaaagggactaggggtcctaggagaagaanagggagacctgtggtagtttaaaaataatcatcctctgctatctaagantgctttncgganncccaaantnntnnngaaanccgnntnagtattaaagatagtttggaaataatatgatttataaatatttgtatgatgggaaaaaagaactgaattgaatgcactgtggagagggggtgaactaggggaaacaaaaggtgggaaantttccatatccgaaaccctaaaggaggaaagctacgtgtgttagtntctggcgntggtcgnncaaaaaaagagataganaaaaacncaacgtaacatnnagtttacagtttatctgcagggctgtgtgtttccagcaagacccaaagctagaaaaggaggaggaagaaactgacccgatcagtgccaggtaggtgagaggaatattataaagtctcctggggtggagacaaaggttgtaagcgccaccgttcctgccggctcccttccaccccacccctttcccctcttcttttctctnccccttctcctttnccctcttcctctgcctgccagccaactttctcttttctggcctggtccctgtgttaggcctatgggggaaaaggtctggggagggctggacggcggaaaggagggcttggaaaagttagagggnaggcaaga

SEQ ID NO: 556105 - DNA, 1211 bp, Homo sapiens
gccggcgcaggcagccctctgtccttcacactctcctccaaaaaaacctccatctgtaacgaaccaaggtctccgggaaggtgagctgtgtcttccccatgttgttgttcctccgtggtgcttgttaggaactgtgtccgtaagagagaaagcagaagcctcggtggtaacgagtcttcgtaggcatgtggacgttcctgacgacgacagtctcgacacgaaggaacaagaagatccgtatgtcacaagatctcgtataacatctgtgctgctatcactgccctattattcccatagggcgcaatgagtggctagataaacgctggccgtagggactactgcttgagtgctgcggtgttcactgctggcgtgagagcaagagagacatgggaacacacgacgatcatctgactggactgcatgttgtctgtcgtgtaagtgcttctggagtctagccgccctggacctccccaattcgccttgactacactaagtcgtgtctcagacacttacaatccctgaagaccagggggtccttctggaaattgtccaaggggcgcttttgtctaaatctctgggcgcctttgtccaaattctatctagactctctttggcgtaaacaacgcgaaatatatgagcggacacaactcggtgggacacctagggggcacaagcacaggagcccaccaaaacgagatgaaaatcacaatacaggaaaccataacagatacaggcgaggagcgagccgcatctgaggcgacaaaaacaaaaaggtgaaatgatcaccttctcacagaaaagaagaagcagcccaccaaaaaaagaccctaggcaagaggagcgatgacaaccaccacatggccacaactaagatcagtaagaggacagcaaaagagagaagcgaacccccaaaacgaaataggacgcgtaacgcacctcgaaagagaaaacaaataaggcccaaggagcgcaaccgacgagagcgcccagcaaaacgacattgaacaaagcacgacacgaagactggaaggatcagatgcggagccacgacagaaccgcccgcaagacaccaccgtaagagaacagcctaacatacagagatacaagagcaaaccaacagcaccaaggaaaccaaccagggagagggcggcagtcaactcccagaataagggtggcggccacagtaaaacaaacacgcacacggcccacaa

SEQ ID NO: 556106 - DNA, 862 bp, Homo sapiens
  misc_feature (688)..(688): n is a, c, g, or t
ggcgccgggcctcctcgcctttgtgccatccgggtctctcgcgcgagcgatttagtctgaggcgaagcttcggagcggccggtactgttgaaagcgacaagtggaggcgccgctctagcggccgggactctgaactatggcggctagtgatacagagcgagatggactagccccagaaaagacatcaccagatagagataagaaaaaagagcagtcagaagtatctgtttctcctagagcttcaaaacatcattattcaagatcacgatcaaggtcaagagaaagaaaacgaaagtcagataatgaaggaagaaaacacaggagccggagcagaagcaaagagggaagaagacatgaatccaaagataaatcctctaagaaacataagtctgaggaacataatgacaaagaacattcttctgataaaggaagagagcgactaaattcatctgaaaatggtgaggacaggcacaaacgcaaagaaagaaagtcatcaagaggcagaagtcactcaagatctaggtctcgtgaaagacgccatcgtagtagaagcagggagcggaagaagtctcgatccaggagtagggagcggaagaaatcgagatccagaagcagagagaggaagaaatcgagatccagaagcgggacaagaaaacgggggatcaggtctcgcttcccgctcaagaantaacaaacagcgctggagcacacacggggttgcacacaggggggctgcgcacaaagagagatgtgtagcgaccagatattaaaaatagcggggcgacagccccctaggggagaccacacaggtgggggcgctcacgggggcgggacacacaccgacggcagagtggaccacacg

SEQ ID NO: 556107 - DNA, 297 bp, Homo sapiens
ctagaccgctatgacttctgctctgggaggctggtatacgagactgggcctgctcccactccatgaggtatttctgacaccgccgtgttcccggcccggccggcgtagagccccgtttcatctcagtgggctacgtggacgacacgcatgttcgtgcaggttcgacatgcgacgccgcgaagtccgaagagggggaagccgcggggcccccgttagggtaggaggccaggaggggcccgggagtaattatgggaacccggggagaacacaagaaaggttaacaaggctgccaagggc

SEQ ID NO: 556108 - DNA, 875 bp, Homo sapiens
  misc_feature (859)..(859): n is a, c, g, or t
ggcgccgggcctcctcgcctttgtgccatccgggtctctcgcgcgagcgatttagtctgaggcgaagcttcggagcggccggtactgttgaaagcgacaagtggaggcgccgctctagcggccgggactctgaactatggcggctagtgatacagagcgagatggactagccccagaaaagacatcaccagatagagataagaaaaaagagcagtcagaagtatctgtttctcctagagcttcaaaacatcattattcaagatcacgatcaaggtcaagagaaagaaaacgaaagtcagataatgaaggaagaaaacacaggagccggagcagaagcaaagaggtaattaacactttgtagtgaataggtactttaaaatacttataaagtgtctggtagaaagatttgtatgaatataagacgttgtcaaggtaagtacaaaacttgaaatttaaaaggtttattgggttataaaataagcatgattttgattcatcatttttgaagaagatgtttatgtgaaaagtaccttcaaaactttaattttattatattgtgaaaatattcacaataaaaatttcatatgaagaatatgattggtttttttaggcctgtcacacagagcttccattaatctgaggtcccgagtctcctggtgcctgacagttgctcaggatttttaaacagcaatcatctttacatagcaataccctagatatctgtgcgctgctttttccttatgaacgataacaggagttctcttttcttttgcaaactagttcagtttccctaatagtagtattgaattttgaataaaaggtttgagtgagggacagctgaaaaggtggcggtgacacnaaaacttgaggaaaaa

SEQ ID NO: 556109 - DNA, 484 bp, Homo sapiens
  misc_feature (5)..(6): n is a, c, g, or t
  misc_feature (9)..(9): n is a, c, g, or t
  misc_feature (43)..(43): n is a, c, g, or t
  misc_feature (48)..(48): n is a, c, g, or t
tgttnnatnatcagctttcgtgacccctccgaccctacgtatngactncgactcttgaggataacccaacggatgtgccgctccgcgcgcgagcgatttagtctgaggcgaagcttcggagcggccggtactgttgaaagcgacaagtggaggcgccgctctagcggccgggactctgaactatggcggctagtgatacagagcgagatggactagccccagaaaagacatcaccagatagagataagaaaaaagagcagtcagaagtatctgtttctcctagagcttcaaaacatcattattcaagatcacgatcaaggtcaagagaaagaaaacgaaagtcagataatgaaggaagaaaacacaggagccggagcagaagcaaagagggaagaagacatgaatccaaagataaatcgaaaaacaggagttcattttcatccaaaacaaacactggacttcctgcggagcggcacatccgttg

SEQ ID NO: 556110 - DNA, 584 bp, Homo sapiens
tcaacatatctactgcataactgcccttcgctacactcattagattctcgtctgttggtttaacgctatcgtatgaagcttactagtcacaactattcttctgaccccagtaactgatagattagtctgcaaagatctcttcaccatctttcctgggcactggagctgcttgccacccatcttgttccttgagcgccagttgtcatcacccagtctagttgctcgagatctttgatcgtaagctcatctttccttcagagtagcttcattatgaatctcgttcatttctggccataagccttgcccggttgaacacaagaatgatatacgttacatttgggttactagctacctgtgggaaagttagaaagatgacaaggtgttgaagataggtaaacaggaagcttccactcattggttctgggtttggtttgtttgtacttgtgttgtttgttctttttttaaggttggaatttgttagattttactttcgttatattatttttatttgtcttcaaaataattcccaattttaaaaatttaaggaaagtacaatagaactggatgtataggcaatcaagctt

SEQ ID NO: 556111 - DNA, 192 bp, Homo sapiens
  misc_feature (62)..(62): n is a, c, g, or t
  misc_feature (77)..(77): n is a, c, g, or t
  misc_feature (113)..(113): n is a, c, g, or t
  misc_feature (168)..(168): n is a, c, g, or t
cagagcctgagggaagtgggcaatgccatcctcttctgcctcctcatagagcaagctctgtntcaggaggaggtctncgatttgctccatgccgcacccttccaaaacatctngcctagagtctacatcaaaaagggggagcgcctggaggtccggatgaaacgtctngaagccaagtatgcccctgttcca

SEQ ID NO: 556112 - DNA, 759 bp, Homo sapiens
ggcgccgggcctcctcgcctttgtgccatccgggtctctcgcgcgagcgatttagtctgaggcgaagcttcggagcggccggtactgttgaaagcgacaagtggaggcgccgctctagcggccgggactctgaactatggcggctagtgatacagagcgagatggactagccccagaaaagacatcaccagatagagataagaaaaaagagcagtcagaagtatctgtttctcctagagcttcaaaacatcattattcaagatcacgatcaaggtcaagagaaagaaaacgaaagtcagataatgaaggaagaaaacacaggagccggagcagaagcaaagagggaagaagacatgaatccaaagataaatcctctaagaaacataagtctgaggaacataatgacaaagaacattcttctgataaaggaagagagcgactaaattcatctgaaaatggtgaggacaggcacaaacgcaaagaaagaaagtcatcaagaggcagaagtcactcaagatctaggtctcgtgaaagacgccatcgtagtagaagcagggagcggaagaagtctcgatccaggagtagggagcggaagaaatcgagatccagaagcagagagaggaagaaatcgagatccagaagcgggacaagaaaacgggggatcaggtctcgcttcccgctcaagatcaagacacacggcataggactcagacggcagcgagctaggcacaagggacggtacggagccgacgatccgaa

SEQ ID NO: 556113 - DNA, 738 bp, Homo sapiens
cgtaagtctgcctggaacagacagagacagggaaggcggtgctgatgggggcacaccccacggagagatacaacagcatacaacctggcccggaccaggagtgctgcaggcacaatagcagaagcggagaaaaaaaagaaagagaagaaagaaaagaaagaaaaacgagaagaagaaaaaaagaaagaatgaagaacacaaagaagcaataccaaaaagaacaagagagacacaagaaaaaacaagagaaaaagaaaaaaacaagcgaagagaaaaaagagaaagagaaaaaagaaaaaacaagagaagacaacaaaaaacgaaagacaacgaaacaagagaaaaaaagaacaaaagaaaaaagacaaaaaaagagaaaaaaaaaaagaagaaaaagaaaaaaaaaaacaaagaaaaaagacaaacaaaaaacaacaaaaaaaaaaaacgaaaaaaaaaaaaaaaaaaaacaaaaaacaaaaaaaaaacagacaaaaaaacaaaaaaagaagaaaaaaaaaaaaaaacacaaagaaaaaaaaagaaaaaaaaaacaaaaaagcaaaaaaacaaagaaagaaaacgaaaagcaaacacgcaaacaccaagaaagaaacgaaaaaagcacaacaagaaaaaaaaacacgaccagaaacacccaggaaaagacacaacaaaacaaaacagcgacacagcaacagcaaacggaaacaaggaaaaaaacaaaagagcagaccc

SEQ ID NO: 556114 - DNA, 671 bp, Homo sapiens
cgacgcgcttcacacagccctccaatgatgaggcgcctgggtgatctgcacggtccgtggcgtagctccgtagcggctcaatgtgtgtggccagcgggcaccctcggcccgacatcactgtggattgaatggacgacctaggccttgactgctgcccagagtgccgctgagcccatgtgaatgaagaatgtggacacttgtgccttgaagaaccgtgcggccgggagggacagtcggcaaattacgacctgccggcgtgtcggaacctgctgcgggtgcgccgatcaactgccaccgtacaatggttgggatgttgatccgagcgggaccctgttccaagccgctgtgctcaccatggtcacggcacccctgtgaagcacgacggttgtgactttcgtggggtgtgaaccacggtccctttcccatgttgcagaagggtggctagcaggcgagagcgggtagaagcgcgctggttgactcccaggttggcgcttgaacaggcggcggttgagagagtaccggagacgcgcggaggggtgcctgtccaccaaacttccaacccaatcgaaatggttggggcgaggacccagaaagagttttggtgaggatgacctgcgcccacgggggtgaacagttgtttgggtcggcggtgcccccgaaggggaattcct

SEQ ID NO: 556115 - DNA, 717 bp, Homo sapiens
  misc_feature (613)..(613): n is a, c, g, or t
  misc_feature (688)..(688): n is a, c, g, or t
ggcgccgggcctcctcgcctttgtgccatccgggtctctcgcgcgagcgatttagtctgaggcgaagcttcggagcggccggtactgttgaaagcgacaagtggaggcgccgctctagcggccgggactctgaactatggcggctagtgatacagagcgagatggactagccccagaaaagacatcaccagatagagataagaaaaaagagcagtcagaagtatctgtttctcctagagcttcaaaacatcattattcaagatcacgatcaaggtcaagagaaagaaaacgaaagtcagataatgaaggaagaaaacacaggagccggagcagaagcaaagagggaagaagacatgaatccaaagataaatcctctaagaaacataagtctgaggaacataatgacaaagaacattcttctgataaaggaagagagcgactaaattcatctgaaaatggtgaggacaggcacaaacgcaaagaaagaaagtcatcaagaggcagaagtcactcaagatctaggtctcgtgaaagacgccatcgtagtagaagcagggagcggaagaagtctcgatccaggagtagggagcggaagaaatcgagatccacaacnacacacaccaacaaatccacatccacaaccacccaaacaaaaccccccatcacctctccttccccctccaactcnaacacacacccataccatgacaaccacca

SEQ ID NO: 556116 - DNA, 258 bp, Homo sapiens
cccaccagagtgtacagtgacagcctagagtcacatcactttgacagcagatgaaggaccacattctagttttctggtgccaaatcctatgccctttcttccttagtggaagaggagctggctggaagccttttggtcctcctttcaaaccatacctttcacacgtggggaacaaaaagtgaactttagaccaacacaggcaaaacactagccacttcttttttcctacaccccaatactttcagtggcaagcgctaa

SEQ ID NO: 556117 - DNA, 1176 bp, Homo sapiens
  misc_feature (283)..(283): n is a, c, g, or t
  misc_feature (302)..(302): n is a, c, g, or t
  misc_feature (307)..(307): n is a, c, g, or t
  misc_feature (663)..(663): n is a, c, g, or t
  misc_feature (825)..(825): n is a, c, g, or t
  misc_feature (867)..(867): n is a, c, g, or t
  misc_feature (985)..(985): n is a, c, g, or t
acttataaactcttccatcactatcccacttttcctatagggcatgcgcgcactataatataacatatacgtaaactttattgatcaatccatctcgcaaatatactagtaggagcgctagtacttgatagagtggccgtatctacaatcgtgcccgataaagattgcttcgtagatctcgtgtggcgctattgaatgccacctacatgcttgtggcttcttattacccagctatcttgatgtcgatattgatagtctccttccatatgtctcaaaatataanatctacctatcacatgccnattcnctatctcgacctattgttgccaatatgtaccgtcccaaaagttcctaatcgtttacacaagaccgttgccacaagagaccccgtgagtacaatcgccttacccaaaacttggcgatataactgcccaattataggtgtagagtcactaagcccgaggggtacgcgcatatgaaaagttaatcgtcacgcaagaaacgattatcgagaggactattccattgtctttatactttcctcttcttcccctttgacctagtcgtgcctacatatctacatggagtctttctcccatcctatttcctccaattctacctatattcttatgtgcaaaacatctttgcgctgagcgtctacgntatcctttacatacacgtatggtacgtgtcacatcatgtgcagcggtaattccttgtgcctatgttgcgtgccttgttgtacatatctaaacatggtggtcttcccgccgtcaccaatggacaggggcgttaaatcttgactctaggccaatcccctgggcnttactggcctttataaaaggcaccaactcatgggcgtccccnatgtatttcccaagttgtttctttttacttccccataatccaactttgtccctcctagcttccatcctaaataggattccgtcctacggattttatcactatattatctagcttcccngtggaccttctacggaaattgcgcggggcacattttggactcgctaatccaaaatggaacacaaatggccttttttcctttgtaggcactcggtttgggtctccccccagaaggtctggctaataaatggttggttacccacgcaattaattacctagaaatcgctacaaaaccttcccgtcgaccatttg

SEQ ID NO: 556118 - DNA, 940 bp, Homo sapiens
  misc_feature (766)..(766): n is a, c, g, or t
ggcgccgggcctcctcgcctttgtgccatccgggtctctcgcgcgagcgatttagtctgaggcgaagcttcggagcggccggtactgttgaaagcgacaagtggaggcgccgctctagcggccgggactctgaactatggcggctagtgatacagagcgagatggactagccccagaaaagacatcaccagatagagataagaaaaaagagcagtcagaagtatctgtttctcctagagcttcaaaacatcattattcaagatcacgatcaaggtcaagagaaagaaaacgaaagtcagataatgaaggaagaaaacacaggagccggagcagaagcaaagagcgtgcttatgcgcgaagagactgaactgaagacgctgcagactcagatagcaaaataataagcctacttcatgataagggaagaagacatgaatccaaagataaatcctctaagaaacataagtctgaggaacataatgacaaagaacattcttctgataaaggaagagagcgactaaattcatctgaaaatggtgaggacaggcacaaacgcaaagaaagaaagtcatcaagaggcagaagtcactcaagatctaggtctcgtgaaagacgccatcgtagtagaagcagggagcggaagaagtctcgatccaggagtagggagcggaagaaatcgagatccagaagcagagagaggaagaaatcgagatccagaagcgggacaagaaaacgggggatcaggtctcgcttcccgctcaagaantaacaaacagcgctggagcacacacggggttgcacacaggggggctgcgcacaaagagagatgtgtagcgaccagatattaaaaatagcggggcgacagccccctaggggagaccacacaggtgggggcgctcacgggggcgggacacacaccgacggcagagtggaccacacg

SEQ ID NO: 556119 - DNA, 971 bp, Homo sapiens
  misc_feature (971)..(971): n is a, c, g, or t
ggcgccgggcctcctcgcctttgtgccatccgggtctctcgcgcgagcgatttagtctgaggcgaagcttcggagcggccggtactgttgaaagcgacaagtggaggcgccgctctagcggccgggactctgaactatggcggctagtgatacagagcgagatggactagccccagaaaagacatcaccagatagagataagaaaaaagagcagtcagaagtatctgtttctcctagagcttcaaaacatcattattcaagatcacgatcaaggtcaagagaaagaaaacgaaagtcagataatgaaggaagaaaacacaggagccggagcagaagcaaagagcgtgcttatgcgcgaagagactgaactgaagacgctgcagactcagatagcaaaataataagcctacttcatgataaggtaactattagtcattcaactcctatttcccttaaatatatcttaaatcagttaagggttttaatgttttttttaaattaatagtaatgttatgtttgaaaaactggtttgaaataaactttaaaacctttagaagtttaaccacttaagacttttccagtctgcctcgttatagcaaaaccaaggaaaatttcttttctaagctcctatagagaactggcaatgaaactaaaatttaattgtgtctccaggtctcttatttttctgcaaataataaattatgtactatgatcattttcagataaatcatcatgcatgttccaaaatgattggccaagttttatttttaagaaacattaatcgtgagtggaaagaaacatgctatggccttttgggagacagtagtgtcttattacagtggaaaagtggtagcgtgggcatcagaaaaacatggggaaggttcagctcacccatgtagctttgtaactctagatcttagttatacatataaggggattaagttagaggatcttagttttctttcgttttn

SEQ ID NO: 556120 - DNA, 1201 bp, Homo sapiens
  misc_feature (1201)..(1201): n is a, c, g, or t
ggcgccgggcctcctcgcctttgtgccatccgggtctctcgcgcgagcgatttagtctgaggcgaagcttcggagcggccggtactgttgaaagcgacaagtggaggcgccgctctagcggccgggactctgaactatggcggaaggtatgctgaaagggagtgaaaattcaacttaaaaggttgtggaataccaattctgactgatgcgcggtttccgaagtggcccgtgatgtaatcaatttgaagtccgagaagcgttacacccagagcacatgtgaggagaggcagaccatattttgcagcagcactgtgccaaggggctgttttcattaaagagggttaatgacattaagatgaggttctcacttaggctagtgatacagagcgagatggactagccccagaaaagacatcaccagatagagataagaaaaaagagcagtcagaagtatctgtttctcctagagcttcaaaacatcattattcaagatcacgatcaaggtcaagagaaagaaaacgaaagtcagataatgaaggaagaaaacacaggagccggagcagaagcaaagagcgtgcttatgcgcgaagagactgaactgaagacgctgcagactcagatagcaaaataataagcctacttcatgataaggtaactattagtcattcaactcctatttcccttaaatatatcttaaatcagttaagggttttaatgttttttttaaattaatagtaatgttatgtttgaaaaactggtttgaaataaactttaaaacctttagaagtttaaccacttaagacttttccagtctgcctcgttatagcaaaaccaaggaaaatttcttttctaagctcctatagagaactggcaatgaaactaaaatttaattgtgtctccaggtctcttatttttctgcaaataataaattatgtactatgatcattttcagataaatcatcatgcatgttccaaaatgattggccaagttttatttttaagaaacattaatcgtgagtggaaagaaacatgctatggccttttgggagacagtagtgtcttattacagtggaaaagtggtagcgtgggcatcagaaaaacatggggaaggttcagctcacccatgtagctttgtaactctagatcttagttatacatataaggggattaagttagaggatcttagttttctttcgttttn

SEQ ID NO: 556121 - DNA, 717 bp, Homo sapiens
agcgggagagatggggaaagacaactcgagagaggccggtaggcttgaggcgggcctgaagcggaagccgggcggccttcgtccggtcgagagctaggccgaggacccgtgccgacgcttccccggtgcctcaccgcgatcctttcaccgatctcccgtcggcgcgtcggccgtggtcggggtaagggcgggcgggggtctcatccatggctgcgctgctcggagccgcctgctgggcttgggcggtggcgcggggcccgcggccgccctacccggctcagtcctctcccctgtgggaccgggtcgacggctggcgtgaggagatgacgggggagctggcgccccggtgcccggggcctggtgggcgggtgggcgagggggagacgggcggctggcccgggcttggggctcgggatccgcatcggggatcgggccgccgatggacgacaaggcgttgcaccaaggagctggaccagtgggtcgagcagctgaacgagtgtaagcagctgaacgagaaccaagtgcggacgctgtgcgagaaggcaaaggaaattttaacaaaagaatcaaatgtgcaagaggttcgttgccctgttactgtctgtggcagatgtgcatggtcaatttcatgatcttatggaactctttagaattggtggaaaatccccggatacaaactacttatgcaatgggtgactatgtacgaccgagggactt

SEQ ID NO: 556122 - DNA, 704 bp, Homo sapiens
ggcgccgggcctcctcgcctttgtgccatccgggtctctcgcgcgagcgatttagtctgaggcgaagcttcggagcggccggtactgttgaaagcgacaagtggaggcgccgctctagcggccgggactctgaactatggcggctagtgatacagagcgagatggactagccccagaaaagacatcaccagatagagataagaaaaaagagcagtcagaagtatctgtttctcctagagcttcaaaacatcattattcaagatcacgatcaaggtcaagagaaagaaaacgaaagtcagataatgaaggaagaaaacacaggagccggagcagaagcaaagagcgtgcttatgcgcgaagagactgaactgaagacgctgcagactcagatagcaaaataataagcctacttcatgataagataaatcatcatgcatgttccaaaatgattggccaagttttatttttaagaaacattaatcgtacatgaagtgtaatactcctctaagcctattgggatactgcaagatgaaaagtgattgcttcacagtttagacattgggaggaaaatcaagagctgtcttttagaggatgtagcaggcagtataactgtaaaagggaccctgcatctctgtgtaaaataatttgaaattatagaaaatattagtccttagtaataattatatttagctaaaaaaatgaaa

SEQ ID NO: 556123 - DNA, 379 bp, Homo sapiens
  misc_feature (28)..(28): n is a, c, g, or t
  misc_feature (130)..(130): n is a, c, g, or t
  misc_feature (173)..(173): n is a, c, g, or t
  misc_feature (228)..(228): n is a, c, g, or t
  misc_feature (236)..(236): n is a, c, g, or t
  misc_feature (278)..(278): n is a, c, g, or t
  misc_feature (283)..(283): n is a, c, g, or t
  misc_feature (379)..(379): n is a, c, g, or t
gtttgggctgactgtttacacacaatanaccttcacagttgtggggtactttttttttctaaaacaatttacatagttattccatcctcatattcatctacactggggtaaacagttagacaagtacaanatctgattaacatttgctgtttttaaagacaaagatgcccttnttggctcttcaaagggcgggtgaggatttacattgatccaattcttatggtcttntctactcntcctttggagccagtgataatctgtatataggatctggtttngccanctgtctccattcctccatccatccatccacccacccaatagttctttgtgtggggcgctgtgctgggtcatgaagccatcaaggtgggtgaaattn

SEQ ID NO: 556124 - DNA, 942 bp, Homo sapiens
  misc_feature (768)..(768): n is a, c, g, or t
cagcacatttagttacttggaaagcaggcattctgatttattgattgtggggggctatcttccctccctttgtccctcttttaagaaattgaaaacatttaaaatgtaattaagaactttaatcatttgtttttaaacttttaggctagtgatacagagcgagatggactagccccagaaaagacatcaccagatagagataagaaaaaagagcagtcagaagtatctgtttctcctagagcttcaaaacatcattattcaagatcacgatcaaggtcaagagaaagaaaacgaaagtcagataatgaaggaagaaaacacaggagccggagcagaagcaaagagcgtgcttatgcgcgaagagactgaactgaagacgctgcagactcagatagcaaaataataagcctacttcatgataagggaagaagacatgaatccaaagataaatcctctaagaaacataagtctgaggaacataatgacaaagaacattcttctgataaaggaagagagcgactaaattcatctgaaaatggtgaggacaggcacaaacgcaaagaaagaaagtcatcaagaggcagaagtcactcaagatctaggtctcgtgaaagacgccatcgtagtagaagcagggagcggaagaagtctcgatccaggagtagggagcggaagaaatcgagatccagaagcagagagaggaagaaatcgagatccagaagcgggacaagaaaacgggggatcaggtctcgcttcccgctcaagaantaacaaacagcgctggagcacacacggggttgcacacaggggggctgcgcacaaagagagatgtgtagcgaccagatattaaaaatagcggggcgacagccccctaggggagaccacacaggtgggggcgctcacgggggcgggacacacaccgacggcagagtggaccacacg

SEQ ID NO: 556125 - DNA, 851 bp, Homo sapiens
cgtggacagaggaagggcgccgtggtctgtgattccgcgcgcacgtgtaagcaccgtacaggcgctgcggcgcatgcagcgctcgagggatttctgctgagcggctcggctacatcaatgggcatctgtcaaggacttcatccactgacccgggtgacctgcggagccgcccctctgccaaggtggtcttccgggatccgtatcggtataaggaagcgagacggagcggttcatagccgttccgagggcattcacgacggggccacgttctgttgtattgctggcaacgaatggcccagctcaacgagttggcaatgtgctcccgtgtggagcaaccattgccatgtagggtacaatcagtagttgcttgcccttgagaggcagaagcctggatcacctgtggtcaagctggctccggggcatcagggaactatgcacaacgcagtaatcgtcacctacatatccctgtagactcgagagaaatgaccgcggtgtggaatgcgtgcgccatcgcgggcttcgcaatgagagggttgatctcccatcgaggccatagcagagcttgtaggtgagggatgatggtggcgtggagggctggcctgcaattggaacaagagccccagtctttggacggcttgagccaggggcagttaccacaaaactattaagggctaaagaagggacagctgggatgtgacacagcagagtacagggggatgttgggcccagtgaactttccctgatggcatgccacttgcgttactagatgagagtgagcacaacgcaccagggtattattcgggtcaaagccccgctcccggccaatccaggcagcgaagcatgtcccccgt

SEQ ID NO: 556126 - DNA, 122 bp, Homo sapiens
cctaagtggaactgctcggataagcaggtccgaggttactgacctgcggcgcacccttcaggttcttgagattgagctgcagtcacagctgagcatgaaagctgccttggaagacacactgg

SEQ ID NO: 556127 - DNA, 455 bp, Homo sapiens
accgagacactaccgttctgggttattgtgaccggaacgtacagctgctttcgcacgactttctggagatctggccaggcgggccttggtgtccatcgtcgtccacgtcagcccctcgctccaactagtcccggctgactcgtcccaaccgatggtcttgtagcgtggccgagcgatcagcgcgctgaagcgccatcgcgagctcggtcaggaacaccgcatcatgggtgaacaccagaacttggcgggtctcagcccagcgctaaccaaacgccgagctatggcccgacgatatccgtgatccagcgacgtccaccggatcgtcgaaaaatacacggtcgacacgtatgttgggcaggaattcgaagctcggagagggaaccatagccatccccaaagcgcgctggtcgccctctgacagcaaccatgaaggctttcgcccgtgatccctgcag

SEQ ID NO: 556128 - DNA, 350 bp, Homo sapiens
atcgagctcggtaccatgaacattcgtgtccgtctgagaagaacaatctcaggatatttatttcgtgggccagtaacgaggcatgatcgtctccaagtgactgctttccccgtgtgtagatatgtgcccctccgaaacaggtagttgctttctggtgggaaaccaccgtactcaaaaagtcgcagcaaatcatagtattgtccatggatgtcaccacatattttgagtggtgcttcaagttctagtaggataggctgactgagaaagatttcacgagactttaagcacagtcctctgatttcattctcctgaagctggacattcttaccaggcttggacacgaatgttca

SEQ ID NO: 556129 - DNA, 348 bp, Homo sapiens
tgggaccagagtttcgctcttgctgctcaggctggagtgtagtggcgtggtctcagctgattgcggcctccgcctcctgggtccaggcggttctcctgcttcagcctcccgggtagctgggattataggcatacaccaccgcgcccagctaattttttatttttagtggagacagggtttcaccatggtggccaggctggccttgaactcctggcctcgggtgatccacccgccttggcctcccaaagtgctgggattacaggcgtgagccactgcgccaggcctctctttacttttaaactcatttctagtttccaaatagctctccctaagtcctatctgcctaaa

SEQ ID NO: 556130 - DNA, 244 bp, Homo sapiens
tgacctgtgtcgctagcctggaacacagatcaagactctgtctgaaggaaaaaaaaaaaaaagccccccaccctgtctgggggccaggggtttctttttaataaaagttccaaaataggcaggcattgggtgttcacccccatataactcccagcactttgtggaacgcgcttgaagcgcaaggcaaatccattttgagggcccacaggagttgtgaaaacccagcccgtggcccaacacatgt

SEQ ID NO: 556131 - DNA, 295 bp, Homo sapiens
tgagtatcgccggagattgtatgggtatgatacatatcatatagctatgctagggtgagtgtgtaggaagttttttcatagagcacgtttatcagttggtcgtagacggaatcaggggtatgctgttcgaattcataagaacaggcaggttagaagtatggtcttgagtgaccaaatattttgtgtagagttcagggcgagagtgcgtcatatgttgttcctaggacgattgtactggtgagggtgttttttattataatgtttgtgttttcggcctgctccggcgtatcctcca

SEQ ID NO: 556132 - DNA, 569 bp, Homo sapiens
ccacaatccaatccaaggttcccaaatcggcccgcacatccacagctgcgagcttgtatgataagagggtaatatcctctgattaagggggtgatgaactccactgttcgagtacgagacgctacgacgtccgacctttcgggactagctcttctcggtcgtctataaatcgtttagcttagttttttggaactgccctaggtttccgaggtacgaattctgggagggtctgagtagagagggatgtttaggggtagtttttgggtattttttgggggagcgcgtctagcgtttttggcggcttgatggggattagggtagccgttctatatgatcgtggggagggcgcggtaggatatgtaacctctaagattgatcttgatggggcttgttactctatatcggtattggcctatctcgagtcggatggttctttcgctgaattaaatttaaaagaaaaaaggggagaaaacttttcctgaagaggcagtggagggtaagggagctccttaggatattacggaaaggcctcctgacgctatagggatcgaggtcacctcgacgtttcc

SEQ ID NO: 556133 - DNA, 125 bp, Homo sapiens
  misc_feature (44)..(44): n is a, c, g, or t
  misc_feature (73)..(73): n is a, c, g, or t
attgtttatgcccgtatagagggggatatgatagtgtgtgcagnggatgcacactatttgtcaaatatggggngaaggttggggggacaaattattggtgtaggatatagatatgggactgtgat

SEQ ID NO: 556134 - DNA, 447 bp, Homo sapiens
  misc_feature (105)..(105): n is a, c, g, or t
  misc_feature (107)..(109): n is a, c, g, or t
  misc_feature (126)..(126): n is a, c, g, or t
  misc_feature (129)..(130): n is a, c, g, or t
caggtccttgagcgaagctctctggatcggtgattgcttgataaaagaccggccacatcgaggaactctgagaagtctccactggcatgaactcctcctggaagntnnncagggcttgtcggcagnttnntagatgggcatgtcttctgccgatctactctatcagagagcagaccagctttcctctgtgatactggtaggcaccttcttaaaacgttgttgtaaatgagatcgacgaggtgccaaaagagaagggaagaacggtaagcggaatagtccttcactgccttatcttgtcaggctggtggctcccacctggatgccaattgccgagccttgcgaggttcaccaacagactcgcaagatttccacactgtgtgctcttccacttgctcagggggcaggattttaagggcagacttgtaatattagggccctgtcacttaa

SEQ ID NO: 556135 - DNA, 718 bp, Homo sapiens
ggactctggtattgtgaactgtaatctgaagcgagattatttaaagtgtagaaaatagaaacaagttctttttggcaaaggtctgtgataccatatttcagctttgtgtaagtaatttgaatataccaaagggttgtgagtgagtcagttcgtgaatatgcaactgtcacacttaataaggacaagtagttccaggtatctctatatagagtgtagtacataaatgatgtggaatgtacagtttgtgagatagtggtatccctttactatgattaattgatgttgattccaggaaatacttgtgaagccagccacattagatatcagcactcttagcagtcgtgtgtcaaggtagtttgaaaaccaacttttccccgttcaggataagaactgccagggttacctaagaaatgcaataaagatctttataggtcgtaacgctctcttggcatataatttttcatcagggttctctgtttattacattgagcgcaagactggcttcgattcaatttgtttccctcaaatcaccagctccttacatagtttagaattatagtagctatctgagagaggtggctaagacatttgctgcacacagttggactaatgtgggtcagtagccttcggtgactggccctgaatcccagtgtagttcaggtggaaaggtttggtatctcagcaggcatgtgtaggctatgtatttacaattgggacc

SEQ ID NO: 556136 - DNA, 182 bp, Homo sapiens
tctattccaattacatcacatcacaaaatgccatgaatggactcggaaggcgctccaccacctccaacaccctggcagcagcagctgctctctacagcaagagcattttccagaacggcatgagacggagagacgcacgtcccaggggaccggagacgcgcgctgagacctcccagcaagag

SEQ ID NO: 556137 - DNA, 836 bp, Homo sapiens
ggagtgggtgggctgagcctggatggtcaggagtgcggcaactggcagatgccaccacccagcttaacacatcatctgctggcagtctgttgcagtgatgcgccgtgtctgcccaccttctaccatgggatgctggagcaagcttcgtgcacaagcaagaacatgacaccgcatggaccctggtgtgagtgaagagtgaagtgatgaaggtggcaaggtgagctggcatggaccatgccagtgaatgtgagtgtagagccctgcatcatcagactgtgacaggagaccatgagcacataccaacacatacatacacagaatagacatatagagattgcatcaatagacagatagagatagacatgccatgccacagccaaagtagctatgatagataacacaaatgacaaagcatagaggatgagagatagcaagagagataagagagtgacattgtagaaatcccaattagcacccaaatcgacagagacaaacaaacagggaaaagagcacataacaaatatgacaaagaggaaaaaccaaacacataatgaacagaaggaaaaattgacaatagagcaggcagagaaaccacgaccaatcggatgggtttgaccccaaaaggacaacagatagaccaggaccaacagaagacatatagaacacccccacagggggattcaacaccagacatcatgcgacaaaaaagacgccaccagagcgccaaaggcataatcaaaagaaccagcaccacatgaaaccacggccagaattggagcataacagcaggatcaaatcaacaacacgccacaaaaccaatagcacccaattgggcc

SEQ ID NO: 556138 - DNA, 131 bp, Homo sapiens
tgttgatggaggtggtctggttccaccttctttctgagatgggggtggtgggcagtatctcatctttgggttccataatgctcactgtggtcaggcaggggcttcttagtggccaatcttaccagttgggt

SEQ ID NO: 556139 - DNA, 171 bp, Homo sapiens
ggaaggttgagcttgacgtcagagataaagggagcatcatcacgacgcttctaccgagatgttgctcttatggttcatcagagtcagtgacgcgaagtaggagtccaatagtcgcgtgctcatctgcaggctcctctgtgagtcccctttctctgctcgtgcctcctcccc

SEQ ID NO: 556140 - DNA, 428 bp, Homo sapiens
tatgcctcggaagaggacgatcctaaacaaccctgtgatgctgggggccctggccctgaccaccgagattaccccttgcggaggggaggacattttggctgaccatgttgcctcttacggagtcaactactgccaggctaatggctcctctgggccttacacccatgaattcgatggagacgaggagttctatgtggacctgcacaggaaggagactgtctggcagttgcctctgttcctcagatttacaaaatttgacccgcaatttgcactgacaaacatccctgtgctaaaacataacttgaacatcgtgattaaaagctccaactctaccggtgctaccaatgaggatcctgaggtcccaatgttttccaagtttcccgtgacactgggtcaacccaacacccttatttggtttgggacaacat

SEQ ID NO: 556141 - DNA, 179 bp, Homo sapiens
gtggctggtttctagggtataagaacaaaacaagaatactaggaagcatcggaagatgtttttacttgctgtatgccccgatgcttagctcttatccttcaaaccccttctctaagaataagattgctcgaaaactaggaaaaggtgaaggcgtcactgttaccgaccacctcagggtt

SEQ ID NO: 556142 - DNA, 111 bp, Homo sapiens
tccccatttgcctttgggtgtccccacccccattcccggtttgccctttgaggaatttgtttggccagtttttttccccttttttttttaaattaattttaaaatttccca

SEQ ID NO: 556143 - DNA, 623 bp, Homo sapiens
  misc_feature (623)..(623): n is a, c, g, or t
atccctgagaatccaaaattccccgtaccacctatcacaccccatccaaaaaaaaaaaaaaaaaaaaaaaaaaaaaaaatgggaaaaaaaaaaaaaaaaaaaacaaaaaaaaagcgagtgtggcggcgcgcgcgccggggcccccggaaaaaattttaacaaacacacacgcgcgggggggcgcgcgcggcgcgccccaaggagaaaaaaaaagggggcaaaacggggtttcctccagagagaaaccgcgcgggagcaagaaaaccagcgggggggagattctccccaaaaataaacaaagacgcccgcgggggcagacacacggagcggtctatctcgagaaacaaccaccacaaagagaggctctatctaagcggaggcgctacaagagaggggagagaaataacaacaccacgagagagcgaccacacaacacaagaagacaagacacgtgagcaaatacaacctcaacaaaatatattaaaccccccccaggtgccctggctgggttggggatagaactaaactcgaaacaagtattaacccacgaaacacaacaaacacgcaacaacacctcaacacaacaaggcgagaacacaccacaccacgaaaacaacaaaccn

SEQ ID NO: 556144 - DNA, 450 bp, Homo sapiens
  misc_feature (18)..(18): n is a, c, g, or t
  misc_feature (57)..(57): n is a, c, g, or t
  misc_feature (67)..(67): n is a, c, g, or t
ccctaaattctttccaanctgcctgtcctttcctcctttggaaaagaatccaaacgnatatcccccngggaatgtgcccccatgtcccccgggtaacccaactacagacagatgccccccattctactcaagcaacttttagagtgcccttgagatacacatcagataattatgcagggcccaggcatggtgctgcacacttgtaatcacagcactttgggaggccgaggcagcagattgcttgagcccaggaattcaagtgtagcctagggaacatggcaaaaccccagctctacaaaaaaatacacaaattagctgcgtgtggtggcctatgacaggaggctgagatgggaggattgcttgagcctgtgaggtcgaggctgcagtgagccgagatcatgccattactccagcctgggtgacatagggagaccctgtcttgaaaaaaaa

SEQ ID NO: 556145 - DNA, 159 bp, Homo sapiens
tgaagctcactgtaactttgaactaatggacttggaatcctcctgctgtggccttcaaagggatgcaattacaagtgtgagccactgcatcccacctcacattttattctatggagatattttttgagttggattaaaaaactttatattgacacttca

SEQ ID NO: 556146 - DNA, 438 bp, Homo sapiens
gttcatgtctgtaatgccagcgacttgggaggcgaggcaggcagatcacctgagatcaggaattcaagaccggtctggccaacatggcaaaactccatctgtaatttaaaaaaaaaaaaaaaaattataggaataattccaaacatcagtgatggcggtaaaaataaacttataaaatgacaggttcagatggggtcccaaaatttagctaaaactagctaaatcaaagaatccaagataaaaggtaatcagtaggacagaacaattcattaagacataatcaatcatgaattgtccttaaggaggcaaaaccggatagacttacagggagatctgagatggtgtgtaatactcaattttctgagcacgctggagggtcaagacaaccaaaaaaattaaggctataaaaggtattacggatggagaacatagggggat

SEQ ID NO: 556147 - DNA, 341 bp, Homo sapiens
gcctttcccccccccgggcccccaaattttgtggggttgggggggccatcagggccccccttgggaaaatttttggcccccccctcccccccttttgggaaccccgttgggtggcccccccaaaaaccccggggggggggtttttttgggctttgggggccccatcccttttcaagggtttcctgagggggcccccccaagtccaaaaaaatttttttttttcccccaaaacctttttttttccccggcccctttaaagggttttttttttttccccccccctccccgggggtttttgggggaactttttaggaaaaaaaaaacgggggtttgggccccca

SEQ ID NO: 556148 - DNA, 701 bp, Homo sapiens
  misc_feature (27)..(27): n is a, c, g, or t
  misc_feature (128)..(128): n is a, c, g, or t
  misc_feature (165)..(165): n is a, c, g, or t
  misc_feature (219)..(221): n is a, c, g, or t
  misc_feature (525)..(525): n is a, c, g, or t
ttcttgggggtttttggggccttaaanaagtggtgtcaaaaaagggggggggggggggttttcgggtatttttccccaggtgcgccccgggtgcgggaaagagggaggattatgggggggggggagantgttcccttttttaggggtttttctctttggtgttanccgcgccgccccgcctttgagcccgggggggggggtttttttccccgggagggnnngcccagggttttgcctttccccccccaaggggggggggtgtttttcctaaaccgaggggcttttgggggcccttttttttccacccaaaaagggaccccggttttttgggggggccccttttttccttttttaaaattgggggcgggccaaggggaaacccggggtttttttttttccggctgggggggggggggttggggggtaacggcccccccccggggcccccctttttttttttttagaaaaatggggggccacctggggggttttttccccccaaatgggggtggggggggccccccnaggggtttttcttcccccctaagggggagagggggggtttccctttcccccaaaatggggggttttttccccccccccttttccccccccgggggggggggggggggttttttttggggggggggggggccctttttttttgggggggaaataaaaaccaatggggggccccttta

SEQ ID NO: 556149 - DNA, 1132 bp, Homo sapiens
tagttctagatcgcgagcggccgcctttattttttttttggttttttctaaaatcatttaagggggaatagaaacaggaatgtcatcaaaaatttttaagtacaggcccaaaagccggttgtctaaaaaaaaaattggtcggccaggttgtggattattcagaataatgatgatcttcggcaggctttggctacgcccttgtctgggtgggtgtcttgaagattaccatcacaagagtactgcagtccaggtcaccaagccagcggaacccgtcggaaaccctgttgttgttctgatggtgccgttaatggtgaaccttgaaagggggtgggcgattctactagagggtcgtgcatgttccaagagcttatgacgaaaaccggcaagaaagcaaacatggcagaaaaagttactaagaatgtaggggctctgaggggaatatctggccgttatatgttgatattcagggaacgattacggaaaaacatccggtagaaacatcgtttagaggaagacgttgaactagttcgcaagggccgaaagctaattatattgccactttagaaaaagtagagcgaaagggtgttggaagaatcggggatgacattgctcattagggctacacgggtgtcacatcggcttgaatcaaaccctggaaggcggctatctattattgtacctctggccccttaaacgtggacaaacaataattcgctgggcaaattactctacgaggactgactataaacggggggtaagggcagggttaaaccttcctccagagtggaaagatggtggccacgcccggtggcattcaaaacgggaggatcaacaaacccccccatctatctaggtaatgtgggggaaacttatatggggtaggcaagaaagagacttaagagagaaaatttaaagaccgtgggaaaagtatgtggcaacataatttgtgtgggacagacaaaaaaattttggtgtgggtttacaacacactcgggggcgcatacaaacgatagctggggatgcacaatctacaatttggacgccaaagggcaatgtttatatttgaacaggtgttgcagccccacagggaggggccaatattgctttagtggtgggagattaatatgcagac

SEQ ID NO: 556150 - DNA, 132 bp, Homo sapiens
taagagctcttggtcagtaggttcattatcagtggtactatttcgaacggaatctctgaacagtatgtataccagtgggcttaaaatattcagtaaaccatgctgtaaatagatgtaaatacgataccacag

SEQ ID NO: 556151 - DNA, 118 bp, Homo sapiens
gactagccatggaaatcagacagagaaggcacagggaagtcctaacgtttcccctgctgtggccacctgttgtgctggatgcccaagctagcacgctaggagagcacagcccctagag

SEQ ID NO: 556152 - DNA, 789 bp, Homo sapiens
  misc_feature (547)..(547): n is a, c, g, or t
  misc_feature (550)..(550): n is a, c, g, or t
  misc_feature (558)..(558): n is a, c, g, or t
  misc_feature (564)..(564): n is a, c, g, or t
  misc_feature (579)..(580): n is a, c, g, or t
  misc_feature (587)..(588): n is a, c, g, or t
  misc_feature (591)..(591): n is a, c, g, or t
gctaccctcccagttgcttagtaatacccataggtgatacaagaagctctgaagatgcaaaaatgacattactaatgatgtgattgcaggagccacagaagaacgttatcagcttttcgctcgaatcagtccttagcgctcgtgatcatatgcttctaccatccacgatactatcactctagtttgtcaccatctattcacaagtaaagcaaaggatgcctggaaggtcgtgactttgtatcttcagaactcacagagtgaatttcagcgtcgtgtctgagattcgaatgacctcaaccatgtgctctttaggagtttacgaactgtagctagaacaaatgatatatttttgccatagggattatttagcgagcaagaaacgatgggcgtacttgtagactgaggaccgggtcaaagaccatcgttgacccatcaataggaaggagtattcctcttataataagtgcgctactattttcgaagatcgcatttaggttgcgataggaccgggtcaccgcttcaaatgatagcggcaaggtagcaattngtncccagttncatttncttcctgggaattanntcgtcanntcnttccttcagtcatcttctgtgtaggtgaccggagcactgagaggcagctctgatgcactattgtgtgtcagcagtctcaaaggcgctaaaacactgaaggttctgcatctgaagtattagattgttagcagcaaaatatgacaagatgaggtggacagtcctctaagccctatttagggaagctttccaagtcacaat

SEQ ID NO: 556153 - DNA, 812 bp, Homo sapiens
cgcagtggctcgctcctgtggtcccagcactttgggaggctgaggcgggcggatcgcggggtcgggagatcgagaccatcttggctagcacggtgaaaccccgtctctactgaaaatgcagggaattggccgggcggggtggcgggcgcctgtggtcccggctgctccgaggctgaggcaggagaatggcgtcaagcggcgaggcggggcttgcggtgggccgagatcgtgccgctgcactccagcctgggcaacggagcgggactccatctcaaaaagaacaaaaaaagtagagatgggatctctagcctcctaagttaatttagcctcccaaatgccagacaaggaatctaacataaaatttaccttgaataagatatatgatattgattctgagctgcttggtattttttctgactttggcatctgtatcttggtgctttctgttagactggtagagttctaagaacctaaggagtatgcattgtacttcagtgctaactttttccttcatttactttctgtgtatataggcagcatatttcctggtagaaccattaacccagatggctaataggcttcatgttacggcattcttccacacagtcccagatgacttcacggaaacagccgaactggcaagtcacagtgtgtcataacctgagcactgaaacacattgctttaaaacaatagatttcactttccttaccacgttggaattgccatggtatgggcgggtctctggataaattcagctggtctggggccccgtattttggaactggtcaacaattttgacgccttcggggaa

SEQ ID NO: 556154 - DNA, 111 bp, Homo sapiens
gtgcaggtgctgcaacagtaggagtggctggttctggtgctggtatgggaacagtactgttggcagaccttgatagattgggttatgacagaaacccttgcgctgatgcag

SEQ ID NO: 556155 - DNA, 363 bp, Homo sapiens
  misc_feature (121)..(121): n is a, c, g, or t
  misc_feature (124)..(124): n is a, c, g, or t
  misc_feature (132)..(132): n is a, c, g, or t
  misc_feature (138)..(138): n is a, c, g, or t
  misc_feature (153)..(154): n is a, c, g, or t
  misc_feature (161)..(162): n is a, c, g, or t
  misc_feature (165)..(165): n is a, c, g, or t
aaagaggctgattggtaggccaacactcgtgccctacataggaaggtatctttaatagggtctatttcaaacctatagatgggaggagaggtcatgctacaagtattgaggcaatgcattngtncccagttncatttncttcctgggaattanntcgtcanntcnttccttcagtcatcttctgtgtaggtgaccggagcactgagaggcagctctgatgcactattgtgtgtcagcagtctcaaaggcgctaaaacactgaaggttctgcatctgaagtattagattgttagcagcaaaatatgacaagatgaggtggacagtcctctaagccctatttagggaagctttccaagtcacaat

SEQ ID NO: 556156 - DNA, 342 bp, Homo sapiens
cctttagtcagaaaagccacaagtaacagttaaaatcacctggtccaaccatatggaaagactcaccaaggttcataaaaatgaaaccacccaaagtatatgaggtcttctgagtcctaatccagggctttgacatggcatcaccaatgcatcacatcccacatggctctcacttcttccctggcacctctgcaaagttccaggggatttcctgcctctcactcttctctcctcattctctggactcaccctgatctcatttatgtatgcttttatcataattttctctaaagtagccccaagtcataattacattaaaacctgaagtctgataaaatagcg

SEQ ID NO: 556157 - DNA, 351 bp, Homo sapiens
taccgtcagcgagagataaccaacgcagcagtgaccgtcctcccctgaggacttaagtctgagttcacaggaccacaaaatactggccatagtgcaatgcctgttactggcagtgcgtttaccatgacaacaaggatattacaattcaggaccagtgttctgaacagtctcgggaactggtggaatactaggatatttgtatggcagcaatagagcggcaacacccttctcagactcgtggtactacccgtcctatcctccctcctaccctggcacgtggaatagggcttactcaccccttcatggaggctcgggcagctattcggtatgttcaaactcagacacgaaaac

SEQ ID NO: 556158 - DNA, 169 bp, Homo sapiens
  misc_feature (155)..(155): n is a, c, g, or t
gctcttaagatccatccggtcgggtatatcaccgagaggtaacagcaaagctgaacgcagacatattctatttaacctatagtccttccctatcatcgactaatttacactcacaacacctaggctcactaaacatttatactcactctcactanccaggaacggggaa

SEQ ID NO: 556159 - DNA, 1234 bp, Homo sapiens
  misc_feature (298)..(298): n is a, c, g, or t
  misc_feature (425)..(425): n is a, c, g, or t
agacttcggttgatggaaacgggatctttcatgtctcaggggtagtttggttggttgcaatgttacaagttttctatctgtctggtatgctataaatctatgtaattggagcttggaaagcgagtaatcgtgacaaaggagtatggtatggagtccagaaagaaataaattgagaaggacgagaggttgctatgagctgtcgatgctacatggagtagcacattaagaagagcttgggagtcgggtggatgttggggtgggccgatgccatactttgccgtggtcctcgacatgtttntcgatatcgaagcgagggtgacttggcaggcagtgtgatgggaagtccgatatatcgaaggccctgaacagttgggccctgtgggccccgttgacttcgtccgtcgtggaggaactactactaggcnctattaggcggatttactcaacaaacgggggttggttgactcgcaagacgacataatccccacggatacattctacgagtggaaagggcacaagcacccaacattcaagggggcgaataatcttgagatattcgatggacgagttgcattagttatgtactagagtcgaggcattggggttatccaaggaagaagggtatcagggttaaaatttccttgactctggtggggctctagtggtgagaacttgagaatcagagttaaaaggggaaatctccagagggctgccccttctttacgttgcatgttttatgatggaatgtgttaaggtttttgaatgttgctctctttggatatgtatattttggggaaggaatgtaaagaatatggtaagtggggtgagtgataacgcataagtaggttaccgggtagtcggttcaggtttttaaatggggtgtatttcgaaccaaattaaacgtggaaatttttttcgagggctctcttccacatttttcacatccttccatctcccaagggtgctcttcccctggcttttaattggtgaatcgaagagcgggcgattccacggggcgtcgatgacaatacgacgtccggttacatgcttaggggaactttcggcaagatctactgacaattggtttccccaagaattgccttaatgggggtaacgtattccaaaaggcgaaaagaaattcctctggggcaacttcggaaagccgccaaagtcgtggacatttgcacacaccggggccaagaaactaacttatggtaaagggaggtgtcactac

SEQ ID NO: 556160 - DNA, 321 bp, Homo sapiens
agccacaagttacaatgcaacagccgtggcggttcatgtacagggtcaggaaccttggacggcttccaggtgggccatccgcccctcctcaagagcaaacgcaaatgtggggtgacgggctgtttcctcttattcaagccatgcaccctactctggcgggtaaaatcacgggcatgtggtgggagatggcataattcagacacttcttcatcatgctcgcagtctccagcagtcatccgtactcaggtggatgaagcggtagctgtcctaccaagcccaccaagctaaggcaggctgccccagaaagcagtcaacagtgcc

SEQ ID NO: 556161 - DNA, 336 bp, Homo sapiens
  misc_feature (152)..(152): n is a, c, g, or t
  misc_feature (171)..(171): n is a, c, g, or t
  misc_feature (218)..(218): n is a, c, g, or t
  misc_feature (279)..(279): n is a, c, g, or t
  misc_feature (294)..(294): n is a, c, g, or t
  misc_feature (334)..(334): n is a, c, g, or t
gtcaataaagaactggtatggttcatatggtatcataaacttaaaataatggtattttctatatccccaaattctgttctgtggggggaaaaaaagtcctatgcagatataaggtagatacaaccggaaccaagaagaattctggtgaccanaatggattttggagaactncgtgggctaaataagttaaatacgcttcgttatcacggggacttctnacatagcggttagaatggttactcaggcattggtgaactctacaagagagatggatatcanaatgcatgtttccanaacttagaatatttaatcactggaatttactgcctgcccntt

SEQ ID NO: 556162 - DNA, 218 bp, Homo sapiens
cagtggcagtttgggacctccctgtgcctttcagcactcccttccccccccccatagcccaaggacaaggctaccccagaaggttaccccaggacctggggtttgtttccaggggacaaggagaccctgtcagcctggtgttccccaggcctggtaaattaaatggcttgtttcatcccccccccaaaaggaaataaaccatgtggctttaattttta

SEQ ID NO: 556163 - DNA, 400 bp, Homo sapiens
agatcctgtgtcatcccccttgtgctatggggctgcgacctaggagtgagcacaccttcatcatgcagtctctcctgaagagagctagctgggcagggtgcgtgtaggctgagagcagcaggaggaaaccttctagtgagcagaggacagctcctcaacacacactggctctgggggtctcttgcagggttgtcagtgagaggtgagcgccttggctgtgagctgggagttatcagcatggctggagatgagatacacattgctccatcaccctcacctgggaccaggttttgcctatctcaatggcagcgtgactggtgggatgtgacacctctggggaagaggaccaatgctgtgttcagccatgggtgcagggtgggaaaacctgatgggggaaaag

SEQ ID NO: 556164 - DNA, 185 bp, Homo sapiens
ccatgttagccaggatggctcgatctcctgacctcatgatccacctgccttggccaccaaagttcttggattaaaagtgtgagccaccacggcccgaccattgactaccaatttttaacttcacattttaaataaaataatatgccaccattgtaaattaaatacccacactgcggtgtgttggc

SEQ ID NO: 556165 - DNA, 517 bp, Homo sapiens
  misc_feature (215)..(215): n is a, c, g, or t
gaaatagatgtgcacagctcctcttaaactccagctaaaaatttaatccaaagaggtggaaagtcgagagatcctcttcccagccaatggtgagctgagatcacctcatccccttgagcccaccaagccaccaattcttagtaactctttttttaagtgtagcccatgtttcgctttgggttgtgtgaaaagattacaaagcagtctaggacttncgagtcccagaattatcctcagccccttatgtggatactttgaaaaccagtaagaacttaagaccattcattttctaatttttccccaataagttttgctcttgacaagtgaaaaatcaattaatggttgataaataacgaaaaaagctcaggaaggttttgcccactgtgtttttttctggccgtgcagcagtaaaaacctcctcctccaagtttgtctctttctcgtgaatatgtatcactcgggaaatacgtggaaggaaataaagttcgccgggttgtattgcggtgttattacggtt

SEQ ID NO: 556166 - DNA, 349 bp, Homo sapiens
tgcttacaaaactttgaggtaccacaaccactctccaaatacaaatgctgcaagtgatttgaagatcatagaaatgataatacaggcaaaaaatgcgggaaatctcccctgccaaattattcaactatgtatgacttctgccttttcacagcgccaatttgccatgctatgcgtttcatctttgcatcattttcaatactggatgtataaattgtgtaaagactttcagagttctaattcattttatgcattttttgcaaatttgattccatgaaagtgcattatcacatcatcgactgtgtgtaatcattgtgtgtgcatataaaaatgaagagataaatgaagagat

SEQ ID NO: 556167 - DNA, 1615 bp, Homo sapiens
tgtcagctgttctagggttaggctgcgtccctcttcgttgtaggcagcctcgtgctgttttgtatggatatgagtggtctggtgcatctctttgtttctgctgtcgtgtgtggttgctgttgtgctgcgctgtgggttgtgcgcggcgcgcgtcgtttcgtcctcttcgcctgttgttggtgggcgttctccgccgacgttgtttcccctcgttgtgtcgccgattgtttgcgattgggggtgttaaagttcccgctggcttgcgtgggtgtctgcctcctgagggggccgagggctctatctcgtgcggtgcgcttgttctttctggtcggagtggggctccacccccgtgtcgagatgttcgcgggggagctctctattgggggctgtgttgtctcccgtggtgttgtttcgcagccgcctgtcgctgtttgcacgggggtgtagtgtgtgattgggaaagggtgtgtcgtgctgctaacgcctcgggggtttttctacggggggcatactccaatggggtagtgttgcccccgtgggtgggggcccggtgatgtatgttgtcttgcgccggggacttatttgtcggccccccgggatggtgctcaccatagggggtccccttttgtgtgtggcccccgtagggtcctcgctctctttagatagattggtgtctggcccttttgtggtattggtgtagattgatgtagggggtgtgttgttcatcttggggagggaagttgtgggaggcctctccatgggggttcacagcgtcgtctcacctctgttgaaatgtgttccggggttgcccctgcctgctaggtgttccgcagttgttgttccgtgtgctccgacgtttcgctcccccctgggtgatcgccccctgttggtgccccacccccacgggttggtgcctcgatatgagggaccctcacataggcccccgctcgcgggtttcccgctcccacgtgtcgtgggagatttgttgcgggtttccccgtgtccccgcaggggcttggagagcacacggggccgcgggggctctgagagtggaaatgtgccgcggggtttgttcccacttctttgttaacgcacgcactgtcccggcggtttgaggtgtcactagtcccccacccacacaggtaggataatatagtgtggaatattggcccacggccagtagaagaaaatggagacccacaacaagagtgtggcgagagctcgataagagcctataaagtggctctggctgttttggccccgtgtggagccacagagtataaataggagaactatttttcgcacttgatgttgtagatagcacgccactcggggtgtgtgtgtattgattgtgttgactcgaagagacgtgtcttctgtttgtggtgaatgaaccgataacgtggtgtgtttttaaaaagcctcggttgtttgtctgcacataaacgcctcttaaaggtgttgttgaaattggtgtgttcaaatgtctgggtgccagttggaggattttttagagacttcctttttaatttgttaattaaagatttaccactggagtgtttccaaaaagatcccaccaactgccagcccctgtttattaaggtctttaataatt

SEQ ID NO: 556168 - DNA, 109 bp, Homo sapiens
acaataaagcaccacacaacctaaagaaaaacgaacgagcactttatacatatatgggccatggtttagcgaacgacgagcgccaggagctattgagcgaggaagcgga

SEQ ID NO: 556169 - DNA, 404 bp, Homo sapiens
  misc_feature (32)..(32): n is a, c, g, or t
  misc_feature (48)..(48): n is a, c, g, or t
  misc_feature (60)..(60): n is a, c, g, or t
  misc_feature (78)..(78): n is a, c, g, or t
  misc_feature (112)..(112): n is a, c, g, or t
  misc_feature (118)..(118): n is a, c, g, or t
  misc_feature (123)..(123): n is a, c, g, or t
  misc_feature (241)..(241): n is a, c, g, or t
  misc_feature (331)..(331): n is a, c, g, or t
  misc_feature (396)..(396): n is a, c, g, or t
caccaatcagcactctgtaaaatgcaccaatnaacgctctgtaaaatncaccaatcaatnctctgtaaaatgcaccantcagcaggatcctaatagtagcctatcacagggnggattnaaaanagggaactctgttaggacaaaaacaacatgggtggggacaaataaggaaataaaagctggccaccccagccagcagtagcaacctgcttaggttgccttccacgctgtggaagctttnttcttttgctcttcccaataaatcttgctgctgctcaccctttgggtccgtgcctcctttaagagctgcaacactcaccaggaaggcctncagcttcattcttgaagtcagtgagaccaggaacccagctgcaggaaccaactctggccacaaanctactaga

SEQ ID NO: 556170 - DNA, 212 bp, Homo sapiens
tataatatagtgaaatatttgatgtagcgaagtggaccttaactggtgggtaaatgcggtgtgaaattgcaagacggtggaggaatgggttccattcgtggaaatatttctccaatctcgaaactcgtatacagatcgaccctaagactgacaggtcaaggagagcagcaaagtcaggaaatgggattggggttaacttctgccaaaccgac

SEQ ID NO: 556171 - DNA, 569 bp, Homo sapiens
  misc_feature (432)..(432): n is a, c, g, or t
agcgggtcaggtcaggacgggagtccggcgggttacagcggaggcctaggtggcagacagggggcccgggtccgctgcgtgttgtccacccaaggatggagttcctcctggggaacccgttcagcacaccagtgtgtctgtgcctcgaggaaaggcaacagatggcatccgctgcaaagtggaggcattggcgcaagttgaatatggagatctgtgacatcatcagtgagacggaggaagggccagaaggatgccattcgagccctgacgaagcggctcgaacgggaacctagtaaactacagacgaggtggtgctggcattaagcagtgctggagacactgtagtagaatgaactgttggccagctcggattgccaagatccattgtgtgccaaacctgagatgttcactccgacaggtggttgcttggtncaaaagagttatcagtcatcgcgcaatgaatcaaggcctctctcactccatgtgttcatgtgagctagatgttgctttggtcttgactccatgtgcaatggtgctagatgcctttctgaaggcaggtcctgatctca

SEQ ID NO: 556172 - DNA, 236 bp, Homo sapiens
  misc_feature (225)..(225): n is a, c, g, or t
ctctagatagatatccagtagtgtaattgctggatcaatggtagatctacttttagttctctgaggaatctccacactgttttccatagtggttgtactagtttacattcccaacagcagtgtagaagtgttcactgttcaatgcatccacaccaacatctatctttttttaattttttgattatggtctttcttggtcgtttgaaagaagaggaaaaaaggagnggatttgttgg

SEQ ID NO: 556173 - DNA, 404 bp, Homo sapiens
aaaggaaaaactaaggagacggtaaaacatcgatggttgccaaggggcccaggaaacaggaaagaattaataggtggagcacagaagatctttagggcagtgaaactattctgtatggtactgtaatgtgggcacatgtcattataagttgtcaaagcatataaaatgtatagcacaaagagtgaagcttaatgtaaaactatggagtttaataataatttgttaccattggcacattcatgtaacagatgcactatactaatggaagatgttaatagtggaaactgtgtttgtgtggtagagtaggtatgaactctctttactgtacttttgttcagtttttctgtaagctcaaaattgcttttaaaaataataaaatctattaattaaaaagaaaaaaaaaa

SEQ ID NO: 556174 - DNA, 195 bp, Homo sapiens
atcagctccatgtagctgtgattacaggcatgcgcaccactgcctggctaatttttgtatttttagtagagacggggttccaccatgttggctaggctggtctcaaactcctgacctcaggtgatccacccacctccctcggcctcccaaagtgctgggattacttgaggtcacgagttcaagaccaacctggcc

SEQ ID NO: 556175 - DNA, 391 bp, Homo sapiens
aaatctcatgttgaaatgtaatctccagtgttgaaggtagagcctagtgtgggaggtgattctatcataggggtgattctatcatattaaactcattaatagtttgacacatcctcttggtgataagttagttctccctcagttagttcatgggagatccagttatttaaaagtatgtggcacctccccactagctttctcttgctctggcttttgccatgtgacacacctgctcccccttcgccttccaccacgattgtaagcttgctgaggccctcaccagaaggatatgccagcaccacacttcttgtactgtccagaaccgtgaacaaattaaatctcttttctttagaaattacccagcctgggtgacaaagtgagactccatctg

SEQ ID NO: 556176 - DNA, 246 bp, Homo sapiens
aatcgagctcggtccactccttcctgagactacaagtgtgggcatcatgcacagctaatgtttatatttttagtagagacgcagttttgccatgttgggcaggctggtctcaaactcccggactcaagtgctctgcgagttcagagctcccaaagtggtgggattacaggcatgagtcattgcacccagcctcaataatctcttctttagagacagggtctcagctcttattgcccaggctggagt

SEQ ID NO: 556177 - DNA, 153 bp, Homo sapiens
gtggtaagtcgttggagtgggcagagaggctagctgctgccttcctgcctggctcagtctctgcccagtccccagtccccagcagccagtggcccgtggcagtggccctcctggggtcacagcctgcgctgagctcagtccaggcaagaacaa

SEQ ID NO: 556178 - DNA, 818 bp, Homo sapiens
  misc_feature (4)..(4): n is a, c, g, or t
  misc_feature (67)..(67): n is a, c, g, or t
  misc_feature (88)..(88): n is a, c, g, or t
  misc_feature (98)..(99): n is a, c, g, or t
  misc_feature (101)..(101): n is a, c, g, or t
  misc_feature (103)..(105): n is a, c, g, or t
  misc_feature (116)..(116): n is a, c, g, or t
  misc_feature (119)..(119): n is a, c, g, or t
  misc_feature (122)..(122): n is a, c, g, or t
  misc_feature (134)..(134): n is a, c, g, or t
  misc_feature (140)..(140): n is a, c, g, or t
  misc_feature (142)..(142): n is a, c, g, or t
  misc_feature (144)..(144): n is a, c, g, or t
  misc_feature (146)..(146): n is a, c, g, or t
  misc_feature (148)..(148): n is a, c, g, or t
  misc_feature (163)..(164): n is a, c, g, or t
  misc_feature (168)..(168): n is a, c, g, or t
  misc_feature (177)..(180): n is a, c, g, or t
  misc_feature (220)..(220): n is a, c, g, or t
  misc_feature (229)..(230): n is a, c, g, or t
  misc_feature (232)..(232): n is a, c, g, or t
  misc_feature (236)..(236): n is a, c, g, or t
  misc_feature (242)..(242): n is a, c, g, or t
  misc_feature (253)..(253): n is a, c, g, or t
  misc_feature (257)..(257): n is a, c, g, or t
  misc_feature (275)..(275): n is a, c, g, or t
  misc_feature (289)..(289): n is a, c, g, or t
  misc_feature (293)..(293): n is a, c, g, or t
  misc_feature (296)..(296): n is a, c, g, or t
  misc_feature (320)..(320): n is a, c, g, or t
  misc_feature (328)..(328): n is a, c, g, or t
  misc_feature (331)..(331): n is a, c, g, or t
  misc_feature (343)..(343): n is a, c, g, or t
  misc_feature (346)..(346): n is a, c, g, or t
  misc_feature (384)..(384): n is a, c, g, or t
  misc_feature (392)..(392): n is a, c, g, or t
  misc_feature (400)..(400): n is a, c, g, or t
  misc_feature (409)..(409): n is a, c, g, or t
  misc_feature (415)..(415): n is a, c, g, or t
  misc_feature (427)..(427): n is a, c, g, or t
  misc_feature (456)..(456): n is a, c, g, or t
  misc_feature (458)..(459): n is a, c, g, or t
  misc_feature (561)..(561): n is a, c, g, or t
  misc_feature (568)..(568): n is a, c, g, or t
  misc_feature (571)..(571): n is a, c, g, or t
  misc_feature (573)..(573): n is a, c, g, or t
  misc_feature (581)..(581): n is a, c, g, or t
  misc_feature (646)..(646): n is a, c, g, or t
  misc_feature (667)..(667): n is a, c, g, or t
  misc_feature (673)..(673): n is a, c, g, or t
  misc_feature (690)..(690): n is a, c, g, or t
atgngggcatagctaaaattccctgggtggaattaatgcctggaccattgctcctccctttcagganaaaagggaaaggatgaaaaanaacagcaggnnangnnnccacctcaggnggnggngggggacctggngctgcntntngngntgggaacgtgttggnntgtnaccagttgnnnntggagcacagtgtcaagtgggccaggatgggtgtgggganacccaggtnntntggncccgtnggggtccaganggtnggggtccagggggggggnggggctggggtggnttgnttnttccacctaaggttttgggaccgntggggtcngtntgggagggtgcntgnttattttggggttggggggggggtgcttcccatctggncgtaagtncacaaacnatgtttatntgggtntggaaagatganttcccctttacacaacccccactccctgngnntgcgggtcccagcggagtggtgggagatcttggcagtgggaaccagaatggtgttgccacacagcacacaggctgaggcacattggtggagggttcagaggnacgaggngangngagggagngggatctgtgacccgccttgtgactggtgggcagattcaagtctctaccgctgctgctgagcaantgggcatctgcttcttggaanaacaanaaaggggtggggtaaanacttgaggcctgggttctaggttgggcaggaagggatggggcagaagtcagggttccatctatagtgacaaatcataggggcttgcttgggaagtaccatctttcgtggaaggtgccgggtgtataaa

SEQ ID NO: 556179 - DNA, 894 bp, Homo sapiens
  misc_feature (671)..(671): n is a, c, g, or t
  misc_feature (680)..(681): n is a, c, g, or t
  misc_feature (694)..(694): n is a, c, g, or t
  misc_feature (696)..(696): n is a, c, g, or t
  misc_feature (719)..(719): n is a, c, g, or t
  misc_feature (732)..(732): n is a, c, g, or t
  misc_feature (742)..(742): n is a, c, g, or t
  misc_feature (760)..(760): n is a, c, g, or t
  misc_feature (781)..(781): n is a, c, g, or t
  misc_feature (833)..(834): n is a, c, g, or t
  misc_feature (853)..(853): n is a, c, g, or t
  misc_feature (862)..(862): n is a, c, g, or t
  misc_feature (874)..(874): n is a, c, g, or t
  misc_feature (889)..(889): n is a, c, g, or t
gagacagaaggaggaaggacagcacagctgacagccgtactcaggaagcttctggatcctaggcttatctccacagaggagaacacacaagcagcagagaccatggggcccctctcagcccctccctgcacacagcacatcacctggaaggggctcctgctcacagcatcacttttaaacttctggaacctgcccaccactgcccaagtcacgattgaagcccagccacccaaagtttccgaggggaaggatgttcttctacttgtccacaatttgccccagaatcttgctggctacatttggtacaaagggcaaatgacatacctctaccattacattacatcatatgtagtagacggtcaaagaattatatatgggcctgcatacagtggaagagaaagagtatattccaatgcatccctgctgatccagaatgtcacccgggaggacgcaggatcctacaccttacacatcataaagcgaggtgatgggactagaggagtaactggacatttcaccttcaccttatacctggagactcccaagccctccatctccagcagcaacttaaatcccaggggaggccatggaggctgtgatcttaacctgtgatcctgcgactccagacgcaagctacctgtggtggatgaatggtcagagcctccctattntcttcactnntttgcagcttgtncnaaaaccaaacaggaccctctttnctattttggtgtnacaaaagtanacatgcaaggaccctatngaatgtgaaatacggaacccnagtgagtgcccagccgcagtgacccagtcaccctgaaatctcctcgcaagcnngcccaagccctacatcacnatcaacaanttaaaccccagngagaataaggatgtnttagc

SEQ ID NO: 556180 - DNA, 1090 bp, Homo sapiens
  misc_feature (396)..(396): n is a, c, g, or t
  misc_feature (419)..(419): n is a, c, g, or t
  misc_feature (443)..(443): n is a, c, g, or t
  misc_feature (446)..(446): n is a, c, g, or t
  misc_feature (466)..(466): n is a, c, g, or t
  misc_feature (481)..(481): n is a, c, g, or t
  misc_feature (544)..(544): n is a, c, g, or t
  misc_feature (549)..(549): n is a, c, g, or t
  misc_feature (567)..(567): n is a, c, g, or t
  misc_feature (617)..(617): n is a, c, g, or t
  misc_feature (639)..(639): n is a, c, g, or t
  misc_feature (659)..(659): n is a, c, g, or t
  misc_feature (678)..(678): n is a, c, g, or t
  misc_feature (685)..(685): n is a, c, g, or t
  misc_feature (728)..(728): n is a, c, g, or t
  misc_feature (771)..(771): n is a, c, g, or t
  misc_feature (776)..(777): n is a, c, g, or t
  misc_feature (788)..(788): n is a, c, g, or t
  misc_feature (824)..(824): n is a, c, g, or t
  misc_feature (869)..(869): n is a, c, g, or t
  misc_feature (888)..(888): n is a, c, g, or t
  misc_feature (893)..(893): n is a, c, g, or t
  misc_feature (896)..(896): n is a, c, g, or t
  misc_feature (907)..(907): n is a, c, g, or t
  misc_feature (911)..(911): n is a, c, g, or t
  misc_feature (914)..(914): n is a, c, g, or t
  misc_feature (921)..(921): n is a, c, g, or t
  misc_feature (929)..(929): n is a, c, g, or t
  misc_feature (939)..(939): n is a, c, g, or t
  misc_feature (945)..(945): n is a, c, g, or t
  misc_feature (968)..(968): n is a, c, g, or t
  misc_feature (970)..(970): n is a, c, g, or t
  misc_feature (1001)..(1001): n is a, c, g, or t
  misc_feature (1015)..(1015): n is a, c, g, or t
  misc_feature (1062)..(1062): n is a, c, g, or t
gagacagaaggaggaaggacagcacagctgacagccgtactcaggaagcttctggatcctaggcttatctccacagaggagaacacacaagcagcagagaccatggggcccctctcagcccctccctgcacacagcacatcacctggaaggggctcctgctcacagcatcacttttaaacttctggaacctgcccaccactgcccaagtcacgattgaagcccagccacccaaagtttccgaggggaaggatgttcttctacttgtccacaatttgccccagaatcttgctggctacatttggtacaaagggcaaatgacatacctctaccattacattacatcatatgtagtagacggtcaaagaattatatatgggtgtggccctgcaatacangtggacggaggaaacaagtatanttccacattgcattccctcgctgnatnccagcaatgttcaccccggnggagggacgccaggnatcccttactacctttacaccatcggtaaaagcgtagggtgtatgggggacataggagggagnaaacntgggactattttctaccnttctacctttattaccatgggagacctccccaaagcccctcccaatctcncaaggcaggcaaactataatancccccaaggggaagggacantgtgagaggctggtgaagncttaaancctggtgaatccctgtagaactccgggaacgcaaagcataccntggtgggtgggaatgaaatgggtcaagaagccctcccctattnatctnnacaagacttgncagtttgttccaaaaaaaacaaaaagagtacccctnctttttctattttgtgttgttcacaaaagttaacactgtccaggnacccctcatgtaatgttgnaaatnacngggaacccccnctgnagntgccccnaccgccanatggtacccnattcanccctgctaatctccctccccgcnanactgccccaagacccttacaatcaccaatcnaacaaactttaaanccccaggggagaaataaaggcatgtcttagcccttcaccctgtgaancctaagaggtgagaaactacagcctaca

SEQ ID NO: 556181 - DNA, 148 bp, Homo sapiens
gcaggtagcatctagtggatacttcatcctgccattcctccttcagctccgactcccctgtctcagggctgctccatgttctggtgctactgcagttctcccttagccccaacatctagtctgtatttcctgcctacttgtataagta

SEQ ID NO: 556182 - DNA, 922 bp, Homo sapiens
  misc_feature (397)..(397): n is a, c, g, or t
  misc_feature (418)..(418): n is a, c, g, or t
  misc_feature (426)..(426): n is a, c, g, or t
  misc_feature (464)..(464): n is a, c, g, or t
  misc_feature (479)..(479): n is a, c, g, or t
  misc_feature (487)..(487): n is a, c, g, or t
  misc_feature (699)..(699): n is a, c, g, or t
  misc_feature (708)..(709): n is a, c, g, or t
  misc_feature (722)..(722): n is a, c, g, or t
  misc_feature (724)..(724): n is a, c, g, or t
  misc_feature (747)..(747): n is a, c, g, or t
  misc_feature (760)..(760): n is a, c, g, or t
  misc_feature (770)..(770): n is a, c, g, or t
  misc_feature (788)..(788): n is a, c, g, or t
  misc_feature (809)..(809): n is a, c, g, or t
  misc_feature (861)..(862): n is a, c, g, or t
  misc_feature (881)..(881): n is a, c, g, or t
  misc_feature (890)..(890): n is a, c, g, or t
  misc_feature (902)..(902): n is a, c, g, or t
  misc_feature (917)..(917): n is a, c, g, or t
gagacagaaggaggaaggacagcacagctgacagccgtactcaggaagcttctggatcctaggcttatctccacagaggagaacacacaagcagcagagaccatggggcccctctcagcccctccctgcacacagcacatcacctggaaggggctcctgctcacagcatcacttttaaacttctggaacctgcccaccactgcccaagtcacgattgaagcccagccacccaaagtttccgaggggaaggatgttcttctacttgtccacaatttgccccagaatcttgctggctacatttggtacaaagggcaaatgacatacctctaccattacattacatcatatgtagtagacggtcaaagaattatatatggggggggagagaggtggaagngaagaggaggaggaggggggngggccatnccctggctgcatccgagaaatgttcacggcagggaggnatgccagggatcctnacaccttnacaacattcataaaagggtacgcgagtggggactgggagggagtaactggacatttcaccttcaccttatacctggagactcccaagccctccatctccagcagcaacttaaatcccaggggaggccatggaggctgtgatcttaacctgtgatcctgcgactccagacgcaagctacctgtggtggatgaatggtcagagcctccctattntcttcactnntttgcagcttgtncnaaaaccaaacaggaccctctttnctattttggtgtnacaaaagtanacatgcaaggaccctatngaatgtgaaatacggaacccnagtgagtgcccagccgcagtgacccagtcaccctgaaatctcctcgcaagcnngcccaagccctacatcacnatcaacaanttaaaccccagngagaataaggatgtnttagc

SEQ ID NO: 556183 - DNA, 839 bp, Homo sapiens
gagacagaaggaggaaggacagcacagctgacagccgtactcaggaagcttctggatcctaggcttatctccacagaggagaacacacaagcagcagagaccatggggcccctctcagcccctccctgtcctcacggagctcacacagtcatcggggggggaagacagacatgctaagtgatctagaatgtgagatcaggtgttgacgagactccgtctcaaaaaaaaaaaaaagaaaaagggaaaaaaagaaaaaagaagaaaggggaaagaaggctctgttggagcctggataggggaaaataccccagagggtccaattggaaagtcactttgaagcggaatgggtaagaggtaggaaaatcttaagtgtcctgtttcctgattaatcatcaggggcccccattttttgaacaattgataccaataactatttcagatgacccttcaatgaaaatttaagccggacatgaaacactgtcctcagcaagaaacctcaccattgcggggaaaaagaacctcagagggtgggccctgaagaactctcacttctacaggagtttgccgctgtcccaggtaagtgcggtgcaacccagaccacgggtgaggaggagaaactcctgcgagagaccggacggagaagccgaagtactggaatgcgtcctgccaaggatgggtcccgacacgggaagaagccgcttgggaggctattggcggaccaggaaacggagtcagacactctggccaccgggaacctgtttttaaaacaaattacccgttggtgcccgacaacaccagcggggggaaaacgccccgcgattgtcccaactcgccctgaa

SEQ ID NO: 556184 - DNA, 389 bp, Homo sapiens
  misc_feature (375)..(375): n is a, c, g, or t
tggagaaccccatctcaaagaaaaacacataattggtatttatgtaatttactatttctacttcaaaggtgccacacagccttcaggtgataaaacgaagcattgggtaagtctaagcactgagaaaaaactttctttctctccacctcccaacctccatcccaacagtggggacaggtgtttttctcgtgtgccttattgaacccttcagctacgtgtgccgagggagctcgtggtctccctttggggggaattgtggcagctcaggttgcgtggcagggaaccctcgaaggtggcttgaaaggattcatttaaaaataaacgctgtgtttcaaaggggtggtgggctgtgggccaaggggagacccatgtgangggatgtggccgca

SEQ ID NO: 556185 - DNA, 348 bp, Homo sapiens
ccaacatcatgaggtgctatctatgaaaagagcggtgccaaatggaccaaggtgcacgaactcaagggagcacaggggcaggtaacaggcatcgactagggcccccgaagagtaacctgtattgtgacctgcggcacagaccgcaacgcctacgtgtggacgctgaagggccgcacatggaagcccacgctggtcatcctgcggatcaaccgggctgcccgctgcgtgcgctgggcccccaacgagaacaagtttgctgtgggcagcggctctcgtgtgatctccatctgttatttcgagcaggagaatgactggtgggtttgcaagcacatcaagaagcccatccac

SEQ ID NO: 556186 - DNA, 1404 bp, Homo sapiens
gccgacgtgctgagtgctggcgtgcctgaggctgcacgatgatgcatgtcatagtctataattcacgtcggtgtaagtgcaaagaattgagtgatgtgctacagataatggctaccgtgtggcgacatctctgtggccaagggaacaggatgaatgtatggatgactgcagagctgtcgtgtgcgaggctaggtcacgtgtgcatcggaatagtcccatatagattgtttgcaagcttgactcgtggtgatcgttgtgagagttgatccttgtaagatgtgaagtactgactaaagtgatgactagttggacaagttgatcggagtgtgtcatgagcgtgtgaccgctagttgagaagtgggcgataggattagtgtgagagtctatcacatcagaacctatggatgactgacctccacgcagacttcgttgagaggactcatctatgaacaagagatactatgttgaggcatgtgtgcctggtgctagatgtctggaacagatctatccatctcatgatgtatgtgacggaacagggagctataacatttacaagtctcatgggtacgtagaacgttacgagctcgaattagtgaggaggcgcgtgcaatcgtgcccaatgtgaatcaccactttcacaagcacgcaaatgaacgttggttggcccttggagacaagtcgccagttcggcatggcgaacgtgccaattggaccccttgactttggtccaccacgacaggcggaacgctgatggggacgcaatctcggcccgaacggggggaaggggtatgctaacgcagatttgcgaaccgtggaacgaaattgggtgcgcgactttttgccggcggtaacctaaacagtaaacaccccgaagtggacctatatgttgggcgccaaaggcggcgcgtcacggttgcgggcagacacctccggaggaggtatccacctatagagcgctaacagcactggtttgtgcacaagcgactgaacaacccacggccggattggcagatatttccttccccttccagattggaccacccaaaatgtgcggcgcgtaccacctatggtgattttcccgtcatcggcgcgcagtgggcggcaaacctccggggaggacatagggacatccacccgttacgtatctgtgtgcgattgggcccgttcgagcccagttatacccacgaggaacggttagtacagccacttaggtaggagaagacattcaaagagggaccttcatttgcaaaataacagcttttacacactgtactactcaataataacactcctgtgacaactctgactagtacaatcagcagatagatagacatcttcggagacactatcttcgttagctcaaataaccagctgaatatatatcacatctcgcaagtagactcc

SEQ ID NO: 556187 - DNA, 328 bp, Homo sapiens
gggttaaaaggaggtggccatgtaattaatgctttataaagaatcttggccgggcacggtggttcacgcctgtaatcccagcactttgggaggccgaggcgggtggatcacgaggtcaggagatttagaccatcctggtaacgcggtgaaaccccgtctctactaaaaataccagaaaattagccgggcgtggtggcgggtgcctgtagtcccagctactcgggaggctgaggcaggagaatggcatgaacctgggagacggagcttgcagtgagctgacatcgcaccactgcactccagactgggcgacagaagcagtccagtctca

SEQ ID NO: 556188 - DNA, 361 bp, Homo sapiens
  misc_feature (9)..(10): n is a, c, g, or t
  misc_feature (299)..(299): n is a, c, g, or t
  misc_feature (353)..(353): n is a, c, g, or t
tactgtccnnctgacagtgagtgagttctcatgagatctgattgttgaaaaatgtgtggcacctccccattctctcttcctcctgctctggccatgtgaagtgctgtcttcctttgccttctgctgtgattgtaactttcctgaggcctccctagaagctgtacaggaagcatggcagcttctgcttctaggagacctcaggaggcctccagtcatggcagaaggcaaagggggagtgagccactgcacctagccaagatgtctacttttaaatatttttatatttaattttttggtancttcaaaaaatcttgataattgaaccctaagtttaaaatggatgggtttaattnggtaatta

SEQ ID NO: 556189 - DNA, 851 bp, Homo sapiens
  misc_feature (182)..(182): n is a, c, g, or t
  misc_feature (184)..(184): n is a, c, g, or t
  misc_feature (202)..(203): n is a, c, g, or t
  misc_feature (210)..(210): n is a, c, g, or t
  misc_feature (222)..(222): n is a, c, g, or t
  misc_feature (227)..(227): n is a, c, g, or t
  misc_feature (265)..(265): n is a, c, g, or t
  misc_feature (280)..(280): n is a, c, g, or t
  misc_feature (282)..(282): n is a, c, g, or t
  misc_feature (291)..(291): n is a, c, g, or t
  misc_feature (293)..(294): n is a, c, g, or t
  misc_feature (307)..(307): n is a, c, g, or t
gggggagattagacaaaaaaaaatccacaatattccaagtacaactcttcatcaagttctctgttaatgccaagatttaacagacttaagaactatgtctctgaatgacagtgtaagagaaatgtaaattttttagaactcttgctgttaatctgtttggttgttggttttttttttttttntnaagggtaaaaaaaaaatnncaccttnagttcccggggngtganccgggttaaaagggatgattttccattgaaagtttggntgattaacaattaangngggatgatntnngggcaaaactcanttatgaaagtagaagcaaatatcagtgggctttgctaccacataaagccatgcgtgttttgggtcaaactgtttacccgggaaaatttcacatcatttctgagtttaatccactttaggatattttcacttggtttgggtgaattggctgaattgaatggtttttctttctcaaatctgtgatctcttttcttaatccggttctcttggtcccttccgttggcttcttattttcctttggtcccattcttttcttactttttcccctttccctttttgggggaggcgggctagtagtgtgtgagaaaagaatagcacgctgacaattggcactaatgaactgtaacgggaaactaaacagtctttcggaaggtacgctatactagcactttgtgaccatcttcagggccacaaaatttgttgtccaagatttcacacgggtttataattctggctaaagctctagtgtggacttaagggtatcctacctattgtgggcggggaattcgccttggttaaaggttggattaaaagcaagttcctcg

SEQ ID NO: 556190 - DNA, 659 bp, Homo sapiens
  misc_feature (16)..(16): n is a, c, g, or t
  misc_feature (29)..(29): n is a, c, g, or t
tgcaggctggttacgncccccggggttantgggcatggtgtcgatgcaagagaggggtcaaatcccagccaataagcatagctgtagtaaagtaggattctacctggattggtgatacccgttcatggacttgttacggcttagctaagactagatgacatggtacccaagtgaatggcgagagcacgtaccatgcccaggagaatccaggtactggcgacactcaagccaaagcagacagtcttctactgctacaaatggggtgagacgcaaaggtaagttcacttattgagaatcactaacatttgagaaaaccaacactacatgaagagaggcataaaactcaacaaacaagaatgaacactggagcaaagaggaatacttataagagtatcacagtcagagtatcttcagagtgactcagagagagtattgctatcctagaaactacgaatgtggctgttatgaaaaataaccaaacatagaaggcagaacaagtgcatggacagcgctgaagaatacatctgtgagcgtgaaacattcagctgtgaaatcctcctagaaagccagtgtaataataacaatgaagtgaacagtatgaaacacaacatttagagttctgaaggatatatccattactcaataactccaagtatcca

SEQ ID NO: 556191 - DNA, 824 bp, Homo sapiens
ttacgggcatggccaaaggagacggtggccaggaacaggcagtctcgtgcccaatctgtggacgctccctccagcccctgcgcaaaaagacccagccggagttgagtgcgctgccccgtgaaggccccaccttacacttggctgggtggccggagccagtgctcccagtgactgctccagaaccgagggaagctcgggtccctccaatgctagccgatggtgatggctgccggagtgccccggtggccccaccactcccctgtgccatgaccacactgccctgggtgccctcctccagaagcccgagatgcggggggccgtggagacaacactcctggctccccagagatggcgtgggtcttggggctgatgggccagtggccctggatgcccaggttcctgggactagtggccttggcagccatgcagggggtggggaccactgggcacccagagaaggtcctccacacatcccagtcgccggtctcccggacatggagcccttgaagagcctcttcctcaagagccctctaggggtcatgggaatggcagtggcagcgtgggagtggtgggggcggtggaggatggccggcctgagagggtctccaagtggcagcgggttaatgccaaccaccggtgtggacagacctgttcgactacgagcccagtgggcaggatgagctgggcctgaggcacgggtgaccgtgtgcgaggtgctgtcccggggacggcagccatctcaggagacgagggctggtgggcgggctcaggctggctggccacggtggggcctctccccgttcagactatgtgtctcggggtgg

SEQ ID NO: 556192 - DNA, 200 bp, Homo sapiens
gcccacctttgctcgctgggcagttgggcagctctactggcccgagcagtggtaacggggttgatggccatcagcactttgaccctgtatgtcgccgttatcaatgtgcactcctaggcatgatgtctcagacaatgatgtaccttctatccctgcctcgctccagattttagtgaagtaaacagtcattggaaatgtga

SEQ ID NO: 556193 - DNA, 360 bp, Homo sapiens
  misc_feature (336)..(336): n is a, c, g, or t
agacactattctcagagatgcccggcctggaccatctggctgttgttctgtgatggccgcggggaggggcttcggcttcttctgcgtgacactgaccgcttcttcagacacgttggagggacccttggccagttttaccaagaggtgctctggggatctccagcagcatcagatgaccgcagacgcacgctgagggttcaaggcaatgaccactctgtcaccagagagcgcaagctggattaccaagaagggcccccgggagtggagaattcctgctggtctgtggagccgtaattctgatggaaggagctgtgcccaccctgtacacttgggttncccctggctggggggcgcttttgg

SEQ ID NO: 556194 - DNA, 108 bp, Homo sapiens
  misc_feature (2)..(2): n is a, c, g, or t
antgaaggatgagagaagatggaactgcaggagatgcagctgaagaaggccaagcacatcgctgaggattcagaccgcaaatataagaggtggccaggaagctggtga

SEQ ID NO: 556195 - DNA, 397 bp, Homo sapiens
tagagttaaattatagtgttaatattatagtagcagagaatctaggggaattcatttaacattcttcattaatattctttactcaatctcaaatagcaaattttctccaacaaatttttcttgtatttcattttttgcatattttggaggtataatttatgtaccataaaattcaccaattttgaaataaaaattcaataatttgtgcagtcattaccataatcacattttataacatgtttatcacctccccaaaaaatgctgtacatattggcagtcacttgacattctcccctacctacacccttggcaaccactgatctatttgtatctctatggatttacctggtttatatatttcatataaatggaattaaacagtgtgtggtcttttgtg

SEQ ID NO: 556196 - DNA, 728 bp, Homo sapiens
aagaggaaaccaggcgctactgtggcagggagagaaaacaagcgctataatactaaggtcaagagaagtatcagcctcacctggataatattagtaatgaggacaagcctcaactccctctttctggagagaagcatccgaaggaatgcttgacgtacccctgtgcttctcttaacatttaagcaagctgtttaaatagcagctcttaataataaagcccaaatctcaagcggtgctttaaggggagggaaagggggaaagcgggcaaccacttttccctagcttatccagaagcctgttaaaagcaaggtctccccacaagcaaattctctgcaaaataggcaccccgtgccttttgatctagcaaagacccttaacccctcacctcaatgcagccagtaagttggatccttgtgtgcatgatccaatatcggttacaaggtaaagaaggtgtcgaggtctttggtagagtagaattatataagaaaaggctttaatttgcctaaactagttcacaaaaggtataaaccacagctaagtagcctataatatacttatccgtgacaaaaccacttaaccatacgtggaatacctgtcagactggatgcggtgaacttaatgtaatggaagtagcttgatgcgaagctttgtagatgaaatctttacatttctataaactgcgttttaggatcccgctaagagaggcacataatattcacaaacaaata

SEQ ID NO: 556197 - DNA, 450 bp, Homo sapiens
atatactagtggttgacaagttatttctgttagccaaaatggagattattgtagaaaataattagtggtactttctggatgaagacattccttcttaacgtaattatgccccatttcctgggtggagtcacagtctttcttctaaagacagattacttcaagctttagtagggactcttagttctgtcttgaactaacaataccttaaaatattctgcttcttcatgtgccccaaatattgatcagaaggatacttgtggtcaaatggatgctgtagaaattcaaaccagtgattttactccacttgaaatttaaaggattcatatgagttctagttgagtatgtcagttttagaacatagttcatattgagtaaacacagaatattttacctacaagggtcacacagatgtcattacagtgaatatacttctgattaaactaatcttgt

SEQ ID NO: 556198 - DNA, 113 bp, Homo sapiens
ccccaaaaaatgggaattttttttttccccttttccccccggatggggaaaaggccccctttggtaaaaaacccaaaaaaaaattggaaaaataaacccctgaccctttggca

SEQ ID NO: 556199 - DNA, 368 bp, Homo sapiens
caacgaagtgaaatatagatatatttttttcaccatttttagaaaaggaaaacacgtcaacttgggtaggatgtaagtctaagagagttcgtgattattttatgaataaaccaactccttctaaattccgttcaagcccgggaaggtttccgtgacactctgaggggggggtgaggggcaataacgatgtacagaaatatgagctcatacagtgtcatcttgaccaccttattcgtttgtgaaaaaacgatcaaatatttcaaccttaatcttttcgtacggtgtaaagtcggactaacgtttcatacaccagtaaaaaaagaaacttcaacctacccgatgttggaaatatgtaagattcttttgag

SEQ ID NO: 556200 - DNA, 611 bp, Homo sapiens
taaaggagggagaaaaaatggcacacaaagcagggaatagtaggctagactcatgggggggtaattaccctagaaactcctaactttccaggctagtggaggaaactaaggaaggcctcccaatattccaaccctcaaagctcacactggcgccccagaaaaacaaaacactcacccccaatccgaatggaatcatctggcatagaaaaccagagccagcaggcctagggaaggagcggatgtttggtggccctcctctaagcacatactagttcagtgggtatgttctggccaggcagtggtgggggccttcaagagggcctcacataaggggaaaataaaactcacgtggaggggtgtcctcctttcccaacattcttcggtgtaaaattttcaacaaattttggtggtggtgggcaaaaggtctcaaactttataccattcagcaccacttcttaagctcagaaaagcagaaataagggtcacttataatggccttagggtgtggtccccgggggtattcccccccttctggcgccatcattatttttggggtgtcctattaacttaggatggctctcctttaaaacaataataacagaaagataaac

SEQ ID NO: 556201 - DNA, 437 bp, Homo sapiens
aatgttaaaggattataattaatggaattaaaaaatgcagggtagtccttaaaaaaaaaaaaaaaaaaaaaaaaaaaaaaaaaaaaaaaaaaaaaaaaaaaaaaaaaaaaaaaaaaaaaaaaaaaaaaaaaaaaaaaaaaaaaaatgggggcccgtttggcccaagcaaatttaaaattgggcaagtttaagcatggggccggaattgggggtaaattggccaattccccctaaaggggggcgtattaaaattcaatgggcggggttttaaaaaggcgggaatggaaaaaccctggggttacccaatttaaatgccttggaaaaaaatccccttttcccaagtgggggaaatgcaaaaaggcccgaaccaaagggcttttccaaaaagtggccaacctaaaagggaaagggaaattggaaggggaaaaattttggta

SEQ ID NO: 556202 - DNA, 97 bp, Homo sapiens
gcgcaccagttacattgatgaagctgaggcggcagattacttatggccaggagttcgagaccagtctcgtcaacatggcgaaaccctgtctctacag

SEQ ID NO: 556203 - DNA, 502 bp, Homo sapiens
  misc_feature (262)..(262): n is a, c, g, or t
agtatgttcctgagacacagagtaacgttgcactgaaaagtagcatgctctgcggcctttagaatagtctaattatagttggggagctacaccattacgcatctccactgctttctccatcttgtcatgccatataagcggtacgattctcaattatctacgcaggacggacagagatacttttaaggaaagggacataatatgcaactcaatttctctaaaagccaggagaaatcatttttagtcagaacaaacacacttngtctttcatctttttttttttttggggcaattaaggagtaaaacgggctatttaaaacatccatttaatggcaatttgggatttcccaggagaacagggtcactcatttaattagacgggataatggcccacctttaccatttccctcctctcccaggttttaaaaaagtgtagctttagcccacacaagtcaggtcagccgggagtcctcacatctaaaagactcccactcagatgaaa

SEQ ID NO: 556204 - DNA, 410 bp, Homo sapiens
atacagttgcccgccaccatgcctctctaatttcgtatattagtggagatgaggttatcaccatgttggccaggctggcctcgaaccccatgaactcaggtgatctgcccgccttggcctcccaaagtgctaggattacaggtgtgagccactgtgcccggctttttatttcttataatcgaggttagtgactctgaaatctagctcagctttttgcagcatgcatttcagcacatgcatcatttatcattcacaactactccagcaaaccacattcaggctctggcacccaaattgtctgcagttccaagtccttgcatgtgctcactttcagctgtgtgcaccttgcagccaaatttctcaacgccatttaggtcacccttccatccatgggcacagccataatcatc

SEQ ID NO: 556205 - DNA, 443 bp, Homo sapiens
  misc_feature (105)..(105): n is a, c, g, or t
cagtccttcacgtatcgcagtgagagaaaactgatcagcatcttccggagacacctgatacccatcctctttaaggaatacctaggataggataaagtaatcctnctcacccccccccccttaaaagatatagatgcactattgtaaagtggctgtaccactggatgtcataaggtgaatgtaccaatttgtaagtcgctctggataagagcgtctgctaaatgacttaaatgtaatgtaatgtaatgtaatgtgtcctggagggcaggtagtttgcccccggtgatgcgttgtgcagacctcactaccctctggagagccttacggttgagtgcggagcagttgtcgtaccaggcggtgatacagcccgccaggatgctctcgattgtgcatctgtagaagtttgtgagtgcctttggtgacatgccgaatttcttcagcct

SEQ ID NO: 556206 - DNA, 416 bp, Homo sapiens
  misc_feature (17)..(17): n is a, c, g, or t
  misc_feature (37)..(37): n is a, c, g, or t
  misc_feature (55)..(55): n is a, c, g, or t
  misc_feature (224)..(224): n is a, c, g, or t
attggaaccacaacccngtttttggttttgaaaaaanccgtccttaagaaagaanccctgttaccctaagccatccccattgaagtccaaagcttgccagcccagtagagatgacttgtattgccaaatacagtaaactttagttttgtcattaaaaagatggatttgggcctcaggacagttgaggtttgaataatgagtcctgcccagttagtagttcctcnctggttacatgaacccatttcctcatctgttaagtggggataaaaataactacacttaaggattttaaaggattaaaggggataatgtatataaaatatctgacattcagtgtggtggttaatgatttatatgtactaactactcttgattactgtggggaaaactgaagaaataaaaatcaaagagcctga

SEQ ID NO: 556207 - DNA, 604 bp, Homo sapiens
tcctgaggttcgactctaaggatcccccctgaagggtgctgacagactgacgctggctccttttctgtagtcacacacctaattgctagtctagtagatcaacatgcatcacatttttaggcaggacctagattttaccctgtcaagctaaagatgaaattaatttcagtgttgattcagaactgaacattaagtaggccctcgtccttgcagttggccacttgagtgtcgatgttttgtatagattttttaaggtgggcatttccctttaacctctactttttcaaaagcaacaaaggggcctcaacctgagttacctatgggcctctcttctgcatccccaaagcggccaagagcaaaatcctgggggataagacaacaagtgtaaacttaggtaggattgtgatgctcaaaataaccatctagcaatatcttggcgcttgagaatagctttggtgggctaatttcttcttgcctcttccccatcctttcaagagagaacttattttagaaaagtatctatttatacacacaccacacagacagcacacatattattatgtaggtttttataccatactgtattggcgagaatacactatca

SEQ ID NO: 556208 - DNA, 213 bp, Homo sapiens
tctagaggatcccggcgcgtggtgggcatgggcagaaggactctacgtgggcgacgaggccagagcaagcgtggcatcccgaccctgaagtaccccattgagcatggcatcgtcaccaactgggacgacatggacgaagatctggcaccaggagcacacgaagagccacgcgaagagccacacgatgagccacaccaagagccacacgaagag

SEQ ID NO: 556209 - DNA, 722 bp, Homo sapiens
  misc_feature (488)..(488): n is a, c, g, or t
  misc_feature (596)..(596): n is a, c, g, or t
cttggtttcccaggtgaatggctctccccaggatatattggaacctgttccccaagtcctgcattaccatgggccctcgggccggcgggtttggcctcctggggtcttaggggccaaaacaaagcccaagccaagttgaccttgggtgggaagggcctataggaggataaccagctcgctggggcttcaaggacaccagggcccccccaagtcccaagtgtcctactcctggcaaggagttgggtttggaccaaaagtgtttaaaattaatatgttggcagtgattagaacacccctgtttacataaaaaccatttttctaattctaacaagttagaatgtgaggaaggaatgaacatgagtgtttaggaacctgccctttggtgctgggctggcgtcccgcactggggtgtcctccctgtttgggggctgctttgctgccccggcccaggtccccttgtggtgttgccaaacgggcctcatggtttnctgtgcaaagaaaggcaggaaggatccctgaaaagttttggaaaaaaggttttgtgccctcaggtggggcttaccccctggtatttataattttaatttaaaaagtgncccccgtggaaacaaacgccttttgtattgtcatgtacatagtccaaacctgagtgctggacataagttgttttgtgtataaataaaacaagcctgtttttgattttcccaaaaaaattctgcgta

SEQ ID NO: 556210 - DNA, 271 bp, Homo sapiens
tcgggggggggttttttttaacaaagcttttttttttaaccctccgattcccttggaaccccctccccccttttttttccccccttaaaaaccccgggggcggttccccccccgggtttttaccttgggcccggggggggtttccttttttccccgggaaccccttttgccctttggccttttttggttgcccttttaaaccagttttttccaaaaaaccgggtgggtccggttcgggatttcccgggttttttttccccccgggtcccca

SEQ ID NO: 556211 - DNA, 242 bp, Homo sapiens
atgcaggccgcgtgagccaacaggcactatccgaggcgctatggccacatcagaggggccagtatacattgagagacagcatcttgctctgcgctagtaactacgcgcaaccactgactcctgctcacaaagaagcccctgcctcagccttctgagtagctacgactgcaggcacatgccaccagacctgactgatgattatggtgccatgcgcagagaccagagcaccgctgtgacgacca

SEQ ID NO: 556212 - DNA, 390 bp, Homo sapiens
aaaattaaccccctaataaaattaattaaccactcattcatcgacctccccaccccattcaacatttcccgcatgatgaaacttcggttcattccttggcggctggctgatcctccaaatcatcacaggaatattctagccatgcattattcaacagagggtctcaaccgtcttttcatacaattggcccacatacacttggggaagtaaattatgggctgtttcatacctctaaatttcagggcaatggggggctcactattctatatctcgtctctttcaacacatagggggggggtctatattggggctcatatctctactcagaaatctcacacatgggcattatactcctgctcgcactagggcaacagtcttaggggctatttc

SEQ ID NO: 556213 - DNA, 782 bp, Homo sapiens
agcggggcaatcgcaggcacatcggtccctcaagctaacaaggcctggcagtttcctcctcacgtcaacgagtggcaggcaacacgactgacctttggcaggcagaatcaagtcgtaagccttttgatctgtctactttgggttctctaataaatggagatgaaacagttctactagaagagtggtttacagagtctctcagttcttgctagtgtaaaccggcgtattagatctggcttgagtctctgtgtgtcttgcttggagtataaagggaaaaaagtgtttgaacgaatgaatagcttgagccttgtgaagaaatcaaaagagagtgagagcaaagctctgaagtaaagctgattctgtggtggacgcactagagtgccaggcagatgagacatgggtacggctgaaggccgatggacagctcgagagaacgcgccatctgggaagtgcctttggaagtcaagaaaatttgacggtggaggacaacgatatgactcactggtcgtcaacatacagcacgtacgaagcgtgtgacaacatcaaggagcacgagattgatacacgaagcactgtattgatggcaacgctggctactagatagcataatccctaatcgatttatagatacgttagagattgttgttcagaccgttgctgtgatacggacatcctagagacgaagcatgctttggttggaggtggtgaaaagtggtacctagacaggatggcctgtgaccaaagtgcagttatctacaagactgtttgctacacaggagagc

SEQ ID NO: 556214 - DNA, 505 bp, Homo sapiens
agagatagccccaaatggatggtgctaaactattcatgagaatccgcccccatgatccactctctttccaccagaccccacctcagcattagggattacaatttgtaggaataatgcttacaattttaagaaattgaacacttgaacaaaggatatttagcaaagcaattttatttttgcgcagagaggtgcctttttggccagtcgccatgagagcacacttgaacaaaggagtacgagagcctttatttttgacgcaagtcttgcccctgtatcctttttttattggctggggtcaggtgtataaaccaattttagttggctaaacatttgaatttttttagataaggtgggcacatagaagaaagaggaaaggggaaagggtgtctgtagtgagtcagaaagttgttttttttttttttttaaataaggaaaggaatgtgagttggtactgataatggctggtattgtggcatgcctgcgcatttaacaaaggcagaaagga

SEQ ID NO: 556215 - DNA, 413 bp, Homo sapiens
acgccgggccatgcatcatatactctagaaatcgcttcaacgctataatccgccgcttactattaagcgtcgatggcgtacggtacacatggcatgaccgaggtaatcgtcccagcagttatagcgttacagatctgggagagcctaacctctactgcctactgctcattgagctagcagcgatgcttaatcagcgagcgcttaggagaattgggacgacacgagggaagactgtgcatctgacgggtgacgcaccagatatgatggcctgccctgactttccaccagtcgagatgtgatatcccgagactatgcccatacagatgagagcctctgtggacctgactgtcaagacggtaacatgtgctatataacacgcggtttcacaacagccgtgcatgctggtaccagtc

SEQ ID NO: 556216 - DNA, 912 bp, Homo sapiens
  misc_feature (229)..(229): n is a, c, g, or t
cgcatacacttcaaatacacgggttttgtatgtttctgttcaacagagtgcccgatggtgggcgccaccaaaaataggagttacgtcaacagttggttacagtttcaagtgtggaacgagatgaacagacactgtaatggttcctgggataacaagaaagagacctgtgaataacaatgtgaaaaactgtcgaagtcctgcaggaaccgctctgcttgccactttaagnggaatactttctcccccattgccaacacctgatatgtgatggggccctacacctgggagacgaatataataatatggggggctggacgcaacagggtatgtgtagaaaaaaaaaggaagggcggctatttgaaataggcagcgttggcgagtattgagaccacctgttagtggtccccttctaaggggaacatactgctcccgagactatttgatacttggcgtcttgtgcggcagaactttcttttgttaaaagatgatccaataatggatttttgagctgttatgacacgaccggagtctcctaaacgctgtgggttttggacaaaactcggctgtgttgaccagtttccgcggggctccaaaattttggtacactcttccccaaatagttttggggtaaaaaaagttttcatctcccccccacttaattttctaaaaggattgtgtaaaatttgtcccttctcccagcgttttaaaacccactgtctttgtaaaactctgtgataaaaatataacccctatgcccctgtaaatatcgggcccaacattatggtgaaccacttttttttcttatattaaaacacacgaaggcccaccatatttttggagatccttttaaattttttttttgaaacaaagtttccaagccaagaaataaaaatccatgtgtttttaaaaaaa

SEQ ID NO: 556217 - DNA, 746 bp, Homo sapiens
gtggtgggacctgtctctactgagggtacaaaggtgggctgggcgtggtggtgcatgcctgtggtcccggctatcgggtggctgaggcaggagaatcacttgaaatggggggtggaggttgcggtgtggcccgagtgcctgtgcacacctgcactcccagccctgggctgtgaccgggatggttgcagcacctcccgtcctccacgcacaccacgggcacccacacgcaaacagcgaacacacggccccaccttaacatttacaccaacctggttgcacttgtgcaggcgctggccaaagacgggaaaaccagcccaactttaaaggaacattttcccacgaaacattccacggcttggggggttgccggcgttgggggcttccaacgaaccccttggttaaaattaccgccaagggacaactttttctggtgcggcacgggccctttgcattgtggccagcaggctcggtggatttcccaagccaaaaaggtggttcccagcgccgacggtttctccccgaaacgagaaccttaaaggaccccttgtggtgttccaaaaaaccctaatttggtgtcggacacaacacccgctcgtttgggtttcccttacgcgcagacgcttgtggacacgaggggacatttaacgcgaaaagagcagaagaaacggtgacacttcccagcgcgaccgttttcccccaccttgaaaggttttggggggctttgggggggagaaatttcttgggca

SEQ ID NO: 556218 - DNA, 103 bp, Homo sapiens
ttgatagcttctacagttaggttgtcttctcttttcggtttcctactggttgatgtgcttgtcttctctaatgtagacttgagtcttgcaaatgcatcagctg

SEQ ID NO: 556219 - DNA, 342 bp, Homo sapiens
  misc_feature (71)..(71): n is a, c, g, or t
  misc_feature (78)..(78): n is a, c, g, or t
  misc_feature (183)..(183): n is a, c, g, or t
  misc_feature (259)..(259): n is a, c, g, or t
  misc_feature (261)..(261): n is a, c, g, or t
  misc_feature (331)..(331): n is a, c, g, or t
tgaccaaagccgtggcgcacgtggacgaaatgcccaacgcgctgtccgccctgagcgacctgcacgcgcanaagcttngggtggacccggtcaacttcaagctcctaagccactgcctgctggtgaccctggccgcccacctccccgccgagttccacccctgcggtgcacgcctccctgganaagttcctggcttctgtgagcaccgtgctgacctccaaataccgttaagctggagcctcggtggccatgcttcctntnccttgggcctccccccagcccctcctccccttcctgcacccgtacccccgtggtctttgaataaaaaaangagtgggcggc

SEQ ID NO: 556220 - DNA, 886 bp, Homo sapiens
gatgtcggctgcgtggccagtgcgcaaaccatattacggtcggtattggtgcgcctcggttcggttatcctccggcaaccatgtgctgacaagacgcgatatggtgtgagcatcagagaaatctcgataagtcgagaaactgcagaggaccgagacgcaagagaaaaatcgcactgccttccaacagaaacgattgaccaggagaagcaagcaggcgaatcgtaggtgaggcgtgcgcggtcacatatgcactgtacattccacaagcattgccttcttatgtttacttctttaagctgtgctaactgttgtaagatgcagagaggttggctcaagtttaactgactgtgtctgcccctttcatgatcatacagaactactgacaagagaaggccgggcttgacttgcccatctgtctatctatctggcatggcagggaccggaatgacacttgcatgttggtgaaggaagagaggtggggggtggaagagaggtcggggggtgttgccgacagtggacactctactaggtgagataggcacacgctggtcccaaggtgtccttgcagggcttgtaattgaccgttctaatgcagagttgcgcattgcacaggcttctggctcacactgatgtgacttagtggtaagtgccccaagttagtatacgtgcggccctatgaggtttgtaacctactgattatcattcgaaggaaccacttctttcgggtgaacaaacccagtaggacactggtgttaaaccacaggtttggggacgggcgccgatgtcttgggtcacaagtttacaacgaggttttagcaccatctgtgatgagaaccgtgtgctacaaaacaaaggctggggagcgtgaacaaccaccggtcggatg

SEQ ID NO: 556221 - DNA, 775 bp, Homo sapiens
  misc_feature (38)..(38): n is a, c, g, or t
  misc_feature (73)..(73): n is a, c, g, or t
  misc_feature (112)..(112): n is a, c, g, or t
  misc_feature (172)..(172): n is a, c, g, or t
  misc_feature (202)..(202): n is a, c, g, or t
  misc_feature (231)..(231): n is a, c, g, or t
  misc_feature (300)..(300): n is a, c, g, or t
  misc_feature (317)..(317): n is a, c, g, or t
  misc_feature (383)..(383): n is a, c, g, or t
  misc_feature (399)..(400): n is a, c, g, or t
  misc_feature (424)..(424): n is a, c, g, or t
  misc_feature (462)..(462): n is a, c, g, or t
  misc_feature (539)..(539): n is a, c, g, or t
  misc_feature (561)..(561): n is a, c, g, or t
  misc_feature (627)..(627): n is a, c, g, or t
  misc_feature (640)..(640): n is a, c, g, or t
  misc_feature (646)..(646): n is a, c, g, or t
  misc_feature (672)..(672): n is a, c, g, or t
  misc_feature (747)..(747): n is a, c, g, or t
tttctcctttttaatgtggtagatgtatcccccgtgtnactctgtggtcttgtgtctctctttcgtccttttnctggtatccgtgccttcttgggcccgctgctcttggctnatcactaggcgctaggtctgggtccagctccagccctctggcaaagtcagcatgggcctnctgggcattccacaaggccgcgtgggcctngcccgcttgaagtaggccttgacgttgtngtggtacttgtggaggatggaagagcagtggtccagcacctggtagtacttctcgaccaccagcttgcnctggcagttgttgagcngcagcggcgtgacctgcttgtgcagctggatccatttaggggacccaggctgttccttcatctgcnggttcttgaggcaggnnatggcatcgtagttcttggcagcngcctccttcacatgcgcctcgcggtagaaccggttgcnctcctggtggataagtggcactgcctttgccttctcttcgtctgttatggcccatgggtgctgctggtacgttccangactcttcaccttcagcatctncatgttgaagaagaggggctgggggttcttctgcagggcgttcaggttagcatggcccagggagcngttttcacgcatnttttcnacaacgcagcagttccgctggccctncagggggttcttgcccaccgcgatgttgcggagacttttggccaccagcgggtacaggaccacatgctttaagtnacaaaggaactgggcaatctccccttct

SEQ ID NO: 556222 - DNA, 595 bp, Homo sapiens
  misc_feature (448)..(448): n is a, c, g, or t
caggatatctttccatttatttgtgtcttcttcaatttttacatcagtgttttatagtttccagtttgcaggtaatttactttccttagttaaatttatttctaagtgttttattttttcactattataaatggaattgttttcttgattacttttttagatagttcattgttagtgtatagaaacactattaatttttgtatgttggttttgtgtcctgcaaagttactgaatttgtttattagttctgtttgcagatgacaggatcttatatgtagaaaaattctaaagattccattaaaaaataattgtacactgccaaaaggtgttattgttgttgttgttgttgtttttaagacaggcttttactctgtctcaaaaaaagaagagagaaaatgggcaagagatttgaacagacacttcaccaaagaagatatacagatggcanataagctcatgagaagaggctcaacatcatttgttattaggtaaattcaaataaaccaccatgagataccacacacaccactagaatgactaacatttaaaattactatttaagcccggtgcggtggctcacacccaagcctgaagt

SEQ ID NO: 556223 - DNA, 429 bp, Homo sapiens
gtgatggcttctctgactggatgactgagcgagttgatttcacagctctcctccctctggagcctcccttacccccacggaaacgcatcagatagttcagaaagcaagctgaactgggaacgggtaaagtgtgcatcgcacgcctcatcagagcaagggaacccagcgaatcgggacaggcaccgaccgctcacacacgcaaaagtgcgcggcgaccgaccgttgaagaataaagaggacgccccccacccaagcgcgcactacgatgatgaactagccgcgaaaagcacaccagaaacggacacaccacaaaccaaccaaaaagaacgccaagcaacaaaggggcgaaacacaacacaaagacacagctcagcacaacagcggaggaggcacctcggacactaccgacgaaccaagcaacgacccccg

SEQ ID NO: 556224 - DNA, 911 bp, Homo sapiens
cggtgcgcgccaggacacaagcctatggcgtggcaaacgcgaatgaccctcacaacgggcgtccatgggaagcttgcggcccaaaaccccagtgggacctgtaacgcgccctgggctctccaagggggcgttcgaccgctgtaaccaaaggatccgggacgctacacgggaccgttctcctgtcgccgcctttggggggctccaaccaacgagggagatgccaactccgaacgcgctcggttctccaacgacagcgataattgtcggcgcgtcttcaagggggcaacggctccatcgatccaaacccaacgaggggctttttcgggccaaaccgtgcgacggctgggacagcctggcaaagggcctgatcaacgacatggccgctctcaagcctggggaatcgaaagccaagggcatcttggcaaaagaatcgcccgaacagccgctgtaccacgtgctgcacaggtattgcgcgcaaggagccagcagtcctgcctcggctggggcaccaggggttgcctagacaggccctgaggccacacagatggctgcccgtacggcactggcccatgggagccaaccggaactcatgaattagcctggtccgactcacacatgtactggaaacaacgggcacagggatgtaagatcgcagcaatgccatcagtgtctcaaagagagctctcagaggcctttgcatcaactgcgcagaagttagggccagagaagaggccagggaggccagtagagggccagggagtgagtgtttagaagaagctggggcccttagcctgccttatgattgggaagatgggcttcaatgagatggcaaaggagaggacaccgaccagtggtccaaaaaggctgctctcttccacatgatacagcatcgggtggggcagcagggacgg

SEQ ID NO: 556225 - DNA, 239 bp, Homo sapiens
aacgagggaaaccttctcctctggggctttgttgccaggaatgatcataaccaaatttatttttttcatttctgtcacgaaatcattccagatacctcttttcttctttccaaagggttttcacatagtgtttgaaagtaattgtcccttgaattgtcggtttttccatgtccacctttctcctttgtgcccagcctgagtcagcaccatcccgcattcacaacatcccagtgaaaggg

SEQ ID NO: 556226 - DNA, 1154 bp, Homo sapiens
tacactgtgaaggtggaggtgatcagccggcacttgtcccgtccttggggcttaggaaccggggcaatgggcgtaccgcagcgcgtgttgagctctctgctcagacagacgtatccaggagtcagctcgtcggtccgagcgcttcgctgctgcatctcctaccgctgaaggacgaagactgcgggtagccgctagtgagctacatgggagtaactattgaggcaatgtcttcaccgaagatttgtagatgacggggaaatgcgcactgttcggttcacaagcgagcctccctgtggatatctagtctaagtaagatggcagtctcgattctgtcaacccagagttggacgtgcaggttggaacgagcttgagttcactggcaagccacaggaccagtttccaggcagatttacaaggtttccgtttcagctatgagacctggcatcagtagaggcatgtaagtgttgatagcaccaggtgttcaacgcgtacacatgcagtgagagacgttcagaaattgtgagaaagtttaaaaggtaagaatggttatcagatccaaaaaagactatccgtctaagtaagaatttccagtgttccgtggaacatcttcagacttcttactgtgggcttgtgcgaagtggatatgcgtatgacttgggttaaaaagcttaggaaattagacttgagtcacaacatattaaaaagcttcagttacaattgggagaactcaatacacctttcaggaattcactctggaggcattcactgcgggcacttagtgtgtaacctttgtcgactcccactcccgaagtactttcggagtttgggaccctgggaaaacaatcaagggctccgttgcgttggcaccccagggatatacaaatttaactgtcgcaaagtgaagggatcacgaccgtgcggccagaggggcccacttaacaccccgcctgtggacgcggtgacaaaagagccctaggcccgtatcacacaaacacacgaaaaaaggagctcgagaaaatctgaccagcaatcccctaagaggcacaccactgccgtgacccccaacaaacgggcgctacccaccagcgggcgaggtacggccacctcacacaaccgaccgcgcggcaccatgataaaattgatctttctaccgg

SEQ ID NO: 556227 - DNA, 830 bp, Homo sapiens
gggcaacccactcgggtccccttccacactgtggaaagctttgttctttcgctctttgcaataaatcttgctactgctcactctttgggtccacactgcttttatgagctgtaacactcactgcaaaaatctgcagcttcggttcctgaagccagccataccagagcccaccggggaggaacgaacaaaatccagacgcgccaccttaagagctgtaacactcaccgcgagggtcccgggtttcattcttgaagtcagtgagaccaagaacccaccaatttccgggacaccacccagcaacttggggaggctggggtgagtggatcactttgaggccaggagttcaagaacaaggcctggcaaacatggggaaaacccggtctctactaaaaaatataacaattaacttggttgctgtagtcccagctactttggggggctgagacaggagacttcatttgatcctgggaggtgaaggttagagtgagctgaagtctcgtcactgactcaaggtgggggaaatagcggagagtgtctcaaaaaaacaaaaagattacaaaataaaagcaacaaaattcttactaggtacatttcaaaatgattccagagtatacattatcgtctaaatacaaagaaaaacaagttgtttaaagtaatctaattagaagtactggctgggggaaattctatggtagcatggtttaccggggtaaaataatccttggcgttataactggtgtttctgaagtttgggagaatctaggtatgttggaatagcgtccataggtaaatttggcgtcgaccctgttgtgtactagttttcccagggg

SEQ ID NO: 556228 - DNA, 833 bp, Homo sapiens
  misc_feature (27)..(28): n is a, c, g, or t
acttaggctaagtacgaggctgggtgnngcgacagcaccgctgccgccgtctctaaggtcgcccgggtccaccgccgccaccatgcctcggggaagccgcagcgcggcctcccggccagccagccgcccagccgcggccactcgtgttcatcgcggcatgtccatgcttctggggatcgtgacgaggaccgatgttcctgtggtctagtctgcttcattgcgcaggcacatcgaagtgtaactacttgcaaggattcagtcgagagatgagttctcaaccgaagtggtagggcaatgtcggtcaaaactagtccatgggtcaactgtcgtagccatggagagccttccatacaggcgtaccagtctcgtcatggcgctttctagttctcgcatcgcgcgaatggatgctggcctctggcaaagggcgtgagaccaacgttcgtgtccggcgaatttggcccgagggcagacagcgccgagggcatacgaggcggtctcgctgaacgcatgcaaagaacgcagacgtggacggccggacgcctctccttccaaggaacagtcaaggagagccagactgaacggatgagttgagggtaaaaaggcccaagaccgccattgaaaaagctgcacattgggcccgtggtacggagagaaaacgctgaacgcgagagcccgtgtttgggactctttcaatgacccatggggtttcttggacacggcacgggagcacccccaatcttcttgtgacgtttccctgggcagacatcaacctttcgctaggaatgaagagaaagtgacagactttattcaacagaaagaatggggtagaacca

SEQ ID NO: 556229 - DNA, 974 bp, Homo sapiens
ggttttgggggagcactctggcgacagagaaccctgggggcctccgggggcccccccccctttgatttgttcccaccccgcggtgagatcatgatggtgtccccctgggtttttcctcaggggggccgcctctactttaggtgacccctccgcggcggtgtgaggatagaaatgctcccccttcccttcatgaaattttttgcccaccggcggtctttgaagaccaacgagaagcctcctcgcggggggaaatcaaaaaccgaggttagtgaatggcccacaagagtgtctgtcgcccccctcaagcgggagccgagttagttgatgttgaggacatttctccccgaggatgggtccttcaggggagatcgtagtcacccgctcgtggtaggatgggttataacatcggagaggggcgccccaaaagattctcttcccccggggagcccacaccatattctcgccccccttgtgggcggtcccccccggagggcgggaagctttggcggcggctacccctgcggttgctttgttatggtcccccatccaccccccccttttttcgttggatccacgagttcaacggagagtcctggtttttgtcgtctatctgagctggcttttgcgacaaaaaagatctcaagggcgacaacaacatatgggccgagaaaaatcgtgctcgcaatcagtaggggaccccccgaatatgtgttattctggtgagcaaaatagattcgcgtgcacacagagggggcaacaagcgttgatcccccgcctgcgcttaacctagctttttttttgggagcacagctttctccccactggtggataatggccccctctgtgtgggtgtgtgtgggtgtgtggtgtgggtgggtaagttcaagcgacccttgggccgtcaggctttttgggcaagtacttaaaaaggggaaattataatcaattagcccttttgcggcccctaggcctta

SEQ ID NO: 556230 - DNA, 376 bp, Homo sapiens
  misc_feature (27)..(28): n is a, c, g, or t
acttaggctaagtacgaggctgggtgnngcgacagcaccgctgccgccgtctctaaggtcgcccgggtccaccgccgccaccatgcctcggggaagccgcagcgcggcctcccggccagccagccgcccagccgcgccctctgcccaccgccgcccgcacctcggcagccgccccaaaaccccgacccctatcgggccaacacagaggcctcatggctcagaatgggcgaaccaacaggcccagcagaggcgtagcacgatgggactcgcgctgtggagaaccacgatcatggagcagacaacaccatgaaccggcagaccctatcagaccggcggggcagcctcgagaagacccctcccaagccatggcaagtac

SEQ ID NO: 556231 - DNA, 192 bp, Homo sapiens
ggggttttttccccccccccctttggggggcgcgggtttttttttttaagggggcccttttttccccccgggaaaaggtgggttgggggggggtttccccccccttttttttaccgggggtttttcccctttgggcccgggggggggggggtttttttttttttccccccaaactttggggggtttttccca

SEQ ID NO: 556232 - DNA, 821 bp, Homo sapiens
ggcggctgactttgtcttctccgaacgactgtctacagaggtctccagacgccttctctctcctgtgcaaaaggggcaactcttaatggagaaaactcaagttgcaccagattgcggaacaagaggcaacagtcttccaaatcaagaagatcatctgtagtgggtgtcggacaagttggtatggcgtgtgctatcagtcatgctgggaaagtctcttggctgattgaatcttgctcttgtggatgtgtggaaagataatgcttaaaggagaaatgatggatctgcagcgatgggagctttatttcttcagacacctaaatattgtggtcagatataacgcaattgattctgtgaccgtccaattctaagatggtatgtggtgaactgcaggatggcttccgtgctagcaagaaggggagagtcggctcaatctggtgcagagaaatgtcacatgtcttcagatccatgattcctcagatcgtcaagtacagtcctgattgcatcatagttgtggttaccaacccagtggacattcttacgtatgttacctggatactaagtggattagccaaaacagcgcgtgatcgcaagtggatgtaagtctggattctgctagatttcgctaccttatggctgaacaagcttgtgcattcatgcccatccagctgccatggcatggatctgggggaccctggcgactcaagtgtggctgtgtggagtgctgtggacatgtgcgcaaggtgtgctctccaggacttgataccagaaatggggaactgacaatgatagtgacacactgggacggatgccctaaaaggtgt

SEQ ID NO: 556233 - DNA, 295 bp, Homo sapiens
tgtatgtgtatgggtacatcatccgacatgaagttgcattatgaagaatggagagagaattgaaaaagtggagcattcagacttgattttcagcaaggactggtctttctatctcttgtactagactgaattcaccccctagtgaaaaagatgagtatgcctgccgtgtgcaccatgtgactttgtcacagcccatgcatagctcaagtgggatcgagaccatgtacagcagcctccatggcggttcgcacagcatgccgcatttggcatcggctgcactcccaaattctgcttg

SEQ ID NO: 556234 - DNA, 776 bp, Homo sapiens
  misc_feature (387)..(387): n is a, c, g, or t
  misc_feature (482)..(482): n is a, c, g, or t
  misc_feature (484)..(484): n is a, c, g, or t
  misc_feature (549)..(549): n is a, c, g, or t
  misc_feature (595)..(595): n is a, c, g, or t
  misc_feature (600)..(600): n is a, c, g, or t
  misc_feature (631)..(632): n is a, c, g, or t
cggacgcgtgggtcgacccacgcgtcgcagttctgcgggtcagaaggctgacccggggctcaaatctgggtgtcggcagtcctgcactccttctggaggctctaggggagaattcatttctggccttttcatttttagaggctgaccgtaattcttgacttcaggctcctccatcttcagagccagctgtgggtagttgaatctttttcccgtcacctcattgaggcctcccctctcctgcctccctccaccactttttttttttttttttggagagacggggtcttggctggtgttggcccaggctgggatgtggcagtgggcctgggtcatgggcttcaagggctcattggcagcctgggacctcctgggttcaaggtgatcctntggttctcagtccccttgagacaatcccccacggcccagctacatattttttgtggggatacggggtctcattctgtggcctaggcttgtctggnanctccggggctcaagggatcttgtagccttagcctcctaaagtgcggggatataggcatgagtcantgtccccggcctgctctaccgctttaaggacgcttatgatcacttngcgcntacccagagaacccaggtcgtctttctattnncaggtcagctgatttagccccccttagtcccttctgcaattttagttccccaccgggctgtgtaccctacacttagtcacaggctctggggactgtcccgtggacttcttggggaggccgttattcggcccaccgcaccctcgt

SEQ ID NO: 556235 - DNA, 950 bp, Homo sapiens
gtgatatatggttaaggttctaaacttgtgtaacgcgatacttgtgagacttgtgacgatcaaagtagggtatgtttcttacttaaggccttgattaaggacattcgtgtgctcatataagatcgtttgcacgagtatgcatttattataactgtagctttatacgcggtttcacgagacctgctgtgagaacatgaagttatgcatagatccattggttctctagcatggttttactataaataggccatgtgcagatggctcacatctgtaatcctgagcacttttggtgccggccgaggtgtgcagatcacgagaatcaggacatcaagaccatctggctaacacggtgtaaaccctctgcctctacatacacaaatacaatgagacgttagaccagtgcgtggagggtgcggtgcctgttcgcacccagactaactcaagggaggctgaggcatgtgaaatggtgtggcccccggcgaggtcataagctttggcaagagagctcgagattcgagactagattgcataccagaacttgtagttggcagagtgagactcagtcctcatttagtacatatcttattttaaatttaggcctggggtctgttttgatgtgacaagtaccctaccttctgataattaattatgataatgggtgtgatagttaacactggtcttttaaggattgccaaacagaccactagttgtctgctgaattggactttatttatcggaaatgtctgaggttagtcacgccgataggagagttgttcctggttaggcaaaacttacaaaaaatatcggtttgtaagggcaaaaacaaataatgaggcagttaagatcgtgtggcagattgtattaaggcgagattggaaacaacttcgaagagagttaagagaaaaagaaagagagaaggagaaatagaaatatgtgaagtcaaatgtgtg

SEQ ID NO: 556236 - DNA, 148 bp, Homo sapiens
ttcaattaaagcctcaaagcagccaaaaccaggctttcccccttcctggagtttgaatatccaggatcctttgtacttcttgttggttaaagtgtttattttggtacaaaatacaatatcagtagttaatacaatcatgtttcacagc

SEQ ID NO: 556237 - DNA, 116 bp, Homo sapiens
gatagagcaacaatgacgtgcaggtgagcctgagcacaaactaaagtggctcaactcaccagtgagggcttcttggaggaagcgacacttagggaaccctctcacagggcctgttc

SEQ ID NO: 556238 - DNA, 352 bp, Homo sapiens
tttgttcttttcttaaatgccctatgcccattttgtcattgggatattcatttgtacccattcatctactgcaaatattaactacactgggttacaaatattttccccaccctgtcatgtgaattgcccctcccccacccgacctgagcttattaaggggtaaatggtataaaaaaaaactgcacgtaattcatgcatacaactgggtgagtttggatgtatgtatacactcacgttgccatcaccacaatccaggtaataaacatatccatcacctccaagtttccttgtgtccctacgtgtgtgtgcatgattgtgtgtggtaagaatacttaacgtgagatctaccctc

SEQ ID NO: 556239 - DNA, 307 bp, Homo sapiens
ttgtggtcccaacttttcgggaggctgaggcaggttaatcatttaaacccaggagccagaggctgcagtgagccgagattgtgccactgcactccagcctgggagacagaacaagactctgtctaaaaaagaaagaaagaaagaataaaacataaatgaagcctatatgaggcttcagtgaactagtcttggaacttttcagtaggttgtattgaaggatgatatctgaaataagacaatttattgcttactatagcaagggacaactgtgctttttaggcacagcttctctgggcatagagattgc

SEQ ID NO: 556240 - DNA, 426 bp, Homo sapiens
  misc_feature (24)..(24): n is a, c, g, or t
  misc_feature (52)..(52): n is a, c, g, or t
  misc_feature (67)..(67): n is a, c, g, or t
  misc_feature (81)..(81): n is a, c, g, or t
  misc_feature (149)..(149): n is a, c, g, or t
  misc_feature (197)..(197): n is a, c, g, or t
  misc_feature (360)..(360): n is a, c, g, or t
  misc_feature (392)..(392): n is a, c, g, or t
  misc_feature (411)..(411): n is a, c, g, or t
gacccagcacagaccttcccaaancagtagcctcaaggctctgagaaccagncattttaataaggancaagactcccttanctgcatactcctgtggaaagactaactgccctacacccacatgttattccccagcttcccaaactttntcaggtgactcagttacacccaacatagttatactgcaaagatgtgtnttattctatttcagttctcagaaactggtgttccaaatgagtagtatgcatagcaactttatggttaccagaacctatcattggtgaagctgtctagagcagcactgtctgaaagagctttctgtgatgatgcaaacattctctttgctgaccaatatgggancacatgtggctgttgagcacttgaaatgcagnctaggtgggattgattttnaattcatcttttatt

SEQ ID NO: 556241 - DNA, 752 bp, Homo sapiens
  misc_feature (67)..(67): n is a, c, g, or t
  misc_feature (198)..(198): n is a, c, g, or t
gggaaagataacttcaggcccccggccaggttggatccagtgtgtaaggatagaactaaagaatccncccccccccatcaattttcagaaatgggatggtctagtaaggataacctttgttaggaaaaacaagacactctctgctgcatttaaatcaagtgcagtgcaacaactcttggaaaaaaactacagaattcnctgttcagtccataatattataaaccagaagatttcagcatagcagataaaatacagcaaatcctaaccagcacaggttttagtgacaaacgggcccgttccatggacatagatgacttcatcagattgctacatggattcaacgcagaaggtattcatttttcctaggtatttggaaaacagaaattttcaaggtcaagaaaaaaaatgaattttgtattttttgtatttgagaaaataaagcttttgctttactgagacattatttacttgactatttttggttcaaaaccaccactgttgtccccatttatgattttgaattttaaagttggaaagttttaaggatcaaagtttttaatatataaagctggtcccatctattcataataattttcaagttcaggagccgcaaaaacgcccaactttacacttatcatttttaacagtttattgtataaaaatgttacttttctatttactgttaaaaactgtaaggccttttttaggcctttagctttgttcctccagtaataaaaaagtttaaatattga

SEQ ID NO: 556242 - DNA, 246 bp, Homo sapiens
gcagtggcaggatctcagctcactggaaactctgtctccccaggttcaagcaatcctcctgcttcagactcccacattactgggattacaagcatgtggcactatgcctggttaattttagtattatttagtagagacggtgtttcaccatgtttgtccagcctggtctcaaactcctgagctcaagtgatccacctgctttggtctcccaaagtgctgggattataggcatgagccaacacgctc

SEQ ID NO: 556243 - DNA, 213 bp, Homo sapiens
cccgggcgattgcaactaattttccgttaaaacctgcaaaccatgcatctttggcatcattggttgttcctgtttttccacctaaatcgttacgaccgattttaagtgctgctcgtccagtaccatgctgaatcacatcgcgtaaaatattagccatatcataagctgagctagattttaaaatgcgttgcgcttggcgataattactccttt

SEQ ID NO: 556244 - DNA, 712 bp, Homo sapiens
aatttcccaccgccctgttgtcgatgaaggaagctgtacttatcggaatcaatgaaagacaccgtatgttattggagtgcatatcactagtacatgggcggggcgccaagtgcgggtgagtaaatgtggggaggtgcctcccctgacagtgtacacccgctgcagacccccgtttagacactcaccatgtagcattgttacacttagaccggcgctgacacataacatgtgggtcctgtgtagacatctcccctatttttgttgcccccgcaagatacaggcattgggacatgtgacacacgacatcaatgctcgctccgaattcagagcgacattctgtctcatctttaagacacaccaaggagtgttgtgcgcagccaccgctgtttgtcgtgctcccccagacagggattggtcgcggtggggggcgggcacccagaagtgtcccacacgccgtcctcttctatggcgcgcacacgacacccgttcttgctggtggactcaaggagcgttggcactccctatgtctctcgcccctatcgaccgcctcctcttactggctctctttggcccccagcaattatttctccaccttgatttatgccatatccaaaacaaaccttttggtcaagcctctgtgagggagacaacaccaccattgtttcccaccgtttctctcccctcctccccccgcccaacaataacaaacaaa

SEQ ID NO: 556245 - DNA, 361 bp, Homo sapiens
gttattacgaacctgcgagacgatggtttcggtggtgacaatcgtattgaatgccagtacagcctggagattcgttacctcggtacagatccacgagtgcagcgtcgaactgagctgcgaccggctcgaccgtagcagcctggcggccctgcgcgaatccttccaccagcggcacaaggcgctgttttccttcagtgagcctaacagcccggtcgaactagttaatctagagtgctcggtgatcgcgcggttacagcgtccaccaatgcctgaacttgcaaccccgctcaaggcaacggccgcgattccggctggtcatcgtccgatgctgttcaatgcgccagacgattggcaggacacg

SEQ ID NO: 556246 - DNA, 457 bp, Homo sapiens
tgggaaaggcgttgctagggccaaaaggaaaacaagaaaccaaaataggaaagactgatagagtcaagtacagttgtttaaaattctgtgtctcagaaagcacctaaacgttatttaaaaacagagtgaggaaaatatatgctacaaataaagcaaacggctaataaaaggtcattcaaatagataagaaaaacactaaaatcctaatagaaaacaacagcatagactacgaatagactagagtgggagaggtgcatccaagaggctcaaggtgatttctgggtgtacagggaaaaatatgggaactattttttaacctatcctttaaaactctattttggtgaacagtggataccctaaataccctgactgacttgatcactatgtgttatatacatgtaaggaaatttcacatgtaccccacaatttgtacaaataaaaaactttaaaattcaaa

SEQ ID NO: 556247 - DNA, 293 bp, Homo sapiens
gtccctaacaaattggggggggccctggccctattactatccttcctcttcctggcaataatccccttcctccatatatccaaacaccaaggcataatttttggcccattaagccaatcctttttttgattcctagccgcagccctcctctttttaccctgaatggggggacaaccagtaagctccccttttcccttctttggacaagtggcatccgtattatatttcccaccattcctattcttaatcccaactttttccctaattgaaaacaaaatattcaaaggggccta

SEQ ID NO: 556248 - DNA, 100 bp, Homo sapiens
gcacaggcatgcagctgtcaggttttgcgcttcaggcaggttcattggccattgttctcacagtcacttcactatgcactcagccaacacttcaagcctt

SEQ ID NO: 556249 - DNA, 123 bp, Homo sapiens
ttacgaactcgagctgagtaccctcgataagggcacttcgagttcccttcaccatttccgacgggatctacggctcagcattttttgtagccacagggcttccacgggacttcactgtcaggt

SEQ ID NO: 556250 - DNA, 215 bp, Homo sapiens
  misc_feature (5)..(5): n is a, c, g, or t
  misc_feature (74)..(74): n is a, c, g, or t
  misc_feature (117)..(117): n is a, c, g, or t
  misc_feature (127)..(127): n is a, c, g, or t
  misc_feature (170)..(170): n is a, c, g, or t
  misc_feature (206)..(206): n is a, c, g, or t
gaatncggcacgagggctagggggcttttcattccatcatctatttttcactatgaaatccaagtttactgatntttttttgtcttctttgtcacatggtgcagcttgcagaatctnagttccctgnagtatggattgaaccggaaactcctgaaatggaagtgtgaggncttaatcatgggactgccagggaagtccccaacttnactaacctt

SEQ ID NO: 556251 - DNA, 449 bp, Homo sapiens
tagcaggatgccttatcatttcagttccctggaacatgacagcgatgacgcggcatcgtctcggcatcgtggccctcggcaggcctgggcctgcgaattgtcgctgaaggggtggagaccgatatgcagcagcggttcctcacccggctagggtgtgactccttgcaaggttacttattggggcatccattgccggccgatagcttcatggcgaatatccggggcgccgaacagccggcgcctgacaaaagcagtcagtgacgggtattcttggatccaaccctaaacatccggttgaatcgggaggccgcagccatggacaaagtcgtcatcatcacggggggcagtcgtggcattggcgcccaaacggcattgctcgccgctcgccaaggctatcgcatctgcatcaactaccagtctgatgaagacgctgcccgaactgaaatgag

SEQ ID NO: 556252 - DNA, 379 bp, Homo sapiens
tcaaaagctgcagctgggtctaactctttggcagtgctgccaaggaaacaagctggaactcatcttcctgagtcaaaccctgacacggtggtgagcgcatttatccctttgcagaagggcgctcatgttcatgtgtatccccgaatcttatcccaggaacacggagaagatccaggtttcaaaataagagaatcacacggaaaggcgattactttcacgccctgagtcaagggcgccacaaggagagacattcatgcctgtgacccatctaaggagataaaggcgtgggaatatcacacaaaagattaaaattgactttgccctttgaaaaacaataagcaattctggatttgaaaccacccatcttgtgatattaaaa

SEQ ID NO: 556253 - DNA, 298 bp, Homo sapiens
  misc_feature (9)..(9): n is a, c, g, or t
  misc_feature (30)..(30): n is a, c, g, or t
cccaggttnaaagtaatcctccccaggttnaaagtgatcctcccacctcagcctcccctaatagctggggccacaggtgtgcgccacccaggcacagttaatttttgtatttttagtagagatggggttttgctgtgttgcccaagttggtctcgaactccctggactcaagtgatccacctgccttggccttccatagtgctggaattgcaggtgtgagccaccatgcttggcccttgtaattggcaagattttaagcaaggcgatctgtgttcaatacccatactcttgaccacga

SEQ ID NO: 556254 - DNA, 918 bp, Homo sapiens
ggagcgcagagcgggttggtcgttcgttgggcggtgctggttttcgctcgtcgatgcggctcttcctcgggcagcggaaggcgggccggggtcggagaaagtggccataaaacttcggcgctggggctgcaaagaaaatggcccgaaccaagcagatgctcgataagtccaccggtgggaaagcccccgcgcaaagagtggccaggaacagccgccaggaaaaggcgctccttctaccggcggggtgaaagaagccctcatcgcataagcaggcccgggcgaccggtgccggctcgaagagattccgtcgttaatcagaggtcgacgcgagctgcatcatccgggaaagtcggtgccccttcacagagtgttgggtcgagggcaacatcgccgccgggattttcaaaaaccgaaccttgagggtttcagaagccgcacccaaatcgggtgcccgctgcaggggagggttaggcggaagggggtacctggggggcccgtgttccgaagtattcccacctggttgttgccactccacggctaaggagagtttacaccaattagtgcccaagagacttccagtgtgtggctccgccgaaatacgggggagaagagagctataagtgaagagacagttaaatgggcgttggcgatacatttccggtaacaatacctgggttaacttggcactttgtgtgcaaaacacttgtaataagaggttgcctgtgacttagtacatgcatcttccactcgtatatgcgaaagtggtgtccaagacctagtgaggtgacctgttgccgcggagtacagtgtcaatagccaaggcagggaacttgggcccagaagggtgaggggcaagcgtgggacactgagaaagctgacgttgcgcctgcaaacgtccgtccagttacggggtccacc

SEQ ID NO: 556255 - DNA, 1130 bp, Homo sapiens
tatgagaagtacatggtcggagcatggacgagcttatatctcaggtggatgagaagaggaagaagcgagacatccccgcaatactcatgatgtggcaagatcatgctttgagctgatgcggcgagccgtgcatcacagcccagtgtgcatcgacctacgacctgcaaggacatcgaggagcacctgtcagcagtgtgtgagtcatatttgaccccgtgacccggagccccctggacccaggaaccaagctcattcctccaactgtggactatggaaaggacggtatactttgagccgacacttgcattcatactaggagcaacttgagtctgagggtagggacgggagcttagcgtgaacgtgctatccacgtgggacccataaagccttgagccagtctcaatgggatcccacgcgggggaaggacgcccttggggggcaagaatagtacgcacgcacggggcaccgggtaagtaccatctacaggctgtgcctagggtgtacgcgtgtgcgcacacgacaccccgggagcctgacgcgatttccgcgcgccaaagggctgtcttagacacgtagggtagagagaaccataccgttggtggaaacgatcgggcacattatcatcacgacgagttcatccgaaggagcgcacttccacgccactatattatggcacgaataggagaagcccccagtagttgcaaatctcgctgctatcacaaccaccaccaatattatggcgtaaggagaggggcaaattggaggcaaaccatataccaggggcaaagcgtgggagttcggacacgcacgagacggttggagcgcccagttggagcggccccattggacaagagggagcacaccacatttttaggcacggccctggccctcgaaccacttaaagtttcgcattgggctgggcgttccaactttaacgacgacacactttccgccggatattgtggaccggaccacaaccccggaaaaagaagcacgcacaccactcccaaacacagcagctctcctctacgaacacaattcaagaacgacgcaatagctgctccaccacatacatcactccgcctaccacgaaacccaactagagacaataacgcaaacagcaacaacaa

SEQ ID NO: 556256 - DNA, 277 bp, Homo sapiens
tgattatacaggactgctcaatcaaatgtcaaaatgtcgaggttcgacctacagagacagtgtcacgtaaccctctcctgaacgcccatcaaactacgagcgtatctcgtcggcagaaagcctacaagccagaagagagtgggggccaatattcaacattcttaccgaaaagaatttcaacccagaatttcatatccagccaaactaagcttcataagtgaaggagaaataaaatactttatagaccagcaaatgaagagagattttgtcaccacca

SEQ ID NO: 556257 - DNA, 243 bp, Homo sapiens
gggcccctggggcccctgccccggcaggggcccagggggaagggggggcccctctctggtggggggtccttgccacactgagtccccccccccagtggatctcccctcctcccaggtcccatgtgggccccttgacggggggggggcccttggggcccgccccttgtcttgttccgccaataaagtgccctgtgctctgccaaaaaaaataataatgatggaggagaatgaaaaaaaaaaaag

SEQ ID NO: 556258 - DNA, 93 bp, Homo sapiens
ggattaggccttttaattggtaaaaaaaggaatacatccctaaaaaaaaaattccaggattttcccttttgttgttcttttgcaaccggaaag

SEQ ID NO: 556259 - DNA, 407 bp, Homo sapiens
gtggacgagtaggctggatggtctcgatataactagtatgggataaggggtgtaagtgtgcacatgtcacctgtcatcagaggccttccctgaccactgtcagaaagacagccctggctttcgctctcacctttccatctcactctgcttattgttctccattgccgctgtcaccatttctcatattacttatttcttcctcatcattttcctctctcaccttggaatgtccaggaaaaactttattttcttaatctcttaaaacccaaaacagtgccggccagatatacgtctcctgaatatatgtataatactggctctgagtccttgtgccatgatcctacaacaatttcatgtacctttattggtgatcttacgtaatcattctatacgtatgtcgtccaggc

SEQ ID NO: 556260 - DNA, 651 bp, Homo sapiens
  misc_feature (61)..(61): n is a, c, g, or t
gagcccgtgtatccgacggcagtggaatctgacgcccgtagtcgcgccgtgccgaggtccncgacctgacacttgacatgaccatggctgatcacttggccacgaggcttcggctccctgccagctcttgaggttctggacttcacttacaacaagttgagcgaaaattctcttcctggcaacttcttctaccagaacaccctgcgtgcacgtctatctaagtgacaacgatatcgaaatcctgccgccagatatagggaagctcacaaggttgcagatactcagccttagggaatacgacctgatctcactgcctaaggaaatcgggtagcttaacccggcttaaagagctccacattcaggggaaaccggctcaccgttctgtccccagaactaggatactctggatttccctggccagaagcaaggtattcgaaagcagagaacactcgctgggtgacccccattggagaccagttcccagcttggcgtgtccccatgtcttagcgtatatcccgttctgagacattcaaattacctctacggtagacacatgcaggccatccagaatcaccgaaaaacatcatgagcaatcgaaaaagatcagccggaaacccttgcagatccgataccgtcaaggaacgagcacaa

SEQ ID NO: 556261 - DNA, 320 bp, Homo sapiens
cacagctgctggaagactacgtggaagccatcgagggtgtcagaaacgcacctactgcggcactccgcagcccagtaagctcacctttgttgggagcttgccaacggccgccttcagttccaagatgggacgcttggctcttgggcgtctaccacggcctgtccccccaaccacatggagctggcccacgagctcatggagactttttaccagatgaaccgcgcagatggagacggggcttagtccccaggatcgtgcacttaaacctttatccccagccgggccgtcgggacgtggaggtaagccagcagacaggcaca

SEQ ID NO: 556262 - DNA, 321 bp, Homo sapiens
aagaaaaatccttatcccccctggatcaactttgggtgttattcccaagggactgtcatttaagtaaatgtgagcgaattgggccttgtgcccaaggaggcaaagttatttggggaaaatatgccccggtttcccccaatcctgaaaatgatggatgtataaaagcagtcttactggtttggcagccattttatatataattattgagggctacccccccattgaagaaactgccctttctgtgatgtttttgaatactacccaacagccaaacatgtttgcaatgaaaagatttttttaattgttaaccttaaagtggga

SEQ ID NO: 556263 - DNA, 173 bp, Homo sapiens
tgatattaaacaaagtaactttagaatgagtgacatattacataggaatttagtgtcaattaacatgtgttataaaaacatcatgggaacaatgctatagaggttactattattgactacacacagttgcagtttttttactgtaattacccattaatttccattcaaagcca

SEQ ID NO: 556264 - DNA, 214 bp, Homo sapiens
acaatcgcagcctacgggctgaggtggagaccatctccaaggaactggagctttagtattgacagtgctaccatctgttgctggagggcctggagggggtgctgcgggaccagctggccctgcgagccttgaaggaggcgctggagcatggccagagccttgggccggtggagcccctgtacggtccatcaggtgctgtcctgtattgcctggt

SEQ ID NO: 556265 - DNA, 140 bp, Homo sapiens
  misc_feature (7)..(7): n is a, c, g, or t
tgcggantacatcccctgtcctgatggccatgggaggagactggcctgcatctctcataagacttagtacttgacgccatgcgcatctactatgtaactagtagttcaatcagtagtaccagtgtgagaagcttcttgct

SEQ ID NO: 556266 - DNA, 338 bp, Homo sapiens
  misc_feature (63)..(63): n is a, c, g, or t
  misc_feature (158)..(158): n is a, c, g, or t
  misc_feature (190)..(190): n is a, c, g, or t
  misc_feature (229)..(229): n is a, c, g, or t
  misc_feature (306)..(306): n is a, c, g, or t
aaaaaccaaggtgataattcatggctggcagatatttacaaaggtcatatttccccataattngtcaactaatctaggtttgtgaatctgaaaagttaaagtccttcattgcatgaaaattttaacctgtcatgcatttgacaaattcattacttatngtttttctccaatcatgaactacatataaatnatacatattttaaagtaaagcctcagggtttaaattttncttttctattggctttgaactgctcatcttcaaaattttaacattgttctgaatccaaatttcagtttgtgctattnttattcaattcagtctcttcatattttttgag

SEQ ID NO: 556267 - DNA, 402 bp, Homo sapiens
gcccgtggagcttatgcggaccagctgcaggcacaggcagtggtctaaccggaagctggtgtgccttggttcgaaccgcagtgggcctcagggttgtctggcgctcaatgtggtcttggtctgggccccactgcaccttcgagactgtgccccttctcagccctcgtaactgggttcaactacggagctcggtgaagagtctggcttcaaggggttcaggccgaaggaccagacttctggtgggcatgcagtctttctggcctcggtggctatctcagggacgctaggctgcacgttgcgtgactcgtaccctttgacgtggctaaagacccaacgccagctcgctctgggaggcgagtggaggctgtgagagtgaacccccgtgcatgtggactccacctg

SEQ ID NO: 556268 - DNA, 266 bp, Homo sapiens
accgcggcctactgtctgacaccacatcttatttctggcctgtataatttgattattttaagtaattcaaataagtagaatcttacagtatctatccttttaactttattttattcatttttttttttttagacacgggatctggctcggtggcccaggttagagggcagtagggcatccatagctcacggcagccttaactcctcagctcaaggggtcctcctaccttagtctcccaagtagcggggagacagggtagagccgag

SEQ ID NO: 556269 - DNA, 984 bp, Homo sapiens
  misc_feature (619)..(619): n is a, c, g, or t
gttaatatatagtatgtgatgttgctcttcttgatctgtgcctttctgttattaagactatgtatacaaaagtgctagtgtttgtgtgatacttgcttcatgtatcataatatataagtacaatcttctcgctgatgaatgtatgctgatatgaataaaatctaaaccatgtgtcttacgaaataggacgaatagactagggttgtatttttcatgattttatagttgtagaaataatttagagcagaagtagaaatagagagacatggagagaacgatgtcttcctgctagcaggtaagtcttgcgggacaggagctgaaaatctaagagatgatagtaggaagtgtggagactttatcgataaaatctatgaccgctcaacaatgttttgcagcttgattattgtcaattgctactgttccttctcacatctatgctaccatgtgctcagctgtgctgcctggacgttaagacatagcagaactccagaagtttaaggcattcacggtggtagagtcttagtggagaaaagtcctttgaccaaagatcggaacccactgtgttaaatagttaggtgggacgtacttaactttgccgaggttttatcgtaatgttccncatgataacgcctttgtgattgtggtctccagctttttactagataacaaaaaaatttttgcggataggatgctgtggatcccattggggaagaagctcaatcctctcactgttactgaacttctgcacttcgctgttggacatatgtactatcggagcaacgtacaactccggggttgaacatacttataatgagtgctcacatacctgaattttgctgcgtcccatgtgtcatacactgatgggcattgtgattacctgtgcatcgtgttcgtttggcatccttaatttgcgcgaacacttggtccaaggggctcagcaaaagcaaagttaacagttttagaaataacactacaaagaacaga

SEQ ID NO: 556270 - DNA, 1170 bp, Homo sapiens
tcgggggtgcgtgcgagggtggtggcggtgggtgggggggttgttgtctggtgtgtcgggcgtcgttggggggttcgtggctacggccccgtgggagggcgtgtacgcagaactgcttggccaggtgggtttgacgccgattggcgcccgggttcccaaacgggggaaagcgttgagtttgccggcatatgcgtccggggtgtgatgagatgtggtgtttgtggcgaggaacatggggagggtccatgggtagtccggtgccataagtgattgaggggggcgtgttttgccgaagacacagggggggaaactttttgtttgtagaggcaggctacggccgcttctcgtggggggtgcgcgacaattgtccggtggttttcttgccggggggttttcacgggggggaacacactttgtggggagtcccacgggtgtttgggggggggaggcttccgagggctcttggggccgagctgttgtgaaggttgtctttgtgcgccctgtctgtaaggccgcaggataacaaagaagtgtttgtcgtccactgatttttaagggtttgtggagttttttggtgagactcgtttgttttttttttggtagtgttggggggccgcccacgttttatgtaaaaggtgttgttttgagagggtgcctcatgttggccgcggggctcggggtgcccacggtttttgttccgcttttgcccagggggcgcctctggcgtcccctctcccaggattccaccccccacggcccccgctggtgtggcgccacagacaccctaagattttgtccgaaacacaccccattttgctcccacacctctcctgccactggcgcaccgaagacccggagacccccccttcaatttttatagagattggggaataagggagagaaaagggagggcccaccggagaaggtttcccccgaatttttttttacaaaggaaatttttttctcccacgagagtttgagaattttttggtgcttttcctggtgtttttggccaaatataggggggccccgggtgttcaaatagcgggaaagaggggctggcccgagaggagtcccactgggctttcacacacaccacaggtgttttgtaacacaggactgaatgggtgaatattttgtttttttggaaaaaacagaaaaaaaatggga

SEQ ID NO: 556271 - DNA, 365 bp, Homo sapiens
tccgacccctacataatgagtgcccagtcattataagtacggctgcacctagcgtcttacaaaactattatttccttgaatttatctactacaccctgactgtgatgccctttaactgataagctggtcctgcccagcctgcttataaagcccatattcagaaatgtaccaggtgtattaaacagaggcatcatttaatggaaatctgcacttcaaaacagcactagaaggaccagccattggccctccaatgtaaatacttctcatttcacattatcacagaaacagtgcagtttactaaccactccttccttataagaaattcagcagctgcaaaattttttttcagtttcaaaacatttcaa

SEQ ID NO: 556272 - DNA, 116 bp, Homo sapiens
agtcgcatgggtttgtccacgctcacggtgctctaggcgcaccctcctgccctagcagagcccaggcttgccctcatgaagcatcattgacatagcaggagcatgttgatttcttg

SEQ ID NO: 556273 - DNA, 662 bp, Homo sapiens
tggcttggtaaataacttaaagggttgatgtgggagtcacaggggaggttatgttggccccaagggttcttcagtgccatcctcaaagctggttagtgcatgggagtgtagggcagagtggtgttccagttttctctccaggaaggggttatagggaggtcccagagagcccctaggaatgagtccctcggtaccatggcaaccacaatttaaaagggtgttctggcccacccttggaagccctacccccaaggtccagcaagatgagaacagggaggccaagattgggccaatttgtctataagacagccgcctgtatccaagatgccacatctttggctcgcttgggtgtcattttacttcttctggggcagatcctatggccagaaactcttttctccttctcacactggtgtagacctgggacgccaaagtggcagagtgtgggcctttggctagcaaagacggcctttcaggagccccaggagcggacactccgcatcgaagagtgggagaaggtggcggcacacccccgacgacagaacgccctataggagagcagatcgagacaacagagggaggccacaagacatccggcaggaaaaagagagtaccgaagaagacaccccccccaagggcaccagagagagagagagcgccca

SEQ ID NO: 556274 - DNA, 1017 bp, Homo sapiens
gacttcccggaagcgcagtagtaccctgctcaagttcatcctgggttgagcgcggacggagaacattctgagaatttatgcgcgcacagtctcggggctgaggcaggacccgcagcagcactagattgctagctcgacatgtgctaaagctgggctagatagaccgtagattgcggagtcgctggtatccggcaggctctggtgtgtttgacctagacgacggtggacttgaatcttgcatccttgcaagggttttcctgacaacgcgggtaccctaagatgacttaattacctaacgaagaattgggtacacttctcatgacgatagaacagatttttgccatagattaccagttgcgacaagaagcggtgatgggacattcaagaggcaaggtacctttggtggaacccagatggagaagacaggcaaagcattcgggaaacatatttattcacccaaaggtcggaaatttgacacatactgaccaaaggaaggaaattgctaatcgaggggttcttcaggttgtcattgaaggttccaccgtttggtcaccggccggaaaatgttaccccttttaaacttgcaggaaccaggtttagccatggaacacggtcttgggggcattgagggaccagagaacttcccggttgacttagtttcacggaagcaaattgagcttcccatttcacaggcgtcggtcaattagaggctttatacctttaccggcactctatagagttcggaccgtaattggcctcgtccactcttgtaacatgggcaaggaaaccctaactgggttaccgacagggttaaaacaaaaaccttgatgtttccaggccgcgtttttccttcgaaatctctttgccttccttggggcacttcgaaagcggcgacctttttgggaaggccaaaaggttggcacatggccaaaacagggcttaagcgaaggggcccctgtgcgcaagggcacacactttacgcacctgcacgttcaaacttccagtggaaagttccag

SEQ ID NO: 556275 - DNA, 306 bp, Homo sapiens
tcgtatacggatcggcgggggaaacaggacggagaggctctaaccgattgcccgtcgtgtaggtcgccagcgaagccagcacctaagatccgtcgtgaattggtgcccatccaatcctgcaaacttccaagaagggcagtagataacttttcaagaagaaaaagaaattgcataaggtccctacataatactgaggctgaaacgagaagaggctgtccactgtaaaagcaaggcacttggggcaggagccaggcaggtggcctgagcagggtccctctaagtgagtcaacagcttgagacacgcga

SEQ ID NO: 556276 - DNA, 327 bp, Homo sapiens
gttttggccccccggctgccaaggaggcaggggtgccagctccccccgctccgggagcccttaaaaaggaggggaggatggcccttaacgggtcctgcaaaccccccccctccccccagggactggggaggaaacagggtggtcctccccaaaactgtgagctttgagttaataaacttaaagggcttaaagctgggcccgtcgaagcgtttgctattatcattagcgcagtgattatcatttcctgtgttgtcaaataccctgcaaggcgctaaacaaaactttttgttttcaaagatggcaaaataaaaaaaaaatgaggatgga

SEQ ID NO: 556277 - DNA, 748 bp, Homo sapiens
  misc_feature (620)..(620): n is a, c, g, or t
  misc_feature (673)..(673): n is a, c, g, or t
  misc_feature (722)..(723): n is a, c, g, or t
agactgagctcagtagccaggcatgaaagagactgggcaagttgcaggggctaattggaaaggggctgtcggttgcacttggggtttaaacaagaggtttcttttgcaatgagaatttttaggtggctaagatcagtcttcttggcaaaaaaataaactaagcatagagtgcagttggatatgaccgaggaaattacaaaaagggctccaggagcaaagtctgagctttccttatcagtgttgcagtggaatagctgggggcctgatgctgtttgtgctgatcatactttgcaaatgcccacactttgttgctgtttgtctccttggacgaggtttgctgcaacttcaattccttgacttcggccttactttgttttcatagcagcaagaattgaagacttaagggtttgagcagatggttttctacctaaattgaataattcaattacgtattctcaactagcatggatttgggtcatggaattaaagtagaaacgtatccggcatgacttctttgtgcttatcaaaagtgatcctgataaacagatcttgctctttcatgtaaagaagtaaaagttatttatgattccatctgatatacataggagagaaactgatanaagaattctgaagggcaactgtatgataaaaagctatataaagtccaagtgtncaatttccttcaaccataattttgagcaaacccaaggatttaaagtccnnggggaacctgaacaatttaatttgg

SEQ ID NO: 556278 - DNA, 325 bp, Homo sapiens
gtgacacctcatgactgactatcctaaatcacgtatgcagttctcttagcagggttattcgtgcggttcatcgtgagtagaagcctgctgctgtgcctgggaagatgccatagttttcgttactggatgtttggagtagatactggtctgtgattggtggaatggagaacacacgtgttggtgcttctgggtagcactggtttgcattagtttatgtttccatgccagagtttgtgtgggcgggcgcatgtgcaccacagagtgcactcgaggggactttcagtcacaggatttcataattgtcatcgtcacatcgtcacttaga

SEQ ID NO: 556279 - DNA, 181 bp, Homo sapiens
ctgtgctctgtggacaaatgctcagacccaaggtggcttggtcaggatcgcagcgttgctagttctcacctagcctatgtccccatagggcaaggagggtctgggctgctctggctccgtgggcactagtgcttggttggtggtcctccgcagcttggaaaccaactccaaacgtgttctc

SEQ ID NO: 556280 - DNA, 153 bp, Homo sapiens
acaggatgatacgaccgaagactacgagaagcacttgacggtcatgaactatgacccggatgtggtgctgaagcaggtgcactgtgaagagttcatccccgagtttgagaagcatacccagaatttccctggacggacgtcacaggctgagat

SEQ ID NO: 556281 - DNA, 750 bp, Homo sapiens
ctaagaagaagaaacgggacgatggaatcgcgagcacgtgaacgggctgtgcacagatagatggagggattcatacagcatcgacaagaaggacaagctcagatacctcaacagcagccgtgccagcaccgatgagccccccgcagacacccaggcatgagcatcccagcacagacccacgcatccacccgggcaggctccggagcggagtccggagcagacgacgcgctgctgtcctccttcactggcagctggtgacagtgacatgcatcaagttcaaaacaggctcaagtgccggaaggaaaaagctcaagttcgtgcgaagagccaacattcacgaacatggggcttgtacagccagtggagcccatccgcaggactgacgagatggtcatcgaaggtcagtgggccagaaatcatccgtccaggtgatccgcccgaccatgcgagggcgaaagacgtacattgacggacgacggaggcaatacgggacgcaggacttaccaatgtaccagggggtgagaccagtggaagacgcgagtacaatacagaccgccagcacagagtggacgagaagaattatcagcagcgctcttccatcacaacacacggatggaaaccacacgaaactagactatagccccagggtggatcaacgagagaggaggcaacagaaaggaagaataagaccaaccacctacgcagaaagaaagactgaacgtgaaagaggagattcaccgatgactataa

SEQ ID NO: 556282 - DNA, 141 bp, Homo sapiens
gattggacatgtcgagacattcctgcgcatggtgcagtgctgtctgtagagggtagctgtggcttctagtgtgcccgagtagcatcctgtgacccctccccagtgcctctcctggccctgaatggtgccgatgaatagcga

SEQ ID NO: 556283 - DNA, 393 bp, Homo sapiens
cacccacaaaccccctctcaccacaaaccccctctttttataattcctttaaatggtatcccaaaggcaagatctagcctgatagtgtatgagtaaggggataggaaaaaaaaaggattcattttcattatcacagggatcaaaggctcctttcctccttttcagtcatctccgtgaatagcccttttatcacaatgaggcattaacaaatgctatttcattctagccacaataacaaagtatactttcttcactgaactattttgaattgcaataaactttactcacagataaaataagggcctgaagcatagtgtaagcatacaagtctctaattagtgtcaattacaataaacttaaaagtctatgcccatcctaacacccatataaaat

SEQ ID NO: 556284 - DNA, 347 bp, Homo sapiens
ctttgacagtgtcatgcctgttgtttgatgaaacattttttcttaatataattagtcctttgttcttcttttcactttggatagagagtgatatgtacgtatcttagtttctttttttttttttttctttttggtcctatttaatttttatggttaaaaaaattttctccccttaagtttaactgattggttaaccatatggatggtctccagtgatggtgatgggctaaataaggtggaaaatgatcgtgaccatgtatggagagctcatggtatggcaagcataactctgtgctcttttgtcctttccttattttatatttgggggggacaccctcaaaagtcac

SEQ ID NO: 556285 - DNA, 210 bp, Homo sapiens
atctacataaaacctttgttggaatgctttacactttccacagtacagaaactaaaataacctgttatacaattagtcactaatactgtcctcgagttttttggccatacacttgagtatttgtctaaaacatgtcttctttgaagcagctaggccctgccacctctgtgcttggctgagttcacaaatctgttgtaacctgtagcttcc

SEQ ID NO: 556286 - DNA, 266 bp, Homo sapiens
  misc_feature (22)..(23): n is a, c, g, or t
  misc_feature (42)..(44): n is a, c, g, or t
  misc_feature (63)..(65): n is a, c, g, or t
  misc_feature (76)..(76): n is a, c, g, or t
  misc_feature (124)..(124): n is a, c, g, or t
  misc_feature (133)..(133): n is a, c, g, or t
  misc_feature (164)..(164): n is a, c, g, or t
  misc_feature (175)..(175): n is a, c, g, or t
  misc_feature (178)..(178): n is a, c, g, or t
  misc_feature (194)..(194): n is a, c, g, or t
  misc_feature (202)..(202): n is a, c, g, or t
  misc_feature (234)..(234): n is a, c, g, or t
  misc_feature (256)..(256): n is a, c, g, or t
  misc_feature (259)..(259): n is a, c, g, or t
  misc_feature (263)..(266): n is a, c, g, or t
tattataataaacaccctcacnnctacaatcttcctaggaannncatatgacgcactctcccnnngaactctacanaacatattttgtcaccaagaccctacttctaacctccctgttcttatnaattcgaanagcatacccccgattccgctacgacaaactnatacacctccnatnaaaaaacttcctaccnctcacccnagcattacttatataatatgtctccatacccnttacaatctccaacattccccntcnaacnnnn

SEQ ID NO: 556287 - DNA, 541 bp, Homo sapiens
tagctatcggcgggtgttatcggcgaggctgtcgggccgtgggggtctgacgcttcgctccggtctcggatccgagcgcggggaggcagacgactgtgagctgctgtcccatcctgcggcgtcctggggacacagagccctccggtgcccggggatggatggagccaggactccttcctcctcgccgcccctgcccctcccagcacctggccacaccctgcagcgcccatggtctggccctgggtggcgatgggtcaggtggggtccctcatggctggtccgtgctgctctggtcctgggggcagtccttctgatggacgcgttgcacggctgcaacactcgtccactcgagagagagtagccaacagggaggagaatgagatcctgccccagacactgaacggggtgaagctggagatggacgggcacctcaatcgcggttcacagaggtctccaggcaagactgggtggctttgatgaggacgcggagccgcggcggagccggaggaagctgatggtcatcttttccaaggtggatgtg

SEQ ID NO: 556288 - DNA, 599 bp, Homo sapiens
atttgattcttctaccttagaaactccttttattattccaagtctcagatagctccgaaatcccccctgcccacccctagcctaccagaccatttctgcctctctcttatgccatagtgccatagttccattgaacaattggtttgttttattcatttccctatcatactgtgggagcagatgttgtgtcccttcatctttgggtcttcagtcctcaattaatttgaatggaaaatgagtagatcagcataatatagtttgtgtgctagttctgttagttattaacagtgtaactttgttatctcatccgtaaaacgagataatgatagtgtttgtgtatatcataagttcttcgtgaggattaagtgagataacatggggccaggcgctgtggctcgcgcctgtggtcccagcactttgggaggtcgagagttcaagaccagcctgaccagcatggagaaaccctgtctctactaaagatgcaaaattggctgtatgtggtggtgcgtgcctgtgaccccagctgctcggaaggctgaggcgggagaatcgcttgagctcgggaggcaaaggttgtggtgagtcaactccatctcaag

SEQ ID NO: 556289 - DNA, 174 bp, Homo sapiens
ccaggagggttccttccaccttggacttgctgggtggctgcgcagaagcccttgccactcaggcagacttcacgccttttccaggacagcaggctccccagtagcatcctgtgcgggctagggaggatgcctcctgcctcttccagctgctgctggcccccatagcctccttgg

SEQ ID NO: 556290 - DNA, 195 bp, Homo sapiens
  misc_feature (48)..(48): n is a, c, g, or t
  misc_feature (86)..(86): n is a, c, g, or t
  misc_feature (142)..(142): n is a, c, g, or t
taggaaaccattctttaaaaaaatcaccttacttgtgtatgtagtccntacgagcgtgtttaatcccaaaggtaaaattttctccnacctgacttaaaacaaccgcatttatttgtaaataccaataaaagtaaagataacntagtctataatgtatatccctgtctctgattattatgcaaatttctaacaaag

SEQ ID NO: 556291 - DNA, 503 bp, Homo sapiens
ccctagtacttgcttaccacaggccagaagcgttaccgtgtgcagcagttgctagaatctataatgcaagagctaatctgaagatgtgaactgaagaggcacgcgacatgcacggtacttcagcacagctcacaaaagcgcaggtgttctcactcatcgacacgagagccgcctgacctcccgttactcacagaaacagccattaccctttcacctacactggtcgacatcaactggatagtagaggactcggggtcttccgatatcgcagcgtgcatctgcatcctgaaatgctcatatcagcattccctttggcggccagtgagaaacaaagaagggataaaaactggatatgcatctgaaacaagatgtaagtcactgaagatttttagaagaccaaggaaactgttcatgcaaacagtttcttcagatgattctgaatcacacatgagtgaagaaaaaaaggaagaagatttactaaataatttatgcaatcaatgtca

SEQ ID NO: 556292 - DNA, 427 bp, Homo sapiens
acaagtttcccactagaactcgggacagccactgtgtataattacgatagcgaagataacattttcaaacggaatgtctcatcttgccacgggttcatccaaaagcattcattcattcaactacatctattgagtgttagcacgtgctagtccagtggtgtcacagtaatccagaggtactgacacagagctactgcatggaagagtcacagcctaatttggaagcaaatgaataaatgaattataaatatcatactaaagcagaagcatgaataagtaactagaaataacagctgatggtaataaaattacatttggaattaacactggggaatgtaagagtttccaagcagaaaaaatattgcgtttacacaagcaattaaatgtgctcagggcataaataggcaaatccaaaaagtggatctag

SEQ ID NO: 556293 - DNA, 107 bp, Homo sapiens
cccagattattatgagatctggcatcgacggcatgactactgctgctagccggcattataaaccatggctatgcccggtggcaagacatccagaaggtccaggtatg

SEQ ID NO: 556294 - DNA, 406 bp, Homo sapiens
cgcggcggaagatgtctgtggacgaggtgtcggacactcagctgatgcttggagtagtgctgatcggtctcaccagggaccgaggagcgcgagactatacgtactgacgcccactatacggaggaacacatggaggcccaggccgacattgtgcacggacactccataagacgtacagagccgagagtgcgactctcgcagtagtagcccacagccgacaacctagaccagtggagagctcctgcatcatgtgatagagcttgtgcatgcatgcagacagtactacgcgaatatggattactacttcgcagatgatgatgtactataattacaggttgcacactacgtttatatctagagagtactctgtgaggaatgcaagcgatagacggaggtgagaggacct

SEQ ID NO: 556295 - DNA, 1126 bp, Homo sapiens
taaatggtatatttttaagcattcctttggtggttaaaaattactttggtttatataattattattggtcaattaaaaataaaaagaaaaaatcatactggctcctattttttactttgagagcaactctggataacaacaacaaaaaaaagttcagtgggggccaacgctgtttccctcctgggagtttcccgggttcacctgggtgggagcggggcctcccttgggtctggcaattccctccctttcttttacagtgtgtctggcacggaaaggtggtgtttcaccaggggtgatccggtggatctgggcttatttggttccctttggtgggggtgtaaagggggctggggccaccctcaaatatattctcctggttattcaccaacgtcttagataatttcactaatccgcgcgctgggttaatgtgtgttaatccttctccacatattcagaccgcgggggtaaagtaaatattggtcccccaagttctcacgacagaaactttatccaagtgggtgggattttatctcagaggcacattaagaatccccgggaaattattcgagccctcgagataaaacgtttttcccccaaggcctcccgaggggcggcttgcggttaaatcaggggcttctttaaaaaacaagcgtttttctgggcccggggcggccaggatatgtctcacacggcccgttgtgtctatccccaaggccacttatgggggcagggcccgaagagcgaggggggaaatccacgaagggttccaagaagttttcggaagaacccaaagctcgtgggccaaaacattgggttgaaaaaccctctgttctcgcaacataaaaaagattccacacaaaattataagctgggggacgatgtagaggagcaggagagcgccccgtggaaattcccccaaggccaacacctagcagcgaaggagccgtaggaaaacacgagggagcaacgcggaccgtgtaacccccgggaagagggaggtgaggatatgacagagagaggccggaaaaataaccgccgccgtagtaactaccaaggcctgtggacgacaaacggtaaacacacccggggtccaaaaaaaaacacacgacgacaaaccaagaggagg

SEQ ID NO: 556296 - DNA, 723 bp, Homo sapiens
  misc_feature (723)..(723): n is a, c, g, or t
catagacccacctttcagtacgtctaatttgtctatgattactaaaaatgaggaggctccattttgctcagagagatcttcaactcatgaccgttgagtaatcataaccttcattatggtgtgtgctctcagatctgtaacaagatttatatgctcatctttatcaacgttattcaacatatagctggtagtgctggcgagcgcaatttattttgacaatagagggcgtacacattgcaaaagacgacatattctgacttaaacataagcttatataccttgtatcctaatgactccatctggaaaatactagtactgcataatgtgttaatgagtgtagaaggatacaccactttacatatacatgagcataacatttagtatccactagcatgtgataacctgtgagaagatatgaaggggagcgatcacacttaagaagctacattgaatagagcagtagctacaccgtttgtaaaatacataggattcatagttaccaaagaagtgatagatgtgtgtgaggaataatatgaaaaacttgtgaacgaggtttaagaggccacacatgaccacgatacattatgcttatggcttttatcgaaatgcccacgtctttcttcatagaaagaggtacaccatcctgcaatgtatggagaccccttaagacctggggagggaaggtaattcttgcagtgaccacagttgcatcactattctgcn

SEQ ID NO: 556297 - DNA, 221 bp, Homo sapiens
caaaactaattgagaacccaaaaaggtcccagcttgaggcaagggggaaatgttttccagaaggtaaattcttgatagagcccagtgaggtatttcagatttgttcaaaatgtctttgtctatgttttcagtaatgtagatgccttataaagactgatatctatgttaacatgtaatgactcttttatcataacaagtggacgtgtaatgtctttggacta

SEQ ID NO: 556298 - DNA, 340 bp, Homo sapiens
ccagctcggttctccatttcacctgctacttaacctgtttagaacacacaagtctaggccaggcgcggcgtctcacggctgtaatcccagcacgttgggaggctgaaggcgggtggatcacctgaagtcaggagtttgagaccagcctggtcaacatgatgaaaccccgtctctactaaaaatacaaaaattagctgggcgtggtgtgcgcgcctgcagtcccagctacttgggaggctgaggctggcggatcacgaggtcaggagatcgaggccatcctggctaacacggtgaaaccccatctctactaaaaatacaaaaaaattagccgggcttggtg

SEQ ID NO: 556299 - DNA, 286 bp, Homo sapiens
tccatatgtagaagtttcatctaccaaagaatgggtatggtataattacgattaggaattaccacgtttaacatatcataaacattacctggaagaactttttaatcgcagtaatatagcctccaaaaggtacctattctcgttcatgaaaattaatgagcgcacttaggaatgggagacaggttatttctctttctcctttttaatgtagagctgccgatacacttaagttgccatagtaatggcagaaggggggaagggggttttctttgtaaaatcattggtg

SEQ ID NO: 556300 - DNA, 256 bp, Homo sapiens
agagcaaagctctatctggggaaagaaaaaaaaaaaaccatctgtggaaactatgcttattggccccttatgtgaatgaactatggaaaaaaatttcctttaatttcaagaaatcacctctgggcatggtaaattcaccttcgggcatgtaaattcacccttttatattgttaagacaaactttctaaaattcctggatctgggcaggtaagggcctaagggggtacctatttacattgcaatttccccttgacgg

SEQ ID NO: 556301 - DNA, 276 bp, Homo sapiens
  misc_feature (238)..(238): n is a, c, g, or t
gtatatagtgaggagttgtcatataagatgggatatgaatgaagaatgcaaagctacaacttcagttctagaagtgatctctcgtgtctgcacactgtctgtatccgttattctagttggaacaactgaaagatgacctagcagattgcatttccgacatcaacgagatttcaatggcaaagataattttctcgagtgggtgtgtatgaactaagataaaaatagatcataactttgncccattctaaatttctgttttgtgtcatgctgttatgt

SEQ ID NO: 556302 - DNA, 367 bp, Homo sapiens
atacctaaaatgtgtaacagtattaccctgttggcgacatgatgatgtttattttttaaacatgaatatttctgttcagcgccagatagtgatttaacagtgaatggtccaacatttgtgtttcttatcaaattgtcttctttagtctaagccaagctagcaacatcatttggaacacactcagtgactcactataggacaagagctatagaaattcagagaccaagtggcagacggcatttgctccatatgccatgctatggctcctggccagtgctcgtcatgcccttgcgaagctttctcaccctttgtaagaaagtatctgtgccgtgctgtgcaagccatctacctgctttctttctccact

SEQ ID NO: 556303 - DNA, 133 bp, Homo sapiens
aatctcaaaaggggaaaggctttgcatctacacatagagtgaagagaggctagatctgctttctagggctgagcctcactcctgtcagctgagactaatgtacctgcttctcaatgcggaaggacagcctgac

SEQ ID NO: 556304 - DNA, 117 bp, Homo sapiens
taacagatatgcgagaacctgagagacacctgggaacatgtgtcagtgcgttaaatcagttatagtacttcaaaatcattaatcattaatgattaaacctttatctacatatgtaga

SEQ ID NO: 556305 - DNA, 268 bp, Homo sapiens
cagaatgaaattacagtaaacagactatttgtctccacataaacacataccaggtctatcaaaggctaggggatctactttaagagaaagttaaaaaaaaaaaaaaacccaccgtatctatctgtggcttttattgacatttaaagtttaaaacataaaattatttactgaaaattttttcattaatccatgagtcacttcacgtactggcttcaaaaaaaatttattagaaaagcctaaatagctatgtgtgtgtgtgtcttttaca

SEQ ID NO: 556306 - DNA, 356 bp, Homo sapiens
cctacttatccagtgatttatatagcttggcagcagaaagtgagagacccatcagcgaaaggatacacatgtagtgacagctaaatggctttatagggaagtctcaatcatcacttgcgcatcgatcatagcaaaaagaccaatgaacttcaatttgatgttagttcgtgtgggtcctgacgcctgctgacagtgtggggtcccagtcacttatgatgagagtgatgagtgtctcccgtggccgtgtcctctctgaatctctgagcattttatctttcatctctgtgggagtcgtggcttggtaataccattcggagtaccctgagcatcggtgctttgtagaacacagcattaag

SEQ ID NO: 556307 - DNA, 312 bp, Homo sapiens
  misc_feature (128)..(128): n is a, c, g, or t
  misc_feature (130)..(130): n is a, c, g, or t
  misc_feature (167)..(167): n is a, c, g, or t
gttcgtatatcgtacagctgtctgcattgaaaattcatgcatggagaagggagtaagcaagggagaaacggtgcgattcacatattccgcgagatcatcagccagcagagaaatccctccatgaaagntnaaacaagataggcgctttgcacctcctcagcctactnaagctgcagacttaaagagctcctacacacctgagactgacattattgtgccaccaatgatgcttttagggatgctagtgagaaaagaatctgatacgggacaaaatgctcttcaaacatcattcttatcacccacacagggttt

SEQ ID NO: 556308 - DNA, 233 bp, Homo sapiens
  misc_feature (18)..(18): n is a, c, g, or t
  misc_feature (53)..(53): n is a, c, g, or t
ttttttttttgctctgcngctttttaaagatacagctacaatcaacaaaggantggcacatttcagaccacagctacttttctactacaatgtgacttcatatttatttagtcctatcctgtcccaaacaaggtttgttaagacagcttacaaaaatacacacagaataaaccataaaattatttataagggattgacaatttgtcgacgcggccgcgaatttagtagtagta

SEQ ID NO: 556309 - DNA, 359 bp, Homo sapiens
  misc_feature (314)..(314): n is a, c, g, or t
  misc_feature (329)..(329): n is a, c, g, or t
  misc_feature (357)..(357): n is a, c, g, or t
caaaatgatacagtaacattggacaaatgtttgggattttctagcaaaattaaacattcacctctcagatcacccaggaattctactcctaggtttttctcaaggagaagttaagtgcaaatatccatcaaaatgctcataaattttatttgtaatagctaaaaacaagacacaactcaaatacctattaaatgtttatctaggacacaatccaaatgtaatacagtcatgctctgcacaatcatgggtcccatggaaattatatggggaggggaaattcctatcacccagtggcacactgttttttaagtccncagcgggtgttccantaacatcctggggtttcacctttcactnac

SEQ ID NO: 556310 - DNA, 331 bp, Homo sapiens
taatagaaagcagtccttaaccctgcactcatctgtattcagctagtataaaactgcaaatctgctcttatgcctaagacagtttggagtaggaggagacttgggttcgctttggaaagtcaggatgatacgcttcatcccattcctggtttttgtgattaattgtgacctacaaaggggtttactactctcacaagacactttgactttcactatatacatctctttctggttcagcaggcagaggaaatatcgttgactttaggctacctggtaaatgtctcatttgccttgtcatatgttgattccttttccctaatctctgtgtggt

SEQ ID NO: 556311 - DNA, 258 bp, Homo sapiens
cccaaaaaaaaaaaaacgcctttttgggggggggggatttttgggccccggggccccccctttgggccccccccccttttttttgggggcggttccccaaaaaacacctttttgggggggggcccttttttttccccgggggggggaataaaggatgggggggcccccccccgggttttttctttggggcccccccccccccccttttttcccccccccccgccccccttttgggggttttttttggggggggggttt

SEQ ID NO: 556312 - DNA, 283 bp, Homo sapiens
gaattcccccccccccccccccccccatttcttgtcttctgttagattgaagtttgggtgggtcttggtttcctcgtcctttaagttatgatgttagggtgtccatttaagatctttctagttttgggatgtgagtacttagtgctataaattcccctgttaaaactgctttagctgtgtcccagagattctgttaaattgtcttttttttttttttgggggacggagtctcgttctgaccccaggttggagtgtagtggtgtgatctcggttcactgaaacc

SEQ ID NO: 556313 - DNA, 269 bp, Homo sapiens
  misc_feature (91)..(91): n is a, c, g, or t
  misc_feature (104)..(104): n is a, c, g, or t
  misc_feature (146)..(146): n is a, c, g, or t
  misc_feature (166)..(166): n is a, c, g, or t
  misc_feature (174)..(174): n is a, c, g, or t
  misc_feature (210)..(210): n is a, c, g, or t
  misc_feature (250)..(250): n is a, c, g, or t
ctgaaccccacagaaataacaaggctcccctcatccctttctctgaagattagtactagtcctaagtggttagctcccagcttcctttagncagaaaaagagangagagaagtgacacttgtttttttactcacaagcttggagtngggggtagaggttgggttgntgtagctngactttggattagaccaggtcaatccccaattaggncattctcagattttgatcctacataggttacttatcaagngtctatttataaaatgggg

SEQ ID NO: 556314 - DNA, 781 bp, Homo sapiens
  misc_feature (650)..(650): n is a, c, g, or t
  misc_feature (730)..(730): n is a, c, g, or t
  misc_feature (760)..(760): n is a, c, g, or t
  misc_feature (780)..(780): n is a, c, g, or t
cttagtaaagtttgtgtattctagattaccacagttccagagacaatgctggcacaaggcttccagcccatcctgtccactgacacggagaatgaaatcgtcctgcctctgggctccttagatcaggtatccagagatttttactcctccagtgccaggcagggcctacgtccataaactcagcaggaagtagttacggaaaacagatctccgcccttctgcagcccccttaagattaaggaggagtatctaatctctgaagggggaatgaggtaggaggtgggactcaactctggaagtggggctcaggcactcagaccaaactgagcaccagctaaaataggtccagggcagatgctagtttccataggacacaccgacctgtgtcaagtcagttcaccatggttctggcagcacccagaagttaccaccctcaccctggaaatgtctgcataaactgccccttcatttgcatataattaaaagtggatacaaataccactgcagaactgcctctgagctgctactgtgggcgcacagtctgtagggcagccctgctttgcaaggagcagcgcctctgctgctgctgtgcacagccggccgcttcaataaaagttgctaacaccactggcttgcccttgagttccttnctgggcaaagctaagaacccttccgggctatgcttcaatcttagggctcgcctgtctgcatcactgggatcatcttccantaaactagcccacttacatccatgtgtcanggacatttctggagaaagcng

SEQ ID NO: 556315 - DNA, 1078 bp, Homo sapiens
  misc_feature (758)..(758): n is a, c, g, or t
tgggttgagcaccagggtacttaatggagggtccatgacaaggtgcggcctccctaggcccctcccctcttacaaggggtctacatggcaacgtggtgaggaggggagattcaggtgtgtgggtgggggactgagttgttggcagggactccccagcagtgagggttctctctcttcctcgtgtgtgctcttgcgtggggctgggtggcccagggcgttctatactccttggaggccagtgttgggccattgaaggctccaccaccctgtgttgtgctgttaggccaaaattctcgctgtgctcataccagcgaaatttgagcctttgaacaaaagtgtggctcggtttgagggccaatgtgccagcccccaggcgttcaaaagcggtgagagagaggtgggttgttcgccagtggtgtgaacagtctctagagaggaagacaccccaccctgtggtgtggccctcagtgtggtacgcccccgagagtagttgcccttttgagagggggggcccccctcgcgagaaggcccgtgatttctcaaccaaaaccttttcgtgtgaagtgctccactcaatatattgaggggcgaggggtgtatttccctatagagacgcggccgaggtctcgaagggctccacaccagctgttggaacccaccgttttggcacaagtggtgggcggcgacaccaacgggaaaagaggccaatgtttgcccatgtgtttgaaagagccctctccccccggtgttgtccgagnctccttaccaagggggaatattgcaccccttttgtccccaaaaaaaggcctgttttgtgaaaaggcgcccccatatgttataaaacaaggaggccgaagcgggaacgtgaaatgagcctcctcgtgaggaagaaagcccccccccgggggggacccaatacacaagggcgccaacaagattttttccccccggggaggggggggccaccaaactcccaagacaggtccttcaacgaggggaggttgggacaagggtgaaactgggcacatactggaaccgttgcgtggcgcccacaatgaagagacccccttttcccaaa

SEQ ID NO: 556316 - DNA, 158 bp, Homo sapiens
gcatctagaggctgcccacattctttggctcatggctccttatacatctacaaagccagacccagtgtattgaattcttctccccattgctgccatctctcgtgttctgttgcttctgacaatccgtaatccgctatagaagcacccattgtgatata

SEQ ID NO: 556317 - DNA, 453 bp, Homo sapiens
agataaatatgtgaggtaatgaataagttaactaacttgatttacgtatttcacagtatacacatatatcaaaacatcttgttttacagcataaatatgtacacttttttccattaaaataaggaactaggccgagcgcagtggctcatgcctgtaatcccaagtagctgggaccgggggcacacgccaccatgcctggctaatttttgtatttttagtagagatggggttttgtcatgttggccaggctgatcttgaactcctggccttgagcaatctacccaccttggtctcccaaagtgctgggattacaggcgtgagccaccgcacccagccttaaaacattatttatacaatttcccatttaaacatcatatgaagctacaagacaagcactcatttctagaaggaaggctgtttatgaaagtgaactgcatacaataaaactatatc

SEQ ID NO: 556318 - DNA, 307 bp, Homo sapiens
  misc_feature (31)..(32): n is a, c, g, or t
  misc_feature (67)..(67): n is a, c, g, or t
  misc_feature (83)..(83): n is a, c, g, or t
  misc_feature (98)..(98): n is a, c, g, or t
  misc_feature (105)..(105): n is a, c, g, or t
  misc_feature (120)..(120): n is a, c, g, or t
  misc_feature (141)..(141): n is a, c, g, or t
  misc_feature (150)..(150): n is a, c, g, or t
  misc_feature (158)..(159): n is a, c, g, or t
  misc_feature (166)..(166): n is a, c, g, or t
  misc_feature (193)..(193): n is a, c, g, or t
  misc_feature (210)..(210): n is a, c, g, or t
  misc_feature (213)..(213): n is a, c, g, or t
  misc_feature (219)..(219): n is a, c, g, or t
  misc_feature (231)..(231): n is a, c, g, or t
  misc_feature (258)..(258): n is a, c, g, or t
  misc_feature (260)..(260): n is a, c, g, or t
  misc_feature (277)..(277): n is a, c, g, or t
  misc_feature (297)..(297): n is a, c, g, or t
  misc_feature (301)..(301): n is a, c, g, or t
gagcattttaaggaaatgttttggctttttnntaattttatgtcttacagtatggaattataatacngaaatctttatatgangttttggcttcttgngctattntgtacttattcaggnggaaaaagtctttcgattacntatgcctcnatagagcnnaatttcntgagaaattcaacagtcattttcaccngccatattttatcttanggnataacnaataggaaaagncagcttaattatttaaggccctagttncnacacataatatattcgnatagaaatgaaaatctgccntggnattaac

SEQ ID NO: 556319 - DNA, 359 bp, Homo sapiens
  misc_feature (24)..(24): n is a, c, g, or t
  misc_feature (45)..(45): n is a, c, g, or t
  misc_feature (164)..(164): n is a, c, g, or t
  misc_feature (282)..(282): n is a, c, g, or t
aaaaaattaaaaatagggtctttncagctgtgattaagttaaggntctcgagatgagatcaacctagattatctgggtgggccctaaatccaatgacaagtgtctttttttccccaagcaatcaatcctcttgttgctgggaccacaggcatctgccaccacanctggctgaatttttttttttttttgagacaaagtctccctgacatccaggctggagtccagtggtgctatctgggctcattgcaacctccggctcccagggtcaaggaattctcatgnctcagcctcccgagtagctggggttacaggtgttcccaccatggccgggtaatttttggattttagggggacggggg

SEQ ID NO: 556320 - DNA, 119 bp, Homo sapiens
gcggccgcctactactactactgctcgaattcaagcttctaacgatgtacggggacatgtttttggttctggaatataggaggtgctcaataaaagttgacgtccgaatggcaataaaa

SEQ ID NO: 556321 - DNA, 1246 bp, Homo sapiens
  misc_feature (855)..(855): n is a, c, g, or t
  misc_feature (974)..(974): n is a, c, g, or t
  misc_feature (1194)..(1194): n is a, c, g, or t
  misc_feature (1215)..(1215): n is a, c, g, or t
  misc_feature (1231)..(1231): n is a, c, g, or t
ttttttacaaaaaggatttttattaaagagaaatctgtttggtgggtcagatatgaaatagatttacagaaactttacatcaggtgtctccaagacataaaaggccgcccaggaaaagcaacgcccccttgccaggatgccagtgggaggacggcaggatggcagcccaggccacgtggcgtggaccctgcgtaggaggctgcaggaagctccaggctgcccgacagtcacggcgttccccggaaatgggttccctaggagggagcagcaggcggcgggggttccaggcatgtctgtgctgggctcggagctcgtgcacgcacactgtcctgcttaaactcctagtccatgtctgtgctgggctcggagctcgtgcacgcacactgtcctgcttaaactcctagtccatgtctagtgggacccccaaagccgtcccctaaggaatgtgctctggtacacaaggggaaaacacaccaacccagcccttaccgagacagcgggcgcaccagcctgggccacgtgagcctctgctgagctctttggcacagcacacctgggcctttaacacctgtcacttacaaaagtagacattcctgtagtaaaacttcttaaaaacacctatttctgcaaaataatgtgtttctgtatgtggagctctgcaaatatacatgtgctttgggaagaaagcagcgtggaccgagactgagggctggtccggggacgtccgagtgctgctggaggtcggtcaggcttcagtccctgcccgctgcccgcgctcacatgaggtcgttgagctccgcctccagcgccttggccatctcgtcggcctcggagctgctgccctcgtactcgttnctggactccctgctggactcgctggcggcgtcctcttcattcagcttcctcttgtggcctctggaccccggaccctgccgcgctcctctcgctggacgcaggtgccccgagcgtccganccctgcgggtccctggcttccggggctggggctcctcctcctgctcctcaggcctcctcttctcgctgtcgctgtcgtcgctgccttctccaaggatgtcgtccacctgaaggaagagggctcctggcggatgggtagggagctggagggtgctgggggcccccgggcgcccgtcctgatgagcttccccgtgttggagtcgtagatccgaacctcgggnccaggctgggccttgggaagnaccggcatcgggtggnacaaggcggtggggg

SEQ ID NO: 556322 - DNA, 508 bp, Homo sapiens
gagtggagagtgagacatcagtgatcaagcttggggacggtgggagcagtggcgatggatacccctttgagggtaaggacggactcctggctcatgctcttcgccccagagcagtggggttggggagactcccatttggatgacgatgagctatggatccttgggatgaaggccaagtggtccgggtgaacgtatggcaacgccgtatggggagtactggcgaggttcgcccttcttgttcaagggcgaggagtacaacagtctgcgctgggtaacggccgtgagcgatggcttcctctggtgctcgaccacctatcaactttgaggaaggatggcaagtacggctatctgtgcccgatgaaggacccggtccaccatggggcgggaacgctgagaggagagcctggaagttgtccattccagtttccagcgcacatcctatgacaggtgcaccactgaggggacggagggatggctaccgaatggtgcggtgctagctgaggactac

SEQ ID NO: 556323 - DNA, 191 bp, Homo sapiens
gcccgattatcttcatgccactgcttatcgaaatactgcacttggacggccaattgagggaccaactgctaatatcacagtctatacgtcgtagggatttagtggcttctattaccacacgttctaaggggccaagaatactgcttgctgctgctggagctgttgcccatgagacgcaatgagagatttgc

SEQ ID NO: 556324 - DNA, 245 bp, Homo sapiens
ccacgcgtccgagtaaacacaaagtaattatagttcacctttatacacacgttaacagaaatcatctgatcccctttgctgctaacgtgtgtgtaaaggtgaactatatgtaattcttctgtgatgcatcgctggtgtgtgtcatccactgagctcttcgatctccctattcaactgtgactctgtaaccaatctgctagaattctatagatttaataagtaacacaatataaataaaacaacat

SEQ ID NO: 556325 - DNA, 671 bp, Homo sapiens
tgggctgcctggctttttatgacccgtgtgtgggggaagagaagaacctgaaagtgctctatcagttccgggcgtcctgcatcaggtgatggtacatggatcagtagaggccctccggatagccaaagcagtcccacaggatcgatacagatggataaactgccaagaaccagagtttctgtaaaaggccagcaacaagaatcgttcttcgctggtgagtcgtaccaaagtcttcggaaaatcgatactacaactccagcacatgcagatgtttctgatctttatattattattatagaaggtggtaccattatcaattatgtgaagggacatgcaagacaccccagcttttgagggtgctgaggggctaggactagaggcagcccacacatgggaaccagactgcagcctggcccatggcatgttttcccaaggatcagttcctggagggaagggctatggcccggactccgcagtgtcccgagcacacgtgactgacacgcagcccgccgacactgtagttcttggctgggtctggaggtgtctgtggagcatcctgccctcaccacaggagcgtgagccacttctgcagtccacgctgaacatgggaaacaacctgaaaagcaggcaggcctcccggtcagggagcctctgctgtgctggcttcccaa

SEQ ID NO: 556326 - DNA, 395 bp, Homo sapiens
gactatagtaatggaagatatatttgcaaagtattcaactgatcaaagaatcgatagctgctcatatagtaaggaactcaacacaactcaatagcaatgtacaccaaataatctgattttaacatgggcaaaagatctgaatagacatttctcaaaagaagagatatacatgaacaacaggtatattgaaaatgctcaacatatcatcaaagacatacaaatcaataccacaataagattatcatctcaacccaattaacatgactattatcacaaagacaaacaaattatggatgctggcaacgatgtggagcaaaggggaacacttgtaacactgctagtgggcatgtcaacataactacagccactatggcaacaacatatggagtgtcctc

SEQ ID NO: 556327 - DNA, 153 bp, Homo sapiens
actgtgggaggcaaggtgggaagatcacttgaagccagaagtcaagaccagccttggcaataaaacaagactctgtctccacaaaaaatttaaaaactagccgggcatgatggcacacgcctgtagtcccagtcactcaggagaccgacgtgg

SEQ ID NO: 556328 - DNA, 290 bp, Homo sapiens
atgatgaggaattataagccaagcgtcatatagcaaggatctatacccctataccttctgcattcatgaatgtaactagaattaactttgcaaggatagcccaagctaatacccccgaaaccagacgagctacctaagatacagcttagagagcacacccgtctatgttgcacaatagtgggatagatttataggtagaggcgacgaacctaccgagcctggtgatagctcgtctctgtctggatatggacggcgtgcaactttgaatttgcccacagaatcctctagat

SEQ ID NO: 556329 - DNA, 87 bp, Homo sapiens
cccacagcctttctccctgccaccactcccttagtctttcccaggcttactctcccaataaatgtgctagagctctaaaaaaaaaaa

SEQ ID NO: 556330 - DNA, 611 bp, Homo sapiens
aatgtggagaccaggctgggcaacatggtgagaccctgtgtctgcaaaaaaaataaattaaaaaaataggtggacattgtggcatgctgctgtagtcctagctacttgggaggctgaggtgggagggtcacttgggagcccgggagagatcaaggtcgcagtgagcggtagtagaggaccaatgggatccagggcctggttggacagagggagactcggtccccaaaaaaacaaaaaaagagaaacaaaaagaagaacacaaaaaatgggtgggggggggcacggcggagggcccggggaaaagagcttaagaaaacacactgggggggaggggggggcggagggagccacaagatgagacagtagaggagcaacttgcgctacaaaccgagcagaggtaccccagaaaaagagacaaccagggtgaaacaaaaaaaacagggcggggagagatcgaccaaccaaagaaaaaaacaaccgccgcgggtgagaaacacgaaggagcggttgagcaaaaaacacaagcggagagctagggaggcaaaacagggacaaacaaacgcgaggaaagcagagcaggccagaatctaaatagccccccggcgggggga

SEQ ID NO: 556331 - DNA, 337 bp, Homo sapiens
taaacttatacattcctctctttcatatctatcccactacatcctaaccctacacctaatcacataacctatacccccgagcaatctcaataacaatatatacaccaacaaacaaagtacacacagtaactactactaatcaacgcccataatcatacaaagcccccgcaacaataggatcctcaccgaatcaaacctgacccctctcactatcatcaaatattcagataccataaactaataaaaagaaaaccacaaaacaacaccccaacatacacatttcacccacagcaccaaatcacataactccatcgctaaacccaaaaaaaaaactcaa

SEQ ID NO: 556332 - DNA, 282 bp, Homo sapiens
ttcacgtccgaagccactgaagagtcatgccgtgctgttctcatccaaggcggaccaggctgattctgaggaactggctgggatcgcatggctcggcgctttacctgggttggcacacctctgcatcgcagactgcaacatttgagcaatggggacatagtcaggtagacacgacattgtacaatatggacagagcatgtcccctgtggcctattctctgtatttatttactagaggagaggggccactgaaaacttcccaggatttaattcatcaactaga

SEQ ID NO: 556333 - DNA, 1029 bp, Homo sapiens
gaattcacgccgcacgaccgcgtcgcgcgctggctcgacgaacacgcgttcgacgccgaagacaccgtgatgctgcgccgcgtgatcgacgcgaacggccgctcgcgcgccttcatcaacggcaccagcgcgaccctcgcgcaactgcgcgaactcggcgagatgctcgtcgacattcatgggcagcacgcgcaccagttgctgatgcgtcccgacgcgcagcgcgagctgttcgacacgcacgcggggctcgtcgccgaggccgcgaacgtcgcgcgcgcgtggcgtgtctggcgcgacgcgacgcaggcgatcgacgcggcgaaggcgcacgaacgcgaactgcagctcgagcgcgaaaagctcgcgtggcagctcgcggagctcgacaagctcgcgccgcagccgggcgaatgggaagaagtgagcgccgagcacaagcgcctgtcgcattcggcgaatctgatcgagggcgtgcgcggcgcgctcgatgcgctgtccgaatcggacgaggcgatgctcacgcagctcggcgcgatcgtgtcgaagctgcgcagcctcgccgactacgatgccgcgctcggcgacgcgctcgcgtcgctcgagccggccgaaatccagctgcaggaagcggtctattcgctgtcgcattacgcgcagcgtctggatctcgatcccgaccgcctcgcgcaggtcgaaatgcgcctcgatgcgctgcattcgaccgcgcgcaaattccggctgccgcccgacacgctgcacgaggaacacgcggcgcgccgcgcgcagcttgccgcgctcgacgcggcggccgatctcggcgcgctcgaagccgcgcaggcgaaggcgtgggacgcgtatctggccgacgcgaagcgcctgtcgaaggcgcgcgcgcaggccgcgaaagcgctcggcaccgcggtgacggccggcatgcaggagctgtcgatggcgggcggcagcttcgaagtcgcgctcgtaccgctcgcggacggcggcccgcacgggctcgaacagatcgaattc

SEQ ID NO: 556334 - DNA, 366 bp, Homo sapiens
acatcatagaaggatccccgcccttccatcagcctggactaacatgtgataagacagtatctctactataaatacgaatattagctggccgacctggatgccctgcacctgctcgttctccactactcaggaggctaaggcagaaggattgcttacaccttagaggtctcggctgtggtaagcctcgagtcgtgccattgcactccagcctgggcaacagagcaagaccctctctcaaaaaaaaaaaagatgaaattttggaggcaaattttcagaagcaagaaaaccacagagagggtaaacactaaactctgattataaactctactctggcctgggttgcagtggctcatgcctgtaatccta

SEQ ID NO: 556335 - DNA, 559 bp, Homo sapiens
ttttttgtgggtataaaaggattttgtctatattctaaaagacacatgataaaaattttggggaatagagtgtagaaaatccggtgacctttaaagaggctccacaacaccgacccgttgatttgggtaaggttttatatatagagaaaattttaccttttttaaaattttaaatgaaaattgtccagaagtgtctggcctggttttccggttccttggaatgtatgaacctttcccataatagaaagttgtgggaacccagcaatcttggttcacaccggtaatcccggcactttgggaggccaaggcaaccggatcacgtgaggtcaggagttttacaccagcctgaccaatatagtgaaacccctgtttctactaaaaatacaaaattatgccgggcgtggtggcaggtacctgtactcccacctactcagtaggctgaggcaagagaattgcttgaacctgggaaatggaagttgcagtgagccaagattggggcactgtactccagctctgtctccttgtcatccaagcatgggtgacagaggaagactctgtc

SEQ ID NO: 556336 - DNA, 230 bp, Homo sapiens
tgactcgacataaatagaaatatagatttaaaatgtaaaaacaaacaaacaaaaaaacaaaaaaaaaaaaacggcctgggcccgggggccccacccttgaaatacccggcctttggatttttccggtttaattttcggaagggcagattgggcctcgacatttaaattgaaattatggactttcacaagtgttaaaacccaaccaaccaaaaaacaccaataaaaaacaa

SEQ ID NO: 556337 - DNA, 854 bp, Homo sapiens
ttcttgtgcgggccgatcttcttccccccggagctgggcgtgtgcggtcgtagaatgaactggtgagctgctgctgtggctggtggtgctgtgctgcgctgctcctgcttcttggtgcagtctgctgcgcttcctgagggctgacggcgcactgactggctacttatgtggccgtatgtgtgcaggcacgactcccagagatgtgggagctgactgatatggtggtgtgggtgactggagccgtcgcaaggtggaaaccggtgaggagctggcttaccagttgtctaaactaggagtttctcttgtgctgtcatgccagaagagtgcatgagctggaaagggtgaaaagaagatgcctaggagaatggcaatttaaaccgaaaaagatatacttgttttgccccttgacctgaccgaccactggttcccatgaagcggctaccaaagctgttctccaggaggttggtacgaatctgaggattctggtcaacgaatggtggaatgtcccagcgctctctgtgcatggataccagctttggatgtctacagaaagctaatagagcttagctacttagggacggttgtccttgaccaaagatgttgttctgcgctcacatgatcgagaggaagcaagggcaagatttgttactgtgaatatgcatcctgggtatcatatctgtacctctttccattgggatactgtggctagcaagcaatgctctccgggcgttttttaactggccttcgaacagaactttgccacaataccaggtattaataggtttctaccattgccacgacctgtgcattccatattggggggaatccctaatttgcaattcccgacttattgg

SEQ ID NO: 556338 - DNA, 716 bp, Homo sapiens
  misc_feature (211)..(211): n is a, c, g, or t
tggggggccttaaccaagcgtcttttaatttttaaaacggaaaagcccctgtcccacagttactggctgctgagccctttcaaggtgactcagtgaggagggaaaaaagcggaagcgggtgtgtgggaagaggcggggctctgtgggccagctgtgcgtgcctcctgtgcttctccttccctccttctgtggcctctataggcctcccagnggagtgtggttgggaacctgttgcgccagtggtgctcgttggaaggctggtggacagtgcagcgggcgttctggtgacacctgttggcgccagtgtgtgcctcgttgggggctggtgccaggggagagggggagctccctcggtgttcccctgtgcgcacaacacagtacagaaggctgttggattccacccagtgtgggcggctcgggttgccaggccagtgtggcgttacctccgccagtgttttgcagcccgaggccagcgggctgcaggtgcaggactatgcctcaggggtcagggtgccacacacccctgcttgtctcggggccccggggtagctccgggaagggcccaaatggggcctgaacttggagctgccgagggggggagctctcggggaaaggggatcccctcctaggggggagtgtcttgaccctggggccatgtgtccggacccgaaacggggtccatgggaagggtatccactactacggaaaggcaaggc

SEQ ID NO: 556339 - DNA, 693 bp, Homo sapiens
gggagaaggtggaattcgagacgtgagagtacgacgatgaccggagcaggggaaagaagaatgggcaaaaggagagggactgatacagaggcagaatggaagagatacgctgggagtaaacgagcgagggagtgtggaccaagaggcagagagggaagatactgagatcacagaacgagaacatagggaaagagctgtagaaaagaggtggggcaggagaccataggagaagctatcagtagagagcaggcatgaaggcacacaaaggacgaacgaccgatcatgaacgacaacaagccgcagaacaggaaacgatacgatcaagggagtgaagggactgccgaaagaaggggagggaaggttaaccaacaaccaaacagacaagggattagtatggagctatacgaagctctagaggaggatagcactaaaggactgaagaggcgagaaagaaggggatcaaaggacaggaacggacatgacacgggagacgtaccaggggcaaacaagcacaagaattggcgcgggacgcacaggagatacatcatgagaaatgcagaacaataactaaggacgagacaggaggcccgtccaggtaaagaatggctgaaaatcccgatggacggacaaggaggaaagaccggctgaggatggtgaaagaaaagggaaaccgagggacacaggaggcggcaa

SEQ ID NO: 556340 - DNA, 732 bp, Homo sapiens
ctcccggacgtaggtagttgttgggccgggttctgaggcctgtcttctctttacttttccactctaggccactgatgccgcagtaccagacctgggaggagttcagccgcgctgccagagtaagcttttaccgtcgcgtgagcctatgaagtgcacgtgtgtgtatctcaaatataggcattctgagtgggaacttgtgtgttaaagtaacagatgatttagttgtcggtgtataaaacagaccaagctcaagatgtaaagaacgattgcgaaattccacagtcaactaatgcgacttatggtagccaaggaagcccgcaagtgttaccatggaaattgagtgaatggttgagaaatgaagacttggtcgtgtacttaggaagtaaatatctttgaaattaagagaaagtgtggggacagacatgtacgtttagtgtaagctaagtgggctgttcagagagcttagaggtcatatttgtgtaattctctttttaatgacctttaagagagctagggagtgcgaaatgttttcagttagaaagcctttatttactttgtggaaactcgaacgaagaaatgcatctgtcttagaaactgggattattgactgttaggtaaaaaccatgtaagtggttgtctgggaaatcggtcggcaatttggcactgcgcttttggggaaaacccatctcttaaatttggtcaactttttacaagcaacttaatgtacccttg

SEQ ID NO: 556341 - DNA, 188 bp, Homo sapiens
cacggatcccctacacttcgatcgcggagaaccatgcttctggctttagaaatcgcttcctgttcaccatggagggtcctggcttcactcatactctggcttgctgtatccagcattctgcttgtatatgctggtagaagatcacggccgaggaattcgatgccccacgaatccgacgacttgcacgt

SEQ ID NO: 556342 - DNA, 154 bp, Homo sapiens
caccagcagcacatcatgctatgcctttcatagaagccttcagtagattcagtcgtcttagtcgatatttgcctttgtttggcattcaatggcacttattcactatactagtgcttttacatgaaattattttaacatatgcacaatcctctct

SEQ ID NO: 556343 - DNA, 269 bp, Homo sapiens
cgggagctcaggtctggggaaatgtgccatgcagaggcggagcatactctcctgcttctgctcgggcccctctatgagacgcggcacgaggccactcaggtgtggtcctgcctcacatcacatccttgttgctcctgcttggactccttaatgacctctccatcccgcatctccacggtcttccccacgatgttcctcttgtggtgtgccttctgacacagactttgtgtccaggctggtttctcgaatctgagctccccgggatacag

SEQ ID NO: 556344 - DNA, 411 bp, Homo sapiens
agtcgtgaacatctgactctgactaagtacagtatacgcccagtaactctgatgcgggcgatgctcacatgctgactaaactcagaacagcgaacaagactacatgaatctatgactatctcatggattctaaattaaagcttagaaacatttacaatgaataaaataaatccatagcgtggaaagtcaacagctgccttgattaataacaaacctaaagatttcataggtttgaggtatcaactttatcaacttggaattaattttcgagcacagtctctatttatcaagtacgtcctaatatttcaacataccttaatttttcccaaaagaaaaagacagttattattcactatgaaatgcatgctattaatgctacattttttaaaaatctgatttcctctttcctac

SEQ ID NO: 556345 - DNA, 98 bp, Homo sapiens
gtagcgataagctgtaccaccagtggctgtccacagtccgggcaaaagatcatgcaaaaatgggaataaaagaggtgaaaaaccgcttgaagcaaaag

SEQ ID NO: 556346 - DNA, 866 bp, Homo sapiens
gccgaaattccggttcccctccctggcgcttcccccgccccctgttgggcctccctcgtctcccttgtcggttgggccccacgactgggaacccgtgtccctttccgacgaccagtgcactgtgtccgctgttcactttggtccgtgccttttttcccccgggcatgtcgcgccgttactccccgggctggggagtttcaccacacacgcgggcctttctcggttgtgtcctccccacgccgccgccgtgtaccttggcctgggtagtgccccccccgtcctcaagataccccctgtgtgggcgccacccacgcgggtgaacgccctgtagtcttctctggggggttcattccccggcttctcttcgtctccctgcagccgcccgaggccacaaggggcgccccccccccgcgggcgaggggtctccttgttatccccccaccgttgggtcccgtacgggcttccccctggccaagtagtgtccctcccaggacaagtcacgctctgggggttgcgccgggcgcccaccgatcaactggttcggggagtcaccggctctctgcgcccccccggcgtgtttcttagatcttgtgtgggcaccacaggcgctgggctctctccaccgcccatttcccaccaggggatccagcacttctccccgctcccatctggcgtgcaaccccgcttccccttcgacctaatcaggtgctcaccaagctcgcccttggtttagccccgcggtctgccacatgtatccactggcctggatgccatctcgcgtcggtgagcgggagaacggttgcccaccacagggagtgcccttgcgggcatgttatccaaacttggaaagcgtcccccgataggga

SEQ ID NO: 556347 - DNA, 181 bp, Homo sapiens
  misc_feature (51)..(52): n is a, c, g, or t
  misc_feature (62)..(62): n is a, c, g, or t
  misc_feature (86)..(86): n is a, c, g, or t
  misc_feature (103)..(103): n is a, c, g, or t
  misc_feature (113)..(113): n is a, c, g, or t
ggcggagcagaagggtacacgacactatggaaatgtctggatcattccgtnngtgcgtactntgagattgggtgtgggatgtcatngttttcacagcactttnttatcctaangtaaatgctttatttatttatttgggctacatgtaagatccatctacacagtcgttgttacacattcg

SEQ ID NO: 556348 - DNA, 654 bp, Homo sapiens
tgtgttaaaagcccagtgtgacagcgtcatgatgtagtaggtgtctctactggttcttcattaaatccttcgtgttataaaaatgtattggctcttcatcatcagaataggaaaaattgtcgatggattacaacgattattaataagcataatgtcaggaagacagggcttgccgacaattagaggacatgattaaaattgcagtgaagttagaagatgttgattaggaaaatctaattgtgtgccatattgtgtcctccctgtccaaattgggaaatgacttgaatgtcaatgtagtgctgttagggtatgtctctgaacttatacttccttatgtagccattaagatctatatgacatattgccccaatggccagttttggctaaatttgtttggggccttatagacacaaattctggataatagtgtgcaaatagtacccctgtgcacagagtagttaatgttttatgcttccattatcataactaaggactttaacagtctgttaacttataatagagatgcggctacgattcacgagacgatatatgaacgagcatgtggtggaccttcatagattgactacaagtgttgagggcagggatttcatccgagcatatatacgcggcaaacaggctataccacggcaacgg

SEQ ID NO: 556349 - DNA, 171 bp, Homo sapiens
tttctacttctggatgaatgtgtgaccgcatcgactccctgctggagaacgaccggacagtcagagcgcacatgcgtggatgtcatgcaggaccagcttcagctcgcgcgttccaggcatcatagacgtagctcttcctaggacaggttcttcaccgcgggtagcccctag

SEQ ID NO: 556350 - DNA, 223 bp, Homo sapiens
  misc_feature (2)..(2): n is a, c, g, or t
anctagaggatccccgctacaacgccaaggcgattatcatggtgatgctgtgcatgatgttaattcagtgcagggcatcccaagctgtccgtgtgtgtacctgattgtataacttcacgttcgcgatgttatgcctcaggttaacacacggacatctttgaatgcactgaactgatttaagatcatgcacaacatcagcttgatgatcgccttggcgttgtag

SEQ ID NO: 556351 - DNA, 121 bp, Homo sapiens
  misc_feature (27)..(27): n is a, c, g, or t
cctgatgatcaaggcattccttcctanaatgcttgctcagaaatctggcaatattatcaacatgtcttctgtggcttccagcgtcaaaggaacagttgatacgccatctctacaagaaagg

SEQ ID NO: 556352 - DNA, 285 bp, Homo sapiens
  misc_feature (112)..(112): n is a, c, g, or t
gccaagagtttgagaccaacctgggcaacacagtgagaccctgtctttacaaaaaatttaataattaccctagtgtggtggcacacacctgtagtcctagctactcaggtgnttgaggtaggaggaccacttgagcccaggagtctgaagctgtagtgtgctatgatcacaccactgcactccagcctgagtgacagacaggttgtctcaaaaatctaggaaaaattttttttaaatttgctaacaaggcactactacctcacatagtttctgtttcactgccct

SEQ ID NO: 556353 - DNA, 211 bp, Homo sapiens
tatgctcctttttgttgtggttaactgaagaattttcactgtgtttcatgaaaagttttttgaaacctgattaaattgagaatggtagttcatgccttataatcccagctgaggcaggaagatcatcatgaattcaagtccatcctttactatgtaaagttttaggacagcctgaactatatatgagatcccgtggctccaattccagggg

SEQ ID NO: 556354 - DNA, 728 bp, Homo sapiens
cccactggaactggatggtcagtattatggattctactgaagctcaattacgttatggttctcgcattagtcagtctgctgggggatcctgtgacatccaagatcatcctcttcacgcgtctcagaattcagcgagaagagagaggatgactgcgcgagaagaagctagcttacgaacactgtggaaggcagacgacggtgccgaccttgcttagcgcccgtcaaggaatgatgtctgcgacgaggagacttcctaagattgatagctctgtctgctaatgcggtctcgataatgatggagcattctgatgttcttgccagttttcggatggttgttgctcattagaagcatgtggcatatgtattacaagcacttatatactggattaaggcagtgaatcacgcagacgacattggatacagcctcaagctagaacgcaaaaggacgcgagaactcgttggaactgggtatgaataactgaagattcagaacatgagaaatgatgatgacatccaatgcaaagtgtctactttgaagtgatacacggatgatgactctcttccctgcagaaagctggtccagagaaccatgccattgtgatccgacgttcagactccatgacattccttgggtgtatacccccaaatccatttgaagtgcctctgggtgaagccatgcccttgggtgatcagcacatctgttgcagccaaaatgctagaaagggggc

SEQ ID NO: 556355 - DNA, 135 bp, Homo sapiens
ctttttctttttcttcttctttgtcttccttttcttcagcctcatcatcgcttacttctttatcacgttccttctccacaaaaagcgtaatggtactaatccaataacactgagaatgtttcttcacaatctccc

SEQ ID NO: 556356 - DNA, 311 bp, Homo sapiens
ctgtgacaggagcttgagagcttgaggctgcatgtacgtgactgcaccactgggggatgacccaggcaaagggaagcatgaaccaaagaaacaagacctgtaaacacacacacacacacacacacacacacgcagaaagggctgggcacagtggctcacacctgtaatcccagcactttgggaggccgaggtgggaggatcacgaggtcaggagatcgagaccatcctggctaacatggtgaaacaccgtctctactgaaaaatataaaaaattagccgggcgtggtggcgggcacctgtagtcccagcta

SEQ ID NO: 556357 - DNA, 696 bp, Homo sapiens
ccgatgccgcagacctgatttaggcgcgatttgcgataattagcagatcaccgccagcaagctggaccgattgctcaaggtcatgaagatcaagctactgttggataactatatctggtccgtgtctatcaaggaatcagcgagcattggtatctttctagtagtctctgtaaagcttagccggctgatgatcatgcgagagcatactcagacccgtgtcgatgagcgaaccaagatcctgtcatcacgttgatatcagtgtcaacagtgttcacgtgattcgtggtaacaagggcatgttgcaggtggacgtcatcatctatatagacagtgacctgggcacgcgctacatcagtcatgctcgcataggttactatagtatccagatcgtctatcctgacactagcgcctagaacgagatgagccgctacggtatctgcgtgctacgaatcagccatgcaataaattgcagcagaagttgttccgctttgcctaatatgctgatcatgctgtctgttactgacgtagtgatttacgaacactgcagtagactgacatcatggccaagttcgcatcgccaccgttgtagtattgctagagactacatgtaccaagaccctaacctctccaagcagactcgatctaaccaactgtcactagtactaagtaactgagctccgttgaggttcctacccc

SEQ ID NO: 556358 - DNA, 1683 bp, Homo sapiens
  misc_feature (376)..(376): n is a, c, g, or t
  misc_feature (1683)..(1683): n is a, c, g, or t
ggcaagtgatggtcccgttaaccgcgtgaatcaggctcaagtatgggacgatgtgtgcatattcaacggattccgtcactgttcagaggcacagcgatctcttggcaagtaacagtaactctgtgttccgcatcaatagagaagagtctaacatgcagagcacgtcaacaagacatggagccaatgatcgggaggcgacaggccctagatgtgtccgggcgcgagcgccccgatgtccttcgagctaccccgaggtgttgaggtgcactatgacggctggcccagtggtgaggccgtggtgtctgggttcccgggacggtcctggtggctgggcgtccttgggatgaccgcgagtcgtggcagcgcgcgcgtgggnacccgtggcctcgtgggggcgtatcagttggggaggccgggtgacccactcggatgcgcgcacggttgggtcccgagggggctacacatggtagcgggtaacgccacacctatgaaggaacagatggggcgcaatgtattcacacgtgtgtcacatggcgtggacactctgttaaccaaggtttggggggcccgtgtgggtcttcccatggcgttcgttgagagctcaagggccggaagggcctagcgacgaagcgccaactggattggaaacgcctacttggcggaggccacttatacgccgcagaataggggttggaggcattgggaggacgaactaggggctgtgtggtcaccccatacagggtgaacgcgccattttttccaaatcagggaaccagggtgtggcctcttatacggacaggcgggggggaaggcagggcaccgggtggcccttagggaacccttaaaccgaggggggttggcccacatttcggcacttgggcgattcaccccccgtggagttggcgccccacccccacggagtggtacgcccccgacccccccaatgggctcatgtggagccgccttatatgggttaggggagaggccaaccgaccgggggcggtccacaagggcacccgtgggcaagctggaaactttccccacgaaaggccaccgccaacacgggacgccttgggtgttggccataggcacagcgacaggggggcgggcgcaacggccataggagcacccaggagagaggacgcattcccagggtaggactagagattggaggtagttagccgcattgagcaacaacgattagcgcaaagggagggaacaaagcgaaagagcgcattgaggacaggatgcatcagcaaaccccggggtgcccaatagaaaacaccacatagggccccctgagaaggcaaacgaaaatcgccttgtgggacaacggaggaccaacccagggccataaattcccacgcatataacaagtcacaaaactcggcagaaggaatggcttgagggacccacaagcaagggcccattaggaataggcaccgggtggcaacagaaaatctaagcccaaacgaggagacagagggaaacaggcgcacgacgcagcgcgccacatgtcaagtgtgagtagggccacaagacacgaggaacaaccagcaggccagacacgaaatagagaaaaaacgacccacgagaaccacctaacacagcaaggtaagcgcaacaacaaacagcgatagcccagacgaagaaaagttgaggcaaacaccacaccacgagagn

SEQ ID NO: 556359 - DNA, 464 bp, Homo sapiens
  misc_feature (434)..(434): n is a, c, g, or t
tcactctgtcgcccaggctggagtgcagtggcgggatctcggctcactgcaagcaggttcaagcaattctcatgcctcagcctcctgaatagctgggactacaggtgtgcaccactgcacccagctaatttttgcttttttttagagacgaggtttcaccatgttggccaggctggttttgaactcctgagctcatgatctgcccttctcggcctcccaaagcactgggattacaggcatgagccaccatgcctggcctggaagaatgtgctttatttccattttacaggtaaggaaactgagccctagagaggttaagtaacttgcccaagattacacagctactaaaaggcaagacaaggttctggaggaaagctgttaccttccaggtctacaaatcctaaactctacatgagtctggcttacatggcaanggggaatgggagttttcgagatgcccagaa

SEQ ID NO: 556360 - DNA, 158 bp, Homo sapiens
  misc_feature (120)..(120): n is a, c, g, or t
  misc_feature (123)..(123): n is a, c, g, or t
caggcgtggtggcgggcacttgtaatcccagctactcccaaggctgaggcaggagaattgcttgagcccaggagtttaaggttgtagtgcgctagacggcgcctgtgaatagcccctgcnctntagtttggggaacatatgagacccctgccatctca

SEQ ID NO: 556361 - DNA, 242 bp, Homo sapiens
  misc_feature (23)..(23): n is a, c, g, or t
ctgggctggggacagaggggccncttcggcacgctggtctacaccatcaagcagatgaagatgtaccggaggcttcagccaagaatgccccgactgtgcatgtacatccacacggtatgcttcctgagagtctctgctggcctataagcttgggggtcaagcaagtaccatgtacgctgctgcacaggtctgcgtctactgagtggcaatgatgtacacgtgggcgtgtgcaatctctcgtg

SEQ ID NO: 556362 - DNA, 147 bp, Homo sapiens
gtggagacctcaccctccatataccgtcagagagtccacgtgaagcctggctctaatgtctccctggatattacatttagcgacccttccctctatggccccaagagtagtccctaggaggcccctctgatcccaagcggagacaag

SEQ ID NO: 556363 - DNA, 1042 bp, Homo sapiens
taggccgcggtaatcggcagaggaagatgccgacggtaaagaaggcaaggaaagaaggtggctccggcccagtcgtgtcgtagaagaagcaggaggctaagaagagtggtgaatcccctgttggagaaaaggctaagaatagggcattggacaggacatccagtccaacaagagacctcacccgcttgtgaaatggccccgctatatcaggttgcacgcgtgcagagtagcctatcctctataagcggctgaaagtgcctcctgcgattaactcagttcacgccaggccctggaccgcaaacagctactcagctgcattaatgctggcccagcaagtacagagccacgagacaagtgctaagagaagaatgcacgagactgttgtgcccgggccgagaagaagggctgctggacaaataggggacgtcccaacgaagagaccacctgtccttcgagcaggagttaacatcgtcaacaccttgtgtggagaacaagaaagctcagctggtggtgattgcaacacgactgtggatcccatcgagctggttgtcttcttgtactgaccctgtgtcgtaaacatgggggtcccttgactgcattatcaatgggaaaggcaagactgggacgtctagtccacaggaggacctgcaccattgtcgccttcacacaggtgaactcggaagacataggcgcttgggtaagctggtggaagctatcaggaccaatgacaatgacagatacgatgagatccgcgccgctgggtggcatgtcctgggtcctaagtctgtgggtaggaatgcgagctcgaaaggcaaggtaagaatgcactaaagtggttaatgtcctgtgagtttctgtcctaaatatgcatattccaattctcaaagaaaaaaaccagggtcttcccgggggaaaaagtatgagggctgctctctgcccgcccccttgtaaggggatgggccccatgggcaacgaacgccgtaagcagacggaccgccacacacccacaaaaacaccgcgccatcacctagacaaaacagca

SEQ ID NO: 556364 - DNA, 1870 bp, Homo sapiens
  misc_feature (692)..(692): n is a, c, g, or t
  misc_feature (745)..(745): n is a, c, g, or t
  misc_feature (836)..(836): n is a, c, g, or t
ggagtgcagtggcgcgatctcagctgactgcaacctccacctcccgggttcaagggattctgcctcagcctcccgagtagctgagaccacaggtgcgtgcaacaacacccggctaatttgtggtatcttagtagagacggggtctagtagagacggatcactcctgaccacgtgatccggccaactcggctcccaaagtgctgggattacaggcgtgagcacaacatccgcggctgtatttcagagaggagagctgggggtcctggtggtgccaaggtggtacgataatgtcctcttagaggcttcctatggactgccttatatttcagtaacctcaagacaccagttaacctcaaccagagtttgggccttatcagaactcgtgtggtgcatcttattgacagccaggttaacatccctcacccaattattcttttcagtcaactaaatttaccatgccaagtaaccagatgggagcaaatgggtcgactcaacggcagaagggttcgactaggctagcctattcattcatggtccacatctaactggctaggcaccagaaagccacatttgggccagggtgctgtgaatgaataattcagaagacccttttagacactttcacggtcaactagaccattcaccttggggtagctgccttacattaaacttgcaggtgggtaacacggcgnactcaactttatttgtcgcagcacagctcgtcggcacaaaactgcgccagtgnagtcgtaggacagcgggaaaaacaacacccctgttttctttctctcttcttttttatcttaattaaataatttccattaatcatacttttnccacacacacagaatcctacacactgcgacacacacacagatcagcccacaacagcacgacaggcacccatacctaagcaccaaccacacaccagcacgatgacgctacgactagcatacaacactcagccgcagcagacgagcgaccgatacgacacaacgacactgccacaccacaccagcaacacagacagcacatcactcgacccacactaaacagactactcaccaaaacaacccaagctacgacacaacaacaaacattcaccgacatcgcaccaactaaactcagacatacccatccagctcgcctacacgaacaaacataataactcaacacaacatatacacacacacactaccacataactattcatacaaagaacgtccaacatactaacctacattataacaacactacaacaaacacaaacgcaacatataactaatctcaacagcaaaatcatcacaacaaccacacgacaccaacagcaacacaatagtcaactcctttccttacagcacacaaaactacatgtcaagaaagcaacatcactatccatccaccacaccatagacagtaacacactcaacaccagaacaatcagcaccctcaaacaacctacaaacaaacctaccgaacaatacgactcgcagctacgccacaactcatagctaccaaacacaccagatacacacacacctcttaatctaactacctatacaaactcacagcacacacactacaccccatcacacaatcacacaacacaccaacaataatcagcaaaaaaagagtacaataacatatcgatcatataacaatcaaatctcactcagacaccaaatacacatctaccaccctacacacatcactaaatccatcacacgacatcatcaacatcagactaacgaacaatcaacgtcatgaacaataacagaaccaacaaatcagaacatgacgagacaatgacagaactcacaccttataatcacgccaaaacgaacaatatacaacacacacacaacaaccc

SEQ ID NO: 556365 - DNA, 200 bp, Homo sapiens
gagagctattggtaggccagtttataaggtatgtgaaacagaattaagttattggtcctgaaggtgacctaaaggcatttaggctctatcaagggcctaaaatttgggtattatgagtttggtaatccgaatttgtggcagtggcacattatttgagttaaacttaagtgtaattcacatatgcactacgcacagtattt

SEQ ID NO: 556366 - DNA, 629 bp, Homo sapiens
  misc_feature (629)..(629): n is a, c, g, or t
gccagaggctgaccaggcttactgagtggcccacctgcgtggaaggctgccaccgcggcctgatcatgccctctgagcccacacaggatctatgagcggaccctgatgttcctgcaggacactgctggcgtgctgactgctcggatcgaaagtgtggagacaggtctgaagctgggcctgtgtggaacgctgctgtaccacctgatcggacaggagaccatggctgactacctgctgaacaccctcaacaaacaccaacgctatgagtacgtgcagcactacagcctgggcagtgcctgtgacaacgtgaagcgcgtgctgaagagcgagctgtgaagctgccgaagacacacaaggtgaacgtgcttacgagcacagctaacatgaacagtatttagactaactatgctgcaggctatcgtgactgtctgaagactttacgccgtgagctgctgtatatccgtgatagctgtacctagactgttcctgtgtggccactcagcatggctgtagactttcgccatgaaccttgtaccgacttggcgtcacggaggcatgtaggccctcccaggaccttacttgacctcgggtggattgatgccttaagacaggttcaccgttccaggtgn

SEQ ID NO: 556367 - DNA, 298 bp, Homo sapiens
  misc_feature (270)..(270): n is a, c, g, or t
gttacagagtagtctagagcggccgggggccattgattctcaccgggggttaccaattaaggtcaaccattcagtcctaaagtgagtcgtattaaatttagacattttatacttttggtcttttaatgcggtggcgtcgccaaagaaccaatgtaaaattgtgaaggggcttctgtgaggggaagggctctttctagtatgcctgggtcttggacactttaagctgtgcgtgaacgtggtgtctcccttgttatttccttgtggaacaanagaccgaggtctctttgtcttcatttgg

SEQ ID NO: 556368 - DNA, 797 bp, Homo sapiens
gaggcgcgtcgggaggcgagcgtcctcctttggtgcgagcgccggggctcggcttctcgaaggaggaagaaactgaggcctggaattgtgattaactcattcagggttacccagtgtgatagagcgggacaacggaccagaatcaccagcactggctgaaggtcaccttaaccaatgggggaatctccttacaagtttggacatgcacagacctttgagccagggcgcaaatttttttccttgattttcggaacaatgcccaagcttaacaagagtcctgaagacaggcgaccttttattaactcagggtggacctgcgtacggtatttccaacaggattgcaggacgggcactccttggggcggcgaccttgggcacgtccattaccagggacgggacggtctggcgccccaacggaaatacttacgggaggaggggcaattcccacaggccattcccaaggcaaggaattggaccgcacacggtttgggcacaggacggaaacggggccatgtgggcggtcggaccagttggctctccccaagtgtaagggtgtaggggccacaacttttaccagcggcacacactatcttttcaccggacaacattttgttctccaacgcaggggtttcacgacacagccagcccatttataaccgcaaggcgctccttcccgtgtgggacagccctttaacacagcatgttgacccccacaaattaattttcgtgccccaaaccacccagaggcacatttctcatagcaaaggcagaggaacggcagggggaccatcctgggg

SEQ ID NO: 556369 - DNA, 690 bp, Homo sapiens
accacactgggatacagctaccggcgcttggtggtttgtcctcgttaatacgtggtttgccttggatgactgactttgagacgtggcgagagggattaaacgatgctgagaaacttgaggtccctagaattagcaactgtgaaacggtcctcaggctacaagctacatgtcctgcaaggtggcgagaagatggtggtgttatgagtcgtaagcgatgcaggatgtctatgacagtcttgcctccacgaggggcactgtgccgagctcgggaaaccttcctgactgtatttcgcgccagctattgggtggatccagggtcacaggtatgtaagtaccacagtgcacataaaggacaccacccgtgccatcgaacaatggtgtttatatgttttatactagatcagtcgttgcaccagctaattaaagtctcgtgggtcgtctgttcgaggaaagcccttccatggtttaaggccttattaggttctataggtatttcacatagagatacccatcggcctatactggcgccagacggttcagcacttaatttcgctgagtctgcccggtgctgagggctacagggggataccttgtagacccgttagaaattgcctcacgtgcctgtgtggcaatccaagaatctttccaggtattccacttttacgtgtataccaggtctctcgggtctcc

SEQ ID NO: 556370 - DNA, 975 bp, Homo sapiens
ggcacagatcgagaacatcgaacaggagttccgggattggcctgaagctcatgctgctgctggaggtcatctcaggtgaacgcttggcacgccaaagcgaggcaagatgagagtgcacaagatctccaacgtcaacaaggccctggatttcatagccagcaaaggcgtcaacctggtgtccatcgttagccgaaacatcgtggatgggaatgtgaagatgaccctgggatgatctggaccatcatcctgcgctcaagccatccaggacatctccgatggaagagacttcagccacggaagggctgatcctgtgctgtcagagaaagacagcccttacaaaacatgtcaaccatccagaacttccacatacgctggccggatggcctcggcttctgttgctatgatccaacgacacccggcacgagctgcatcgactacggggacgccagaggaaggaatgatccaactccaccaacatctgactacaggcatcaagcacgtgcgcagaagaagttcctggacaaacccccaacatgctggattgccgacagacccacacggcggaaatgcccgaacgacctgaagacaagcatccatgaacttcacgtgtctcagccaataccaagccatcaactggacgcccacgaacgcggaaaacagcagccactcgacatctgcacaggtgggcgacaacacggaacgcgacagcatactgacagaatacgagaagcagcagtgaacggggcgagatcgccgacaaaccgggcgcggaaccggggcaacacacagaatccatgaccacagaggaacgaaaacggacagaccaggacaggagggaggcagcgaaaaaagccagacagtggaaacgagaagacaaagagagagaccacaaaggcacacggacaagagagaaacaggggagaaaaaagacgaacgaacagagaagcgaccaacaaaacgaccacaaggcgccga

SEQ ID NO: 556371 - DNA, 1004 bp, Homo sapiens
gggcctaaagggcccacgcggtgcagtggagcagctgggctggtgccgaggtgactccaacctggaggccttcctgcaggcctcccctcacttctgaaggtcccatccctgttgccctccgccaggccagggctgggcactctcttggagaccaaaagacccatctcaagaacgagtggcggtgagccaactttcccctttggaaaacggcaccttcaaaatcactgcccagggttcccacattgttccccaagggcccagagggccatccaatttgccgggcccccacacagtttcttggggttcccccggcctctagcttggaccctgtggcaggccacttttccaaagggttccgcagggaagggtttggcgggcgacacgctacgagggcctacaacttcctttggaacaccaggagtccctggtcttccccagaggatcctcccggggcggtttcattattatgtgcgccccaaaagagttcggaaaggaaggccggagaattggctcgcccacggtttcacccacgtgggttacacagaggccgttgacgagatacatggtacgtgcgaacctctggctccccagtgccccagggattgctcaattcccaaggaaattcggagcggaaccgactggaggcgacgcgtgcggagacaccatccggattgtcccgggaagttggggaaactccttccttttagggaaaggcaaatactagggtctcctggcgcccaatgaatttaggggtgaggccccagaacccggtatatctatgattgcattgcggaacccatctggagtggctgccccagggattcgcgcactgagaattggctgtggctgacacgcgtatacatcagttctgtcaagagcctggtgccggggccctggtaaaggccaagttttctgggccaagcccctgtgccacgtatcgagagactgccacaagtcgagcggcgaaatgccaccatcttccgtgtggggcgcgactccagcgg

SEQ ID NO: 556372 - DNA, 335 bp, Homo sapiens
  misc_feature (248)..(248): n is a, c, g, or t
tctctaaagcagtagccaaacccccctttgtaaaaggactcttccatcagggatgggaaaaccattggggaggactaggacacatatgggaatttttacctctcagggccgggaggaaagaatggatataatctgaatcctgttaaattttctcaaaactgtttcttagccgcactgtttagggaaaaaccaggaccagtttttttttgtggttttgggaaaaattatttttgttgggggaaattttntggggggggggttgagttgggaaaaatttctaattttttttgtacatttggaacagtgaaaaaaaatgggacccctttaaactgtca

SEQ ID NO: 556373 - DNA, 444 bp, Homo sapiens
  misc_feature (25)..(25): n is a, c, g, or t
caggtagtaaatattttaggctgtntgagtcatggtcttagagtctcttctcaactctgctattgtatgaaaacagccatcaacaatagaaatagaaaacagccatagacaatacctaaataaataggcacgactatgtttaataaaattttatttatgggctgggcgcagtggctcacgcctgtaatcccagcactttgggaggccgaggtgggcggatcacctgaggtcaggagttcgagaccagcctgcacaacatggtgaaaccccatctttactaaaaatacaaaaattagccaggtgtggtggccggcgcctgtaatcccagctactcgggaggctgaggcaggagaatcagttgaactcgggaggcagaggttgcagtgagctgagatcacgccatcacattccagcctgggggagaagagtgagatttcgtctcca

SEQ ID NO: 556374 - DNA, 210 bp, Homo sapiens
acaataagataaccctcacataagaagttctttcaaaatacaaaccgcacacatcagagaatagtgctgcattagcaaagcagacagtcgaaaattaaatacgcagaagtagacattcgtcataccaaggtaatgtaacgcaaacaagactgagagcaattcatgagaagcatcagaacttgaaccgaagattttcattttaatacctaa

SEQ ID NO: 556375 - DNA, 201 bp, Homo sapiens
tggatcccccatcgaaaccctatacaagtagaccactacagccaaataaccgcgttaattgtctgtagtggtctagtatagggtttgatgacaggttttcgatgacatcgaaaccctctccgaggacaatatattaaatggatttttggagcagggtttgatgagggttacgatgagggtttgatgaccagggtttgatga

SEQ ID NO: 556376 - DNA, 159 bp, Homo sapiens
aatgtacccctctcttgaagattgctgaagttgaattaaatagaactgcagatcgatgaaatctgcaaagaaatgatacagctcctgatttgatcttcgtgtcctgtggggactgtgggaggaggggatctgggatggggacgtaggacataaccgcgg

SEQ ID NO: 556377 - DNA, 1110 bp, Homo sapiens
ggggtgcgggtgcccgggtgaggggcggagctgggggcactggcgtccggagcggctcgctggctagtattggcacccgtctggtccggggctctccggagcgggcctagcttgaggaaacgatggcgatgtctccgccgcatggagcggctcaggccggagccatggttaccggtcgaggtctagttcgatcgttacccgacagacgagcgaccattatgtgcccataacgcgggtgaaagatgtccttcggccttctccgatgtgttctccattgtgatccccttttctctaatcgtctcgaggacaacgtcattcagccacagcacactgtgtggctggcgtcgtgacgttacgcagcgaacggtagactcattgtttggttccatgaggcatgatagatgatggatgacttgaacgaggctaaggacttgtgcactataccacttaacgcattggagcaaggcatacgcatagtggtcgagtacgcaatcgtggtccctgtcgtatggcaacgtgcatagcgcctgaggtgaagacatgcgattatgaggacaacatccggtgcgcgcaaaagcagatgccaatttgcaaatcgaaaatctcgcggccaccgacagtacgcggtaggcggcctcagaatggataagtaacccagttggtgtgaggatattctaagttgtttgcacatatggcacgcaccaggcgctagggtttgtctaggccactccgcttataggtttataggcgcgccaaaaggggcactcggggcaagattggccacaatatagatgccacactaggtattctcattccatgcaaagacattcccaaccgttgggccaaagaggcagctctttcccatgtggacagccatttatgccgccaagggggggattttcacaaacgacgtcgacgagtaaataggtattcacgattgcaccgaatggatacaccgttgcgagaggtgtaacacagttaacaccttgtggcggtagtaaacggcaccagatagagggacggtaagttattgaagacagaacggtacaaccaaagagttggaacaggaccccataaaacgtgtaggaattaggacgccgtgtgggagga

SEQ ID NO: 556378 - DNA, 272 bp, Homo sapiens
  misc_feature (184)..(184): n is a, c, g, or t
  misc_feature (259)..(259): n is a, c, g, or t
acggatccccacggacgcattcatagcagtacgaaatagatgtttgacaggtttgcatgagtgtctaagaatttatatccagctgtcattaaagaccggtaataacagacaaagtcgaagaaaaatataacggtcactgaattatacagaaagatgaaggtgcttaatagtggtatcttactgntcaaaagcacaagagcagaacatttaggcttagtttttagaaacagacagcccagacggcggtggctcacacctngttaatcccagca

SEQ ID NO: 556379 - DNA, 477 bp, Homo sapiens
ttgattattatctagaatccttctctaacagaaaatttcctatcattgtaatctgttaacctgggggatacagttatataggaaatgcagagtagatgcatgagtctttatccctatatactagtttaaaaattatgagttggtccacataatattccatatacttatttttacttcatacagacttatagatctatgcattaatcttatatatcttattaatgctcaaaatttttatcattgatgataatcgcctcttggggtggaccccctaagttctttggaaccctagtaggtattagagagttacctgtgcacatggtatggcaaaagtacacgggattaccttatataaagtttcttctccggacctgaagccagccatttctcccaggccctctgaatcctttcagtggattatagcatgtggtgaccactagctggaatgctagagccctagagcttaaagtatacttt

SEQ ID NO: 556380 - DNA, 328 bp, Homo sapiens
ctggcatacgtagtgcgtggacgtctggctccggcggatagagaagagcgagtcgtcgtgtagcgcggtcggcggttcccatgccatatggattctggtctactggtggagattggctgagtccctggagaagccgacaccagagagcctttagtgttctctattttcctgtctatgctctgtctcacttaacactacgttttctgctatggtctgtggttgatgacctcgatatgagtttcgagtgttaacgtgtttttgtttgggaagtaattttgtttgaaaatgctctcacatacaggaattagggcctagattgtaagctctt

SEQ ID NO: 556381 - DNA, 959 bp, Homo sapiens
gtgatgttcagatacattataggctcgaggtttaatacaaaaatctgatgtattccagtcacactgtaactgaaaaagatattctaagctcatgagcctatctctcatccaaataacagttgtctaagatcattaattgattgtcaatttttgatctatttgagtctaagaattccacaattttgaggaattctttgccaattattcacatattctgcagtttgaacagaggagtgtaaagcaattccagcaggcgcagcagtagctgtgactgcaataaggcccataatcactgcaatcaaagtaaaaatgaatcttttagatctagttagaactccttttaatacttaagatatgtacggatggagaagcctcccacggtcgatccatggacacagggatccacacgccttctcttgctcttacagagtaccattctgccaatcaaaagttgaatcaatgcaagtaaacaatctacaattttcactggttgtagtatgggaatctggtttaatagctatgtttcctacaactagcatataaggtggttttacacaacttgcaaaggaatttcagatgtaatttaggttaatagtataatatggcttatgatttctgtcccctacttgatttccagaccaaattctaatgtggtatgaggccacagtgagcttccattatcctgaggtgttcaggaccaactaagaggactaactaaccttggtccgggggatgaaattctcttttcaccccattttcatggatagggtgaatcttggcatttattagactggttagcctttatttaatattacttaggcggatagggccaaagattgagcgtaaaatttatggttggccacagcaaatatatggccagcgccacataatattacatagttatatcctgttcgacattcaaaatttggatgatgacagacagccaagacaaaagaaca

SEQ ID NO: 556382 - DNA, 485 bp, Homo sapiens
  misc_feature (42)..(42): n is a, c, g, or t
  misc_feature (57)..(57): n is a, c, g, or t
  misc_feature (76)..(76): n is a, c, g, or t
  misc_feature (94)..(94): n is a, c, g, or t
  misc_feature (116)..(116): n is a, c, g, or t
  misc_feature (134)..(134): n is a, c, g, or t
  misc_feature (147)..(147): n is a, c, g, or t
  misc_feature (186)..(186): n is a, c, g, or t
  misc_feature (205)..(205): n is a, c, g, or t
  misc_feature (296)..(296): n is a, c, g, or t
  misc_feature (312)..(312): n is a, c, g, or t
  misc_feature (348)..(348): n is a, c, g, or t
  misc_feature (365)..(365): n is a, c, g, or t
  misc_feature (380)..(380): n is a, c, g, or t
ggcccggtgagtcccggcctgatgtaaagcctgtgtttcccntggggaattcccgtngccatgcaaagaataaccntctgagttttcctgtgtnggagatgttcaacccccctccngtggagtggaaaggcccnagttgaatactgncataattagtgtggaaccccagaagggccacactctggnctaatcagcccctcaaagncctttctagcccaatcctaacaaaccttaaaaacaagtcttgaaaggatcaagctgccctacaagctgattacctgcctgctagacaaagnagagagcaaaatctancacatctacaacgttcagcatccgattaaaaaagtnctagatataggaaaagnaaatggtgctcattnccaggagaaaagtcagtcactgcaacagccccaaaataataaagatatttaaattaataaacaaggctttaaaaagtgattatataatgatatgaatgttaggga

SEQ ID NO: 556383 - DNA, 183 bp, Homo sapiens
caccccctagcgtcatcaataatgcatgtggaactataggtccaaggtctccagaggatgaaagctggcgtctgtcaatgtcctactgagaacagcacagctaacctagctagcaacattggtttctagtctagcacaatatctaccttatagaatacagtacaatgatacacaatctagaaa

SEQ ID NO: 556384 - DNA, 398 bp, Homo sapiens
aaaccatggagctgatacttccttctggtgccagagtgggtcatcgctccttgatgagatactacaaacagcgatttggcttgccaagagctgtgacagttgctaggaatcaaaaggctgtgggcagagttctccagcaataccgagccctggggtggatgggcagcacaggagcagctctcatgcgtgaacgggacatgcaatatgtgcagaggatgaaatcaaaatggatgctgaagataggaatgaagaacaacgccaccaagcagatgcacttcagggcccaagtgaggttctgagaggctgaaacagatgcatctcccgctgcacttccctccttgtctgaggacagggaagccagattgccgaatggttcctttgctgctacttcatttgtt

SEQ ID NO: 556385 - DNA, 386 bp, Homo sapiens
accatccttattctgcacccacagcagtctgggagacatgagcaagactccatctcagaacaacaacaaaaaaaaaaaaaaaacaaaaaagaacttctgtctaactacagggggtaggaatcatgtgctagcgtgtcctgactgtcagagccttcctgtatgtatgtgcagctactaggaattgaaaccaccagctcttggaaacttgtgccaggcttcagggtgggagaggcagttctagagccgcagccgccaagccaagccaaatggccccatcatctctcgcaagagcaggagaatacctgggggcagaggccatagttgtacctttctgggcaaagggtcagtgtctgtagtgtccatatagggctgtgggtggcagaatt

SEQ ID NO: 556386 - DNA, 727 bp, Homo sapiens
gcagatttacatgctgccagcgtcacctggcctctactggaagctgcttcccggagcaggctgcgcccccgggcgcaggtgaccccgtgggctggggtggctgtggcctggcgctggctggtgctgaccgcgtaacggtgctgctggccgcaaacctgacctggcagccacaagctgaagcctgctggtcattgtgtgcgtgtgccggacccggccagccatgcgccgacacaaccaggacaagttccctggcctcctaccgctacagccccgactgcctggctcagcctgccccgctgctgcgtgggcttggttctttgaggaattttgtcccaggcgtcaaacgctacctgcgccgaagctgctgcagcagaaggccgtgctgctggtggccacccgcctgcccaaggccagctgcagtatgccctgcctggacagctgagggatgccccgtgcggtgcaggccggagcccctcggtcccccgtgaggagcttgagaacaccgggatgggccgctgtgcgggggtgctgttccttgtcccaaaggcagcagtccgggccacatattcccgcacggtggagcaagggccgttgtggctgacttcagacagctgtgcaagcgcgagctgctggactgggctgtgtcctgcgccagcggtcccgttgacttcatgcccagttcatgctcaggacttgcctactgcttgactctcctgggactgttgcg

SEQ ID NO: 556387 - DNA, 1223 bp, Homo sapiens
tgggagacacaagaaaaaaaaatttttggggagagataattaaaaagggggggccccctctttgaaacccccccttagggtgggggccccccctttttctccaaagaggcgcccaaaagtggggagatagtttcttttcaccccccacacacccctctctgtgggaaaacacccttttttcacaccccccagtgtgtttttaaatctctccactcacaaattaaacactgtgtgtgtgatacacaccccctctattctttgtgatgagagagagtgtgtgtgttctctctctgtgtgcgggcgccagagaaacactctgtgatgacacagtgtgtgccctctgtggcggcgagcggtctctctccacacacacacagtgtctctctctctgtgtgtgtgcgtgtgacacgcgtgtgtggcgggagagtagtagtagagacatatatatatatacacgtgtgtgcgccaaagtgtgtagtacacacccgtgtgcgccacacagggcgcacgccgtgtggggcgtgtctctcatcaaagacgcgcaccctccgcgcacaggtgtgcccgctgtgtgtgtgagagacacgcctgtgtctccacccccacagcacacacagcagagagacacacacactactctgctgtgtgtgtgagaagagagagagagtaagagacagaggtagagagagagagtgtgtgtgagacgacactcgccccccctcagagagtatgtgtgtgagaacaccactctctctgtgtgtgcacacacaactcttttttcacccacagtgtgtctctctcttgtgtgtggacacacaaatatctgtcgggcgccctccctctcgcagggagtctctcataaagagacacacgtgtgtcgctctctatttctctctctctctgatacacacccctgtgtgtgtgcgcgccacaaaagagcgagagaaaaactctctatctcccatttgtgtgcgcgctttttcccccgccccgagagtgttcaaaaagtgtgagacacatctcgtgtgaagactactaagaggagacaaaacaccctctcgcgacaaaatactggcctaaaaaaatatgtggggagcaacagcagggagtagtggctcattataacaaaaatccccgcggggaataaacacaacaagggggggcagcaggagcgcaagagaggcccccccaaggtggtcaacaaccccgcagagaatctctca

SEQ ID NO: 556388 - DNA, 133 bp, Homo sapiens
ttgaatattttatctttccttggcttttcccctgcttccccttttgccaatctcaacacccaagttgaagactttttttttaaaatggtttgtcctgaagcttttgtctaattaaaaccctttcaaaacagga

SEQ ID NO: 556389 - DNA, 157 bp, Homo sapiens
  misc_feature (26)..(26): n is a, c, g, or t
  misc_feature (92)..(92): n is a, c, g, or t
  misc_feature (100)..(100): n is a, c, g, or t
  misc_feature (113)..(113): n is a, c, g, or t
  misc_feature (125)..(125): n is a, c, g, or t
  misc_feature (127)..(127): n is a, c, g, or t
  misc_feature (129)..(129): n is a, c, g, or t
gcttcaggggctgggtgctggggaanccacattcacttcggcgtccagaggcagaagcacaaccaacaagaaccacgggggaggcgcctttnctcctttnatgcctgtttggngccctctactgncnangcttttcccctttcttaaaacagccaac

SEQ ID NO: 556390 - DNA, 279 bp, Homo sapiens
atcggtgttacttcacattcggctatagtcctcatcctctatagcaagtgaacaggacttaaccctgtaatatatatctatacagagcctagcacagtgcctaggtgcagagtaagcacttagtggacactggctgaatagaccgatagacaattctgatttgtaaatggagaagaagggagatgttttcttcactgggcagacagcacagcagcaacaaaggaaaatgaaaagcaatggcgatgagttcctagtgagttagaaagcagcaggtcatcc

SEQ ID NO: 556391 - DNA, 494 bp, Homo sapiens
catcgggactaaccccgtataccttctgcgtattgaattgactagaaatactttgcaaggagagccgcaactaagacccccgaaaccagacgagctacctatgaacagctataatagcacacccgtctatgtcgcataatatgtgcgaagagtctatgggtggaggcgacaaccctactgagcctgcgttattcctagtctcttgtctgtgataatcttagttcaactttaaatttgcccacagaaccctctaaatccccttgtaaatttaactgttagtccaaagaggaacagctctttggacactaggaaaaaaccttgtagagagagtacaaaatttaacacccatagtaggcctaaaagcagccaccaattaagaaagcgttcgagctcaacacccactgcctaaaaaatcccaaacatataactgaactcctcacacccaattggaccaatctatcaccctatagaagaactaatgttagtataagtaa

SEQ ID NO: 556392 - DNA, 615 bp, Homo sapiens
  misc_feature (358)..(358): n is a, c, g, or t
  misc_feature (421)..(421): n is a, c, g, or t
  misc_feature (424)..(424): n is a, c, g, or t
  misc_feature (514)..(514): n is a, c, g, or t
  misc_feature (516)..(516): n is a, c, g, or t
gacacccaggcttacactttctctcggctggaggtgtgggattttggggggtcacaattctacgagacacagcgttgaccgttttcgtatttatccccctcacgaaggaaattcgcccccgagagaaaaatttcgcacgagggccaattttttttttgggaaaccaccctccccgttatggccacggtgtgggagttcccagaacactggacactccccaagcctccaagaaagatatccccctttggcgacggccggaaccccccaaggaaaaacccccggcgttattccagaaaaacaggggtgggcccccctttttaatttgaaggtttaccccccaccccggggcggggggggntttattccacaaaaaagctagcccgcccctttcccaattcggaatccttggcccccttcccanctnccaccccccaccctgtaaactagggcggctgcagcaagcagacctttgcatcaacacagcagacaccaaaaaccagtgagagccccgctntntaccgcccggccccagcactcgctagctttcctgacacctggaactgtgcacctggcaccaagcggaaaataaactccaagcagccagtaaaaaaaaaa

SEQ ID NO: 556393 - DNA, 902 bp, Homo sapiens
gcgagcgccacccatgtctggttcaggatgacatgatgtcttgtgactcgcatcttcgtctgccccgccctgctcgagtgtcgcccctgtggccgctcccacctacgggaatgctcccaccgaaaagcggtgctccaagtgtgggcgatactcttttgggggtgaagtacccgacgaaagagtgggctttatccgcttgttagggcgacctctaatcctttttggggcctgccccgcatataaatgttggggagaaatgttgaaaagagagctcttagagctctgccgcatagtggacccggggggacgcgtggccccacatttgccgagggaaaaccttggggtccaccaccagttgttgggaaaacccagggccgggggaacccctgtttgagggaacaaggggccaataactcttaggtgccaacttcatattggggcccccccgggtggcccctcgagtggtcctctcccccccgcggtatatttctgggcgcccgccactttgaccgccgagcacaataaaccttctgttccggccgtttgtagtttggagcactaaaaatggcacttttcacatgggggtgccccaaaaacggtaaccccttggggggggtgaggaacccctgtaaaaaagcgggggttaaactcaagagaccccttggttccaccccaaatgtgtacacaactcccgtaaatgccgcaccaaaaatgtgtgaggaagaaaactcctcgtggggcataccaccgagagtgagtttgttcccctggcccacgcgtttttttaacattttgtttgcctcaaccgttagggacggttctgttttccccggcttgtagggaaagttaaaaacccttttcaaaaacatttcgacattcgcaaatagataaacaccacaaga

SEQ ID NO: 556394 - DNA, 506 bp, Homo sapiens
atggcttatgtttaagaaagtccatggccgggtgctggtggctctcgcctgtaatcccagccttttgggaggccaaggtggatggatcacaaggtcaagagatagagaccatcctggccaacgttgtgaaaccccgtctctactaaaaatacaaaacttagctgggcatggtggcacacgcctgtaatcccagctacttgggaggctgaggcaagagaattgcttgaacccaggaggcgtagattgcagtgagccaagattgcaccactgcactccagcctgggcgacagtgcgagactctgtctcaaaaaaaaaaaaaaaaggtcctgaagaatgcagcagcctagaagggcagtagaccaaaggtggtgagaaataggagctccctgcacagaacaggagggctctcctgtctattaactatcaggcgggcagatctcgttagtaccacagagccatcatagaggaagccacagcgttgtctagttatgcaaaggaggctccta

SEQ ID NO: 556395 - DNA, 260 bp, Homo sapiens
  misc_feature (159)..(159): n is a, c, g, or t
  misc_feature (161)..(161): n is a, c, g, or t
tcgatgggcgacgggatcagcggagagtcacaggtaggtcgcggagcagtgtggcgtatagtgagtgcaccaccccccaccctgtaaactagggcggctgcagcaagcagacctttgcatcaacacagcagacaccaaaaaccagtgagagccccgctntntaccgcccggccccagcactcgctagctttcctgacacctggaactgtgcacctggcaccaagcggaaaataaactccaagcagccagtaaaaaaaaaa

SEQ ID NO: 556396 - DNA, 824 bp, Homo sapiens
gggctgaatctctttacggcattcctcagaccctgcctgcatcccatgtgaaataaaacagccttgtcgctcactacaaagcctgtaaggtggtcgcttcacacaaatcgtcgcatgaatatttggtgccatgactcggatcggggtacctcccttgtggagatcaatccccagttcctcgctgactcttagctccgtgagaataagatctatcctaggacctgcaggtcctcggattgaccagaacctaggaacatctcaccaagttctcaaacatctggagccccatctgaataaaatctggaagctgtgtccaaactcattctggtcataccactcccagagcccctggaacatctgggtccaagcctctctgattgacttccttccgcgagtatcttcgtcgagcgttgagcaggtgaagactgacactgcgccagagtcgccattgggaagccccctagaccatcacgggatgccgagcttcgagtaactctcacagtggagggaacgcgcatgaaaaaacaaacaaacaatagaaatttcttttggtagcgagaataaaataaaagaaaaaaaggactttttcttctggactgaactatatttaaatctcaaaggatggaccatctcacaaacttcctacagcaagtactgtgagaactcaaggggacaagaaaacgacgaccacttcttcaagaggaggaagaaatctgatctttccctacgtctgcttagtgggtaactttgggatgtccctagttgtgcttcccgggaaaattgctttccctggtttcccctttattatggggtctccttgaacc

SEQ ID NO: 556397 - DNA, 158 bp, Homo sapiens
ggaaaataaactccaagcagccagtgctggggccgggcggtagagagcggggctctcactggtttttggtgtctgcactcgctagctttcctgacacctggaactgtgcacctggcaccaagcggaaaataaactccaagcagccagtaaaaaaaaaa

SEQ ID NO: 556398 - DNA, 173 bp, Homo sapiens
actcatcttttacagtgggggtgaattcagtgtagtacaagagatagaaagaccagtccttgcttgaaagacaagtctagaatgctccactattttcaattctaccctccattcttcagataagtcaacttcaatgtacggatggtatgaaaccctagacacatcagcaattc

SEQ ID NO: 556399 - DNA, 231 bp, Homo sapiens
aacaaaccaaaacattttccccccacaaacttgcaacaaaataccccccatcccccccgacccccccttaccattttgcaaacaaaacagaaaaacaaaacaaaacagaacaaaataaagtggagacctccacacctggggcagtttagaaggaagccttccccaatttatagcatttttttttttttttttttttttttttttttttttaggcagcaacactggccttgg

SEQ ID NO: 556400 - DNA, 153 bp, Homo sapiens
ccacaggtaagaatggagaaaaatgtcggactcacgccctactgacccaggaatttcacttcttggtacctacccgtgagaaacacgtcatgcattgtgcacaagcgggttgtgttatgacgactgatcgcacagcaactgtttgtaactatc

SEQ ID NO: 556401 - DNA, 951 bp, Homo sapiens
agtgggggctcacgtctgtaatcctagcattctgggtgaggccaaggctagtgtagaccgcgaggtcatggagttcgatgaccagcctgactcaacgatggtgtaaaccaccatcgtcgtacttaaaaatacaaataattagaccagtgctatgggtgagctgctatgccttgtaagtccccagctacatcgtggatggctagaggccaggatgaatccgcttgaaaccctgggtacgatcggagagttggcaagtgatgcacgagagttgcagtctactgtattccaagacctagggtcgaccagagcaacgactccagtgccccaaaacattacaacctacgtaacatatagacacaataacacagatacaagagtcaagattaagtgaaaatactcacatccaagttgacgaagggcggaggcgcactaggtagtgtggacgcaagtaaattgggcagggacatgaggggaagtcaggaggtttcaagttggtatgaccattaggtgaaatctcgtccagtcagtttagtcattgactagctaaatacacaagcagagattgtatagtcttttaaagaactgaaaaacagcaagcgaaggacagtcaacaatgggcaaattcatcgttaattgtacttaaatcggggttagatccttatagaagtatctactcattacaggcccaagtggcgtggattgtcctggttaacttcgcccagcaagcatttgggaagggccacaggaacaggagggatccccctctgatggcccaagggaagtttccaagggccgaagcacttagggtaatcattagcaaaggaaccccattcttctttaaaaacaatagctgaaagtaccgtaccggccaaccaagccctcccgtgtactaccacccaatgtgtcggcacatcagccttgggctcaacgcttcttactagacctgatgtg

SEQ ID NO: 556402 - DNA, 278 bp, Homo sapiens
actgcagggtgggagaaagatcaaaacaccagggaactcatctatagtaccagagtctctctgatggaagtctataagaaattttgttgaaaaagtgaagggttgggcgaggtggttcacgcctgtaatcccagcactttgggagacctacgtgggtggatcacttgaggtcaggggtttgagaccagcctggccgacatggtgaaaccctgtctctgctgaagatacaaaagttagccgggcatggtggcaggcgcctataatcccagctactgggg

SEQ ID NO: 556403 - DNA, 409 bp, Homo sapiens
atctctgtctctctctgtgtttctatcattgtcactctacaattctctctgtcacgcgaactcaatctcgtggggacactgaacctaagactgccatttatttgagcccacagtaggctaatcgctcactatcatgactgttaatggactgcttcacgctgacactaccccctgatggacctactgctatctcttgcccgaacgataccgcatggagacgtcctagctcaagggctactacatacattactactaagaggcttatattgactgtcctgcgtcatgacagcacaagcacacctttgatcactccggtcatgatgacccttgcgcagaccatgagctctctgacactagcagagaccaggcgaaccagctgtgaccttgccttagtgtcagcgcgaactgc

SEQ ID NO: 556404 - DNA, 119 bp, Homo sapiens
agcagctcaagttactgtgtagaaaatggattctctgctgcccttagtaaaatcctctcccctccggtaaaaatctccaagtgttggtgccccccgccccactgctgggggtatcctct

SEQ ID NO: 556405 - DNA, 111 bp, Homo sapiens
  misc_feature (49)..(49): n is a, c, g, or t
  misc_feature (78)..(78): n is a, c, g, or t
  misc_feature (98)..(98): n is a, c, g, or t
atttgcatattaaaaaaattgtgcattccaataattaaaatcatttgancaaaaaaaaaaaatggcactctgattaanctgcattacagcctgcaggncaccttgggccag

SEQ ID NO: 556406 - DNA, 502 bp, Homo sapiens
  misc_feature (147)..(147): n is a, c, g, or t
atttttgcataggttaatgtcattagaaagtactatcagtattatacattggttaggtaaagcatatcacttgtcttaatgatgctatttgttttaatctagtttattcataactttaaattgtagtgtgactttgacaattacagnggagatacattattcatgttgcttgtaggtcattggtctcttcagcctggctacacattgagaattagcagaggagctttttaaaaagtaccagtgcttagtccccaacctggattgtttggcctattcctccttcagttttttgtggttcgataattatcttttaagttgacaataaacagctaaatttagaggggggattgctttttcattgttctagtttccaaatatttacttttgagatgcagcgtattaaaattttcaaagactggtttaaccattctcattagtaaatacaatgtattttcagtgtatccatagataataaaagttggataggtaagaattggaaggg

SEQ ID NO: 556407 - DNA, 460 bp, Homo sapiens
  misc_feature (376)..(376): n is a, c, g, or t
  misc_feature (425)..(425): n is a, c, g, or t
tctaaaattgatcacaaaattagaattaaaacactcctcagcaaatgcaaaataactgaaatcataacaatctctcagaccacagtgcaatcaaattagaactcaagattaagaaactcactcaaaaccacacaactacatggatattgaacaacgtgctcctgagtgacttctgggtaaataataaaattaaggcagaaatcaagaagctctttgaaaccaatgagaacaaagagacaatgtaccagaatctctgggaggcaactaaagcagtgttaagagtttctccacagacactacccaaagcagtgcttcactacagtgggcagacagacctggaaaattttcatctggaaggcaggcaggagtggaactngcagagggcaggttcacccaaccagtgtggggaggcttaaaagcggggnctcttttggggggtttccggggttgggagttgttt

SEQ ID NO: 556408 - DNA, 327 bp, Homo sapiens
  misc_feature (130)..(130): n is a, c, g, or t
cgctctaaggatcacgatgaggacataaaactgttacgtggagctactttctagttaggtacatatataaataaagctacaaatatctacttactcagctgatcaagactaaatgattccagggcttggngattttgggtggggcgaagcaaacttaaggattgttatactattgattcactgtctttcttaggaacacacactttcttttgagaagtattatacgaaagatgtgaatcctcattcaatctatgccaactttcaccttccagtttcttgataattcatccgtccatggaggtccgccaactccactgccagcatatg

SEQ ID NO: 556409 - DNA, 539 bp, Homo sapiens
gcacgaggcagaatcctggggaaatcaggaactgttatcagacgaagggggacaagaacacaaatccattctctttggtcagcctgcttcaaccatttaggaagaggtcaaggaaatgtatagacacagacacactgagggctgtaagaattcacatgtgacaaacgttaacggtgaaacaaacaggagaaaagcacaaccactcgggccacacccttcaccaaggatttcttctttcgcaaatgttctaggtgtttgttttctttctcactgtgatctcctaagtccagctcttgtcaatacacattccttaatctaataaaaatggtttattattaatagtagcagcatttatcaaacatccacaaaatgctaggcaagatgctgagatatttataaggattatctcatttttaaatttattttttatatttattttgagacagggtctcactctgtcgcccaggctggagtacagtggtgcaatcaagatgcactgcagcctcgaccaccgggctcaagcgatcctgtcacctcag

SEQ ID NO: 556410 - DNA, 137 bp, Homo sapiens
gcggccgcctactactactactactgctcgaattcaagcttctaacgatgtacggggacatgatttttgccctgcgtcccttctctttggggctcctttcccctctcatacataaaatcgctttcaaattaaaaaaa

SEQ ID NO: 556411 - DNA, 437 bp, Homo sapiens
cctataaaaaccctgagaccctagcaaggctcctccatcagctgagagctgcttccactcaatcacacttcgcactgattctccaagcccaggtgtgatccgatttttctggtacacccaggcaagaacccaggatacagacagccctctgtccttttgataactagagggtctcattgacctggttaacacaagctgcctacagacggcaaaactaaaagagcaccctggaacacacgcccactggggcttcagctgtaaacattcacccctagacacggctatggggttggagcctgcctgtctgtatgctcccctagaggtttgggcagcagggcactgaagaatcaagccacacccccatcgcacaccctgcgagggggacaagggaacctttctcttttcagttggttttaataaacactgagtaaatgaaa

SEQ ID NO: 556412 - DNA, 429 bp, Homo sapiens
ttacaatccccacgatcaccacccaatcaatgactaatcaaacgtaaacgtcaaaacaaatggatgaagcatacacaagactgaaaggacgaacctgatctcttatactagtatccttaaatcattgatattgccacaatctaacctcctcaggactccttgcctcactcgatttacaccaagccacccgcactatctataaatccttgccatggccatcccctatatgatgctgggcgcagtgattatacggctttgcgctctaaggattaaataatgcccgtagcccacttccttaccatcaaggcacaccgtacactcccttatccccggtactagttattatcagaaaccagtcagcacgactctattcaaaccaattagcccgtagcgcgtactgcctaaccggctaacgattacttgcaggcc

SEQ ID NO: 556413 - DNA, 336 bp, Homo sapiens
ctcctgcctcagctcctgagtagctgggataacaggcacacaccaccacgcccagctaatttaggtatattaagtagaggcggggttacaccatgctggtcaggatgttctccaactcctgacttcatgatccacccacctcggcctcccaaagtgctgagattacagacgtgagccactgcgtcctgcctaaaatgcatttcctagatgattgaataacagtagtcctttgatagaagataatgcacttggtttatggccttaatatactacttaattccttaagatgtttatcactagaatgataaatgtccagagtaacctataagcatgaca

SEQ ID NO: 556414 - DNA, 153 bp, Homo sapiens
atgacgttactaagtgcggaaccaggattcaaatgcagaacttaaggctcccaaatcttaaacactatacaacattgcctggctagttgctcaaggagagctgatgctataaaggcggcagtccccaaccttttcggcttaagggacccttgg

SEQ ID NO: 556415 - DNA, 367 bp, Homo sapiens
  misc_feature (21)..(21): n is a, c, g, or t
  misc_feature (150)..(150): n is a, c, g, or t
  misc_feature (152)..(152): n is a, c, g, or t
  misc_feature (203)..(203): n is a, c, g, or t
ccccccttttttatacctttnggggggggggggtttttgaggggtttaaaaaaaaaaagggtggggcccccctctccccccaagtgggggccctttttaaggggcggccctctttaaggccccttttttttaagaaaacccccccccctngnagaggattttcccccccccccccccagaaggaaaggccagtttggcccccnagggcccccgaaccctttttggggaaggaaaggaaaaggataaatttggagtggggggtctttaacccaattcgcctggattccctttttttctggggttttccaaccccctaacccccccccctggggggggatcaaagggaataaaaaaaacttttggctta

SEQ ID NO: 556416 - DNA, 132 bp, Homo sapiens
gtgggaaggcatggatcagtgaactccataaccatcaagatgattgttccccgctaagtgattgttccccgcataagtgattgttcccacgctacgatgattagttcccacgctacagtgacttgttcccac

SEQ ID NO: 556417 - DNA, 280 bp, Homo sapiens
ggtggaggccgcaggggaggcccatggacagcggctccaggagcacctccgtgagagccggggggctgagcagacctctcgagcagagctgcacagtgtcaccaggaagctgcaggaagccagtggtgtggctgatgctctccaggctcgcctggaccaggcctgtcaccgaatccacagcctggagcaggagctggcccaggctgagggtgcaaggcaggatgcggaggcccagctgggccggctgtgctccacgctccgccgtggcctggggctccag

SEQ ID NO: 556418 - DNA, 318 bp, Homo sapiens
  misc_feature (49)..(49): n is a, c, g, or t
  misc_feature (67)..(67): n is a, c, g, or t
  misc_feature (291)..(292): n is a, c, g, or t
  misc_feature (298)..(298): n is a, c, g, or t
gcacgaggacacctttaaaatatttaagttctcggccgggtgccccctncacgcctgtaatcccaanactttgggaggccgaggtgggcagctcacgaggtcaggagaccgagaccatccctgctaacgcggtgaaaccccatctctactaaaaatacaaaaaattagccaggcgtggtgatgggtgcctgtggtcccggctactcgggaggctgaggcgggaaaattgcatggacccgggaggcagagcttgcagtgagctgagatcgcaccactgcactccagcctggnnttgttnggtggggctccttctcaaaa

SEQ ID NO: 556419 - DNA, 262 bp, Homo sapiens
cgtaaatgatcatgaggctatctagtatagctcatatttccgggtggtaaggctcaacacacaggacttccactccaagagatatttggcccctcaatccctacaaagtgtagtctaaacaaacaaacgggtcataaaaaatggcaccggacgatataaaaagaactcaatagcaggcttctgactacctctggagaccacacactatcattattctgacggtcttaaatacaacaatccaatatgccccaagatggccatc

SEQ ID NO: 556420 - DNA, 155 bp, Homo sapiens
cgagcggtgtatgatctggacacggccactacctagattctgtatacacgaatgacaaggggttcagctacaccctgatttgctataacacacatatagcaagaaagcatttgtttggcccattctccctattgtataacgaaatacaatgcaac

SEQ ID NO: 556421 - DNA, 161 bp, Homo sapiens
  misc_feature (51)..(51): n is a, c, g, or t
  misc_feature (73)..(73): n is a, c, g, or t
  misc_feature (93)..(93): n is a, c, g, or t
agctctcacgtgctcaacgtggacctcgctagtatattactattaagtgtntatattcaaacaaatgcccatnactctctttggaggcacttncaatggcaatacaaccacctgtctgttagtttagaatttgtgagtattaatcattcgttgagaagctt

SEQ ID NO: 556422 - DNA, 368 bp, Homo sapiens
atactggtgtacacatacatgatcagtgtgtcaaacctagcgtggccaaacacaactgattccccacacacacccccaaacatgcttctccctaacctttcccgtctcagtgaacggcagcactgactgcccagtggcttaataaaaaaatctaggtgtactctcagttttgcttttcctcaccctcaagatccaatccaatctatcagcaagtcatgttgctttgaccttcgaaacacaccgcaaatccattcacttctctccagcccaactctttctgcagtcttttcttgcctgatggaattgactactgaaattccccctcctcacaccgcttccatttttgccccagtgcaatccattctatg

SEQ ID NO: 556423 - DNA, 173 bp, Homo sapiens
gacttggagcgcaccgtagctaatattaccattaccttccctctacactatatcatcttcacaattctaatctactgactatcctagaaatcgctgtcgccttaatccaagcctacgttttcacacttctagttaggtctacctggaggtctacctgggttaggtctacctgg

SEQ ID NO: 556424 - DNA, 124 bp, Homo sapiens
tggcaatggcactaatacgtactggtggtcatagagagttaaaagatcgttccctttcttctgtacttttccaaggttcttgaagagttctgtggttctagaaatacgtgtcagagcttcccag

SEQ ID NO: 556425 - DNA, 1383 bp, Homo sapiens
gtacaggtgtgagccactgccacctgcgtgaggttcttcagtctttacttacttcttacttttagtaacggtagtacaccttgctgaagttaaaggttctacattaactggatcagatgttggcttaaatattgagaggcagggcatcaaaggtggtagtgctaaaattctctggattatatactctattttggagacagtttcactctgtttcccaggcatggagtgccagtggtgcagtctcagcatcacgtgcaacacttggcctcccgggttcaagcaagttcgtgggttcaaggtacttccaagatagcgtggagactacaggcgcataccaaccaaacacgtggcataattatagagatatatgtagagatagaagcagtggagtttacaccattgttgtggccaggacgtggaatctcgaagcgtccacgaccgtccggtgaatggcgacccgaacaatcgaggactcccaaagagagtgctgcaaatatacaggggcgatgaagaccacacgagtccacagaccacatcgtggatcatatggaacattgcgtagacccgtatgaagaacttgagcaccagacaactagcagagacgcatccacaagaggtcgcgtgggggcactccaccacggacacagcgtgacggaccccgaacgtgtgaggccgtgcggcccataaagcccagtgaataaaattaaatcaacatacgggatgagcaataacatagggagcaaatgggactacgaataaaaatgtagacccacgtgagaaaaacagataaagacagtagcatgaggacatcggggacataaatcacccgcgtgataagcatcagtaacaccctaagagcgacgagacagattagcggagtagtaacagagaacacatcaatcaacacgaacttggcaacatctgaaaacggaccgccaagtatacatgacccaccgccgcaagggttgatctaaccaagaaaacagacgtacacgtggggagacggatggctggaatgacaaggagggaagacagggaatagatataatcagagaaacacacgcgttcaagagactaagccagacagtaatagagtgaccaaatacagagacatggggaaagatagccaaagacgagagcgacaacccacgggaggacctcaaccaacagaggccacgtcgcaacacgttcacacgggggataccacaaggatgagagacacaacccacaagacaggccagcgcaagggaataaccaccagagaaggcaacagagcagggagaaaatacaacacgggcgaagtgagagagaaacgacagcacaagagccaacgtggagcacaagcttaggtcggagcggaatcatgacaagaaagagaagact

SEQ ID NO: 556426 - DNA, 274 bp, Homo sapiens
catacatagcgtttttggtatgatacagtatttaatacatccactgttttctgttaaaaatgtttggtagaattcatcagtgaagccctctggtcctgggcttttctttattggcagactttttttttttttttttttttggggacggggttttctttttggtcccccggctggggggccggggctttttttttgttccccccaaccttcaacctttttggggggggggttcctttaagattcccctgggggcattcaagtttggacctggccc

SEQ ID NO: 556427 - DNA, 256 bp, Homo sapiens
cacgatccccagaattgtctacaggttgggatcgtgttatgatgcagtgaacaatcatgctatggacatgttcgaagttactatctcgattcatgtggtgctacaccctgggatatcaagccttccattatgtctgccagagatttggagtcggtcacattatcactgagcccaaagaataggctttaaccactaatgatgttattaaccagttattgcaccatcgtttggtgcgatttgcatgcaccaactcaat

SEQ ID NO: 556428 - DNA, 355 bp, Homo sapiens
tggagccctcaaggcctttggggccagggtttccgtgatcaactcaaccctggtgttcctttttttttggggtggggcctgggacccaaccccggcaacaaactcaaaaaatttaaggggctgggccccccctgggggccttttgtttttccaccaggagtgactgtttccagggcttttgggactcctgtttgggtgtggcctggtccctttgggccctggggtttttttttggccctttaggcaggtttggaaaggccgtttttgtttttatggagggggggtcaaagggggggggggcccccagcctgtagggttttttttttttttggcaataaaggggctttccccccca

SEQ ID NO: 556429 - DNA, 576 bp, Homo sapiens
aatgactcatggatgacttttaggggtcaaaactttagcagaggaattaactgcagatgtggtagaaatagtaagggagctaggactagaagtggagactgaagatgtgactgaattgctgcatctcaacagcactgcatgctgcagagaaatctttcatgaaaggaagagtcagcagatgcagcaaacctccttggtatctcattttatgaaaactgctattgtcaccccaatcttcagcaattgccactataaatcaatcacagccatcaacattgaggcaagaccctatgccagcgacaagattacatctcactggaggcttagataatcattagcatttttttttagccataaagcatttcttaattaaggtatatacattgtttttatttagacataatgttattggcacacaataaagtataatataaacataacttttatatgcatgaggaaaccaaaaactttgactcactttattgtagtggtctggaaccatacctgtaataactccagagtatgcctagattacatgagtattgaaatggtcgcaaatccggggtacgagctcga

SEQ ID NO: 556430 - DNA, 291 bp, Homo sapiens
tgtgctgtggccgggctgaaccacggacacgataaataagcagaactcgtaacctgcggacgaatcccaagcacaagtaactggtttttacactccaatcctccctaatccaagatctaacagcaactccttttctctctgtcactccctgcttttctttaagaaaatgagtaccttgccttaaactatatattggatgaaaatattaaacactttcacaaagtgcttctttggctgttgctggtatgccttgcatttggaagggtcagagatttgaagacttctgtgatc

SEQ ID NO: 556431 - DNA, 1412 bp, Homo sapiens
  misc_feature (842)..(842): n is a, c, g, or t
agaacgtaaaaatgataagagatacgacgagaagaagggaggatgtgctgtgcacgtctgcacgctcgagtccatgtagatgcatccagaatctgattcgtctttagagtaatgcgatatcgttgtctacgcggcactatgcgcgccctactaggttagctctcttcagtacgtgcattggccccgtcgacgttgtggattggctcacagctctgcttgactaggaagtggtgcctctcctcgacggaccagcagtgtattcttgcttgtttccccctccccacggatgtgtttctgcctccgcagcgctctgtctcgtgaagtatcggctccctcctgcttgttggagcaggggatgagcagagttgttgtgtgttgtagagtcggtcggcgtgtgacggcacgatttttctgcttggtcggccggcgccggggattggttgtgtttctcccgcggccgctgtttttgtgcgcggcgcatatacttgttgtagtgggtagagggtgcttggtgggtcgccgccaccgccccgccgtgggcaggcgtggttgtcggctgtcgttgtacgaagttgggacgccgcgctgtcggttgtgtggcaccccggcgtgtggtgttgtgtgtgtgcgcgccccccccccgtgtgttgtcccgccaatatttgggtggtaaattttgtggccccccgccggtttacaaccttttttttcgggggcacccaatacagttggataatcagttgcattagagttgttgtctgcttctgtcccccacaatcgcgcgacggatatgagctgtcgcttaattgctttagatgctctctctctctcgagaaagtttnggcgcgcacccgctacacactctctttaagtggtgcacccccccgggtgaggtacccatactgatgtgttttctcgcacgcactctgtggcgccccgttggtatcacacagagacgcgttgctttcttttatcttcttcgaggagcttttgttaccttatctgtgtttttgtcgtgcgcacagacacagaagatttgtcgtggggccgggaagaggtgttgtcccctccttataatgccgccagattgtctcctctctttgctttcgcagtataataccgccgcgggtgcccacccctccggccaccatggtctcccctcttgggttcccttgttgtgttcttctgcgcgggtattattcttgtgttgtgttgttgttctcggtctctgctcccgcgccgtttttgtattgttcgcccgccgcgcttttgcttcttcttttagtaacagccctagcgcagtaataaattttgtgtttaataaatggagtaagttaataaacccctttatctcgctcttattattatagaatcacaaatatcaacgagcgcgatcaataaacacagaaaac

SEQ ID NO: 556432 - DNA, 136 bp, Homo sapiens
gttggagtgacctggatttccgtgatgaaactgcccattcagataagaaacaccgagactcaaaatccctagaaggacgtcccatggtagaaaagaagagcaagaaacccaagaagaaagagaaaaaacacaaaga

SEQ ID NO: 556433 - DNA, 200 bp, Homo sapiens
tcttaagtaactcttgatggtaactgtgcacccatgttcagacttccagtgtatgtaatgaatgagtcaatgccaccaaagatcaccacgctgccactctggtcattggcgctgagtgtaaccacgacacatgtgcaccatgacacatgtgcaccactgacacatgtgcaccacagacacagatgcaccactgacacatg

SEQ ID NO: 556434 - DNA, 205 bp, Homo sapiens
cgcagtaccaccttgtaaatcgctacaccattggcattgacagagctggcccttaaactctgttgtggtttcctcacctgaaattgttactgcaaacccactagcagaggaggagccattctatgaatatacggattttggttaaaaaaaaaaaacggaatagggaaaaaaaaaaggtttgggggggggtccagctattaatttc

SEQ ID NO: 556435 - DNA, 269 bp, Homo sapiens
  misc_feature (201)..(201): n is a, c, g, or t
  misc_feature (209)..(209): n is a, c, g, or t
  misc_feature (236)..(236): n is a, c, g, or t
aatgtagcctttttttgaaatggtgttgttttcatgtaataaattttcataaatatgtaagtctgtttcttaaatgtgttttcagtttccttgatcagtttgtcctttcctgttaaaaaaaagtaagtttattcctaatattactttcccaggaagtgttctttttcactattttcatattttaaattaaatgctaatttncgtatttnatattaaatgctaatttaaaatacggnaaatggtccttttttcccgtttcaggctttttt

SEQ ID NO: 556436 - DNA, 118 bp, Homo sapiens
gcgtgaccctcagctcacatctggtttagacatcctacctcccgctagcctgggagcagccagaggataggctagtatcttgattctgtctcctctgggcctaagagcatgccgcgcg

SEQ ID NO: 556437 - DNA, 214 bp, Homo sapiens
agcagtggtagggtaagaataaagacagatttcactccctcaagaagctctattgggagaaacaccagaaatgaaccaggagttgacacctgggtcgtgggaactcagagaaggaattttccattgtaaaggcctatctacaccactgtcccttctactgttcccttctagtaacatggtttcatcaggcatatcgtgtaattctgctgaaatg

SEQ ID NO: 556438 - DNA, 435 bp, Homo sapiens
gattgcggtgctatttcagactttttaagcactattcactggtttgatacaaagtcagaatgcagtttgacacccactagccgggcccagagctgacagcctcctggggaggggtcagcccagccccacggcagccctggtgcacacccacagtgagacctgagttcatcttttacctgctttgctcctcacagttactcgggggtaggaattgtggccccgtgtgcccacgtcatagttgtgtaaaccggggcttagacagtgggtcgactttctggagctcaatacggatagtgcctgcatgtggaccccgcccagacagccgccctcttcccacctacccgttaacacccatgctgcatgcaaagccacccacccgcagaaacaggtggtgcagagagggggcggggggatgagaccaagggctgaggaaca

SEQ ID NO: 556439 - DNA, 466 bp, Homo sapiens
gcggtgcagctaggagtagtagggtgtctgattgtatgacaaatataccccactcggcttgtgtgatgaaattgcgcccacgaattttcgctctaccgcgtcagatgccgccattagtagaacgacatgatcgtttagatagttttgaaagtgagtttagccagtgaagaactgttcctgataagaagcagctagccggaattgagcactagctctgggtcatgagctgcctcaaatacttcctccctcacttctcccattctacgagtggcagagaagacctgggccattttagcaagggctgagatcaggactcacactcaggccagctgcctatgccccaggctggtgatgttgggagctcagggtcaacgagaggagagtggggattcttgaccaaaacaaagagggagccatttgagcagctcccatcttccttcagagttctgctgagatttctcccctc

SEQ ID NO: 556440 - DNA, 612 bp, Homo sapiens
  misc_feature (324)..(324): n is a, c, g, or t
  misc_feature (390)..(390): n is a, c, g, or t
taagtaaaccttatttttaataagacaggtggcataatgagactgtgtactcctgaccaaggacttgacatttgctaaattatagaatgaccaaaaatacagatcacttatctagaagtctgagttgcagaacaattgtcctaaagtttttaaaaatttttattactaagaaattcataccattgtgataattaacaagatttgctctacagttcaatgctcagggacatgtgatctgccaggctgtgaatgatgggtaaggtcacacttgcctggttgacccagtgcagaatgggtgctttagacccaacggttcagtgtgtncttttggaattaatacagtgacctgtatcattaacctggagatatcagatctcagatattctagtntatcagttaaacaccaaaaagcattaaaacaaagaaaaactaccctatttaatcgttcagtaaaaactaccatatttaatcattaagttttgtcatgatttagcaaaacaaacgcaaatgtgtgtgtgtctgtgtgtgtatgtgttttataaaacaggttcaggataaaatgtatccatatagcacattatgattattttaatacatttgggcgtacgggga

SEQ ID NO: 556441 - DNA, 463 bp, Homo sapiens
  misc_feature (76)..(76): n is a, c, g, or t
tggtgatgagtaactagagatgtgatcacttggacagtaagatgcaggacacgttccagccacagcacacactttntactctctgggcaaaggaaatcaggattcattgtgctgttgtgtttgtggtgttagcttgctgttttgttgagcagcctgttgtgcagggtttttacagtagcatcctggtaaaaatgaacactctatacagcatctccccagctgttacccactgtgaagtttaacgttaaattagaagagcaaggaaattgagatggaaaagctctgtatttggtttctgccaaggtgttgcagtgcatgctgagccacatgtgacactgcttccaaagacccttttaattaaaggcctcacccagtgaattggggatggaatttcaccctcaactctgacactgactgcatggccaaatggggggtggggggaggtacacatagaacaaaatta

SEQ ID NO: 556442 - DNA, 354 bp, Homo sapiens
  misc_feature (66)..(66): n is a, c, g, or t
  misc_feature (132)..(132): n is a, c, g, or t
acaagatattaaatagtaatactaacatacaatgtcatccttccaccccactcccatcagtgtgtncttttggaattaatacagtgacctgtatcattaacctggagatatcagatctcagatattctagtntatcagttaaacaccaaaaagcattaaaacaaagaaaaactaccctatttaatcgttcagtaaaaactaccatatttaatcattaagttttgtcatgatttagcaaaacaaacgcaaatgtgtgtgtgtctgtgtgtgtatgtgttttataaaacaggttcaggataaaatgtatccatatagcacattatgattattttaatacatttgggcgtacgggga

SEQ ID NO: 556443 - DNA, 177 bp, Homo sapiens
ctcagttctagaggatcccgagtgcactctgtgctctgaactggtgaccatgtggtttcttctttatgagaatctcaccctaagatcaagcctcatggcaaaggcctttgtgacctgtacccacgcaacacaagttgccgtatggcgctaattttgagacacaggtgaaaagcagcc

SEQ ID NO: 556444 - DNA, 190 bp, Homo sapiens
atcaagtaaggcccccgtgttgggcaccccccgtggtggcggggtccccgcctttgggccctgggtggaccccgccctgccccgctacaaaagccagattgggtcccgcggacgccagcaggggcagccccagcctagggtgggctccagcactggggggcttttttgcaataaagtcccgagggtttga

SEQ ID NO: 556445 - DNA, 465 bp, Homo sapiens
acaaaattcttaggtatcgtgatgtacagtcatctcttttttcctttcccctctccgtttttcaatcccctctgcaaggtctctagtaccccttcttacttcccccttaggttaaccaactttccaacctctctcttttgcctactcctactcatcccgaatctgtcttccctacccctttactcagtctgcagcccaacttctcctgaatcactaacaggtccctccatgtctactggctcaatggtgctagactaagtccaaagtccttcaaactcaattcagcacagggcaccttggcctcccagcactttgggaggccgagcctggagggatcacttgaggtcaggtattcgagaccagcctgggcaatgtggtaaaaccccgtctctactaaaaacacaaaaattagcccgggctggtggcgggcacctgtaatcccacctactcaggaagctgaggcag

SEQ ID NO: 556446 - DNA, 432 bp, Homo sapiens
cacgagggggtccggagagcgaatcctgacggagggttaccacaacgaggggccgacctgggctccgaacgggcgtgttttgatgttcttccgggagagccagggcgagaccggcggagcgcgaatctactcggtcgatctcaccggctacaacgagcgagtcgtgaacaccccttcgttcgggtcggaccctgcttggtcccccctcttaaactgatacagtgtttaaccggagcttaaccgggcgcgcgtattcttgcatctgcgcctctgcgtcagggtgaggcattaatctttgtaaatcaggggcttccatgcggcgtgcggcggccgtccagaggctcgaggagcaccaacaacggcgtggcattttcgcatcaacgaggggggaaaacagtgtcgcacgaccctcagttcttgatcaaatcatgc

SEQ ID NO: 556447 - DNA, 420 bp, Homo sapiens
gctggccgtgaacgcaccgatcgcgccattcggctggagcaacgcctgggtgacctgttgcccgccctgcagcccgcgctggcggacgtcaccgtcggccaggcgctggacatgaccggcggcctgcccgacgtgcgcgaaacgctcggcctgctcggcatctcgctgcacgccgtcagcgaggcgcagccggtgatgcagtttgtcgaggggttggaaagattgaactacgaagccggcagcgagatcgcctacagcaataccggctatcggctgctggaggccgcgctgcgcagcaaagggtatgatttcgaccaactggtgcaacagcacatcgcccggccgctgcagttgcagatgcgggcgccggaaagctggttcgacgtggtgccggggttggtgccgggttactggcgagcg

SEQ ID NO: 556448 - DNA, 148 bp, Homo sapiens
gattagtcacccaggcaccagtcaacatcatgcaccactaaggcattatcaagcgtgcattcaacagcagcacaccaggtttatcattcaatcaacagcactagcatcgtccaacacatgctcggagcattagcatcacacacagcac

SEQ ID NO: 556449 - DNA, 177 bp, Homo sapiens
acaattttttgaattttgaattgggtaataaattcaaaattaagtggcatcaagaattcagttggggccgggcgtagtagctcacgcctgtcatcctagcacttttgagaggccaaggcgggtggatcacctgaggtcaggagttccagaccagcctggccaacgtggtgaaacccc

SEQ ID NO: 556450 - DNA, 940 bp, Homo sapiens
catcatctctagcatcaccagtattagaggcaccgtgctgcccagttgagagcatgttataactggacgcggatagcctaaccgtgcacaaggtccagccgattaaatcacttgttccttaattagggacctgctatgagatggctccgacgagggttcagcggtatctaactgtgtaaccagtgaaattgaccgtgcccggtcaagaggcgggcatgaggacagcgaagacgagaagaaccgtatggagctttaattgattaatgctgacagtagccaacaaagccacaggtcctaatgtaccaaacctgcattaaacaattccggttggggcgacctcggagcagaagcgcaacctccgagctagtacatgctaagacttcaccagtcaaagcgaactactatactcgattgatccaataacttgactatcggaacgagttaccctagggataacagcgccagcctattgcctagagtccatatcaaccaatagggtttacgacctcgcatgttggctcaggacatcccaatggtgcagccgctattaaaggttcgctgggcaagattaagtcctactgtgatctgagtcaagaccggaagtaatccaggtgggtactatctagttcaaattcctccctgtcgaaaggagggagagaattagggctacttcacaaagagcttccccgtaatgatatcatctaactaggatataccaaccaccaagaacggttgttgccacccacgccactcaagtaaaactgggtggggtcggcctcacaacttccgaattcgtggcgggccaagatgaacgcgctaggccaggaaccgccgacgcggtctcaacaaacgccggcggggctcaaccagggcggtcggattcaggcagctaaacgccgaggggccacaagaaatcaacacgcacaccacaacaccgcca

SEQ ID NO: 556451 - DNA, 189 bp, Homo sapiens
caacgcctcctcctccatcgtttaaaatgtttctcttcccccatttgctgagatcctactaagtggtgtgttttcatcatctctgcttccttcatctctttcttttctctcttttgactacttctttttttcgttttccttcatccttcttattgttcatcctaatatccacccttctgtcgtcttctc

SEQ ID NO: 556452 - DNA, 372 bp, Homo sapiens
  misc_feature (19)..(19): n is a, c, g, or t
  misc_feature (34)..(34): n is a, c, g, or t
  misc_feature (40)..(40): n is a, c, g, or t
  misc_feature (43)..(43): n is a, c, g, or t
  misc_feature (52)..(52): n is a, c, g, or t
  misc_feature (101)..(101): n is a, c, g, or t
  misc_feature (116)..(116): n is a, c, g, or t
  misc_feature (173)..(173): n is a, c, g, or t
  misc_feature (219)..(219): n is a, c, g, or t
  misc_feature (248)..(248): n is a, c, g, or t
  misc_feature (265)..(266): n is a, c, g, or t
  misc_feature (270)..(270): n is a, c, g, or t
  misc_feature (281)..(281): n is a, c, g, or t
  misc_feature (312)..(312): n is a, c, g, or t
  misc_feature (324)..(324): n is a, c, g, or t
  misc_feature (334)..(335): n is a, c, g, or t
gattttaaaaagccacatnggagctctcttttanccactntanaatatccantttttacattttttgagggggagtgagttttaggggggaattaagattncagggagagctctgnggatagaacagggcgcagattccatctcttcccaaggccctttttagtgactaagtnaagggcccaacttcccttccccaccctacgctgagcttattcgagntcattcgtactaataatcccttctgcggnttcctcaatggtgctgnnttangccaccccagnttaaccatgattcctttccctctgtgtgagntttggttttgtnacttgcttanntgatgtgcgtatgtgttttggtggggtgggctgttct

SEQ ID NO: 556453 - DNA, 469 bp, Homo sapiens
agcggctggctgatcctctcccctgcccttggctccatgaatggcctcggcagtcctagcgggtgcgaaggggaccaaataaggcaaggtggcagaccgggcccccccaccctgccccggctgtccaactgacctgtcatcacgtctataaagcggcctcctgaccagcacccaagccgctgccgcggagccgagcgcgacccgccccgacgacgaaccccctgaagctgtgccaagatgtgtgacgacgaggagacaccgcctggtgtgcgacaacggctctgggctggtgaaggccggtttgcgggcgatgacgcgccccgctgctgtcttacccgtcccatacgtgggccgccgcgggaccaggaagtactggcgggtatgggtcagaaggaaatcctacgtaggtgatgaagccccaaagcaagagaggcctcactgaacccctaaggtataccatcgagcatgg

SEQ ID NO: 556454 - DNA, 232 bp, Homo sapiens
  misc_feature (157)..(157): n is a, c, g, or t
cgcgaggtctctgttatgtttgcagcaggaggccaacatagaacatactcgccagtactcggctgtgcaaaacaggcgctagcgctgaagtacaaatgggaaaacgtgattcttttgttttaaataaatacttagaacacgatcttggctcctacanagcatctggtactctgaggtctcagctacgtggagtgtctcaccctatgggccccacgcatgaacgcgccttaat

SEQ ID NO: 556455 - DNA, 878 bp, Homo sapiens
tttccctcctccccgccctcaggtccacggccaccatggcgtattaggggcagcagctgcctgcggcaggtcggccttatgcagcgtgggcagcgagcaggcaggctctgcgagtggtaaacccccagcgcgtttaggccagtggcgcttctcacggcattcagcagcagcgtggggtgttaaccgacaaggacaccttcgaattagggcagcattcctcgattccagcaaagcacccgaatattgacccgaaatgagcttcctgagcagcgaggtgtgggtgggggacttgatgtcccccctttcgaccaagtcgggttgggcggcttgaagaaagcctaggttctctttagaatgattacctggaggttggccaagcactttcaaacctcatgggtttctccaagcgacaagggctaaggcgggctcctccgaaataggctggcctgtggatgggttggtacagcccctccaacaacaggcaagggaggatgccttcccccgggacaaggattgctgtggacgaaccattggctttgaacggagtcgacgtcggatgccctggtggggtatagaatgacctgaaaaccattggccagatgaccgttctggaccacgtgtggaattgagcactttggtgattcctctttggcccccttagtcccagggaggactacattaggcaggcccccccaacgacggtgaaacccaaattggccattctcccaagagggttttaccagagccgcgaccagggttggccccgttacacttgttagaagcgtcattcccttttccccaggcggccgggcgcccccatcagagaacatcctttaggataacacatagcggcggacacgggatccacacacgacaac

SEQ ID NO: 556456 - DNA, 473 bp, Homo sapiens
ggagtccccaggttcccatcccagaagtccaagaacatctcttttgtcatcgccaagcctgatgtcttcaagagcccagcctcagacacttatgtggtctttggcgaggccaagattgaggacctgtcccagcaagtgcacaaagccgcagctgagaagtttaaggtgccctcagagccctcagccttggttccttagtcagcacccaggccccgggttaggctggagtgcaaggaaaaggaaaaggagggaggaggaaaaggtggaccaggcggggctggaactgcgtgacatttagctggtgatggcgcaggccaatgtgtccagggccaaggccgtgcgggcttttagagacaaccccagtgacattgtcaacgccctcatggaactggccatgtagcccctggccggaagctggagccatcctacgccttccctcagctttggtactcaattaatcggtgtcccttcca

SEQ ID NO: 556457 - DNA, 644 bp, Homo sapiens
gctccgggagctgccgacggacggagcgcccccgcccgcgtcccgggcgtactcgaccgtaaggcgcgcatgcccgttcatccaacagccacaacgcagctgaagctgcgcattcccggcccgaggaacggagttctcgccgtacgcttggatcgccacacaatcaaccatcatggacaacggtggctgacccccgcagctctggtacgctggtagctgtctcgtccaagtacccacgccgagtcggccttacaccggcttggacgacgtcatcccagcactacggtccgtgtgacccaactctctgagagcccaacactctgttaacaggtccagctcggaaccacgctcgagggcctcgcccgctagccagagcgcctcagaccagaatggaacggatcaccgttacgccgcacaacgatacgttcgccacaaccggcggaattccattcattctcaagaaccacccccccaacctcacaatgccctgactgcggcacccccacgacgacaccacccgatcgcccgcggccataaccgacaatcgcccgcccgaagagtgctggaggtacggcaaggccaagcccacgcagaatccccgggaccccacttacgcacaactgccacagctgggaaacgacaag

SEQ ID NO: 556458 - DNA, 480 bp, Homo sapiens
gtcgtgactggaaaaggtcagtgcagtcttgaatctacagcttgggctaagagctctgaaaatggaggtctgcacttacctccagtctacatgtgctactctcctgacaagatgcctacaccccagtggtgataaatgctgaagaggactccgctgtgcgccaccgtgccttccctgccctcccccatggccacgaggcatgccaactccctcaagccgcttcccggcgaagctgcccgtgccttgtgagtgcggactgagaacgggaagaacaagggaaatagatgaaagtggtggactttgaaattcccgttcatctcccaaagctatcaacccattcgacggcaaagaagtgacactttcttaatgcagcagaggggaagcttagggtaatgtcgaggattctgctcctggaattgtgtgagctcggaattggaggaggcgagacctttcaatggttacggctccatttctcatttt

SEQ ID NO: 556459 - DNA, 281 bp, Homo sapiens
ttcaagtctgacatatatcgattcaccttagtatatgacactctggttacgcatagtgcgcgcctcatgagctcaccatcatgatggatcctttcgtgcccattaatgatctttctcactttgcactagcttgtacttagccctcctcaggtgtaatacgatgtacacgcatagcgacccttggtcttatacttctccctctgtataaatcccgtcttgtcaatgctgatgacatccatgaatccagcagggtaggttatatcagttcggaccttgccatc

SEQ ID NO: 556460 - DNA, 299 bp, Homo sapiens
aaattacccactgtcaggcctctgagcccaagctaagccatcatatcccctgtgccctgcagttattacacccagatggcctgaagcaactgaagatccacaaaagaagtgaaaatagccagttcctgccttaactgatgacattccaccattgtgatttgttcctgccccaccctaactgatcaattgaccttgtggacaatacaccttccccacccttgaggaaggtgctttgttaatatttttccccacccaccccaggcccgcacccccggcaccctttaggagggtatttttgt

SEQ ID NO: 556461 - DNA, 151 bp, Homo sapiens
actaaggagcgtatttgggaggagctcactaagctgtcaagcaagttactactcctgagtgtgccctctgatggatggtgagagtataacttttagatgaagcctcacccacactccctgtacaaaaacgcttctcacgtcaagtgtctct

SEQ ID NO: 556462 - DNA, 149 bp, Homo sapiens
tagcaatgaaatcgccagaatatgtaccggtggaaagcacggcgagcagtatcaggtggtggaaaactattttaatcaactgttagaacatggcaacatcatgagtgatgtgcaggttgagcaggtgaatctgttagatgtactagctc

SEQ ID NO: 556463 - DNA, 432 bp, Homo sapiens
  misc_feature (100)..(100): n is a, c, g, or t
gaagtggtttaaaaaaaagctggaagcttaagagtcctcaaggtttaaaaaaactcctcagggtggaaactggttttggcatttgatgactccccaggantcttgttttatttaaattttggcttcttgggatattttcttttcatgccagctcagcaacatgtttaaaaatgttttagctgggcacggtggctcacatctgtaatcccaacactttgggaggctgagataggcgaatcacttgagcctaggagtttgagaccagcctgggcaacatggcaagacccggtctctacaaaaattacagaaattagccaggcatggtggtgcatgctgcggtcccagctacttgggaagctgaagtgggaggattgcttgagcccaggaggttaaggctgcagtgagtagtgatcatgccactgcactccagcc

SEQ ID NO: 556464 - DNA, 162 bp, Homo sapiens
taagaccgtattacgatgacgtattacgatactattagtgatacgtattaggatgacgtatgaggatgacgtatgtaggatgacgtattaggatgacgtattagcgtgacgtatgtaggatgacgtatggaggtgacgtatgaggatgacgtacttaggatg

SEQ ID NO: 556465 - DNA, 176 bp, Homo sapiens
  misc_feature (68)..(68): n is a, c, g, or t
ggaagtaaagaagatttgcatgcagcggttcattaaaatcgatggcaaggttcgaacttatataaccnaccctgctggattcatgggatgttcatcagcatttacaaggacgggggggaatttccgctctgatctatgacaaccaggggtcgttttgctgtaaaacgtattgtaca

SEQ ID NO: 556466 - DNA, 186 bp, Homo sapiens
gggtctgcctggatctatcaggactaattggttgttccctcttctcctgggaatctctcttgagagaagagcaggattctgagaacggcgatgctggaaacaacgctcctttgattcctcaagctactgattttctcactattcttctgtagattttcaggtctatccctggagtatgtagcctca

SEQ ID NO: 556467 - DNA, 269 bp, Homo sapiens
  misc_feature (199)..(199): n is a, c, g, or t
ttggttgcctcaattccttgtggtccccggcacttttggggggctgagactgatggatcacttggggtcgggagtttgagaccggcctggtcaacatggtggagccctgtctctgctggaagtgcaagggttggccgggtgtggtggcgcatgcttactcgggaggctgaggcacgagagtcgcttgggcccgggaggnggaggttgtagtgggccgggattgtgctattgcgctccagcctgggcgacagagggaggctctgtcttta

SEQ ID NO: 556468 - DNA, 196 bp, Homo sapiens
aaagggtaaagaacaaagccacaaggtcatctcaatagatgcaagcaactgacaaaatccaacactcatttacagttaaaaactttcaacaggagttcccgttgtggctcagtggttaacgaatctgaccaggaaccatgaggttgcgggttcgatccctggcctcactcaatgggttaaggatccggcgttgctg

SEQ ID NO: 556469 - DNA, 284 bp, Homo sapiens
gcctttttttttttactttttgtggtagttgggctaaggtggtctgggaagtaagggggagggggttgggggctaggttaagcctgcaaaataaaaagggaggggctcttgtcccctttctggggggcagggcccatcttccaatatggctgttaagtgtattccactgctgtcagcgggaaatataaagggaggaggaggacttctctaaatcccttaacgggtggattcatataactccccccctttggaaatcctagtggccttacaggctcgtggggaaa

SEQ ID NO: 556470 - DNA, 949 bp, Homo sapiens
  misc_feature (1)..(1): n is a, c, g, or t
  misc_feature (259)..(259): n is a, c, g, or t
  misc_feature (266)..(266): n is a, c, g, or t
  misc_feature (319)..(319): n is a, c, g, or t
  misc_feature (325)..(326): n is a, c, g, or t
  misc_feature (329)..(329): n is a, c, g, or t
  misc_feature (338)..(338): n is a, c, g, or t
  misc_feature (341)..(341): n is a, c, g, or t
  misc_feature (345)..(345): n is a, c, g, or t
  misc_feature (357)..(359): n is a, c, g, or t
  misc_feature (363)..(363): n is a, c, g, or t
  misc_feature (365)..(365): n is a, c, g, or t
  misc_feature (371)..(373): n is a, c, g, or t
  misc_feature (377)..(377): n is a, c, g, or t
  misc_feature (384)..(384): n is a, c, g, or t
  misc_feature (390)..(391): n is a, c, g, or t
  misc_feature (394)..(394): n is a, c, g, or t
  misc_feature (396)..(396): n is a, c, g, or t
  misc_feature (398)..(400): n is a, c, g, or t
  misc_feature (402)..(402): n is a, c, g, or t
  misc_feature (405)..(405): n is a, c, g, or t
  misc_feature (409)..(409): n is a, c, g, or t
  misc_feature (417)..(417): n is a, c, g, or t
  misc_feature (419)..(419): n is a, c, g, or t
  misc_feature (424)..(424): n is a, c, g, or t
  misc_feature (426)..(427): n is a, c, g, or t
  misc_feature (429)..(429): n is a, c, g, or t
  misc_feature (436)..(436): n is a, c, g, or t
  misc_feature (442)..(442): n is a, c, g, or t
  misc_feature (444)..(444): n is a, c, g, or t
  misc_feature (448)..(448): n is a, c, g, or t
  misc_feature (455)..(455): n is a, c, g, or t
  misc_feature (472)..(472): n is a, c, g, or t
  misc_feature (474)..(474): n is a, c, g, or t
  misc_feature (478)..(479): n is a, c, g, or t
  misc_feature (483)..(483): n is a, c, g, or t
  misc_feature (509)..(509): n is a, c, g, or t
  misc_feature (511)..(513): n is a, c, g, or t
  misc_feature (521)..(521): n is a, c, g, or t
  misc_feature (523)..(523): n is a, c, g, or t
  misc_feature (528)..(528): n is a, c, g, or t
  misc_feature (535)..(535): n is a, c, g, or t
  misc_feature (553)..(553): n is a, c, g, or t
  misc_feature (558)..(558): n is a, c, g, or t
  misc_feature (561)..(561): n is a, c, g, or t
  misc_feature (726)..(726): n is a, c, g, or t
  misc_feature (728)..(728): n is a, c, g, or t
  misc_feature (746)..(746): n is a, c, g, or t
  misc_feature (771)..(771): n is a, c, g, or t
  misc_feature (795)..(795): n is a, c, g, or t
  misc_feature (802)..(802): n is a, c, g, or t
  misc_feature (824)..(824): n is a, c, g, or t
  misc_feature (914)..(914): n is a, c, g, or t
natgcattttaataccttgctgataaaatagtaacattccgtctttgcaatctgatacggaatacaggaagatactggtaaaggctttgatgtgcatatctatcataaccaggtaatgagaacacacacgaaaccacctactttagtgttacaccataccaacttctcagaaaggtcagcttcaagctctactgggtagcatagagtaaatagcgtccaatgtttaaagactggggaagcggggagaaagatgaaaggngtaagcngcacacacttcaaagcccacttttaagcacacgacattatgaatattaaaaantatttnnatnctaacaaanaangcanttcagcattttnnnaaanancttttnnntatnttcaatncataannacncncnnntnccnctcntccattcntnctcancnncntaaagtntttccngncatngtctagnggcagcacacgtctccnantacnnagcnaccgatctgtcatgaccaccatctcntnnntatttgangntaagntgtcgangagagcagtgaagttggnattcntanctttcatgctctggaaggaagcggccaatttactgcagctcagcttgaactgtttgatgatgttagctgatcttctcaaaccggtggacgtacgcgctgctctttgcactggtagtgggaaataaccaagaatgtagctctttcgaacagcagaacttcatcggncncaatgatttgggcaaaantcctgaggttcatctccagctgctnaacgttgggaatcagctggtagangatgctngaccaggctttgtagagcgtcncatcccagatggacgttcgaaaacaagcacactccagcgggcgagacagacgcctcaggtcttcctctcgctctttaaaaatcaggtcangctgatcctcctgaaccagatccattttgtgcaca

SEQ ID NO: 556471 - DNA, 1021 bp, Homo sapiens
  misc_feature (334)..(334): n is a, c, g, or t
  misc_feature (619)..(619): n is a, c, g, or t
  misc_feature (742)..(742): n is a, c, g, or t
  misc_feature (748)..(748): n is a, c, g, or t
aataatagttccagacttctacacaggagtctatatatctgatcggagaccggcgccctcatgatgctggtgggcttcctgggcttgcatggggggctgtgacaggagtcccagttgcagtgcgtgggcactgtgtcttcggtctgcctcattggttgatattcgctcgattgaaatagtctgcggccagtctggggatattcctcacaaggtatgaggtgattaagggaagtccaggagttttacaaggacacctacaacaagctgaaaaccaaggatgagccccagcgggaaacgctgaaagccatccactatgcgttgaactgctgtggtntggctgggggcgtggaacagtttatctcagacatctgccccaagaaggacgtactcgaaaccttcaccgtgaagtcctgtcctgatgccatcaaagaggtcttcgacaataaattccacatcatcggcgcagtgggcatcggcattgccgtggtcatgatatttggcatgatcttcagtatgatcttgtgctgtgctatccgcaggaaccgcgagatggtctagagtcagcttacatccctgagcaggaaagtttacccatgaagattggtgggattttctgttngtgcgttggtttgtttgtgttcgtcgttgttttttgtgccactaattttagtattcattctgcattggctagataaaagctgaagttactttatgttagtcttttaatgcttcattcaatatngacatntgtagttgagcggggggttcggttgcttggtttatatctcctcagtgtccgttccgctcgttcatatctaagcagaaatcctgcaatgaaaggtactatcattcgctagacctctagaccaagatatcgtacactcaacagaattcctctcgtctttaacatagatacaaatgtctatcaacttcaatccaagtgtcacttatattgcacgacaattgctcacataactgacaacttatgaccatgtctggttcagccacaccccccctcccg

SEQ ID NO: 556472 - DNA, 455 bp, Homo sapiens
ggaaattcggccattatggccgagggggaagaaatttaagccattaaagggagtcaaatccgtaacggaagctgaaaggttccaggggaggccttgaaaggaggccaaaattcttaaggaccagttggttttccaggggtcattacaaggaataattattaggtcccaagtgaggggaaatccatattctagttaaggcattggggtttagttacacacggttaccaaggttacttagttataaaggtaggattttaaaggagccttaagttagggaaacctttaagggactaagttaatttggaatcttttaacttaggaagattttgaaggggatttttttccataggaggataccatttggcggttgaacatggtaccagtaagggcagaaagttgtagggataacctctttcttaaaggagttaactggcttaatccagcagaagttatct

SEQ ID NO: 556473 - DNA, 479 bp, Homo sapiens
gcgctgtgctgctcgtgcgcgctccttgatcagcagccacagtgagctcaagtgcgacatcatgcgctgagatccagcagcgacagggaggagctggacgccatgacgctggcgctgcatgtgagcaggatagtgcctttggcagtcgtgttcgatgtcgcagatgcacgcggccgtcggccatactgggccgcgcgcgtgccgagaccgaggagctgatccgcgagcgcgtgcgccaggtggtagctcacgtgcgggctcaggagcgcgaagctgctggaggctgtgagacgcgcggtaccagacgcgagctaacgaggacgactggccagtcggactgaggccgtcctgcgatgctgtgtctgtcagcgcaatccgcagcagggctagctgtgctggttgctgacggttgaacgtgctagcggcctctgagtagccagtgagggttgcttggtactgagtcgcggttttcctggcgc

SEQ ID NO: 556474 - DNA, 268 bp, Homo sapiens
ctaacctgatacgcacatgcagtgcatgctttaggtgctaagcatgtttattgtacatgtatactgttaggtccttgcatctgtggtgctaggtgaggatgacaagatgtcgagtgctggaccatgaccgccgcctagagaatagggctgtttgtaggcgttctaaatatgcttattttgtgtgtccctcactacctattacacaccgttgctttgtgggcttgttttgtatgagcgtgtgccatacagtagttaactttccatgcag

SEQ ID NO: 556475 - DNA, 631 bp, Homo sapiens
tggaaacagtcttgctgtattgcccaggctggagtgtggtggcacaatcacagctcattgcttcctcaatcacccaggcctaagcaactccttcccacctttgtagctgggactacagctcacagcacaccgtggctaaaatttttttttggttgagacggattctctatttttgcccaggcgggtctcaggccccgtgggctcagatggctcctccgtgcctcagttctccaaaggcacaggccaagtttgtagctttgtgctccctttgccatcagtgcccaacaagaggttctatcccttttaaagtgaatgtgacttttcataaagtgggttatgtgggggggcaagttcttaaagcgggaattggtaaatccctccgtgaaagtgtttttccagtgcagttcccagtgacctaattactacaataaaggagggctctgggggtgtccaaaacaaacaaacaaaaaaataaaaacaatacaaaacaaaaaaacatacacaccaaacactatacacataccaaacaaaacaacactccagagattatactatcggtccggcacacaaaagatcatacatcataacacacataataaacattttcacccacacccattttttaaacata

SEQ ID NO: 556476 - DNA, 219 bp, Homo sapiens
cccccccccgcccttgggggtttagggggggggtccccccccccccttaaggggcccccccattttttggggcctttttcggggtttgggggctttttggggcccccaggggtttttccctgggaagttttttggggggggccccccggggggttggccccaaaaccccttaaaaagggggggtctttttttgggtttttttaaaggggttttccccca

SEQ ID NO: 556477 - DNA, 531 bp, Homo sapiens
  misc_feature (70)..(70): n is a, c, g, or t
  misc_feature (89)..(89): n is a, c, g, or t
  misc_feature (123)..(123): n is a, c, g, or t
  misc_feature (282)..(282): n is a, c, g, or t
  misc_feature (311)..(311): n is a, c, g, or t
  misc_feature (318)..(318): n is a, c, g, or t
  misc_feature (323)..(323): n is a, c, g, or t
  misc_feature (326)..(326): n is a, c, g, or t
  misc_feature (328)..(328): n is a, c, g, or t
  misc_feature (330)..(330): n is a, c, g, or t
  misc_feature (332)..(332): n is a, c, g, or t
  misc_feature (341)..(341): n is a, c, g, or t
  misc_feature (345)..(345): n is a, c, g, or t
  misc_feature (352)..(352): n is a, c, g, or t
  misc_feature (359)..(359): n is a, c, g, or t
  misc_feature (362)..(362): n is a, c, g, or t
  misc_feature (364)..(365): n is a, c, g, or t
  misc_feature (373)..(373): n is a, c, g, or t
  misc_feature (389)..(389): n is a, c, g, or t
  misc_feature (400)..(400): n is a, c, g, or t
  misc_feature (414)..(414): n is a, c, g, or t
  misc_feature (456)..(456): n is a, c, g, or t
  misc_feature (469)..(469): n is a, c, g, or t
  misc_feature (510)..(510): n is a, c, g, or t
  misc_feature (519)..(519): n is a, c, g, or t
acctcctccctgtttgagcaggtgaaagaccagtttaatgggggtcccggctggcaaacccacgcaaggngaaacccagtactattttngggtccccccgggggcttcccccacttttgaatnggaggttccttccggggtcactgagggggtggggaagctttttgactttgatcccctccctggggggggccctggagaagtttccaggaagacccctaaatttatggagcccgtggcggagaaagcgctgccggaatccccccaaaagccccggggggngtgaaatgtggatgttgcttttgcccccncgggggnatttnagncngncncccccccanattnggtgcgnccccccnaananngttttgcnggtccccaagtaaccnggccccccccnccgggcccccaacnccgcccccccccccccccctttgggtcccgccctttaccccncgactttgcggcncatgggaagaccaaattgcccccgcccgcccctaattccanaaaactgtnttgggggctgga

SEQ ID NO: 556478 - DNA, 1174 bp, Homo sapiens
gctatttcctccttggcctgtctgaagatagatcgccatcatgaacgacaccgtaactatccgcactagaaagttcatgaccaagcgactacttcagaggaaacaaatggtcattgatgtccttcaccccggaaaggcgacagtgcctaagacagaaattcgggaaaaattagccaaactgtacaaagacacaccggatgtcatcttggtcatctggcattcagaactcatttgggtgcgtggccacgcaaactggcttgggccatgcattccatgcattcccctggcatctatgcaaagcacacatatgaacgcaaacatagcacttggcaaggacatggcccttcgtattgagaaggaccaaagcactacaagaacagcaactgaacgggcacaccgcaaagacacagaacttgccgcaacgtccagggcggacctgccaaacgggccacatgcatagcctgcctgtgctaacaccagtgccgcacggcagttccaccgcgttgcctcgcactgtgattgttcacgcttgctggccacgttgcgcgccattcacatagccatacaaccgcttcaataacaatctgaaatactcatatatactcactcttcttctatatctcacaaatcacaaacctttttcttgatcacacgacacctaagagccactatgcgcagaaaagaacaaatctttatctaaacgaccactctacttatcttatatagaatgagaacacccacgacagcatacccctcctcccagctcaccataatggcgcaccacacctactggtaccccacagaccagagaatcaccgctgctaaacagagccaacacaccgctcgcgacgtgcgcaccactccacacccatacttatagaaaaaaaacagtctctgcggacacacaacaaaccagacaaccgtatgccataacaaaaaaataaccacaaccaaggatagcattcttacacgtgccacacacaaggtagcagcccactaaaaaacacgacgagccgtgcacacgcagaagctacataatcaaaagcaccgcatacacactgataggagcaacacacactaccagcacgcctactcaccccaggcccaccacccacccaccacctgccacccgccaccgccccatcgcaacccccatcaccatcacacccgtccc

SEQ ID NO: 556479 - DNA, 357 bp, Homo sapiens
ataggtatgtgatagagctcctagggtatgcggatgggaggaagggttgatcataaggtatgtgacagagctcctagggtatgcggatgggaagaagggttgatcatagaggtatgtgatagaactctttggagtgagagaaatgttttgtgttttggttgtagagatgctcacctgactccatgtgcttatcaaaacccacagaactttatgctaaaaaagtaaattttactgtatatcaattctacttcaacaaacttgacttaacaaagaaaccttcggtatttctagcgtgtttgaaatgggatgcaacgtcttattatggtttgtaaggctctgtctgacatctggcctgtc

SEQ ID NO: 556480 - DNA, 127 bp, Homo sapiens
cctctttcttatccatcttcctccttctcattcttttattcttccttctcctttcttcatatcctttcatattccttcctattattcctcctctcccccttctgtcgtactatctcgcagccgtata

SEQ ID NO: 556481 - DNA, 329 bp, Homo sapiens
  misc_feature (18)..(18): n is a, c, g, or t
  misc_feature (307)..(307): n is a, c, g, or t
  misc_feature (316)..(316): n is a, c, g, or t
aagacgggaatgaaagtnacctccggtcatcctcactgctcattatacgctagttataatgcattgacatgctaagagacactcccaccagcatcatgacagtttacaaatgccataacaacatcaggaagttaccctatatggtctaaaaaggggaggaaccctcagttctgagaatttccttgaaaattcatgaataatccaccccttgtttagcatatgatcaagaaataatcattaaaaaatagccaaccagcagctcatgctgctggtcttgcctatggggtagccatcctttctttattancctgctttnactttatggactc

SEQ ID NO: 556482 - DNA, 1230 bp, Homo sapiens
cagccgcggcgttgtgtgtcatgctatgtcatggttcgcttctcctcctcctgtctcgctgtgtccttccgggggctgtttgtttgtgtgtcgttgctgtgtggggcgcccttttctcgggggtcctgccacccctgtttttgagtttttgaacttggcactttggtggtgagcttcctgcgggggcaacttcttttggccctctgtgccttagccaactttctggaattagtgaggggaacgctcacagattacttaatggaattggaataatttgggggtaaaaattccaattttggtaaatagccgcaacttttttgtgtggaaatttacagcgattggggcaccataaaattgggccctctctgacttttaaaagaaaacgggtgcacgcccatgccaccccagccttatactgtttccaaaagattgacttcgggcatggcctgtcattcctctaaatttttaaaaccctcacccaaagttgggtggtaaaatttggaaaaaggtgaaggtcacccctcagagttctaaatgggtaatcgtgaacccgcaaatttggtaataaagacttttttccggtggtaaaagaacgcttgaatttttgtgaaaaggcatttgttttatccagaaccaccatgtctgaatcctctttctcctctaagtatattttgtggccactttagagcgcccaatttgtgtaagaccagcttggaaattaatgtctggtttagactcgttaagagtgggccctttttccacggtgccacgagtgcctctggctcgttttccctcgttgtttctcccccgagcttggctccctggtgtaaaagatgccctctgtcgcggccacgaaaccacaaatggggctgttcccgctttatttataaaatgcctcgagaccaactgcacacttccacgttcaacgccgggccttgcactatataatataccggaggcactaccagtgaggcaccattctaagctgagtgagtaaatacaccctcttttttgccctcttgccccctataaaaatggtaaatctgatcactatctaccactgtatgaaacttaaccactgggaaatgttaaggagagccaatggttgtaaactttgtaagtaacttataacacctggtgtatctttttgcttatgaatatttctgtattataacccttgtttctgtagtttaattaaaacattttttctcggctgttagcttttttcca

SEQ ID NO: 556483 - DNA, 522 bp, Homo sapiens
  misc_feature (71)..(71): n is a, c, g, or t
ggatcccgatgggggccaatgttccaactcactttggctccaggcacgattaaatttcacttgggacacgntgctatgtggggaccaatgaatgtctacgggactcagctcaacatgttccagcccttaaagaccgtggccattttgggcagtgtaacgtttttggctggcaatcggatgttggcccaccagccagtcaaaaaaccagcccattagttccaaaagaaaaatggaaattttgaaacctgaatgtcaaaaaaaggagtcaagacccattcccagtttgagaagaaaaatggaaaaaaaaacctttttttaaaaaagaaaaaagcccagattggggttaaacttttgcttgtttttcagtttcccccacccccagcaaaaacctggggagcccaaaaagtttctttttttgcccctgggtaaaaagctgtgaaaattcctaacttccccaaatgttgcttttgaaaagttaaaatgggtaatttttttgaaaaaaaaagggtaccaataggacca

SEQ ID NO: 556484 - DNA, 129 bp, Homo sapiens
atatcagaggttgaggcataggatcacttgagtcaggtaggtcaggctgcagtgagctgtgattgtgccactgcactcaagcctgcgtgacagagcacgaccctgtctcaaaaaaagggtaccgagctc

SEQ ID NO: 556485 - DNA, 494 bp, Homo sapiens
aggtgcgagcgtggggcctgtgcactatgaggtcagagtactcctacatgccctggggcccctgagagcttcatcctcccctgctcactgccacgggctctgctcccgctcagctgcccatccggcttcctgctcacagccttgcatcttgtgtccttctctcgcaggccaacactgcacctttatctttacctatcctattcctctctcacgttaatgtcaactaggacccctagctgctatctcatactcatccccactaaaccaatacctcctgggaaaatctcctgtctccagggtagtctgtgcaccatagtgcaatgatttttcttcttgggtctgctcttgtgactcctggaacccttcgcggacccaacagctgcaaacaaaatacctcaacttataatcacagagtgctaaataacagtcatgggaaatgtctagtttagggatggtgtgtgtcctggtatctttgcgtaaatattcggaaggac

SEQ ID NO: 556486 - DNA, 564 bp, Homo sapiens
cctaacagtctgagccatatagtgttatggtcctcatactcctcatactcggtttctattattcaaaactgttttgctcctccaatgtccttggctatattccatagacaattgaaaatccgagcgtcgagtacaggccaaggctgctgaaatcttggctgagactgcactaaatgctgctggccattatcgcattgagccttctgaccctgtgtctgtaggtggcccagctgtctttgagttggatattgagtttctctcagcagagccttgtagcttttagtatgtagatcttacactgtgtttggttaaatgtattcctaagcacatcatacttttcatgtattataaacagtatggtttttaaatttcatcttccagttgttcgtgggaaataatgcggaaatacttgattttttggtgcattgaccttgttaaatgtatgaattctactcacttttgggactattaggcttgtctgcacatgtggtcacgtccatgtgtgagtcaagacagtttttcttctcgcgttctgagccgtgcagctttgttaactggaaagcc

SEQ ID NO: 556487 - DNA, 699 bp, Homo sapiens
agcaccacaaacgcggtttccgacacattttaattaacagattaacaatcaactgctacatattattatattttaaaaagagttaagttgtatttagataattcacaaactatcatgcaaataacgagtaagtagacaagaataaagtggtttgagatgaaaagaacctaacattatttacagtagatgtggttttaatacaattacgtgccctcaaaatgtctctggcaatgtacagaaatattgtatatacttacatcatgtaattgttgtaagcagttataatacacaaatacatgcgtgcatactatctcacattaagtagcactcaacatgaaacagttcaagtccacttattaacttttcagttaggtttgcaatgagaaagagtggaaatttgtatttaggaatagcttatagaattacagacatgttgaggaagtgtagagctttatttgcttgttcatagaggcagaaagtaggaaccagatagagatgaaaaggggccactgaaacgtgaattgatagctcagccatttaagcatgatctacattattcagatagctcttataagctttctataaatatatgcattggtgtgtgtcagtaatagatgtaacgtttacactttgaaagggaactcttgattcaactgttattaataacagcttgctaatataagtagtgatgctaccttg

SEQ ID NO: 556488 - DNA, 385 bp, Homo sapiens
  misc_feature (122)..(122): n is a, c, g, or t
tttgggcccttgggggccccccccccctggggaagagacccgcccgttttctcccttccccccgggggggccggggggggtttttcccccgtggggggtcccccaaggggggccgggggggntttttcccccccggggggtatttttcccagaaaaaaccccccccccccccgggtttggggggggggggcccccttttttgggaaaaaccccgggcccccgggggggccccccccccccccccggggggggggggggggttttttttaaaaaggggagggggggggggaaaaaatttttttttttgttttttttgggggggggtttttttcccccccccccccccctttttgggaaatttcggtttttttttttttttccccca

SEQ ID NO: 556489 - DNA, 867 bp, Homo sapiens
cggccgcatctagaacaccctagtcactgacagagggaacagcagagaacctatgtttggtattcatgcatgtgattgtgatactatgatgaattcaagatgtgcaccgatatgtatataacgagcaactaggatagaaaatagtcgtgcagtggttcctttccattcctattttacgatgggagtcctggcatccagtgacccctcgtctccgacgttggtagcttgtcctaaggtcagactacggcttcacaacgaggaaagcagtgaggctgaaagggggggctatggaagagcggtagggagtccaggggagaagatgcagtgaatgcttgcatgctttccacaccgtgttgtcgtagtcgcgcgagctgagttccactccgtgttctggcggttgctgtcgcgttggatggctaggccgtgctactgggcgttgtgtgtagcagtcgatatgggccagcggagtttcttattcttcgctagtcgccctaatggccggctctctggggggagtagcgaggggcgcggtgggtcgcttgggtggctggtgaatgggcgcgtcgcccttgtgcccgcctgggccgcaagcggttttacccccgcctatacccgtggttatggccatgtgtgtgctctgtcgttggggatctttgttcccgctaactcagtgtgggccaaacgactaaagtggaagcaattacctggtagcctttaacccaatctacccccctttccaagaatccaaggacgccccggaacgatgggtttcttacgcattcctggggcaccattttacactccattttgccctcccgaattaaaattttgtccacttaatgccagcaggctggtcacgcgcaaacc

SEQ ID NO: 556490 - DNA, 109 bp, Homo sapiens
aggtaagagcgcagtaggaggaaggcgaaatgaaaatttggtcatcactggcaacaaccagcctattgtttttcagcaagggacaacaaagctcagtgtagaaattgaa

SEQ ID NO: 556491 - DNA, 226 bp, Homo sapiens
  misc_feature (33)..(33): n is a, c, g, or t
  misc_feature (44)..(45): n is a, c, g, or t
  misc_feature (91)..(92): n is a, c, g, or t
acatggtgagtggaagcccggcagatcgacaanccagattacannggcacttggatccacccagaaattgaaaccccgagtattctccgannccagtatctatgcctatgataactttggcgtgctgggcctggacctctggcaggtcaagtctggcaccatctttgacaacttcctcatcaccaacgatgaggcatacgctgaggggtaccagctcgattgtatt

SEQ ID NO: 556492 - DNA, 236 bp, Homo sapiens
  misc_feature (24)..(25): n is a, c, g, or t
  misc_feature (29)..(29): n is a, c, g, or t
  misc_feature (136)..(136): n is a, c, g, or t
  misc_feature (139)..(139): n is a, c, g, or t
  misc_feature (157)..(157): n is a, c, g, or t
  misc_feature (161)..(161): n is a, c, g, or t
  misc_feature (163)..(165): n is a, c, g, or t
  misc_feature (168)..(168): n is a, c, g, or t
  misc_feature (170)..(170): n is a, c, g, or t
gagagcagaggccatgaggatgannttancacaccaagcatgagatctctgagatgaaccggatgatccagaggctgagagccgagattgacaatgtcaagaaacagtgcgccaatctgcagaacgccattgcggnatngcgagcagtgtggggagntggncnnnaananatgccagggaacaaagctggcgcgagctaggaggagagccctgcagaaaggccaagcagagacatg

SEQ ID NO: 556493 - DNA, 796 bp, Homo sapiens
  misc_feature (539)..(539): n is a, c, g, or t
aattcggcactgagggacgagagagtgagttctcccgtgtgttgcccaagctggtctggaactcctgggctcaagcaatcctcccacctcccagtgttgagattataggtatgtctagaggtcagtttggacagggacaggaacctctagacatgtttttctgggtgaacgagataagcggagaaatcacctaccccccgcagaaggcagatgcacctgctgtttctcctgagagcccacaaaagaagcccccatttcagcccaggagtgtgcaggaggctccttgcagtccccagggcccgcctgcacagaggcctgcccttgcacctccatctaagccttctctgaaagactcaggctcaagaaacccctgcccatctgcacccacctgggccaggccaaagccggaggagtgaggagcccccaccgttctcagcaatccctgtcaccatctcatcaccaggagtgactctgcccatactcggacccctgggaccagcccttcagccaccggtctcgacctctcctctcagcccttntgcaccctgggccttcacctgcaagctgaacaatgtccttactgggaataactggttttccttttgaatcttaagaaaatttgtctggctacactctttaagcaccttcctgagccacccgtggccaggctctgctggccgcatctgcctggccccatctaccttccctggaagcacaggactcaccccaggggtctcacaggaacatgcccagtgctttcaaacccagtaaaattttacttagattttgacaaaaa

SEQ ID NO: 556494 - DNA, 628 bp, Homo sapiens
agcgggcggccgggacggcggcgccgatctgcggggtggaaccgccgcgcgctcccgggctcgggagctgagcccgagagaacttcgctgccttcgggtcgccgcttcccgcttgtccactgctggaatgtgcagctatgggatacgagagaaaccaagggttctggggagacggtcctccgtggacgacttttcgtctctgcaaggtctccataggttgaagcacattctgaggccgactggacattccacagaagtcctgggagcttaagccttaacaacgctcgtgttgcatttaagcgggcgccggtggggcagtcgactgcgacacatcgcttacttgtgggcttgttagcattaagaagagaagggcggaacgagaacgatgtcggtacggtgaccttacctagactgctgttacagtgtgctcctggggctgtgaagtggtgttaatttcatgcaagtgggcggctcctaaaaacttcaacaaggcaaagctccaggtaacggcaggccttggcaaggagactctgcgtcagggtcacccagcagagatcagcaatccttggctcactgaggaggtccggattggcctcacagggcactgccaccacttgaacagaggcat

SEQ ID NO: 556495 - DNA, 1306 bp, Homo sapiens
  misc_feature (543)..(543): n is a, c, g, or t
tttttacttaaaaatgctttatgggaattatttggataaaagcaaatatcttgtttttaaaacaaattatgtgagaaatataaaagctttctcttatctttgaagtgtgccccctatatattttctcgggcatttttctcccccaatataagggtgacaggcgtgcctcccccgggatatatattccgggaaagttgtgttagttctctttagggatatatgtgcccacgccacccgcgggcgagaacaatatattgtggtgctcaagacaaattctcacatatatgcacaaggagagaggagaacaccgacggctgtgtgggttctctccaccctctctctctcacacggcctgtgagaggggtgtcaaggtgtgtgacagagagatatctcaagtgtgtgctatacaggcgcatgtgacacagggcccatatcacaaagggtatattctctctccacgtgagaggcggagagatatatctcccaaacactctatatagacacactctctctccctctcgacagatattatagtgtgccganaaaaactctctctgtgtgtgagagagagtgggcccatatgtgtgatccgcggtgagcagcgtgggagactatttcccgcggagaaggatctcgacgaagacatctcttttataccctcctcacaaagcggtgatattattaccgcagcggagggcgacaaatataaaaaagcggtccttcttttatcaaccaaacgcatctcgcagaagcgttagatgcatctaatctgagaacattcttcctcagcacacaagaggggcgcccccattgatgtggggagcgccccccgctcttatatgtccgccgcaaagtattctcgcccacgacgatgggcaccacggagagaaagctctatatgtgggtctccgagcgtgttctccccaaggaacgccgaagacgaggagaacccaccaccgccaatagcacaaatcactctcccacacaggtgttgttggttaggacgccaacaaaacggaaggacgcagcaagcatgttgtcagaacagcagcgccaccacaacagaactcttgagcgggacgcacccattggtgggcggagggaaggataccccccggcagccgcacaccttacttcatagtatcccttacatgattaaaatcaccccccccacaaagataaggcgtccagtaagctggcgcggcgcgcgctgcacgcaaggaagccattgtagtatgggtagcgcccccccggccccgccccacgaccgcccaggggcggcattatttacacgtgatagcaggtg

SEQ ID NO: 556496 - DNA, 402 bp, Homo sapiens
tggggagtacggaatggggagtgactgctgcatgggttgggtctcttggggcagcaaaaatgctctaaaattagtggtgatggttgcacaactctgtgaatatactagaaaccattgaattaggccaggctcagtggcttatgcctgtagtcccagcactttgggaggccaaggtgggtggctcacttgagcccaggagttcaagaccagcttgggcaacatggcaaaactttatctctacaaaaaatacaaaaattacctgggcatggtggcatgagtctgtagtcccagctactcaggaggctgaggtgggaggatcacctgagcctgggaggtggagactgcagtgagatgtgatcgcgccactgtacttcagcctgggtgccagagtaagactgtctc

SEQ ID NO: 556497 - DNA, 444 bp, Homo sapiens
tccgcgggggacgaaagggatgaacttcgttgatttctttgagaaagaagtggaaggcaatccggagaagcgaaagtgggtaatgcatcaacttcgagagttgatgtggcataaaaatgtacaaaccacgatgaaatacattgactatcgcagaaatcttcacatgctcaaaagcgcggaagagggctggggaactcaccttatcaagctgctttcagcaagagaagagaaatgaccttcgcagcccagcagctacaaggactggtcaaggtcagctttccattagacgacctgccggatttgatctcaccgtctaggcttgtgctcgagttgcaggggacaaggcgcactcatatttgggcgtggtgctatcggaaccagggatacctcaaacaagcatcccagaaattggatattgatcctgcttctcgctgtgagaagcga

SEQ ID NO: 556498 - DNA, 155 bp, Homo sapiens
ctagagatccttgccttacccgggagccttacctatggcttaacccccgggagccttaccctccggtatgccttaccctgtgctgagtgcagtggcgcgatcacagttaactacagcctcaatctcctaagctcaagcgatgcttccactttcag

SEQ ID NO: 556499 - DNA, 400 bp, Homo sapiens
  misc_feature (71)..(71): n is a, c, g, or t
tttcactttaattatatatgtttgtctgctttattcatattcattcataagcacagaagccttgctaatanagagcaaggaatacaactgaaattggggatacaagtagggtgaggaagagactgatttaggagcttgtttaagaaggctattctagaagatggccacaaaatgtggagagagttaaaatagtataaaaatgctaatagttccttaatcgagcatgtgactagaggattatttacatttgttgtctctgcctcatccttttatttttctacttcatcagagaggaaaggggaggcaacattggcctacagacagtttacggtttaaacacactaccgactgactaaagccaacttaaaatttccctagttcctggctaatgttcctgatc

SEQ ID NO: 556500 - DNA, 207 bp, Homo sapiens
ctagaggtccccacagaggctgccagaacgcagttaacagagccacggtgtccaactgtttaaaattgatcagagaccatgaaaagaaacttgtgcttcaccgaagaacaatatctaaacatcgaacaacttaaatattatggaaaaaaaacatagcaaaatataaaataaatataaaaaaggaaaggaaactttgaaccttatgta

SEQ ID NO: 556501 - DNA, 112 bp, Homo sapiens
cctctacatttatatgctgtctacctccattctgaagagggaggtttaggtgtcccttggtcctctgggaatagaagatccattatgtctttgtgtagagcaagcacgtttt

SEQ ID NO: 556502 - DNA, 117 bp, Homo sapiens
tacagagaataacgagatggagctttaatttattactgcaaacagtactaacaaacccacaggtctaaactaccaaacctgcattaataaattaacagctccatagggtcatctcgt

SEQ ID NO: 556503 - DNA, 1034 bp, Homo sapiens
ggtaataactgaccacagtttaggcagtctgagggctcagggatagtactgattgatactcggctcaccagggtcactatgcctcaccaatctatgcccctacaaaggtccaatatgtaccccatacgtcgtctctttatagctgagtcgcatcaacgtgcaagaccacacctgctctcgtactcatggtagggtgcctatcgccttacgtagtatgtgggggctgcgaaggagggcgtgggtggtaggtcatatgttagtcatctagagttgtgacagtcacaagtattggtcgtaaggagatatagtacataattctaaatgtactgcgaatgggtaaggctagtagaccaaacagttataggagtgagcgactgacatgagtttgaagagcaaagtatggattgaagcaatggaatgggtaccaaaggctagttatagaggatcaatcccgtctagtgattttgggaagccacaatcaacaaataaccgatgggatgctgttcacctctaggcgtttgaactcctgaactgcctaagagagcaaccctactctgaatgactagactggtactgactacctacccctcaaatgcattggaatagactgactgagagttcactgcagtgaagcactattcagggaaagaagacactgctactctgtatactggtctccctgacagatctcctgaattataacaatttgacaggcagcagaaactaatcatacttttatgatcgggcgtcgaaatcaggattatcgccacttggttatgatcacccgatgaggacaggcagaaggcggaacgcgggaatattgctatgctaaacctaagtaggtccttcccctactcatcggtatgttgactccaaaagcctaaggtacataaacattcaaataatccttcatggcagaaattaaattctgaccaacattatagagagcttccaagggttatagacagaccttagggcactagatactaagcgagtaaagcccttggcaaatgggcgacctacaagggggtaac

SEQ ID NO: 556504 - DNA, 1149 bp, Homo sapiens
cggccagagacgtcggcgcccttgagccagtgcccctgaccctgcgctccagctgggcagaccccaatccagcatgagcgccgcacccactcgcccatgatgcaggtggcgtccggcaacggtgaccgcgaccctttgcccccctggatgggagatcaagatcgaccctgcagacctggctgggccttcttcgtggaccaccaacagaccgcaccactacgtgggaacgaccacgctgctgttgccctcatgagtggccccaaggagactccatcctcgtgccaatgtgcccttccctgggagggctctagtgctgcctgcctgctaggtgaatggccaccctgtgtacaccccagactccgaccaggctacatttcccattccgtgtgctccattgaaggcgctgagaaccgggcatggtgcaaccgctttccatgtctatccccagcctgggatgcaggcgagttccgaactgaggcggagctagcggctcctcagaggtcccagtcacctctgcggggcatgccagaaagcactcagccagataaacaggtgtggacaggtggcagaggcggaggcagccacaggccccaggctcaccagcggacctgaggcgagcccagtctcgagctgacatctgactgcatcaatcactcatccatcctcggacagctgcacatacctaccgggcaggagcaagctgggaggaaacagtgtcccgcggagaggtacgatctacataccggtgatacacgaagagaagttacacggcaaaaagccaaacatcactaccagcaagccaaagagcagaacaaaggaaaaggggaagtaaaaagcacaagctggtacacaagaccagggacgatactgggcgccccgcccgttcggcgcgaacccggcacgacaaagtacaaggggacatgagccccggaggaacacaaggcagggagagagcgcaaaccaaccgcggcaaggtgtaaaaggaggaaccaggcctcagaccgagcacaaaagcatgagcgaagaaaaaaggagagacagccatggcacaaaaccggacaaacacgacgagggcagcagcagagccacaagaggagagacacgacagagcaccgcaaagagaggacacgagacaacaggaagaaacag

SEQ ID NO: 556505 - DNA, 322 bp, Homo sapiens
  misc_feature (108)..(109): n is a, c, g, or t
  misc_feature (122)..(122): n is a, c, g, or t
  misc_feature (144)..(144): n is a, c, g, or t
  misc_feature (146)..(146): n is a, c, g, or t
  misc_feature (165)..(165): n is a, c, g, or t
  misc_feature (208)..(208): n is a, c, g, or t
aggccaagtgcacaagctgtgcatgcactgcaaggtcagactcatagacggatccaccagtcacagcccaacaaggacgatcacaagacatgagggcaaggcaagccnntgtgatccccacngctcacaggtagaggctgctcntncctctcctagcactgaagnagccttgtccttgggaccggacactatggctttggccctgtgnagggagaaatggtgccacaggagttgtcttaagaggacaaggcatgcacggtctgagatcagaggttgtcatgccacccatgagccagtcttgtggtaacgggccgagctatat

SEQ ID NO: 556506 - DNA, 403 bp, Homo sapiens
tctttcaacacttgaactgcattttttatagttttctttgaaacaaaaaaagtacttctgaaatgaacctttctgcctgcatagaaatattacaagtatttaaggtattaaagaaatttgtcacagcatggtggttcgcgcctgtgggtgcagcgctttgggaggccggggtgggtggatcgcttgaggtcgggggttcggggccagcctggtcagcatgctgaaacctggtgtctgctgggaatgcagacattggctgggtgtggtggcgggtgcctgtggtcccggctgctcgggaggctgaggcgggggggtcgcttgagcccgggaggcggagcttgcggtgggccgggattgctagcgcgctccagcctgggagacagagcgggactctgtcgtaaaa

SEQ ID NO: 556507 - DNA, 300 bp, Homo sapiens
ataacaattatactgtataaatggtacagcatataacaatttcttaaaccataaagctagcatctcctgacaagactagccaggtactcaaaacaaaacaaaagtaagacatcttctctgccatggagtacaaagaaaaattgtattaattctcactggagggggttgctcacagccccaaggggctacaacttactcggaacacagaaagaaggcaatggtgttttatgaaactaacaatgaaggaaccctattatatcctttatttctcctattacttgcctatattaatcaaccact

SEQ ID NO: 556508 - DNA, 987 bp, Homo sapiens
  misc_feature (252)..(252): n is a, c, g, or t
  misc_feature (254)..(254): n is a, c, g, or t
  misc_feature (293)..(293): n is a, c, g, or t
  misc_feature (435)..(435): n is a, c, g, or t
  misc_feature (455)..(455): n is a, c, g, or t
  misc_feature (479)..(479): n is a, c, g, or t
  misc_feature (490)..(490): n is a, c, g, or t
  misc_feature (649)..(652): n is a, c, g, or t
  misc_feature (657)..(657): n is a, c, g, or t
  misc_feature (662)..(662): n is a, c, g, or t
  misc_feature (664)..(664): n is a, c, g, or t
  misc_feature (666)..(666): n is a, c, g, or t
  misc_feature (670)..(671): n is a, c, g, or t
  misc_feature (674)..(674): n is a, c, g, or t
  misc_feature (680)..(680): n is a, c, g, or t
attcttaagcaagaaacttttttcttgatgagactcacagatctacacaaactacaaaagttaattttcttgttacacccactgcactctgcaaccagtgttgcctgcctcatggcagttggatcagctcctttacaaaaaagaaaaaaaaaaaaccaacagcaacaaaacagagcccatccatgtcagccacaccaatagtttcatgttaattcttggccactggagtcaatttggctatgagcactggtnanggctggtaacctttaacttattgggttgatgtggaaaantgggtgatgtaccactggtttctagatttttttcatggccttttaatcctggatattaggttaatcactttggaagctatagttatgctggtaacattttagcatggtttcacaccaagttagtgtagccaatgaggaaaangttaccataatgacagcagntggtccgagaagtgacagcggtantactcagagcntttacttcttacacctagaatattacaatataacaccaggggcgaaactgtgacagtctatttccagttgcacatattgtccttatatataacggttcgacagttcaatctctcgggctggcaactaaagaacacttacgtatcagtaatggaactctnnnngattnaaacnantntgcnnaanttgctntgcccagatgctgggcatatatacgacgattgggggtgcctgtcggtcttgggaaaagtcattaagtaatctttctaaaacttcttctgtgtggatcccagtgacgttgacggccttagaccccgggacttgagtaccttcctgcccagtagcgggtgtttctgccgcaccattacggaagcgatgtctacgcctttcttttcaagttagtccagggcctaaagcaccgggttttgatcaccagcacctgtgtaagacccgcgttaagagtgtgttggcgacagcgagccccatgtgtttgtcgaaa

SEQ ID NO: 556509 - DNA, 330 bp, Homo sapiens
aggagtactcagcactgtatcagctatgctctcacggaacggggtgtgagccttgtactgtcccaggaccctatgcactccttcagggactaagagactcttgttgatttctgcgccctccatgcgggtctgccggtcagcactggaagtgtccgcgcctcgctcattccctgccagatctaccaaagagaacttgccatgcacttctccctttagctcgaagaataatttggaagcacgcgtgggagcgggaggaattggagttggcaaatgtctgcccagaggtactgcaggcgctgcccatatcgatcatcttgatgacatcaccca

SEQ ID NO: 556510 - DNA, 375 bp, Homo sapiens
  misc_feature (207)..(207): n is a, c, g, or t
  misc_feature (228)..(228): n is a, c, g, or t
  misc_feature (294)..(294): n is a, c, g, or t
  misc_feature (325)..(325): n is a, c, g, or t
gcttcaagatcggtcgcgagcagatacacaccacttttgattgggaatgctgacatttgagaagagaaactggcttctgttttcgcaaaggaaaaaaaaaataggataggcttcccttgtgcagagggagaaagggtttggttttggtttggtttttaaatgggagcccgtgaggcatcagcttattatactgtgggactctacctnctcactcactatatgctaacnttaaagccattcaacaagagagtcaagatagatctggaaattaaattactcaacagaactcctccnttttttaagctgtatttttcaaggtacggtngtggtgaccggccccacggggtgtctattacaggccacttgggtagtggt

SEQ ID NO: 556511 - DNA, 470 bp, Homo sapiens
cgagggtcttcggaacgtagcgctggctgcggcccggccggcatacccagccggccgtccggcagccggatccgcgccgactcacgacgcatctgtcatggggccagaccaccatggcgggacgctccggatgcgccatgccccgcgcatttatcacatgacaggccgcttgttccccacagccagcgcacgcccgcacaagtcacccagatctcggccaacggagcatgcagcggcagggtgacctttccacgagaccacagagacggatgacaggatccattgcgatcccagacccgggagccaggactacacctggaacgcccgacaaagactcaggcgcatgggtggcaaggtccccggcccagccagacagacagacgaggacagacacggcttgcatagtggctgcatagatggtcatgcggagtaggccagaccgatgagggacaggagagacaggatggaga

SEQ ID NO: 556512 - DNA, 133 bp, Homo sapiens
cagatgctcttacatggtcatagctcttctcgcgtgcctacttttcaggttgaattaatctttataacttctaaaagtatgtttttatcttctaattaccctatcttctctattcttttcttcgccttcccgt

SEQ ID NO: 556513 - DNA, 940 bp, Homo sapiens
tgcgtcacagaccattgcagttaacttccgtccgtgactcacccttcccgatgcagtctccctgatgccaggctcccctcctgatcgccctgggcttgcttctcggcggccctgcgcaagcccacctgaaaaagccatcccagctcagtagcttgttccgtggagataacttgtgatgaaggggaaggaccctgtcgggtgatcatgaagcctgattctggagcctgacccatcgtcgttcctggaaatgtgatcctcagtgtcgtgggcaggaccagtgtccccctgagtgctcctctgaaggtggattctaggttacggagaaggaggtggctgggctctgggatcaacgatcccatgcagacgactacattgggagatgtcacctttgagcactgcttgtgatgtgcttgacatgttaattcctactggggagccctgcccagagcccctgcgtacctatgggctttccttgccactgtcccttcaagagaaggaacctactcactgcccaaaggagcgaattcgttgtgcctgacctggagctggccagttggtctcaccaccgggagctaccgcatagagagcgtcctgagcaggagtgggaagcgtctgggctgcatcaagatcgctgctctctagagggcatataacatggcctctgcacaggatgaatggagcgagtgacggaggaccctcactctggctgtgtcgcaggcagatatccactctatgcgcccttaatcccttgacagtagtccaacctacgaaatggggccatacgttaagggggcagaccctgcaaggaatggtgcagctagagcgggcgggggacagacacggaagccgaagcgatacacgacgggacaggagccaaagagccaccatggaaacaagaaagccccaagcaggaccaacaagagggcggccccgacagccg

SEQ ID NO: 556514 - DNA, 271 bp, Homo sapiens
  misc_feature (144)..(144): n is a, c, g, or t
tcaaaacagactctgacttcatcaccaagatggactaccccaagcagactcaggtctaggtccttcctgaagggcggtgagaccccactcttcaagcagttcttcaagaactggcgggacccagaccagacagatgggctgggnttttcctaccttttccagccatatcgtcaacgtggagcgggtgccctccgacggtcgcaccctagcacaccttcactgccatggccgcccagcacggccatgggatgatcggtggcacaggccagat

SEQ ID NO: 556515 - DNA, 389 bp, Homo sapiens
ctcacgcctcagcatcatattcagtcctgacatcttctgttcctgaggtactaaagaacatgcactcaagggtgttccttaccttaagcactcgaccactgaaacggggacttcagagacatgaagtgtgacataccaaccaacctcagctccttcaacctctttttcttcaacctctttacagatgcttcacctagtgttagtacagttctagaaactgaaatatacgagcataatcttgaggaacgttttccttaggatcccatgaagatgtccggaagctcttaaggcctctgtatttctgaaatcgaattcgagcagccacatcacggggcgtgtccacttcatctggaaacatctcttccagtctttcttgtctatatttctcc

SEQ ID NO: 556516 - DNA, 1421 bp, Homo sapiens
ggttgcccgaccgctttccggtgagactggagtcgaaggccgtgcagtcagccataatggccaggtgaacgaaattaatgaacgactatccagtagaacattcacgagctattcgtcagcgtttgagaattccattggccgctgtggcatgacgactgctgacagaccatgcatgtctgtaacctagcaacatgagtctgttgacagaagcttggactccacattgaacaagtcaaacacgctgcgcactccgcgcttctctgcatacaccattaacacttcaactgctccaagggctctcacttctggtcaacccaaagggcagctctcaattccttacacggcaaccatacccagctaccaccaccaggcacacttgggcccacagcacctacagaagtacttattactgcacacaagcagctccaaggcacacatacaccacgaccaaagacaaacacggcctggcaaagccctcgcgcaccaacgcacgggttgccacggcatctacaacaggcatactcggtacacgccacctcttgccgccttcctaggcagcaacacccaacacacctccggacacacaacatggccctttcacacaccgcttggcccccaatacacacgcgcaaaacaacggtcaacaacggtcaacaaccctatacacagggccactccacggacatggttaacacacgaaattaatttccccaaccaccagggtacaaacatcaatatccacacacacacagaaccagcagcagcacaccagtacacgcaccaccccgcaccccaccacacatccgccgcaccgcacccgccgcatcgacgccacataacaagcaagcaccggacgccccacccccacctccgccccacaccaccacaattacatacaaataccacaataaatgaacatattacaacaccgctatataatacaagacaaatcactcatactatagatgaccaaataattgacaaaacaacaaaatgaactatactacgatcataaacacgcagatataaatacaaatagaaaacaaccacaccacttcgaaccacgaatataacaacaacgtgacatcagcaaacaaataatacaataatagatgagaagaaagcacgcgagacgacaagaagacacagagaggggacgaacgatgccaggcagaacgacggccgaacaaacagaaaacgcacagccagcagccgacaggacggcaacgccacgcgcagatatggagcaagccagcgagaggggagaactcaaccaaaagagcaccaatcggagtcagattaggatcacacaatacagctcgagtcagagcatcacggaagggagaacgagaccgaaggagagcagacgaacgcacacgccaacactgacaggacggacggtgactgcagcacgcacgacc

SEQ ID NO: 556517 - DNA, 917 bp, Homo sapiens
ttacaccctgcgtgcggaatccctgacagcaccgccgtgatgcccaggaagacagcgcgaactggaaagtccaactacttccttaagatcatccaactatggatgattatccgatatgttatcattggtgggagcagacaatgtgggctccaagcagatgcagtagatccgcatgtcccttcgcgggaaggctgtggtgctgatgggcgaagaacaccatgatgcgcaaggccgatccgagggctagctggaaaacaatccagctctgtagaaacgtggctgcctctatatcctgggggaatgtgggctttgtgttccaccaaggaggaccttcgactgagatctagggacatgttgcttggccaataaggtggcctagctgctgcccgtgctggtgccgattgccccatgtgaagtcacctgtgccagcccagaacactggtctcgggcccagagaagacctccgtttttccaggctttaggtatcaccgagctaagaatctccaggggcaccattgaaatcctgagtgatgtgcagctgatcaagactggagacaaagtgggagccagggaagccacgctgttgaacatgctcaagatctcccccttctccttgggctggtcatccagcgggtgttcgacaaatgtgctgcatcttactaccctgaacgtgcttgatatcacaggaggaagactctgattctcgcttccgtggaggggtgtcacgcaactgttgccagtgtctgtcttgcagaattgggtacccaactgttggattggtaccccattccatcatcaagggtacaaacgaagtctgggcttgttggggggaaacgattaaccctttcccacttggtgaaaagccaggctcctgggggagacacaatgcttggggggtgcccttgggttgcccaaag

SEQ ID NO: 556518 - DNA, 272 bp, Homo sapiens
ggtgcagcagctcaggcccaggttctagtctgggcccagcgtactgtgttccaccggtgtgagaggtagagttggaccctcatttgttgaggcaaattccagttaggcttggaatttggggatgtgtaataagggctccttcggctcccggcaaccactggcatcattagtttgctctacgtgtctgtgagcgcagtcgcatcgaggttcattttagcatttgtcttctgatgtgcgctaagatattggacagaaaaatctagcagctaacc

SEQ ID NO: 556519 - DNA, 300 bp, Homo sapiens
ccccgtctccccagacacttatttaactggcctaatacgaaatttgtacctgtttactgacatttccccattttgccacctccccgagtctctgtcaactatcattctattttctgtttctatgagtttgacttttaaaattttcacaagcaagtgagattatgcagtatttgtctttctatgccctgcccagccactccagctccagctgtgacaaaaaggggccaatgtacagctaaggctgttgcttcagaagatgcaggtcccaagccttggcagcttccacatggtgttgttgta

SEQ ID NO: 556520 - DNA, 745 bp, Homo sapiens
gacatggaaaatgtttagaaaaataaagatcctcccctgccctgaggccactgaagtcaggtttgggtgtgttggtacagtgcgggaaggattgttcgggctgagaaatttattttctcgaaaaaaagccgtccctcgaaaaacttgaatttctttgaacaaccctggaaaacaatttgggaaaccaagcttgggggaaccccttttcccaagggggcgttctcaacaaggccccttcttacagtttgtttgtctaaaaagtgaaaggaccgcccaaaaaccaaaagcgcaccaaaaaccaaaattggcgccccttccccaagggggggttattgggattatccccttaaggggtaacccgaattttaacgttggtcccccgatttgatttgcctactatggggcggttttagtagcgggaggaccccccccatagttttgggggaggttataccaagcgccccaaaagtgcgcctggggaggacccaccaaaaaatgggacgtgccccgatatagcatcataggggcgggcacacgctcaatagagaagtctccgtaataaaaaacatgccggggagaatttttctctaggggggcggcccccaaaaatagcgatgcagatgggggcgtacctaataataataataccttgtggcgggaaaaccattttttcttcccccgatttttttggggggggcgaaaaacacgagttttttttctctttgtgggggcacaccacataatg

SEQ ID NO: 556521 - DNA, 104 bp, Homo sapiens
gtagtaaatggctgttacctaaatggctggtccctaaatggcaactcgtgatcgccatatccagcagccatttaggtagcagcatttaggtacagccatttagg

SEQ ID NO: 556522 - DNA, 217 bp, Homo sapiens
tgtgtcccattacaactttacttacaaacgcagactgtgtcagacctggtccatgcatggtagtttgccacaccctgttttagaaagctcaggtttatgatgtgatggagaatgcctacaagagctcttgttttaaatggtagagtgaatatacactggaattctatcctgcttgacccaagctcttgatagcgaaaggtagaaaagatagatagta

SEQ ID NO: 556523 - DNA, 961 bp, Homo sapiens
  misc_feature (344)..(344): n is a, c, g, or t
actattcgagaaggatggcaggagtcctgcactccatgttccaccatgactaagttaagtgataggtatcactcactgatacttgaagtgcgactctgggctcggggtaagtgcacagatcgctccacaaataccagtgctgatgtgtatgagccctacccgatactgttacttgggaacaagtccccatattggttctataggacactcgttacaggtaggatttcgcccagattgcagccgatgtttctgtggtggattgcgttcgaatcagtcgaggagatagctagtgaatgccccgcccatagctagccatggtacggtggtgttgttcgggctagttntcagcactaccgttccccctagtaaacagcaagactgcataacctgtagtaacagatatatgtttcaaatccactaagtccgtgtgagacgagtgcatgtcatagccgtagatagtaagctctgctgatccaagtccacacgtgcggcgagcacgttcgctggtgtggcgtgggaatcctctgatggtcaacgttaacagcgcttttgtgtcactcgtgcgtggttcaaaggctcacatgtcctcctgggctggcatcaacgtgccacaacatcatcctagcgagcacgtaaacaattctgtgatgccacgcttatggtctcgcctctaaaagcttggtggttgaaccccagtagtgattaccgggaattatgtgggctttttatttgaaccccagggcatgaggttggtcgaagtcatgcatggacggggtcacctgcaattccctcgttccaattctttcctcctcttcaaagaaaggcagagggtctacggaatagaatccccttggcgtgctgaacgcttaccaaaggagtcgttgtgttataactagtgcgttcacattgtttggtttgggcgaaccatccagcccttttgtaacatgctatgatcattacg

SEQ ID NO: 556524 - DNA, 128 bp, Homo sapiens
tagtaccccgctgccaatgcaatggcagggtgtatgttgtacgcatagtttgtacattttggcccaggacacacaaaggcgattggctgctgaaaggggagagcgtcaagttccacattgtgtgtcct

SEQ ID NO: 556525 - DNA, 452 bp, Homo sapiens
cagcggacccttgcttggtcaggcaataaggaagagaaagaaataatgatatcaaatcaggaagagaggaagtcagatgtctctgtttgcagatgacactgatcatatatttagaaaatccatcatctcagcccaaaatctccttaagctgataagcaacttcagcaaagtctcaggatacaaaatcaatgtgcgaaaatcacaagcattcctatacaccaataatagagaagcaaatcacgagtgaactgccattcacaattgctacaacaagaataaaatacctaggaatccaacttacaagggatctgaaagacctcttcaaggagaactagaaaccattgctcaggaaatgagaggacacaaataatatgaaaaaacattccatggtcatggataggaagaatcagtatggtgaaaacggtcataatgaccagagcttgtgtaccgag

SEQ ID NO: 556526 - DNA, 912 bp, Homo sapiens
cttcgtaaagcctgtgggcctaacgcggggggctagacaaggtcgggtggtctccttggcagccctggtggatgtttggcgccttgggttcagagagggtgctgctacaacatgagggggttttctggattccaaagggcgcaatttcctgagctggagttgtgcccccccggggtattttgctgcgcgctgtgaggagcccaaacacgtgtttgtggtgccgccgctttctgcgtgtggtcaaccccgccaagttttcggacagcggggttttatccaagtctgggcacccaacttcgggggaggcctccaaacagggcagccaaaacgacgccagagttttcttctcgcgaaaacatcaaacgctctccgttagcatggcaccgctgggccccctgggaacccagcgacccccggaaaaggggcgccccaacggggggcaacttcatccctgatatcgggcgatgtccccccgatcgccaaaaaaaggggaaccttcgtcgtgtcacaccagacctcgccccagcaccctccttgtttgggacgctgataggataggcatggaacacatgtgtgttggtactccccgccgcgtgatcaacacagggggcacacgcaagtcgagtccggcccccacgagcagcacaatgagctgggccatccagtgcgaccacgcacccgggaccctttgggggaagcacccacacggggggcgaacgccactggtggggaacaacccccaagacgcccggaggaccccacagatgaggccacaaagagggagaaacacccctgttgaggcgttctctgaaaagaccgagggaagttacaggacggaaaaatggtgcatgtctcggaacaaaaccccccatcattggcaacccaagcaccgaaaatttgcccaaaaaaaca

SEQ ID NO: 556527 - DNA, 188 bp, Homo sapiens
agttcctggtgtcgcttatctcctgatgggatgaagaggagcttcatgacaaaagtcagtgtttcagactggtcacgggaggtgaaagaacgaggctgatggtttcaggactattgtttaactgcaagacagaggacccccgccagagggcaaaatacaaagcaagtgcctggtgaggggaacgaagc

SEQ ID NO: 556528 - DNA, 375 bp, Homo sapiens
actctagacggatccccttgcactgttcggatggggacagtgctctcatggccacagcagtcactcgggactgcgctgccacccagtgctggcttctgctctgtggtccacgttccatttcttgccgtggtcccagcagcgtcgctgtgggtctggcctgggttgcgtgtgtttcgtatgtgggccgtgctccctgcttggttcccttttcctggaacgtgtcactgcctccctgtctcgctccgtggacatttctgggaggtcaggccgtggccacctggccccctgttcaggtctgaggctctcacctgcttaggttcgggaagctcaggagagaggccatgccctcctcaggacatcccatccgaagcagtg

SEQ ID NO: 556529 - DNA, 927 bp, Homo sapiens
tcccagaaacactgctccttattatgtgtcgcccatccgcaatgtgccatccccggaatctcaacctgggaagaagaaataaacactttccacaaagaaacttgcttcccgcgatgtagcccgaacccctgtctcttattggcaagaaaacatctaacaaaacacttttaatgcggcccttataagcttctaaggccgaaccacactgggcccaccacttgtaattaaacccctctggaccctccgtatacgtgtaattatcaccaccccctcctatgccaagataaagaatttctgaggcgttaatatattatcgatcgccacggtaatagtggggttataacaataagccaagaccagttcttaaatttttgttccctcaatttcccacaggaacaatttctcttggcgtccaaaacataaccatccacctacccgtccccgccacgcaattgtttaattgcccccgcacggaatttctcccccgcaattttcaataagagtgtgtaaccaaaaccaatattcctccagacagcagcgcccaccttcaagatattttgctcccaccgcaagtcggttgtggttcaaaagaactccccatccttgattaccccctgcgctccgaagaactttttttccacgccccctccttgcgcgccctccgtgaatcctcgccaaaaagagtaacattctttctcctcccccaatattatttcttgatattcatacatagcaatattattcccccaaaagtttttttagcacaattagctctatcacatgccatctctcataaatgtgtgtagggatgttatgtgtgttttataaaaccacctgagaacccaaattttctgtaatttttaacacatataaagtgtcgtttttaaaacctggaaaaaaccatttgaaacctcggcccacataaca

SEQ ID NO: 556530 - DNA, 354 bp, Homo sapiens
cggccagccccccggcaaggccaaaattcccgcgcctgttagcagcgtttgctcccaaaccaacggcgccttgggccccacgcccaggaccgccccgcccgccccggagcccgcggcgctcagggcccaccccgtggtccagctggaatgcaagccctgggggcccggccacgaacctgtgggaccctaaccaggcgcccccccctttaagggtcctttggccccacggacagcaggacccggaccccctgtgggacctggcctcaaactccccaaatcgctcatggtttttaaaactctaatggggagggtgtcggggaccccggggcaaaacaaaaaagtcctatttttcca

SEQ ID NO: 556531 - DNA, 898 bp, Homo sapiens
  misc_feature (406)..(406): n is a, c, g, or t
aattcatataatatgaacatgatctcctactagaagtaacgtcagcaaggttttcatggcacatgatgatgtaaatgtctctcaatgttttagaatagatgaagttctaatagagagatctctcgtgaaagtattcgctgaaaaaatgtctagtaggtaatatgggttagatcagtgttttagaaataaagtggtagatattgtaaacaagagctatttgtaaatttgacagcaagggtttatactagaagcagatattgatatgaccatgagctgtagggcgtaacgttgactgtggtatttaatttagcgatacactatacccatctgtgtttgtgttgagtaaggagatgtgtgaccgacatgtattttcaatgttgtcgattaaaactttgtaggttttatnctttgttaaaaaaatagaagaagtatatcgtggtttttaatcagcacgacgcttgtgtaactaggattgtgtccattctgtaggaaaggggtgtatatcgtggttttagtgggtggaattaaatatagtagttgaatatgccgcctgtatttttaaggcccaaagatgtaaggttgagattcaagagaaagaaatatatatctttagtatgttgtgcgattgtgccttattttacatttttggaacgtgtcggaatacataggtgactagtgggagagattatttaggacatgaagttgtattgagaggggaacttttgtgcacaatccacatagatagacaagaagtagtagattaagagcggttgctagttgaattgaaccatgaatgtttggttgaacatatgttgaggtttaggctaactttaattttagttgccaggtataaattggagttaatttcggaacctgtttgaataaaagaaatggttgc

SEQ ID NO: 556532 - DNA, 203 bp, Homo sapiens
gtaatgcattcttccatgatcgacagaggttgatcttaagccttgaatttctcgagtgtgtgtcactgggcgtccaccatcgagtgtgtatggtcttaccagtcaggtcttcacgaagatctgcatcccacctctgagacggagcaccaggtgcggtgtagactctttctggatgttgtagtcagacaggtgcagcgtataat

SEQ ID NO: 556533 - DNA, 124 bp, Homo sapiens
ggatctcatatgttctcgatccgttagaacgtctgagattataaagactgataatggtagatggtggggaagatgtggtgcaactggaatgcttatccatagctggaggtaaacaagctgactt

SEQ ID NO: 556534 - DNA, 401 bp, Homo sapiens
  misc_feature (388)..(388): n is a, c, g, or t
cctcgattgctgtgccgttggtcctgttgcggctcacttagccaagatgcctgaggaaacgcagtacccaagacctaacgcgtctggaggagcgaggaggttgagacgttcgccttacagggcggaaattgcccagcttgatgtcattgactcatcaattactgtctatctccaacatagagatctttcctgagagtagctctatttcaacattcatcagtatgcattggacaaacatccggctatgaaaggcttgacatgatcccattttaattacgactctgggaaaagagctgtcatattcactcctgtatacccgaactaaacaattatcgacactcgtctactattgctcggatactgcgatattggaattgacctatacgcntgatccttgatca

SEQ ID NO: 556535 - DNA, 900 bp, Homo sapiens
tctgtgaagtcaagaatcacttgccggccgggtgtggtggctcacgcctgtaattctagcacttgggagactgaagcgggtggatcacccgaggtcaggagttgaagaccagcctggccaacatggtgaaaccctgtctctactaaaagtacaaaaattagctggatgtggtggtgggcgcctgtaattccagctactcaggagtctgaggcaggagaatcgcttgaacccaggaggcggaggttacagtgagccaagattgcaccactgctctccagcctggggaacagagcaagactgtctcaaaaaaaaaaaaaagggaaaaataaaaaagaatcacttgccgatttaatttggtcctcccaaaaccaagagttatacctggatgtacccagtgggaggaacttgagctgctggggtaaataacccagaagaaaggtgatgagagtaggcctgtgagataatttaggaagatctgatggcacacgtgttggcaagaaaatccgggtgtccctagagaatggttcccacaagaacactgatttgggttcaattcgggatcaaggcagcagatgattatcaaagccttacatggggctcggtagcatcaaagcctggagcacggcaggcagatttttggacctagaagattcggggccaaagaatccagtaagcattgtaggaacaactggttggcgcctgctattccagttcaggtagaacccactcgaaacgtggatttccgggaggggttgtacacactacccctgagatgcccaatgtcacgcgcgacggtaaacatcggcaccgttgggtgatcagggcgcgcaaaggttaaggccctcaggttggaacaacaggcgcagcggaggagaaagcgtccggggaataaggggtatg

SEQ ID NO: 556536 - DNA, 405 bp, Homo sapiens
tgatcgagtacgaattttcttaaggaatctatactaacagatcagctaccacttatcattgtgttgtgatcgatttgactttgttccatgatttggtgctctctttatctgaaataatcttcaaaagtatatcgagatatatgtacagaaggtgaatccaagtcgacttcctgtagttcttggaggattacttgatgtttactgttctgaagatgtcataaaaaacttgattcttgttgtaagaggtcaattctctactgatcatcttgttgctgaggttgaaaaaagaaacagattgaaactgcttctgccttggctagaggccagaattcatgagggctgtgaggagcctgctactcacaatgccttagccaaaatctacatagacagtaataacaacccgga

SEQ ID NO: 556537 - DNA, 263 bp, Homo sapiens
  misc_feature (22)..(23): n is a, c, g, or t
  misc_feature (46)..(46): n is a, c, g, or t
  misc_feature (54)..(54): n is a, c, g, or t
  misc_feature (56)..(56): n is a, c, g, or t
  misc_feature (59)..(59): n is a, c, g, or t
  misc_feature (64)..(64): n is a, c, g, or t
  misc_feature (77)..(77): n is a, c, g, or t
  misc_feature (80)..(80): n is a, c, g, or t
  misc_feature (113)..(113): n is a, c, g, or t
  misc_feature (143)..(143): n is a, c, g, or t
  misc_feature (145)..(145): n is a, c, g, or t
  misc_feature (149)..(149): n is a, c, g, or t
  misc_feature (155)..(155): n is a, c, g, or t
  misc_feature (157)..(157): n is a, c, g, or t
  misc_feature (178)..(178): n is a, c, g, or t
  misc_feature (180)..(180): n is a, c, g, or t
  misc_feature (205)..(205): n is a, c, g, or t
  misc_feature (241)..(241): n is a, c, g, or t
  misc_feature (245)..(245): n is a, c, g, or t
  misc_feature (258)..(258): n is a, c, g, or t
  misc_feature (260)..(260): n is a, c, g, or t
ttagagaatagactttgtttcnnaaaggctataaatcacatagtanatttagcntngancgtgnatatgataggcgnatnattaaaatgatttaaaataaactcatcccttcnattatttctttccaagtaccattgcacccncnttcntctagncnaagagaggaagttatctaccncngttacattctgatatttctcctccntctagaacacttctccgggagaggagagtatggccnaacngttggtggtgtancntaa

SEQ ID NO: 556538 - DNA, 915 bp, Homo sapiens
  misc_feature (915)..(915): n is a, c, g, or t
tcgggttaaaaaataccttaaaatttaggtaaataaagtctcagggagggggggcggccatcggggtgggtcagccctttgggccccccgggcctgtcagtgttcgccccgagggcctttgaaaagcagctcattcaaggcggcccaccagggccctagggtcgtcaacaagtccagcagcaatcagggggtcctcgtatatctgatccaccagcagttgagccaggccaggctcgctggcgcgcagtgatacagcttctggatgagcgcgtgccgggggtggatctccaggcgtgggctgcaggagcggtgcgcgctcctccggggtctgggccagctgctgcatgcgcaggaagtggggggcgagcccccatctccgagcggggtgcaccagggcggggttgggtgtccagtcgggagggtcaccttcacgtgggtgcacacgcgaccccgagcaaaatttctcatccgaggccatgagctcctccgctctccttctctgataggcactcgggggtggggggacctgtcctcaaatttctcctccttgttggtgatccacgattatgtccgtctccaagagatcagttcttcgggtcaaactcacgagggtgcggcagggtgaggctaagatggccgaagggaagagaggcagggaaagagggtgctccgggccccgttgtcgtgaaagcacgggggggtaacaaggggtggatcccccgtctgaaagggctaaattgggtgtgggcggatcccggcaagaacccaccgtgtgggagtggcccgaataaggtgggggagaacccccaaaggggggaggcgctggaaccatcccgctggcgcaattcactggattggccctgcaagaaaaaaaatggcgcgaagggggcgcaacatcctgaactgaaaagggtn

SEQ ID NO: 556539 - DNA, 356 bp, Homo sapiens
tgtgtgatgatctagccctccggttagtggttgagggtaggcttatccggcacgctatcgtttccaccgtggatactgcgcttgagaaggccacgacctcctccttggtggaggtccttaggatctcagcttggagtcgagtgggtggcgaccttttaaaggaatgggacccacccggagttcttctttctcctgtctctctctctctctctctctctctctctctctctctctctctctctctctctctctctctctctctccctctctctgtctctctctctctttctctctctctctctctctctctctctctctcccctctctctctctctctctctctccccccccccaca

SEQ ID NO: 556540 - DNA, 102 bp, Homo sapiens
tgtagatcatcgcctctggagtatggcagaggtacgggaagtgtcctgatcccgtgctacactacttcactcctccatccatccttccctcccttttcctct

SEQ ID NO: 556541 - DNA, 805 bp, Homo sapiens
ggacatgcaaaatgagaagaaatacagaaggaagtgaccgtggcattggtaactggaggctttgaaggtgtccaggactgtgtgtgaagcccagcactgccactagctagctgtgcagtattggacaagtcatttagccttgctgagatccttttagtacttgaagggcctccacaaagtggagactccacaaatggctactatgttcattaagtgcctgctaaatcttcttggcttaattctgtagcattcaccagccctgctgcccaccccttccagagctggggaatggatattgatctgaaagaggcctgaaaaaaaaaaaaaaaaaaaaaaaaaaaaaaaaaaaaaaaaaaaaaaaaaaaaaaaaaaaaaaaaaaaaaaaaggggggggggggaaagcaatactctcacgagggagggccacaacgtgataacacagcccgccagacgatcgttgcagaaacagggggcggctacctacaagagtggaggattgataatatacacaaacgacggcggagcgcgcgggacgcgccataaaaaaccaccgggccgacaacgaggagcaaacaacacggcctatcggacgagagctctcttgacgaaagaaaccacacaaaatcggtgggggcaggcaaccacaggaggaccacacacaccatcccacgagacacatcacaagcccccagagcacaatataaccaacacaggaggttatcgctgtcccccaccacgagcataaggatagcgcgtcagaaacgtgctcgcgagatcgaattaccaaaaacctattgcacgggcc

SEQ ID NO: 556542 - DNA, 261 bp, Homo sapiens
  misc_feature (73)..(73): n is a, c, g, or t
ttgttctagaggatccgaacgaaaagcagtaagtcacactctttctcggcaggtcgattggggcccttatatngtgctgtgtagaggccaagaagggctggagttgggacttcagcctaagtgcccatggtgattgcacaaagttcttaggaagcagaatgtcatgcctgtaatcgcagcactttgggaggatgaggcgtgtggatcatgaggtcaggagttcgagaccagcctgaccaacatggtgaaaccccatctcta

SEQ ID NO: 556543 - DNA, 106 bp, Homo sapiens
ctcagcaccggtccgttccagactttccggccaactgatcggttgccgcaatttacgttgcagttcgtcgagccgcttgacggcccgacggtaggcgccgggcacc

SEQ ID NO: 556544 - DNA, 1122 bp, Homo sapiens
tttccctcccggggagtgggggccctgagaccgccccggaggacctggaatcctagacctgaatgcggcggtctttgagaagatgatcatctcagagctggatgcacaacaaactgcgggaggagacatgaagtcagcggactaagggcaccatcctacacgtcgcatgatgcctcccactgtgccatccgtgttgccatgtgtgtgtgctggggtgactgagagacagcaggcgtggtctgggcctcaggtgtagtgctttgaccatgggtccgagatttgacactttcgtctagtagatgggcgcacttgagaaggagctcgtcatgtcgtgcatgttcacctggggccccaagtactggatgcatgtacacagaagcagagtcttggactgagcgtcgcgagaagcatgacactggacgatagggagacagtggggccatctcaagagcaggagggccctatcgtacgcataccacgtatacacattgtgaaccggtgcggaagctcacacttcttaattgccccagggcccgtggtgtgcaaaaccacattagcatggggtgacactacgatcgctaataccacttacacccgaggataaattgacagaggcgcttgacgcggggtttcgcccccaggtttgtaaggggccccctgtgttttcaacaaccagtagcacctggctggcgagtacgcccccctcacaagccgcccggatagatccaaaccacgaggatacgggcaataaaactccaacgaatttaggttagacaccttattaaaaacgtaagcggagcggaacccatggctaagttgcaacattggaggcttcaccaaagagcaaggagagcttcacacggcatagatccgttcatagtcaacactttcatcaacaaaccaacggatcgaccaccattttggaaccccattggacgacggctgataaccgagaagagagtcgggcaatgtgacagcaaggcgcaccgacaccgcagcgaacgaaccccctataattcaatgccactattacacttaatcatgcacgttcggcaacacaagttacgctcaacgcaaagcccccaccaagagcggccacagagacaatgccccaaacacctg

SEQ ID NO: 556545 - DNA, 478 bp, Homo sapiens
  misc_feature (34)..(34): n is a, c, g, or t
ttccctccccccccccgaggggttttcccccaanaatatagggggggcgggggttatgggtttttttttctttttccaaaaagagggcccccccccccccgttttttttaaaaaaaaccccccaaaaagaaaggggggcgcggggggtttttttcccggggccccccccccccttttttaaggggtttttcccccccaaaggggggaccccttgggggggggggggccccccttggggttttttccccccccggggggggggggcggggggggataatttttctccccgttttatttttttttcccggttttttttcccccccgtttttgggaaacccccccccccctttttttttgggttttggggaaaatttttttttttgggggaaattttttggggggggggggggggggggggggtttttttttttttttttttcttttgggcccggcccccttttttggcccccccttttta

SEQ ID NO: 556546 - DNA, 448 bp, Homo sapiens
gacccccagcacgcatagatattaccggcatactaaatcggaaaagaagaagtcaatttttctctgttttcagagaacatgctcttatatgtacagcaacctaaaaactccatcaaaaaattctgagatgaggccgggtgtggtggctcacgcctgtaatcccagcactttgggaggccgaggtgggcggatcacctgaggtcaggagttcaagaccaacatggacaacatggggaatccttgtctctactaaataatacacaaattagtcgggcatggtggtgggcatctgtaatcccagctactttgtgaggctgaggcagggagaattgctttaaccccagaggtggaggttaaagtgagccaagattgtgccacagcactccagcctaggagacagagtgagcctctgtctcaaaaaataatatttaaaaaaaaaatttttagg

SEQ ID NO: 556547 - DNA, 244 bp, Homo sapiens
  misc_feature (54)..(54): n is a, c, g, or t
aggctctgctcctagtggcaggtcccccctctcaggagggggtatgggtaggcncatccaagaaagggcagaagacaagggcagtcggggtctagaaaggcgggcgctggcccttctgagcgcttcggagcccccactgtatcccactcagctttgtgctcagatcccaggtcccaaggagtgacaggggcttcctcccaccttctgtccttgtccaggtcatgtcccactggtgcggccggga

SEQ ID NO: 556548 - DNA, 432 bp, Homo sapiens
tgtacagcatacaaaaagtgtcgacatgggtgtcagccctgatgatacaaaatgtaaagacacgacacatatagtctattaaaacatcacatatatacgtatagatcaatgaaacacaaaatgtaacttggtgccacaaacacacattagagctccctaatgaccaaagacaaggcagaagtgattgagtctaagatgaatatggacgtggtggaaggcagagaccccaataatgatgcatactacccccagaacataagaagcttgggatctatctatatacccctctacagtcagaagtagatagactctgtacattgagataaggaacaacataacagatgctatatcacgtattcctgacataagataaaaaagaagactataggaacttccaaaacgcccttccaagggtagagacatgtatttagc

SEQ ID NO: 556549 - DNA, 613 bp, Homo sapiens
  misc_feature (560)..(560): n is a, c, g, or t
tgtgatggttcgcggctgtagttccagcactttgggagcctgaggtgggaggatcgcttgagcccaggagttcaagaccagcctgggcaacatggcgaaaccttgtctctactaaaaataaaaataaaaaaaaaatcagtcgggcgtggcggctcacacctgtaatctcagcactttgggagggtgaggccagtggatcacctgaggtcaggagttcaagaccagcctggccaacatgactaaaccctgtctctactaaaaatacaaaaattagccaggcatggtggctcatgcctgtaatcccagctactaggggggctgaggcaggaagatcgcttgaacctgggaggcggaggttgtagtgagctgagatcgcaccactgcactccagcctgggcaacagagcgagactccctctcaaaaaaaaaatcagccaggtgtggtggcacacaccagtagtcccagctacacaagaggcttaagagggaggatcatctgagccagggagatggagattttgtcagaggcgttagaatcagaacaacttcatcttgactgangggtaggcctttaaatgtttatggttaaaggaacgatgatcatgtttactgag

SEQ ID NO: 556550 - DNA, 258 bp, Homo sapiens
tgcgtcagcatcccgagtagctgagactacaggcacccgtaccacgcctgggtaaatattttgtattatgagctagagatagggatttcaccatgttggccagagatggtctcgatctccttaccttgtggcgctgcatctcgtttacccaaagtgctgggattacaggtgtgaacccttgcatctggcctggagccacgtaaactttttattgtctccatggttatggccttttccggaaagtcccgttgaagccgt

SEQ ID NO: 556551 - DNA, 1190 bp, Homo sapiens
gcattccacccacggagcccgacatcagcccgcggccaaccgtgctgccccagcccctgtctggcctgcgccctgaggcccagctgccagcgaggcccgttccccgggaggacattggactccatggcccctgggaaagctgccgaggcgatacactataagacgcgcggacgttgggctcccgatcttcacgcgggaaccatgaaggctgcgacagacactcatcttgtgccctcggggcccactgcagcagggggagaatacccacgtgaagccgggaaccccaccggaaggccaatttacaccacgcacaggtacttgggacacgcggagatcccagaaggtcaccgggccaaaggggaatgtgaacaccaatgcccaccgtgtaggtgcccgggtcaccaacaaagacccggggagcaagaatctccgaaaccctggctgtacgaagcccaccatggaaacactgcgcgtacggcaacaacacctgtgtacagtacacaggccccgcggcgatcgaccggcaagtggaccaaacaaccggagtgcaggtgccacgcgggcaagcgcgtcagaaaagcgcaacacttcagcacgacaggaacccagccgcgcaacactagtacacagaggagaccgtcctgtgacacagcgacctcgacaaccacaccaccaacaggagaaaagagtacaacacaacagatcaagaacgaacccgcagtggaagagacaaaagcgaacacattgcagtcacctgtgggcacacaaactcgcgggtcagcaccccacagtgaacaacacgaaataaggcaccccggccagtcccactatcgaaccactgtcgcaagcgccacccacctgagcccagagcggaccaccaacaccatacctgtacgaagactgcgcaacccagatcccccgcaccacacccggcggaagcagcacaagctgacaacgcgctcgacagcgccacactccccacactgtcaccaagaatgcactccccacaaatcgtagcgaaaccaaccctccgtctaactgtagcagagctcaccacagactcaagcaccggcgacaacaactccgaacgggcgccagctccacatcagcactacgagccacaccacacggctgtgaagaacagacaccacacttcgttcatcaggcacaacacgccgccaacacgtccg

SEQ ID NO: 556552 - DNA, 299 bp, Homo sapiens
gctcgacaaaaatttcaatagcttttgggtacactgtggtttttggttacatggatgaattctatagtggtgaattctgagattttaatgcacccataacctgagtagtgtgtcgtagccaatatgtaggtttttattagttccagagtatatgtgtaggatgtgcattttgttacataggcaaacgtgtaccatggtggtttgctgtacctgtcaacccatcacctaggtattaagcccagcacgcattagctcttttccctaatgttctccccctggcccagcctcccccgtcgacg

SEQ ID NO: 556553 - DNA, 1191 bp, Homo sapiens
  misc_feature (1180)..(1180): n is a, c, g, or t
tgagaggcctaaggtatgggcctggggacgacaacctttttgaacgcccgaaacacagggtgagcaatgatctaacggatggcggtcaacccacggcccgaatacaacggggaacgcgtggaaatctcaagagaaggggacgaactctgcacgggggacaaaaccacgagatatctcacgtcccaaccgagccgacaaagaggccgccaacccaggttcccccggggcagggatttacggagagcccctaccaccgtggagtaacaccaggcgtggtaccctctccataaccagggcaggcttacgggaccaagagtctgcggcaggtggcttcaagcgtcgctgggccatgctccggcagcccgtcacccggatgcacctcaatgttccgtcatgggctgtcagatggaaaagggacgtacttaaccctggctcgcactgaatcacttggtgatgcaaaacgcgtccctgcaccacgcaacctgtttggctcccacatcgcgcaaaagtcattccacgaggcgattctgggatcatggaaggatcagatgaccacagtcaattccaacacggccacccagaagacagtcggacgggaccatcaacggaaggcccggcagagatggacggggtgcccaccagaacagtgcatcccagcctccactggggcatgcagaaagctcgtgaccaaagtcatcccagagctcaaagggaagctagactagggatcggcagttcctgggtacctaaccctctggatgtgtctgtcgtggaccatgacctagccgcatcgcccgagcctgccctccttagcttcacgccatacaaggaggctgtaaaagcagcagccaaggggacccatggactggcatccttgcgctacacacgaggactgaggtacgtctcgtactggacttgccgtacggtgatacacgacatacgtccatcattgcgatgtctaaggccggcatgtgcgctcaatgacaatcttagtgaagactcatgtgtcatggtacgacaagcgaatatcggtctatcagtcagcagggatggtcgacctcgctgccgctacatgtatcagccgaaacaagtgaaacgggaaggtcctttctttccttcctaggggaccggggcaggaaaagtgcctcccgttccagcatctggctgctacgggcggagngacacccaggg

SEQ ID NO: 556554 - DNA, 166 bp, Homo sapiens
cgcccttctacgctgtaactcccctcctgtctctgccccaaggtctactccctcctcaccccatcgctggaggcgcaggggatgtggagagcgctcctgatgtcttagtttccacagtaaggtttgcctgtgtacagacgtccgtccaataaattattggcatgaa

SEQ ID NO: 556555 - DNA, 450 bp, Homo sapiens
  misc_feature (171)..(171): n is a, c, g, or t
  misc_feature (179)..(179): n is a, c, g, or t
cttggatctatcaaatggtgcagtgactcggataccttccctagtggccataaagctccagacgaatctcagtgcaggacgccatcctcgcaatattcaagagtcacccttctaaggaggacccctagactgctcgctagtggaacacgacagaggcgaaatcctgccccngtctcccngtggacctggctggatatggtttttgccaatccacagagccatcctgccctgacagctagcaagaggccaagacccacacgaacaaccactacagcccctctgtcagcaggaagcagttaaagaagactgaccttcgtccattttcccaagataattggggtcttggactcttgagggggggaaatgttggagcaggtagctagtcagacatgagcagggcaggggagggcccccttcaccaggaatgtcagggcaccatcaggtgatggt

SEQ ID NO: 556556 - DNA, 342 bp, Homo sapiens
ttcctagatatgataaatataacatttatgaaaagcccccccccaaccttatacttcatggtgatagactgaaggctgaatgttttccccttaagattgggaagaagggcaaggatgttccctcgggccctacttttattcagcattggacttgaagttctagccccagcagttaggttaggaattcaaggtttgttcaacatttaaaaatcaaataagctaataaaaaaaagaggttttttctgcaaaaaaagtgaaactatatgtattccccgttgatacatagttggatatagaaaatgctaaagaatccctaaaaagtaataaatgggttccccagga

SEQ ID NO: 556557 - DNA, 324 bp, Homo sapiens
aagaatctttcctttttttggtggtttccaacccccaacttaaattttcaagtgggggtcaagatcaagttcaaaacgttaacacccttggccccaaaaaacccatcaggttttccttggcacacccgggctccaaattcacttccaaattcctttggcttcccattgcggtgtttcccttatttaatacttggcctcctcttttcctgaagggtgggggctgaaaagggccaatggttcaaacctgggcagaccttattataattgtccccaccagccttatacatttaaaaaacctgaggtccaaaaattttgcccaaggat

SEQ ID NO: 556558 - DNA, 116 bp, Homo sapiens
gtcatctaaggatccccatgggtgctcatccccccctacccatctcaggtgagttcaaatgttcctggatttgttttttgtttgcttgtttgttttttggggcagagtttcgcttt

SEQ ID NO: 556559 - DNA, 1246 bp, Homo sapiens
agcgggtaaaaaaaaaaaaaaaaaaaaaaaaaaaccctgatttattactatgtcttttttatcaaaccctgccctaaaattaaaagtggggcatgggcttttacaatttctaattgtgttaaaaacacgcctattttattattttgtcggacaaccaataaggtattattcatgggttcccactgggcccttaaataaatggggatccttctattaaacacacttcctatgatatcacccactggtttctaactggtgtacactgggctccctattaaaacgctggattgggcgtttttcattaaactctggcgagggaacattaaaattcctggaaagaaaagggagaaaaagaactctggacttgggtcacattggggatacaggggtgaacacgtctttggaaaaaatcaaaatcactgggacccaaaaaattgtgttgcaaaacaagaagaattccccgtgtatgtaaacaccgtgttttaccctataagggtggtgtgttctctataacaattcgcgtgtgggcgaagaacttctccaccagaagccgtgtgtgtctaatcacccacgggcgtgtgtgccaccagaatccccagcagaaatttttctctcgacaacaagaagggttataattttcttctcccagggctgagaaaactttctctctcaaattaccaccccaagctctctccccaggaggcgtggagcaaattctcacgacagacacaaacacaatttctccgtgaaagcagggtgggactcaccattcacagtgggaagctctcttcacacagacgctttttaagccctcttttttcccccactcttctgattgagaccactcccaggggcggagcaagggtgcgtcctaaccctgtgttcgttaaacacctcttctgtgtggcgcgccagggattctacttccagggcgagaagcacctgttgtaacacgacagtcttctctccaactaacccctacaagtttcttcacaccacaacactctttctgtggtcttcaacacacacgaacacccgtggggggtggcgacgttgttccaccaccttcccaacataatctgccggggggcgaaaaaagaaacaccccctcttttcctcttattgttggggggggggacccccccattgataggggcggaaccccccaaatttctttctctccaaaaaaaaagttgcgccgcgccatcattattcctctatccggcttcaagcaaagaacacactc

SEQ ID NO: 556560 - DNA, 1112 bp, Homo sapiens
tcgcgtgctatggttcttctcgtggtgctttctttctcgttgtttttctttgttgcgccgtgtgtgtgcttcttccgatgtacctctctctgcggtgttctggcttatctctgcttcccgggatgctcgcgttttatttctgggattcccggtttccccctgattgcgttggccttgtgtctgctgtttcccgctgggatgtcttccctgccttgttgtgctatgttgcgtgttgttgatcttgcatggcgaggtatgtcgttctttggtgttggttcttttggcccgcttttcttttcttgtggggttgatccggtcctttgctttctgttttcttggcttgtttcttctgcttttgtcccttctacgtctagttacttgtattctatagtcttgctccccaagtatgttatgtatggaagcctttattactgtaatagagacctaatataacttctgataatcagttaaggcaattctaccctttctgtgcctaagagatgtgatgcagatgctcctgatagatcagtgtactgttacccggactattcctattccgttcacaagttctggttcttcagtgctgcttactattttggtaactgggcctttcttggggtatttttgattggattaattgtatcctgttgtatatgggaaagtatatcggttattgaaggcagtagatgaagattcagacataagtgatgatgagccctgctgtctattctgcttgacagccttctgtcttaataggttttataatgctgactgaatatctgttatgcagttgtttaaagtattaaactgagcattagtagtttgctatactagcatttcatcgtgtataatgggagcatggatataagactactatatgtgtagttatatgttttctgaagtaacattgtatcatagattaacattttagattaccataatcatgctatgtaaatataagactacctggactttgtgatgggaatgttatgtgctaaattttttcctctaatgtataatagtgttttattgatttccatcttccagaagttatattcccttgtacgcgttggaacatatatcagaccggggcggggcgggggggggggggg

SEQ ID NO: 556561 - DNA, 112 bp, Homo sapiens
acttgtgtgcggaactcctcggaaccatggcgtccctttcccttgcacctgttaaacatctttaaaggcaaggaagctgatgaaagggagaagcagaagacaactcgtctta

SEQ ID NO: 556562 - DNA, 230 bp, Homo sapiens
tttactagagacggagtttcgctttgttgcctaggctgatcttaaactcctggactcaagcaattcacctgtggctcccagagcgttgcaattataggtgtggactgtctgccaggcgcggtggctcacacctgtaatcctagcactttgggaggccgaggcaggtggatcacaaggtcaggagatcgagaccatcctggctaacacagtgaaatcccatctctagtaag

SEQ ID NO: 556563 - DNA, 2795 bp, Homo sapiens
ttttttcgcacttaccctgatcagccgactctctctttatctcatctttgtacagcttctctcctgtccttaatttatccacatatttgtccgcacttcggtgtgccaactgtcacaccgttatttcccgctttctggccacgagtctatgttcctctcccttctcaccgcggttcatgtgtgattcccctaaatcgcttcctctggcttcatcgcgtcgcactcgccgtcgcgtctcgtcacccgcgtccacgccctgattgcccatctccgacgtgtcgtctcgtcgtttctttctcactcgcggtctctctgtaccgtaccccccgggtctcactcctgtccctgctccgtcggttgtgcgtcggcttcgctctgttcgtttcctctctccgtctcttctcctctctcggttctgtcttgagtctgtatcttgttgttgtgcctcgtgtgagttccatgggttgcggtgcatggtgtctgaagtggttctcctgctccctgtggttattcgctcgcagcactgtgttgcgcatcggatgtcctgtctttgctgcgtttcgccgtcgttgtttcccgggcacttggtctgccacccagtgtgtcgtgtccaacactgtgaacccaggttagttaggtaccatctagtcgtatacatacggtctgtagtacagaaccagtttattgatgtttgagtctttgcttgttcaatggctttgcaggctgcatgaattgtccgctctttggtttgtctgccgcccaggaagtctaatgcctacatttaaaggatggcctggcccccagtatacgccgattcctgctcgcggccttctacgcccattactgggagcagcagccatcagtgtagacgacgacgaaagtctcccatgtaggaaaacgtgtctctgctaactggaggcgccggctccacgctcggcttcatggtgctttgcaatacggctctgcgctttcatgtccatctccatccagtggctcacggagtcgcttgctggctttcgcctccgattcttgtccatgttgattttcatgcccttctgaaacttccgggcttgcagatttcctgacaaaggcccaggcctcatcctctgtggcaaacttcttaaatctggcagcaggaaaccggtccacctgtgctctgcactcattccaggtcagaaagaccccggtcttgcggcccctcctcacggcatagaacatcccgaacccgcgagagccgcggcggcagggcaaggcggccaaggcgactctgtgggccaggaacagaagccagctcatcgctcactcccggcaccgggaagcatttcgactcccggcccagcgtgggcgcgagccgccggcgctcaacaccgcacttccgtcaccggcgcgggaagatgacgcacgtctgggcggagtcctgatgagggccggggcctagggaggggcggtgtcgtagggcggagcccggagctcggcccctgacgagcccgaactcgtcaacttcctgtcggtacttgaagaagcggagccagggctgagatcccgaaggcgggcgaggtctgggatggggcggggcctatgggagcggggctgaagccctgggcccggcagaggaaggtcgagatggaccatgttgggccccttctctccccgcccccaggccgcagttcgggggccacgccccggcgtgctcgggtcaccgcgggaagcccttgaaccccctggcgcccggcacccacgtgcggtaaccgcggctcctcgagagctccagggatgcggatctacagtaagggctgtggccagatgaatgaatgcacattttttagtgggcagaaagatgttagaattcatgaattagaataagcacaaaggagggcgagaggggaggccgtggaagccgcattcctccccttgccttgggcgcccacccccgaaggggcgcgtcccctccctgctccactgcacgtgggtgtttaaccaggggatatccagtgcctcaagcaccacgacccgggagaaaactgagttgagaaggtcttctaacaagccttttgcacacctgccatgtattttgtcaggccttggggatgaaggtgagaaattcgagaatccccggagataacacatcagcaaatagtgcgcaggcagaacaagctgttggaggtgagagacacagagcagagaagcacccgcacctggagagtcaggagggcctcacatcagaacgcctgagcaaatacagttttgaaggatactaattttttaaaaagttcattcacatgagttagacaaagagaaagaagcaggacattctaggaagaaggaacggcccaggcaaaagcgacgcgtacattggcgtgggtccattcaagaattgtgcccacaatataccaggcacttgtccagacctgcatcgtccaatgcccacctcgacctcccaaagtgttgggattagaggcgtgagccaccgcgccctgcctgcatgtggctattgagatgtgctgtatgatacacaccggactttgaagactcagtgtgaaaaataaaaagaattttaagaggggtgggggtcgaggggaggcagagcagtaggacaaatagctaatgcacgcagggcttaaaacctagacaacaggttgatgggtgcagcaaaccaccatgacacatgtttatctatatagcacctacatgttctgcacttgtatcctggaacttaaaattagaaaaaaaaaataataaaagccaacatggcattcattactgccaaaaaaattaaaacacattgttaaaattga

SEQ ID NO: 556564 - DNA, 1559 bp, Homo sapiens
  misc_feature (374)..(374): n is a, c, g, or t
  misc_feature (787)..(787): n is a, c, g, or t
  misc_feature (956)..(956): n is a, c, g, or t
gccgcaaattccccacaggattggatcgattcgcgggctcatggtgtttgtattgtgttttattgtgccccgccttccctgcggggagatctctcctatgtaattcgccccccctcccctctcatgtggtgagtgatagaattttttgattgaaagagaaaattgttgcggggtggttggaagcaccctccctctctctcgtgtgcctgtaagagaccatcaaagatgtgtttccccaacaggggggagggcccgacagacagtgttctccacacatgtttgttttccttggggggtgtttaaagtggcatccacaactagtgtcgtctgtgtatccctcaagagccagctaactacttgttggggcgggttantttccgccccgttttctttggtgtggggaacccgctctctccaaataaggagcccggtacgaccgcctcttattttggaggcatgttggcctttcttataccccactgcccataatggctcagaatatggcccccacgcaccccccaggagggggcacaccaccacaccagcgggggtttcttctgtgcggcgggtttcataaaattagtttcgagaggggacatcgtctcgggtagaatagagggtaacccaccccctcccgctccacagcaacaaagtttgggggagaggctgcagctaaagatatatataataatttgggccaacaacatcttttttttcacaggggccaacaccacacaacatatggggttgggaacacacatctgaacacattagagttgtctccccnccaccccacgggagtgtgtgcaacacacagctcggtgcctcgttgccacggagatttccacactctcctcttctctctccacacattagagtgtggtcccgcacgcaacttgtggctcatcttctgggagttattataagagagagactactctacccctctgggagtnttgtttatagaggaagagagggtgagaagacacacacactgtgtgtttctctctctctctctgtgtcactctacacacttataagggagctctctctcacatgtgttctcttatagtttttatagagagagagagcggcccacacacatttgttttttttttgtgtcacaactctgtgtccggtgacacacacacagcgtgtgtgtgtgtgtgtgtgtgtgtgtgtgtgtgtgtgtgtgtgtgtgttataagaggtgtggctcttaaaaaatcttgtttatcgcgcatatgttctcttactcacacatgtgtcacacgagatgagctggcgcttttatactatattgtgagaaacacgtgtggtttgtgtgtgtatatcacaattcacataatatatcacatttaaagcacgtttgtagaggcacatacttttgcacataagaaaatataaaaaaatatctgaatttggggcacactgagggaaataatttgaccacacttatagttaatcttcacacgtttgttgcacaaactttgagatttttaatttcacatctgaacttgtttccaagatttatattaaatatttggcataaccagaga

SEQ ID NO: 556565 - DNA, 317 bp, Homo sapiens
caaaccttctaggagctcacagtttattggggaagagagaaaaccctggagaatatgtatagtgaagggaggggtcaatgaaaaacaaggagtatggggaaggagaagaggattgtgtaggttgtgtcaggaaaaaaaaaataaggaaacaatgattgagtcagatacctttaaaatgaccaagagagctgggcacgcagtggctcacaccttagggagtaatcccagcactcagggaggcagaagcaagaagatagcttgagcccagcagttcaagacctgcctgggcaacatagtgatacgcctattctgcgacg

SEQ ID NO: 556566 - DNA, 2964 bp, Homo sapiens
ttttttcgcacttaccctgatcagccgactctctctttatctcatctttgtacagcttctctcctgtccttaatttatccacatatttgtccgcacttcggtgtgccaactgtcacaccgttatttcccgctttctggccacgagtctatgttcctctcccttctcaccgcggttcatgtgtgattcccctaaatcgcttcctctggcttcatcgcgtcgcactcgccgtcgcgtctcgtcacccgcgtccacgccctgattgcccatctccgacgtgtcgtctcgtcgtttctttctcactcgcggtctctctgtaccgtaccccccgggtctcactcctgtccctgctccgtcggttgtgcgtcggcttcgctctgttcgtttcctctctccgtctcttctcctctctcggttctgtcttgagtctgtatcttgttgttgtgcctcgtgtgagttccatgggttgcggtgcatggtgtctgaagtggttctcctgctccctgtggttattcgctcgcagcactgtgttgcgcatcggatgtcctgtctttgctgcgtttcgccgtcgttgtttcccgggcacttggtctgccacccagtgtgtcgtgtccaacactgtgaacccaggttagttaggtaccatctagtcgtatacatacggtctgtagtacagaaccagtttattgatgtttgagtctttgcttgttcaatggctttgcaggctgcatgaattgtccgctctttggtttgtctgccgcccaggaagtctaatgcctacatttaaaggatggcctggcccccagtatacgccgattcctgctcgcggccttctacgcccattactgggagcagcagccatcagtgtagacgacgacgaaagtctcccatgtaggaaaacgtgtctctgctaactggaggcgccggctccacgctcggcttcatggtgctttgcaatacggctctgcgctttcatgtccatctccatccagtggctcacggagtcgcttgctggctttcgcctccgattcttgtccatgttgattttcatgcccttctgaaacttccgggcttgcagatttcctgacaaaggcccaggcctcatcctctgtggcaaacttcttaaatctggcagcaggaaaccggtccacctgtgctctgcactcattcctccaagggttgttacaaggatccaactgcaaatactggcttattagaatttgccttttttaaaagggaagattaggtactgagttccaatcccaatttagctggtacggaaagtcttctggtaacgggggttcgttctgattacgtgtcactttttgttgcactttaacaggtcagaaagaccccggtcttgcggcccctcctcacggcatagaacatcccgaacccgcgagagccgcggcggcagggcaaggcggccaaggcgactctgtgggccaggaacagaagccagctcatcgctcactcccggcaccgggaagcatttcgactcccggcccagcgtgggcgcgagccgccggcgctcaacaccgcacttccgtcaccggcgcgggaagatgacgcacgtctgggcggagtcctgatgagggccggggcctagggaggggcggtgtcgtagggcggagcccggagctcggcccctgacgagcccgaactcgtcaacttcctgtcggtacttgaagaagcggagccagggctgagatcccgaaggcgggcgaggtctgggatggggcggggcctatgggagcggggctgaagccctgggcccggcagaggaaggtcgagatggaccatgttgggccccttctctccccgcccccaggccgcagttcgggggccacgccccggcgtgctcgggtcaccgcgggaagcccttgaaccccctggcgcccggcacccacgtgcggtaaccgcggctcctcgagagctccagggatgcggatctacagtaagggctgtggccagatgaatgaatgcacattttttagtgggcagaaagatgttagaattcatgaattagaataagcacaaaggagggcgagaggggaggccgtggaagccgcattcctccccttgccttgggcgcccacccccgaaggggcgcgtcccctccctgctccactgcacgtgggtgtttaaccaggggatatccagtgcctcaagcaccacgacccgggagaaaactgagttgagaaggtcttctaacaagccttttgcacacctgccatgtattttgtcaggccttggggatgaaggtgagaaattcgagaatccccggagataacacatcagcaaatagtgcgcaggcagaacaagctgttggaggtgagagacacagagcagagaagcacccgcacctggagagtcaggagggcctcacatcagaacgcctgagcaaatacagttttgaaggatactaattttttaaaaagttcattcacatgagttagacaaagagaaagaagcaggacattctaggaagaaggaacggcccaggcaaaagcgacgcgtacattggcgtgggtccattcaagaattgtgcccacaatataccaggcacttgtccagacctgcatcgtccaatgcccacctcgacctcccaaagtgttgggattagaggcgtgagccaccgcgccctgcctgcatgtggctattgagatgtgctgtatgatacacaccggactttgaagactcagtgtgaaaaataaaaagaattttaagaggggtgggggtcgaggggaggcagagcagtaggacaaatagctaatgcacgcagggcttaaaacctagacaacaggttgatgggtgcagcaaaccaccatgacacatgtttatctatatagcacctacatgttctgcacttgtatcctggaacttaaaattagaaaaaaaaaataataaaagccaacatggcattcattactgccaaaaaaattaaaacacattgttaaaattga

SEQ ID NO: 556567 - DNA, 177 bp, Homo sapiens
  misc_feature (58)..(58): n is a, c, g, or t
  misc_feature (108)..(108): n is a, c, g, or t
  misc_feature (114)..(114): n is a, c, g, or t
  misc_feature (116)..(116): n is a, c, g, or t
  misc_feature (123)..(123): n is a, c, g, or t
  misc_feature (127)..(127): n is a, c, g, or t
  misc_feature (132)..(132): n is a, c, g, or t
  misc_feature (148)..(148): n is a, c, g, or t
  misc_feature (150)..(150): n is a, c, g, or t
  misc_feature (152)..(152): n is a, c, g, or t
  misc_feature (154)..(155): n is a, c, g, or t
  misc_feature (172)..(172): n is a, c, g, or t
gtattttattttaatactattcagatcaaatgaaacttttaccgaaactggagacctncattagggcggaagagtgggggattggacctcttcttacgactgcgttgncaatangnagcgatntganctttnacagcaattactgtangnanannccgcactagtttgttanaaaaa

SEQ ID NO: 556568 - DNA, 2474 bp, Homo sapiens
ttttttcgcacttaccctgatcagccgactctctctttatctcatctttgtacagcttctctcctgtccttaatttatccacatatttgtccgcacttcggtgtgccaactgtcacaccgttatttcccgctttctggccacgagtctatgttcctctcccttctcaccgcggttcatgtgtgattcccctaaatcgcttcctctggcttcatcgcgtcgcactcgccgtcgcgtctcgtcacccgcgtccacgccctgattgcccatctccgacgtgtcgtctcgtcgtttctttctcactcgcggtctctctgtaccgtaccccccgggtctcactcctgtccctgctccgtcggttgtgcgtcggcttcgctctgttcgtttcctctctccgtctcttctcctctctcggttctgtcttgagtctgtatcttgttgttgtgcctcgtgtgagttccatgggttgcggtgcatggtgtctgaagtggttctcctgctccctgtggttattcgctcgcagcactgtgttgcgcatcggatgtcctgtctttgctgcgtttcgccgtcgttgtttcccgggcacttggtctgccacccagtgtgtcgtgtccaacactgtgaacccaggttagttaggtaccatctagtcgtatacatacggtctgtagtacagaaccagtttattgatgtttgagtctttgcttgttcaatggctttgcaggctgcatgaattgtccgctctttggtttgtctgccgcccaggaagtctaatgcctacatttaaaggatggcaacttcttaaatctggcagcaggaaaccggtccacctgtgctctgcactcattccaggtcagaaagaccccggtcttgcggcccctcctcacggcatagaacatcccgaacccgcgagagccgcggcggcagggcaaggcggccaaggcgactctgtgggccaggaacagaagccagctcatcgctcactcccggcaccgggaagcatttcgactcccggcccagcgtgggcgcgagccgccggcgctcaacaccgcacttccgtcaccggcgcgggaagatgacgcacgtctgggcggagtcctgatgagggccggggcctagggaggggcggtgtcgtagggcggagcccggagctcggcccctgacgagcccgaactcgtcaacttcctgtcggtacttgaagaagcggagccagggctgagatcccgaaggcgggcgaggtctgggatggggcggggcctatgggagcggggctgaagccctgggcccggcagaggaaggtcgagatggaccatgttgggccccttctctccccgcccccaggccgcagttcgggggccacgccccggcgtgctcgggtcaccgcgggaagcccttgaaccccctggcgcccggcacccacgtgcggtaaccgcggctcctcgagagctccagggatgcggatctacagtaagggctgtggccagatgaatgaatgcacattttttagtgggcagaaagatgttagaattcatgaattagaataagcacaaaggagggcgagaggggaggccgtggaagccgcattcctccccttgccttgggcgcccacccccgaaggggcgcgtcccctccctgctccactgcacgtgggtgtttaaccaggggatatccagtgcctcaagcaccacgacccgggagaaaactgagttgagaaggtcttctaacaagccttttgcacacctgccatgtattttgtcaggccttggggatgaaggtgagaaattcgagaatccccggagataacacatcagcaaatagtgcgcaggcagaacaagctgttggaggtgagagacacagagcagagaagcacccgcacctggagagtcaggagggcctcacatcagaacgcctgagcaaatacagttttgaaggatactaattttttaaaaagttcattcacatgagttagacaaagagaaagaagcaggacattctaggaagaaggaacggcccaggcaaaagcgacgcgtacattggcgtgggtccattcaagaattgtgcccacaatataccaggcacttgtccagacctgcatcgtccaatgcccacctcgacctcccaaagtgttgggattagaggcgtgagccaccgcgccctgcctgcatgtggctattgagatgtgctgtatgatacacaccggactttgaagactcagtgtgaaaaataaaaagaattttaagaggggtgggggtcgaggggaggcagagcagtaggacaaatagctaatgcacgcagggcttaaaacctagacaacaggttgatgggtgcagcaaaccaccatgacacatgtttatctatatagcacctacatgttctgcacttgtatcctggaacttaaaattagaaaaaaaaaataataaaagccaacatggcattcattactgccaaaaaaattaaaacacattgttaaaattga

SEQ ID NO: 556569 - DNA, 471 bp, Homo sapiens
agactgtcgacaggttggagtgcaatggcactgatctcagctcactgcaacctctacctcctgggttcaagctattctcgtgcctcagcctcccgagtagtttggatcacaggcacctgccaccacgcctggctaattttttatttctagcagagattgggtttcaccatattggccaggctggtcttgaactcctgacctcaagtgatccgcctgccttggtctcccaaagcactgggattacaggcgtgagccactgcgcctagccatgctatttttttggcatcagttaattaattgtacctgaaatccaatgatggggagggagatgtagaaaacatggccttgatatgctcttatcctgcctcttgccactgacgcttatctttctgctgttgctaggactggctttgctaaattgtagacttccagaattaccgaataaaggattcccatcatgatccaattatg

SEQ ID NO: 556570 - DNA, 2751 bp, Homo sapiens
ttttttcgcacttaccctgatcagccgactctctctttatctcatctttgtacagcttctctcctgtccttaatttatccacatatttgtccgcacttcggtgtgccaactgtcacaccgttatttcccgctttctggccacgagtctatgttcctctcccttctcaccgcggttcatgtgtgattcccctaaatcgcttcctctggcttcatcgcgtcgcactcgccgtcgcgtctcgtcacccgcgtccacgccctgattgcccatctccgacgtgtcgtctcgtcgtttctttctcactcgcggtctctctgtaccgtaccccccgggtctcactcctgtccctgctccgtcggttgtgcgtcggcttcgctctgttcgtttcctctctccgtctcttctcctctctcggttctgtcttgagtctgtatcttgttgttgtgcctcgtgtgagttccatgggttgcggtgcatggtgtctgaagtggttctcctgctccctgtggttattcgctcgcagcactgtgttgcgcatcggatgtcctgtctttgctgcgtttcgccgtcgttgtttcccgggcacttggtctgccacccagtgtgtcgtgtccaacactgtgaacccaggttagttaggtaccatctagtcgtatacatacggtctgtagtacagaaccagtttattgatgtttgagtctttgcttgttcaatggctttgcaggctgcatgaattgtccgctctttggtttgtctgccgcccaggaagtctaatgcctacatttaaaggatggcctggcccccagtatacgccgattcctgctcgcggccttctacgcccattactgggagcagcagccatcagtgtagacgacgacgaaagtctcccatgtaggaaaacgtgtctctgctaactggaggcgccggctccacgctcggcttcatggtgctttgcaatacggctctgcgctttcatgtccatctccatccagtggctcacggagtcgcttgctggctttcgcctccgattcttgtccatgttgattttcatgcccttctgaaacttccgggcttgcagatttcctgacaaaggcccaggcctcatcctctgtggcaaacttcttaaatctggcagcaggaaaccggtccacctgtgctctgcactcattccaggtcagaaagaccccggtcttgcggcccctcctcacggcatagaacatcccgaacccgcgagagccgcggcggcagggcaaggcggccaaggcgactctgtgggccaggaacagaagccagctcatcgctcactcccggcaccgggaagcatttcgactcccggcccagcgtgggcgcgagccgccggcgctcaacaccgcacttccgtcaccggcgcgggaagatgacgcacgtctgggcggagtcctgatgagggccggggcctagggaggggcggtgtcgtagggcggagcccggagctcggcccctgacgagcccgaactcgtcaacttcctgtcggtacttgaagaagcggagccagggctgagatcccgaaggcgggcgaggtctgggatggggcggggcctatgggagcggggctgaagccctgggcccggcagaggaaggtcgagatggaccatgttgggccccttctctccccgcccccaggccgcagttcgggggccacgccccggcgtgctcgggtcaccgcgggaagcccttgaaccccctggcgcccggcacccacgtgcggtaaccgcggctcctcgagagctccagggatgcggatctacagtaagggctgtggccagatgaatgaatgcacattttttagtgggcagaaagatgttagaattcatgaattagaataagcacaaaggagggcgagaggggaggccgtggaagccgcattcctccccttgccttgggcgcccacccccgaaggggcgcgtcccctccctgctccactgcacgtgggtgtttaaccaggggatatccagtgcctcaagcaccacgacccgggagaaaactgagttgagaaggccttggggatgaaggtgagaaattcgagaatccccggagataacacatcagcaaatagtgcgcaggcagaacaagctgttggaggtgagagacacagagcagagaagcacccgcacctggagagtcaggagggcctcacatcagaacgcctgagcaaatacagttttgaaggatactaattttttaaaaagttcattcacatgagttagacaaagagaaagaagcaggacattctaggaagaaggaacggcccaggcaaaagcgacgcgtacattggcgtgggtccattcaagaattgtgcccacaatataccaggcacttgtccagacctgcatcgtccaatgcccacctcgacctcccaaagtgttgggattagaggcgtgagccaccgcgccctgcctgcatgtggctattgagatgtgctgtatgatacacaccggactttgaagactcagtgtgaaaaataaaaagaattttaagaggggtgggggtcgaggggaggcagagcagtaggacaaatagctaatgcacgcagggcttaaaacctagacaacaggttgatgggtgcagcaaaccaccatgacacatgtttatctatatagcacctacatgttctgcacttgtatcctggaacttaaaattagaaaaaaaaaataataaaagccaacatggcattcattactgccaaaaaaattaaaacacattgttaaaattga

SEQ ID NO: 556571 - DNA, 651 bp, Homo sapiens
  misc_feature (437)..(437): n is a, c, g, or t
agttatgcttgctacttatggaacgaaataagaggccataacgaccagtggtgtcaatgtcctgttaatctcaggcatctttgagacaggtcccgaggaccggcgctgggagtcacgaccgtccacggacctgtgaccaacactacgcccctgtgcgtaccatttctggctgacacacttccacggggctcttatactacaaccattagcagatcccattgacgccacgtgctggttgcgttgccgtatggcttgccatggtaatcgcaggcatgcatcgagagcagagcatgacggcccgagcaactcgcttgacaccctgggaggccagacgccctctgcacggtgcagccaacacagacttgcaccaacgtgtacctccatgcccatgggcacacaacacgcccacgacgcaccaatcccccaaaacaacaaancaacaacaaacgcaacaaaccacaaaacaaaagagaccaacacaccagggtcagagcgggacccgcaacgaaccgcacgaccacccacaatggacaggaggcaagacagggaactaagtccaaaaagcagcagacagacagcacaaccaacgaagaacaagacgagcagggcgggagaaccacaaaggtgcagcgcacaaaagaccagacagcg

SEQ ID NO: 556572 - DNA, 669 bp, Homo sapiens
  misc_feature (537)..(537): n is a, c, g, or t
  misc_feature (579)..(579): n is a, c, g, or t
  misc_feature (583)..(583): n is a, c, g, or t
cctcaacgcctgtaatcctagcacctttgggaggccaggtgggtggatcaacttgaagtcaggagtttgagaccagcctggcaaacatgttgaaaccccgtctctactaaaaatataaaaattaacttgacatggtagcatgcgcctgtaattccagctactcgggaggctgaggcatgagaattgcttgaacctgggaggcggaggttgcagtgagccaagattgcgccattgcactccagcctggggacaagagtaaaactcttgtctttaaaaaaaaaaaaaaaaaagcctgggtgcagtggctcactcctgtaatccgagcactttgggaggccgaggcaggcggatcatgaggtcaggagatcgagaccatcctggctaacacggtgaaaccccgtctctactaaaaatacaaaaaattagccgggcgaggtggcgggtgcctgcagtcccagctatgcaggaggctgaggcaggagaatggcgtgaaccccggggggcggagcctgcagtgagccaagatcgcgccactgnactccagcctgggaagggcgagactccggctttttaaaaaanaaangcttattcatgcggcccaattgagctaattggcaatcgcctatagggggggattaaataactgccggggtttaaaaagcgggctgg

SEQ ID NO: 556573 - DNA, 758 bp, Homo sapiens
  misc_feature (246)..(246): n is a, c, g, or t
  misc_feature (249)..(249): n is a, c, g, or t
  misc_feature (319)..(319): n is a, c, g, or t
  misc_feature (351)..(351): n is a, c, g, or t
  misc_feature (387)..(387): n is a, c, g, or t
  misc_feature (544)..(544): n is a, c, g, or t
  misc_feature (645)..(645): n is a, c, g, or t
  misc_feature (648)..(652): n is a, c, g, or t
  misc_feature (690)..(690): n is a, c, g, or t
  misc_feature (692)..(692): n is a, c, g, or t
  misc_feature (697)..(697): n is a, c, g, or t
  misc_feature (727)..(727): n is a, c, g, or t
cgacctgtgggagccaaggatggttcagagaacctagctggtaagccagccctgcaaatccccagttctcgagctgctgccccaaggcctccagtatctgccgccagcgggcgtcctcaggatgatacagacagcagccgggcctcactcccagaactgccccggatgcagagaccctctttaccggacctctctcggcctaataccaccagcagtacgggcatgaagcacagctcctctgccccnccnccaccacccccagggcggcgtgccaacgaccccccacacctctgcctatgcacagcagcaaagcccccgnctacaacagagagaaacccttgccaccgacgnctggacaaaggcttcaccctggtcgagagggacctnctgctccacccccagtcaaaccacctccttcccctgtgaatatcagaacaggaccaagtggccagtctctggctcctcctcctccgccttaccgccagcctcctggggtccccaatggaccctctagccccactaatgagtcagcccctgagctgcnacagagacacaattctttgcataggaagacaccagggcctgtcagaggcctagcacctcctccacccacctcggcctccccatctttactgagtaataggncannnnncccagcccgagaccctcccagtcggggagcagctcctncnccccnacacctgtgatccgaaatggtgccaggganggtcccctccccaccacatacggatgcatgg

SEQ ID NO: 556574 - DNA, 2468 bp, Homo sapiens
ttttttcgcacttaccctgatcagccgactctctctttatctcatctttgtacagcttctctcctgtccttaatttatccacatatttgtccgcacttcggtgtgccaactgtcacaccgttatttcccgctttctggccacgagtctatgttcctctcccttctcaccgcggttcatgtgtgattcccctaaatcgcttcctctggcttcatcgcgtcgcactcgccgtcgcgtctcgtcacccgcgtccacgccctgattgcccatctccgacgtgtcgtctcgtcgtttctttctcactcgcggtctctctgtaccgtaccccccgggtctcactcctgtccctgctccgtcggttgtgcgtcggcttcgctctgttcgtttcctctctccgtctcttctcctctctcggttctgtcttgagtctgtatcttgttgttgtgcctcgtgtgagttccatgggttgcggtgcatggtgtctgaagtggttctcctgctccctgtggttattcgctcgcagcactgtgttgcgcatcggatgtcctgtctttgctgcgtttcgccgtcgttgtttcccgggcacttggtctgccacccagtgtgtcgtgtccaacactgtgaacccaggttagttaggtaccatctagtcgtatacatacggtctgtagtacagaaccagtttattgatgtttgagtctttgcttgttcaatggctttgcaggctgcatgaattgtccgctctttggtttgtctgccgcccaggaagtctaatgcctacatttaaaggatggcctggcccccagtatacgccgattcctgctcgcggccttctacgcccattactgggagcagcagccatcagtgtagacgacgacgaaagtctcccatgtaggaaaacgtgtctctgctaactggaggcgccggctccacgctcggcttcatggtgctttgcaatacggctctgcgctttcatgtccatctccatccagtggctcacggagtcgcttgctggctttcgcctccgattcttgtccatgttgattttcatgcccttctgaaacttccgggcttgcagatttcctgacaaaggcccaggcctcatcctctgtggcaaacttcttaaatctggcagcaggaaaccggtccacctgtgctctgcactcattccaggtcagaaagaccccggtcttgcggcccctcctcacggcatagaacatcccgaacccgcgagagccgcggcggcagggcaaggcggccaaggcgactctgtgggccaggaacagaagccagctcatcgctcactcccggcaccgggaagcatttcgactcccggcccagcgtgggcgcgagccgccggcgctcaacaccgcacttccgtcaccggcgcgggaagatgacgcacgtctgggcggagtcctgatgagggccggggcctagggaggggcggtgtcgtagggcggagcccggagctcggcccctgacgagcccgaactcgtcaacttcctgtcggtacttgaagaagcggagccagggctgagatcccgaaggcgggcgaggtctgggatggggcggggcctatgggagcggggctgaagccctgggcccggcagaggaaggtcgagatggaccatgttgggccccttctctccccgcccccaggccgcagttcgggggccacgccccggcgtgctcgggtcaccgcgggaagcccttgaaccccctggcgcccggcacccacgtgcggtaaccgcggctcctcgagagctccagggatgcggatctacagtaagggctgtggccagatgaatgaatgcacattttttagtgggcagaaagatgttagaattcatgaattagaataagcacaaaggagggcgagaggggaggccgtggaagccgcattcctccccttgccttgggcgcccacccccgaaggggcgcgtcccctccctgctccactgcacgtgggtgtttaaccaggggatatccagtgcctcaagcaccacgacccgggagaaaactgagttgagagggtccattcaagaattgtgcccacaatataccaggcacttgtccagacctgcatcgtccaatgcccacctcgacctcccaaagtgttgggattagaggcgtgagccaccgcgccctgcctgcatgtggctattgagatgtgctgtatgatacacaccggactttgaagactcagtgtgaaaaataaaaagaattttaagaggggtgggggtcgaggggaggcagagcagtaggacaaatagctaatgcacgcagggcttaaaacctagacaacaggttgatgggtgcagcaaaccaccatgacacatgtttatctatatagcacctacatgttctgcacttgtatcctggaacttaaaattagaaaaaaaaaataataaaagccaacatggcattcattactgccaaaaaaattaaaacacattgttaaaattga

SEQ ID NO: 556575 - DNA, 141 bp, Homo sapiens
gtgacagtaatggtggtgggcaggtagtggtgacagtaatggtggtgggcaggtagtggtgacagtaatggtggtgggcgggtagtggtggcagcagtaatggtagtggtggtggtggcagtagtaacagtggtaggcggg

SEQ ID NO: 556576 - DNA, 175 bp, Homo sapiens
  misc_feature (124)..(124): n is a, c, g, or t
  misc_feature (132)..(132): n is a, c, g, or t
  misc_feature (171)..(171): n is a, c, g, or t
gagaactgacaatatagaaagcagaggtttaaaccttctcttgggatgcctcgttttgttgtgattgacaactgtattgcactgaagaaggttgcatcacggtcaagaaaaaaaggagagaaancattaaancaaagtagagaaatttcaaaagcaggggagtatgtacgngtaa

SEQ ID NO: 556577 - DNA, 186 bp, Homo sapiens
  misc_feature (24)..(24): n is a, c, g, or t
  misc_feature (55)..(55): n is a, c, g, or t
  misc_feature (83)..(83): n is a, c, g, or t
  misc_feature (102)..(102): n is a, c, g, or t
aaataattgttttaagttatgtcnaaagaggatgttggcatgcttttgaataggnaataagtgagtatattttgtaaaagtanatttataaaagaagttgcnctttagttaatactgagaaaagtaaaattgtgtgtgtgtgtgtgtgtgtgtgtgtaatgtgtttaatattgaaacataaatcct

SEQ ID NO: 556578 - DNA, 245 bp, Homo sapiens
aatccaactctaacactatgcttagggctatcacactctgttcgcagcagtctggccttagaaaaatgaatcaaaaaatcgtagcttgtccacttctagtcaactaggactcataatagttaccatcggcatcaagcaagcaccaactagcattactgcacctcttgtacccacgccttcttcaaagccatactactctatgtgctgccgggtgcatcatccacacccttaacaatgaacaagat

SEQ ID NO: 556579 - DNA, 164 bp, Homo sapiens
cctccgtagctgctccatatagtactcagaaatcatatgttctacctcttcatgaaaatacttttcaggagctccaggtaatgaggcggagcctgaattgtttagaacacaaatgatggatttagaatatggcaatgctagcgtcagacaaaccatggctttat

SEQ ID NO: 556580 - DNA, 152 bp, Homo sapiens
ggaagaaagaggaaaggtaaaaatgggatgcctttggaccccaaacctgagcctaagaagcataaagattccctgatatatgtggctctgtcctagaaaagaggtaatagcacacctaacgcaccacggcatctactccttctagtttgctg

SEQ ID NO: 556581 - DNA, 300 bp, Homo sapiens
ggacacagttatgacctgggcgtcgcttacactcagcgaaagagctaatctccgtacaaacatctcagacgcgcaggagatttacaccggctgaactattctgcccgccatcatcctaatcctcatcgccctcccatccctacgcatcctttacatcacagaggaggtcaatgatccctcccttaccatcaaatcaaaaagggcaccaaatggtactgaactctacgagatacaccgaactacggcggagtaatcttcaattcctacatactccccccattattcctagaaccaggcgga

SEQ ID NO: 556582 - DNA, 572 bp, Homo sapiens
atggggtatctttccatttatttatgtccttttttatctccttcatcaatgttttctagttttcagcgtacacatctcttacctccttaaatttcctaagtaattttttgatgcaattataaatgggatagttttcttgatttctttttcagataattagcatatagaaacattgtatgttaactttgtatcttctaattttctgaacttattaagtctaatagttttttggtgaagtctttagagtttttttgtttgtttgttttgttttgtttttgagatggagtctggctctgtcgccaggctggagtgcagtgctacagtcttggctcactgcaacctctgcctcccgggttcaagtgattctgctgcctcagcttcccgagtagctgggattacaggcgcccgtcactatgcctggctaatttctgtatttttagtagagacggcatttcaccatgttggtcaggttggtcttgaactcctgacctcaagtgatctgcccgcctcggcctcccaaagtgctttgattacaggcatgagccattgtacccggccattgttctttcatt

SEQ ID NO: 556583 - DNA, 353 bp, Homo sapiens
gtggttcttgtcttggttgtggagcagtggcacggcattctaagtggtgggagctgttgggcagggtgggtacccactggctgttcctcttggccttctgttccctgaggtaggtggggggctctgtgctgatggatgtacagtttgatgattactcgctggtctgcctggtcctccaggatgctgtccgtggggataggactcgatctgctgtctgatgtgcctgatgcgcatggatgccacaagcgtcagcgggttcaaatccatgatcgtcacagaggatttctgaaaatatctcaggcgtcatcaagtttctcattcatgttccaggttaaggcgtctcgagagaactg

SEQ ID NO: 556584 - DNA, 185 bp, Homo sapiens
aatctgatactggttgatgatagtagtagttgttcctgctctaactgtctttggaaggagcagaggatgaatctgtttcatcgctggtgtcgtacctctgcactcattcaggcatgtagctttgactctgtgcataatacatgtgacacaaatcctgtatctacattgaacgtttgggagagatg

SEQ ID NO: 556585 - DNA, 334 bp, Homo sapiens
tcaggcaccacctatgagaatgggaggtgattcacaatggcaggcatggggccgggcacagtggctcacatctgtaatcccaaccctttgggaggctgagacaggtggatcgcttgaggtcaggagctcgagagcagcctggccaacatggcgaaatggcatctctactaaaaaacaaaaattagctggcgtggtggcaggtgcctgtaatcccagcaactcgggaggctaaggtaggagaatcgcttgagtctgggaagcagaggttgcagtaagttgagatcgcgccactacactccagcctgggtaacagagactctgtctcaaaaaaaga

SEQ ID NO: 556586 - DNA, 469 bp, Homo sapiens
aggagaactccctacgctttttacttccgtcaattactactgctgagaccacctcacataggacttccagcttcacttgttcgatcaccaccaccaagaccacctcacacagtacttccatcttcacttcctcaataatcaccgagaccagctcacacagttctcccagcgtcacttctgcaatcaccaccaccgagaccacctcatgacagtactcccacgctacagcttcttcgatagccaccaacatgaacacctcaaagagtactcccagcttcacttcttctatcattaccacggagagcattccacggagtactcccagcttcagcttcttgtatcactagcaaagcaagaacattcacgcagtactcccagcttgacttccgtgatcacaaccaccaagaccacctcaaacagtattcaaggtttcactttttcaatcacccccaccgagaccacctcacac

SEQ ID NO: 556587 - DNA, 767 bp, Homo sapiens
caattctcggttccaggaatgcctcgtgctcggaagggcaatgcgctccgcaagggcggtcagcgccgtggaggaggtgccaggagcagtacccaggctgactctggctccagtgaggatgaagcggccagtgaggcccggagcaccaccagtgactgtcccagccttctcagcgccaccacagaggactgcctgggtggcgaagcggtggacgaacagagccagcaggaaaacctggaggagaagctgaaaggttatgtggactgccagaacccagaaagccaggtggccctgctccagagatggacaatctcatggatatgctggtcaacacccagggccgccgcatggacgaccagcgtgtaacagttaattccctgcctggcttccaacctatcggccccaaggtaggtgatgtccagattacctgtgagactccacatagctctctaaatctatgacctgtctctaggcaggaaaggagaggaccctatgaacacgtaaagtgctatgggcttaaggtcaggtggcaggactcatgctagtgcagaactatggcgtggaaattacagttcctgctccaacatctgtatatttggggccccgttcagccgatgaacaatggaaccaagggtgtgtcacccacatgaacccttttatccgcctcccagtgcaaagaaccgtcaaggaggccctggagaacctgggcctggcctggcttcccggctaaattcggaagtttttgttggaagcaagacctcaatctg

SEQ ID NO: 556588 - DNA, 304 bp, Homo sapiens
cttcccccaaattttgtaactcttgaccatgtcttaattgcctggtactatgctagaagtatagaaatcattaaactaggctgggcatggtagctcatcggtaatcccagcacgttgggaggctgaagcaagagattgcttgatcccaggagttgaaaaccatcctgggcaacatggtgagacccttatctctacaaaaataagaaattagcgaggcgtggtggtgcatgcctgtagtcccagttactcgggaggctgaggtgagaggaccacttgaacccagaagtttgatgttgcagcgatg

SEQ ID NO: 556589 - DNA, 142 bp, Homo sapiens
tggttcacactagaacaattgaatcttaagttcctctacattattctaattgtacagtccctggcttgagaaatactggcctacagtaagtgattctttaagatgttgtctccggtaccagcgagcaccagcaactatctgg

SEQ ID NO: 556590 - DNA, 1146 bp, Homo sapiens
  misc_feature (566)..(566): n is a, c, g, or t
ctgaagtacgccctgcccctggttggccaccgcaaaggtgtctaaacgagtgctaaagcgctacaccagtgcgccccctggctggtcgtctactacacgtgtggacttcaggctttgattacagagctgcaacatacacttttggcggagcctaattcctaaaggtggccaaggacttccctgagtacaccttctgtcctagttgtcggaacgaatgagtgactatgcttgccgtgacggtgaactgacctgtgggtctcatcagaggacgtggtggaggatcgtctagatgcccgccaatccatggacgtacgcagtcgtgtgaagcaacgtttccgtcctattggagccccatgcacggtacgttcttggactactgaacaaccctaccgatgaaagtttgtcaactagctattcatacaccacatacggtagagaacttgtaagcctagtccatcaaaattccccaagcacactgccacaacgcatagcaagcataagggggatctccagttacataagggtcgattggttggtgcaacaagcatcctttctggaaactccanttttgtcgacttgggaacccccaaagaagggaacgtcctttcgatcgatgtttctaactgcgccattagggtttgcaggtgtggctacctttgcgcacatgtctatgacctcaagtacgtcccccgattggttacctaaccgagggcgcccttggaccctaaaggaaacgcgttaaccaagaggggagccccaaatggaggggtggccccttgagattccagttcggttccccaaaaggtatttgggaaacctggccccaacctttgttcccaaatgcggaacctgtgtacgccccccagacatggagccccggccttaattacacaggggttcggggacagcggtcgccttttccacccaacatatcccaattacctaaaccttttccagcccacggccccctcaaggcttggcgtggctgaaccagaggataggaggaacaatcccccaaaggtctcacaagaattttcgtcgcaacgcgggcgcttgcagacaggaaacccctgtgaagacaattccgtaggggatggcccatttcttcgggaagtcccctggtttttgactcactggacaggcacc

SEQ ID NO: 556591 - DNA, 473 bp, Homo sapiens
ggttagaggcagagccaggtgcagagttgtgtgcttcacaagttggctctgtggtcgggaaggctcacggcgataagcacctggcttttgattcctgggaggacagcacttggacgggagtacgcattcaggcaatcactggtttccccacatgctttcttgtctcatggacagtttaacaaagctggcagagtcctgtaactaggatctgtacctttgggggtacaggcacgtaggaacagacatccaaacacaactgagtgctgggatataggcttgaccggacagatttcaggtgcctgggctttgtttgcatactgggcaccttctcagtctctttgtcagaactgacgcagcacctttcacatctaagtacaggccccaggctggatactggtagatgactggggcgggcatcagctcttccactggatgggtgaatatacttgcaggtcaattactaaagttgagcc

SEQ ID NO: 556592 - DNA, 418 bp, Homo sapiens
atgatcctaacaaaacctagaagtttacaggagtcagcaagctaccgagtatctgacgtggtttctaaggtgcagttgcatggggagcactctcccgtggcttctgagtgaaggcaacagtgatgtccaaaccaagcccgtccgcctctgaaccaccagttggcaggccagaatgactccagtctttagcaaagagctttccattctacctcccgaaatcccagaccagatggatgtctcctcccacctaggcgcagagggtagcacagtcttccaaaaggaaacaccttcattaaacgcagcagccagtcctatatgctgacccttgggtcaacccacagcttaagcgggggaacaagtggttctgatccatgcacagccagatctgctgaggactctggggttcccaggaaccaga

SEQ ID NO: 556593 - DNA, 483 bp, Homo sapiens
atcccccgtcgtgtgctggtgggtggatatgagtgtatattggggacggtagtggatgataataacttgctggtggttagggatagtgggatcagtggtaaagagaggagtcaagggatgacttcagttgatggcctgagcagttggatgcttttttctttgatgaggaacactgtgggaaaatgcaaattataaggagcacacgcagtcgcgtatgatggacgtatcgatccgcctgggcggaattctgactgagaggcgtacagtcaataatcccaaagatggtagcttcgcccaatgggttcctcagccaagcacatacaccaattgtctgaacctgcggtacctctcgtactgcgcaggattaccatggcaacaacacatcatcagaggggaacacctaacctgtctcacgagggtctaaacccaggatcacgtaccctattagtgggtgaacaatcctacgctgggtgaattctgatt

SEQ ID NO: 556594 - DNA, 985 bp, Homo sapiens
  misc_feature (1)..(1): n is a, c, g, or t
nactgcaaaatgtgtgaagaacgccgcgtggggcccgcgagaagccccccacgggggcagcgccgggcctagcgccacaggtgtggttcccggcccccccccgggcccattggccccccgggtcgcccccgggtgggtattcccaccggggccaccactgaaacaggtagaccgtcgccgggcgggtcaagaacacagcgacatgtcccccctcattggagacaaaccacggggaggcggtcccccaaaatttcatgaacagtcgccggtggcagggcccgccacacactgcggcaaagaagggggtgcctgtcgcggcaaccacacccacgtggttcgttgggaggcgtcatttttcacggcagtcactacacccggcgtgtgtggagccaccaagcaggtctctgggcgaatagttggaagccacgccccccagtcgcgccgggggtccgtcacccaactcagcacgacaaggcacgacacacagaaaggacgctcatgggcccctaaggcacacaggcgccaccacacaggtagtcggagcctcgcgctaggttcatcacaacagcgggtcacaggagacagttctaggccgccgctggatctcgcccgccccgccccgcctcaatacacacaaacgggcgggcaacataacccgctgctccccaagaaaccacgaatgtactcacaacgcgcgccctcttacaatgcagtgtgtggtcaaacatgtcgcggtgtacaggaaaaaaccgcacagcagtattgttttactcctcgtccggagacggggtaagcgcaatattcttttaggggccacccctcctgaggtttctctttatcggcgcgcggccagcagtcttcttgcgtgatatagtatgttttgtaatccacgcacgcatgtctcattttgtggggtaacacccgggccccgaacgttggtgtgcagcacgacacatttggcccccagaaatacagcccaaccaag

SEQ ID NO: 556595 - DNA, 288 bp, Homo sapiens
tgctcttttgggagttgggtaagtgcagcacttggtatgtgttaagcacctctgagtgctgttactgtcaccagcggcatcatccaggcagagctgcggacaaggtggcggcgggtgagggtggtggtttgagaacggctgaaataaaagaatactgatttattttatataaaaatatgcttttatatatgatgtataatatacgtatatcatggcatatgatacgtgtatatcatatagcacatatcatatatatagtcagcaaagaccccaaaaggggtaccgagc

SEQ ID NO: 556596 - DNA, 163 bp, Homo sapiens
tctaaggatccccgcgctagcgtgcattaagtgacggtctgcctatatccgagaaccgggggaattcgggggaacccccccatgacgaggggggaacctcaccctccgttcgtcaagtgcgggcggtgcacgaggcgggtgtggacgatgtagcctgttcact

SEQ ID NO: 556597 - DNA, 281 bp, Homo sapiens
atcgccgagaagaatgagcggttactggggtcctcaaggctcttcaaagagcttggaatgcttgtcaacacagggcagctgcccgcatgttcgccaagagaacatgcgggggccctaagagcagatagcccaaaacaatctcatatgaagtaacagtagcaatcataatactatcagtactcctaataaatggatcaatatactctaataaccctaatcacaacacaagagcaatttgaataatctaaaaatcctgaccactagccataatatgatttatc

SEQ ID NO: 556598 - DNA, 510 bp, Homo sapiens
gcaaggaactgtaaaactggataataaggtgattaaattctggtgatcattagcaagtgaataccataaattattttatattatctgagttcagttttatgagagcttcagtttcaaatgaaagtagccagagatggaaaagtgattatgaaatttcttttgagaatccttatgatccgccctatcctgcacttacacattaagttgaataatgtagagacctaaaaggttaatgaaactcccattgtatctaggtgaccagtctgaaataattttcctatggaaattgataacctatgtacatgtgataaattaattaaatgcttactctgatcacaatttttttcatgatacaattttcagaagttttctcactaccttacattacctaaaaaatgtaattctgtgtcttgtgtctttcccatttaaattgaaaaatactttagagttgaattctacaaagcatcaaaataaatattctaaataaatgtcctgtctgaaattaaaaaa

SEQ ID NO: 556599 - DNA, 112 bp, Homo sapiens
tgcttagaggtcgacgtgtattcaccagtgcgtgtggcttgcctctcgctgtacaagttccgtcgacaagtgagcaccgtgctgacctccaaatatcgttaagctggagcct

SEQ ID NO: 556600 - DNA, 173 bp, Homo sapiens
taagacaaggtcatgcatgaggtagtccaccgcgctagcctggggtctccgccagcagaggcggcgccccaggcgctgtgacctggatgtcataggtgtctacagtgattctagggagggcttccagctgcagcacggcgtaatccctcggatcacggctgcgctatggcggg

SEQ ID NO: 556601 - DNA, 303 bp, Homo sapiens
tgttgtgcagtcaagtcctcggcacattgtgaactttgggggatgtcgctccaacctgactgctgtcaccttcaccgtgccagtttttaaatcctgagtcaagccaaaacagataaaaaaaacccaaaccaataaaaaaaaaccaaattaagcctttgccattctctttttgtttccggcccattttgtcgagattgggggattcctctaagagtgccagcccgggcgggcttagagggctggggcatgggccgggtcggtttaacagcgtgtgggagctggggagaaaaaggcgtaggggcc

SEQ ID NO: 556602 - DNA, 426 bp, Homo sapiens
caggatcccggcacgagcgcccaagtttaagtacttattaacagaagtatcaggccagtgaacaggcgtcgggtatgacatgcgataattaatagagccctcttgcgatagatgatcggatgtgatccagatcatgtgctgggaggaccctccaggtaataatgtgctccctcccattgacagtgccttacgaggtaatgacatcacagctgaccatgaacagagtcagagcaaggctggagtgtgggagtgtgtcgtgaatgtctccctattgtgaatggcgcgggtgcccacaagaggcctgggcagtcaacagctttcttcttccataaaatcatgggaaaggagcttctaatgctaagtgtgaggggctggagttcatcccaccagcaaacaaacaaggactccatgtttttgcattgcaat

SEQ ID NO: 556603 - DNA, 368 bp, Homo sapiens
  misc_feature (368)..(368): n is a, c, g, or t
cgcggtggctcacgcctgtaatcccagcgctttgggaggccgaggtgggaggatcacctgaggtcaggagtttgagaccagcctaaccaccgtggagaaaccttgtctctactaaaaatgcagaattggctgggcgtggtggtgcatgcctgtggtcccagctactcaggagctgaggcaggaaaatcgcttaaacctgggaggcggaggttgcggtgggctgggatcgcaccattgcactccagcctgggcaacaagagcaaaactacatctcaaaaaataaaaaacaaaacaaaccgagccgggacactggcctgcatcaccctggctttctggaagaaggtgtgttgagggggctggacacgggn

SEQ ID NO: 556604 - DNA, 806 bp, Homo sapiens
gaggcaggagaattgcttgaacccgggaggcggaggttgcagtaagccgagaccatgcttattgccctccagtctgggcaacaaaaatgaaactccgtctcaaaaaaaaaaaaaaagtgggtcaatttcgtaacagttttattttgggacacaccctgtgaagccttgtggtttggaatttaagaaacgtgagtttccgggaattggacaaaccatttgtgttacccagctgtgtccggggctattggaagaagattcacattttccggcgcattccactttgttggcagtccaagttccttcttagttgcaaggcaattagaaattattaaagaatttattaatgcacggttgactacatttttatgggagggtgcctcaaggcaaagattagttgaattttattattgacggggtgtgaacggtattttccttaacctactaatagataggttaaggttaataacttggcattttaataatggagctttctcattctgtcaaatggctatggttttctttaaagttgtttccaatttctagatttatccaccttggtttttttttatgtggtttacaacccattaagtttgtaattatgggtgtaaagagtccagtcatgggctgggtcaatttacccttttggagagtccacagtggtacgtcagagtggttacggtcttcctctagtactaccagtttcataattgtttactctttatgtaattggtcctctagagggcagatcatcggttataggggttttgaaccagagttttgaaggtatttaaacatacgttatataa

SEQ ID NO: 556605 - DNA, 114 bp, Homo sapiens
cctggggggcctgttgcgggggcggggcgggcccgttgcctttggcggctcctggggggctgtggccatgcggtccccctcggttcgtgctgcaataagggccttcttctctta

SEQ ID NO: 556606 - DNA, 415 bp, Homo sapiens
gaatacacagacacatagacgccgcttgtcatagatagttctggtacaaagaaaactaacctgtgtgatagaattcctatcaatggctgccatctatcgtgagtgaaaggaactgtctgagcaggtttactagagaaccttctggggtgatggatatattcttaagcttgactggagttgtggttacatggtgtatctcaatttatcaaaactccactgaattgtactatttaatgtaggaacatcttattgtacattaattacaccctctattatgttcgttttaaaacatattagatacatcagctggaaatcacttggttttaacaaaaaattttctctgtgatcttatttattctagcacttatcttcttgtcttctatagcaatgcaatacttcactaatgttagagata

SEQ ID NO: 556607 - DNA, 379 bp, Homo sapiens
  misc_feature (89)..(89): n is a, c, g, or t
cccccccccccccgggcttcctgctccttagcaagggggcagctttttcctgttttgggtgttacccttggacactccagctcggggantgtgggggggtgagggggcaaattcccctgtgtggtcgaccctaaaaactgtggcttggaagtgatgctccatgggacgacgactttgctttttttccttttagggggggggggatttgtagatcccccccgcctatgtaatgtaaaaaatggccctttaatttattgctatgggagccccttgtatttgttaatggcccaacccaattttaaaaggttgcccaatgtatattttgttgcttaaatgggtttttgcagaaattgccaataaataacatattttgggtcca

SEQ ID NO: 556608 - DNA, 412 bp, Homo sapiens
  misc_feature (62)..(62): n is a, c, g, or t
  misc_feature (102)..(102): n is a, c, g, or t
  misc_feature (152)..(152): n is a, c, g, or t
  misc_feature (156)..(156): n is a, c, g, or t
  misc_feature (337)..(337): n is a, c, g, or t
agtcttacgtgaaatatcctttgaattgaagcagaggaagttagacacagacacaccatganctccggattcatcaactgcagtgagagtaatggtgggacnagtgagccagtgtctgtggacaaagtcgggaccttttttcgatatgcagnaccngataaaaatcatcttcctctacgattggcagcccagcagcagaacaaatattatacatccccaggtttatttctcttcactcccaccagtgcgggtggtctttgcagtgactatggaaggcagtgcacggaaagtcatcactgtccggtcagccctcattgtgaggaacagacttgagacnccaatggaactaagactggatagcccatcagctccagacagtatgttttgattgtctagcatatagtaaatgctg

SEQ ID NO: 556609 - DNA, 266 bp, Homo sapiens
ctcacttatatgtcaggctaccaaattttgtgttgctttattgcactttacagatactatttattacacactgaaggttggtggcaaccctgtgtcgaggaagtcttgcagtgccgtctttctaacagcatatgctcacttcgtgtctctgtgttacatttcggtaacagtattttagatgttttcattattatcatatctgttatagcgatcagtgatctttgatgttactcttgtaattgcttacaacctcactgatagaagag

SEQ ID NO: 556610 - DNA, 358 bp, Homo sapiens
aattttaagtaggaaagtccccccaacccttttgctttcccttaagtgtttgggccgccatactgtaggaaccagccaggtcctggtactgtgatattttaaatatcccccgcactccctttttcccaatgatcctagtaaatgcctaaaaatatctttctcttacctgttatttatccatttttccccgcatttttatccggaaaaaattgtattgcaaacccttagtaccccggtgataaaaggcatttggtataattatggtgggtgattattttttaacccgtatgggcccaagctttacctctgtggaaaggccaccgttttaataaaagatttcccttcccccaaaaaaaaa

SEQ ID NO: 556611 - DNA, 93 bp, Homo sapiens
gatttggccctgaattactatggttcggggagtcctcatctacagggtgcttttgatgtctggggccaagggacaatggtcaccgtctcttca

SEQ ID NO: 556612 - DNA, 315 bp, Homo sapiens
agaggacccgcgtgtgtcttgcagatctgtgacgttacccccaaacctgtgctctctgaaacatgtgctgtgtcactcagggttaaatggattaagggtggtgcaagatgtgctttgttaaacagatgcttgaaggcagcatgctcgttaagagtcatcaccactccctaatctcaagtacccaggtacacaaacactgcggaaggcctcagggtcctctgcctaggaaaaccagagacctttgttcacttgtttatctgctgaccttccctccacatatgaccctgccaaatccctctctgcaaggaacccacg

SEQ ID NO: 556613 - DNA, 1090 bp, Homo sapiens
  misc_feature (582)..(582): n is a, c, g, or t
aatacatttcctgattttaaagtattctatttttaaatatatcttcacattcctgtagtaaaagactgcaaaaaaaaaaaaaaaaaaacaaaaaaaacggtgttaaaaaaatggaaaaacatgacccggtttggaattgggagtggggatgaaggaccggggacgggttcccggcccaataaaagtctggcccctttttaaagggtcccgttttggggctccttggttttttcccctttgattaccccaccgggtacaaactttgggtttgggtcacaccccggaaattttagtttcctccactgtgggaatcctggctttggaaagagataaatcccttcaatggtactcctggcattgttctaaccccatcctggggggtttaatctaatggcaagaccagactttcattctcctgggtggcatcctccttttcatggtgtcttcaattccgcaacctttttggttcaccttgggaacctcttctcggaattggtgcggctaaaataggatcacctgtggtgcaccctctttaggtacaaaggccttttgccacagacaacttggcacctctaccttctngcctctctatttgaaaacattcccgggaaagggatgctctccaacggggaagagtgaccctccttccctgggaaatctggagggtatttttcaccagacttcggcggaacttctggcgcgcttaaaaattcctccctctccttgtccttaccacaggcacatttcgcaacatgggcatcccccactctttgaagaaccggtcaaacctttaagaaatacggcttaatacctccttattatggctgttaaacccccataatgtttgttctgaaccttccttcacagatgtccagggcctgcaacacacctttctacactcgacacacacatcacaaacacaaagggggggcctgaatatcccgggccaatatactctcccctttgtaaagtcccatagcgcataaaacagccggccctacaccgatggaacacgcgtgtcaaccctctgcgcatcgaccccacactcagataatctcgtgccctgccgtcttatcatgtcacacctctc

SEQ ID NO: 556614 - DNA, 306 bp, Homo sapiens
  misc_feature (155)..(155): n is a, c, g, or t
  misc_feature (268)..(268): n is a, c, g, or t
  misc_feature (297)..(297): n is a, c, g, or t
ctacaggaccctttatgttataagtatgttgaaattaaaggtattgggctgggcctggtggctcatgcctgtaatcccagcactttgggaggctgacatggcaggattgcctgagcccagcagttcatgactaagcaacatatggcagattcttngtctatataaacaaagtaaacaaattaacgtgggtgtggacagtgcattacttctcagtcccaagtccactggcagaggctacggacagccacgtggcgaggctatggacagnccactgtgcgacggctaggacgggtactncgagctcga

SEQ ID NO: 556615 - DNA, 423 bp, Homo sapiens
aaaacaaagaaataaaaaaaaaggttaagcctttcttctggtacgggggaattccccagctagtctttccagtaattaatcctactttttctaattccccatctctgccatgggccatccagtggatgagggcttcctggtaattttaactagtacagcttaatatagcatttcccaatagtttgtccaccggtagaaataagtaatggcttttctgggactcatttgggataacctcatttccacagggagtgctggccataaaactaagcatatctattgggtagatagagcagagagggcaagcacagaggggaccctctctctctaacacccttcagaattatggggacgctccataatgggcggggaatctggcggagcaccagcaggggtcccgagctcgaaatccgaactcagggc

SEQ ID NO: 556616 - DNA, 165 bp, Homo sapiens
ctctcactacagtcttcggggtaaattttagtttatctgatataaggatggctacccctgctttcttttgaggaccatttgaatggtaaatggttctccaaccttttattttcaggctgtaggtgtccttctgtctaaaatgagtctcttgtagacagcaaatag

SEQ ID NO: 556617 - DNA, 779 bp, Homo sapiens
gggccctagcaggactctggcttagtgagagtctctgtttcccccttttctttctttccacccaataaaaccgggtcttactcatcattcaaatgtctgcgagcctgaattttgtggccgtgggacaaagaaccccgtctttaacggaactaaggaaaagccctgcaaacaatttgggcgcgcaacgtggggacttgagaagcgactcgctctgtcacccaggctgaagtgcaatggcacgatctcagctcactgcaaccttcaccacccgagttcaagggattctcccaccttagcctcaaagtaacctgagattccagatggcccattgttcattaactcaagggctctaaaagggccttggaaggtttagttaaaccaagttgaaccaccggtaacatacaacgcaaattagaagcagaaacgccgcgaccggcaagtgagtaccacaaaacgcccacaaaatgtgggggcccaaggggacccacgggaacggggacaaagggcaaataaacaaggtaagagagacatacacgcacgcggcaacaacactcataacgaagagaacgaggccccaccacgcgaacgggcacaacccaacacaatgggccacaatgggggacaaaacacagaagcacaaagaagacgtccccacaaaaacaggaacacacaaaacaaaacaaaggccgccgcccgcccacgagcacaacaatccaacgggcgggcgccgaaagcgacacgcacccgacacccaacgagccggacggaaacacaccaca

SEQ ID NO: 556618 - DNA, 233 bp, Homo sapiens
agaagctcccacctggcccggaccctcctccctcctccctcctctggcggggttaaaatctggattgaaaaagcaagtcggggtttgttggcctctcaaaaagtggagcataggccgggtgcggtggctcacgcctgtaacgccagcactttgggaggtcaaggtggcggatcacctgaggtcagaagtttgagaccagcctggccaacatggtgaaaccccatctccactaa

SEQ ID NO: 556619 - DNA, 195 bp, Homo sapiens
gacgtaatgtgtgcgtagtctgcatgcacataactaatgaaagcagaactatgccactggcttctgggtgagtaggggaaaggaactgcccttctttgctgagtactcatcaggtgctatgttcagtgccaggcatttcatgttcaacatctcatttactctgtgaagactcataactgtaaattctcctcaaca

SEQ ID NO: 556620 - DNA, 1277 bp, Homo sapiens
  misc_feature (615)..(615): n is a, c, g, or t
gtttgtattgtcggtagcgatgtatgtcgcgtcttcgcgttttcccggcgctgcccagcgtgttgtgtgtgcccgtccgtcctcttataagtgccgccccacctgtgtgtccgataggtccccccccccccctccgccggctgggggggctccccacatagtgtggtccctttcgctcgcccgccgcagggttagtacgttctggttggaagatcgctgttggcgacggcgctctagtttggggtatggttatatatcccggccgcctgctgcgcctgccggttcctagttggttcgttgcctggtactctccccccccgtgtgccccagtgagaccccccgtcttttgggtcctcttgctaccgcccgccctgtgtgcccccgtggggtgaacgttgaattccgcccctttattttgttagcccctattaagaatttttattaacaactcaacgaccgttcacacaacgtctttgccgccttttatctggcaccccatatacaccgcccggtagacgcgttttgaaatattcctcgcctttcccaatatcggcgaaataacactccgtgtcccaagattcgacaacgccccacaaatataggcccccccttctntgtgaatgtgtacacccaccccccattttcttccatacccctataacctcgcccctttggagaagcgtcttccaacccggcgcccaaagtcccattttctccataaagatttccgcccctccccggacattttacaatcctcccatatacattatatttctcgcgctttacgccaacatcccaaatctatctcgcaaacgccactcttcaccacttttcgccactcactaaatgccttcttctcacaggaaactctcccaaaacttttaactcccaccttaatagacttttttgtaatgaactcttctagccacagaccctcgcctataacctccccttatccccccacctatttaacacctatctgggagaaacttcttctgtgttatgtaaccaccgcttttcctgattcacaaatattcacctttcctaacttaccacggaactcacacacacatatctatgtcacacgccctatactccctttaacatatttaccacccaacacacacatggggctcaactcacccacccaccacttaccacacattaaacccctcacttcaccaccgagaaaaacacccctcaatgttcatacaccctatcccccattttcctcctatccctcaaccccgacaatcattaccgggttttcctcttta

SEQ ID NO: 556621 - DNA, 164 bp, Homo sapiens
accgctttcctgattccacttcctgcttcccccttaccacatggaaatgtgcacacccactcacactcactctctctcacactgatcagcaaagtattgacattcacactcagcactgattctcactccagatactccatttacaggggatcctctcagagtcg

SEQ ID NO: 556622 - DNA, 692 bp, Homo sapiens
  misc_feature (692)..(692): n is a, c, g, or t
agcggagcggcctgcttgtcccggaccgcgggctacgtgatcgtgagctccgtgtcttgggccgtcaccaacgaggtggacagaggagctggacagatgccatccactgaggaggcatatgcccagacgctgcatagaggattcagggcagacatctggcagacaaagcttttctccgagcatcatgcccacaaggaggacgcagcaccatgaggaccccgaggcgggcgccgcacacgggccaggcagaacccaccggaccacacaggagatgatactccgtacacggcgacgaggcgcaggccacagacggccaagatgcagacacccacgagggcaccataagaacatgtcgcagcctgtgcccacacgacacagcaatcccccatgagccacaactgcccaagacagtcaatgctgagtggatatagcaccttgggtccactaaaccaggttaggttcccgacaacccaacgcatatgcaacgcaaatacctaacacggaactattggccccaagtataatgccgtggacaaccattagcaacaatagccaccgtcgttcaatggttggattttgtggcccccacattttcacaacacccacagttacaggccacattggggaattattcacgatatttatcattcctaaacaagttgcaaaccagacacaacaggggaaacgcaacn

SEQ ID NO: 556623 - DNA, 949 bp, Homo sapiens
  misc_feature (50)..(50): n is a, c, g, or t
  misc_feature (76)..(76): n is a, c, g, or t
  misc_feature (78)..(78): n is a, c, g, or t
  misc_feature (93)..(93): n is a, c, g, or t
  misc_feature (140)..(140): n is a, c, g, or t
  misc_feature (144)..(144): n is a, c, g, or t
  misc_feature (146)..(146): n is a, c, g, or t
  misc_feature (188)..(188): n is a, c, g, or t
  misc_feature (200)..(200): n is a, c, g, or t
  misc_feature (246)..(246): n is a, c, g, or t
  misc_feature (293)..(293): n is a, c, g, or t
  misc_feature (297)..(297): n is a, c, g, or t
  misc_feature (301)..(302): n is a, c, g, or t
  misc_feature (304)..(304): n is a, c, g, or t
  misc_feature (307)..(307): n is a, c, g, or t
  misc_feature (314)..(314): n is a, c, g, or t
  misc_feature (320)..(320): n is a, c, g, or t
  misc_feature (333)..(333): n is a, c, g, or t
  misc_feature (335)..(336): n is a, c, g, or t
  misc_feature (352)..(352): n is a, c, g, or t
  misc_feature (393)..(393): n is a, c, g, or t
  misc_feature (406)..(406): n is a, c, g, or t
  misc_feature (419)..(419): n is a, c, g, or t
  misc_feature (424)..(424): n is a, c, g, or t
  misc_feature (431)..(431): n is a, c, g, or t
  misc_feature (433)..(433): n is a, c, g, or t
  misc_feature (439)..(439): n is a, c, g, or t
  misc_feature (441)..(441): n is a, c, g, or t
  misc_feature (454)..(455): n is a, c, g, or t
  misc_feature (460)..(460): n is a, c, g, or t
  misc_feature (466)..(466): n is a, c, g, or t
  misc_feature (472)..(472): n is a, c, g, or t
  misc_feature (480)..(481): n is a, c, g, or t
  misc_feature (484)..(484): n is a, c, g, or t
  misc_feature (487)..(487): n is a, c, g, or t
  misc_feature (510)..(511): n is a, c, g, or t
  misc_feature (513)..(513): n is a, c, g, or t
  misc_feature (516)..(516): n is a, c, g, or t
  misc_feature (536)..(536): n is a, c, g, or t
  misc_feature (540)..(540): n is a, c, g, or t
  misc_feature (551)..(551): n is a, c, g, or t
  misc_feature (554)..(555): n is a, c, g, or t
  misc_feature (557)..(558): n is a, c, g, or t
  misc_feature (560)..(563): n is a, c, g, or t
  misc_feature (582)..(582): n is a, c, g, or t
  misc_feature (618)..(619): n is a, c, g, or t
  misc_feature (638)..(638): n is a, c, g, or t
  misc_feature (687)..(687): n is a, c, g, or t
  misc_feature (704)..(705): n is a, c, g, or t
  misc_feature (708)..(708): n is a, c, g, or t
  misc_feature (711)..(711): n is a, c, g, or t
  misc_feature (717)..(717): n is a, c, g, or t
  misc_feature (719)..(719): n is a, c, g, or t
  misc_feature (721)..(722): n is a, c, g, or t
  misc_feature (728)..(728): n is a, c, g, or t
  misc_feature (731)..(731): n is a, c, g, or t
  misc_feature (738)..(738): n is a, c, g, or t
  misc_feature (753)..(753): n is a, c, g, or t
  misc_feature (793)..(793): n is a, c, g, or t
  misc_feature (818)..(818): n is a, c, g, or t
  misc_feature (821)..(821): n is a, c, g, or t
  misc_feature (833)..(833): n is a, c, g, or t
  misc_feature (835)..(835): n is a, c, g, or t
  misc_feature (839)..(839): n is a, c, g, or t
  misc_feature (845)..(845): n is a, c, g, or t
  misc_feature (871)..(873): n is a, c, g, or t
  misc_feature (879)..(880): n is a, c, g, or t
  misc_feature (931)..(931): n is a, c, g, or t
tttcagcaaagttattgcaacacgatgaaaatgcagacacactattacangctgtaaagtaacatatgagttttananaattaaaatattaanacatacttatgggatttgttgaatgactaacagacccataaaagcanattnantgctgagagcgaacatgccacgtattagcacctaacaatatnctcctcgatcangttgaaacttttgagatgggtttactctctcctaatgtatttttanaacctctctcccaaatacagcgctctcacaccccaaggctaaccggncggngtgnncngcnccgatcntagggncgtcccgccaaangnngagctacaaatatggnctcagacttgagagttttactgagaagtaacttactgtacntgagccaatcatnagatttctgtgcnctgantactgtntntgagancnttctgtgggtcannaggtntgcctnaggganagttaacnnttngtnatatacagtattattcctatccnntngcntctcatgagtcatatttatnacanaactataattnggnngnntnnnntgcctgcttattccatatngagggacacagcgggaacatttgtgtgtctgatggnntggcatccactttattgtncttactgatttttgtgatgaacaagcagcacgtatcatatctttccaanattcaaggttatggaannatnacntaaaantntnnataganatntatgganattgaattaaataangatttaattaggaataattgatataataaaaaaaataaanttataaatttttttttaaattagantangtttgggggtangnattnttgatnaagatattaagatttgagtaatggtnnnaaagtnnttatttgaaatatgggtggtgaaaaagaagaaaaagaaataaataaaaatnttatggggttaaaatttt

SEQ ID NO: 556624 - DNA, 348 bp, Homo sapiens
  misc_feature (43)..(43): n is a, c, g, or t
  misc_feature (78)..(78): n is a, c, g, or t
  misc_feature (107)..(107): n is a, c, g, or t
  misc_feature (143)..(143): n is a, c, g, or t
  misc_feature (233)..(233): n is a, c, g, or t
cttgggtctgctctttgaagacatgctgctgaatcaaaattanggatgcttggagggcctggcgtgattgtcacgccntgtaatccccagcacgctaggagagaggncggaagaattgcttaagcctaggagtttgaaaccancctgggcagtatagcaagccctgtctatacttaaacaaaaaatacagccaggcatcgtgcacatgcctgtagtcccaactactctggagnctgaggcaggaggaccactcgagcccagaagctcaaggcgtgcagtgagccatgatcacacgactgtacctccagattgggcaactgagtgggagacctgtctcaaaaaaaaaaa

SEQ ID NO: 556625 - DNA, 208 bp, Homo sapiens
ctaccccactcaggctgggcatggaggggcagcgtaggtctggcagcggttgtgtgcaggctaggtgcgtgaagatctcaggacatggtgtccacgagcatctccagcccaggttgctcggttatatccactgtgtagtcattcgccagctgcagggaggccagcattgacgcgacacacctcgaggccggctcgagccaccagtccg

SEQ ID NO: 556626 - DNA, 391 bp, Homo sapiens
tggtagggacaaattctccacttgataaccctttatggagcatttcctggagcttatggcaaaagcctgtgggcccctcccagcaacaaccactgggactttggactaaagaatttccacttgaagggcatttactgactcgcaatgaaacatttactgaagcccccccactgaaacctgaaataggcatgctgtttcagatgatgtcaaaggaacattttaatggggatggcagggcccagaagagttccatgacccaatggaaatggtttataaaggatcatgctactcaaggcatgcaaagaattttttttcccctaggactgactttggaactgtgtgagaaactgttggattttacagggccaaataaacaactttcccctgccca

SEQ ID NO: 556627 - DNA, 150 bp, Homo sapiens
tttgcacgtgggtgttgcacctcacgtgtctcgtgtcgcacaagcatgtgtaggtgtcctgctgagctctttggtgggcggcagtgatcctcgaggtcacgcatgtcttctgcgggcacagacacccacatgcagacacccacgtgcaga

SEQ ID NO: 556628 - DNA, 325 bp, Homo sapiens
ggtaagtacactaatgctcaggcggggcacgctgctcgagcctgtctccagattgtgggtcctggccacgatcgacagcctaaaagcgcagcacgtccaggtgcgctgagcacatcatccgcatcacggaaccccaggccgatacacggccgcccgtttctcccggggctgcgtctcttccacgaagcacaacatgaacagcaggtcctaggcatgccgttgcaccgccggccagcacgcgagctcccgggtcatgcaacgtatagccgtgcagagcgctgacgttccctttgctgatcccccctatcaggctggaggccacgaa

SEQ ID NO: 556629 - DNA, 1568 bp, Homo sapiens
  misc_feature (1518)..(1518): n is a, c, g, or t
  misc_feature (1568)..(1568): n is a, c, g, or t
gtgtcccaggtgattcggacattgtactgtactggaggtgatgggcagggctgtgggatttcatgaacactcgtaactggagaagaggaagagatgtgatagcaaagtattctaagtgagagttaagtcaggaacgagtggaaggttctgcatgaggggagtcataagggagattggagaaaggtactgtacgaggttagtgctgtttaattcaacgcatgtgatgcatataattctgccgtataattcgggcattaagagtagaattttggaaaagagcattgttctaatattgcaaattgttcatatcataagtgtctaaacttagagacactggtcctgggctaaagtccaccatttcaaaggcccttgttaagcaagtttcatgtccagtgagtcgcatatcgcacgacagtccactcccgcgaggggcacatcagaccctattcttaacacgtgttccatttggcagcaccgctaggcaaaacgcaaacggacgaaagacggggatacttgaactcagactcacctttagggcgtaaggctacacgccaggattttaaaattttcaaggggtagggcctctgtgacggtttctcacggaggtttggcaaggaggtccattaacagataaccgacgtttcgaatcctttcatcggggcggcgtggataccacactctcttgtggtggggtctgctacggcctacactttggtcgggacttcccttccttaggtccacaccttctgtgcggccgttacaggcggaggaggtatgtacgtagaaagccggtcttaacctatatcacgggcgctgtaacaacgcgtaccgtctccactgtcgtgtctcgcataatcggaagacctcgtacttggcgttacagttaacttccgaaccggcgttccataataggcgacgggaaacacccgacaagtttgtggctccaattaacactgtggtagcggcttcgaagacgcgttcataactatccttgtagccacttatggttaatacccctacgggagggatgaatcgtgaatgcagacctctgagtaatttgtgcctccagggcaacgggccgctacaccacgacacacgtgtttgtggccgccacgaaattggcacataagggggcggcatatctccgctgaaacagatcatgtgggaaggccacatatgtgtaggttccataataatccgatgtggggcagagccccctattattttcaacggaacgagactttgtgtctacattatgggatggtgcagaaacccgttttttcccctgggaacgggcacagacaaaatcggtctcattccacgaggcgacactggttttggggtgtcatcgttggagggaaaccatcgctttaagcaaaagcggcaccaacgagccagtctaacagcagcgtgtcatcacgacgactctcccgacgaaagggtgtgcgcgatcgcaagcgcttagatgctggtcgcgaacaacatgcgtgcagcacatactgtcgcggtatgttgcgnccagccaatacttacgcgacggcgaacatcgaagaagtgttttgtctgcn

SEQ ID NO: 556630 - DNA, 1060 bp, Homo sapiens
cattagtagaagattattctcaaaatgttgctgtgcgcctaggacatatggcatgcatgttagaaaatgaatgtgaagaccccagccaggagactattcacgttcctactataaattgcatctaaggtgattcttggtcctaaaagctcatggctttaatgcagcaaggcttgctaatctcccagaggaagttattcaaacagggacatagaaaagcacatgagaattctgacgagctgatgaatcagtcactacgattatcttcgggaagtttgcctggctagtgacaaggtcaactgtagatgctgaagctgtccatatattgctgactttgattccggcattcaatagactgactacacttggaacgctttgagcttgactctctgacaccggtggtagatattcaggacaacatcagtgatctagttaacaactttaactcctcgttagacaagactgcaactaaataacataagaatccacgggggaccaacaaccacttctgccgcccactccttgctccaccctcggactctcttatattaccaatctaaattgtactcgaggctcagtccccaccacacgattccgaaggattgagacaacgagtgcaaccaaaccggttttcctacgggaacagaaacacagccggagcgcacatcagatgacggacactagcgatttccaccacgcgggcttatctaataccccaccacaggcatgtacaccacacaggcaccatgataccataaaacacgcaacgaggtaccccccttgcacgaaagcgaccggtttaccaagagaactgccacaaacccaccgggggaactaaccaaccaaccacgccgggaccgaagccacagcgaaagaagagaagcacgacccgcagcaacgagttagatacaattacactatcgcagacccacacgacagccaccgaagcagtagagacacacaacaaccactgacacgcaacacacaccacataccacgtcgcaacaccacagaaacgactagccaggaccacgacgaaaacaccgacataagagcagcacag

SEQ ID NO: 556631 - DNA, 170 bp, Homo sapiens
accggtctgcatgcgctgagcagcacagcgccattacggaggcaacaatcatttttaaagaggcagggcgggacgcaatcatgtatttcctttgggattggacatagacaagctgaatgcagaacgggtgggtttgtgaatgaaaagcctgtaaaaggcgaattgcacaa

SEQ ID NO: 556632 - DNA, 270 bp, Homo sapiens
  misc_feature (213)..(213): n is a, c, g, or t
agcggcgtgccttctggctcagcagtctctcgcttagctcttgagtgggtggacgaagaagtgtgtgcgcagtgctggctaattttgtgtttttgtggagatggggttttgccgtgttgccctgtgctggtctcgaacccctgggctcaagcaattgatgtgccttggcctcccaaagtgctgtgattataagtgatagccactgcgcccggncagaacatttttataaacccagtgccaagctgagagtctgtccatgggtaccgagct

SEQ ID NO: 556633 - DNA, 399 bp, Homo sapiens
agtactacacggactctggtgttgttgcatctctgcccagctgggcgatcctcttcgcaagcgtccactttacaccctctgtgttcttgctccatcaccatctggtccagcacatgggcatcagccagtcctcaacacttgcagtcattctcatggggcaccagccggtttccgatcctcttgatcccgttctcccggagctccttccccctgcaggctcaactcgcccaagtcatgtgggcgcccaggcactttgcatgaggtcttcctcctatgcctgcccagcttgtggtccaccacatcagtcccaccatgtctgttgctgccataaggtcagcgcaatggtctccatggcatgccttgcaccttgcattgcagggttgggcttgtattatcccc

SEQ ID NO: 556634 - DNA, 404 bp, Homo sapiens
gtcagggagtggtgcggcgctgcgaacaaggtggtcgattgcgccatcacctggttcgctgtcgggctattcggccaagtggtacgaagtctcgaccacctggtggcgctgccgatcaactggaaccagcagatccacgccgtcaaccagaaggcctgggacaaagctcgatacgaacgtgcgcacccctggggtttctgggtatcccgagttccactctactgtaactttaattgctctgtgataggtagctaccttggggaaggattagtgaagaccggttatggtcaaggtgaaactcttgcctcgtccactccggcccacaaatctcagatcgttgaaccttgctacttggtatttcataacagcagaggcattccggagctcagcagacataattttca

SEQ ID NO: 556635 - DNA, 804 bp, Homo sapiens
cggggactcgccaagcggcgagtaagaggaaggccccaaggagccaggtagatcctccgggccacgcaagtaaaggactgctggcaagggcgcaggagatggccatacccccagttggtgcggggccataatccaagggggccgtgtcccgcggtgcatgcccgccccgatgacctacaggcgccccgacacgtaccgcaaccacatgccgggccagtccgccctaacatgcgcggcgccccgtggtatgatccgcgcacgcaggccaggaccttgcacgctggccagatcccatccaggggccaggcccccgcagcagcattacggccaggacagatgccccgcatgcccagcgctcattcatgagaatgccacacggagagtcacatctgtgttcctgcaccaacctgcacaagaggagaccaaacgagctcatgcatgtccatagctttatcaatcagttccctggtcttcaaggaggtccgtctggtacccgggcggcatagacatcgccttcgtggagtttagacaatgagagtacaggacaggggcagcatcgcgatgccctgcagggcatttaagatcacgcagaacaacgccatgaagatctcctttgccaagaagtagcaccgttttcccacatcgcttgccaccttcccaatgttctggggccacgcacgctttcccccattggctcagccctcctgaaggtaagtcccaccttgggggccttcttggagccgtgtgtagagtgagtggtcgcaacacagcattgtacccagagtaagtccccgggacatgcac

SEQ ID NO: 556636 - DNA, 212 bp, Homo sapiens
tcctttctttctggttgaggtagggctcttaaggtacagaactccacaaaccttccaaatctggaggagggccccatacattacacttcctcccttgctcggcggtggattgcgaggcccgtccttcgacttctgaggctggatttttaactgtccagactttcctccaactcatgggcgccacgggtgtggcgctggcagtctcagcctcc

SEQ ID NO: 556637 - DNA, 343 bp, Homo sapiens
  misc_feature (295)..(295): n is a, c, g, or t
agacagaatgcaaacaactttgttagaatacttgttagaagggccgggcgcagtggctcacgcctataatcccagcgtttggggaggccaaggcaggcggatcacctgagatcaggagtttgagaccgccagcctggccaacatggcgaaaccccgtctctaaaaatacaaaaattagccagggcatggtggcacatgctgttggtcccagctacttcaggaggcttgaggcaggagaattgctttgaacctggggaggcggaggtttgcagttgagtttgagattcattgccantgcactttcagccggggttaacaggagcaagattttttgccttaaaaa

SEQ ID NO: 556638 - DNA, 1202 bp, Homo sapiens
  misc_feature (50)..(50): n is a, c, g, or t
  misc_feature (75)..(75): n is a, c, g, or t
  misc_feature (241)..(241): n is a, c, g, or t
  misc_feature (249)..(249): n is a, c, g, or t
  misc_feature (488)..(488): n is a, c, g, or t
  misc_feature (584)..(584): n is a, c, g, or t
gcggcgagtgggggcgtgcgacggttactctggttactggggccgcgcgnctggcgagacgccagcccgcgagantgcatggtgaggaagccgtcgggagccgccgccgccatctgagggaggtacctggaaaccaccttttatcggtggggaagtgcagtcgcggtgggggctctgggggcagcgaacggaggcctctaatctttaggtggggcccttttggggcccaaccttttggggncccccccncctgagaagccgcactcttgagtccgaggccatcttttgttggagaaggcgtcggcgttggcgttttcccgaggttgggctgtacagtgtctccgtccgcggaaaaagaagcctctgaacccgcgccggcccgcagcccccgtgccttccggccgctgctcgccgtcgccagaggctaggccacgtttcccccagtgccgaggtgtttctgtgaccctccctccactcccattcccttntgaaagggcacctgctcttggtgagaaaagaaattatagcacgaagagccagtatcagaagagtatccatcacccgcagcaaccgctcagggaacnccatcaatcacacgacaacacctgggacatatctggatttcctggtgctgacggagtgatgcgagtcttgctcgtggagctgtatccagcaggcgattttacaatacttgctttctaatgccctatacaacttggcttcacatacttttacactaactttatatgatttttaaaaactggtctgattctggacttctcgtcccttgggacactgttaactggagtctggcctggctctccgttgctcctcttggtacctcatatcggggacgaaccttatacccactcgagcacataatctccgcttgaccggtgcaccaaagaagccttggaccatgtggacttttctgggcattgcccactttcacctatttatacagaagtcggggacttcatcacttgcgccaacagggaggtcctgtctgtgcgtgctggtgttcctctcgcctgggcctggtgctctccctacctgttgtctgccaccgacaacgggggtgtctccatcggggcagacaagcagacgcggtcccaagttacgccatcttcatcggatatactctcaggcctgcctttcatggcctctcctgtgccacatccccctgaatcgaacctagtcaa

SEQ ID NO: 556639 - DNA, 1161 bp, Homo sapiens
  misc_feature (50)..(50): n is a, c, g, or t
  misc_feature (75)..(75): n is a, c, g, or t
  misc_feature (447)..(447): n is a, c, g, or t
  misc_feature (543)..(543): n is a, c, g, or t
gcggcgagtgggggcgtgcgacggttactctggttactggggccgcgcgnctggcgagacgccagcccgcgagantgcatggtgaggaagccgtcgggagccgccgccgccatctgagggaggtacctggaaaccaccttttatcggtggggaagtgcagtcgcggtgggggctctgggggcagcgaacggaggcctctaatctttaggtggggcagccgcactcttgagtccgaggccatcttttgttggagaaggcgtcggcgttggcgttttcccgaggttgggctgtacagtgtctccgtccgcggaaaaagaagcctctgaacccgcgccggcccgcagcccccgtgccttccggccgctgctcgccgtcgccagaggctaggccacgtttcccccagtgccgaggtgtttctgtgaccctccctccactcccattcccttntgaaagggcacctgctcttggtgagaaaagaaattatagcacgaagagccagtatcagaagagtatccatcacccgcagcaaccgctcagggaacnccatcaatcacacgacaacacctgggacatatctggatttcctggtgctgacggagtgatgcgagtcttgctcgtggagctgtatccagcaggcgattttacaatacttgctttctaatgccctatacaacttggcttcacatacttttacactaactttatatgatttttaaaaactggtctgattctggacttctcgtcccttgggacactgttaactggagtctggcctggctctccgttgctcctcttggtacctcatatcggggacgaaccttatacccactcgagcacataatctccgcttgaccggtgcaccaaagaagccttggaccatgtggacttttctgggcattgcccactttcacctatttatacagaagtcggggacttcatcacttgcgccaacagggaggtcctgtctgtgcgtgctggtgttcctctcgcctgggcctggtgctctccctacctgttgtctgccaccgacaacgggggtgtctccatcggggcagacaagcagacgcggtcccaagttacgccatcttcatcggatatactctcaggcctgcctttcatggcctctcctgtgccacatccccctgaatcgaacctagtcaa

SEQ ID NO: 556640 - DNA, 487 bp, Homo sapiens
ggaatagtgggacatctctgtactaactgtccctgtttcgctctgtcacatagacactactctacaacaaattcagtctacttataaaaaagaaaacaatgtactattactagatgcaaaattattacttcaaagaaatctaggtaaaaagaaagactatcttaatataattaggggagggacaggggagacaaggcctctctctgtcgctacaggctggagtgcagtggtacaaacacagctcaaactacctgggttcaagtgatcctccacctcagtctcacacagtgctgggattacaaggtgtgaaacaccacaactggacaaattatattaatttatttatttatcttttatcgaaacagggtcttgctaatatgcccaggctagtctatagatcctgggctcaagcagtcaatcctctggacttgagccttccaagtagctgctactacagatagacaccacaatgcccaggtcagaatat

SEQ ID NO: 556641 - DNA, 483 bp, Homo sapiens
  misc_feature (107)..(107): n is a, c, g, or t
ttcgacgggttctgtagtagaatctcctgtttaacagtaaaatacctgtttaaatgtctatttgggcatgaatcgtaaatgatgcagaattacaggggcatcaccanggaacctagatatattgtttttgagacagggtctcactgtgttacccaggctggagtacagtgctgtgatcttggctcatggcaacccctccctcccaagtagctgggattacaggtgcaccaccacgcccagctaattttggtatttttagtagagacggggtttcgccatgtgggccgggctggttttgaactcctgacctcaggtgattcaccggcctcggctgttgaaagtgctacgattacaggcgtgagccaccacacccagcctaattttggtatttttatagagatgaggtttcaccatgttggccaggctggtctcacactcctgacctcgagtgatccacctgcctcggtctcccaaagtgctggg

SEQ ID NO: 556642 - DNA, 666 bp, Homo sapiens
cttcccaaagtgctgggattacaggcgtgagccaccagcgcccagacctaatggtaaaatatattttagaactaacaaaggtgctagtggtactatataaaggaaaaactaatatattatactaagtattatctagaataggtctagtggactataaatattaagaacactagtatatatatacagatttagtatatataatatagggaccataatacccatttatgggctaccagatagtaatatatagggtataaacctatacctactaaagaataacaaggggtacagacacagggtcagaaggcccagacaatagaccgaatattggtaacgggatataatactaaaccccaaagggccagattatagtaacagacttaactaacctttaaactcacgacacatttatggggcctaattaaaggcgccacacaagtgggcacaaccacactttgggccaacaacggaggatagagttgcggcaaagttaaccataatacttactcaacccgtagtacagcacgaaggtgaattaaagcgtacaaattgtagtacagtaggcgtagcagttaagctccccggggcctcttaacaccgcaggagcaggcacacttgggacacgagatttaaagggggcaaattagtacttctaaattagcatta

SEQ ID NO: 556643 - DNA, 130 bp, Homo sapiens
cgcgttgcgtgttctgtatcgctttcactgtaacacagcaagatgcattttagaatctttatattacagttttactccctattgcctttgtgtctaccagtgatatcttcacccgaaagtgaaaccagcg

SEQ ID NO: 556644 - DNA, 366 bp, Homo sapiens
  misc_feature (86)..(86): n is a, c, g, or t
  misc_feature (217)..(217): n is a, c, g, or t
cccaggcgcaagtggttctcctgcctcagcctccagactagctgagattacgggagcccaccaccatgcccagctaatttattttnattttttgtatttttagtggagacggggtttcaccattttggcagggtggtttcgaactcctgacctcgtgatccacctgcctcggcctcccaaagtgctgggattacaggcatgagccaccacaccccgnctaattcttagaacattttctatgccccccccaaaaaaaaaaacaacttatgaaaaataaagatgtgctggcttggttttatgaatgaattcttaataaaaggatacaacacagcttatttatttaaaggtcaactttctgtaatgcgg

SEQ ID NO: 556645 - DNA, 392 bp, Homo sapiens
  misc_feature (354)..(354): n is a, c, g, or t
taccattccttctgaaactattccaaacaatagaaaaagagggactcctccctgattcattttatgaggccagcatgatcctgataccacaacctggcagagacacaacaaaaaaagagaatttcaggccaatatccctgaagaacattgatgtgaaaatcctcaattaaatactgggcaaactgaatccagcagcacatcaaaaaaacttacccaccacgatcaagttgggctttcattactagggatggcaaggctagtttcaacattacacaaattcaattaaatattatttccaacacattaaacaggaacccaacaacaaaaaccactggattattcttcataggttgncggaaagggttttcgggttaaatttccaccacaccttt

SEQ ID NO: 556646 - DNA, 284 bp, Homo sapiens
tatagagaatccccaagactcgctaagacgggcagaaagacgacaaggctgcgcaagtacagagtggcatggccagcacctgcaccattgcaaccaaaatggggactacctgacaagggaggtcactccctctactcactgagctaggattagggagggacattgccccaaccatcgcaatgcgaggtgcagagacaggctcagcctcctcattgactaaaagacgcctaaatgtgcgaagagcgatgtctgctctagagtaccccaccaccccgtgtttcaca

SEQ ID NO: 556647 - DNA, 307 bp, Homo sapiens
gaattgtaaaacatcatagtgaagtttgcttgttgtaaaggcctgagaatttttttttcagttggttcttctgcaagggttgtgatacctgcaaaggatatgtaaaatctaatttttcttttttttttttttggcaacggtcttagagaattaggcttgcaagaattaggattaaggtgcacctgagtgaaaggttttttttaaaattttaatcattccctaagggttggaaccgggggaatgcgtacaaacgagttctcactccgggggggggacaccgagctcgaatccgcaactcagtggccaa

SEQ ID NO: 556648 - DNA, 354 bp, Homo sapiens
tctagagttacctagggcttagggaggcgaatgtcattaaggcagcaaagtaatctctgtagaaagatggaggaggaccctccatagcctcagagataaaggcaaagatttgcccctctcagtgtccagaaagggaaaatggcagcttttcttcccttccatgtgcagccactccaattgctacactccgggattacccttcatcccttatagtagataacgagtgcttgcagaagctcgaaaggccagagatatcgcttggtgtggggttaaaaagttcagcatattcccagcaggcagctggtgttcccctaaagaaccctagggtaacccgaggcttcgaaatttcggtaa

SEQ ID NO: 556649 - DNA, 421 bp, Homo sapiens
gcgctgtgcgaattttgcacgagatattttacactccccacaattctctgtgtgttgcgcacacacacttgtgtgacctctttgtgctctgtgtccatttgagtcccacaacacacttacacaattatttttcacaagcaaggttcacagatatccacgtttataaatctgtgaaggggcgctattaatgccaataggtaattatttttggaacattatacttgagcccaaatgatctctttttcccttagaatggccagacacccgtgcctcgggcttctctaacgggtctaccgggtggtccacacatcagaaagagaaaggttgtgctgtgcattggccacctgtcatgaattccttgagagagtatatatttaaggtgggaggtgactgcgataagtgccaagcacgagttatttct

SEQ ID NO: 556650 - DNA, 1224 bp, Homo sapiens
tcaaaaaaaaagagcgatcaaaaaaaaaaaagtgtgtgtatataaaaaaaagagggcgggggagcgcgggggggggacaccccccgcgcgcggcccccccacacccggggggggccgggggggaggggggctcactcgctcggaggaggaggagagagagaatatacaaaaacacgcgcgcgcgcgcaaacacggggggaaacacacccctctctctaaaaaaaaaaaaaaaaaaggcgggggggggggggggggcgacccgtgtgtatctcccaccacgctcgcgcggcggggtggtgagatgaggagatagagatatatatttcttctttcacgcgcgcggcggagtagagtaaatatgatgtgtgacagagggaggcccaaaatatgtattacccgcggcgggcacccacacgccccgcgcgcggggcgctcaacacgacagagacaacaacataatctgtgaacaaaaacaaaaacacaacaaacacaaaaaacacaacaaaaaagagagggggggggggcgcgccccccccaacacaaaaaacaccactccccgcgagggggggggagcgacgacgcaccccaacaatagcctcacaagacgagacccacacaaaacaacggtaatcactactcagagagcgcaacaacacacgggggggcggcccacccaacaacaaaaacgagacagcgcaccaaaacactatcatacaaaaacagaaaaacaggaacaactgcgggcgagcgccatactcttatataacacaaacacagcacccacgggagacgcgccggtcgcagaaacaccacccgcgcacgagcaacccaccgaggaggcagaaatccatcattcataaggaaaaaaggaagacaacacacacattatctacaggcgtggaggagggacggaatcgtactaacaaaacaattggcgagggacacaccacacaccccaccaccccaaagcaagcgaaatgaactcataccgatccgcctacaatacgaaagatagactaacaacaatacatcactgtccgcctacactggcggcgcctatccattttcgtccgcctctgaaacccaccaccctacgccgcacgcttcataatctacggagagaatcgcacaaacaacgatcaacaagtattgtcttcgatcccgacgcaggagtggacgatcaagttccatacgacacgaggcgaatttattatccacaggggg

SEQ ID NO: 556651 - DNA, 520 bp, Homo sapiens
aaccatagaagcctacctgtgacaggagagacaacaaggcgctaattatcctaaggtcaaaagaagagtcagcctcacctgatttatattagtaatagaggacatgacctcaactcccacttactggagtagcagcatccgaagtaatgcttgaagtacccctgggcctctctataacatttaagcaaacttgtttttatagcagctcttaataataaagcccaaatctcaagcggttgcttgaaggggagggacaaggggcacgcgggcaaccactttaccctagatattccagacgcctgttaaaagcaaggactccccacaagcaacttctctgccacatcgacacccaggtaccttatgatctatcacagaaccttcaaccctcacctaacgatgcagccagtagcttggtaccttgtgggcattgatccataaatcgtatcaaggtaacgataggtgtcaaagtctataatgagagtaaattgggccggagtaaccaaactcaaattcgtaatca

SEQ ID NO: 556652 - DNA, 290 bp, Homo sapiens
tgtgttgcccagactgatcatgaactgctgggttcaagcaatcctcccccacctcagcatcccaaagtgctgtcattacaggcatgagccaccatgtccagccttttctttttttaagtttccttgttagtagacaaggatagctttctttttctttttcttttttttgagacagtctcattctgtcaccaggctggagtgcagtggtgcgatcttggctcactgcaacctcggcctcccgggtttgagccattctcctgcctcagcctccctagtagctgggactacag

SEQ ID NO: 556653 - DNA, 106 bp, Homo sapiens
agacggactcccctggccagtacggctgtggagaggatcttaagggaggaggtggtgctgggagtggtttatcttgttttctcaccatgcaatggagaatgacttt

SEQ ID NO: 556654 - DNA, 554 bp, Homo sapiens
  misc_feature (145)..(145): n is a, c, g, or t
ggggccaagggttctctgtcctgggttcaccgtgatttggctttcccggtcctttcccgggaaaccctgtttggggttttgtgggtttgggtgggaagagggccctctccctaatgttaaccttctaactttcccaaggcccccngggcctggcttttgttagggggtggacaatgggggcccccctgtgccctcttttttttcccacaaggccccgggtgtttgggggggggttcagcccgccccccccccctgttttataaagggcccctttggccctttccaataaaaatggggggggggccccttggcccctggctttctgggtaaggggggcccccccaaaggttttctgggggtggatttgaatcttggggggggggggttgaaaccttttttgggcccccttgggcccccccccttttgtccccttttgggtgcccgggggcccccaaccaaaccccccgggcctgaaggtggtttttaatgggctttggggttttttttttgccccaaagtttttggggttttcccataaaattttttttgcccca

SEQ ID NO: 556655 - DNA, 786 bp, Homo sapiens
  misc_feature (5)..(5): n is a, c, g, or t
  misc_feature (16)..(17): n is a, c, g, or t
  misc_feature (19)..(19): n is a, c, g, or t
  misc_feature (21)..(21): n is a, c, g, or t
  misc_feature (23)..(23): n is a, c, g, or t
  misc_feature (58)..(58): n is a, c, g, or t
  misc_feature (69)..(69): n is a, c, g, or t
  misc_feature (74)..(74): n is a, c, g, or t
  misc_feature (82)..(82): n is a, c, g, or t
  misc_feature (86)..(86): n is a, c, g, or t
  misc_feature (96)..(96): n is a, c, g, or t
  misc_feature (119)..(119): n is a, c, g, or t
  misc_feature (146)..(146): n is a, c, g, or t
  misc_feature (149)..(149): n is a, c, g, or t
  misc_feature (151)..(151): n is a, c, g, or t
  misc_feature (160)..(160): n is a, c, g, or t
  misc_feature (173)..(173): n is a, c, g, or t
  misc_feature (184)..(184): n is a, c, g, or t
  misc_feature (187)..(188): n is a, c, g, or t
  misc_feature (190)..(190): n is a, c, g, or t
  misc_feature (195)..(195): n is a, c, g, or t
  misc_feature (203)..(203): n is a, c, g, or t
  misc_feature (206)..(206): n is a, c, g, or t
  misc_feature (225)..(225): n is a, c, g, or t
  misc_feature (227)..(227): n is a, c, g, or t
  misc_feature (229)..(229): n is a, c, g, or t
  misc_feature (231)..(231): n is a, c, g, or t
  misc_feature (239)..(239): n is a, c, g, or t
  misc_feature (249)..(249): n is a, c, g, or t
  misc_feature (269)..(269): n is a, c, g, or t
  misc_feature (288)..(288): n is a, c, g, or t
  misc_feature (292)..(292): n is a, c, g, or t
  misc_feature (303)..(303): n is a, c, g, or t
  misc_feature (306)..(306): n is a, c, g, or t
  misc_feature (314)..(314): n is a, c, g, or t
  misc_feature (325)..(326): n is a, c, g, or t
  misc_feature (338)..(338): n is a, c, g, or t
  misc_feature (354)..(354): n is a, c, g, or t
  misc_feature (364)..(364): n is a, c, g, or t
  misc_feature (375)..(375): n is a, c, g, or t
  misc_feature (390)..(390): n is a, c, g, or t
  misc_feature (402)..(402): n is a, c, g, or t
  misc_feature (411)..(411): n is a, c, g, or t
  misc_feature (420)..(420): n is a, c, g, or t
  misc_feature (462)..(462): n is a, c, g, or t
  misc_feature (465)..(465): n is a, c, g, or t
  misc_feature (535)..(535): n is a, c, g, or t
  misc_feature (609)..(609): n is a, c, g, or t
  misc_feature (613)..(613): n is a, c, g, or t
  misc_feature (628)..(628): n is a, c, g, or t
  misc_feature (653)..(653): n is a, c, g, or t
  misc_feature (662)..(662): n is a, c, g, or t
  misc_feature (673)..(673): n is a, c, g, or t
  misc_feature (770)..(770): n is a, c, g, or t
tgcanaacaaaaaaanncntnanaaaaaaaaacccaaaaaagcccacccttaccgganaccaaaccccnaaaangtcaaaancaancccgccgttnccccccgaaaaccaaaccccctnaaaagaaaaaacgaaaaaacccaaaanttnanccccacccnttgtggggaaaangcagtttgcantcnnangaaanaaccaacngtnacccaaaccaaaaaaaatncnancnaccccaancaacccaaanaaaaaaaacaaaaagaaganaaaaaaaggagccgaacanaaanaaaaaccacancantttccacnaaaacgaacanncaaaaggggccncaaaaaaaaaaccttnaaaaaacatnccagccaggancaaaccaagtaggancccaagacagtnacaaaagcngcgaccccncccaaaccggggcaccgaatgccccgccaagagccgcaagcngcncagtgatcatcacccacaaggacaggttgccgggatgaggcaccctttcctttcatgtttaggttcttcncacctgcatttcactttcctaaaggtcccagccacacagcgttcttttagggattaaagtagtaggaaaaaaanaaanagaacacaacatccntccttaaagaaaaaaagtaaatccnctttatggnggacttcagcnatggacaaatttgggatcagtgttctccagtttgaacatagtcttctgttacctgggagagagtggtcaggtactgccagcccagggcagccaaaancatgaaaaacgacagg

SEQ ID NO: 556656 - DNA, 253 bp, Homo sapiens
tcgacgcagaggcaggtggatcacttgaggtcaggagctcaagaccagcctggccaacatggtgaaacctgtctctactaaaaatacagaaattagccagacatggtggtgtatgcctataatcccagctacttgggaggctgaggcgcgagaatcacttgaacctgggaaggcgggaggttgcagtgagctgtgatcacgctactgcactccagcactccagcgcaggcaacagagggagactctttgtctc

SEQ ID NO: 556657 - DNA, 130 bp, Homo sapiens
gtgagtaggctaggatacggaagtataagtgctgagagccgaggaagaaaagccaactgtgcttggagtagtcagggaagacttcccagaagaaggtaagtctaggttaagggctaactggtgaatgacc

SEQ ID NO: 556658 - DNA, 1518 bp, Homo sapiens
  misc_feature (504)..(504): n is a, c, g, or t
  misc_feature (981)..(981): n is a, c, g, or t
  misc_feature (1104)..(1104): n is a, c, g, or t
  misc_feature (1134)..(1134): n is a, c, g, or t
cttgtccttttataataccctcttttggccgccccccctgttgttaggtgtcggatgtttctgtcccgccgttgctcctcagatgtgctgctccgccctcttctctctcatttgtgggagatgtttgattgtgtcgcgtcgcacgcccccgggggggaaccacccttcctttagattgccttaatgctcccccccctccggcgaagtgtgtgaggaaaagaagtgggttgtgctgcttctccccccggaaacacaagatttgtcggtggacgccccaggagagtttctcctccgcgcggtgatgatattttttcccccggcgtgtaccaccccgcggtttttgtgtgtcccccccctctgcggtaagaagtttgtggataaacgatgggggggacaaaaaaagatgggggtccccaccatctatggggacacccacacaacacaaggggtataacagcacctcttgggagtggagatctctcggcgcttctcacctataggcgngggggagagaaaaatgcgcccctccccgcgccgcgtcgagaagggccccccctcgcgaggggggccgcaaaaaggggtgtcccccgcgaaagcccccccactctgagagagacaccctcgggtggttcaagaaaaaattggggtgacacatgggagacgcccactctcacaccctcgctcacagggaggaaacacacacagtggtgtgtcaccacacacaaagagagagagtctctcatccacacagaaagagtgacacactctcccacacagagtttaacacactgcgaggaaaattcacacactcacacatagggggagaaacactctttgagatagagaccacaggcagagagccctcacagcagaaaggagagtgtataacaccctctcttatagagacaacacagcgggggtgtctcgcacacagagacacacacaaatcttcatcagagcgacacaactctctcctctggngcttataataatgtgtttcacacacaaaatcgtcatcacaccacagtggtttctctataatatgtttgtgtgagagaaaacacacatcgagagatctccacagagattgggcatcatcgggtntgtgcttcctatattgtggagactctctcncgctcgagagagagatgtgtggggtgagacgcccacgatatatatatgagattttttctctctataaggagatgggttttatagagaaatgtgagaacaaagtgtgttataccacaaaatggtggccacacattatattttgtgagatcttaatcacccctggtcacatcacataaactggcgttcttgccttgttcacatccaccaccacaccacccacggagacttataagaccacacaatgggagactgaatggtcactctttgaggctccttcacattaaattttgaccgtgaattatttggagatggcaggccttgtttttaagaaaaaccagtcaagtagggttgtcctataaaattaaaagccattttaacctccca

SEQ ID NO: 556659 - DNA, 126 bp, Homo sapiens
ttcacagtgcctcccaggaggctgcgggagctgcagcttcaaagcctcacagagatcttgaaaggaggggtcttgatccagacggaacccccagactctgctaccaggacacgatttagtgtaggg

SEQ ID NO: 556660 - DNA, 810 bp, Homo sapiens
  misc_feature (559)..(559): n is a, c, g, or t
ggaactgttggactacatgttttctcttagattatgtgattttgtgggcactggcaaaaggtgtgtgtgtgaatgtgtgcatgtgtgtgaatgtgtgtgtgtgtgtgtgtgttgtgtgtgtgtgtgtgtgtggcagacgtgcaaaagtgcagctgaaataataccttagatttctaggtaagtctctccacatttcaatagtgggtcagagtagaaccagggccgggtatcaattattgcttgtgtggcaccaggcataaactcactttctcaaatcatccagcgttcctataaatgtatgccggaaactctccttctgtgagtataactcctgagttcctatagcagataagatatacgacagtgcctccctagtgctcctccgccgtttgtggctaaaattccctttctctctaagtccaccatttcaagatgtgacgatagtgtatagtaagacagcttgtcgccctgccagatgtttctctccttgtccaaaggccagagacatcccaggaagagcgctggggggtcacacccgagcaacgctgtgcgttacccntgctaaaaaaccacccgttactccagaggaaggaccgcaccgtgccacgttggggaaccttatttcccaagagatgcttaacttcgggtgggctaagggcagacacccttgtcctcccacgggaggggtcccaaataaccggattggggggaacgaccgaccaaagacatggcgccctgcgaacccggtacgccaccggcccgggaaccctcacagggcccccggcgcaaggggtcacccccgaatttata

SEQ ID NO: 556661 - DNA, 127 bp, Homo sapiens
tttaccctggatgtggagatcgccacctaccgtatagctgtggagggcgaggagtgcaggctgaatggcgaagggttggacaagtcaacatctctgtagtgcagtccaccgtctccatgtgctatgg

SEQ ID NO: 556662 - DNA, 84 bp, Homo sapiens
aaaaaaaaaaaagtctgcgttcattgcagttccagtttctcttccattctgtgtcacagacaccaacaccccactcattggaaa

SEQ ID NO: 556663 - DNA, 400 bp, Homo sapiens
  misc_feature (21)..(21): n is a, c, g, or t
tccctggggaaatggtggccnatggctgccctcccaggaagggcctggcgggggggatgctgggcatgtgtttccagcgtccttgcccccagtgttccagctcagtctccaccaccttcttctctcccaggtggccataaaagacaagcaggaaggaattgagtaggggccagagggggctctgctcggcctgtgagccccgttcctacctgtgcctgaccctccgctccaggtaccacaccgaggagagcggccggtcccagccatggcccgccttgtggccacccctcaccctgacaccgacgtgttggccacccctcaccctgacaccgacgtgtcctgtacatagattaggttttatattcctaataaagtatagcgggagagacctggaaaaaaa

SEQ ID NO: 556664 - DNA, 489 bp, Homo sapiens
accatcaacaaagaagaccacacactgggaaacatcattaaatcacaactcctaaaagacccgcaagtgctatttgctggctacaaagtcccccaccccttggagcacaagatcatcatccgagtgcagaccacgccggactacagcccccaggaagcctttaccaacgccatcaccgacctcatcagtgagctgtccctgctggaggagcgctttcgggtggccataaaagacaagcaggaaggaattgagtaggggccagagggggctctgctcggcctgtgagccccgttcctacctgtgcctgaccctccgctccaggtaccacaccgaggagagcggccggtcccagccatggcccgccttgtggccacccctcaccctgacaccgacgtgttggccacccctcaccctgacaccgacgtgtcctgtacatagattaggttttatattcctaataaagtatagcgggagagacctggaaaaaaa

SEQ ID NO: 556665 - DNA, 310 bp, Homo sapiens
tctcatcacgactcccgtcgaacacggcgtgttgggctggctgctgctgctgggctggttgctggtcggtccttctgctggggctggactggttcggcgctttgcaccggctgtacctgctgtcctctgcggaccttgatggtgtcgtgctgaacacactgggggctgttgctggctgctggggggtgtactgcggcatctgttgttgtccttgtgacggtaacagatccaggctttggtggcagatgtcttccacaaacgtcgaccgggagactcttgacacacactgatcacatcatcttctatacat

SEQ ID NO: 556666 - DNA, 462 bp, Homo sapiens
cacggtactatcttatcctctaggtctcaacttaagtataaccgtccttcaacagaccccactccctgggcattttgtaaattatggtaaaagggacaaagcagtaaaatttaccatttgaactacttttattttatttattgctttgagacagagtcttgtgctgtagcccaggtgggagggcagtggcatgatctcagctcactacaacctccgtctcccgggttcaagtgattctcccgcctcaacctcctgagtagctgagattacaggcacgtgccaccacgcccagttaattttggtatttttagtagagatggggttccaccattttggccaggatggtttcgaactcttgacctcgtgatctgcccaaagtgctggaattacaggcgtgagccaccgcacctggcctgagacagggtcttgctctgttacccaggctggagtacggtggcgtga

SEQ ID NO: 556667 - DNA, 1902 bp, Homo sapiens
  misc_feature (185)..(185): n is a, c, g, or t
  misc_feature (218)..(218): n is a, c, g, or t
  misc_feature (222)..(222): n is a, c, g, or t
  misc_feature (228)..(228): n is a, c, g, or t
  misc_feature (256)..(257): n is a, c, g, or t
  misc_feature (261)..(261): n is a, c, g, or t
  misc_feature (275)..(275): n is a, c, g, or t
  misc_feature (301)..(301): n is a, c, g, or t
  misc_feature (314)..(314): n is a, c, g, or t
  misc_feature (338)..(338): n is a, c, g, or t
  misc_feature (345)..(345): n is a, c, g, or t
  misc_feature (1361)..(1361): n is a, c, g, or t
  misc_feature (1510)..(1510): n is a, c, g, or t
  misc_feature (1726)..(1726): n is a, c, g, or t
  misc_feature (1728)..(1728): n is a, c, g, or t
ggagacggggttcagcgtgatccatcattcgcaaaaggggagtaggcaacatatcattaaaagtcgggacaagtccatggataataaagcacggtatgatacattttctggctttgggtaacatcctttcaggtaagggggttcgtgatgaaaagggttccaggggctagggattggtacacttngagacgcaggaagcagctgaaagagctatgganaaantgaagngaatgctcctaaatgatcgcaaagtatnngtgngacgatttaagtcncgtaaagaacgagaagctgaactggnagctagggcaaanagaattcaccaatgtttacatcangaatttnggagaagacatggatgatgagcgccttaaggatctctttggcaagtttgggcctgccttaagtgtgaaagtaatgactgatgaaagtggaaaatccaaaggatttggatttgtaagctttgaaaggcatgaagatgcacagaaagctgtggatgagatgaacggaaaggagctcaatggaaaacaaatttatgttggtcgagctcagaaaaaggtggaacggcagacggaacttaagcgcaaatttgaacagatgaaacaagataggatcaccagataccagggtgttaatctttatgtgaaaaatcttgatgatggtattgatgatgaacgtctccggaaagagttttctccatttggtacaatcactagtgcaaaggttatgatggagggtggtcgcagcaaagggtttggttttgtatgtttctcctccccagaagaagccactaaagcagttacagaaatgaacggtagaattgtggccacaaagcccttgtatgtagctttagctcagcgccaagaagagcgccaggctcacctcactaaccagtatatgcagagaatggcaagtgtacgagctgttcccaaccctgtaatcaacccctaccagccagcacctccttcaggttacttcatggcagctatcccacagactcagaaccgtgctgcatactatcctcctagccaaattgctcaactaagaccaagtcctcgctggactgctcagggtgccagacctcatccattccaaaatatgcccggtgctatccgcccagctgctcctagaccaccatttagtactatgagaccagcttcttcacaggttccacgagtcatgtcaacacagcgtgttgctaacacatcaacacagacaatgggtccacgtcctgcagctgcagccgctgcagctactcctgctgtccgcaccgttccacagtataaatatgctgcaggagttcgcaatcctcagcaacatcttaatgcacagccacaagttacaatgcaacagcctgctgntcactgtacaaggtcaggaacctttggactgcttccatgttggcatctgcccctcctcaagagcaaaagcaaatgttgggtgaacggctgtttcctcttattcaagccatgaaccctactcttgctggtacaatcactggactgttgtnggagatggataacttcagaacttcttcatatgctcgagtctccagagtcactccggtactaacggttgatgaagctgtagctgtaactacaagcccagcaagctaaagaggtgccagaaagcagtaacagtgccaccggtgttccaacgtgttacaattgatcagggacccatgaaaagaaactttgtgcttcacgcgaagaaaaatatctaaacntngaaaacttagatctctactggaaagcaacaacacgttgcgaaagtattggcatacataacaacgcgggcacgcgaaccttggaacctgatgttccgagcaaatgcccaggtctaggaaacgattatgctagtcctaaattccgttatgatcaaaaggaagcaaaaacacacaag

SEQ ID NO: 556668 - DNA, 395 bp, Homo sapiens
gattacctcctagacggacagaagtgaaaaccgctgccctagcgaacaacaccgatgatagagggcggaacagccttattgctgatacagagaaagtccgagtgatctggacagaagattgaaccagccacaacactcccttaagccaaagcctaatccagaccaagaccctcgctctctctgtcctacgaaggctgagagatgaggaagctgcagaaaaaaaagtttgaagccagcagaggctagttcatgaggttgaaggaaagaagccatctccataccataaaagcaaagacgaagcagcaagtgctgatggggaagctgcagcaagttctccaggagatctggctgagaccattggtgaaggtggccacactaaacaacagattttctgt

SEQ ID NO: 556669 - DNA, 1470 bp, Homo sapiens
  misc_feature (929)..(929): n is a, c, g, or t
  misc_feature (1078)..(1078): n is a, c, g, or t
  misc_feature (1294)..(1294): n is a, c, g, or t
  misc_feature (1296)..(1296): n is a, c, g, or t
atgcttcgacgcgttggtaagctctccatatgatcgagctgcaggcggcgaaattcactagtaattagagactgcgagaaggagctcaatggaaaacaaatttatgttggtcgagctcagaaaaaggtggaacggcagacggaacttaagcgcaaatttgaacagatgaaacaagataggatcaccagataccagggtgttaatctttatgtgaaaaatcttgatgatggtattgatgatgaacgtctccggaaagagttttctccatttggtacaatcactagtgcaaaggttatgatggagggtggtcgcagcaaagggtttggttttgtatgtttctcctccccagaagaagccactaaagcagttacagaaatgaacggtagaattgtggccacaaagcccttgtatgtagctttagctcagcgccaagaagagcgccaggctcacctcactaaccagtatatgcagagaatggcaagtgtacgagctgttcccaaccctgtaatcaacccctaccagccagcacctccttcaggttacttcatggcagctatcccacagactcagaaccgtgctgcatactatcctcctagccaaattgctcaactaagaccaagtcctcgctggactgctcagggtgccagacctcatccattccaaaatatgcccggtgctatccgcccagctgctcctagaccaccatttagtactatgagaccagcttcttcacaggttccacgagtcatgtcaacacagcgtgttgctaacacatcaacacagacaatgggtccacgtcctgcagctgcagccgctgcagctactcctgctgtccgcaccgttccacagtataaatatgctgcaggagttcgcaatcctcagcaacatcttaatgcacagccacaagttacaatgcaacagcctgctgntcactgtacaaggtcaggaacctttggactgcttccatgttggcatctgcccctcctcaagagcaaaagcaaatgttgggtgaacggctgtttcctcttattcaagccatgaaccctactcttgctggtacaatcactggactgttgtnggagatggataacttcagaacttcttcatatgctcgagtctccagagtcactccggtactaacggttgatgaagctgtagctgtaactacaagcccagcaagctaaagaggtgccagaaagcagtaacagtgccaccggtgttccaacgtgttacaattgatcagggacccatgaaaagaaactttgtgcttcacgcgaagaaaaatatctaaacntngaaaacttagatctctactggaaagcaacaacacgttgcgaaagtattggcatacataacaacgcgggcacgcgaaccttggaacctgatgttccgagcaaatgcccaggtctaggaaacgattatgctagtcctaaattccgttatgatcaaaaggaagcaaaaacacacaag

SEQ ID NO: 556670 - DNA, 1253 bp, Homo sapiens
  misc_feature (185)..(185): n is a, c, g, or t
  misc_feature (218)..(218): n is a, c, g, or t
  misc_feature (222)..(222): n is a, c, g, or t
  misc_feature (228)..(228): n is a, c, g, or t
  misc_feature (256)..(257): n is a, c, g, or t
  misc_feature (261)..(261): n is a, c, g, or t
  misc_feature (275)..(275): n is a, c, g, or t
  misc_feature (301)..(301): n is a, c, g, or t
  misc_feature (314)..(314): n is a, c, g, or t
  misc_feature (338)..(338): n is a, c, g, or t
  misc_feature (345)..(345): n is a, c, g, or t
ggagacggggttcagcgtgatccatcattcgcaaaaggggagtaggcaacatatcattaaaagtcgggacaagtccatggataataaagcacggtatgatacattttctggctttgggtaacatcctttcaggtaagggggttcgtgatgaaaagggttccaggggctagggattggtacacttngagacgcaggaagcagctgaaagagctatgganaaantgaagngaatgctcctaaatgatcgcaaagtatnngtgngacgatttaagtcncgtaaagaacgagaagctgaactggnagctagggcaaanagaattcaccaatgtttacatcangaatttnggagaagacatggatgatgagcgccttaaggatctctttggcaagtttgggcctgccttaagtgtgaaagtaatgactgatgaaagtggaaaatccaaaggatttggatttgtaagctttgaaaggcatgaagatgcacagaaagctgtggatgagatgaacggaaaggagctcaatggaaaacaaatttatgttggtcgagctcagaaaaaggtggaacggcagacggaacttaagcgcaaatttgaacagatgaaacaagataggatcaccagataccagggtgttaatctttatgtgaaaaatcttgatgatggtattgatgatgaacgtctccggaaagagttttctccatttggtacaatcactagtgcaaaggttatgatggagggtggtcgcagcaaagggtttggttttgtatgtttctcctccccagaagaagccactaaagcagttacagaaatgaacggtagaattgtggccacaaagcccttgtatgtagctttagctcagcgccaagaagagcgccaggctcacctcactaaccagtatatgcagagaatggcaagtgtacgagctgttcccaaccctgtaatcaacccctaccagccagcacctccttcaggttacttcatggcagctatcccacagactcagaaccgtgctgcatactatcctcctagccaaattgctcaactaagaccaagtcctcgctggactgctcagggtgccagacctcatccattccaaaatatgcccggtgctatccgcccagctgctcctagaccaccatttagtactatgagaccagcttcttcacaggttccacgagtcatgtcaacacagcgtgttgctaacacatcaacacagactgagtctgtataactgccttggggatcctcagagac

SEQ ID NO: 556671 - DNA, 411 bp, Homo sapiens
gaccccgagcttaagggctaccctgagggaggtgcacgaaggaaagatagtttctttatgactggaagacttattcgactgcggtgatgatacttgtaataggaagtgccgtcagaagcgataactgacgacgtataatgtctatctgaccgcaatcgctgaaacctctacaacttagttgaccgtagctgccagagccctgccctgaattcctgtgcttactccctctttaagattgcggacccactgcagagtgctgaagacggatttgccacgaggtgagaggctctctggtgtagagatcaacatggaacgtagttttgtcacttgaatgcacggaaattggcgttttgacagttttctacgtttaggagttttatacactttagggtaacgttatcatgtcattgc

SEQ ID NO: 556672 - DNA, 270 bp, Homo sapiens
  misc_feature (107)..(107): n is a, c, g, or t
  misc_feature (145)..(145): n is a, c, g, or t
gcagagcgcagcgcgcacgcccagcgagttccagaggcgccagtggaagctgcggcggtgttgtctcgcgaacggagaaatttcctctcctccgggtcggcctaggnctacgtccccagctccttttttttttctcggactcggnctctgacccccaactcggtcccctagtccggccccggctccgggccccccaaccctcgctccagaccggcccggccccctccccagtcctgccgcccggtcccaggcccggccgcgtacgcttcc

SEQ ID NO: 556673 - DNA, 292 bp, Homo sapiens
tactctactaggtatatatgaggcatcatatccactgactgtgtatatggaggttgcacaactactagtctatagagagcggagtctttgggagcgtgagagatctagtactagagttttcactgaacttggcgatgagatcttaggccatgtggggttagcctctcggatgagcttcatatgttacgtctaaagtgtatttagtaccttctctacctggtaaggctcagatgtgacaagaatgtgggaagaccatcttgacaagtacatagcagtgtgagaaacataaagc

SEQ ID NO: 556674 - DNA, 168 bp, Homo sapiens
gaggaaggaagtccccccccgccttcctctgtccggagaggcacaggtgtcaccagttccaaccaaaggctcctcacaggcgctgtgaatttttggaccagtcttgtaattatcgaatccaccacttgtttccatttaataaaaatgctcatgggaagtgaaaaaaaa

SEQ ID NO: 556675 - DNA, 1626 bp, Homo sapiens
  misc_feature (185)..(185): n is a, c, g, or t
  misc_feature (218)..(218): n is a, c, g, or t
  misc_feature (222)..(222): n is a, c, g, or t
  misc_feature (228)..(228): n is a, c, g, or t
  misc_feature (256)..(257): n is a, c, g, or t
  misc_feature (261)..(261): n is a, c, g, or t
  misc_feature (275)..(275): n is a, c, g, or t
  misc_feature (301)..(301): n is a, c, g, or t
  misc_feature (314)..(314): n is a, c, g, or t
  misc_feature (338)..(338): n is a, c, g, or t
  misc_feature (345)..(345): n is a, c, g, or t
  misc_feature (1085)..(1085): n is a, c, g, or t
  misc_feature (1234)..(1234): n is a, c, g, or t
  misc_feature (1450)..(1450): n is a, c, g, or t
  misc_feature (1452)..(1452): n is a, c, g, or t
ggagacggggttcagcgtgatccatcattcgcaaaaggggagtaggcaacatatcattaaaagtcgggacaagtccatggataataaagcacggtatgatacattttctggctttgggtaacatcctttcaggtaagggggttcgtgatgaaaagggttccaggggctagggattggtacacttngagacgcaggaagcagctgaaagagctatgganaaantgaagngaatgctcctaaatgatcgcaaagtatnngtgngacgatttaagtcncgtaaagaacgagaagctgaactggnagctagggcaaanagaattcaccaatgtttacatcangaatttnggagaagacatggatgatgagcgccttaaggatctctttggcaagtttgggcctgccttaagtgtgaaagtaatgactgatgaaagtggaaaatccaaaggatttggatttgtaagctttgaaaggcatgaagatgcacagaaagctgtggatgagatgaacggaaaggagctcaatggaaaacaaatttatgttggtcgagctcagaaaaaggtggaacggcagacggaacttaagcgcaaatttgaacagatgaaacaagataggatcaccagtatgcagagaatggcaagtgtacgagctgttcccaaccctgtaatcaacccctaccagccagcacctccttcaggttacttcatggcagctatcccacagactcagaaccgtgctgcatactatcctcctagccaaattgctcaactaagaccaagtcctcgctggactgctcagggtgccagacctcatccattccaaaatatgcccggtgctatccgcccagctgctcctagaccaccatttagtactatgagaccagcttcttcacaggttccacgagtcatgtcaacacagcgtgttgctaacacatcaacacagacaatgggtccacgtcctgcagctgcagccgctgcagctactcctgctgtccgcaccgttccacagtataaatatgctgcaggagttcgcaatcctcagcaacatcttaatgcacagccacaagttacaatgcaacagcctgctgntcactgtacaaggtcaggaacctttggactgcttccatgttggcatctgcccctcctcaagagcaaaagcaaatgttgggtgaacggctgtttcctcttattcaagccatgaaccctactcttgctggtacaatcactggactgttgtnggagatggataacttcagaacttcttcatatgctcgagtctccagagtcactccggtactaacggttgatgaagctgtagctgtaactacaagcccagcaagctaaagaggtgccagaaagcagtaacagtgccaccggtgttccaacgtgttacaattgatcagggacccatgaaaagaaactttgtgcttcacgcgaagaaaaatatctaaacntngaaaacttagatctctactggaaagcaacaacacgttgcgaaagtattggcatacataacaacgcgggcacgcgaaccttggaacctgatgttccgagcaaatgcccaggtctaggaaacgattatgctagtcctaaattccgttatgatcaaaaggaagcaaaaacacacaag

SEQ ID NO: 556676 - DNA, 1011 bp, Homo sapiens
  misc_feature (470)..(470): n is a, c, g, or t
  misc_feature (619)..(619): n is a, c, g, or t
  misc_feature (835)..(835): n is a, c, g, or t
  misc_feature (837)..(837): n is a, c, g, or t
gaagtatcggcgtgcgaaggataggaagtatctgttcccaaccctgtaatcaacccctaccagccagcacctccttcaggttacttcatggcagctatcccacagactcagaaccgtgctgcatactatcctcctagccaaattgctcaactaagaccaagtcctcgctggactgctcagggtgccagacctcatccattccaaaatatgcccggtgctatccgcccagctgctcctagaccaccatttagtactatgagaccagcttcttcacaggttccacgagtcatgtcaacacagcgtgttgctaacacatcaacacagacaatgggtccacgtcctgcagctgcagccgctgcagctactcctgctgtccgcaccgttccacagtataaatatgctgcaggagttcgcaatcctcagcaacatcttaatgcacagccacaagttacaatgcaacagcctgctgntcactgtacaaggtcaggaacctttggactgcttccatgttggcatctgcccctcctcaagagcaaaagcaaatgttgggtgaacggctgtttcctcttattcaagccatgaaccctactcttgctggtacaatcactggactgttgtnggagatggataacttcagaacttcttcatatgctcgagtctccagagtcactccggtactaacggttgatgaagctgtagctgtaactacaagcccagcaagctaaagaggtgccagaaagcagtaacagtgccaccggtgttccaacgtgttacaattgatcagggacccatgaaaagaaactttgtgcttcacgcgaagaaaaatatctaaacntngaaaacttagatctctactggaaagcaacaacacgttgcgaaagtattggcatacataacaacgcgggcacgcgaaccttggaacctgatgttccgagcaaatgcccaggtctaggaaacgattatgctagtcctaaattccgttatgatcaaaaggaagcaaaaacacacaag

SEQ ID NO: 556677 - DNA, 434 bp, Homo sapiens
aatattaggaatcaagaaactatatatataaaatcaaagctgctaaataaaattataaattgtgtttataattacaaatttgaattggaaatatcattataaaatcataatgtatttcctttacagaagcacattttctagccctgttatttgaaaatcagtaatgagcacccttagaatgcagattatagtctctaaatgcaattttctgctaaaaggaataagaattccttggagaaatgacgaatgtatgagatgagctgaaaacatcttgttgaacatgaaataaaggaaacccttaaaaaatactgcatttttaaggacttaggagccaatttaaagggattatttcttgccaaagatgggaaattgtgtataccaaaacaacagttgtgataaattgaaattcatattaaaatctgagagtttaaaat

SEQ ID NO: 556678 - DNA, 418 bp, Homo sapiens
cgtgtagtcgagtctatgaggatccccatcaacattgaacttcgagattggggtgacgattcacaaccgtcctttcctcaaagcgctagtcactgacgagttgcaagggcttgatgcgaccattccgaaggcgactgtggccagagacgacaccacggtgaccttccatgacgttgacgttcatgccaatggaattcggcacgtccgggagaaatcccagacagtggccgagacgatgtcagcctctggccgtgttgactggtctgagctgtcgcggttggcgggtgcaaaaatcacctataacgacgacgccggggaaaccggcagggtgacgatcgtgcgggagatgtcggtattgggagctcgggtagacgtcagtattaccgccgtacccggggtcgagccaatgttggtaagc

SEQ ID NO: 556679 - DNA, 328 bp, Homo sapiens
  misc_feature (313)..(313): n is a, c, g, or t
taagacattactacctctttaaccagaaatctgcctgccgattctttgagcccacgaacgttactctgtgatattcttctgaactatgtttccgttctatacaactagcagtaggcacacagaagcaaagtgagaagtttatatgtacatttgaccaaaagaaaggatgattcagtaaagtttgaacttattctctccctttttaaaagaagtaagcataggacaccaaaagcacaggcaacaaaagcaaaaataaacaagtggggactacatcaaactaaaaagtttctgcacagcaaagggaaacattcantaacacaaacaaaca

SEQ ID NO: 556680 - DNA, 964 bp, Homo sapiens
taaccctttgtaaagggtgtttttttcatccaaacattcctcctggacgcttttgtaaatccccaaaacctggttgtcttgggattacgcttttctctacatttcgcgtgccctaaaaaacaaactttgtagaaaagagaaaattcagtgtctctttcttctaccctctcttaaacttccgtattagttctttccccttttctcaaagaccccccttgtttggtcccccagcttaccccccaagtccctaagaccctcatacttggtctcacaatagcctgcctccgcctctctcattgtggggacctccaacagcttccttctggtgacgtaggtcgggtgacagttgatacggctcgggcctccctcctagatgctcccccccccgcgcggggtaaaaatgaatggttcccacgctgtgggccctcctttgtgggcgctgtgcgtgaaggacatccctctcccctgccccccggaggtgctcgcccacgtgctgttgcagtcccgcctttctttgatgccccgccacccaagtccgagggggaccactggcgttcctcgtcgtcaccagacaggcgttgcgttctagtgtgtgctgtgaatgaccttctccgccccgggcacagacgtctatatcttccttttgaagagttttatgtgtgcgcacacgccccagcgcatcatgatgttgttgtggatggccgccgcgttctagaagagacgcagagtctctaaacgccccaggcgttgttgttctacagacgtaccacccatgtgagagagagaaactttgtcactaatgacttgatactttaggtgggtgggttgctcattacgtatgtacctatgccaccaggggcgggacgtatttcttcgcaccctgctctctcgccattaaaggctgattgcccgcggcgagtcccgaaaagcttaaaacaaccctttaggacaccccaacaaaaca

SEQ ID NO: 556681 - DNA, 605 bp, Homo sapiens
gctattgctgttatctagatccaacgccggacagtagctgtgtccttgtcttctgcatgtcgcaggctccaattagtctctgttagcaccaaatagagctaatattatcaggagacgtgaccttttataaggccactgtcagtaggatataaaaagcagcccactgctcagtttccaggatcagcttcctccttctgtcacttgtgtaaagttggcactaccttgtgcctctcagatagctgaagtgctgctggtaagcatgtgcatgctctgcctttcttgtgaaaggttttcaatcagcgatatcagcacttacagtaagacagtaaagtagtgcacagcaaaaaggctaatttgcctttgccctggggtgttcagcttgaaagaataaagctcatttgggtaagttaaatgtcttactctactgtgcctatactttagctgcgatactaagcaagggaacaatacccgtttctctgagcccagagaagacttgatcaccgttctccaagctctgtgtaagccatgcttaaccccgggagatttcaggccgggagcaaacctttcacataagatcttgttaacccttatgcctgtggtcccaa

SEQ ID NO: 556682 - DNA, 332 bp, Homo sapiens
  misc_feature (29)..(29): n is a, c, g, or t
  misc_feature (62)..(62): n is a, c, g, or t
tttcctgggggggggggggaaattttaanccccctacccaaaagtttaaccccctttttgtntaaaagggggccccccccagggaaaaacccctttggggcgggggtgggggggggggtttttccccatgtcccccccccccttgttttggggggcagttttttttcccccaggtccccccccccccccccttggggggtttttcgggaaagttttttcccccccccgggccctggtttggggggaaaagggccgggactgtttaaaaaaccctttttttttctttttgggaaccaaaaaaaaaaaaaaccgggcttttttttggtttccca

SEQ ID NO: 556683 - DNA, 131 bp, Homo sapiens
gttaagccaacaacaatccccctttcctattttttttctccctgccccctggagggcactgtgtttggttgggcaaatgtatttactaggggtgtttccaccagtgggcattaaaggccctttttttaata

SEQ ID NO: 556684 - DNA, 403 bp, Homo sapiens
agctatatacggaagcgcatccctcctgacagtagacgagcaatttgatccgcatcgagagagcccacaggggtgcagaaaggcaagcgagggtgctggagtatgcctctcgcctggacaatgagcgtaccaaggatctaatcatagaagcaagatttcatcgcacaatcattggggcagaagggtgaacggactccgtgaaattcgtgaacaaaattacccagaggtcatacattaactttccagacccagcacaaaaaagtgccattgtccagctcagaggacctaagaatgaggtggaaaaatgcacaaaatacatgcagaagatggtggcagatctggtggaaaatagctatacaatttctagtccgatcatcaaacagttcacaagaatatcattggg

SEQ ID NO: 556685 - DNA, 483 bp, Homo sapiens
  misc_feature (18)..(18): n is a, c, g, or t
  misc_feature (26)..(26): n is a, c, g, or t
  misc_feature (31)..(31): n is a, c, g, or t
  misc_feature (45)..(45): n is a, c, g, or t
  misc_feature (63)..(63): n is a, c, g, or t
  misc_feature (129)..(129): n is a, c, g, or t
  misc_feature (131)..(131): n is a, c, g, or t
aagaaatggctggaaatnaaaggtgnggagnttcagaaaaggggnaaaaaatctagtggctgnataacttgtctgctgtgctctgatgatgtcagaaggttggagaacctgctgcccctgggttcctangnagctcccagctctggggtgctttttcagcctggggctcttgatgccttagaagaaacttgttcaatccgtggtgccgcctgtaggctgcatacagctcaggacggctttgactgtggcccaacacagattcataaactttcttaaaacgttatgagattttagcctggccaacatggtgaaaccccatctctactaaaaaatacatcaattagccaggcatggtgacatgcgcctgtagtcccagctactcgggaggctgaggcatgagaattgcttgaacctggaactgcagtgagccaagatcatgccactgccctccagcctgggtgacagagcaagaccctgtctcaa

SEQ ID NO: 556686 - DNA, 160 bp, Homo sapiens
cccgagcagaagaaggagggagggagccagccgctgcagccaccaccgccaccatgtcctaccagggcaagaagaacatcccttggcctgccccccaaccctgaggatggcctccatcccccaacctctcatattgcctctaaccaatggcaatgcatcc

SEQ ID NO: 556687 - DNA, 269 bp, Homo sapiens
agtcgatctgaggatccccgataggtctcctttggtctctctttgggccaaaccaaccccagagaagggggcctcagaccatcagctcttagcctaacaaagcctctatggacactggagtaggccagttatgctgaataggccaggcctcacaggcttagcaggtgaatggttccttcggctacgggccattcaggtgggaatcacaaggaccggggatttatctccctttaactcttctacagcggcccggtagtacggcctcatca

SEQ ID NO: 556688 - DNA, 827 bp, Homo sapiens
acattaggctaggtacgagtctcggtggttactctggccgaggctcctcccggtgcagaaggaacctgcagtgtccaccgtgcgatggagccagccctgtccctggtcagagaaatgacgacgaggatacctgggagcgggctggctggcctgggctggtgcctgctgcctgtgtgctgggctggcgactctgctcctccgcttgctgctgtctctgtggaactgggtgccagctgctgatgtgtggcttccatgctggacatgtggacccccgttcccctgtgctcccctgcccacccttgcctggggatgtggctggaatgatgcctgtgtgaagaagaaagagaaaatcaccctgggtgtggcatgcatgcagtagctggcaagacgtgatggcctcaaaaagtgtaaaatctcacagctatttgcagcatcccaactcccctgctagcactagataagtggagatggaacatttttcaagcaatgaagtgcctggcttggttttatgaatatgcagtgtcctgatgaagttgtagggccagaaggaatggaacacaatttttgtgcaacgacattggtgttgaacctgaaaatatcattatgtaagatttttagcgttggcacattggaggcgtgaaagcaatgggcatttttttaccaaggaagcaatggttccacgggaatgacttcattacagtgtgactgcacagaaaaagtaacaaaacaaatttgactttttgcggctcacagttgaatgatattccgtcattaagaatatctacggaatatcctttgatttgcagggatacgatcgagaacttgat

SEQ ID NO: 556689 - DNA, 884 bp, Homo sapiens
tttttttatttttttcgtggtttaggccccatggctaaagccctttattaaagcgaaattcccgaggggccagcccccatatttgatgggtccatgtgagtctccttagtgggccccatgagggattaaaagctgttgggtagaaagctagggacctggtcccacgcctggacccgggggcaggcaagggggcccacagcccccaccaccaccccaggagagggcggggtagaaaaccggagtcaaatctggggcggggtccaagcgcctgagcgccggttcacgcaggaaatagtccagttctcaggaagtgtgtctaaccacgccccagccccagccgcggaaccacctggggggggttcaatgtacactggcacggaagacggacgtaagcggggatcttaaggccccgggtatgatggaaacaacggggtcgacatgcggaccaacaggaggaccctgtcgtctcaggaggtgacgcgtggtccaaaattgggccggaaccccctgggtacccccgacaaacgcgtgctttgcccaacatgggctgcggagaggccccgcgggaactccaaccggggggggcagaggctcagtgggtcgccccatgggccacatacagttggccgcctggtgtgttccgccctccacagatgtggggatcactcacaccacatcagtcgtcgagttgcgaaaaaaaacaacacttgacccgctagtgcgggtacgaacagggccaccgaccatctggtgcgcgcggtagaagtgcccactttttggaccgcttacgaagcgaagcccattctggtgtgaaaacacgctttggcgccacctgcccaccttgtaactagcgctaccacgttatttagtaccagttgttgtaa

SEQ ID NO: 556690 - DNA, 708 bp, Homo sapiens
  misc_feature (20)..(20): n is a, c, g, or t
  misc_feature (29)..(29): n is a, c, g, or t
  misc_feature (40)..(40): n is a, c, g, or t
  misc_feature (110)..(110): n is a, c, g, or t
cctgatattataaaaacaancctttcggngaatatataanaacaacattcatatattttttttcattataactaaaataataaatattaatttcattttttttccatatntcaaataaattaaattttttttttataaatttattattttatgatttatttataaaaagtaaccaaatacgtataattattaatttatatattcatttatctttttctataggagtttctatttataaaaaataaataacaaaaaaaaaaaaaaaaaaaattttttataatataataagaaaggaccttatattattatccaataagtaataataaacataaaaaaataaaatttgacttaattataataaaaattaattttaatattatcatatgaaaattattcttctttatttaatttataattatatattatatatattaacattgtatttttttataaattatttccactaaaatcaaatacaaaaaaaacacaaacaacatattatttttttatttatattaattaataatatatatattaataatttaaattcatattttataatatttgtaatttaattaaaaaaataaaaataaatattattttatataaatataataaatataaaagacaaaaattatttataatatattttttatataaataattattttaaatataattaataattaaaaattattaaaaaatatt

SEQ ID NO: 556691 - DNA, 295 bp, Homo sapiens
  misc_feature (32)..(32): n is a, c, g, or t
tgtcctaattgccatgattaatacaatgatgnatatgtatacataccaggtataccttggaaatattgtgggttcagtttcagactacccacacaaagcaaatattggagtatattgagccagacaaatttttttttgtttcccagggcatataaaaattatgtttacactatactatagtctatttaatgtgcaatagcattatgtctaaaaaatgtatatactttaagtaaaaaaatactttattgctaaaaaatgctaataatatctgagccttcaacaatttgtaatgtta

SEQ ID NO: 556692 - DNA, 1050 bp, Homo sapiens
  misc_feature (486)..(486): n is a, c, g, or t
gccgaggagaccccgcgccagtgctggcaacagtgcacggtggagaagctgaggtcatcatcaggatttcgaaatatttgcttgtggatacgaaactatttcagcaatgcagacaagtaagtgtgttgttgtgggcgatgagtgctgttgagtaaaacatagtcgtcctgtatatccgtagcaacaacttagacgagagatttccactcgcaactagtggtaccgagctgatttcttgaacatatgcgtatgtcagtatcacagattgtgaatagggtggagtaaccatagtagctcttgggactttgtcgatagcatgcaggggcaagaggcattatgacagagttacgagcagcgtgaggtgtatccagcaagacagaatgtagtctcgtagatcggtagttcaatttccaggtcgggtcctcctccgatcgttcactttgtatgaatcgtgaaagaacaagatgtggagttgccttgatggantaatcatcaccgacttgtccaatataggacgtccgtttccttgcgctttgatgcgggggactccagaatctggagtcctcagttagtactggaactccagatcatacgtatgtggagcgaagactttgtgccgataggaaagcattggacagtaaaggccatagtccactgtcccaggagacctgcgtgtaaaatggcatgggccccgtggaaccatgaaagggccgtgtcaagtgtcactgtgcgaagtggtttgctggcaccttttacaccacggaaggagggttcttggaccggaaatggtggtgacgtagtagaaagggccttaattccacttaagagcttgggcgcccttcctaagggccctgccacggggaaagactttcccaactcgcaataaagaatgccgcaaaggttggcttcggtacttaatatgcctttagagaccctgggtgatacacacttcccgttcttcccccttttcctttattgacattagcctttggcgttttacccttggttggcgccagctttacgttaggtaagacgaaacaaggaattcga

SEQ ID NO: 556693 - DNA, 232 bp, Homo sapiens
tgagggtgcggcgagctgggtggtggcggcgggcgtgcgagacgcaaacatgcggatcttggtgaagaccctcacgggcaaaaccatcacccttgaggtcgagcccagtgacaccaatgagaatgtcaaagccaaaaatcaagacaaggagggaatcccaccctgaccagcagcgatctgatatgggccggacaaacagcgtggaggatggccgcagctctctcagcaatac

SEQ ID NO: 556694 - DNA, 286 bp, Homo sapiens
cctttaaaggggaaagggggggtttgtttaaaatagtaaacccgtaagtcccttttaaatttaaaaaaaaccaaattggggttgaagaataagtaggtttcccattggccatcgccgttttctttgaaaaaaaaaaccttttttaaaaaactaagcaggggtgtcccttttccccttcatgtaaaattctaactggggctaccagttaatctttaaattgttaagtaaaataaaattttgcctcttgggttaatgggttagccaattaaaagtttttaaaaggcca

SEQ ID NO: 556695 - DNA, 637 bp, Homo sapiens
  misc_feature (6)..(6): n is a, c, g, or t
  misc_feature (203)..(203): n is a, c, g, or t
  misc_feature (293)..(293): n is a, c, g, or t
  misc_feature (360)..(360): n is a, c, g, or t
  misc_feature (364)..(364): n is a, c, g, or t
  misc_feature (368)..(369): n is a, c, g, or t
  misc_feature (405)..(407): n is a, c, g, or t
  misc_feature (423)..(423): n is a, c, g, or t
  misc_feature (574)..(574): n is a, c, g, or t
  misc_feature (576)..(576): n is a, c, g, or t
  misc_feature (601)..(601): n is a, c, g, or t
ccctcntttgcagcaactatcacatcctcataaaaggggcaaaatttgtaagatgcctcttaaaataaatattcttttttataaaataataaaacttcaaataaatattctttacactaaacaatatgttgaaaaaattagaaaataaaggttgaattttactgtaactgtacaatatacatgaagtccaaagggaaatcagngtcttacaataaaggctttctgtaaggcaaaatacaatctaaaaacatactgtttgtttcacattcttccgattgttcaacatattagtntaattttttgtgtctgtgccatgtggtttggcacaacttgtttttcacagttgcaaatatttttgtntatncaannatatagcacattctctctggtgtaaacaatggtaannngtcatctgctaatttnccagttttgccagttctattctccaacaagaactttgcctgggggtgtctgtgttgctttagcttatgcgatacatgggtccccaagttctgtatctcatactttgagctccattggctgggttctgacaggcgtgtcggtttggagggcncntgggcggggagcctttcgccgccgncagcaaagactatcccaactttctattaacagtgcc

SEQ ID NO: 556696 - DNA, 759 bp, Homo sapiens
catcttgcgtccccgcgtgtgtgcgcctaatctcaggtggtccacccgaaaccccttgagcaccaatccctagtcccccgtcgcggtcccttattcgctccgacaagatgaaagaaacgatcatgaaccaggaaaaactcgccaaactgcaggcactcagtgtcgcagttgtgtgggcaatggaactgctcgcagaaatgcaacgaaggtggttcataggaacagccacagcagatgactaataacttcagttctccttaacagaacgttacgtgggtaaacgatatctctgtgtattgaagacggtgcaatattgtttaccaaccaaggcaacagtgatccactttagacaaccctaaagttcaggcatctctggcagcgaacactttcaccattacaggccatgctgagacaatgcagctgacatgaaatgctacccagcatcttaaaccagcttggtgcggatagtctgactagctttaaggagactgggcgaagctctggccaaacaatctgtggatggaaaagctccacttgctactggagaggatgatgatgcatgaagttccagatcttgtggagcaatattgatgaggcttccaagaatgaggtcaaactgaattgagtcaactttctgaacgatcaaatgctgagagaagttactgggagctgctactttgatattattgactgcttggaacgaacattgtggtatggatctgataaatctagatctctactattttaagcccaagccct

SEQ ID NO: 556697 - DNA, 159 bp, Homo sapiens
aacagctgtagtctcgcattctacagtggtattaacagccaggccccggggtcgcgtctacagtggccgggctagagcgaggatcatggtattccccttactaaaaaaagtgtgtattaggaggagagagaggaaaaaaagcggaaagaaggcaaacac

SEQ ID NO: 556698 - DNA, 1245 bp, Homo sapiens
gggctacccgctgcgctctgccttcctcggccatcgatgcctcggggctcggtggctgtcgtggcctggcgggctccccgttgggctgtgtggtgctggcgtgtcctgagctgtgcttgctgtgcaggctggaatgcggtgtcctgtgtgtctgctgcagtggctgtgtgtgggctgtgcgccagctggtgctgtgagtgcgtgcctgtgtgtgcctgccatgggcatgaagtgtcaacgatggacagagggcggcactgcccctgatccccgaacagggcctagtgtctaaccaaggaatctatcccttgaagccttagtgagcccctgagcctgactggttagccttggacctgaactgaggtgccttgagttgttgccctggccaagttgggcaagaggccctgatggtcggcagggtgacctgaaggttatccctttgttgagaagagggcaggcagagatttcgtagcgcagaattaaaaataagccgagggtgattgaggcaccccagagggagcgagtttagccccccctgaacagagccccgagcgcaggtgcaccaattggttcacctgcgaggttaaactaggatggcgaaaggttttccccaatggctgagaggcacatagtaagttgaacccaccaggaggtttggccccccattagacagttttgggaaagcggagttggcaatgaaacacgagccataggcagagagtgaaaaacctatgcacactaaaaggaaagccaaaggtaggttacccattttgccaaccgcacattacaagggaccattatcatttccccgcgaaatattccccgtgggaggagttaaacacccaagcgtatatacagagcgtaggattcaccgtttagactattcccaaggaagagtgcggcagcacttagctagcctcttaggcatgaggaaccgtgaagttcttatgggggacaggccaaaaacggacagaaagccccagtttagaagccacaaagtatccgtatcctcagaccttttgggtctttttgggccacaaccagaggggcagtctgctctggtgaaacgcgaagttttcgctacgtagcaccccagtaagcacaaaatcatgttggtgactgtgcgtacacgagaccacacagaagagaattttccattacccacgcacaaaatggatgtatcaaaaactccaaacacagtgtgcgaaacaccagagaaccacttcccgtgaatcgataactcgt

SEQ ID NO: 556699 - DNA, 167 bp, Homo sapiens
ccagatgtcatatccagtaacaatggaaagagtcagatgtgaaatatgacgctcgatttgacaaatatcttgatccgtcctttctacaacatcggattcattggtcgccaattttcacctccttcatgatgcgtgcatcttctatggtgggcttcagttgcaatgca

SEQ ID NO: 556700 - DNA, 238 bp, Homo sapiens
  misc_feature (57)..(59): n is a, c, g, or t
  misc_feature (65)..(65): n is a, c, g, or t
  misc_feature (67)..(68): n is a, c, g, or t
  misc_feature (72)..(72): n is a, c, g, or t
  misc_feature (76)..(76): n is a, c, g, or t
  misc_feature (83)..(83): n is a, c, g, or t
  misc_feature (88)..(88): n is a, c, g, or t
  misc_feature (111)..(111): n is a, c, g, or t
  misc_feature (114)..(116): n is a, c, g, or t
  misc_feature (120)..(122): n is a, c, g, or t
  misc_feature (124)..(125): n is a, c, g, or t
  misc_feature (127)..(127): n is a, c, g, or t
  misc_feature (135)..(135): n is a, c, g, or t
gagaacgcaaacaccggtggagcgagaaaacacttctgtggcacggcacacctgttnnnaaccancnnccanccangctgaangctgnggaccgggatgcagtgtcaggcntgnnngtcnnngnncncatcatcnagaaggacaaaatcaccaccaggacactgaaggcccgaatggactaaccctgttcccagagcccactttttttctttttttgaaataaaatagcctgtctttc

SEQ ID NO: 556701 - DNA, 940 bp, Homo sapiens
gcataaatctcaaccaggagctgggagaagcttctgctggcagctcgctgcaatggtggcattgaaaaccctgctgatgtcagtgtaatatcctccaggaatactggccagagggctgtgctagaaggttgctgctgatcacgtggagccactcccaattgctggccgggtcagtcctggaaccttgcagctaacccagatccatgcagtcctgtccgggtagccgacggtgttcttgtggttactgaccccagggactgaccagcaggctctcacggaggcatcttatgttaacctatctaccattgcgactgtgtaagcaagagattctcctctgcgctatgtggggacattgccatcccatgcaacaatccaagggagctcactcagtgggttggatgtggtggatgctgggctccgggacaggttctgcagcactgctgtgcgccacgatattccctgtgaacaccacataggggaggtcatgcctgatctgtacttctacagagatcctgaacgagatcgaaacggacagagcacggctggtgctgagaagggcaatgaccaaaggatgcgaattccacggctgaatggaatgatcccgcctcctgattcactgtatctcgtgtcgtgcgggttgcagactgcgtctgcatggtgtacacgtgccctctgtgcctatgtcagcagttccctactgtgtgagctggagcgctcagctgcctcgtgggactggtctgtcagtcccaatgctcatggcgctgcatggggaggggcacgcctgactgtgtgactgtgttcgtgctaaggctgtaggctgctgtgccatggtgtgggctctgtcagttttcacctggaaaggtcgggttgttgacggtcggggaaggtgaggggcttggttttggggccgtgtcggaagcggccttggggatgacggcac

SEQ ID NO: 556702 - DNA, 658 bp, Homo sapiens
cggggaggtccctcaacagcacacgccagcatcttcagccaccacacatccccagactcggctccagcccatcacttcagggccccgaacacccacaatgccacctccagttcgtactacagtgtctccgcagtacccgtcatgccccggcccccaagtggcatctgtggtccggcgtgcccccgaggctcagtgatcgcccccgatgccgcccgatcatccgacgcgcccgagaatcaacgtggtgcccatgcctccctcggccctcctattatggccccccggacagcccgccaggatggtgccaacagccgttgtgcctgctccagctggtggcccgctgtcgccagctgccagactgcaaggccgaccatgttcatcccgcacgctcgccatggcaagatgagcccacctcgaagaaaactgaagaccagaggacagcctcatgcacagaggaggagttcctgcgcagaaacaagggtccagggtccatcaaagtccaggtgcccaacatgcaggataagacggaatggacacggaatgggcaggtgcggtcttcaccctcccagtcacggaccagggctctgtcatcaaggtgcagattcatgaagcacaggcatgctgagggaaaacagaagctacagcatgaggcactacg

SEQ ID NO: 556703 - DNA, 486 bp, Homo sapiens
  misc_feature (473)..(473): n is a, c, g, or t
gactccagaggatccactctccctactgtatcctatttattaaaccatgtcttggagaacagccctctcgtagatgtcattaatgtccttgaaagggaaggcacccggggttgtggctcaggaaatgaacagagaagccactctttcttctcctcttgttggcactcctgttgttctcaggatcagttctcagaacctgctgggaggcagccccagatccagatccagccttccgtgtttcaggggaggaggacggaatgcagaaagccaccaggagaacagagccactgtcaagatcatcaccacagagaatgtagtgagcaccacgatgagcaggacttgatgagatcaggcatgggagaggcaatgatgcaaagacaggagccaatcgaaggctagatgcaggcagtgtgcataggggtgaggggcgtgtgtgagggtttgctatgtacacgtgcatgcctgtgtgcagngtaccgagctcga

SEQ ID NO: 556704 - DNA, 861 bp, Homo sapiens
gattctgctctcttcagtcgaagctacgtctgatcaatgcccatgtccccggtccaggtcgtactccctggatatgatcataattgagcgcgtggtcgcctcgggctgcgtcttgaactgctggtcaagtggctatagttgaccaatcaactggcaccaccggttcatagacctctgattacccttggtatgcaaattgtacggaaatattgattctcacgctatgggtaaaatcccaggggtagcggacaatatgggtgacaacgagaggcgttgccatcgaattggacctccgctatcaacacgatcgtccgcgaggagcgagagccctccataatccccctgcggcgagatgctcgtcgctcgtcgatcctgtcgtggtagatccaatgcgcagtctgtacaacaccatggacgtacggctggtggctctattttcgtagtggtggagaacgaccaacaaatgaggtcatgcaatcctacatggtgccgcatcttagatgacgccactcaaggttaagtcctgagagatgtcaaccgtgagatctatgacactggtcgccagatcattacgagtgactgctgaaacatcaaaggatctggaggccgtgtgcatatgctctcttcaaggagacttgtgcgtgtcagtcggataggacctccgtagacaaccattaaccatgctcatggatgagcactctaataacagtcgatcgtatagcccatcccgtgatgaaggcgacgtgagtgagcgcgagtatcctcgtaaagacgtccgtccatgtgtggcgcatgaagggaaggaaaggggtaaatcttaactcagggatataaggctgtgaactatggccaggggatttc

SEQ ID NO: 556705 - DNA, 281 bp, Homo sapiens
  misc_feature (243)..(243): n is a, c, g, or t
taaacatacagaggtctgctatggcactaactcaaagtaagactcgcgcaggagagagctgctgcatagccacagtataacttcacatgttcattaaaaagcaaactgaccgctaaaacttcaaagaaaaagatctcataaaaaagtcttaccccaaaattgcaaacaaatacattaaaaggttagaagaggtgatagaaagcaccacacattacacacaataaaaataactgaatgaattcnacctcaaaaaggccccattcagttgcaaattcaagggg

SEQ ID NO: 556706 - DNA, 946 bp, Homo sapiens
cttggctgcagcgggtgacatgggacaacgcagggaaggagcgagaagcggtccagcttatggcggaggccgagaagcgagtgaaggcttcccactctttcctccgagggttgttcggaggaaacacaagaatagaagaggcatgtgaaatgtataccagagctgcaaatatgttcaagatggccaagaactggagtgctgcagggaatgcgttagtcaagctgccaaactccacatgcagctccagagcaagcatgactctgctaccagctttgtggatgctggaaatgcgtacaagaaagcagaccctcaagaggctatcaactgcttaaatgcagccatcgacatttacacagacatggggaggttcacaatcgcagccaagcaccatatcaccatagccgagatctatgagactgagctcgtggacattgagaaggctattgcacactatgaacaatctgctgattactacaaaggagaggaatctaacagctctgccaacaagtgtctgctgaaggtggcagcctacgctgcacagctggagcagtaccagaaagccatcgagatctatgagcaggtgggagcaaacaccatggataacccttgttgaagttccagtgccaaggattactttcttccaggcgggctctgccacttcatagtggtatgagcctggaagccaaggcttgctctgggcaaatacggaggaaatgttccggcgattttaaggactccggagaagttattcttgagaacctcttggaagctcagaggcacgaacaggtgaggtttactgaagcctgaaggagttggtccaataactgggtccgggcggccccggtgtgtcgttcaaatctcccgggggaaagagatgaccggggggcacttgtgtgcgccctactatggcgggaacgcttatacgccactttgtttcccccttgtc

SEQ ID NO: 556707 - DNA, 971 bp, Homo sapiens
  misc_feature (663)..(663): n is a, c, g, or t
ttttaaagaaacaatttgtaaccaaaattttaaccccaaggattctcacaaaactatatttacaaatgacagcttgaaaaaaaatatccttgcccagtaactcaaagttcggtctctacaatgtcacccttaaatcgggcaggactattttggaaatcacaatatttgccctataaaaatattgtaccccgaacccagcctatgtttcctattatacagcactccaatatagagggactctttatgcaccttaaacgccaaaggtaacatctttcttgaaacctcttaaactattcttatcccccaatctgaggcacccctactgcccaggtatgagtatgtattggtatttttccaaaacacctctatatttatataagtcgcagctatttcggtatcttcccctctagaatggggctctgtgtttgttttccaacaagtaaatgtctttttatcaacagaactggtccttttgtctcccaattcttatttagtctgcgcaggctctatattatccccatggtcttatggggaaacaaaaaaattataatactttctttcacgtatccacacatttttatctgcgcccacgattgcagttctacctgagttatttacaactatttcaacaaaacaaaaaacaccaatctctacccgcatcgngcgagcaggtatctccaacgcaaagggttatataaatctacgatcccttgtgctataacctaaacaagtttcaaacaggccaactgtctcccactactggggctcacaaacggggcaccacatcttggctcaggtttaacccactcttcctggggtatatacaacatgccgcttcgttattgaatccccattttacaaacacccataagaagatttttaccccttttggtggtccccttgttttcaaggacaacaccccggttttgacccgctaaatcttcaaaagctcccccacgtatttaagttca

SEQ ID NO: 556708 - DNA, 543 bp, Homo sapiens
  misc_feature (10)..(10): n is a, c, g, or t
  misc_feature (33)..(33): n is a, c, g, or t
  misc_feature (39)..(39): n is a, c, g, or t
  misc_feature (58)..(58): n is a, c, g, or t
  misc_feature (60)..(60): n is a, c, g, or t
  misc_feature (62)..(62): n is a, c, g, or t
  misc_feature (75)..(75): n is a, c, g, or t
  misc_feature (100)..(100): n is a, c, g, or t
  misc_feature (104)..(104): n is a, c, g, or t
  misc_feature (107)..(107): n is a, c, g, or t
  misc_feature (109)..(109): n is a, c, g, or t
  misc_feature (113)..(113): n is a, c, g, or t
  misc_feature (119)..(119): n is a, c, g, or t
  misc_feature (121)..(121): n is a, c, g, or t
  misc_feature (127)..(127): n is a, c, g, or t
  misc_feature (131)..(131): n is a, c, g, or t
  misc_feature (136)..(136): n is a, c, g, or t
  misc_feature (138)..(138): n is a, c, g, or t
  misc_feature (141)..(141): n is a, c, g, or t
  misc_feature (143)..(143): n is a, c, g, or t
  misc_feature (146)..(146): n is a, c, g, or t
  misc_feature (166)..(166): n is a, c, g, or t
  misc_feature (168)..(169): n is a, c, g, or t
  misc_feature (180)..(180): n is a, c, g, or t
  misc_feature (210)..(210): n is a, c, g, or t
  misc_feature (213)..(213): n is a, c, g, or t
  misc_feature (252)..(252): n is a, c, g, or t
  misc_feature (273)..(273): n is a, c, g, or t
  misc_feature (289)..(289): n is a, c, g, or t
  misc_feature (298)..(298): n is a, c, g, or t
  misc_feature (310)..(310): n is a, c, g, or t
  misc_feature (317)..(317): n is a, c, g, or t
  misc_feature (324)..(324): n is a, c, g, or t
  misc_feature (331)..(331): n is a, c, g, or t
  misc_feature (356)..(357): n is a, c, g, or t
  misc_feature (362)..(362): n is a, c, g, or t
  misc_feature (383)..(383): n is a, c, g, or t
  misc_feature (419)..(419): n is a, c, g, or t
  misc_feature (425)..(425): n is a, c, g, or t
  misc_feature (433)..(433): n is a, c, g, or t
  misc_feature (440)..(440): n is a, c, g, or t
  misc_feature (444)..(445): n is a, c, g, or t
  misc_feature (449)..(449): n is a, c, g, or t
  misc_feature (455)..(455): n is a, c, g, or t
  misc_feature (461)..(461): n is a, c, g, or t
  misc_feature (464)..(464): n is a, c, g, or t
  misc_feature (474)..(474): n is a, c, g, or t
  misc_feature (476)..(476): n is a, c, g, or t
  misc_feature (497)..(497): n is a, c, g, or t
tagtttccanaatttggctttattttgcagtanaaaaancatttggagccattttganananaagtagaggcccngtcaagtcaaaaccgcattgcagcntggnccncngaanaagccncncccganaaanaaaanangcncnacncttgaccccctttatgtccncnnccccccccccncccccccaccaactttattaggttaaaacnccncaaacaggctttccccaaatgaccccccatgtctggggnttggttaaaattttatgcccncaaaaaccaaacttgnggctatgcnatttgggccccnccaaaanatttganaaaaaanaaaaaaaaaagtcaaagggaaaacnnccggntgccgtcccaaaccggggaanattcaatttagaatcccccgaaccccaagaggacanagggcncacaaccngtatggntccnncccntgagcngcagcngcncaaagccacncngattaaaaaattaaaaaaacngtctcaagttgtctgtgtgggtatcccaatgtttgtttaacttcac

SEQ ID NO: 556709 - DNA, 320 bp, Homo sapiens
ctgttgcccaggctggagtgcagtggcacaatatcagctcactgaggcctctcgaccttccagggtcaagcgatcctccctcctcagcctctctagtggctgggactacaggcaggcaccatcactcctggctaatatttttttttttttttaattttttgtagagacagggttttgtcatgttgcccaaactggtctcgaactcataggctcaagcgatccaactgcctcagcctcccaaagtgctgggataacagatgtgagccaccgtgcccggccacagaggcattatttttagcagggtgggcggtggattgtag

SEQ ID NO: 556710 - DNA, 430 bp, Homo sapiens
  misc_feature (98)..(98): n is a, c, g, or t
  misc_feature (117)..(117): n is a, c, g, or t
gtcattccagttcggctctgatctacaaaaaattcctgaagccatatatatacctctggtttccccctcgttagtcgtatatggccaagaaagcaatncagaattccatgatcaaancaaaggcaaagtaactttaagggtgcagccatgaatggattacctaaaggaccccatcatttaaaaaatggacctgataatatgaagcttcttccttgtaattgtctctgacctttttatctgagaccggaattcaggataggagtctagatatttacctgatcctaaccaggaaatatatgatatcggtatttaaaatgtagttagttatatttaatgcccccattcctaagttcctttttggttaatgaagctttcatttcggttatggcggtttgaataatatgattaaatagaaggtttgtgccggtag

SEQ ID NO: 556711 - DNA, 762 bp, Homo sapiens
gcagagcgagatcatggagtactcgtgtgctgctgcctcgaacactcttccagaggacgaaagtgccggaggggggaggctgagaagagactcctcctggtggacttcatgcagccaagccctgttccagcgacaagaattccaggccaagtcctgggtgagaaggtcttggggattgtggtacagaacaccataagttagccaacctcacggagtccctgtggttgctcaccttccagcgatccgcatgctacagccgacagtaatgtgacgtctgctatatgtgtgttctggtgttgaagacccctacattgagcatacccggggcattggatccagtgctgggtgtgcaagaccgtcaggagcagaaatcccaatacatcctgcttctgcaaccacttgacctactttgcagtgctgatggtctcctcggtggagtgtggactgccgtgcacaagcactacctgagcctcctctcctacgtgggctgtgtcgactctgccctggccctgccttgtctcccatttgccgccgtatctcttgctccagtgaggaagcctctgggactacatccattcgtggttgcacttgatccctgctgctgggccgttcttccttgcttggagcacgagcttccttgctcaggcgatgccggtggcccttgcacagggctcttgagggcctggttgccgagcccatggccatcttcccttgcactttctcccttggttcacctgccttttcctggaattgggccctcga

SEQ ID NO: 556712 - DNA, 199 bp, Homo sapiens
aatctagaggatacccaagatgtcagagtggacaagttggatccccggcccatcctctcctgcagtggattatctctatgcaatcaggtcacacattgtcaatacatacctctcatgcaggcagctttaagttcatgcacacactcacaccaagttgcctcctgactgagcagccctcctgtccaaggtaggctcgtgt

SEQ ID NO: 556713 - DNA, 391 bp, Homo sapiens
aaattctcgagcatttactccattccaaaacatacagtcaggttgatatgcatccattatggagtctgacttctacactatccagactgattgcatataacctcaatcacaaaatcatcttaaaacccaaggatatccgtaactcttattgttatccacggctttaatacctccaaatttactttactcatgtccacctttttatctaggcattctagcaaataacagctgcttcagtagtaacttactagtcttgttgctgaacctgattatcctgtactgcacttgttccgaggaaaaatcacgcgtaccatcttgccgactcgctcggagatcgctcccatatcccgggggtacaacgagcagacgaccatacggaacgaaccacgct

SEQ ID NO: 556714 - DNA, 329 bp, Homo sapiens
accggacgtggctgtcgattcgagaaatcagggataacaatttttttttaattaaaaaaaagggttactggaatattaacataatttaatggctcttaatttaaccaaaaattttttacacggattggtaaactccacccattaccgtatcgaagtgaaatccatctctcaggaacatacagttatgggtggaatgtatctgatgctgagagtccagcatatttaagaaaaatcctggcatggtcatggggttctggtggcagtcttctggtgtacaccctctcaaaaagcaaagaattccatctgacttcccggtagcgtcgaaaaaa

SEQ ID NO: 556715 - DNA, 88 bp, Homo sapiens
cttttgcggctccacgtcggcaccagctgcggggcaagatggaggcgctgattttggaaccttccctgtatactgtcaaagccatcct

SEQ ID NO: 556716 - DNA, 1014 bp, Homo sapiens
  misc_feature (629)..(629): n is a, c, g, or t
gccctttcaattgatacaacaccaaacaaccagcaaaggcatctgcaggtgcacagcaagtggcacatgttcaacaaccgtgcaggcatccaggccatcgtgtgcacatcatcaatgctccacacaggtgctatcatgtgcacatcattagtctttgacaccacaagatcatcttccagcatatctcgttggcattgcaacacattgcattgccagcttcatacatcatgcttgccagccagcatatccatcacacagacaggcacaacacacaacactgcattggcgaggatagattcctagtcttcattatgcaattctttcaatatattgcaatgcatgctcatgctacagcaaaggcaggtcacaccacaacacaatgcgaaacaccccaaacatgcagaactctcttaaatggatgaggtatattgtataaatatctcaacttatgttccaccgttaactactctcatctagaaccccactttacctgctgactggttacacacgttaacgcaacataacttaacgcataaccgaacaacaacaacatggccaaaccaactgtaataccattccacttggaacattaccataggcccttataaataacaacgtaacctgtcacngttctcactggcccacatatatatagacttaatactatataagacaaacgttctgtgggggtaggcgacaccccaaaatggacattgcgatgtccagtatgggctcggcagtcgcaaatgatgctttatcaaacacccaaacgggagggataataaatagattccctctctctcgagtcgacctgtttttttccagccgaagtgaatcgcaaatgttaccgcacagcgtattagtatgctgaaaccgaatttgggaacctctaccgacaccctcgcagtattaaaacacccgatggggagtttaacccgaccgatatccgttataggacggatagtaacaatcaactaccttacacaaaatgatgcagtgtagtgagagccacaa

SEQ ID NO: 556717 - DNA, 116 bp, Homo sapiens
ccagagtactgccctccaggggaactcaatttctagaagtctctgggcccagcactctttatttctcatcggagccctccctacggctttcattcttttttaaaactagacagctg

SEQ ID NO: 556718 - DNA, 225 bp, Homo sapiens
ttgacttcggcagctgactatactcaatatctccccactgcagtgtacacgcaaatatccctagaatatagggtactccttaaacacatctgagcactgacctggatagagtgcacttgggagacctggtgacaggcacaaaaagcatgatcagggctagcctcaatacaggaagaaatcatggctatataaaaatactatacctgagtcagctgacggacattc

SEQ ID NO: 556719 - DNA, 824 bp, Homo sapiens
  misc_feature (394)..(394): n is a, c, g, or t
gttatcttttttccttgaagggggaaaaaaatgtgagaagtgtttcttggcgaaattccctggctgcccttttggtggggaacttgtttccagccaaaggtttcttttatagagggcaattagggtatttccacatcagaaacaattaagtaatgttctgtgttttccatctggtgaacattgttttatggtggtcttaatttggtggttggctgccaactgtgttatacatagtatatggaaactttgtaaaacaaaggtttctcgaccaaattcacgattctttaagagatgcaaattcaccttttagcctactataaaaccaccttttagttgcgggttttgactgccccttgagcttctatggatatcttaaatgagtagtcaccttaantacttttgcacatgtaacatttgtctcactcttgagtgagggcaccttttcttgtggacaataatcggataggggcccaatagccaccaataacattgttatcaccaatccaactgtgtttctttgtgatccctatttccatagagccagtccagtctcacagaggttgactgccacttccagtgtctaaactacgaccacagttgttactcaaggtgatttccagttgatagtgaaactccagcctgggccactttctggataaactgtgaaaatagttttataagatcatgattattgaagataaccttttgggaaattttaaatgttcgctgagccgcttacactacttttggatgtagccctttttaagtatcttgttacatttacttttttaaattaagaaattaccgaagaatgtccagtaata

SEQ ID NO: 556720 - DNA, 589 bp, Homo sapiens
  misc_feature (137)..(137): n is a, c, g, or t
aatttgggggggagagggcacaaagaattctccccccccccacgtggtgtgggggggggccccccaaaaaaaaccctccttttttttttttaaaaaaaaaaaagggccccgccccggaattttttttttaatataancccctccccccaaaaaaggggggggtgttttcctcaaggggggcgcggtttttttttttttttgtgccccccccccccccccccccctccaaggggagggggcccccttttttttttttttggagggcgccttaaaaaagggggggggcccccccccggggggtttttttgaggggggggggggggcaaccctccccccccccgtggtggggggggcaaaaaaaaaaaaaaaaaggggggggtcttttgggagggccctccctccaattgtggggggccccccccccccaaaaaagattttgtgggaaaaaaaacggggggcaaagggggcccccaaattttcccccgaataaacacccgggcaaaaagggcttgaaaaccccccgggcccccaaagggttgggaaaaaagggggttaatttggaaagggtaaccggggtttcccctggact

SEQ ID NO: 556721 - DNA, 409 bp, Homo sapiens
gctgtgtgaacccctcgagatgcttttcgccgtatacccgtagaatcagctgagtcatcaggccgtccgaggtccgtggagcgccagaatgcggaccatgcagacctggcgtgcttactttgccgctgccttccacgcctcaatctcattcatgggcagctcattggcgggctcctctgcacggaccccaagccaggggctgacaagcgaagatatacacctggaaggtgcgtatcgcgctgcgtctaggaatgggatacgtgaaatgctagttatgcatgtacatggtagacaaattcacaagcgtagaacacgcccatacatgtgcacacttatgtagtgccagataggagaccctgacacacccaccttctcagctgggctctgcgtatcccccagccttaaggga

SEQ ID NO: 556722 - DNA, 692 bp, Homo sapiens
gaacagggaaaagtatgtaatgcagtgaactaaaaggaaacaccctgggacactgacaagcactgggcagcctggactgtcacaaagcactaaagatgctctcaggagagatggggaatggagaggaagaggagtaatgtcacaatttatacactattcaactttcatcccaaggcaattctgattccatattctccatcaaatagcctgtcaatcaaagaggaaaacaaaaaaactctaacttccactactaccaccatctataatggcaaaatcatatgatcattaatgctcctcaaattctagctcagcagatatgtactgcactgaatctgatgtgcattttccattactttggctgaactgatcaaaacagaaaaattctaaattaaggtacagttaatctctctcaaaatttttatccttcgtagattcattataaagctattggtaatattaacaggatttttaaggataacaaaagaggaaaatacaccatacaaaatgtcatacctggtggtacttcctgcttgtcttccacaggaaaaatgcttacttctaaaataaataatatagttataatctgttacatattgctgatcagtggtttatgccgtgccagatttaagtaatgatgatacttttcataagattttaaacaattcaaatgttttaatcatcactggcttctt

SEQ ID NO: 556723 - DNA, 550 bp, Homo sapiens
atgtatatagaaagagtagtgcctacctaatgaaattacaatagcgcttgtcagtgtgtaacgtaaactgcctgcctggaacatagtaaatgctatataaatatttgaggttttataattaattgggacatctgtatagtaaggactgttggcattgcttctggaattccccttgaatttcaaataatggaaatcaaagctcagagagcttgattaactatgtccaaaggccacacaaccaaaacttggcccaggtaggggatccaaacaccaatctctgaactgtaaaactcatacacttaacatgattctccattgcctcccattactggggggacctcaagaagctaactgtccagcaatggttcttaacgtggcctggagtttgtcagattcaggggaggctgaggtgggatggggacagcagggaaaggctgtggaagagcacggacaggtctaggagcctgagtagggggggtgtctcctgcccaccctacctcgcctcgctcccgcactcctcttctcgctttgtctcacttgtctccccatg

SEQ ID NO: 556724 - DNA, 1213 bp, Homo sapiens
  misc_feature (686)..(686): n is a, c, g, or t
  misc_feature (1213)..(1213): n is a, c, g, or t
gtaaagatgtgcggcggaggaacctggggggcagaagcaggagccagctgggcatgcgactcctgaaggtgttaactgtctggcctatgatgaagccatcatggctcagcaggaccgaattcagcaagagattgctagtgcagaaacccatctggtgtcacgagcgagctggcagctcgtggggtcctcatacaacggagtactgctgcacagatgaccaacatactatcatacagacagatcaagagacctccacgaaaaagtactcgatacatccgacaagaccagtgcctgaccggcaacgtgtatctattcgaggctattcggcattctaccacacttggcaggcacttgcatggcattgacatcacaggcagttgacagcaggattccaatggctagtgttctgccaaaggagccaaagggcaagaaccttggctggtcacaggggcgtttcacttgcaatttcaacaaatctgacgcgacttatccaacgaaaccacgatacgatgggaaccattgaatatgaagacagggtgtgggaagaaaagccaagaagccctacttggtacggaccagaaccctggccttgggaacataccatttacacatagaccacaatgaaggcgaaacattaccatgaaaagttaacgcgtatggtgaagcgagtcattacaccattagantgagtggcttaggctatacgagcgcgtaccgcaggagcctaaagccctagagcaaaggatcaggctgacagagcatgacacaacagatattcacttctcccagaaaagacgcatgcatcatcacatttcacgagaagggcaggttcggggcaccctgagagacacctttcggttacccacagagtggacacagttacacgttaagcacgcaaatggccaaactgaggaaatagggtctagggacaaatcccccacaattcagcaagagcacaagaagtagcaaaggcaaacggcctaggaaaccgtccaaaagcagaatatacctcgagtagcaaggtatccgacaattataggccatacccatataggtggcaccacaaaaagtgggttaacacacaccatataccccacagtgagtaggattttggtaaccaccacaaagtacccacaacaagggaggagtaagagaagacagggatatacaccaacaattcagggagcatcatcacaccatagatcaagtaggn

SEQ ID NO: 556725 - DNA, 197 bp, Homo sapiens
gagagggtcccgtgcggctgttggtgcgaggaagcggtagcacaagtacacccgactcgtgagtggctctcatcctggacagtgtatttggcacacagccctaggtattccatagcttgatggttttatctcggagatccagagacaatctgccggtcgtcagaggagaaggccacactcagcaccacgaatcgccg

SEQ ID NO: 556726 - DNA, 195 bp, Homo sapiens
tgtttgttttgctgagcacttcctctattcatttcatccccagacccctgtgcctctggtccctatagttttactttctccagaatgtcatactgttggaatcttagagcatgcagccttttcttttcttttcttttcttttgagacggagtctcgctctatcgcccaggctggagtgcagtggcgcgatctcgg

SEQ ID NO: 556727 - DNA, 137 bp, Homo sapiens
gcttcggtaccgcatcttgctcccatcagcgctatatgggcagcactatgcttctgtccccaagcacaagttaaccctgtagtctttgtaccaggctgtttgtgatcgtatcagccgctatgtgaaacagcctttac

SEQ ID NO: 556728 - DNA, 790 bp, Homo sapiens
  misc_feature (398)..(399): n is a, c, g, or t
  misc_feature (432)..(432): n is a, c, g, or t
  misc_feature (484)..(484): n is a, c, g, or t
  misc_feature (501)..(501): n is a, c, g, or t
  misc_feature (518)..(519): n is a, c, g, or t
  misc_feature (556)..(556): n is a, c, g, or t
  misc_feature (558)..(558): n is a, c, g, or t
  misc_feature (565)..(565): n is a, c, g, or t
  misc_feature (572)..(573): n is a, c, g, or t
  misc_feature (578)..(578): n is a, c, g, or t
  misc_feature (585)..(585): n is a, c, g, or t
  misc_feature (770)..(770): n is a, c, g, or t
  misc_feature (780)..(780): n is a, c, g, or t
tcaccccatgacaacaagtcatgggagatgtttgaagagatgattaccaccgcagaggagttctaccagtccctggggattccttaccacattgtgaatattgtctcaggttctttgaatcatgctgccagtaagaagcttgacctggaggcctggtttccgggctcaggagccttccgtgagttggtctcctgttctaattgcacggattaccaggctcgccggcttcgaatccgatatgggcaaaccaagaagatgatggacaaggtggagtttgtccatatgctcaatgctaccatgtgcgccactacccgtaccatctgcgccatcctggagaactaccagacagagaagggcatcactgtgcctgagaaattgaaggagttcatgccgccagnnctgcaagaactgatcccctttgtgaagcctgcncccattgagcaggagccatcaaagaagcagaagaagcaacatgagggcagcnaaaagaaagcagcaagnaagagacgtcaccctannaaaacaggctgcagaaacatggaggtcacacgatggntngaaacanttcctgnnctccntatttgnccaggctttcatttctgtctgcgtgagatgatcacgagcgatgcccaagcagcaagggaagcctaagcacccattcatcccctgccaccgatctgagctgcgtaggtgagaggggaccagtgtccatgtacgacacagatgttcctgtctaattcgcctgggcatagcgatccataattgatganttgatgcaancatgttatta

SEQ ID NO: 556729 - DNA, 160 bp, Homo sapiens
  misc_feature (10)..(10): n is a, c, g, or t
  misc_feature (20)..(20): n is a, c, g, or t
aaaaaacaanaatccctggngaccaccaggaagaagattgcccgaacagaccccacacgcgaagcgatccgcacaaaatgccgcattgtaattcattgagtgtcatgtggtattaatcgcaccatcctgaaaatgcaaatgaataaaagtttggtcaatg

SEQ ID NO: 556730 - DNA, 114 bp, Homo sapiens
tcagtaggggtcgtctacgtgtcccatggacaactttatcttagtaaacaagtgcacattatgtcagttatttgcatgtttaaatattatagtctgattattgtaaacaaacaa

SEQ ID NO: 556731 - DNA, 3168 bp, Homo sapiens
  misc_feature (270)..(270): n is a, c, g, or t
  misc_feature (300)..(300): n is a, c, g, or t
  misc_feature (313)..(313): n is a, c, g, or t
  misc_feature (364)..(364): n is a, c, g, or t
  misc_feature (366)..(366): n is a, c, g, or t
  misc_feature (379)..(379): n is a, c, g, or t
  misc_feature (449)..(449): n is a, c, g, or t
  misc_feature (472)..(472): n is a, c, g, or t
  misc_feature (495)..(495): n is a, c, g, or t
  misc_feature (497)..(497): n is a, c, g, or t
  misc_feature (521)..(521): n is a, c, g, or t
  misc_feature (745)..(745): n is a, c, g, or t
  misc_feature (754)..(754): n is a, c, g, or t
  misc_feature (762)..(762): n is a, c, g, or t
  misc_feature (777)..(777): n is a, c, g, or t
  misc_feature (779)..(779): n is a, c, g, or t
  misc_feature (3004)..(3004): n is a, c, g, or t
ggcaaccctcaatgaccaattccccttttatatagtttggtatctgaattagaatcccagaatctacaaattcctctgggtgtgggtgctgcattttaaggattttataacactgccatcaccaagctctcttttgatattcactttaaggagataatttacgggcaaccagagagcataaaccaaagtagatatctatctagatagctagatacatctccatatcattgacaggatacattctggccgagtgtgagtacaacctatggntgtggttggagagaacatgtgttccacctnaatggcagatcangattattccttctcatctgctgcaatggctcaatgtgttaaggagaggagngngacagcaagaacngcattcattcagtcatacagaccaaaaggaggaatgtcgcccagccctctaaactgacccagaacccagntcatgtctcaactgctacctctnctacttagaaagaagtaactccncnaaagcagggttctggacaaatatntttttattgatcatatacaaatagatgaagatggacttggatgttaagaaaaataatactatacaaaatcgagagtagacagttgcccctagacttaaattaaaagtgtgcacattagataatttaatccaatgtatcaggtaaaaacttgaacaaaccttttggcctcttccttaaaattcagggaagcatgtcctccacaaaacagaatcaaaatataaatnaaagactgncttaagangaaaggaaaccttananatgaaaagaagccagatgagaggcacttaactaagaatgaaaagaaactgagtggacaaaataattatgagaagatgaaccttcaaatcagaaagagggaaaaaagcttatttgatactatgggaactcaaaagagagtgaacacaaatgtgaaaattccaagagtgaagaaaagtatcataactacatttagagcatgagaaaaagtatacaattttgagtaataagaacagaaatcaaaagtaactattgtatgctgtattttagtagagcaacactgaagaagaaagaaaacaagaaataatattaaatatgaacatatggagaacagaataatatttttaaaatttttagtttctaagcttatctgaaattttaattttcttttcttatgtaataccagagttattaggaaggtattatctaataacactattttcagtgatattttaagtagttgtcctagaaaaatttctattttttaaaaatgtatatttaaaaatacattaaatgtgtatatacatcaatcatatgtatcgatttctgtttttcttgaattgcaaatgaaatttgtatttttgtgttcctggaataaaataaactcgaatgggtcgtaatatattattcatgctgtaattcaacgtatttgaatactttaagaatgttacatttatagttaacagatactgacctataaattttctgtcatataatgatgctgtgagacaatctgagaagaattaaaatttaaattcatgtattcctacttttttctctattctctaactgtaaaatattttcattacagatggaggaacaaatagatgttagataaatagatatataatagatcatccaaaattcttattcttatggttttatgtagtcagtatttacctctatttttctacatgtttatccttccaatttagttcattacttcctgcacctttgatgtcatatacataaacaggaaataacacatggtggctgggatgtagagagagccacaggacttgtgaatgaaatccacaggcaaggatgtggcgattccttttgcaatattggagggaatgccaaaccctatgtttgctgtggaaaagagtatggtagttcctcaaaacatcaaaatggtattgccttatgattcagcagacccacatcccaagacagcaaaagaattgaaagcagagtcttgaaaaaatatttgcacatccatgtttgcagcagcattattggcaatagctaaaacgtagaagcaattgaactgtccaacaacagatgaatggatgagcaaaacatgatatatacatacaatggaaaattattcagccttaaacgagggaaatattctgacatatgttgcaacttggatgaaacttgaggatattatgccaagtgaaataagttagtcagtgaaggacaaatacagtataattccatatgtataagggacttgaagtggacagaatcatagagatagtacaatgatggttgccagaagctggggggaggaagaaatggggaagtattgtttaatgggtatagtttcagttttacaagatgaaacgaattatggagatggatggtagggatggctgcacaatgttatgactatatttagtaccactgaactgtacacttaaaatgtttaacagagtacattttatgttttatgtatcttaccacaataaaaaaataaaataccttaggaacattttcctgaaagagtccacataaaattcattttaatgcatgtgtttatgcatagctttctatttttctcttttctctttacattccaaattagaatataatgctaatcaagtatagtggctgcgtttctttcttcctctagtctgcaggtagcatacaaatgtaataaagtactcattcatgtcacatctatttattttctgccttataccaagcttgtgggattctcttaaatacaacatttttatacttacacctatgcaatacccattagcatcgccttcctaaatcaggggaaattgagtctctgtaaggtgcagtaacttactaagatacaaaactcagcattaaagtctgtatacttcaatatcctgccctcttctcatttgtctttactgccttttatgtatgtgttagatgttcaataaattctcttttttaaactgaatttaagccgtggagcagtgttttgttgaacactaacatatgatatggacactcttcctccnctttcatttatgatgcagtttcatgacaaagagaaaattctttcactgtggtagaagctttaaataatgaaatgccactttctacctttaacagaactgagggactcaggtgaatggctgagacttgacaaccagggcgacataatcctgtttaattccccctg

SEQ ID NO: 556732 - DNA, 422 bp, Homo sapiens
gtctgagctggggaagatggctcccattcaggttggaggggcttcggcagcccctcatgctggtacaggggcatgtgtatctctggctcttctccagaaggcaccaccacagctgcccacttctgggaagttctatctccggcgggtctgggtctccacaagctcggtgtccggagttgggtcctcgccatcccgctgccaggtcagtgtgatctccgcagggtagaagcccagggcccagcacctcaggggggcctcagggtcagagatggggtggtgggtcacatgtgtcttgggggggtccgcgcgctgcagcgtctccttcccgttctccaggttgtctgcggagccactccaggcacgtgccctccaggtaggctctcagcggctcggccacaggggcggcttcccagtttgctcag

SEQ ID NO: 556733 - DNA, 419 bp, Homo sapiens
ctctgcttttatgattcatgttaagcttttgttcatttaagctagaacttttctatttatacagatcaaataagaatttagtaggcttcctacctatttcacttcaaggagcaccatgatcaattagccaacactacagttctgtgcaaatcagactattgtgattgtggctttgactctgttgtccattatggttaacaatgtgcaccttgcctttggtaatggagtactgccacttggcccctgccaccctgtgatccaattattcctattgcatttaagtttccaactcagtgattgcagttccctctgtaatgtatggcctaaagagaagagaaatcatggagctcttgaagtatgctggggtctcctcataaaaatttttcacagaattggtataaaggaaacaaaaaaaaaaa

SEQ ID NO: 556734 - DNA, 2941 bp, Homo sapiens
  misc_feature (270)..(270): n is a, c, g, or t
  misc_feature (300)..(300): n is a, c, g, or t
  misc_feature (313)..(313): n is a, c, g, or t
  misc_feature (364)..(364): n is a, c, g, or t
  misc_feature (366)..(366): n is a, c, g, or t
  misc_feature (379)..(379): n is a, c, g, or t
  misc_feature (449)..(449): n is a, c, g, or t
  misc_feature (472)..(472): n is a, c, g, or t
  misc_feature (495)..(495): n is a, c, g, or t
  misc_feature (497)..(497): n is a, c, g, or t
  misc_feature (521)..(521): n is a, c, g, or t
  misc_feature (745)..(745): n is a, c, g, or t
  misc_feature (754)..(754): n is a, c, g, or t
  misc_feature (762)..(762): n is a, c, g, or t
  misc_feature (777)..(777): n is a, c, g, or t
  misc_feature (779)..(779): n is a, c, g, or t
ggcaaccctcaatgaccaattccccttttatatagtttggtatctgaattagaatcccagaatctacaaattcctctgggtgtgggtgctgcattttaaggattttataacactgccatcaccaagctctcttttgatattcactttaaggagataatttacgggcaaccagagagcataaaccaaagtagatatctatctagatagctagatacatctccatatcattgacaggatacattctggccgagtgtgagtacaacctatggntgtggttggagagaacatgtgttccacctnaatggcagatcangattattccttctcatctgctgcaatggctcaatgtgttaaggagaggagngngacagcaagaacngcattcattcagtcatacagaccaaaaggaggaatgtcgcccagccctctaaactgacccagaacccagntcatgtctcaactgctacctctnctacttagaaagaagtaactccncnaaagcagggttctggacaaatatntttttattgatcatatacaaatagatgaagatggacttggatgttaagaaaaataatactatacaaaatcgagagtagacagttgcccctagacttaaattaaaagtgtgcacattagataatttaatccaatgtatcaggtaaaaacttgaacaaaccttttggcctcttccttaaaattcagggaagcatgtcctccacaaaacagaatcaaaatataaatnaaagactgncttaagangaaaggaaaccttananatgaaaagaagccagatgagaggcacttaactaagaatgaaaagaaactgagtggacaaaataattatgagaagatgaaccttcaaatcagaaagagggaaaaaagcttatttgatactatgggaactcaaaagagagtgaacacaaatgtgaaaattccaagagtgaagaaaagtatcataactacatttagagcatgagaaaaagtatacaattttgagtaataagaacagaaatcaaaagtaactattgtatgctgtattttagtagagcaacactgaagaagaaagaaaacaagaaataatattaaatatgaacatatggagaacagaataatatttttaaaatttttagtttctaagcttatctgaaattttaattttcttttcttatgtaataccagagttattaggaaggtattatctaataacactattttcagtgatattttaagtagttgtcctagaaaaatttctattttttaaaaatgtatatttaaaaatacattaaatgtgtatatacatcaatcatatgtatcgatttctgtttttcttgaattgcaaatgaaatttgtatttttgtgttcctggaataaaataaactcgaatgggtcgtaatatattattcatgctgtaattcaacgtatttgaatactttaagaatgttacatttatagttaacagatactgacctataaattttctgtcatataatgatgctgtgagacaatctgagaagaattaaaatttaaattcatgtattcctacttttttctctattctctaactgtaaaatattttcattacagatggaggaacaaatagatgttagataaatagatatataatagatcatccaaaattcttattcttatggttttatgtagtcagtatttacctctatttttctacatgtttatccttccaatttagttcattacttcctgcacctttgatgtcatatacataaacaggaaataacacatggtggctgggatgtagagagagccacaggacttgtgaatgaaatccacaggcaaggatgtggcgattccttttgcaatattggagggaatgccaaaccctatgtttgctgtggaaaagagtatggtagttcctcaaaacatcaaaatggtattgccttatgattcagcagacccacatcccaagacagcaaaagaattgaaagcagagtcttgaaaaaatatttgcacatccatgtttgcagcagcattattggcaatagctaaaacgtagaagcaattgaactgtccaacaacagatgaatggatgagcaaaacatgatatatacatacaatggaaaattattcagccttaaacgagggaaatattctgacatatgttgcaacttggatgaaacttgaggatattatgccaagtgaaataagttagtcagtgaaggacaaatacagtataattccatatgtataagggacttgaagtggacagaatcatagagatagtacaatgatggttgccagaagctggggggaggaagaaatggggaagtattgtttaatgggtatagtttcagttttacaagatgaaacgaattatggagatggatggtagggatggctgcacaatgttatgactatatttagtaccactgaactgtacacttaaaatgtttaacagagtacattttatgttttatgtatcttaccacaataaaaaaataaaataccttaggaacattttcctgaaagagtccacataaaattcattttaatgcatgtgtttatgcatagctttctatttttctcttttctctttacattccaaattagaatataatgctaatcaagtatagtggctgcgtttctttcttcctctagtctgcaggtagcatacaaatgtaataaagtactcattcatgtcacatctatttattttctgccttataccaagcttgtgggattctcttaaatacaacatttttatacttacacctatgcaatacccattagcatcgccttcctaaatcaggggaaattgagtctctgtaaggtgcagtaacttactaagatacaaaactcagcattaaagtctgtatacttcaatatcctgccctcttctcatttgtctttactgccttttatgtatgtgttagatgttcaataaattctcttttttaaactg

SEQ ID NO: 556735 - DNA, 152 bp, Homo sapiens
aaccttagatcgagctggtaccgactgcatctgtgctccatcactgtactcccttgttcaccccagaagcaggaagaaggtcaagaatcagacctttggctgggcatggtggctcacacctgtaatcccaggactttgggtggccaaggcag

SEQ ID NO: 556736 - DNA, 243 bp, Homo sapiens
  misc_feature (28)..(28): n is a, c, g, or t
ggtgcccaaaaaggttgggcactgctantctataccgctgtaggatgactatagttaacaataatatgtagtttcaaaaagcctagaaggaagacattgaatgttcccaacacaaagaaatgatacatgtttgagatgatggatatgctgattatcttgatctgatcactatacatgatatgtattgtaacatcacctaggtaccccatgaatatgtacaattatgtgtcaagataaataagt

SEQ ID NO: 556737 - DNA, 752 bp, Homo sapiens
  misc_feature (514)..(514): n is a, c, g, or t
  misc_feature (522)..(522): n is a, c, g, or t
  misc_feature (534)..(534): n is a, c, g, or t
  misc_feature (546)..(546): n is a, c, g, or t
  misc_feature (553)..(554): n is a, c, g, or t
  misc_feature (562)..(564): n is a, c, g, or t
  misc_feature (571)..(571): n is a, c, g, or t
  misc_feature (578)..(578): n is a, c, g, or t
  misc_feature (589)..(591): n is a, c, g, or t
  misc_feature (593)..(594): n is a, c, g, or t
  misc_feature (597)..(597): n is a, c, g, or t
  misc_feature (639)..(639): n is a, c, g, or t
  misc_feature (644)..(644): n is a, c, g, or t
  misc_feature (646)..(646): n is a, c, g, or t
  misc_feature (663)..(663): n is a, c, g, or t
  misc_feature (677)..(677): n is a, c, g, or t
  misc_feature (747)..(747): n is a, c, g, or t
cggagaggagcggggcgggcgccgcgcgccgccagggcgggggcgcgcccacggagagcgggggacgccgaaaagggggaggcagcgggcaaaaagggcacggggccggcgggaggcaaggcgccgaggcgaccagagagggggaacggggggcacaccaacgggcgcaaaaacaacagacagcccgaggcgggcagggaaggagcagggcagcagacgagggcggaggcgggggggacgggcagagcgggggcgcgaaggcccagagggcgagggggggggacgcaccgcgcgggccagggggcggggggaaacagggggcggggaggccgaaggggggcaccaaccaaaaccgggcgccgggggcagcggagagggaacacaacccaaaaacgagacgccagcggggcggcccgggcggccgcagcccgtaccagcacggggcagggcgaaagggcagcggagtggaggaaggtgccgtgaacggccggtgtgggaggggaagagaaaggtnataggcgncaagaagaccanaggaagcgggtntgcgccnnaagaaacnnnaagcctngaatganagcaaaaaggnnnannccncgcagcgaaggagagcgggcaaaggcaaaaggagaaaccggngccgnanccagcgcaggggcccgngcagcagcgagaangaggagaaggggagcagcaaggccggcagaaacagcccggggaaggacgcggcggaagggaagcaagcgnaacag

SEQ ID NO: 556738 - DNA, 349 bp, Homo sapiens
cctggacatgcatatctggcaacattgaacacaatgaaagatgtgcttaatgattcagaaaataaggcccaggtgtctgtgaatgtccttagtgatcatgacaaggtggagaagtccctgcaagaaaaaaagtcctgtgatgaaatccttgggaatcagaaacctgcattacattaacttgcagaagaaactaaggctctggagaaaaatgttaagcctgatgtagaaaagttatgtaagcaagaatttgatgatttgcaaggaaagtggaccaagcttaaggttttggttaccaaagatatacaaatgcttgaggaaaatgctatcacaatcagagcttttgcggccg

SEQ ID NO: 556739 - DNA, 197 bp, Homo sapiens
gcagaaaaaaagtgagaacattttgattccccttttttttacttgatggggtttatgaacaacccgtagggcctttatggccagtttgagtcccgcccactttgacttttacgttcccattcctgggttacccccttcctcccgatttgttcccctattttgggctttaaatttcaataaaaaactttctgagggga

SEQ ID NO: 556740 - DNA, 364 bp, Homo sapiens
cgatacatcagccaagctatagtaatagatatagaattaggtgcaatcaaggcttataagagtgaatttcaagttgttaccagtaaagtttgtctttttcattcagcctgatgcctttaacagaaaactcagatgagtggattggtcacgtgagatggcagtgacaaaaacttcagtttaaaatgccttatggatctgtattggcattccttcccgctgatgaaattctaggagcttttagtaaattaaagctgcatttgcatgaagaagccagagaaattactgactggtttgaagataatgacgtgcatggtcggataagaagacatgccctggagttgctgtttgaccatcagtatcgtta

SEQ ID NO: 556741 - DNA, 154 bp, Homo sapiens
cctacagactgggtcctgcggagtggggcgttcactgatgacttccaggccctacgcggtcagaggctgagaccagtctccaaggaactggacccttttggacagtagagctgtgccagctgctgctggagtggcctggatgggggtgctgcgt

SEQ ID NO: 556742 - DNA, 441 bp, Homo sapiens
tggggaccccagggggacagaggcccaactctccctcccttgacacactgggtccaggaatagcaagaccctcccctcacacagggacaatattctcacagccagtttttttaaatctgtgagctgaaatcatgccaggtgattccagttgactgggagtaaggttggagcgttctccctacccccctcctgtgcggctaagagggtgctgaccgtctcccctgggcctggtgaccaagccagccttgtccaccctgacctactgtccagctgtaatcaccttttttgcagggtaccttccggcacactgagggctcgccatcttctgtggcgacatccctgaacaacttcttatactcagggccttgtgaaggaaagcgcgcgtccattaggctgtctgaagggaaagactagaacttcggagagcagggggtgtcctgg

SEQ ID NO: 556743 - DNA, 1761 bp, Homo sapiens
  misc_feature (1093)..(1093): n is a, c, g, or t
  misc_feature (1139)..(1139): n is a, c, g, or t
aactcctcccaccaaccgacaagagagacagagaaggacagagagagagagagacaacgaagaaacatcgtctcatgtctttcaatcttctgtgatgattatcattgtctgttcagtttgtgtgtgtcgtctaccatactactcgtcgttgtgtttctgaccattttttatcgttgggatagttccgctcattccctctcatttggatatgggttctcccacataataatcgtcttcgtttgtgtttttcccccagaagaggggctgctttccctattgttcattcacaaggggcgacatacaaggcttgcaggtgttgttgtgagacgccgcgcacacgctgtgcggaggggtcgtgcctctcagcaaagcgtgtttgttttttgttgcacacccccgtcgtcctcctttttattagtggggacactccacaatttatgctttttctcctcaaggaagcacgatcaatcacagttgtgggggaggaaatttttttccgacgtcgtattgattgtcgcgcgggggaggatccagtgtgcgatttgtgcaacagtctaaagtgggcttttatcatcgtgttgtagcccacgcaaatatggttctactttctgtgggcgtagaagttacgtatattgtctttcatcgggggcgccccacaaaacaccgtggtggtcgacaacaacagttgtgtggtaaaaaagcgcgtcttccccccgcccttataaagggtggtgggacaaaaaatattttttaggagagggacgcacaaaggttgtgtgtcgtgccgtctgttctacaagaacagtgtgtcctctctaataatatagcggcttttataatgggggtctctttcgtggggagaaaaaaaaccgcttaactatatctgttatacgataagaaactttcctccgcggagagaggttgttcttctgtgtcgtctgcaaataagatgtcttcctaccgaaacccccacgcattatgagatcctcgcgggttttataaagacttagggaactcgggggtgtctatatattttaatatctcactcggcgctctgcgagatagaagagatctctcgcggtgtatatagatnttgtgtgatatatgataaaagcagccactcttatagaggagagagngtcgtcactcttctctcttgtgccacacacacaaagagtgtgtcgcccactcttatatacacaccccctctctcacgcgagagagaaatatatatatagacaactctcgttctctgtttgctaaagaaactctctcatcggctgttatattctcgggggcgtctctatatatacaaatatatagacacagagcgtgtttctctcgagatatagtgtgtgcgcacacctcgtatgaacacacaggaacacctacacacaaatatagtgttaaaatcctctcgtgtgtctctttctctgggtgaacacacacagagtgtgttaaaattgttctggagaatataaaaaccactcgccccccacgcgaggaaattttcgcgggaatttgagagtgtttctctctccgatataagagacacaaaatatattgagatgcactcgcgagtatggtcacattaatgaggtgttttacccacctctcgagctgatacacgatatggaaaccccacttctctttttaatactccgagattatattattttgtggtataattggtggagaaaaactatacttgtgatgttttcactatatatgaaattttcccccataaacccgggtttttta

SEQ ID NO: 556744 - DNA, 700 bp, Homo sapiens
cgtggtggctcacacctgtaatcccagcactttgggaggccaaggtgggaggataacttgaggccaggagtttgaaaccagcctgggcaacatagttagaaccccatctctattaaaagaaaaatagtagtatgtagatagaacacatcaaaaatgtagaagaataagtagcaaatttaatgggttcaagggtaaagggaacgctgactttctctagtgtttcagttttctatttattttaacaacattaatgaatataaactgttagaagcagtgaagagtattttttttaaaggcatacttttctcagatgctattgttagataactatatgttaattttcatggttactaatacaaaactgggtatagaataaacgtatcctggctcccagtgtaggatgctttccattgtatcacaatgccctcagtcagctgtagcaatagactgtattcagtgtagttcatactaaacagggtaatttgattctataatttttgttccacattgacatcttcatatttaactttggatttaaacgcgacgaagggttttgaccttgttgaattctagaacatttcgaactctctttgccagggcccaggtggctcccaccctgtaatgccaggactttggggagggctgaacgtggggtggaatcacttgacgttccgggaaggttcgcacaatccggccctgg

SEQ ID NO: 556745 - DNA, 271 bp, Homo sapiens
gagtgatgtcatcaaaattaaacaattagctgagtaaaagcctaaattataaccatatctggacataaggggatgccacaagtggtcatgaggaagagattaatctctacactctcaaagccttggactaagagacattcattcattcaaacaaccctttttttttttttttttttggaaaggggttctttttggcccaggctgaagggggggggcacactcgtgggctcagggcaacctttaccttcccagaagtacacccggcgggggg

SEQ ID NO: 556746 - DNA, 744 bp, Homo sapiens
agcgaatgacctactctctttatcctctgactaacctgtagatcttcatcacacacttaattccttcatcctccttgcctatctcactctctgcaagatccctagcacctgtcccctttcgtcacctcttacctcaactacttggcacacgacaatcttcatactcagcgcttctacattctgggcctagcgaggagacgagaacaaggcgaagtagaaatatcgatccaggtaccagtgtgtatattgctaaacacgctcgaagcatgcgttctgtccccaaggcaaggagtgggagaaagaagcttttgagatgctagtcgtgacacggattccagcacaaacgagactcgtgttgtagagtcgagtgtaacaacactcagtcggactactcacccagttcatgaagtgagtcgacgtgatgtgggcctcgcacgcacactgatggctttcctgccttcattccactgtccctgccacagggacatgaatctcaatcctttgttgatgtgctgtcatagatattccatggtgtactgtgtgccatcgattttctttatgcagtctatcactctgactggtcattctgggttggttccacacgactttgctattgtgaaccagtgccgcaataaacataacgctatgcatgtgtctttatagtagaatgatttttaatcctttgggtatataccccagtgaatgagattgctgggtcaaatggtatttctggtctaaatcctt

SEQ ID NO: 556747 - DNA, 1062 bp, Homo sapiens
  misc_feature (999)..(1000): n is a, c, g, or t
cacgcgtccgattatttttgtcatttttttctttttattataaaagtaatgcaatgtagttatggggggggaaattgtactaaattctataaagtaaaaagtcaaagtcttttactgttcttcatcccacatcccattttccagagtgagctataattgggtgaatttttccaaactttataaatacacttgcaaacatttatacacagcaacctagataataatgttacaggcattgccttttcagttaatgtgtcatggccctttttctagactatgagtgcatagtcttctagtactaccaataacagcatttatcaagcatttactatatgccactaattctaacagctctgtgagacacttcatgaagaacttgaggttccaggtaattctgtaatttgcccaagagcacataatttatgggaccaggatttgaagcgaggcagcctgacctcaaagttcatcggtctttttgtttgtttgttttcctaagagacggggtttcactctgtcacccaggctggagtgcagtgacggatcatagctcactgctgccttgagctcctgagctgaaggaatcctcccgcctcagcctgcgagtagctgggactacaggcatgtgccactgcatccagctaattgttaagattttttgtagcgatgaggtctcactatgttgcccagactggtcttgatctcctggcctcaagcagtcttcccgctttgatctctgaaagtgctgggattacagatgtgagccaccatgcccagctaaagttcatgttttaaccataaaaataggtaatgctttagtacacatgtatgtaaataaaaatttagatattgccaaaatgaaattaagaatcttaaacaaggaccagctaagacctgcggggacatggtttcgcaaataattggaaacattaagtcatgtaaaagtagttggaaaagtatttttataatgttgaatgagtttattattactctgtggaaaannaaattatagtaacagcactgcagcagaaccaagactaccaagctttagtcagtgacttactc

SEQ ID NO: 556748 - DNA, 1222 bp, Homo sapiens
gatgattacttctttatagcccatcgtggatgaacggcggggcattggtggtatctttctttgatgactcttgactctccgctccaaggcaggaggctgctttcgcgtatcgtacagagcctgtgccagggctgtacgcttccttcttacacttccccttgtgcaaacaagcactgctgcactgcacctcattcaccccccaggcagacagctgctggcacgcagcctcagcacagcaggcacggctatgctacgacacttctaactcctgctgatatgactcgcgggccacaacagcttctggccctctttcacatccaaggatccagcacactctgacaacgctactcctctgactgctccttctaccctcataaccgtgcccgcactggcgagatacactggcacttcaacccatcagaagcaacttccacacagcaagtcctgcacacacttcctggccaagctttcctaccgcccactccaaacgcggcacctgggcgctgcgctctgaaatgccacgagcagcacatggcctgctgacagcggcgctatatggcagggccacatcgactgcttgtgctcacccactgcccactctgcgtccgcgcacctatctgcccaacctagtgctgcgcactgtctactcctgttgcctctacgctccttcttccacctcttgcaccccctatccctcgctgcgcgccccgcctgacttaacccactgcttctcggcgactgctttgctccagcctgcactgcacacttgcgctgcccgacttgccgccacgcactctgctcccgcaacgctccacctctgcacttcacacaccgatcaatgtctataccttctcctagatggctccactaactctaattactatgaacccttaagcactttcacaccaacacacatatgggcaccactttggaaagcatatacccacaacagggcatatttcgcaacgcaactacaccgggcgccacccatgttcgcacattaaagcgctacgtcccccaccctgctcctctaacaccgcacaaaccacttcgtccttaacagtccctaggaagacctaccttcggtcatctaccacccatgaaccaaattctatcaccaccaaagcctatctcatcatatagcttgtggcagacccaagacataaagcactaaccgtggaccgcgcggacagcagtacctactacctctcactctctcccc

SEQ ID NO: 556749 - DNA, 531 bp, Homo sapiens
  misc_feature (468)..(469): n is a, c, g, or t
tgactgagagaggtgccacagtacactaagacacgctgacacaagtgaaagtgtgtttacaaagctgtgccacagtcttagtaaaactgtgtcttggccgggcgcagtgctcatgcctataatcccagcactttgggaggccgaggcaggcggatcactggtcttgatctcctggcctcaagcagtcttcccgctttgatctctgaaagtgctgggattacagatgtgagccaccatgcccagctaaagttcatgttttaaccataaaaataggtaatgctttagtacacatgtatgtaaataaaaatttagatattgccaaaatgaaattaagaatcttaaacaaggaccagctaagacctgcggggacatggtttcgcaaataattggaaacattaagtcatgtaaaagtagttggaaaagtatttttataatgttgaatgagtttattattactctgtggaaaannaaattatagtaacagcactgcagcagaaccaagactaccaagctttagtcagtgacttactc

SEQ ID NO: 556750 - DNA, 242 bp, Homo sapiens
tcagtcggtacctgatgtatccccaacacttcaggaggctaaggcaagaggatcacttgaggtcaggagtttgagaccagcctggccaacatggcaaaaccccgtctctacttaaaagacaaaaattagccagggttagtagcacgtgcctataggagatcgagaccatcttggctaacacggtgaaacgctgtctctactaaaaatacacaaaattagccgggcgtggtgttgggcgataa

SEQ ID NO: 556751 - DNA, 781 bp, Homo sapiens
cgggttcctgggctccgggctctgggtggcggcggctgtgagcggcggcactgcggcgcaggcggcggaggccagcgggcgccgtcggcggctggccctgtcggccgcgggatgaggaagcggaccgagcccgtcgccttggagcatgagctgctgcgccgctgctggtgctccgtcctcctccggctctggccgccgctggctgctggactgcctgactgcctgcctgaagcagaacctcacgcctgactgggccctggtggctgtgttgagccgcgctagcgcagcctgacgctgggcaatgaagctggggctgcctggggcaggcgcaaaggcgcgtgtaggtttggcccctagaggaatgatactctttctggtgttttggggttggtacagttgcgcattccactttcctcatcacaactatgtcctggacatagcaggccaaagctgatttcctcttgacatttcgtacagagttccctaatttcattggatttgaggaaaaccacaggatcagggttcgaatcacacgtgtaacctactacctgcagccagaggaagacgtgaccattggagtctggcacacggtccctgcagtctggtggaagaacgcccaaggcaaagaccagatgtggtatgaggctgccttgggttccaggcaccctatcattctgtaccctgcatgggaacgcaggtaccagaggaggcgaccaccgcggtggagctttaccagggtgcctgaggtccccttgggtaaccatgttggtcacccttgaca

SEQ ID NO: 556752 - DNA, 129 bp, Homo sapiens
  misc_feature (104)..(104): n is a, c, g, or t
agcgcatggtctgatgagcatgctcgcagcatctatagctgacacttgtgcatctaaatcatcgctggcagagtgactggccactgcagcacagatgacatctncagaagcgtgcgacgctcgttgcat

SEQ ID NO: 556753 - DNA, 726 bp, Homo sapiens
  misc_feature (84)..(84): n is a, c, g, or t
  misc_feature (87)..(87): n is a, c, g, or t
  misc_feature (89)..(90): n is a, c, g, or t
  misc_feature (92)..(92): n is a, c, g, or t
  misc_feature (335)..(335): n is a, c, g, or t
  misc_feature (337)..(337): n is a, c, g, or t
  misc_feature (342)..(342): n is a, c, g, or t
  misc_feature (347)..(348): n is a, c, g, or t
  misc_feature (352)..(353): n is a, c, g, or t
  misc_feature (359)..(359): n is a, c, g, or t
  misc_feature (363)..(363): n is a, c, g, or t
  misc_feature (365)..(366): n is a, c, g, or t
  misc_feature (376)..(376): n is a, c, g, or t
  misc_feature (380)..(380): n is a, c, g, or t
  misc_feature (384)..(384): n is a, c, g, or t
  misc_feature (389)..(390): n is a, c, g, or t
  misc_feature (393)..(394): n is a, c, g, or t
  misc_feature (400)..(401): n is a, c, g, or t
  misc_feature (405)..(405): n is a, c, g, or t
  misc_feature (412)..(412): n is a, c, g, or t
  misc_feature (424)..(425): n is a, c, g, or t
  misc_feature (428)..(428): n is a, c, g, or t
  misc_feature (432)..(432): n is a, c, g, or t
  misc_feature (445)..(445): n is a, c, g, or t
  misc_feature (447)..(447): n is a, c, g, or t
  misc_feature (451)..(451): n is a, c, g, or t
  misc_feature (457)..(457): n is a, c, g, or t
  misc_feature (461)..(461): n is a, c, g, or t
  misc_feature (467)..(467): n is a, c, g, or t
  misc_feature (469)..(469): n is a, c, g, or t
  misc_feature (493)..(493): n is a, c, g, or t
  misc_feature (496)..(496): n is a, c, g, or t
  misc_feature (498)..(498): n is a, c, g, or t
  misc_feature (504)..(504): n is a, c, g, or t
  misc_feature (552)..(552): n is a, c, g, or t
  misc_feature (554)..(554): n is a, c, g, or t
  misc_feature (557)..(557): n is a, c, g, or t
  misc_feature (562)..(562): n is a, c, g, or t
  misc_feature (577)..(577): n is a, c, g, or t
  misc_feature (583)..(583): n is a, c, g, or t
  misc_feature (587)..(587): n is a, c, g, or t
  misc_feature (591)..(591): n is a, c, g, or t
  misc_feature (598)..(598): n is a, c, g, or t
  misc_feature (603)..(603): n is a, c, g, or t
  misc_feature (608)..(609): n is a, c, g, or t
  misc_feature (627)..(627): n is a, c, g, or t
  misc_feature (629)..(629): n is a, c, g, or t
  misc_feature (631)..(631): n is a, c, g, or t
  misc_feature (635)..(635): n is a, c, g, or t
  misc_feature (639)..(639): n is a, c, g, or t
  misc_feature (643)..(643): n is a, c, g, or t
  misc_feature (665)..(665): n is a, c, g, or t
cccaaaagctgtcctcaaaagcaaggaaaatatatactgacttcatagaaaaggaagctccaaaagagataaacatagattttnaancnnanactctgattgcccagaatatacaagaagctacaagtggctgctttacaactgcccagaaaagggtatacagcttgatggagaacaactcttatcctcgtttcttggagtcagaattctaccaggacttgtgtaaaaagccacaaatcaccacagagcctcatgctacatgaaatgtaaaagggagcccagaaatggaggacatttcattctttttcctgaggggaaggactgtgacctgccananagacngaccnngaanncagccngggngnncaggaaacancacncagnactannganncaaagnngggnagtgaancaggaagccagnnacngacnaggagaagctggnancagnacagcncccncactgngnacagaacgcaagaagggaataggnggncngaacgnggcgtcccaccctgaaaagcaggaacgcaagatgatgaaagagacaangnaanactgntggtccaaaagcatntaaaancaanaganctgggantatgnggccnnaggtagctggttgtacancntncccnaaancganccatgttaccacatagtagttntagtttaggattcagtaacagtgaagtgtttactatgtgcaacggtatcgaagttcttatg

SEQ ID NO: 556754 - DNA, 788 bp, Homo sapiens
  misc_feature (84)..(84): n is a, c, g, or t
  misc_feature (87)..(87): n is a, c, g, or t
  misc_feature (89)..(90): n is a, c, g, or t
  misc_feature (92)..(92): n is a, c, g, or t
  misc_feature (349)..(349): n is a, c, g, or t
  misc_feature (395)..(395): n is a, c, g, or t
  misc_feature (582)..(582): n is a, c, g, or t
  misc_feature (614)..(614): n is a, c, g, or t
  misc_feature (616)..(616): n is a, c, g, or t
  misc_feature (619)..(619): n is a, c, g, or t
  misc_feature (624)..(624): n is a, c, g, or t
  misc_feature (639)..(639): n is a, c, g, or t
  misc_feature (645)..(645): n is a, c, g, or t
  misc_feature (649)..(649): n is a, c, g, or t
  misc_feature (653)..(653): n is a, c, g, or t
  misc_feature (660)..(660): n is a, c, g, or t
  misc_feature (665)..(665): n is a, c, g, or t
  misc_feature (670)..(671): n is a, c, g, or t
  misc_feature (689)..(689): n is a, c, g, or t
  misc_feature (691)..(691): n is a, c, g, or t
  misc_feature (693)..(693): n is a, c, g, or t
  misc_feature (697)..(697): n is a, c, g, or t
  misc_feature (701)..(701): n is a, c, g, or t
  misc_feature (705)..(705): n is a, c, g, or t
  misc_feature (727)..(727): n is a, c, g, or t
cccaaaagctgtcctcaaaagcaaggaaaatatatactgacttcatagaaaaggaagctccaaaagagataaacatagattttnaancnnanactctgattgcccagaatatacaagaagctacaagtggctgctttacaactgcccagaaaagggtatacagcttgatggagaacaactcttatcctcgtttcttggagtcagaattctaccaggacttgtgtaaaaagccacaaatcaccacagagcctcatgctacatgaaatgtaaaagggagcccagaaatggaggacatttcattctttttcctgaggggaaggactgtgacctgccataaagactggacctntggaattcagcctgggctgtttcaggggaaaccagttcactcaggnaactaatttggatttcaaaaggttgtggggtagtgggaaatcagggcaaggcccagtaaacctgggacctaaggggaggaaaagctggtaatcaaggaaaccaggcttccccttcaactggttgtacaagaaaccgccaagaacgggacattacggtggtcttagaacgtggtggtctcactctganaaagcaaatgtaacgatgatgaaagagacaangnaanactgntggtccaaaagcatntaaaancaanaganctgggantatgnggccnnaggtagctggttgtacancntncccnaaancganccatgttaccacatagtagttntagtttaggattcagtaacagtgaagtgtttactatgtgcaacggtatcgaagttcttatg

SEQ ID NO: 556755 - DNA, 729 bp, Homo sapiens
  misc_feature (84)..(84): n is a, c, g, or t
  misc_feature (87)..(87): n is a, c, g, or t
  misc_feature (89)..(90): n is a, c, g, or t
  misc_feature (92)..(92): n is a, c, g, or t
  misc_feature (177)..(177): n is a, c, g, or t
  misc_feature (338)..(338): n is a, c, g, or t
  misc_feature (340)..(340): n is a, c, g, or t
  misc_feature (345)..(345): n is a, c, g, or t
  misc_feature (350)..(351): n is a, c, g, or t
  misc_feature (355)..(356): n is a, c, g, or t
  misc_feature (362)..(362): n is a, c, g, or t
  misc_feature (366)..(366): n is a, c, g, or t
  misc_feature (368)..(369): n is a, c, g, or t
  misc_feature (379)..(379): n is a, c, g, or t
  misc_feature (383)..(383): n is a, c, g, or t
  misc_feature (387)..(387): n is a, c, g, or t
  misc_feature (392)..(393): n is a, c, g, or t
  misc_feature (396)..(397): n is a, c, g, or t
  misc_feature (403)..(404): n is a, c, g, or t
  misc_feature (408)..(408): n is a, c, g, or t
  misc_feature (415)..(415): n is a, c, g, or t
  misc_feature (427)..(428): n is a, c, g, or t
  misc_feature (431)..(431): n is a, c, g, or t
  misc_feature (435)..(435): n is a, c, g, or t
  misc_feature (448)..(448): n is a, c, g, or t
  misc_feature (450)..(450): n is a, c, g, or t
  misc_feature (454)..(454): n is a, c, g, or t
  misc_feature (460)..(460): n is a, c, g, or t
  misc_feature (464)..(464): n is a, c, g, or t
  misc_feature (470)..(470): n is a, c, g, or t
  misc_feature (472)..(472): n is a, c, g, or t
  misc_feature (496)..(496): n is a, c, g, or t
  misc_feature (499)..(499): n is a, c, g, or t
  misc_feature (501)..(501): n is a, c, g, or t
  misc_feature (507)..(507): n is a, c, g, or t
  misc_feature (555)..(555): n is a, c, g, or t
  misc_feature (557)..(557): n is a, c, g, or t
  misc_feature (560)..(560): n is a, c, g, or t
  misc_feature (565)..(565): n is a, c, g, or t
  misc_feature (580)..(580): n is a, c, g, or t
  misc_feature (586)..(586): n is a, c, g, or t
  misc_feature (590)..(590): n is a, c, g, or t
  misc_feature (594)..(594): n is a, c, g, or t
  misc_feature (601)..(601): n is a, c, g, or t
  misc_feature (606)..(606): n is a, c, g, or t
  misc_feature (611)..(612): n is a, c, g, or t
  misc_feature (630)..(630): n is a, c, g, or t
  misc_feature (632)..(632): n is a, c, g, or t
  misc_feature (634)..(634): n is a, c, g, or t
  misc_feature (638)..(638): n is a, c, g, or t
  misc_feature (642)..(642): n is a, c, g, or t
  misc_feature (646)..(646): n is a, c, g, or t
  misc_feature (668)..(668): n is a, c, g, or t
cccaaaagctgtcctcaaaagcaaggaaaatatatactgacttcatagaaaaggaagctccaaaagagataaacatagattttnaancnnanactctgattgcccagaatatacaagaagctacaagtggctgctttacaactgcccagaaaagggtatacagcttgatggaggggngggggggggggggggggtgggaaaagagggggggggtgtagggtggtgtgggtgggggtgaggggggggtggggggggaggagggtgatggtgcggcgggggggggggggaaggaggagaaatgaagctttttcctgaggggaaggactgtgacctgccananagacngaccnngaanncagccngggngnncaggaaacancacncagnactannganncaaagnngggnagtgaancaggaagccagnnacngacnaggagaagctggnancagnacagcncccncactgngnacagaacgcaagaagggaataggnggncngaacgnggcgtcccaccctgaaaagcaggaacgcaagatgatgaaagagacaangnaanactgntggtccaaaagcatntaaaancaanaganctgggantatgnggccnnaggtagctggttgtacancntncccnaaancganccatgttaccacatagtagttntagtttaggattcagtaacagtgaagtgtttactatgtgcaacggtatcgaagttcttatg

SEQ ID NO: 556756 - DNA, 503 bp, Homo sapiens
  misc_feature (42)..(42): n is a, c, g, or t
  misc_feature (52)..(52): n is a, c, g, or t
  misc_feature (61)..(61): n is a, c, g, or t
  misc_feature (77)..(77): n is a, c, g, or t
  misc_feature (177)..(177): n is a, c, g, or t
  misc_feature (197)..(197): n is a, c, g, or t
  misc_feature (311)..(311): n is a, c, g, or t
  misc_feature (376)..(376): n is a, c, g, or t
  misc_feature (473)..(473): n is a, c, g, or t
cacgctgttgaacatgtcactctccccccttctcctttgggntggtcaccancaggtgttngccaatgcagcatccncaaccctgaagtgcttgatatcacagaggaaactctgcattctcgcttcctggagggtgtccccaatgttgccagtgtctgtctgcagattggctacccnactgttgcatcagtaccccnttctatcatcaacggggacaaacgagtcctggccttgtctgtggagacggattaccccttcccccttgctgaaaaggtcaaggcctttttgggtgatccatctgcctttgtggntgctgcccctgtgggtgctgcccccccagctgctcctgctgttgttgcagccccagctaaggttnaagccaaggaaaagtcggaggagtcggccgaggatatgggatttggtctctttgactaatcccccaaaagccccccccttagcccgttttttttgcnaaacaaggaaataaaggcttacttctttta

SEQ ID NO: 556757 - DNA, 755 bp, Homo sapiens
  misc_feature (2)..(2): n is a, c, g, or t
  misc_feature (713)..(713): n is a, c, g, or t
  misc_feature (738)..(738): n is a, c, g, or t
gngcatgaggctgttttttacattttacagttacagtttcagagaaagtttgatatttatctaaaatttttcaatgtatgaactttttcatttgacaaaccataattgtacatattcttgggatacagagtgatattttctttacatgtatagaatgtgtagtgatcaaatcagggtaatttccactaatttaaaatgccacctttatgttattgtaatttatatatatactatatatatacacacacacacatatatatatacatgtccacatacagtgtgtgtgtgcacatgtacacacatgcatatgtgtatataatgcccagtataagcaatgtgcacaaataaaattagctaacagagatagtatagagtgagaggagaggcagattaatctttgaggaaaagcacaattttatagctgaatggagaaagctgaggtggtttctaagatggagaataagacaaaaaatgtaagtacgttgtttgactgaattcaagaaagaagggtaaaagagaagaaagtagtggtcttatcattaaatgccacagagaggtaaagataaaaacaacatattgttttgggtttagtaatttaagggttaccaaattccgttttggaggaggaacagattccatgtccactagaatggaatgaacgagaaatggaggaggaaaataggtagtttttcaaaagttttcaaaaatatganaagaagaaatgaagtggtacttggnagagattgttgaaatgg

SEQ ID NO: 556758 - DNA, 376 bp, Homo sapiens
ccacagccatttctcaagctctccagtgttgtggtctgacaagtcagagaccacatctcttaacagcattcacaaccagagaggaggtgatatatagtgggaccaagcagagtgtcaaaccgcaggtctcccttcacacggtctagacataatatcttgaaaagatttttcacaaggtgcttaagaatgtgcctttgcacagcctgcatagaaccaaccttgtaatatattcataggtaaccccaagggttaaaatggcctagaagagtgcctatggaggtacagccttaaaccattatctctcacttctgcaccactggagcggtacccgctttctctttcctccaaaagacagagagtgaccccccaaaaggtg

SEQ ID NO: 556759 - DNA, 1516 bp, Homo sapiens
tggcaacatacgttttttattactccaaggacaccctggactgtcaccaatgcccagtcttcacgggggctatgttagtgggtgacctcacgggctgtgaaccacaaaactccctgtgtgtgaacgccgtgtgtgcatacagccctgtgggcatacttttgggcacaccgcaagaggacacctgcggttaccttgaacaccgtgacttgtgctctctagaagacatgtgtgtgattccctgtgtgtcttttctcccgtgaaaatggtgtttccccttctcccgtgtgtctgtgccacgtgtctccccccaaaatttttcttgtgcgcttctccaggggggcctctcctcacccgtgtgtcgtgggttaaccttagggctctctgtgggcccttagacttagacatcttttggggtaaggtggcccctctctgtgccccaaaactcagaggtcgccgtgggcccctgagagcgctgtgaacgcttgtgtgtgggcgcctcccgagagacccctgtgaaccctgtgggctcttcggaggccctcagtctcttgtgttggcgcgcccccacgcgggatgttgtgccctgtgtgctttgtgacagggggcccaccccacacatattgagggcccaagctctctcggcaggtgtttcccccacacggttttaaaagggcgctgtgataaagaacccctttgtgtgccccccaagaaagagctatacgagacgggatggcagagagatcgcataggtcctccagcagcattatctccatgggagagaggagactctctcaagaagaaattctctcctccccgccgtcctctctttcgggcattaaaggagacctttagaaaccccccctttagtagaacactttttttaaccacggccgccgatgatatctcttctcccgccgcttttttttcccccccccgggggggtgctcttctcccccctatttttttgggcgagacaccccgaggggggagctccctgtggcccttccgttggttttcacaccccccccagagcggtcgcgttggtggcgtagcgttgtacgagcgcgccctccatttaaccacattctccatgtggatacttgctcccaccgttggatcgcgagcccccttcgactagacgccgctcctcccacaggggcgcgtattcaagattgtgggacgatccgctccccccttactcttttatggaggcgcgcatcccccccccagagaagtcgctcgtagggggacccccaaccggaggcgcaggttacgctgaccgtcgctactaccctcatagccccgacgagcgcgctacatctcataccaacgtattattagaaacaacccaaagcttctctcgtgcgcggcgcgcgcacgaccacccacgaggcggggcgctccatcactcctcattgagattgtgacgccccccgtgggcacggatggtgccgtctatgcagacacctcatatgggtgggcgctcctccccggagagattcctccctccttgaag

SEQ ID NO: 556760 - DNA, 1630 bp, Homo sapiens
  misc_feature (1328)..(1328): n is a, c, g, or t
tactggcaaacaaaatccatttaggggggaaaaggggactatatttaaaagcgtgctagaaaaacgtgaatataaagcaaatctcaagaacgtgaaaacgagttctccaacctcccattcaattcctccaaacgcggtgaccgggtctcggccagcaactctcctttctccttattttttcttctcccctgtgtgtgatagagggagaaaattctcaaggttctcacgacaggacattctccttctctcctgtgcgccacaaagagtgtcctctcaaccacagagatacaagagagggctgtgcagggacacacaaaacttctgtgtggcgcggtgagatatcagagtgcgcacaagaggcgcgctctcagagaaagagctctcatacctctccagagctctctgtgagagactgttcacaaacagagctgtggtgtggcgtcacccagagtgtgagagtgtcagaggcactatcataacactccccacacagagacacaagagacacacgcaggcaagccacaccccctaaagagacgtcgtcgggggggcaacacgccgctgtgtgggcacccgtgaagagcgccgtgtcatgagggggtctatacaaatttccagagagcggccccagcggcgtctcatgcgtgagaagcgtgccagctggcacgagagtttacgcgtggaggagaacaccacaaatagggcgccgcccaaaattatacaaccatctgttgtgcgcccaggcgcgcactgtggagaccaccctctcaaaacaaaccaatagacgggggggcgggtcctcacccctcttctcgtagtggtcgccgccgggcgtgtacaaagcggggggaggaagaatgtcgcccctacaaggggggaatattaaaggggcgcgaccagccgctcctcacaacgagttcatcaccttcctgttggcaaccaccgagcacggcaacaacggcggctaaggagctaacatacaacactacactaaacatgggggccgccggcccccccctattttgttgatagagatagatatggtcaagtaatactagtaagtaaccaatataatacttgccgcggcagctgcttatcatctacgaaacatgttcgctagaagagacaacacgccacgccagccgttggtggtgttggatccaaacaaagcgtgtgacgcacgacgacgagcatatatttcatacacacaaaacgaacacgcctcgctggttgttggcccccaaacaaatagggtgggcgtggtggacgaacaaccacgcgaagcgataaaaattacagccggccagtaatcgacagaaacaaacagncagcacaacgttcctgcgtgggcccgccacagagagcgactacgcgagggtgactacagaagaaacaggcaggcgaacgaacagaccacaccaacaaagctgacgtggaggatggaaacgattgttagccacgacccaaacagaagtaccaaccgccctccgcgcgcgcggcccgccccgctgttgatggctatcgctctctagatagcagaataacaataatggacggggcacacaaacacacacatgatttggtaagcggacgcacgctgaaaacaaaagccccccttcttagtcggcaa

SEQ ID NO: 556761 - DNA, 568 bp, Homo sapiens
tggggaaaaaagcaaaaatatgacttaaatttaacttcaacaaggacccggtgtaccagcccagggaaaaggtattgggagggaaatggtcaggtcttccggttccttaaccagcagagccccagcaacctagaaagcgcctcacctagcctcttaagggatgtggggaaggagcagggatatgggaaatcagaggctcaaaaatgtaaagaaggctgatggcaagccgggggagaaggccgggacaaccgagggaagggctgagggctattgaggagtcccctagcgcaggtcttcggcaggtgaccttgccctgtggcccgtgggcaggatggagtcctggggggggtcactatgggggcccctggggggggactcctccaggaacaggcggggattggccgtgcgtgggtgggcgttccagggcatgtgccgcaccatttccggggatgtcctgggttggatgaggtttgatgccaatggtctccccggttaagaattggccggaaatgtggtcttcgatctcctggaggggggtatcctttctccaccaccaggcactggggcg

SEQ ID NO: 556762 - DNA, 182 bp, Homo sapiens
ggcagcactgccgactttaaatggccgcccatgagcagataacaggcctgttattttcaaacgcccgttagtgcaagtgaagaaatttttatatcggtatgttcagcaaaaagacatcgcccctgtgacacgctttggcacattcctgcatcagcgctgctattgaaacttctaaaactagg

SEQ ID NO: 556763 - DNA, 165 bp, Homo sapiens
ggtttgagatatcgacataggctaacatacgaatacagtctctaacaagatagctaggactgtcccgagaccgctgtgtacaatagaacttgtatatacctctctatacgcgaacgaagggttgtggataaaggcgagcaagaattctgcatgtggggttgtgtg

SEQ ID NO: 556764 - DNA, 106 bp, Homo sapiens
cgttttttcggaacccattgattttctgttgactttcgtcgagtatcagaagtaattggagcaaatggcaattgcccggtaatgtcagatgaagcggcatcgaatt

SEQ ID NO: 556765 - DNA, 232 bp, Homo sapiens
tagaggatcccgtattacagaggctcacttctgtcattcaggtcatctggtagtctccggagaagatgctcgttatttccttaccagccgctgagtgcacacttgttcttctcaaaagcatcattgtttacttaaatattttcatattctttggcatcaggaatcacttagatgagatagctccattgtggcgagagcgtgacctttccaaaggtactcgtctgttatctgg

SEQ ID NO: 556766 - DNA, 303 bp, Homo sapiens
  misc_feature (126)..(126): n is a, c, g, or t
ggttttgtcagtcaaacgttaaaaactttaacattttcaaagggcccagactgtggacaaaaacacatgtaatggagattggacaggttggttttttgtttggacccttggaagaggttaattccnaacggtttccaattttaaaattttaaaatcttgtttaacaaaagcttggattaaaaaactgttttcatttcattacagaattgtttaaaaaagttcatttgttgaaaaaaaaggatcctttttaaaaccccagcatttggactgttcctttttaaaaaactgaaaatataaaaggga

SEQ ID NO: 556767 - DNA, 753 bp, Homo sapiens
attccaatttgggggtgggaggtggaaaaaggaacccaattttcttatgaacagatatttttaacttaatggcacaaagtcttagaatattattatgtgccccgtgttccctgttcttcgttgctgcattttcttcacttgcaggcaaacttggctctcaataaacttttaccacaaattgaaataaatatatttttttcaactgccaatcaaggctaggaggctcgaccacctcaacattggagacatcacttgccaatgtacataccttgttatatgcagacatgtatttcttacgtacactgtacttctgtgtgcaattgtaaacagaaattgcaatatggatgtttctttgtattataaaatttttccgctcttaattaaaaattactgtttaattgacatactcaggataacagagaatggtggtattcagtggtccaggattctgtaatgctttacacaggcagttttgaaatgaaaatcaatttacctttctgttacgatggagttggttttgatactcattttttcttttaatcaacaatttgccggccccccccttttgggacccttttaaccgaggggccaaaccacagctgcacttattactcgacagaaacacagtctaacgtgtaagtgcaaacttggacattagcaggcacattactaacttcagaagttccatgactgtacgatgtctgcgtttctagcttacgtcttttaaactttctaattcaattctattttcga

SEQ ID NO: 556768 - DNA, 696 bp, Homo sapiens
  misc_feature (256)..(256): n is a, c, g, or t
  misc_feature (547)..(547): n is a, c, g, or t
  misc_feature (644)..(644): n is a, c, g, or t
gtcacgctgctgtccctttctttttttcaggcggcgggaagatggcggacatttcagatctgaggcgtgcctaccaaaagcacgtcgaccatctttcaataacaagaagagggtcctgctgggagaaactggcacatggaggcaagctcccgacggtactactagaccatcgttctgggcttcaatgacacccaatggaggcttattagatgcggcagcccttatcattcgtaccacatgcaataactgtccttcntttccaactagggtaaatagtggtccatcttcgacgaggccgagactaccattctcatgagacgattgagatgaccaacgattgcaacgatgggccaagaagagaccactttcggttgattccagtcacgagcatatatctcgccatctcacactccgtaatacggtatcaaaccgccttcgaaatgcaatgcgccgagcgaaatgaacatgtctgtacacctgtccccctgcttcagggacgtccagatcggtgacatcgtcacagtgggcgagtgccggcctctgagcnagacagtgcgcttcaacgtgctcaaggtcaccaaggctgccggcaccaagaagcagttccagaagttctgaggctggacatcggcccgctccccacnatgaaataaagttattttcctcaattcaaaaagaaaaaataactaaaaaaag

SEQ ID NO: 556769 - DNA, 162 bp, Homo sapiens
actacggtcatcttctaactatatgtgtgtggttctgtgtatttatgggtaaggtacaaactgtaaataaggtatgggaatcaaccgaaatcctaatggtaatcctctttaccaaaaaagaaggtctatagggggaacccgggcccccctggggcggcaggt

SEQ ID NO: 556770 - DNA, 148 bp, Homo sapiens
ggcacccaaaactagaccctgcatctgtgatcatcccacagaatgagacaacatgggagcaagaaagtgttgccttgaacccaataaatgtgactcacgtgtgggccctgctccctggtggtgccagacagccctgccctgtctccac

SEQ ID NO: 556771 - DNA, 399 bp, Homo sapiens
cgacctgacatggggtgctggggactgaactctggtcctctgtaagactggcaagtgctattaaccactgagtcatgtcttcagcctctatgtttaatttaaaaaaaaaaagatttatttttattgtgtctgtgtggtggtggtgatgtgctgtctgtgctgtgctgtgcgttcagtgctgtctgtgctgtgctgtcggtgctgtgctgtggtttgctctgctgtctgtgctgtgctgtgctgtctgtgctgtgctgtctgtgctgtctgtgctgtctgtgctgtgctgtgctgtctgtgctgtgctgtgctgtactgtgctgtctgtactgttctgtgctgtcctgtgctgtgatgtgctatctgtgtttttcgtaagacgcgcccgcgaatttagta

SEQ ID NO: 556772 - DNA, 227 bp, Homo sapiens
tggaggagaagaaacactacctcatgtggggtctctcctccgatttctggggagagaagccccaccctcagctacatcatcgggaaggaccacctgggttgaacacttgccttaagaagaccgattcccaggccgaggggacccggaaacattgccaggacctgggcgccttcaccaagagcatggttgtctttgggtgccccaactgaccacacccccattccccc

SEQ ID NO: 556773 - DNA, 84 bp, Homo sapiens
taattcctcaggctgtcctattccaaggagagaaatggcaagtccatagacgaccaaaacatagttaatcatggccaggttcaa

SEQ ID NO: 556774 - DNA, 356 bp, Homo sapiens
gaggaaggtagaaccgccgatgcaggcacgtcttacatggccagagcaggagcaagagagagaggtgggaggtaccacacacttttaaacaatgagatctcatgataactcactcactataccataacaaaggggatggctctaaatcattaatgagaactccacctccatgatccaatcacctcccaccagaccctacctccgaaactgggaattacaatgagacttgagatttggacagggtcatatccagaccatataattctacccctgccccctcccaaattttatgtccttctcaaatttcaaaatacaatcatgccttcccaacagtcccctaaagtcttaacttattc

SEQ ID NO: 556775 - DNA, 378 bp, Homo sapiens
cttaccgagcagtggtgggggtctgtgcattgctgcatgtgatgagcctgggcaggctctgtaaaaggagagccctgaatgcctaaaccctgaatgcttgcttggttgtcactcctaagcgccacccctcagcatggctgcaggacctctgtgctcaggggaagcctgtgaccctgcctctcttagggacaggaacggcctggcatagtcactggtcctgagttgaagttgatgctgggcggccagagatcttggtttcacatacggcactctcatgccaggcagggagacgttctgtttctccacactcttcccaagacctggcaaccaagcaggcctgggaagggctggggcgagaaactcactcatccctcgttg

SEQ ID NO: 556776 - DNA, 446 bp, Homo sapiens
tttatcgatgccacctttgatccatcagggctggccatcgctcagctgggaagaggtgaagtgcgggtgatttctgcgtgtggttgtacaggccatcgcagcggatgaagaaacccctgtattatggctctggaattcgacagtcaggaacagctaaaatatcttttgataattgaatactttaatcagagtgacttttcgtctgttgcaatgactcgttctggtctgtccttggaggagttgaggattatggaaggacagcggtcatatttctgaggtcatcactcctccagacatcaaatcagtcgaatttaatgacttggatttgcatgtccgtgcactttgctggatggtaagatggtaatggaagggttttctgaagagattggcaaccacctgataaaaggccaggggacttcctctgccattgtttttgaggggctccg

SEQ ID NO: 556777 - DNA, 106 bp, Homo sapiens
tcggtacctatggtctggtccgtcccctgcgcactcagggtagggctcacatgggggttgtttctagtcagtagtctcccaagcttcctgatgctgatgagcccct

SEQ ID NO: 556778 - DNA, 350 bp, Homo sapiens
cccagccgctacatggtgtctactactccgtggatccagcgaagggatgagtaacaaatgcagaggcagggtggtctcccagacaacaaggatgtccagagttctcctgaccctgtctgaaccacacttcacatgcaaggcagcggcatcacagttatatccatcccaggccacccattcactcattccaagatgtcaggcctctttaactctgcatccctatgggtaagacgcaagcgaggtgagaaaagtcatccctggcaatgagagcctgtcccacacatgccactcggcatgagatggatggaggaagaagccaaagagcagggatgccttcctgtccccgtgga

SEQ ID NO: 556779 - DNA, 211 bp, Homo sapiens
ctgtcagcactcacagctccatttcctcaactagaaatcaaggagggtggggtacccttcaactctcctatttctctgcctgtttctctctacacatggtatctacctctgttcgggctgccatatcaaaatatcataaaccaggcagcttacaaacaatggaaattcatttcccacagttgtggaggctgggaaagtccaagactgaggg

SEQ ID NO: 556780 - DNA, 295 bp, Homo sapiens
ccccaatgggggggggggggggggggggggggggttttttttccccccccttttttttttcccccccctttccccgggggcccccccccccctttttttttcccctttttggaccccggggggcctccccccccccggtttttttttggggcgggggggggggtcccttttttcccccgggccccttttttccctttgggctttttttggggccccttttaccccgttttttttcaaaaaccgggggggggggggggggggtttttcggggtttttttccccccccgggcccgca

SEQ ID NO: 556781 - DNA, 1394 bp, Homo sapiens
gcctgctcagacccagaggccttcctctgattcagggctgttcacatgacagtgtactgtcaggacagcagaagctttgatttgctccatcccacaaaccatatgcatccatggtgacctcatcccatctgccacagttgcagctgtagagatgacgagtgtcacgtaaagcaacagcatatgattccttctccaacttgctacaccagccctctttcaacgctcacaccacacaccctccatgtgcgggctccttcctactcactcctcatgcaaactacactgcttgctcgctcacaactggcacccaactctgctccttccttacattcaactgcctgcacctcctagctcacagcacactcttgccacttcaccctctcctgcctttccacgccaggcactgccaccccctcgtcttcctcggctcctaccccgcaacctccttgcgccctgctcccacccacctctcctccatcacactaccccactctctcactctctttcacacactctcaagccgcctccacaccacgggaccactcatctttacgccccactaccacccctcacttctgcctgtcactaccccttgcccctcactcctgcaaactcaactgcgcgcatattcactctgctctcaacccactatccagcgcaccaaacacgcactccttctcctctcctcttccctcacaagcctcggcccctcgcacccccacgcatccaacccccgcgctccaccccacctctccgatctccaagcctccaccaaccccctaccttcacacctacttgcgctcccctttcacccactttccagcggcctcctgccctaccacaccagccctttccccccaacgcaccgaccttcctccattccccctctggcccctacgcttctcaaccccgcctcccccctgccgtcctcactcaattcctccccttccaccatctcaccctcctactagtctcctttccccacacctcctccctacaccatctcacccaccccttggcccttcaatccacccccctcctccacagctccaccacgcacctcgcctcccctggcccccagcccacttccctctccctcgtcccccccccacgcgcgccccgccccgcccctccctcccccctctcctccctcaccctcctcccccctctccctcccacccaacccccaccctcccacccctaccctcccctcacccccccgcccttcaccccttacctccccacccccacccccctacatcctcacaccccatctactacccccccctccccacactcctcccctccacccccccctctccctcccaccccccccacccaaccatccccccacaccgcacacctcaccccccctcgccacacacaccccccca

SEQ ID NO: 556782 - DNA, 433 bp, Homo sapiens
tcagcctcctgagtagctaggattacaggcacatgcgaccacacccagctaatttttctatttttagtagagacagggtttcactatgttggccaggttggtctccaactcctgacctcaagtgatctgcctctctcagcttcccaaagtgctgggattacaggtgtgagccgccccacccagccccatttgatgctcagctgaatgtgtcaatacctgtgtgcaatgtggaataaaaatgtctcttctgcaataagatgtctcttatgcaatgaaaatgtctcagtgtcttatagataatgaactgttggttcctcctgtagcttccttccgagcctcacaccaggcggcccctgttccttcagatcgtgtttcaggtcagtttctcccagttcctcccagcagaagagacagccttttcactgcttctgcc

SEQ ID NO: 556783 - DNA, 427 bp, Homo sapiens
tcgtctctacaggtatcccccccgttgtggccagcgaacaggagtggggtgttctatgggttggtggtatctggtggacgcttgtatatcgtgaaatcacattgactggtccattatgacatcataccaactttaggtcactgtacagcatgaatacgcccgtggggcaggggccgatccctggataccctcccagtctgccctagaaagggaaggtcatcaagatctgtgctgaccatggtcccggtgcagcatggtgtgtgctgcatgccacttgagggatcatggagtcttatcaggtgcttctggggttgccgctgaatccaacaggctaaggtggctttggaagcattcagcaagaccacgcccaggccgccaagcgtcggtttcactgcgtgtgtatattaacatattgtgcctctatatc

SEQ ID NO: 556784 - DNA, 862 bp, Homo sapiens
ctatgcgaatgaccctgaccaccgcacatttggcttttcacaagttctccaggtcattcttgggcacgatcaaatttgagaatcacaggtctaggatacgacggggaaaacagaaatgtggggtggtcagggacattcggataattcgggctatttgtattcaggtgtgagctggcaaatccgagacctgttttgcgtagctaattaccagcaatgacaaactcccaggctctgaggcccaagcctcctgggctgcaactggtctttatttttggaggcaatgaatggagcacctcggcctgggaccctcagtgtagggttttctgactcttaggcaacttcctagggtgctgtacttcctttttaaagttggggagcggcagggggagggggaagtgccacgcccttgtagtttcatgatgtcatgttgcatgtgctcttgagctgtaaataaagagacgatggttaaaaagcccacctggtgtctctctttgttcctccaggagacggtctgtctgtgctggtagtgagctctacaggggcatttggaggggatccttagcctggtattccacctatgacttctcaacacactggactgagcatttgccctgagctaagcagcaaacaaggcagacaggacccctgccctcgcctggtcctcatcataatccctcagccagacctcttgactgcgagtctcagatttttttgttgtttttttttttttagacagagtcttgctctgtcacccatgctggagtaaagtggcacggtctcggctcactgcaacttctgccccccaggttcaagcaattctcctgcctcagcctcccgagtagctgggattacaaacgtgtgc

SEQ ID NO: 556785 - DNA, 614 bp, Homo sapiens
gagttcggggaggggggaaactgggctggtacgccccagcaccacatcccggggcaccccccgtcgttttaccttctgcttggggaggagagggattagattgattcaccccgcacccctcccctgccgtggtctcgtggtgtgatgtgagatatactgttgtctttggatttgttcgagtcagcgtcgtcaattttttgtttttttggttgagaaggatgctagtatggcgtgactctgtctgttgtgtgcggttgagattgatgtttctggccccccactatgtgattttttgtggtgggggggggggggttggttgttctatgttggtggttgtgcgttctctgtctcgttggttttgtgttgttctcctctctcgtgtctgtgtgttttgatcatttagcttcgactctctgccccctctctctgtgtgtgggttgccgtctcccttctcctgagccgtgcggtgggattaattatcactcatgttttgaagaagtttttgtctgttggtggtatgatcagacgtccgtctctcctcgctcccccgaaaactagtgttgtggttgggggggcgtttctaaatatgtttgtcttttctgaaatcaacatta

SEQ ID NO: 556786 - DNA, 728 bp, Homo sapiens
  misc_feature (20)..(20): n is a, c, g, or t
  misc_feature (63)..(63): n is a, c, g, or t
  misc_feature (110)..(110): n is a, c, g, or t
  misc_feature (202)..(202): n is a, c, g, or t
  misc_feature (210)..(210): n is a, c, g, or t
  misc_feature (222)..(222): n is a, c, g, or t
  misc_feature (244)..(244): n is a, c, g, or t
  misc_feature (343)..(343): n is a, c, g, or t
  misc_feature (430)..(430): n is a, c, g, or t
  misc_feature (444)..(444): n is a, c, g, or t
  misc_feature (452)..(452): n is a, c, g, or t
  misc_feature (456)..(457): n is a, c, g, or t
  misc_feature (491)..(491): n is a, c, g, or t
  misc_feature (494)..(494): n is a, c, g, or t
  misc_feature (501)..(501): n is a, c, g, or t
  misc_feature (506)..(506): n is a, c, g, or t
  misc_feature (513)..(513): n is a, c, g, or t
  misc_feature (554)..(554): n is a, c, g, or t
  misc_feature (595)..(596): n is a, c, g, or t
  misc_feature (651)..(651): n is a, c, g, or t
  misc_feature (653)..(653): n is a, c, g, or t
  misc_feature (686)..(686): n is a, c, g, or t
atcatttataatcccaccancgagaggatgtactttactattcaatccttcacaagtgatgtncatatatgttatattatcaaatgtactttttacctttcaaaaatatnaaattcacatattacttagccttatttccatattatatatcttaccaagaacctcttttttacaaatgtgtaaagttcttttattaaaaganagaaactngtagattggttnaaaatacaataaacaatgagangcagataacaagagaaacatctaaaaccattaatagcaacaggttataagtggaaatatggacaaaggaatatcagggaatgctaataaaaagcaagcnatatggtattgttaatatcagataaaaatcaaggtaaactacattaaataggggtaaggatggtttcgattaaccttccaacgcatnaatataagtttgtntctgactntacnnatctcaactatttcatccacttctctaaacatanatncattgcntaaangcctgtngtgtatatattctttaaactcctggagagattaaataagcntttctctaaaagttccttttgctttggcctcctcctctagnntctcctcctcttctggcttttcctcaggctttggctcttcctcatgctttggttnantctcattttctggttttccttccattttttganaggatttcatcttgtatctgtatacctctcttccttccttct

SEQ ID NO: 556787 - DNA, 155 bp, Homo sapiens
gcggccgcctactactactactgctcgaattcaagcttctaacgatgtacggggacatggaggtccctggatcatcgaaaggacctctcccactcctcctaccaccgaagtggttaggactctatataaataaaaacaaggctgttagaaaaaaa

SEQ ID NO: 556788 - DNA, 1080 bp, Homo sapiens
gaccagggtctggatgagcttgaatttgaactgaacttgacgtttgtatttctagaaccctgggtctcttacatgtctggtctttctttggttctcggctttgctcacccttcgactaaacggaagctatattcactccacaacaaaacaaacaacacaaacaaacacacacaaaaaaaaaacaacaacacaaacaaccaacaaacaaacaaaaacaaacaccatacaaaaactacacacaacaccaaaaacaatacaaaacacatacaaaatcacaacacacctcttctcgcccagcccctcctccccacccgacacaccacctctttcaccacccaatcttcccctcacccacagacggacgatcactacaaaatcaaacaccacatatacaaatcacagtctacaataaaagcaaacaccaaccaacaaacaaaatatatccctcgcctcatcaaactcacatcctccccggcaaaaaaaaaaacacaatcccttctatccactcacccctgcataataacaaacaaaacgctcccctataccccccatactattcaaaataaattatataaagaaataacaacaatcaatccgctaacaacatacctcacagacaaaacacttttcttttcaataattgcacttcacatcacacccacaagcacccacccccccctactccaaaccatcactctccgcgcactctcactcatgaaaaccccctacctcttcactaccacacccccaccaactctaaaagtctccatccaccaccacccccctccccccctgacacgttaccacaaacatccaacaacccacaaaaatcacatcagaactaatccacgctacacccaaaaacccacactccgctcacccctaaccaaactcgatcaacaaatcacctaaccacaatgtaactacaatcacaattgacaccagctctcacctctacacagtcccatacaccataacaagaataaaacatacaagatttactaatcctcgaaaacagctacctcaacagctcctatcacatctactcacaccaatcccctacaacacacacgcacaact

SEQ ID NO: 556789 - DNA, 1125 bp, Homo sapiens
  misc_feature (304)..(304): n is a, c, g, or t
  misc_feature (538)..(538): n is a, c, g, or t
cagtgggatggaaagtgtcctgtccttggtggatgacttcattcttcattcatcccggcgcctggctcccaagcccttgtggaccgagagtttctcccgaggtccctcatctaccctgcggtaggtcaaacgaaactccagcacccaccttctcgtctctaaagtttcggaaataattgttttcacgtcgatgattatgagtaatgctactataaacattcttgcatatgatttttgactgaacacgttttctttttttatatctgaagagatttattcacgtgaccaatggcctatgacacangcccaggaggtcctgagaacatgtgcacaaggtggttgggctacagctggttttctacgatctagggagaccattaagacgtccaggtgaatccatgtgagaatgtagactgccttgggtttgaaacacagtggtattcccatccctcttgggggtggtattagcttggcgaggttgggacatttggcttggggtcacacgggggtccactactggtggccttaaaccttttanccgaaggaagcccccaagaacttggtgttaccacaggtggcggagaggggacccaactcattatcctgtttttcccaaggcaagcggcacgcagaggaaaaaagtctccaagtgttacgtttcctctcagggtccctatcaggcttgagggcacccttacggctgggcgaattcccagggcagtagcgtgagatccctgtggaccacacccccgtgtgcccaggggcgagtactgcgcaggccgtgggccaacccggccacataaacgggggaccgcggacgaccaggcgaaagtagcccccaaagtgtgaccacgagtgggaaccagcgagaaacgcgatataaccgagagagcaaaccgccctcgcaggcgggcacccacaatactcggaggataacaaggccgtggcgggcccaacacgacatttgccgccacagatatccgacagctcgaccgcctcgtgcgcgccaaccagtgagtcgaccaacatgcgcgggtcacaccacgtagtgccccccgagagccggtactgcccagccacgggcgcagcaggctatcacggactaccgtcacgcctgacacgccc

SEQ ID NO: 556790 - DNA, 551 bp, Homo sapiens
taggtatattaaatacttgtgatcctgtaaccttgaataatgcattgattagtacataagtgtcatatttgctctcttgggtgctacatatatcctgtgtaaagtgcctctgagtgatgtgtactcttgttgctcgccgcacttccgcactgtcgctatcactctcgtcgttcgtttatctacctctctgacacatgttagcgcattgtgtcgtgtctttgtcgtctcattatcgtcccttcgcgtgtcgtgcatttccttcacttccctccttgcctccttcttcggtttctctcgtgttcttatcatatccttcgtatacctccttttttttctcttggtgtatgtgtaacacactgttgagtaagcagtgggagccatacaacacaatccctagggctcatgtttccccagagacgctagcgcatagcttgagctagacttggatagggcagacgtcctataaatatctgcgacactggttcgaggttgactaactatagaactgccactgcggagacccaacctcgaaggcccggtaagtgactcga

SEQ ID NO: 556791 - DNA, 262 bp, Homo sapiens
ccccagaggcacaaggaggaaacggagggggagcgtacaacgaatttcctgaacctatcaaactgggacaagaaggaccgggcaaggctcggagaaaggttgcagtggctggagggggcagtgagagtggagcacagagtccttcacaaaccaagaacacacgtaggccttcaacacaattcccctctcctcttccaaacaaaacatacatcggatctgctactcctccagcaacaagaaatcattctgggttcacgggaca

SEQ ID NO: 556792 - DNA, 205 bp, Homo sapiens
cgcgacggcaggtgtactcatgcctgatttttcttgtttcttatcccatctcaacactttttcatttcttccttttcaccatcccaattggaactctccttgctggtggcttcaactcttggtttggtgtttggagacacagtttccctgttacccaggctctagtgcattggtgagaacctagcttactgcagcctccaatgcc

SEQ ID NO: 556793 - DNA, 158 bp, Homo sapiens
ctgaggagttcgacgcatcgaggctatgattgcgttgccgtgggtcaaacgagtatagatggtctcgagatgtgagacccctgtgggcgagtgtaggacgctgaataatttatgaaggagaggggtcagggttgattcgggaggatcctattggtgcg

SEQ ID NO: 556794 - DNA, 981 bp, Homo sapiens
  misc_feature (7)..(7): n is a, c, g, or t
  misc_feature (124)..(124): n is a, c, g, or t
  misc_feature (605)..(605): n is a, c, g, or t
  misc_feature (610)..(611): n is a, c, g, or t
  misc_feature (624)..(624): n is a, c, g, or t
  misc_feature (643)..(643): n is a, c, g, or t
  misc_feature (649)..(649): n is a, c, g, or t
  misc_feature (673)..(673): n is a, c, g, or t
  misc_feature (677)..(678): n is a, c, g, or t
  misc_feature (688)..(688): n is a, c, g, or t
  misc_feature (711)..(711): n is a, c, g, or t
  misc_feature (714)..(714): n is a, c, g, or t
  misc_feature (733)..(733): n is a, c, g, or t
  misc_feature (750)..(750): n is a, c, g, or t
  misc_feature (760)..(760): n is a, c, g, or t
  misc_feature (796)..(796): n is a, c, g, or t
  misc_feature (807)..(807): n is a, c, g, or t
  misc_feature (819)..(819): n is a, c, g, or t
  misc_feature (833)..(833): n is a, c, g, or t
  misc_feature (847)..(847): n is a, c, g, or t
  misc_feature (859)..(859): n is a, c, g, or t
  misc_feature (880)..(880): n is a, c, g, or t
  misc_feature (892)..(893): n is a, c, g, or t
  misc_feature (896)..(896): n is a, c, g, or t
  misc_feature (909)..(909): n is a, c, g, or t
  misc_feature (914)..(914): n is a, c, g, or t
  misc_feature (950)..(950): n is a, c, g, or t
cagccgnaaccgaacccaggaaaccccgacccccagcccaaccccgagcaacccagaacagcccaaaagcccagaaaacccagaaaaaagcaaaaaaaaccacccaaaccccagcagcgaccgncgaaaaagaagcccccccaacaaaaaagaaagagagggccagaacaagcagaagaaagcgccaaccagagcacaagagcagaagccaagccacagcaccaaaagacaaagaagccagccaaggagacgcccccgacaaacaaccgaaagcccccaaaaccaaaacagcaaacccgcagcgcgcccgcgccgcccacgaaaacaaacagcaaaaccacaaacgagcgcgccgaaaccagcggaaaccacagcccaacacccacccccacaaaagcacgaacagcgccccaacccaaaagaaaacaagaaaaaccagaacccgcggcaccagggcagccaaacccgcacaaaggaaaaagccgaaccccagaacccaaaaaacccaccaagaagaagccccagaacacacgccaacaagaaagaggaagcccacacggaggatggtcagaaccaagaagaagagaacgtcagcccggaggagnaaganncacagaaacgttnagaaaaacccaagcagtancttctntatatcagaaccaaagcaacaagncacnnacaagcacangccgaaaaaacaaaaacgaagancgnacccacaacacagtacganccacccccaccaaaagnctaacccaanacccgaaacagcaaggaaaccccccccaaacgagancaaagcgagcnaagccgccaacnctaagacaaaacanaggccaccaccccnaaacctccaacnaaaaggccacccaaaacatanatcgcggccagnnaanccacaaaccccancgagnccaaacaagaccagagcccgaagaacaagaaacacnaccacaagttcccgaacccacaagctcagat

SEQ ID NO: 556795 - DNA, 358 bp, Homo sapiens
cttgaataactgatcacagtcaccgttgatcctttccccaggaaatagtactttttgtttttattttcttccatgaactagccttttatccatagcagagaggttttctctcaagaagaaacaggatctgaacaggatctgaaccttaattcttcttctggtgggagttcagtccatttccttcttattctggattaatttcccctttgccattgaataaaacagaggactttacaaagggcctacttcatgccaagtaatgtgttaatagttctaagtggtttatgtgcatctcaaaagaccttcgccacaatttcacagactatatgttattagcccattttacaaactagcaaac

SEQ ID NO: 556796 - DNA, 146 bp, Homo sapiens
acggaatacagccagcgtggacatgaagtcggggaggccgcagctgaagctcaatcatgaccttccagaagtacgggcaagggcggttcagacccatgaaacaaacgagggagcaggagacaccccctgaactttttttatttctc

SEQ ID NO: 556797 - DNA, 529 bp, Homo sapiens
gtaatcccacacgcgaatcggaaagtgcctttccacaaagagaaaacgcccccgcctcccttacattttgatgtccacagagtaaccggcacgcgttcttgaagtgaggcgtgcccctccaaaatggactgaacctcccacaagcatagcctccccatatatcacctttaagccgttgggcataaaaaaattcaaaagggttggcacccgctatattaagagcgccccccctttggagaaggaggatctattttcaggaaagagctgactctaaagttgccttcggtggttttgaagcggcggaaaggaaaataaacaccgggcatggtgggaaaaaaaaaaggcggcggagaaaaaaggggggagcgccttctccatcaacagtaacatcattctggatcaaaagagacccccgggctggtttaccgtttttagaaagcgggtggtgattttcgtgcaaaggtgtaaatctgggaaatgcattgtttctgggacatccccataaagagtttaaaaactttctgcaaga

SEQ ID NO: 556798 - DNA, 1073 bp, Homo sapiens
  misc_feature (2)..(2): n is a, c, g, or t
  misc_feature (108)..(108): n is a, c, g, or t
  misc_feature (142)..(142): n is a, c, g, or t
  misc_feature (179)..(179): n is a, c, g, or t
  misc_feature (249)..(249): n is a, c, g, or t
  misc_feature (295)..(295): n is a, c, g, or t
  misc_feature (428)..(428): n is a, c, g, or t
  misc_feature (544)..(544): n is a, c, g, or t
  misc_feature (960)..(960): n is a, c, g, or t
  misc_feature (1047)..(1047): n is a, c, g, or t
tnctctatacacacttctcacacacatctaattcacacaatatacaaaccattcaacactctcatccccacacactcactcaaccccttacacccctcctctccaacnctcacccctcacaacccttaccatatccaatcancactaaaaacatccaaaactcacaaccaaacccaaanacctccattcccctaaccccacccccatccaatttcacaacacaccacccaccctccacaactaccaccnccctctccctttccctctctctcatctttcaaaacactcccaaccntccacaaaccaatcacccccacctactcaccacaacccacccgctcctcccccctccacctcactcaccactcaccttccctccccccttcctcacccccccatcccactcccttcactcaccccaccctccntctcctcctcccccccaccactcccgccgtcctacctccttccttctttccttccactcacacaacactcctccttcacccactcatccccactccccaaactccaacctcctccncctcccctcaacgcactcacacactccctcccacacccccacctacccaccttctcttctcctctcctccctccctccctccccacatcctcccatcctcagctcaagccccaggtctaggaatagggacagtgaagaaagtgtaccctccaagaaaaagcttctgaggacttttctaattgtgcagatacttctgaagcccatgccgccccgcccccacagccccatccccttgcccagggcctcacatgcccggctcccccaaccggtccttccccttgggctgccggtgcagctgtgggcccaggctttggcaggcccagcttcaagacagtgggacacagaaaacactttgcagcatcgcctctccctccgccacacccaggtcagcagagatgggccccccaccgagagancacagctctggtacagggaggtgggcagggttggagaggaatggagagacatgtcacctctatagaaacgcgttcaaagtacaagcnaagcaggggggaaggagagggccaga

SEQ ID NO: 556799 - DNA, 152 bp, Homo sapiens
gacctgcgcgaaataacacaaacattacaataacaaaataagaaaaatattaggtgagtgcaaaagtaattgccgtttttgcattgctggaataaagctagtttgatactggaatatcttcttttttttttttttgaaaaggaatccccccc

SEQ ID NO: 556800 - DNA, 869 bp, Homo sapiens
tgctatggtatggagtcctggttataatctggcacagaggctgtacgagtcatctgtctggacgcgctgggttgatgctgtgggggctccctgtggaactgtgttggagcctgagcaagcgctagccatgtgcgcaagcgcgcacagactgtatgccatcctgatggacaccccgggcttctgggtgaactgctgtggaacatcgctgctggaggacattctcactgctgtaaatcacgagtggcatgttccgagttaacgatgattgtagatgctctaactagctaggtacccgatactacacaagaagacagtcgctacattggtcggagaccatctaatctaattgtaagttataatacaagactgattccgtataagtcaaaagaacaaattcatacaattcgcacgttaataaagaagataagagcatgtagtcagcgtagagaacacagactgcgaagtgtctagacagatctgcatcaacacggcaatacaaactaaggagaagaggatgaatcacatgtacaatcttgtagcataaacagaaaaatataacaagatagaacgacagattcactaaacttattgagtggcagaaacgcggcagaaacaaccacagtagcataaccaaaacagaaggaggagcaagagtacaaacaatcaccacaagagaagataagacgaaccaaagaagaacaacttagatagtaacagtaatagacgcaaaataacacccaagaaagcagaggagaaatctaaagggacagaaccagcagtaaaagatgatacaggacagaccgacgagaacaccagagcagtagaagaagcacagcaggacagaaagtaagagattagtcgaaacaaag

SEQ ID NO: 556801 - DNA, 219 bp, Homo sapiens
  misc_feature (213)..(213): n is a, c, g, or t
tcgacccggtgacagcactattagtattgggcagcacgcagatggtggacagcttcgattgaagccgcttgtgtcggataaaggtgtcctcggcagcagcagacctgatgacttactgtgatgcccacgccgtgtgaggatcccctcatcacccctgtgccacttcggagaaccccttccgggagaagaagttcttctgtgctctcactctgnatgctc

SEQ ID NO: 556802 - DNA, 239 bp, Homo sapiens
ttgtacacgtggaagcctacagttgtggggagcttctgtccacctgtgctgtagaggagcatgttccagcccgtgtgccccaggatggttgagttgaacatgatgaacacaacatggggcaccggccgcctgaagtacttgatgtttacctacaattgctgcttgtggctgggtggcctggatgccatggcagaggacatctggacgctggccctaatgagtgactacatcagcctgct

SEQ ID NO: 556803 - DNA, 1112 bp, Homo sapiens
ggacgcgtgggtcgacccacgcgtccggcgccccagtgcgtcaacaactggttggctaaagggcttggagcgcagtcacttataggctgtttgcagtgcagagctagagtcccgcactctgatctctcctcagtgcagaccctactggatgttgagccccaggtcgatctacaacctggtatgctgtaacagggctttggatctgtgtatcgctccaggctccgatacgttgccttctctcgtaagcttcctctaatttatcgctttaagcgaagaggggtaaatcgaagcgagacgtaaacaactgtcgatcggttcatcgatacttcgcccatcgaagcatggggccttatgagtccatcgtctgggcagcttggacaccctggtatatcgcaagggagtcggttccccttagttcgacatttccatgtattgtactgggcataaagtggcatgtggtcgtacatttgggcaggcgcacagccctaatacgccgtgtgctttccaattcatttggggatttcttgttgagcgtcccaggggaaaggtgcgctcccaccggactttggccagttgcaaggcgttccttgggattcatttccccctttgatgccccacaggggcaaattcgaaatcatggagatactggatactttcagcgacacaaggcaacggggccttaacaatctcccttgatgtcctcctgtgtgattgacacagcctcttagtggacccttttgttagacatttgcgcctgggcggaaaattgccggtgaacggggggtttcatttggacaaagcatccacttggggggatctcggactatgtcccctcgatagcgtttcgccttcgttggtggcgcgattatcccctatggtggcgcactcgtacggaaggtccgagtaaatcatttaagccgaacagtcgggactcggattgccagtacaggaggccactcggtacctcgctgttccagattcaccttttccacaccattggatggatgtgcacacccacaattttgggctcagccgccttaggtgcagagtaagagcgcactacactctctatactagggggagaagtctccctctaggaccttgctcccaca

SEQ ID NO: 556804 - DNA, 173 bp, Homo sapiens
actgcgatattgaaaaaatttgaaaagggacccggatagacaccattgtgtgtgtatgtatgtgtgtgcacacgtgtgtgtgtttcctactcagcacacctcctcattcttttgacaatgaagcacctccttattggggggttctatgtagtttgggtgggtcagaacataag

SEQ ID NO: 556805 - DNA, 294 bp, Homo sapiens
ccttctttccttcctttctttctctctttccttcctttctcttccttttctccttttctttctttctctccttccttccttcctttctctccttctctctctctctctttctttctttctttcttgccttccttccggatgatgagtgagaagtatgggagaacttgtcggggtcagtgctcttctaaactccccttcccccaataatgcagctggtataatggaatggtaaatgcaccggttgggattcaggcagagccccagtctgcctacagcagacaaggtagagccgag

SEQ ID NO: 556806 - DNA, 138 bp, Homo sapiens
  misc_feature (42)..(42): n is a, c, g, or t
  misc_feature (69)..(69): n is a, c, g, or t
aacattgcaaatgacaaacaattcatttttaattaaatactnacaaggaaaaaaggcaccatggcccantcaagtattttgcataagatgtaacaaatattgtaaacaattaataggtggacaagagagaagaagatc

SEQ ID NO: 556807 - DNA, 185 bp, Homo sapiens
aaaatcaagcaggtgtagttatatcagataaagtagactttaaagcacaatagtaaaaaaaaaaccaaagaaagtcattacataataattaacaggatcaatccaacaagaggatattacaatcctaaatttacatgccccgtaactctggcagctcccagtattcataaaaccaattactcatt

SEQ ID NO: 556808 - DNA, 103 bp, Homo sapiens
gagtgagcctttcgaagagatactcgcccagcccatgctccgggccaccagcctgtggaggttggtcaggtggttacccatcttcttgataagcttcacttcc

SEQ ID NO: 556809 - DNA, 325 bp, Homo sapiens
cttacctagagtagtccaattcatagcaacaagtagggtagtggttgccagattctgtggggaggtggaaaatggagagcaacttaatgggttatactgtttccattttataagatgaaaaagttttggagattgattgcataacaatgtgaatatacttaacaggactggactatacacataggttaaggatggtaatttttatgttacggggttttttcccataatttttaaaaataatctagggacaattctttcataaggtcataatttagaagcagtggcagatttagacagcattattactattttttattattttcaa

SEQ ID NO: 556810 - DNA, 150 bp, Homo sapiens
gagagagctagtgccatcagattcgagtccttatgttgtgctccacctgtttcttccgttcagattctctcgcttcatataactccctgtctgtgccaaacgatcaaataaaagggcggcgttaattccactgggccggtggtacttacc

SEQ ID NO: 556811 - DNA, 328 bp, Homo sapiens
cactctctgatcattaaatagagacagtgtcacatgatgcattcatttctctatggcactgtgtatttgtgtggataaaagcgaaacaaaacacaacaaagaaaaaagctatggaattccatcacttggaaaaactagatcctgttggttatagcataagtgagttctccacgtctgtctctctcgctcatgtaatatactctgaccctgagtggaaaggggttgtatgtactgttttaatatttacctacatttgctatttagcttcagtgtactattcctgccacctgtgtattttaagggtgctattgaaacttctaaaactagg

SEQ ID NO: 556812 - DNA, 168 bp, Homo sapiens
gaggcgggtctgaactgcggatgtggatcacggtggacgtcgggggagcagggttgtggggcgcccaagaacagcaacctcgtggttcctccttgagcatctcatagttggggggctggcactgttgacaggagagaagaaggtttggacagtgtgattcatggtgtc

SEQ ID NO: 556813 - DNA, 178 bp, Homo sapiens
tacctaaatgtatttaaaatcttacacccctgttacttccttatatatactctggtctccaaataaacaaaactgtcacttgcccaataacacataccatcctttttctgtgcctcttgcattcatttttcttttcctgaaattgctcttccttttactacctaagaccctagtgtac

SEQ ID NO: 556814 - DNA, 221 bp, Homo sapiens
acctcaagtatattttaaaaactagaaaagctgtgcagctgttatacaggcatggaaagtatgttggcttacatttatcatcagcaccttaaaaatattcgagtagcaggcacagtgcatgcgcctgtaatcccagccattcgggaggctgaggtgggaagatcgcttgagcccaggagttcaaggccaccctgatcaacatagtgagacctcatctaaaa

SEQ ID NO: 556815 - DNA, 489 bp, Homo sapiens
ctagggatgctatgtgaacttgcagtgtacgtaaagtgagttagatgtaagacagatggagcatcatgggttggattattactgagttcaataatctggtgggttttgccagctagaaacataataaaatacatgataaaggaatagaaaggaaatatatttatttgaaattaaattactgcttataaattcatgtctctgattttacaaagtgtaatgggtaaaattaccatattctttttcttatttcaatccatacaatgagagtcatgttcagtttttcactgacttcatgctgggtaatgttcactctgcattagcggttgccatgttcaccgttttcttacaatgtctatccagtgcttgttactgtctcactgacagacagaagtctagctgttttcatccacataatggcaggcagggctagtgttgctgctgcttcacccagagaatctcattttacaataaagttagtattatacttga

SEQ ID NO: 556816 - DNA, 441 bp, Homo sapiens
  misc_feature (7)..(7): n is a, c, g, or t
  misc_feature (16)..(16): n is a, c, g, or t
  misc_feature (44)..(44): n is a, c, g, or t
acctggncctaaaaanccaaaaaactggccttcaaaaccccccngttgttcctttaaactagcccctgtgaacaaggccaagaaacagtatcctcctaagcacctcagtctcttccatcccattaaacaaggattaaaatggtaagtccaccaggctgggccgcaagttgtcacgccctgtaatcccagcactttgggaggcctgaggtgggcggatcacctgagatcaggagtttgagaccagccctggccggaatggtgaaaccctgtctctactaaaactacaaaaaattggcccaggcgtggtggcacgtgcctgtaatccctgctactcaggaggctgaggcaggagaatcacttgaacccgggaggtggaggttgtggtgagccgagattgcactactgcattccagcctggcaacagagcaagactccatctca

SEQ ID NO: 556817 - DNA, 508 bp, Homo sapiens
tcagatccaactataagtctagtaaatagtagatattcgaccacctcccatgaaccacaaatgtatctttatggcatttaaaatggtgaatcccagccaggcacagtggctcaaacctgtagtcccggcacttggggaggctgaggtaggtggatcacgtgaggtcaggagtaagagaccagcctgaccagcacggcgaaatcccatctctactaaaagtacaaaaataagccaggtgtggtggtgcatgtgtgtggccccacctacttgggaggctgaagcaggagaattgcttgaacccaggaggcagaggttgcggtgagcaatgatcacaccactgcactctagcctgcactacagagcaagactccatctcaaacagaaacgaagagacgcgaccagaaaccgaaaggaagcaatgaaatgaactggacatgatgacatgcactgcactgcaataactaaatcaatcaccataaaacagaggtgtggtctcgaggtcagaact

SEQ ID NO: 556818 - DNA, 342 bp, Homo sapiens
ggaccttgaatcgaacggtctccttaacaaccattacaattgcatagtttggtgtgataacaaaagcatagcaaagagtacaaagttattaatatatgttagctgaactgaaattgactgttaaaaacagtctatcttgtgtagatgttagttgaaacttagaagggaaaaacagtcaatagcaaaaaaggtttctttaaacaataggttaactgctaaagaaataataggctttataaatttgtttacaaaaataaagctttatttaaaaccaaagaattatacaattcttcaatcacaaaccagcttcttttgaaaatgcccctattttctcttggcaca

SEQ ID NO: 556819 - DNA, 222 bp, Homo sapiens
ggtggcccccccggggggcctttttttttggggttaaaatcccccccttaaagggcccctcggggcctggggctcccccccggggcccttttttttgggggttcccaggggttttttttccccccccccccccgggtttggccctgggcccccttccccctttttccccggggcgggtttttggggtggtttgggattaaattccttttttgggttttccga

SEQ ID NO: 556820 - DNA, 276 bp, Homo sapiens
gacgcatttatctagcatttactgtggaagttaatgctctgttcttcactataatgtattatgtggttaaactgagctatccccgcatctgatgactattggcatccactttgccaggccaatggcctggattaagggttaggattatttgtagctagaatgtcattttatttctgtgaaatcttattcgctcatactttgacggttaggtgtggcctttaccttaccagtacatttattcccgctaccagttgactagcccatatcattgttcaa

SEQ ID NO: 556821 - DNA, 207 bp, Homo sapiens
acccaccgccactgatcagggatcgtagttgagtgtcgcgggccgtaacgcccatctcgatacaccaaccgatctggagtcttggttgagtgattcggcccgaatcacccagatcgctgccgccactgatctgggatcttgggtaagtgattcgggccgaatcagccagtccgccatctccgccaatatctgactcttgcgggggga

SEQ ID NO: 556822 - DNA, 236 bp, Homo sapiens
cccgctcgtggggactacggaatcctggactctctccaggacgccgttcgacatcgaatcaaactggtttactccatcgataaccatttgcaccagctccacctctgatttgcctatatcggtccaagattagaaattatcaaatgacactcgcctgatagctagcagatgttccaactcctccatgtaccagcgttttgtggagtcttgagtgttcctccaggggtgctacctgc

SEQ ID NO: 556823 - DNA, 167 bp, Homo sapiens
aagcagttaatacagactcaactgtggggctctacgcacttctcccttcccaggctcccaatgtatctagggactacagtgtgcttcgcagctgtggtggctcaggatgcctttcatttctatttcttgcctaagttgctataggttagaaacgtctactaacagtg

SEQ ID NO: 556824 - DNA, 497 bp, Homo sapiens
gtctgtgtggaaagcggctgtgcagacattcaatggttattattatgaaaacaaaaaaaacaaaaaaaaaaaaacatttgtgggccgctgcgccggaaaaaattttcaaacccattctgtgggggggcggggcccaaggggaaggaaacctcgggccacaacggcgtaccccagagaacacccggggcacaaagcacaaagtggggcggggagttttctcacaccaatataaaaacaacacagccgggcgggacaacccggagcgggggttcttgacaacaatctcccagttgggacttctgcggaggcgccaaacaggcgggactcttactcaacaggagagaggcacgcgagggaggccgagcatacaaaaaattaacggccccagctagagtgggaaaaagcacgacgataccaaacagcagcgacgggccaagagtaaccacacagcaacagatagtagacggatgcgaataaacaacagaacagaccaacga

SEQ ID NO: 556825 - DNA, 455 bp, Homo sapiens
gtagaccctgtatcggaggcacttcctgtgtgtccgtgcatatgagctcggcgccgagtgggagacacaggggcgttgacaggacctcagcatccgagagggccactcgagggaccttccaggggacgttccgtaaaacggcgatacgggcacactttttttttttaaggagagaccacagatcctgtgggattatcgaggcgatgttggcccgagaacctcggctgcgctgggacgggtggggagctagggcacccatctgacgatgagccagagccggggcaagtgggttgggcgaggggtggcccttggcctgagatgtgtggggcttgcaagggtgggtgggggctggtcagagggggaggtcaggctcgggtgaatgctgagcctgggggaacagattggattccgccggtctgagtcacggctggggagtctcccagcctgcagtcacc

SEQ ID NO: 556826 - DNA, 944 bp, Homo sapiens
  misc_feature (153)..(153): n is a, c, g, or t
ttgggccagttgccgcttttgcgcgggcccccacaatccccttttcttcgccccttttagagggaggacaacctccgggcgttccccccgagacgttgtaggcgctttattatctttataggtcctcccggagatatttggggagagattttnggggtgttacccccccccaggggagagtgacccccccctccccaacacgccactgggctgcattgtgttcgcccccctttgtagaaactctgggggggacgactacattataatcagagaagataagtacaccgccaggaggaagaagtccttcttggttgttgttcatcaggcaggaggggggcccccttctcttgtggagcgcccgggggaggaggaggtcttttcttgcctcctcctgtggcgcggcgtctttgcgcctcgccacctgaggccttctcagagagctttgccactatatctttcttccccggggagcgctttttctctctcccccaacgctcacaggcgcctctcacaccccccctcgggggggggagcctccgcagaggattttctctctatagacgggggcctcgcgaccgtgggtgtcccccaccatagaagccgcccgacgcggggtagatgttgccaccacgaggaagagctctctcgtttgtggcgctgctgtggttttatatgggtgtagagaccaccctcccgacctttccttatccctattgggacttaccctctatagggacttactttttacctccctcgccctcttgaggccccacctctctccaagaagatattcccggtttccaacaaaaagcccggccccccaatattttttttagccccccccggttcagggcgttttgcccaatttggatagaaatagctgccccccaccatatttccccctcctttaattacaaatgagggttttctggttccaaaaaaaa

SEQ ID NO: 556827 - DNA, 241 bp, Homo sapiens
tagaccagctgttacagcacaggttgttcacccgtgagccccaggatacctaccactacctgcccttgagcctgccacaccggaggcctcacttcttctttgccaagttccgcatcgctcgcagcttgacgcccttctctccgtacgagcccctgaacttccacgccatgttccagcccttacttgagatgatacacgaggctcagcaggccattgacatccacttgcacagcccggcctt

SEQ ID NO: 556828 - DNA, 719 bp, Homo sapiens
gagcgagaggacgagcatagcatctgcatgaagatggatgtgggcagcaactaggtcctgatggagagccctggcggtactagtccgcagatctccctgtgggccgatcgggtgatcgcgtgctgggcacagtcgcagcttgaatacagccattcgtttatcggtggtcggtgcgtggtggtcctcaatcgtctgctggtggatccgtgtgcgcacgtccttgcgtcattggtggtctccgagatggacgcaagagaaaatagagcggagaatagagtctcatgagaacgatcgaagcgatgaggtggacgccacgggcaagccaaaaacaacagcgcttggcccccttgaagattgagcaaccttggtttattcaagttgccaaaacttttctcccaatttgggcctcccaggtgggccatcgatgcgtggtacttgacttaacgcaggaacgctgtgccttgatttcctgccctttattaaacggcccaaggaacaccccgtggaggatggcattgcttggttttactagtccacttgacagagagtacggctctcgaaggaggacgccaatttcgccctagggttcgttttgaggggcgttcgtccaccataaaggaaaaaagttccctagcaagaggttttcccagtgactgggaaagtggcctcgtcgtagcagggggctagagccgggcagtatgtcgtaccggttcataatg

SEQ ID NO: 556829 - DNA, 761 bp, Homo sapiens
cgatgttgctggcgccccggttctcttgtgggcgggaatccggcgcgcattttttctttgtagcgggtcccctgtagcgcgtgtttttccggtgtctcgcggttgccgggaacataatttccgccgggttttttgttggcccctgttgcgtctgctgggcaggaggtctcttcccggtcgatggcctctttcttgcccttgtagcgctcattaagagattgcgcttcttgcgaggagttgctcgtaactggttgcattgccgcgctagttgtgtgcgtctttgtgtgggaagtcgagtgtagccaatcctttgttaatatctcgctgccgttgatctccccccttcttttatccttccctgtgtagaatattttatcgagtggagttaataaacccctcgtgttcctcacgtattccactagaacttccactcctctcctttactctatgcacgtggattctccctccacactgcatgtgttgtcaccccgccctctatacttattccccttgtcacacactcttcttctcccccctcagccactcattagtggtctcactccaccccgcacgccctatcttcaccaccatctaacgccccgtcattcccacccgcgtattaaccacccgtcctaggtttgttataccacactccttttccagcacgttatttaactctcctcgaattcttcgctcctcgacgcaccccgcaacatccatcatcccgggttttctcctcctgtcaaacaaaataaccaaaa

SEQ ID NO: 556830 - DNA, 164 bp, Homo sapiens
tctgctccaatcagccatcttcgtccctcaggtcacttgtatcaagtatttttactttttatttttcatttaggatattttctatagtgtcttcaggctcactgatcattacttctatagctcacgctctgatattaaccccatctattaaaaatttaaggtac

SEQ ID NO: 556831 - DNA, 282 bp, Homo sapiens
taaggaaaatgtagcatttaacttcagaaatttagtggttcagaatagttggtgtgtgatattatggcttttattaagctgtaatatcatgtaatgatattacatgtaaatgatattacatgtaaatgatattacatgtaaatgatattacatgtaaatgatattacatgtaaatacatgtgatcatgtaaaagtggaatttatattaattttaattttccttttaggatctcagattacttaacattaacatacaacacaaagctagagataatgtgcgta

SEQ ID NO: 556832 - DNA, 1846 bp, Homo sapiens
  misc_feature (13)..(13): n is a, c, g, or t
gcagataccccancctgtgtagtgagcctctctggtaaccaggctgtgcgcctgcccctcatggaatgtgtccaggtgaccaaagatgtgaccaaggccatggatgagaagaaatttgacgaagccctgaagctgagaggccggagcttcatgaacaactgggaggtgtacaagcttctagctcatgtcagacccccggtatctaagagtggttcgcacacagtggctgtgatgaacgtgggggctccggctgcaggcatgaatgctgctgttcgctccactgtgaggattggccttatccagggcaaccgagtgctcgttgtccatgatggtttcgagggcctggccaaggggcagatagaggaagctggctggagctatgttgggggctggactggccaaggtggctctaaacttgggactaaaaggactctacccaagaagagctttgaacagatcagtgccaatataactaagtttaacattcagggccttgtcatcattgggggctttgaggcttacacagggggcctggaactgatggagggcaggaagcagtttgatgagctctgcatcccatttgtggtcattcctgctacagtctccaacaatgtccctggctcagacttcagcgttggggctgacacagcactcaatactatctgcacaacctgtgaccgcatcaagcagtcagcagctggcaccaagcgtcgggtgtttatcattgagactatgggtggctactgtggctacctggctaccatggctggactggcagctggggccgatgctgcctacatttttgaggagcccttcaccattcgagacctgcaggcaaatgttgaacatctggtgcaaaagatgaaaacaactgtgaaaaggggcttggtgttaaggaatgaaaagtgcaatgagaactataccactgacttcattttcaacctgtactctgaggaggggaagggcatcttcgacagcaggaagaatgtgcttggtcacatgcagcagggtgggagcccaaccccatttgataggaattttgccactaagatgggcgccaaggctatgaactggatgtctgggaaaatcaaagagagttaccgtaatgggcggatctttgccaatactccagattcgggctgtgttctggggatgcgtaagagggctctggtcttccaaccagtggctgagctgaaggaccagacagattttgagcatcgaatccccaaggaacagtggtggctgaaactgaggcccatcctcaaaatcctagccaagtacgagattgacttggacacttcagaccatgcccacctggagcacatcacccggaagcggtccggggaagctgccgtctaaacctctctggagtgaggggaatagattacctgatcatggtcagctcacaccctaataagtccacatcttctcagtgttttagctgtttttttcattaggtttccttttattctgtaccttgcagccatgaccagttctggccaggagctggaggagcaggcagtgggtgggagctccttttaggtagaatttaacatgacttctgccccagctttatctgtcacacaaggctgggcacctctagtgctactgctagatatcacttactcagttagaattttcctaaaaataagctttatttatttctttgtgataacaaagagtcttggttcctctactacttttactacagtgacaaattgtaactacactaataaatgccaactggtcactgtgaaaaaaaacccaaagcgaaacaacagcagaacaacagacaaagataaaaccgccaaggacagcacaacagcggaagacagaacacacgaca

SEQ ID NO: 556833 - DNA, 206 bp, Homo sapiens
aaaggggcccccccccccccgggccccccccgggcgggggttttggagggcccccctttttttgaattgggcgggggggttgggccttgggggttttttttttggttcccaaaaggtttaggaaagggggggggggcccccggggggggggcccctttttgcccccgggggggattttttttaattttccccttttggatttggga

SEQ ID NO: 556834 - DNA, 1474 bp, Homo sapiens
  misc_feature (13)..(13): n is a, c, g, or t
gcagataccccancctgtgtagtgagcctctctggtaaccaggctgtgcgcctgcccctcatggaatgtgtccaggtgaccaaagatgtgaccaaggccatggatgagaagaaatttgacgaagccctgaagctgagaggccggagcttcatgaacaactgggaggtgtacaagcttctagctcatgtcagacccccggtatctaagagtggttcgcacacagtggctgtgatgaacgtgggggctccggctgcaggcatgaatgctgctgttcgctccactgtgaggattggccttatccagggcaaccgagtgctcgttgtccatgatggtttcgagggcctggccaaggggcagatagaggaagctggctggagctatgttgggggctggactggccaaggtggctctaaacttgggactaaaaggactctacccaagaagagctttgaacagatcagtgccaatataactaagtttaacattcagggccttgtcatcattgggggctttgaggcttacacagggggcctggaactgatggagggcaggaagcagtttgatgagctctgcatcccatttgtggtcattcctgctacagtctccaacaatgtccctggctcagacttcagcgttggggctgacacagcactcaatactatctgcacaacctgtgaccgcatcaagcagtcagcagctggcaccaagcgtcgggtgtttatcattgagactatgggtggctactgtggctacctggctaccatggctggactggcagctggggccgatgctgcctacatttttgaggagcccttcaccattcgagacctgcaggcaaatgttgaacatctggtgcaaaagatgaaaacaactgtgaaaaggggcttggtgttaaggaatgaaaagtgcaatgagaactataccactgacttcattttcaacctgtactctgaggaggggaagggcatcttcgacagcaggaagaatgtgcttggtcacatgcagcagggtgggagcccaaccccatttgataggaattttgccactaagatgggcgccaaggctatgaactggatgtctgggaaaatcaaagagagttaccgtaatgggcggatctttgccaatactccagattcgggctgtgttctggggatgcgtaagagggctctggtcttccaaccagtggctgagctgaaggaccagacagattttgagcatcgaatccccaaggaacagtggtggctgaaactgaggcccatcctcaaaatcctagccaagtacgagattgacttggacacttcagaccatgcccacctggagcacatcacccggaagcggtccggggaagctgccgtctaaacctctctggagtgaggggaatagattacctgatcatggtcagctcacagctacactcgccatcacgcgtaccagtcagcaaccgttatactcgccgtccttttactctcggaga

SEQ ID NO: 556835 - DNA, 652 bp, Homo sapiens
gcaggagaatgacgtgaacccaggaggcagagcttgcagtgagccgagattatgccactgcactccagcctgcacgacagagtgagactctttctcaaaaaaaaaaaattaaaaaatctgaaactgtttgaattaagggtagtagtaccactacaaataaaacacaaatagattgggtagttaccacataatttattttgtctttctttcttagcgggggggtagatgggttagagagtatggccaaagatgaaatggagaatttcctgataatatggagtttatgcaaaatcagtatatgggtaagttaccaaacttataattcttaagggtcactcaaggtgatatggtccattcatctttcaataagtattatccagttttacttggttcacactacttggttcacacctacttggttgggctgtgtgacgcaaaacaaataaaggcttggcctttatggaattctataatggtttaagacgagttacgatagctgattggcaactatacagtgggccctctgagtagggggtatcgcatccagggcatggaaccaaacctgcagatcagaactatcggcaataaaacacgccgggtgtgatggctcacgctgtaatcccaagcacttggggaggccaaggtgggggaa

SEQ ID NO: 556836 - DNA, 291 bp, Homo sapiens
acacttcacacctgggggtgctcaagacaccccatgacccaatgatgtgccccatccaaagtctctgtgcggaaagttacaaaggcctcactgcaagctccctgtcggagagcgcacttatgcccttggaggcaagctgcctggtcatactggctgtaaagagcaaggtgcctgcacaggaccttctctgtatcctatgccaagtcttccaggctaatgacacaagagtccaccatagtctttctggacagagcgatataagatggggcctatacagctacccaccacatg

SEQ ID NO: 556837 - DNA, 173 bp, Homo sapiens
  misc_feature (17)..(17): n is a, c, g, or t
  misc_feature (125)..(125): n is a, c, g, or t
gccaatgctcctatttnagtctgaaggctgtctgctgtagaaccaggaagagctgatgttgtggaagttcaaaggcagtctgctggagaattctctgctgccctggggaaggtcaatcttttttnttttattcaggcttgcaactgattggatgagttcctcccacatactat

SEQ ID NO: 556838 - DNA, 251 bp, Homo sapiens
  misc_feature (180)..(180): n is a, c, g, or t
ttattccgcggtacagggacacagatttattaaggacacattcctgtgcacattgaaagtgtctgctacccatatcttcttgaacgtataataggaagatagctcgataatgagaattctaccactatttgattaacgagccaatttttatacgccatttctggaacgttcagcacgatngaatagtcaccatgttactatcgttttctcgcgccacgggtacgcgagcatcgaattccgtaatacattgt

SEQ ID NO: 556839 - DNA, 105 bp, Homo sapiens
tgctgcagatcctgtatgagatccccctcttgagggcgatgaggatacgtctcgcatggcagaagtcgataaggttaggagttcatagttggaaaacttgtgccc

SEQ ID NO: 556840 - DNA, 526 bp, Homo sapiens
  misc_feature (139)..(139): n is a, c, g, or t
  misc_feature (163)..(163): n is a, c, g, or t
  misc_feature (409)..(409): n is a, c, g, or t
  misc_feature (417)..(417): n is a, c, g, or t
  misc_feature (480)..(480): n is a, c, g, or t
  misc_feature (488)..(488): n is a, c, g, or t
  misc_feature (514)..(514): n is a, c, g, or t
tggggtttcaccattgttggccaggatggtcttgatctcttgatctcatgatccacccgccttggcctcccaaagtgctgggattacaggcatgagcactgtgcccagcccttttttttttttttttttgacggagctncgctctcttgcccaggatggagtntagtggcacgatctcggcttactgtaacctccacctcctaggttcaagcaattctcctgcctcagcctcctgagtagtggggattacaggtgcccgccaccatgtctggctaatttttgtgtttttagtagagacggggtttcaccatgttggccaggctggtcttgaactcctgacctcagatgatccacctgccctgaacctccgacagtgctgggatttacaggcataagcaaccgtgcctgnaccagggnttttttagcaaggaaaacgtgaggaatgaatgggtgtttggtttgcaacaaatcataattgcnacatgttntgaaacctgaagttatttgttaagtnttttatgaagaa

SEQ ID NO: 556841 - DNA, 104 bp, Homo sapiens
cttatagaaaaacaaaaagaacaaaaaacaaaacacacacacacacacacacacacacacacacacacgcccccagaggcacaggatacagagtggaaacagcc

SEQ ID NO: 556842 - DNA, 252 bp, Homo sapiens
  misc_feature (36)..(36): n is a, c, g, or t
  misc_feature (42)..(42): n is a, c, g, or t
  misc_feature (51)..(51): n is a, c, g, or t
  misc_feature (75)..(75): n is a, c, g, or t
  misc_feature (80)..(80): n is a, c, g, or t
  misc_feature (116)..(116): n is a, c, g, or t
  misc_feature (227)..(227): n is a, c, g, or t
ggcaagaaggcattttttttttttaaaggaaccaanctctcnaatcatgangtgatataaaagcggcatatgccnccaangctttgaattcgggtcccagttgctgtcccaaaggngggggtgaaactccccccccccccccttttttatataataaaagggccttagcatgggttgcagctgtcccccctccagtaagctggtttccaaatgttttcccctgggcntcccaataaaaagaaccatgggcta

SEQ ID NO: 556843 - DNA, 973 bp, Homo sapiens
  misc_feature (243)..(243): n is a, c, g, or t
  misc_feature (322)..(322): n is a, c, g, or t
gaccttcacttcgcccctccagctgctgctgctgtagcccgaccgcgagcgtgccaagcggacttcagtcagctagcggagcggtggcggcggaccccctcaggacactcaccagtattccccttcttcccccgccggttctcgaccatggacgaactccacggcatcagtatcttgcagcagacgcttgcacaatgctagtgattccttcccctactcattcatggctaggacccgttgtgnccaatagacttgctctacgtagaattatcttattcacatccattatacgagacttagagttaatcttcgtgcgctgttngagtagaatagaacctgcaattgtgcaaaatacataaagctctttgacaatggatgtggccagttggtatatttatacctacaactgattaccggggttactatcttaattaaccagataagctgtgtataaacgcctcatctggagatctcttgagatcacccaaaaggtatcaacgctggtggtgacgtactgcgtgtcctgatctgtgtcacctaggatatacatgtcgggaacacctgtgaataaacacttctgcgccacacacgacaatcggtaattattgaaaagatccacgtactcttgatctaaggtgttgaaacctgactcaccttccgatacttatcccttccttaatccaatcatcaggaagcgaaaaagtggtgagaatcaagtcttcttacgaatgagggagtgtataaactttggttgtgatgtcggactttggattgtagttggagcctgcaatttccagtggttacacgtagtcattaggatatgaagaggtaggtatgtggtgtatcacgatgacacttttgagaagtgcctaaatcaaaagtgaaaatgcattaacttggaagcgggttacagggactggggagttccaaggttcacatgaatggtcaccttgttgggggccaaacacgggcc

SEQ ID NO: 556844 - DNA, 966 bp, Homo sapiens
tcataatgcagttatttaggtgaacacaacagctgacttttcagaacaaggcagcaactcacttttatatgctaccacagtatttcataactttctgggaaaccttatttaggtcatacaatggtcatcttatctattttccaaaacaggtcatattttaatacattgtcacaattctcatatcacagttgcgtgaccgagcaattcggtcacagttgctacgcgtgtcatatcaaggcatcctttctaacattcatgccaactacgaggcatggtcatccattctccaaagtcctcattttggccacaaggcttaaaaccaagtcagccacacacacgcattgccacattgtacggccattcgagtaaactatggctggtcttctacactatatctcaccctggctacttttacactttgacaaaccctaaaaacaccactggttctgacacacacgcccataattcacattacccttaagataaaatcgttcattaaacttttccaacacgtgaattgttacctttggtacacacacactggcactcgtctacacattttcggcacgcttggggacaacccctgggagaacaacagacgctgacgctggactaacatctctatcgggagcggcgttggactcctcatcagcgacttctcggtccttcattagacacagataaaacaagaacagcacattctggcagcacgtattttgtaaaaccctcttggagcattttcacactgctttacgacttcactttatccaggccatacacgcgaagggaataccccgtggctataagcgggctacttcactctacatggcctagttggccctttctatttacacgctgacaacccaccgtcatcggtcgcaggcgcttcatgggcccattaccccaaagacgtaactattacaggcctgggctctcacacgaacccacactcacaacgacaccaca

SEQ ID NO: 556845 - DNA, 91 bp, Homo sapiens
  misc_feature (33)..(33): n is a, c, g, or t
gccaccgccgactccaggcactcactcaaactngatcttcaactctgcatacaagcagaagcaataaaccaatctgattttcttttcaatt

SEQ ID NO: 556846 - DNA, 391 bp, Homo sapiens
gccgcaggcttagcgctctcgccctgtgcatgtagcggacagagcccgacgaggtggtcatgagccaagccatccaggcggcgcacgccactgcgcgcggcgagctgagcgcggagcacctgctcaagtggatcgacaccaccggctgtctggcggctgagaaacacgctggagattcctgcgatacagcctcagcggatgacatacagttggaggagacaggtagagttggacaagttatcaccatcaaagcacaagatactagagcattgagcacaagcatggagatcagtatcaaggtcatggcacaggatatgctcactggcattgagaagctagctagagtggctttcatgacatttgtagccccagctggataagaggttcgttt

SEQ ID NO: 556847 - DNA, 154 bp, Homo sapiens
tgccagacaggatggacactcgtttgaattgacttgtcaagaaggctggacgagagacttctgtccctcccagatgtgaacctggcactggccagcagctcttctctgagctccatgtacagataaatcaggccagactgagaaggctccccag

SEQ ID NO: 556848 - DNA, 175 bp, Homo sapiens
ttggtaaagttggagttctgccgtgttactgatgctgatctcgaactcctagacctcaagcagttctctttccttggcctttcagagtgctgggattacatgtgtgagccactgtgcttggccaaaatatcgttttttaaatcatagtagcttagtatatctagttgagtgagcc

SEQ ID NO: 556849 - DNA, 223 bp, Homo sapiens
gtcaagcacatgaggttcttactttatgccgtccaatctactggtttggtgtgtggtttcttcctttctttaatctttcgcaagtcctctcaatcttcatattttcttccacctttatggtaacgtctttcataattactcttttattcatcaaccatatgtgtaggtatatgatgttaaattaagctcatgattcccctccccaatagctatcaaactatcc

SEQ ID NO: 556850 - DNA, 627 bp, Homo sapiens
  misc_feature (1)..(1): n is a, c, g, or t
naacagcaaagtcttgtgtgtttctatatgacgcgattcctttaacagtcctgttacactgaaactgctgttcttggacttatcacaggtcttctccttaaacttaatgccaaaagtaatttagcaacatatctgacttgattgagtgtagagctattcacagtctcatttgatcccacttagatatattgtgctaaagagtaccaatgtagtacctagtggtattaataatatatgccacatattatctaaaatttgaaatagcctgaatccaaagcacagcgtgggttaacatacataaatactagcactgacctctgaaaccttagtataacaaaccccgagtaccaataagtccccagagggtctgcatgttggattcatatataccatcctctaacaaaagaacacagggctctctggagagaggagtcgattccagggcagggacagggataatacaagagcctggtggtgctagaaagaaagaaagtgctcaaaacaaaaagcacagaatggagaatgttgatggggcacaagaatccaactgaaggatgtggccacagctggaagatctggagcaacaaaataaatggtgataatattgatcataatacaatactgtct

SEQ ID NO: 556851 - DNA, 87 bp, Homo sapiens
gggtcttcgaaagtgctgggacaggcaggagtgagccaccgcatctggcccggaaagtgtttggagcgtagaaaaatgcaaattata

SEQ ID NO: 556852 - DNA, 213 bp, Homo sapiens
gacattacacctttgcagtccagcctgggctacaagagcgaaactccatctcaaaaaaaaaaaaaaaaaacccaaaaggtgattctcaaacaccagcctggccaacttggtgaaccctcaccccacccgaaaatacaaaatttacccaggcgtggtggcacacgtcttattatctccagctactcaggaggctgaggcattgagggggaccct

SEQ ID NO: 556853 - DNA, 93 bp, Homo sapiens
ggacgcgtgggtcgacccacgcgtccgcggggagatggctgaggccgaaggggttcccacgaccccaggcccggcttcgggatcgactttcag

SEQ ID NO: 556854 - DNA, 369 bp, Homo sapiens
ggctgatcactgcttttgcacagatctgaggcatgagaatctttcgaacctggaggtggaggttgcagggaggtgagattgtgtgactgcactccagcctgggcagcagagtaagacaccgtctcaataaagaaataaattacccagtctgaggtatttatttacagcaatgcgataatggactaatatagaaaattggtactgaggagtgaggcattgctatatagatacctgaaaatgtggaaacagctttggaactgggtaacccacagaggttggaagagtgtggagggctcagaagaagacagcaagatgaggagagttttgaactttctagagacttgttaaattgttgtgaccaaatgctca

SEQ ID NO: 556855 - DNA, 1127 bp, Homo sapiens
agcgtcggggctcgcggatggcggcgcaagggcggtagggcctggtgccggtggtcggcggcgcccccggggctgggaggcggcccgcgagaagctggcgctgcggcgcacgaaggtgctgagcaccgaggcatatggagctgtacagagctggcctcagggcggagggcgagcgggtatcgacccctgaggttgttccaaagatccgtggtggaacctgctgaaagctgaaacgtggcccccacttcgcccgtcattaccagattgctcaaaggtcctagtgtgttgccaggagctagaagtgctagcgaatgcagaggcccccaggaggaccctttgcgggcccgtgttctcatgaccacaacagtagagaagcgggtgcccgaagaaccccgagggggatgaagacaataacggcaaaggcggctaggcaccgtccggggaagcacacgaatactttgtgggcccacagatggtgccggggaagactcgcataggaaaagaccgactagaaaggaggaatcgcaagggccaaagctaggaattggcccactggcacagggccccatatggggccatacaccagggtcttggccacaaaaatgcgtagagcatggaagccctgtggtcacaaagaaagaccccgtaacgtaccagtggggcaaggcaagaaccattagaggaatgtgaggggcctaaaaggcacttgcgattccaggatcatttaggatcccccccaaaggcataaacgcgccgataccacaatgtattcaacgcgtaccattttaccaaaggtggaaattaagactagaaccgccttttaccatggaacaagttgccagaaaggggggtcccaacgagatgaacaaacagaagaaacacaacaacagaagagctcgtccacccaatcacaggtggttggtagtgatcccaccgcgccactatatagagggtcgcgctcgtaaaatccagcattttccagaaagcgagagctgatgctcccccgggtggcaaccaaaagaacttttcagggtacccacccattttatcaggacagacaagacgttataaaatatatacatagacagcgtgagggagacgtaaaacaaccagcggtggagcacgta

SEQ ID NO: 556856 - DNA, 365 bp, Homo sapiens
ttaagtatcaggctgcacaggtgggtacatctatgcaaccctaacctttctgaaattactaggcatagatattcctgaagcactagtctcagcctgcatgtatggtccctcatggctactgtctcatttgaaaagtgagcctatgaacagaggaaaacactatgatttttaccactgtttggtcacaccaattcttgacattaactctctcgaaggcacattagtatgaccttcaaatcctagcccccaggaaagcttcacttgagaaagtacgtttcctgggtatcccttcctacaaaccacgaagcaaaatgacacacaccctccttacatgcatcaaaacagtgctgataatggatgaaaca

SEQ ID NO: 556857 - DNA, 172 bp, Homo sapiens
cctgagtccttctcatgccatctctctgttctctctcctgcctcctcctccacacagaaggaacacagcgctgctaacgcctcggatttagccccaggacgcctcattgtcagactcttgacctgcagaactgtgagatgatcaacctgcatagcataagctacttcccacc

SEQ ID NO: 556858 - DNA, 140 bp, Homo sapiens
tcgttgaacataacaaccttttatagcggctgcaccatcgggatgtcctgatccaacatcgaggtcgttaacccagattgtttatatggactctagtaataggattgcgctgttatccctaggttaacttgttccgtcgg

SEQ ID NO: 556859 - DNA, 126 bp, Homo sapiens
cctgaggacacggctgtgtattactgtgcgaaagaagggggggaggtatttagcagtagcagctcctatttgagggtaccacacacagctggaggctatttgtacttcgatctctggggccgtggc

SEQ ID NO: 556860 - DNA, 409 bp, Homo sapiens
gtggaacatcacttggttctcatgatctgcctgcctcatgctcccaaagtgctgggattacaggcgtgagccactgcgcccagcctattagttcattttcatactgttgataaagatacccaagactggataatttataaagaaaaagaagtttaatggactcacagttcctggtggctggggaggcctcataatcatggcagaatgcaaaaggcacatcttacatggcggcaggcaagagagaatgagaaccaagtgaaagtggaaaccccttataaaaccatcagatctcatgagacttattcactaccatgagaacagtatgagggcaactgcccccatgattcaattatctcccaccagttccctcctacaacacgtgggaatgatgggagctacaattcaagat

SEQ ID NO: 556861 - DNA, 131 bp, Homo sapiens
atagcccagatacagctggaccacggatccatcaccttccagggacagccgaactaagcccagagctacaggcggccatggcaggggtgtggccctgaaccactccccctcccaccatgcccgcacggtgc

SEQ ID NO: 556862 - DNA, 192 bp, Homo sapiens
cagagatcatgatgccactgcacttcagcctgggcaacagagcgagactccgtctcaaaaaaaaaaaagggctaaagttagccatccatatatgaactccttttccctatactatcgctcatagaaaaattttactactaactttggccaatagactatgcataacaaacatgaatgaggcacccgcgtaga

SEQ ID NO: 556863 - DNA, 127 bp, Homo sapiens
ggaaagcgtgttgaccatctcgagcttaacttgtgacctccccgagagactaagaccggcatagctgtttggtgttaggtggctttggttggccagcagattgctttttacttgcaggaccccccct

SEQ ID NO: 556864 - DNA, 391 bp, Homo sapiens
ggactatgagaatcgaacccatccctgagaatccaaaattctcctctacctgcacgacaaacacataaaaaaaaaaaaaaaaaaaaaaacaaaaaaaaaaaaaaaaaaaaaaaaaaaaatcgtgtttgtgtggggcgcgcgctggggccccgtgaaaaaggttttttaaaacaccttgtgtgtgtgggggcgggggggcccagtgggagatggtggaaacagggtggttcaaagagcgtgtgttctctagagagaagaactggtgggtagtagaacgagggtggtggggttttcttccagacatataaaaaaaaaggcgcggggggggaagcagaggaggtgttttggaacaaaattccggagaggggagttcggagggtcctaaggggga

SEQ ID NO: 556865 - DNA, 158 bp, Homo sapiens
tcactgcagcctctgctcccggttcaaacgattctcatgcttcagctactcaggaggctgaggcaggagaattgcttgaacccgggaggcagaggtagcagtgagccaagatcacgccactgcacttcagcctgggcgacagagcgagactctgtctc

SEQ ID NO: 556866 - DNA, 253 bp, Homo sapiens
ttgctgctcgtggttctacgtatgcatgactgcgcatcccttggctgtgggacgggtcactggggaaagagactagccctctcctcacttggtgatctggtgtgaaggagtgaggggtatccctcagcctaggtggctttagtttgtcgtgagtcccatatctgtctgcaaacctcactccaggtacccgtctacgatcccaaaagacttaagaatagccagggctataggattttcaagaagcaggaactgg

SEQ ID NO: 556867 - DNA, 384 bp, Homo sapiens
tgaggtgtcgtgaagatgcgggatagaaaagggtccgagttagcagtggacgtgtagggagaggaccgggtgcgaggacggacggagcgaggtgggaagggcggctcgatctggatgtatgggggtccgatggctggctatggaagtttgacccgaggtggagaagggatggtcatggggatcgtgcgggggtctggcgtctggagtgcgcgagggctgtaatcctctctcgggtggggatgagaggggttgcgggcgtggtatggggcgcccccctccacacatggactacaaatacgaaatacacaagccgattcacgtgaagcggatagtgtattactgtgcgagagtacattatgtcggagcagatcgccaatttgacta

SEQ ID NO: 556868 - DNA, 143 bp, Homo sapiens
gtagtacggcaaacagctggaggatggcgcgctctctcagactacaacatccagattgagtcaccctgcacctggtgttgcgcctgcgagggtggcattattgagccttctctccgtcagcttgcccagaaatacaaatgcga

SEQ ID NO: 556869 - DNA, 1350 bp, Homo sapiens
gggtcgtggggcttctggggcagctagtggctgcccgccgagctgcctgcgccggaccggtggcgggtccagtcccggagcgggccgtcgcggagagagaaataacatctgctttgctgcctgagctcagaggagagcccagagcccatcccgcagccagagggctggagcctgactcagaggtgctttgaagatgccggaggccccagactctgctgtggccagctgtgtatgctgggcctggtgctgctgcgtggtgctgctgctgcttcatgaggcactgggagcttggaggcctgtatgccatatacgggtggaaacggaggttcgatcctgcacggcgcaagttcgcacaacgcgtgcatcattggtgttgacaccgaagggaggcagccgcgatacctgaaagccatggtgcgtggacgcaatgcaggaagcgccggggaaagggcagccggaagcgggtaggcagtgcgaggcccaggtggccgaacccctaccttggctggccgcgcagacaagggcgagttgggcgccaagacaaagtttggcgacgacaacatgaacaggtgctaagaatcgagagggaccgcccaggggagtccaggggagccgagcagaggcaccatccggtggcgggagatggcggacgtgtagggaacactacagtttgaggggacgaagagcaaaggattagaggcagaaatcagacgcaggccaggcgtgtgatgaaaaccagggggagcggaagtggccaaaatcaagcgagatcggggggaatacaagagcagccgaacactgtgggccgcggacgagtctaagcgccaaggccggggaattaggtgcgacaatcatcgagcttaagcagagttgagaagacgcacagagggggcacaacgactatggggagagcaaggagagacggaccacaccgggagcaacaaatgccacgcaggtcgggaaacggaaggacagcaagaccagggtgagaacaccacatagagaaaacgtgggacgtacccgaaagcaggtgggagagaggcaccgcaagcagggacggggcaaaacgagaactaatgtgggaggaaaaggtgggccaggctgactgaacagagggcagcgaaaagacactggacgcaaagacagcgcgagcgcacacaggggatgaagagcaaagaagcaaaaagcaagaggcgaccgaggagagataaactgatggagacggacgcaagaacgaaagagaatccagtgataaaaaaggaagagtagaggaacggaacataaagagaagcagcacaagaaaaatgaaaggaagagcaagcgagggaaagcgaagcgtgcagacacacg

SEQ ID NO: 556870 - DNA, 434 bp, Homo sapiens
tgccagtcccgacagtagccagagctaagatggggacagtaggaggagcgtgagaaattctacattgtccaaatcgtgctctcttggcttcctgcagtggctctctcatgcctgtaatcccgatactttgggaggctgaagctggaggatcacctgaggtcaggagttcaagaccagcctgggcaacatggcaagacccctcacaccccccatgcacatctctacagataatacaaaaattaggtgggcattgtggtgcacacttgtagtcccagctattcgggaggctgaggtgggaggatcaattagcccaggaggtcaaagctgcagtgggttatgactgcatgacagcactccagcctgggtgacagagtgagacactgtctgaggctctcccatcagacctgcgagccacagcttcggctgccattggg

SEQ ID NO: 556871 - DNA, 242 bp, Homo sapiens
gtgaggtggtggcttcttgtttccctggtcttagatactgctcaactcacagttgaaatgtagaagtgaaaagtcagacagcagcaggtgttgctgggaatgtggagaagttggaaccctcacacaccattggtggggatgtaaaatggtacagctaacttggaaaacagtcggcggttcctccaatagtcaagagttcccatatgccctagcaattccactcctaggtacgtatcaaaaaa

SEQ ID NO: 556872 - DNA, 698 bp, Homo sapiens
tggctcacgcctgtaatcccagcactttgggaggccgaggtgggtggatcaactgaggtcaggagtttgagaccagcctgaccagcgtggtgaagcccccgtctctactaaaaatacaaacattagccaggcatggtggcgggcgcctgtggtcccagctgctcgggaggctgaggcaggagagtcgcttaaaccggggaggcggaggttgcagtgagccgagatcgcgccattgcgctccagcctgggggacaatagcgaggctttgtctcaaaaaaaaaaaaaaaaaaggggaaaatcgggccaaactgggtggtgctctcgcctggtaagtgccagcgcttggggaggctgaggtgggcagatcacacagggccgggatttaaagaccatccggggcaacctgggcaaaaccccatctctactagaaaaaaaaaaaaaaaaaacaaaaacaatgatgtgggggtcgcgcgcgccgcgcgcgtcaaaaaagaaagcttaacccacaccgatgggggaggggggcgcgccccggagagtgtacaaccgggagacgacgatggctctccaggagaacagtgccggcaagacacgcgggggtggctccccccaaaaaaagacgccggggaacaacgcgtgggcacacacccggggtccggagcggacagaggatacgaggggcccgggaggatataaag

SEQ ID NO: 556873 - DNA, 355 bp, Homo sapiens
gtgcactgcttcggactgtgttcggacgtttcttccttcggtgggttcgtggtctcgccggctcaggagtgaagctgcagacgttcgtggtgagtgttacacgctcttaaggcgacgcgtctggagattgttcctttcctccctggtgggctcgctggtcctgtatggcttcaagacgcgaagccactatcactgtggttgagagcactcacagacacacgtgggcttcttgacgactgtcttcctgacaaggcatgacgccttgaccacctggactgccgacccacgccctgtgcggcatccgacacgcacgttgccggggtacccgacgctcgaacttcgtacctcatggtca

SEQ ID NO: 556874 - DNA, 159 bp, Homo sapiens
cagcaagaatggcatatcaggttctctgggtaaccctgcctatgctgacccttgatgcttaggtgtactcctctttctgcactctgtactaaaggacgataacactattactgttctgagctgcaaatctgcacttgcactgatatgccattcttgctg

SEQ ID NO: 556875 - DNA, 655 bp, Homo sapiens
gtctgaacgaaagggtctccgactgactgagctcgaagccagtccgtttacctgtcgtcagactgaggcaaaagcgctcgcggcaccacgacgaggcgcgcgttcaagtgggaagctgtgagagcgaaaaggcatccggtgttcccgtaagcgtgtcagagccgtggagcgggagcgctaaaaacagcgcgctctctggggactgtagacgtggctggtgctctttcctccctgaaaggaagctagactgccgtctagcgtctaccctcggcactcgcttggtcgtcgattacatggcacgagtccacgtgtgacctggcacttcatagctgattgccttacttataaacgcgtgtgtttccagtagcaacaagtccttcatgacatttgcctatacttgacgcctgaggctgtcagggcgtactcaggccttatgaggagggtattgttacacaaaacagttgtctaggtgaagacgagcaagaaagaggggaaaggatcggacagaatgattgctggaacgactatagaaaaccatgagatctattcgatcttttgctaatgatgatcgccatgttatggtgaaacattcaacaatctatccatctccggaggaacttgaagctgttcagaactatggtatctactgttgaat

SEQ ID NO: 556876 - DNA, 442 bp, Homo sapiens
  misc_feature (33)..(33): n is a, c, g, or t
  misc_feature (40)..(40): n is a, c, g, or t
  misc_feature (47)..(47): n is a, c, g, or t
  misc_feature (76)..(76): n is a, c, g, or t
  misc_feature (98)..(98): n is a, c, g, or t
  misc_feature (163)..(163): n is a, c, g, or t
  misc_feature (165)..(166): n is a, c, g, or t
  misc_feature (172)..(172): n is a, c, g, or t
  misc_feature (204)..(204): n is a, c, g, or t
  misc_feature (267)..(267): n is a, c, g, or t
  misc_feature (396)..(396): n is a, c, g, or t
  misc_feature (398)..(398): n is a, c, g, or t
atacaacatatgaaagccttatcacaatggttngcacttnacaatangcatttagggttccatatatgtctgccantgacttgatgtctaatgctttnacatcatatacctgaggactacattctacaaccctgctataattgcttattaatgtcagcaggtntnngttatntagaattttctacaaagacaatcatgttattngagaacaaagacagttgtatttcctccttccaaatttatgtgcattttatttccttttttttnggtatcactgcattagatagcacttccagtacaatgctgaaaagcagtggtgtaccttgccatgttcctgatcttagtaggaaagcatttagttggaaacatcaaggatgatgctagatgtagggttantngtagtagttctttatcaaattgagtaagttctcctgtattcctt

SEQ ID NO: 556877 - DNA, 369 bp, Homo sapiens
atgatgtatgcggtagccattgtacgggaaacggggccgccctgactcaggagctacagaggcatgcccggacctggtggaggacttcaagaacaacatatgaggatgaaatcaacaagcgcacagaagcagagaatgaatatgtgactctgaagaaggacgtgcatgcttgcctacatgaacaaggttgaactgcaaggcccagggcagacaactactccacgagacgagatcaacttcctgagagccttgtataggtgaagagctgtccctaggatgcagaccccacatctccagacacaatctgtggtgcttgtccatggacaacaaccggaaactggacctggacagcatcatcgctagaggggt

SEQ ID NO: 556878 - DNA, 261 bp, Homo sapiens
tcgctatgattataccaagtagagaatgtcataaaacaagcacaggagaaactgggtccagtggacttgctggttaattgtgcaggaatggcacgtgtcaggaatatttgacagatcttgcaagttagtacctttgaatggttgatgatgcatcaattacctgggcagcgtgtaccccagccgggccggtgatcaccacctagtgaatgagcgccgggtgggctggatcgtgtttgtgtcctccctgaggcttgactatga

SEQ ID NO: 556879 - DNA, 167 bp, Homo sapiens
gtggcctgggattttatttaacccaatctgttgccaaagagttggctttgtttatttggttttggcggggagaggcgtggtattttatgctttctggggaccatgtaaccctaaacccatcatgttttttaaatgcccccaacataaataaaacataagcatattga

SEQ ID NO: 556880 - DNA, 307 bp, Homo sapiens
acacaactgccaccttactcttgaagtaaataaataatctttgactggcaggactatgctgaatctccttaggcactctaatcagatgtcctaggtcctcccaattcttagaccttttccatttagtttttcaattcatacaaaacatatccaggccatcaccaatcattctacacgacaaatgtttcttctaacaaccccacaatatcaccccttaccacaagatcttccattcagcttaatctctcccactctaggttcccacgccgcccctgatcccgcttgaagcagacctgagcaagccagg

SEQ ID NO: 556881 - DNA, 376 bp, Homo sapiens
cctctttcggcctcagtcagctagcggctgctaggtgcgggcaccatgctactgatccttctgctgtctctggactccatgtaataaccatgtacaagttatcaccgccattttacagatgagtgtagattaggaggtgtcacctagggtcacgttactgctaagtgagggagcccaagtcatgaagtcatgcgtcagcatccaaccctgcgcttattgtttgctaagaactagacagatgctgtggttacaaagcgaataccacaaaagctcagagtctagtggaagagaggcgacactaagaaaatacagtaattaccatttgttacaatattaaaagtgtgtccaaggtccagagatagcatgtaacactaac

SEQ ID NO: 556882 - DNA, 307 bp, Homo sapiens
taacgtttgattaatcccagtcccgtgaattcctcctggtttcccctttatggactgtccctagtgaaagaacaagccaaccttgatggtattgcccaaattataggttttatgcacatagcatttttgcctgttttggaaagtgcctttaattatcttggtgggggacaaaagcccttcccctatggtataaaagccttgggtttggggagtaacattgtaaagatttacctattttgcagctgcccaagaccatggttttatttgtaagctcccccaataaaaccccccagactgataaactgga

SEQ ID NO: 556883 - DNA, 575 bp, Homo sapiens
catttgccaaagtgaaggaactccagttatgatcgggggaggagttttggcctcacagcaagtactaggagttgcatggaactgagattacagggacagataaacgtttctgattctagatccatacttataggccggtgctgagagacctgcaagttagtttcggagaaagggcctggtgccggatggaagggcccagatttttggaacaaggatgctatagtataacttatgtcgttcctcagcgaccgaaatatgcattgaagacatatctgtggtaggtcgaaagactgccagtagagtggtgcttatcaaattcgtggaataaagaatcagtgtaatgtgtttccacattgaaatcctggttctagtttggagcatttgaaagttcagtgacctttttcaaaggttgtaagatactggaacggagaactgtacttttcttagacgttcctttcaataggctttaaagagacgaacagcatacacaaccagcagtatgataggcatgtacaatcccatgtgttcttgaaatggatcttcacttggaagaaaagttggcgtccttctcgcga

SEQ ID NO: 556884 - DNA, 967 bp, Homo sapiens
tacaggggaaaaaaataaatttttttccaattaataccttttaaaaaaaatcctccccgcggcccttaaaaactttcccataaccccaattccccaccccgagtgtgcaagttctgtggggaacaggttagggtgtttgaaccgtgctggcttgagaggctgtgttcccccaaaccccatctcctgtgacacttagggcccaactccgctccgtgggaaaagaagctatccttcgtgagagaggttgtctcccaccagagtttcagacacccaagtctcctgtgagacacttctcaaaagatatttgtgaggcgccccctgtttgtgtgcgccccgaagccccaccgagagacaccgcgcgaggaaccccagaggggcgccttaatctcgctctcttattagtaggctcccctttttttgagaaactcgccaagagagcggcctataaaaagagcgacacacagttgtgggcccgagtcgctcccatgagggaccaccccccagagcgccattctcaagaaacacccaatagctcccttcaaaatctctgtgggtgtgtgcgtagcagtgggcacacagacgtgtgcaccttgtgggccttataacagagacaccacacaaagggggcagcgacaagacggaataggagcggaacaaacgagcgccacaccaaagtacatggggacacacgaagagcacataccacacgggccccccccaccagtggtagaagccacaaaggaactccgacagaaaaaaaaagcggacacaaccaaagagaagaaagaggcaacaacagcaagggaggagacaacaacaagtagtcccaaagaagtagatatgagtgggagacagaggagatctaatacagcaggggaacctcacataagaggaggataattggggagacaacaaaccgaggatgaggcacacgaggagaagacaacggaggaagcaaaagcacaag

SEQ ID NO: 556885 - DNA, 169 bp, Homo sapiens
gagtgtaaggtcaagagactttgattctggcagattccttgatgactctgaacccaccaagaagccaaactcagatatctacccaaagccaaaaccaccttactacccacagcccgagaatcccgacagcggtggaaatatctacccaaggccaaagccacgccctcaa

SEQ ID NO: 556886 - DNA, 346 bp, Homo sapiens
cactagccggagtagaagtcttttacgcgcatgtctgcttaaggagaagaagtcctcttctacaggagtagggcggccatctcaggctgccggggactaccagggagatgaggtcaaggagcagacattctctggaggcacctctcaagatacagaagcatctgagagctcgaagccatggccagatgcgacctacggcactggttctgcatcacgggcctcagcagtttctgagctgagtcctcgggagcgaagcccagctctcaaaagccccctccagtctgtggtggtgaggcggcggtcaccccgtcctagccccgtgccaaaacctagtcctccactttcc

SEQ ID NO: 556887 - DNA, 368 bp, Homo sapiens
  misc_feature (95)..(95): n is a, c, g, or t
  misc_feature (170)..(170): n is a, c, g, or t
  misc_feature (242)..(242): n is a, c, g, or t
  misc_feature (259)..(259): n is a, c, g, or t
  misc_feature (350)..(350): n is a, c, g, or t
ggattttgtttgagcaggtgagtgggactttttttttttcttgagatggagtctcgctctgttgcccaggagaagcaaaagacaatacaaaaagntcccctcaggggatgcagatcatggagttaatggacatagactttaaaataattatgctcagtatgttcaagganataaaagatgaaattgagaacactggcacgaaactaagaaaaaaaactataaggcacgtggaaatgctagantcaaaaaaacataaaanttggaactaagaacttggtggatgggtttaacagcagattgagaaacacaagggaagaaattaataacctgggaaaatagatgaaaatatnccagactgcagtacaaag

SEQ ID NO: 556888 - DNA, 320 bp, Homo sapiens
cggtcgacctagcaggatccccgtccactgcgaatattatttatttagaatgcacactaacagacatgacgataaactgtcatcacaaacctgtaccaagaagcacgtaatctttaaaagtgtgttgtttcttcacaatgctaatttacagtatagcattattattatttggtacttgagtcaaagacgacatttagattcttcatctttgaagcatttagtaccatcattgtctagtcaggcagaggaaagaaattcaaaaagcacttactgtttcttctgtcagttcctttgcagtaagatccatattcgcacgtaga

SEQ ID NO: 556889 - DNA, 444 bp, Homo sapiens
aacaggaagaaagggaagaggagtggggaagggtatggaaaacacacagaagagaagacaatacgttaaaatcccaaatgcaatacaatctttatccttgagtggaaaaaggagtgagcaggggccgcacgctttgctcacatgtcagactccacatgcacataccctgggacatgcaacaaacatggacaccccagccttcctgcgtgctgggtcgtaatgcctggctttcttatgcttacagtctttgtgtttgcagatactgctctgtggcctaatcacgagaacttgccttttaccgttgttctgtgcgataggtatggtttgtgataaatctgttaaagattaacgtcccttgggaagcagcacttaagacgccaggtcaagtacgtttctttcttttaaattacttgtaatagctatacattccctgtggaagagtac

SEQ ID NO: 556890 - DNA, 244 bp, Homo sapiens
tagtttaataatgggggaaaaaagattaggttgctcctgaaactggctgtagagcatgtaaaatgattttactgggttttgttcccctgtaatcaatgaaaaagatggtcgttgtagacaaagttgcagaattaaaaaaagaaatctgcttttaatttattctttttggattaagaatttggataggttctttcccttttgccaaacagggttggccccccttattaaagccttttcaaaatga

SEQ ID NO: 556891 - DNA, 1121 bp, Homo sapiens
gggccggacgcggtggctcacgcctgtaatcccagcactttgggaggcctaggctggtggatcacgaggtcaggagatcgagaacatcctggctaacagggtgaaacccgtgtctctactaaaaatacaaaaaaatgggccgggtgtggtggtgggcacctgtggtcccagctacttgggaggctgaggcaggagaattggcgtggacccaggaggcggagcttacagttgagccaagatctcaccatgtgcactccagcctaaggcgaacagagttgagaactccaatctcgaaacatcacccacacaacaacacacatacaaaaaaaactgtttgggggctcacactagtggccctccgcaaaagcgtcttcacagacccacaacgggtagaggagacgaccggcgggccccacaacaggacaaggtgacacatgtggcgccaaacacgcgaggacacacaagagaacacccgggcacatgcgacagagggaggggacgaccaccgcagaaatataaaaaagacgccagaggagagaacaacgcgacggggctctgcgaacaacatctcccagaggtgagagcacggagagggagcaacgggggggcacacaccacaccgggggaaccacacaaggcgacccgggaatacacaataagccccagccgccggggtgagaacacacatccacaacaaacgacaacatccaacaacacaacgccccacacacacacacaacacagcacacaacacacacccgtcaccgagcacaaacgaaacaacacaaacaccgacacacgcacgaaagatccagactcaccccacacgtacaacaagaacccaccacaaggacaaaccggacgccacgacaccgcgccccagcgcacccagcaagttacgatctatcgcgtctgatcctacgcagactagcccggacgtccctacggcaggagccgtcatatgtaccccggcgcatcgctcacacgcttcactaccgcgcaccagagcaagcccacaaccctagcgccaagacgctggtacctcccagagaatgagtcagcactaccagctctgatgtgtggatcggaatagatggtcttctacaacgtgggagccttct

SEQ ID NO: 556892 - DNA, 264 bp, Homo sapiens
ccgacgttgctcagcaccgtggggttgccctggatgcccgagccctgcgtcacgccgagcaggcggtccttgaagtagacgacataggcggtgacggcggcttcgtaaagcttggccgtggtgcgccagccggcttcgaagttggtcgaggtctcggggcgcagcgaacccttgatggagtcaaagcccgactgggtggtggcgaagggcgtggagcccgtggcggcgccctggtaggcacgcatgttcttcgacacgctggtg

SEQ ID NO: 556893 - DNA, 529 bp, Homo sapiens
gcacgagcggcggtgctgtcagcgtctcgggtctctcggccgctggccgggccctccccgggttgaggcggcccatgtcgagtggcgcccacggcgaggagggttcagctcggatgtggaaggccctcacctacttcgtggcgctgcccggggtgggagtgagcatgctcaacgtgttcctcaagtcgcggcacgaagagcacgagagacccccgttcgttgcctaccctcacctgcgcatcaggaccaagcccttcccctggggagacggtaaccataccctcttccacaaccctcatgtgaacccacttccgaccggctatgaagatgagtaaagagaacctggcctcccccaggcaacaaagggaccacagcactggttttggacccttactctgtgtggaccacgaaaaccctttggatgctaagctcgtgtctcctttcctcagatggcgaccattactctgatcttccatcccttctgcttgtaagaggagatgccttaaataaataacttaaactcaaaaaa

SEQ ID NO: 556894 - DNA, 207 bp, Homo sapiens
  misc_feature (33)..(33): n is a, c, g, or t
  misc_feature (60)..(60): n is a, c, g, or t
  misc_feature (132)..(132): n is a, c, g, or t
  misc_feature (185)..(185): n is a, c, g, or t
aattcgcggccgcgtcgacacggctgcgagaanacgacagaagggaatagtaaggcagantatatttaggtaatttactttttgtgcacatgtaatttgtcttataataagattatcatagaaattagtagntaagatgtgttttttgcagtttgtttggataatggacttttcataaggagganaatcagtgtgtcttgtatcacg

SEQ ID NO: 556895 - DNA, 671 bp, Homo sapiens
cgatggcgaatcgatggaaggtcactggctgcaccgttgatgcctcacaccgcaggcctgcatcagtgaattcgtaacgttgaacccaatagaccggattagcccgacacgcgccagcgacttcatccgatcagcagggacgtcgtagccctgatcatcctcggtggtttcgtggaaccgcaatacgtccctgcgctgttgctcggtcagcaccagcggtacttcaatcatttgttcagtcataccgcgctcccttcagtgtcagtctctgcaactcgctcaaaatcgtggccgtactggtggcagttgcaatcaaccacgttcgtttcgccaaccgattcacattggcatagctgcgcaacaagcttttcgtacaaagtggcttccataccttcggcgacttcggcacgtgacagactgacgctgcgccgctcggtagtggatgggtgtttgtatgtgaaggtcagcgcctcccctcgtaggcgatcaagctttgcaaaacgtgcggcttggagttcggcgctacctgggctcagagacagcccccctaccgccttgctgtaaatgaacttgatctgatcccacgaaatcgtgtgactctggctgtactggccttcaccgccgcaaacctcgcagtgttcgttctggtgcggattcggggggtcctctag

SEQ ID NO: 556896 - DNA, 935 bp, Homo sapiens
  misc_feature (692)..(692): n is a, c, g, or t
gcttcccctagcccgccgtggcactctccccaagcctctgtttggcacagacgccagctcgtagcgtcgagatggttcgccatgcagtagatcgggaaccggtacctccgtgatgtgattggggctctgaacctctacccctccatgttctcaggccacccgaggctgcgtggtctatgcgctgccacgagattgggcgcagactgtcgtgcaaggacaacgtgtgcctatgcggagtcatgccatgtgtcatgccaatgagtacgattccactcgacaaatgtcctttggttggggaccaccttaggccaaagggtccacgcgaaagagtcaattaacaagaccgcacatgaacgtaggcctgacatgcctgaccgcctggcaacgcttaatagggtacgacttgattccccgattaatgcagcccatggggcgtcgttcgtcgcatatccccgcaaagatttcgtggtgtcccccggcaagtacgggataccctccaggggactcgtttccatataacgccctgtgaacgacaactgcctgcgcaaggcgtggctggccaccacgtcgggctttgctgcacaatgacttccatcttcatcaaacagggatttctcggtggatacctacgtgacatattatcacaggacaaaacctcacatgaaacgtaatcccattgtgtagttcgcacnccacttagcggtatgcgctgctccccgggggttaggcgccgctcgcaagcgatatctctaccttttggacgagcccttgcgcttctgtgggagcatccttcaacccgttagccttgtggacccacaggttcctcggcccaatttgatcgggccccttttatggtgtgagcggatcccccttgggacccttgagacccttgccacccatcttcgcaagaacaaaagttttttgccctatagtac

SEQ ID NO: 556897 - DNA, 126 bp, Homo sapiens
ctgggtatacagctctctaacttgcttttagaattaagaggtccacgaagttacttggtaccagaggataatcgtattcattgttcgtcactctgacccctgttgaaaatgttctccccaaaactg

SEQ ID NO: 556898 - DNA, 362 bp, Homo sapiens
ggcacgaggagagagagagagagagagagagagagagagagagagagagagagagagagagagtgagagattcagatcttgtttctcttgacattacagagataatcttctcttgcctctcctatacaaccattttcttgatggaactcttcctacatcttttaccaaatttctgtctttactagtataccctcattgtgtattcattcccccaccgatgaactcacaatgtcacccaccgtcttattctgttttttattttctaccaagacagctattgctcccatacccctcgtgacacgagtgtttcgcctcttattcttcagagacatctagttttactttacctgagttctgttgcg

SEQ ID NO: 556899 - DNA, 765 bp, Homo sapiens
agcgggattcgttcacgtcgcgagtgacggagctgctgtggccgtctccatgacgcaaccatgaagttgaaggacacaaaatcaaggacaaagcatgtcaacgctgtgtgcaaatttcagacacaagggaatcaaagttgtgggaaaatggaaggaagtgaagattgacccaaatatgttggcagatggacagatggatgacttggtgtgcttagaggaattgacagattaccagtaaggtctcccctgacaaggaatcccttccagatctcttctcaagaggaagcacgccaagagaaaggcacaagctgtttcagaagaagaggaggaggaggacggaaagtctagctcaccaaacgaaaaagatcaagttgaagaaaagtaaacacatgtagcaactgaaggaaccagtacccagaaagaactttgaagtgacaagatcctgagctggaagcccagtgagatgacatggttagcgatgatccggaggctggggacgatgacatcagacaaacgcttggtccaaactgctccagaaaaaggaagaaaaataaaagggaacacaaggggttggaggccttctcagagcacttgctgaccaagggtgcccaaaaaaaagcgaacgcacaattggattcctgaaggttcatgatcatgaaaagcagatgtgtcagccttgggcagggacctgtaatgtacccaggcccggttcctcccgaacaactcaagctttctaggattcatctgctaccacaaccaatccag

SEQ ID NO: 556900 - DNA, 1242 bp, Homo sapiens
ggacgaatatgttcctcgtgccatccatggttggatctagaacctgggtaccatggactctgtcacgctcagcgtccgttttcggccgacgatcgtttagaatccatgatcaaaccgtttggtacttttggttcaggtctggttagcagtgtaacaacatgggcctaaaggccgaatacacgagaaggcgtccgagtcgtgggttgagtctctgtccatgtggatgctggatacggaacggagcggcagagcaggctgtgactgtgcctgccagggttttccaggcgtggacccaggtcacatggagcgagtggcacaggggctcgtggaagtgagggcagcatcatccattgattcaggcgagagaactcgcgaggacatgacatgagcccttgaagtcgtcatattccagtggaaatacccttgtgcgagtagatgggctgcccctattccaacacgcgaagatagatggttcgtggaacaagccgataggttgcggagggccccttagcgagagttggccgacacacatcgtcgcgttgcgctatccaagttaggggatcaggaaggaacttacgtagcagtggaggaaccctttaatttggccacttttggagcacaattccaatgagcacccatccattagttgaacttaaattcttggccttatcgccagtcaagcgtccttagaaaaagaccgttgaacgcaatcaaacacaataagcccttaacagcgagggaactcccttggaaaacacaaaaccatttagtggtacggtcccaaagagaccgaaggcccccaaatcgatcaacaagttgaggatatgttgatatccacccaaacaaccactaggaggcggatcaactccgggatggatatatacacccacttagttagcgacacacgaaggtgccctatcgagaatgctctagtagcttggcacctactagttaccacaagtcaacaataggggttttggggagcaccaagatttcggacaggacaactttgggggattttcccccccagcgtttttttcgccgcaaaggtcgtgcagttcagattctccaacacgttgtagtacgtagtattttaaagatatggaccccagatgggaggacatcttttatgggaccacgccgttccattacaaactgccacagggacccgaggatagggcagaataagaggcgtcataaaaggagacaagtcgttaatttctggagaaggactttccatct

SEQ ID NO: 556901 - DNA, 299 bp, Homo sapiens
agctaggggtgaaagagagtataggcgttcggtacagagcttggcttgtccgcagggggggggggatcatatcactcttaatctaatatctcagttttgttctgattaagttggttgggctggcctcagaccttctattcctagacattaacatcttcagccttcccttcccgtttcagtctccttcctaaaaagagtaggccaggtcaggctaggatttgccttgacttcgagccagcacccagccatggaccaagtccctctatatggcatacagtatgacttgtcctcatgaggtg

SEQ ID NO: 556902 - DNA, 114 bp, Homo sapiens
accttttttccatatctttgagattactatgaggttgagagtttggccagagggttgaaagccctgttcagaatacttggtaagcacatataatttcctttgttcctgttagta

SEQ ID NO: 556903 - DNA, 898 bp, Homo sapiens
tgcactctctgaaagcactccccagaatagcatatttcttggggcactgtgttcacacactgggtaagacaaccctcccgggaaagactccgcggcaccactaaccggctccggattccccaacgcccgtattaaacttgtcgaacagacatatccccggtgcgcggcgctgtcccgcccccgcccacaggtttttttcccgcgggttcccatctgctcgatcaaacgggtcggtccccccggcccgcccacaggggaacatcaaaacgacgggcaacaatcaacctatcaggccccccacgtgggggtccaagcccccgcaattcccaccacctttggggagccccgaccccggaacatctactcggaccacaggagcccgagggtccacacggcgcccggggaacggggcgcccgtgaaccaccagcacctgggggcacaaaagcaccagaaacccacaagctagccccgccccccccccgcccgacaagaacatcctagagcccaaggatgcggggcggtacccagccgcccgccacagaacgtcgccgcagacttcttgggcagcgctagcaagtggagaggaaactccctgcacgcccgaaggtgtcaagagcccccgcgggcgcaaaggtactaaacacgcctcttcgccacggaggaccgccaaaatagcacggggacagagggcaaaaaaccgagggatacccacaagacactctagggcggcgtagaggtgaccaggaggggcacgcccctggacaccaaagaggcaccataagcgagctagggacactgtatcgttatcccgcccgccgcgagggctaaagatacactcccatcccgccagaagggcgacaaagagaaggggcaaaaaaaaaaccccacccacatgta

SEQ ID NO: 556904 - DNA, 380 bp, Homo sapiens
  misc_feature (38)..(38): n is a, c, g, or t
  misc_feature (131)..(131): n is a, c, g, or t
tgcaaggagggggccattttttgcattttttaaccccnaatccagtggaagaggggttcaaaatttgccccagaatttattcacttttttcaggattgggttaaagccttttaacaaagggaagggcagancttcccccaaaacttttttaaggaagtggagcagtttccccaggtggccaaggcctaccagggccgctattaggacttgggggcctaaaatttttccaggaaggggctggcccaacaaaggcaaaggatttttcaaaaaaaaaaaatttcaaaaaaggcccccgctgccccctccttaggaaaatttgggggccccttttttttgggtttgtataaatgtttgttaaaaataaaaccctgcccccttta

SEQ ID NO: 556905 - DNA, 565 bp, Homo sapiens
  misc_feature (302)..(302): n is a, c, g, or t
  misc_feature (329)..(329): n is a, c, g, or t
  misc_feature (336)..(336): n is a, c, g, or t
  misc_feature (344)..(344): n is a, c, g, or t
tcagagtgaatgtggatgtcttatgacaaggcgatgcacaacgacttgtaactgtcctgtcgacagtgaagcggctccagcagccaacgacagtgcaaatgcgtcaacagatctctgtgacccgctcaccacgatcgatgaacctcagaatctacaaccagcaaaaaactatgtgaatcggcacgtgtatgggggaaaggtcgcagtttgtttctctgctgatcaaacaaggaacgaagagcataccattcgaattgaagcggccgtctcctcaggaggtcgatcctacaactgggacgatnagatcgcgattcaggtgtcgaccaggnagttgcnatcggtcntggctacgctgctccaaatccagaacaagttcgaagggaaagggcacggtgcacagaacgaaaaatggtttgttttggaaaaccagcctgacaaagttttcctttccgttgaatgcaaatgggggctgctctgctagatctctaccgatcacaaccaggcgactgctatcaggtgatcactcttgtgatggagcagatgctgaagaatacattcatctgta

SEQ ID NO: 556906 - DNA, 397 bp, Homo sapiens
  misc_feature (20)..(20): n is a, c, g, or t
  misc_feature (74)..(74): n is a, c, g, or t
  misc_feature (381)..(381): n is a, c, g, or t
ttaagtgggtcccccacccnacaaaaaagccccagcaagcctaaagatcccactggcttgaaaattcctccgcngccagcacggcaagtctgaaagtaaacatggtatgcttccagcttggtgaggggaggggcatatgccattactgaggcttgactaggcagttttcccctcacagtgtaaacaaagctgcccaggaagttcggattgggcagaacccactccagccctgcaaagccactgtagtgagactgcctttctagatttctcctatctggtcagagcatttctgaaagaaagcagcagccccagtcaggggtttatagataaaactcccatctccctaggagagagcacctgggggaaagggtggctgatggnacagcttcagcagact

SEQ ID NO: 556907 - DNA, 145 bp, Homo sapiens
atggagaggaatgatggccctgctagagattgctcctcactctacagtgactgatgcttatggggctactatgtctgattcaaattcatttaccagctaacgagtgggatcttaaaaatatgattcactgtggagaacactgtgt

SEQ ID NO: 556908 - DNA, 269 bp, Homo sapiens
atggtgtggaccaccgaggcactgttgcataggaagtcacagcagcggaatggctgtacggcactgaatgatcactacgtgtattagttaactgctgcagtttggcacggctgacggtggctgacggctgcgggtaatgcccagccccaaaatcactctgacccattcgctcgtataagccaatgtaggcgtagctcgtcccggggatttcagccagctgcatgggtggggtgaagttagcagccatgttgaattgagccaactgctgg

SEQ ID NO: 556909 - DNA, 164 bp, Homo sapiens
aaaacttgaagaaaggagagaagagaaaagaaaagaggaagaacagagagaaattaaagaaggaaaatttagaggggaaaaactttgaaaagaaattgttggatttattaaaggaaacaaggaggaggtatttaccaaaaaggattcttggggggaaggaacca

SEQ ID NO: 556910 - DNA, 350 bp, Homo sapiens
  misc_feature (4)..(4): n is a, c, g, or t
  misc_feature (7)..(7): n is a, c, g, or t
  misc_feature (62)..(62): n is a, c, g, or t
  misc_feature (126)..(126): n is a, c, g, or t
  misc_feature (139)..(139): n is a, c, g, or t
  misc_feature (224)..(224): n is a, c, g, or t
  misc_feature (283)..(283): n is a, c, g, or t
  misc_feature (301)..(301): n is a, c, g, or t
  misc_feature (321)..(321): n is a, c, g, or t
ccgngangtaggtccggcctttcgggtggtcaggaagatggcggcctctgggcggacgaggntcctggtacaatacttggtgttacgaaaggatctatcacaagctccgttctcctggccggcggngcaactggtagcnaggcttgtcacgcggccaccggccttgcacactcaccgcgaccacccgcacacagccgcttacctccaagagctggggcgcatgnaaaagtggttcctcgaggccccagatgagaccaccctaaaggagctggccgagaccctncaacagaaggaacatttnaccacattgttttggttttnagcaaaccagagattattcgccatttgtt

SEQ ID NO: 556911 - DNA, 225 bp, Homo sapiens
gtcgagcatggttgcggaagctgtagtgccaatctctcaggaggcagaggttgcagtgagctgaggtcgtgccacttcactccagcctggcagtagagcgagactctcgtctcacacacacacagcactttaggaggccaaggtagggggtcacctcaggctaggggtttgagaccagcctcgccagcatggtgaacccagtctctactaaagtgcaaaattggt

SEQ ID NO: 556912 - DNA, 342 bp, Homo sapiens
ttattcctagaaccgggcgacctgggcctccttgaggttgacaatcgggtaggactcccgattgaagccccccttggtattattattacatcccaagacgttttgccctcatgagcggtcccccccttagggttaaaaacagatgcaattccggggggtttaaaccaaaccccttttcccgctacccgcccgggggtatactccggtcaatgctttgaaatttgtggggcaaaccccagtttcatgcccctggtcctagaattaattcccctaaaaatctttgaaatgggggcggggtttaccctatacccccccccttccccccctccagataaaggttcg

SEQ ID NO: 556913 - DNA, 133 bp, Homo sapiens
gtcatgagtggttgaagttaccaaatttttcttaatttatggagattggaaaaaatctgtgtagtatataatttaaatatgattttctttttaagcctgtggatgtgatgaatttaaccttgcgcacccgtat

SEQ ID NO: 556914 - DNA, 691 bp, Homo sapiens
tttttggttttatactttaatcaaactccccagcaaactggctgactggcatttccacacattaccaacaccggccaggacttcacagcagggtgacccgctaagcaagctggcctaggttcagcccacactggctgctaccttacttcttcaagaacatttagggtgtgaacagagaaggggaatgagggtgaccgtgggtttgtgaattgacccagggcccaagtgcacaagagagaatttggagtgtcaaattaggggtggcaaggagaaaacaaaaaagactcccaagcttatagagaacacagaaaaccgagtgaattcaacatttgcaaaaagcaatcatcaataagcctgaagaaggccacggactggtgcatccgctgggctcagagaaaggctggggcagccggaacagcagcttccggggtaaccaggcaacaatctcagcgccggggagtcagggctgcgcactccactctggccagaacacaaagggcatgggcacggtaagctctcagttacggtggccctcttttctctcctctatttctccaaagcttttgtgcgacacccagaggaacgtgagtggcaattccagggtgcgggcgggcaggaggggagagaggacaacgagagaataagatgagctaaagtgtttcgtgaaaagccaccggccatccgaaaagct

SEQ ID NO: 556915 - DNA, 753 bp, Homo sapiens
  misc_feature (26)..(26): n is a, c, g, or t
  misc_feature (81)..(81): n is a, c, g, or t
  misc_feature (104)..(104): n is a, c, g, or t
  misc_feature (106)..(106): n is a, c, g, or t
  misc_feature (143)..(145): n is a, c, g, or t
  misc_feature (147)..(148): n is a, c, g, or t
  misc_feature (188)..(188): n is a, c, g, or t
  misc_feature (193)..(193): n is a, c, g, or t
  misc_feature (199)..(199): n is a, c, g, or t
  misc_feature (203)..(203): n is a, c, g, or t
  misc_feature (262)..(262): n is a, c, g, or t
  misc_feature (384)..(384): n is a, c, g, or t
  misc_feature (415)..(415): n is a, c, g, or t
  misc_feature (417)..(417): n is a, c, g, or t
  misc_feature (472)..(472): n is a, c, g, or t
  misc_feature (494)..(494): n is a, c, g, or t
  misc_feature (499)..(499): n is a, c, g, or t
  misc_feature (506)..(506): n is a, c, g, or t
  misc_feature (514)..(515): n is a, c, g, or t
  misc_feature (563)..(563): n is a, c, g, or t
  misc_feature (606)..(606): n is a, c, g, or t
  misc_feature (628)..(628): n is a, c, g, or t
  misc_feature (630)..(630): n is a, c, g, or t
  misc_feature (682)..(682): n is a, c, g, or t
  misc_feature (705)..(705): n is a, c, g, or t
tgaacctgtcacgacctcctcaaggnaccagccattcctgtccccagtactgctagccacaagcctgggatccggccagantcagcccagccccacccctggcncnaccatgtcacgtgggccctgcatctgcatcgtccctnnnannacctggccttggaatctgctcctccaagacccagccaggntgggncagggnaggnttcccacacgagggcccgtcgacaggccctcagcgtccaggtggcgggatccagatganaccagggcgggctcccaccagcctggccagttcctgccgacactgtccctgtagtcgacgtagcaccgcctccaggcaggcctcctggctcctcagcgtcctgttcaccacagctgcccgcncgtcccggtcccctgctgccccttcctctcntntcaccagccggtgtggcccatggggctgggccgggccaccgtctcgctcccagcnctgctgtagagctcccagctcnttttnctcagcntcccgagnngcccgccgcgcggcactccactctggcccccgtccacagcctccggcnttggcctcccaggccgcccgcctgggctccgcagcctcccgcngctcctcctccaatgcctgcancncccgcactaccaggtccaactcgccacccccgcgctcggggacccagggcangaaggtgggctgtgaggctgcancaggcactccggggcacaggtgcccaagaccgtgtccatccaccgcca

SEQ ID NO: 556916 - DNA, 283 bp, Homo sapiens
  misc_feature (55)..(55): n is a, c, g, or t
tgttcctgtcggttgcatttctcgggagccgggcagaatgcccttggggtgaacnccgggcaaagcttagcaggagacaagaaaatgatggcaacctataaggagaagaaagcttttgtttaactgtttccatgctaaacatgatttataaccagctcagagctgaacataatttatatctaatttgagttcctctaaagatcttggttttccatgaatacagcatgtataataaaaattttaagaaataaatgttattctactttattaacaatatttgttt

SEQ ID NO: 556917 - DNA, 281 bp, Homo sapiens
ccccccgcacccgcacgctaagacacacacatcattctcatacccatacacacacacacacacacacacacactccagatacagccccactcttacagcacacgcacactccaaatacagccccactctcacagccccatgcagacacatccaccctctcatatatcatcatccagattcatcccatatagaccatggagatccactcaaagccccatgcctcaggatactcctcaatagccatcgctgtagtatatcccaagacaaccatcattcccccg

SEQ ID NO: 556918 - DNA, 827 bp, Homo sapiens
cagaagtaggcttcagaaggttgataataacaaacttatctgagctaaaggagcatgttctaacccatcgcaaggaagctaaaaaccttgaaaaaatattacacgaatggctaactagaattaccagtgtagagaagagcttaaatgacttgatggagctggaaagcacactacaagaacttcgcgaagcaaacacaagcttcaatagccgattcgatcaagcagaagaaaggatatcaatgattgaagatcaaattaatgaaataaagcgagaagacaagattagagaaaaaagagtgaaaagaaagaacaaaacctccaagaaatatgggactacgtgaaaagaccaaatctacatttgactggtgtacctgaaagtgacagggagaatggaaccaagttagaaaacactcttcaggatattatgcaggagaacttccccaacctagcaaggcaggcaacattcaaattcaggaaatacagagaacaccacagagatactcctcaagaagagcaaccgagacacataattatcagattcaccaaggtttgaaatgaaggacaaaaatgttaagggcagtgagagagaaggtgtgcgttacccacaaagggaaggcaatcagaataacagtggatctctctgaagaaacctaaacagaagagttagggcatattcaacatcttaaagaaagaatctcactagatttatttccagcaatagtctagtgagggaaataagtttaggaagcagtggagattgccccggtggtaagtttgggagcaatgtgaatgtccggaagcgtgtgcactgtaaggaggaagaaggg

SEQ ID NO: 556919 - DNA, 166 bp, Homo sapiens
tctgtacacttctttttgcaagacccgcgaggatgacagatctactttagaggaaaaccattccctgagctccacgctggcattgtaaacactgaagtcagcaaacttcacaggtacataaagccctgaactcattagcttccggaaaatagcttccagctcatcc

SEQ ID NO: 556920 - DNA, 278 bp, Homo sapiens
cgctgaagtttgagcaaatttcactttagtttctatgcatgttaaatggaagttattaggttggtgcaaatgtaattgcggtttttgcagttgaaagttaggaggccaggcgtggttgctcatgcttgtaatcccggcactttgggcggccgaggtggatagatcacttggcgtcgggagtttgaggccagcccggctaacatggtgaaacccatctctgctgggaatacaaaaattagctgggcgtgatggtcagtgcctgtaatcccagctactcg

SEQ ID NO: 556921 - DNA, 558 bp, Homo sapiens
  misc_feature (34)..(34): n is a, c, g, or t
  misc_feature (72)..(72): n is a, c, g, or t
  misc_feature (77)..(77): n is a, c, g, or t
  misc_feature (99)..(99): n is a, c, g, or t
  misc_feature (106)..(106): n is a, c, g, or t
  misc_feature (110)..(110): n is a, c, g, or t
  misc_feature (112)..(112): n is a, c, g, or t
  misc_feature (198)..(199): n is a, c, g, or t
  misc_feature (218)..(218): n is a, c, g, or t
  misc_feature (246)..(246): n is a, c, g, or t
  misc_feature (255)..(255): n is a, c, g, or t
  misc_feature (257)..(259): n is a, c, g, or t
  misc_feature (267)..(267): n is a, c, g, or t
  misc_feature (470)..(470): n is a, c, g, or t
  misc_feature (472)..(472): n is a, c, g, or t
  misc_feature (515)..(515): n is a, c, g, or t
acctcagtgaaaccggaaggaaagtccgagtcanaagtgtgggaagccaccgtggtgacccgcagatagtantggtnttcgccttgcgtgaggtttgcnaaaaaanaaancnagttaaactgctcgttcagctgttccagcaaggaggaggtgttgagaatcttccactggtaggactttagaagctcgttgtatttnntggtaaacctttaaggganttggagggattcgtggagctcccgccgnagtttagcntnnnaggggttnttggtggaaaaatcaacagaaaagatatcccggaatttgtaaaattggtctttcatccgaagaagcccgtggagttgtggcggatctcccggcacacagtccggtcatcgtcgccttctcgtatgaattctgttggcgggtgctggaaggccgggctgtggaagtggatgtccatggcctgctgagcctcgtgtatcatctcnangaagggctggaacatggcgtggaagttcaggggctcgtacggngagaagggcatcaagctgcggacgatgcgggacttgggaaaaa

SEQ ID NO: 556922 - DNA, 118 bp, Homo sapiens
tctactggtcgagtcatgttcttgtctgctcatctctctgatctgtccctaccctctgatcctgtactgtctctccacgggcctgtccttgtctgctctcattctgttttctctatat

SEQ ID NO: 556923 - DNA, 257 bp, Homo sapiens
cgagcttccgctcttgctaggtcttacccccaggcgggtggctccgtggcctcccttctaagcatcgctaatcgccctgtggtcctcatatgactgagacgccctctccaggggttcaaaaagatggtcagggatcttttacagatcatgttgcctcctcgggaccaggagcttactcctcaggcatgtgagccccagcaggccggccccacccctgtcaggctggactgggggctggggggaaagtcagtgcgtat

SEQ ID NO: 556924 - DNA, 761 bp, Homo sapiens
tctaaataacattgtggtgaatagaatattgaacgtatatttgaaaattagctaatgattttaattctaacaattcaaaagtgatagactatcaagaaattgaggtaggccgggcgctggctggctcacgcctgtaatcccagcactccggcgaggccgaggtgggcggatcacgaggccaggggattgagaccatcctggctaacatggctgaaaccccatctctactaaaaatacaaaacaattagcccgagctgctggtggccgggcacctgctagtcccagctactcaggagcgctgacggcagcgcgaactggcgtgaacctgggaggtggagcttgcagctgagccaacgatcactgtcatcgcccctccagcctgggccacacagcagcgaagactcacatctccaccacacaaccacacacacacacaaccacaacacggacccacccgcacacccaaccacacaccccagccaaccggccacaccactaccaacgccgtactcaccggacccggccacaccaccacaaccaccaccaccacttcccacaacacgccgacacaaggcacacagcggcccccacaccctagccacatctacccctaatcctgccacacaccaacctctacccgcgcgaccccacacaacacgagaccaccacaacccgcgcccaaaccaaccgcgcaaacccgcccacccgcgccacccaaccaccccggacacccaacccccaggaccacccgacacgccccc

SEQ ID NO: 556925 - DNA, 214 bp, Homo sapiens
ctcggtacctgcgtctttcaatctgcggttgtggtagaaatagcaagaaaactaggttagaagtggagtctgaaggtaggactgaattgctacaatctcatgataaaacttgaagagatgaggagttgatttttatggataagcaaagaaagtaggtttttgagatggcatctacgcctggtgaagatgctgtgaaccgcagttgaaagacgca

SEQ ID NO: 556926 - DNA, 105 bp, Homo sapiens
tgcacacttactgaactctcacacccaatggacatctatcaccctatagaagactaatgttagtataagtaacatgaaaacattctcctccgcatccagcctagt

SEQ ID NO: 556927 - DNA, 1429 bp, Homo sapiens
ggcaagaacaagcgccttacgaaaggcggccaaacacagggcagcccaagcaagcaaagtggttgcatcccattttcctcaagcacacagcattggtcatgcatgtgcaacagcaccgtgctcatgttcaatcatcaagcacacatcattggcacaagcacgctccgtacaccaggcaccccaaggcacacccaacacattgccatcctgcatggatctccaaggcgtccgtgctgtcttgcacagtgcagatcttgcctgcatctatgccagcacatgcatgcacagttgccatttcagcaacacattccacagctgcattcactgcacagcatgttccagaggtcaacacaactagccttgcactcacacttcccatggccataggcatctatcaccacgtgacaccacacacatgctgttcccattggtccaacaaacataggccagcacaatagcattgcacagctccactgttgcatgtcccaagcactcaccagcatggttcacttgctttccgtactgttcctgtgttagcgtattctactcaaacacaaccgccaaacaatccagcatcacggcacagcacctccttcatagctccagccaaccaacaagggtccgcccaagatcacgggcaagcaaagcatgcatagggacacatctatgaacccgcagcagggttgccagcacgaacatgcacttgcaacagcaagttggtcaaaatacaattggcattccccagcacaagcatttggccacaagcacatcaggacaaacgggctttgcccaacttctacttttattccttctcccactgcattggtctttccggtttacgcacactagtaacaaacattggctagcaaagacaggcccaaaggtcttggcacctcttgggcgacacacggcttcactggggacagccttccatgaggtgaacagggcaggtcacgatttctggggaacacaaagctcaacatggggcgcgcaccagacgcaccacgggaggcctaacacagcattgcaaacccgacgcttgggcctgggacgtcattgacaagcccaacgcaaggacccacaagacaatccgggcgatcacccggtagcaccgaacttcgcaacatcatgctgctgcacaccaaatacaaaaaggagtgccccttttgcggggccacacacacacacaacacaacaactggcgcggaggcagcccacacacaatacacacctaaagggagcaccaaccaattacaaacaccacaaccattgacaaccaagggcaccctcatactgacagctgaactaaacaagcacagcgtcgacgactatcacacaagccgccagcgaccagtaccaggacgtaagctcagagaccatatagtgctaacagacgcaaacaacgcgatgcaccccgcaccacccacct

SEQ ID NO: 556928 - DNA, 699 bp, Homo sapiens
tggcaggtgtgtgtctggggaagagacttacatgaagtggagttgctgagtcaaagatctaaccatgagctaccctgtgctatcccccgcccccaggtgtgctacccaccagctgcaccaggtggtggtccctgggtgagtgtgctgcctaccctcctcctgcccagcatgccccccatctggtgctggataactgtgtgccacctatgctggtggcagttcaaccagtgactatctctctgtggaatgtgcgtgccaacatgtcttgggacatttggaggagccaacatgcccaacctgtaccctggtggcccctgtgggctggctacccaccagtgcccccatggctggcattttgggcagccccacctctgcccagcagaactgttacctccctatgggatgtatccacccaccagtgaggaaacacacaccctaccaggatgcccacatatccgccatacccaaggagcccctgtgccgggccagcccatgccaccaccacggacagcagcccccaggggcctaccactgggcaggcacacagtgaactacacctggtcagcctccaaatgacaatccctgggcaagcagaagccaatgccggcataccatggatacccggggtcagggacagtaaccacgcgtgcacccaacaagaggaaccagagcacaccgaaacccggaagaccatcaaac

SEQ ID NO: 556929 - DNA, 416 bp, Homo sapiens
  misc_feature (377)..(377): n is a, c, g, or t
  misc_feature (402)..(402): n is a, c, g, or t
gaaactcggagtttgtgagtacaccaacagaagctttaatcatgagcaggtgtaggggactttttgcccattctccccaggcttggctcactgtgaagactcctgcatttgtcttctgtgctgggagactgcatgccagagcctacagaggacaccacccctgcaaaacaataatttgcagaagaaaagcaaacttgaagccagccatctactctttaaatataatctctaacttaaaagcaaaagtatgtcgcctttttctgaacatggtaccataggaatgctggtggctctgtgtagaggtgtggatctttaaacaagagtgtaaaagaaagggtctatcactttcattgccttggccaaccctgaaccttgangaaaatgagctccggtttgctggtngacataaggaaaga

SEQ ID NO: 556930 - DNA, 178 bp, Homo sapiens
aggtcatgacatgacagcccaaaatatgtctgtaggacagcagtatatgccattccaaatatgcctctttggcacaggattactttaaactgattattttgggaaacagacacaggagaagctctgaaaacagtaaaagttgtatttttgtaagagaaatttattttatacaagaata

SEQ ID NO: 556931 - DNA, 1005 bp, Homo sapiens
tgtggcggggcgcgtccttgcgcgcgctgtgtttgttcgagtgttcgtgcgtgttatgggcagagggtgcttgttgcgatgctcgcgtggcgttgcgctgtgctcagggtcgcctgggggccctcaatctccacggggagggttgtctccatggtgccctcctcatgggtgctgtccgcctgcctgtcgaggggagggcccacagctctggggccgtttctgagacttgggatcgagcgttgccgcttgggggcccgtggatgcgtgtgccggttgccgtgcgcgtattgctggtgcccggtgcacggaggggtccggtgtcggtagcggcgcatggcacctgggcgtcaggttgcagcgcggattcctggtctttgctccgctggtccccggtgccccagcctcgtcttgggccctcatcccctagatcccgggaccccggccccctttgcagcccttgggcccctgtaggattcgaggccctgggcctctagcccccagcccatccgtgttccaggcactggggggctgaggtcctctgagaagggacacagggcctggggggctctctcagcccatcagcaggagaggactgactccagaaaaatcagcgtttgtacccactcaggctgccaagacctgtgtccgtccttccaagctcaaccttcagagttcatgaggccccttgcccagaatgtccacagagttcatgaggccccttgaatgtccacagagttcatgaggctccttgcccggaatgtccacatttgaaacctcccaacaccgagccccatttcaagtataaccaggagggaaaatggtgcttgaaataagcatgccacaaaggaaaacctgctttctcgaaatgggccctggccgcccaggccctgacctccccggccaggatggaacgttccagagacccattagtgccaaaggcaaatgaaaacacaccctgtgaaaatgtcccaacaaaaaaaaaaggacggcgctcgcgactagaac

SEQ ID NO: 556932 - DNA, 239 bp, Homo sapiens
gtcatcacatgcagggtgtgtatcgtgtgcaatgcaggatttcatgttgtaaatgtggtgggtgagctgagcccctattgtgttgtgcgtaacatatgtagcagggagtatagggctgtgactcagtatgttgcgtcctgtacagtcaggcgagtgcatatttgaaccggagaacgtggttactagcacagagcagttctcccagcttcagcattcaactcagtggggggtacgcgcgc

SEQ ID NO: 556933 - DNA, 461 bp, Homo sapiens
  misc_feature (145)..(145): n is a, c, g, or t
  misc_feature (155)..(155): n is a, c, g, or t
  misc_feature (233)..(233): n is a, c, g, or t
taggccaagtgccgtagctcatgcctgtaaggccaaggggtaagaagatcacttgagcccaggaatttgagaccagccttgtcaacatagtgagagcccatctctacaaaaaaatttaaaaattagccgggcatggtgctatgtncctataatcncagctgctcaggaggctgaggcaagagaattgcttgaacctgggaagcagaagttgccgtgagccaagatcacttcantgcactgcagtctgggcaacagagaaaggccctgtctcaaaaaaaaaaaaaaaaacttttcctgtgccaaattattataagatggtatcataacttctctcgctataactaaatctgtgagctttttgaaatcctttcttgaattcttctttttaaaaaagtaattcaagttttcttctttttggactttttttccttgttgggattcaagcctgaaatcagttttag

SEQ ID NO: 556934 - DNA, 1119 bp, Homo sapiens
agaccttaccctttacaaccctgagaggaccatcactgtgaagggggccatcgagaattgttgcagggccgagcaggaaataatgaagaaagttcgggaggcctatgagaatgatgtggctgccatgagcctgcagtctcacctgatccctggcctgaacctggctgctgtaggtcttttcccagcttcatccagcgcagtcccgccgcctcccagcagcgttactggggctgctccctatagctcctttatgcaggctcccgagcaggagatggtgcaggtgtttatccccgcccaggcagtgggcgccatcatcggcaagaaggggcagcacatcaaacagctctcccggtttgccagcgcctccatcaagattgcaccacccgaaacacctgactccaaagttcgtatggttatcatcactggaccgccagaggcccaattcaagggtctccagtatgatagctaagcagaaggaaagctgacaagctgcccacttgagccttgcccttcacctgccttagatggctcagggaagaatctatggcaaactcaaggaggagaacttctttggtcccaaggaggaagtgaagctggagacccacatacgtgtgccagcatcagcagctggccgggtcattggcaaaggtggaaaaacggtgaacgagttgcagaatttgacggcagctgaggtggtagtaccaagagaccagacccctgatgagaacgaccaggtcatcgtgaaaatcatcggacatttctatgccagtcagatggctcaacggaagatccgagacatcctggcccaggttaagcagcagaaatcgagagtgtgctctccccggcaggcctgagaatgagtgggaatccgggacacctgggccgggctgtagatcaggtttgcccacttgattgagaaagatgttccagtgaggaaccctgatctctcagccccaaacacccacccaattggcccaacactgtctgcccctcggggtgtcagaaattctagcgcaaggcacttttaaacgtggattgtttaaagaagctctccaggccccaccaagagggtggatcacacctcagtgggaagaaaaataaaatttccttcaggtttta

SEQ ID NO: 556935 - DNA, 137 bp, Homo sapiens
gagctgagtcacagtgtcagaagagacacccaggtctatctgtgactgagtagaacaccagtgccacggtggccgagaaacgacctatgacttcatctagctggggatcctggtgcattacctcaggatgtcgcatc

SEQ ID NO: 556936 - DNA, 1727 bp, Homo sapiens
gagtggcagtcggggttctccggagtgcctgtgtctctgccaacgccgtccggatgggttgccaaaacacgagagccagccgccactagcgtcgccgcacgcccgtgaaaggagctgagacgagcggtgcggcgccgcgcggggtccaggagggagaaaaggctacaggcagggcagcatgcatgacgcctccatgcaggtcctgcgcgataaaaggcgatcatcgtgccgtatcacctgacagtcatgacaaaactagaagcacccactggggatagccggacccaaatccgatgggaagacaagactggccaaccacgctactagttgacggcacccatggacgcgctaataacagcatcatcggacaaaggaggtcctccaccagcggtgagacctaccccgctcaagcaagggagggacaccaactacgagtgacagacgattaccccaatccagggacagcgaccaatggaaggactgcaaacacacggcaaagcgggtaggagaaacaaaagcaccaaggggaaacaaaacagatgactaggccacatgacgaaacacgaatcaccttggacaagcgggcacacacacggatggcgatactcaggaaccccatgggattactgggactgtggtacacaggagcaacccaacataccattgcggcaggcgtcacccaaatacccgaaggtacaggccccgtcccgagcagggcgcacgcacaagccccgagacgaccacattcggcacacagcgacccccgatcagaagcaacaaacacaacagaaatagaccatgggcccccgggcacgcgctaccatgcggaacacgaaaaacgccaccacaacacaaggacgcattagcgcgcaccagaaaaaggctaccaaccactggcacaacacggacacaccgacatacacaataccaacaaagagccacaggcgatcaacaagcaccacgccaacacaaggcggaacaggaccccactgtgaaagctacaacgagggacattagcaccaccaacgtaacgagtgagctccaccgatagagaagcaaacagaaagacgaaaaaaccaaaagacgagcaagagaaaaccgcaccataccgcacactggcgacagtggaaacccgacgacatcacaggggaacgacgataacacactgcgaagtagatacgacgagcaacacaacttggaacaagaatatacggcaacacacgcggcagcgcgacacgaccacgctaacgcggacacagtaggcaaagacatgtaggctcaaagcgtacaaagggaagcaacgatgacagcaggcacgtatgacgaacaccccgatgtgacgcaaatacttaacgacaccacaaccacccaccaccagcacaagcgaaccacagaacaaacagaacaaccccaagtctaacgagacactcacggacgaaccgaaacagagcacgatagacaaccgcgacacgaatagcaggcgacggagatacacaagaagcaagaaaacacaaggagcaacctcagagagcaatcaacgaacaacagcgcaacaaaatcaaacagcgatatacatcacgtagacatcgcggcggaacaaggagaagcaccaacaaacagagacgaacaagaccaacgagctacaagggaaccgacacaaaacaacaacggagaagtacgaacgagacagcagacaggcgatacacagaccgcagcaggcagcaggg

SEQ ID NO: 556937 - DNA, 1129 bp, Homo sapiens
agaccttaccctttacaaccctgagaggaccatcactgtgaagggggccatcgagaattgttgcagggccgagcaggaaataatgaagaaagttcgggaggcctatgagaatgatgtggctgccatgagcctgcagtctcacctgatccctggcctgaacctggctgctgtaggtcttttcccagcttcatccagcgcagtcccgccgcctcccagcagcgttactggggctgctccctatagctcctttatgcaggctcccgagcaggagatggtgcaggtgtttatccccgcccaggcagtgggcgccatcatcggcaagaaggggcagcacatcaaacagctctcccggtttgccagcgcctccatcaagattgcaccacccgaaacacctgactccaaagttcgtatggttatcatcactggaccgccagaggcccaattcaaggctcagggaagaatctatggcaaactcaaggaggagaacttctttggtcccaaggaggaagtgaagctggagacccacatacgtgtgccagcatcagcagctggccgggtcattggcaaaggtggaaaaacggtgaacgagttgcagaatttgacggcagctgaggtggtagtaccaagagaccagacccctgatgagaacgaccaggtcatcgtgaaaatcatcggacatttctatgccagtcagatggctcaacggaagatccgagacatcctggcccaggttaagcagcagcatcagaagggacagagtaaccaggcccaggcacggaggaagtgaccagcccctccctgtcccttcgagtccaggacaacaacgggcagaaatcgagagtgtgctctccccggcaggcctgagaatgagtgggaatccgggacacctgggccgggctgtagatcaggtttgcccacttgattgagaaagatgttccagtgaggaaccctgatctctcagccccaaacacccacccaattggcccaacactgtctgcccctcggggtgtcagaaattctagcgcaaggcacttttaaacgtggattgtttaaagaagctctccaggccccaccaagagggtggatcacacctcagtgggaagaaaaataaaatttccttcaggtttta

SEQ ID NO: 556938 - DNA, 264 bp, Homo sapiens
  misc_feature (94)..(94): n is a, c, g, or t
cggatgcttcctcctcaaccttggcacccacctccttcttactgggcccaggagccttcaatgcccaggagtctggtcaaggcagcagagcggngccccctacggcccctacccctggggatgggggcccagggacgccttccaaggtgacctgtttcctcccaatggatcctgccaccttctggtgcaagagacctgaaagtgtgggcgacctggagctaccaggctccacagtcatcagggtccctcccaacactaagactt

SEQ ID NO: 556939 - DNA, 894 bp, Homo sapiens
  misc_feature (2)..(2): n is a, c, g, or t
  misc_feature (26)..(26): n is a, c, g, or t
  misc_feature (72)..(72): n is a, c, g, or t
  misc_feature (80)..(83): n is a, c, g, or t
  misc_feature (88)..(88): n is a, c, g, or t
  misc_feature (92)..(92): n is a, c, g, or t
  misc_feature (116)..(116): n is a, c, g, or t
  misc_feature (118)..(118): n is a, c, g, or t
  misc_feature (121)..(121): n is a, c, g, or t
  misc_feature (129)..(130): n is a, c, g, or t
  misc_feature (136)..(136): n is a, c, g, or t
  misc_feature (142)..(143): n is a, c, g, or t
  misc_feature (147)..(147): n is a, c, g, or t
  misc_feature (152)..(152): n is a, c, g, or t
  misc_feature (162)..(162): n is a, c, g, or t
  misc_feature (165)..(166): n is a, c, g, or t
  misc_feature (181)..(185): n is a, c, g, or t
  misc_feature (187)..(187): n is a, c, g, or t
  misc_feature (190)..(191): n is a, c, g, or t
  misc_feature (194)..(194): n is a, c, g, or t
  misc_feature (196)..(196): n is a, c, g, or t
  misc_feature (199)..(200): n is a, c, g, or t
  misc_feature (202)..(202): n is a, c, g, or t
  misc_feature (204)..(204): n is a, c, g, or t
  misc_feature (211)..(213): n is a, c, g, or t
  misc_feature (215)..(215): n is a, c, g, or t
  misc_feature (219)..(219): n is a, c, g, or t
  misc_feature (226)..(226): n is a, c, g, or t
  misc_feature (229)..(229): n is a, c, g, or t
  misc_feature (232)..(232): n is a, c, g, or t
  misc_feature (235)..(235): n is a, c, g, or t
  misc_feature (242)..(242): n is a, c, g, or t
  misc_feature (245)..(245): n is a, c, g, or t
  misc_feature (247)..(247): n is a, c, g, or t
  misc_feature (250)..(250): n is a, c, g, or t
  misc_feature (264)..(265): n is a, c, g, or t
  misc_feature (269)..(271): n is a, c, g, or t
  misc_feature (276)..(276): n is a, c, g, or t
  misc_feature (278)..(278): n is a, c, g, or t
  misc_feature (280)..(281): n is a, c, g, or t
  misc_feature (289)..(289): n is a, c, g, or t
  misc_feature (292)..(292): n is a, c, g, or t
  misc_feature (298)..(298): n is a, c, g, or t
  misc_feature (311)..(311): n is a, c, g, or t
  misc_feature (316)..(316): n is a, c, g, or t
  misc_feature (327)..(328): n is a, c, g, or t
  misc_feature (332)..(332): n is a, c, g, or t
  misc_feature (357)..(358): n is a, c, g, or t
  misc_feature (365)..(366): n is a, c, g, or t
  misc_feature (380)..(380): n is a, c, g, or t
  misc_feature (388)..(389): n is a, c, g, or t
  misc_feature (401)..(401): n is a, c, g, or t
  misc_feature (415)..(416): n is a, c, g, or t
  misc_feature (423)..(425): n is a, c, g, or t
  misc_feature (437)..(437): n is a, c, g, or t
  misc_feature (439)..(440): n is a, c, g, or t
  misc_feature (452)..(452): n is a, c, g, or t
  misc_feature (474)..(474): n is a, c, g, or t
  misc_feature (481)..(481): n is a, c, g, or t
  misc_feature (542)..(542): n is a, c, g, or t
  misc_feature (544)..(544): n is a, c, g, or t
  misc_feature (552)..(552): n is a, c, g, or t
  misc_feature (555)..(555): n is a, c, g, or t
  misc_feature (568)..(568): n is a, c, g, or t
  misc_feature (571)..(572): n is a, c, g, or t
  misc_feature (575)..(575): n is a, c, g, or t
  misc_feature (599)..(599): n is a, c, g, or t
  misc_feature (634)..(634): n is a, c, g, or t
  misc_feature (646)..(646): n is a, c, g, or t
  misc_feature (649)..(649): n is a, c, g, or t
  misc_feature (701)..(701): n is a, c, g, or t
  misc_feature (885)..(885): n is a, c, g, or t
tnggttgggtgtggggggagtgaggnttgtggggggggtgggttgggggtgggggtaagatggggagagagnggagggannnntaagnttgntgtgggggtgggtgtggagggagngnttntgggtagnngagaangtgagnngggntgatntggagggggnggnngagggctagggttannnnngnggnnggnanatnntntnggtgttnnngntggnggggggnatnttnttngtgaggntgntnttngagggatttattgnnaaannntgtgnantnngtattggnatngagganagtggtgcttatnagggncaacccaatgnnatcnttgaaaaggtgttcatatgtattannaagtatnntgataagaaaaggntggagggnntgtgaaagaagntggattggaatgtnngaaaaannnaatggtggtttngnnatcggaggaatnaggacaagcccccaacgcttantaaattntgtgaaagcatgtggagattcacattttatttatgtatattctgctatggaattagatttntntggtcgtnacnttggttctggganatnnganagtgctggcataactatccatttnagcctctttcaagtgggctttatcactattatatnatggaattggcnttntattggtcccttatgttttctcagtttacagacattaaaagaaaggacttcntgatcatgtttgtgcatcacttggtcaccattgggcttatctccttctcctacatcaacaatatggttcgagtgggaactctgatcatgtgtctacatgatgtctcagacttcttgctggaggagccaaactggccaattatgccaagtatcagcggctctgtgacaccctttttgtgatctcngtgctgttt

SEQ ID NO: 556940 - DNA, 1260 bp, Homo sapiens
agaccttaccctttacaaccctgagaggaccatcactgtgaagggggccatcgagaattgttgcagggccgagcaggaaataatgaagaaagttcgggaggcctatgagaatgatgtggctgccatgagcctgcagtctcacctgatccctggcctgaacctggctgctgtaggtcttttcccagcttcatccagcgcagtcccgccgcctcccagcagcgttactggggctgctccctatagctcctttatgcaggctcccgagcaggagatggtgcaggtgtttatccccgcccaggcagtgggcgccatcatcggcaagaaggggcagcacatcaaacagctctcccggtttgccagcgcctccatcaagattgcaccacccgaaacacctgactccaaagttcgtatggttatcatcactggaccgccagaggcccaattcaaggctcagggaagaatctatggcaaactcaaggaggagaacttctttggtcccaaggaggaagtgaagctggagacccacatacgtgtgccagcatcagcagctggccgggtcattggcaaaggtggaaaaacggtgaacgagttgcagaatttgacggcagctgaggtggtagtaccaagagaccagacccctgatgagaacgaccaggtcatcgtgaaaatcatcggacatttctatgccagtcagatggctcaacggaagatccgagacatcctggcccaggttaagcagcagcatcagaagggacagagtaaccaggcccaggcacggaggaagtgaccagcccctccctgtcccttcgagtccaggacaacaacgggcagaaatcgagagtgtgctctccccggcaggcctgagaatgagtgggaatccgggacacctgggccgggctgtagatcaggtttgcccacttgattgagaaagatgttccagtgaggaaccctgatctctcagccccaaacacccacccaattggcccaacactgtctgcccctcggggtgtcagaaattctagcgcaaggcacttttaaacgtggattgtttaaagaagctctccaggccccaccaagagggtggatcacacctcagtgggaagaaaaataaaatttccttcaggttttaaaaacatgcagagaggtgttttaatcagccttaaaggatggttcatttcttgaccttaatgtttttccaatcttcttccccctacttgggtaattgattaaaatacctccatttacggcctctttctaaaa

SEQ ID NO: 556941 - DNA, 955 bp, Homo sapiens
tgggggtcccaacacctgggaaaattgggggcgtttttccccaaaaaaaaccttgttttaaaaaaaaaaataaaacgccaacccaaaaaaaaaaaaaaggtggccccaaaaaatatccccttgcatcacgaggaagaagatgaccaagagctgcgtggaattcattcatacacccgcgcttcataacaactaaatacaatgataggaggggcacagaaaaaacaaaaagtcgtcgaaaacaaagcctgttacccacccccgagagtacaataaagggggggggggcagcagctgaagaggggaaaaaaaaacactacccgaccagaagacaacagggagaaacgatatgggcgaaacgagctcgcgcgacacccgaaaaagccctcgttgtatttgccagcccgtggtgggtggagacacacccccccgagaaaagctggaggctgccccaccatatccacagaacaactagatagaagaaaccaccaagagagggggtaggacagcacagcaaaaaagaccgccacacaacacgaggtgggtcatgcacaacaacacaaacactagcaacacaggagggggcgacacccgacacaccagcagaagaaataggggggccaacacgcacagcttattcacccacagagggggggacaacaaaatttgctgcgaaaacacagcaaaaaaaaaacgtgcgacagataagctgaccgcgcgtgcggggcacacaacaacgagggggagcacaacagcgcggccaatcaatcgagggccgggaacgagctaggaaaaaaacaaccagcagaaagaaagacccgcggcacacacgaggggaggagcacattttgctgcgtccaccaagaacgttgccaccacagaaacctctggaagaaacatctcctgatataagccgcacatatgcccaggaaaaagacacaaagtagtgcggtgcagc

SEQ ID NO: 556942 - DNA, 1079 bp, Homo sapiens
agaccttaccctttacaaccctgagaggaccatcactgtgaagggggccatcgagaattgttgcagggccgagcaggaaataatgaagaaagttcgggaggcctatgagaatgatgtggctgccatgagcctgcagtctcacctgatccctggcctgaacctggctgctgtaggtcttttcccagcttcatccagcgcagtcccgccgcctcccagcagcgttactggggctgctccctatagctcctttatgcaggctcccgagcaggagatggtgcaggtgtttatccccgcccaggcagtgggcgccatcatcggcaagaaggggcagcacatcaaacagctctcccggtttgccagcgcctccatcaagattgcaccacccgaaacacctgactccaaagttcgtatggttatcatcactggaccgccagaggcccaattcaaggctcagggaagaatctatggcaaactcaaggaggagaacttctttggtcccaaggaggaagtgaagctggagacccacatacgtgtgccagcatcagcagctggccgggtcattggcaaaggtggaaaaacggtgaacgagttgcagaatttgacggcagctgaggtggtagtaccaagagaccagacccctgatgagaacgaccaggtcatcgtgaaaatcatcggacatttctatgccagtcagatggctcaacggaagatccgagacatcctggcccaggttaagcagcagcatcagaagggacagagtaaccaggcccaggcacggaggaagtgaccagcccctccctgtcccttcgagtccaggacaacaacgggcagaaatcgagagtgtgctctccccggcaggcctgagaatgagtgggaatccgggacacctgggccgggctgtagatcaggtttgcccacttgattgagaaagatgttccagtgaggaaccctgatctctcagccccaaacacccacccaattggcccaaacgtggattgtttaaagaagctctccaggccccaccaagagggtggatcacacctcagtgggaagaaaaataaaatttccttcaggtttta

SEQ ID NO: 556943 - DNA, 174 bp, Homo sapiens
ctaggcatcgctgattcctggacccctggagacactggaacccttacctcccactttcctagtgggcttgtcttgaaactaccccaagaaagacagtgctctcttgccctgggccctcagtgtgagggcactctgtgcacaaaatcccactgaggaccaaacatgcctgcagtg

SEQ ID NO: 556944 - DNA, 104 bp, Homo sapiens
ttgcagcagtaggagttgagtagcgcccaggcatcgcagacagggcgacatcagctggggacgattggcctgagctagggctggagacctgaagcaagccagga

SEQ ID NO: 556945 - DNA, 333 bp, Homo sapiens
  misc_feature (63)..(63): n is a, c, g, or t
catgatccaggcgccataagcgatgtgggcagcctacgcggtttaccaccgtgggactgggangactgctccagcctgggcaaaagagggagagactgtctcaaaaccaaattaaaaaaaattaaattcaggggctgggggtggctcatgcctgttatcccagcactttgcaaggccatagtggatggactgtttgagcccaggagttggcggctgcagtgagtcatggtgccactgcattccaacctgggggacacaggagaccctgtcttaaaaaagaaatttgagaaaaaaaacccaggggagagtaaatttaaagggttctaaaattta

SEQ ID NO: 556946 - DNA, 227 bp, Homo sapiens
  misc_feature (45)..(45): n is a, c, g, or t
aaaagccgagatagcttccttaaacgttttaaggaaaatgttccnaaaaaaaaaaaacccccaaaagaaagggtcctgggtttaattaaagggccagcctgctccccccaaaaaagcccccttttttaaaaccaatgggaaggagccttagctgttggaaccttttccctttgaatttatggcataataggtgtttaaaaaaaaaataaaggccctttggggtccca

SEQ ID NO: 556947 - DNA, 185 bp, Homo sapiens
aagatcagtcatttgagagcaatctgatatttaagagacctaaaataaatcctatgtagggaagtcagtggaaaatgctcgggtggtaatggatttagagtgcgttcatttgagagggctagtatgttaaaagtagaaatcaaaatctggcaccgaagcatgtgtaattgtgtactggacctggt

SEQ ID NO: 556948 - DNA, 428 bp, Homo sapiens
  misc_feature (22)..(22): n is a, c, g, or t
  misc_feature (30)..(31): n is a, c, g, or t
  misc_feature (36)..(36): n is a, c, g, or t
  misc_feature (40)..(40): n is a, c, g, or t
  misc_feature (52)..(52): n is a, c, g, or t
  misc_feature (54)..(54): n is a, c, g, or t
  misc_feature (66)..(66): n is a, c, g, or t
  misc_feature (180)..(181): n is a, c, g, or t
  misc_feature (254)..(254): n is a, c, g, or t
  misc_feature (274)..(274): n is a, c, g, or t
  misc_feature (335)..(335): n is a, c, g, or t
  misc_feature (337)..(337): n is a, c, g, or t
ccttgttagtgggcctgtttanagggtctnntcagngagngtgtcatcaggnangacctgatgtgnggggtctggtcagcagggacctggtcaatgtgggctgctgagcactgcttggataagccaggtgcaatgtgcattattgaaggccctgtggacagctgggatagcccagtgatnnccaagggcctagtcaaaagtggacaaagcacgtgtttggatggacctgggagatcctgctcagagattctganaggacaaaggtaaaggaagngccagagtggctgcagagatggtcacagtctatgggctgcacaggatgaaggaggccaggnancaggcagggtgggcagttggggttcagggagaggcaggtgcatgctgggaggtcagaccctgtgagggcttcgggggcgtcaggttgggta

SEQ ID NO: 556949 - DNA, 600 bp, Homo sapiens
gcttcctgtagagaatatgccccatccaacgaaactcagcttcagctatgacaccatcggtcgggtaagcggactttcggtagctggccgggagtgtgtgccatcacagccgtagagtgttggtagtgggcaccaggcaatggtaccatccagccgtccccgctggtacatgggcactagttacactgacgggagagagatgagagtccactgtctctctgcaccagtaactataaagcctcttaccttgctaccgtcgacagtgcaaggctttttgccagcgcatccgcctggccccgtcccattcattactgtgaatacaagcctctgatcttccatctcctccagcgaaaaaaatgaggagccctggcccctccaactttcttcagagtaatagcacttaattccttccctatctccttaccaaaagtacaagttacatctattcaccaccttttctgcaaatctaggagtctacctgttcattcctttatcaaagaaaagtatctacttcctttctagacataagagtactagctctcaccctctgccctttactagaacaggagtcttcattctttttatgcctcatcagagaag

SEQ ID NO: 556950 - DNA, 558 bp, Homo sapiens
  misc_feature (505)..(505): n is a, c, g, or t
agtccctaatcattaattatcaggtaaaatgctcactagaattaatcctacttccagaagagttctcaaaagagaaacctatatactcaactctgatgctcaagtctgaccaatccctagatactgctgacctattcatatattcatattctatcactgatatgggaagctctgtttgaaacataaacttaaaaaggaatctctatatatgaactatcagtgctatcagacaatgctaacattatgaacatgatgaggatataacccttgttttcttagaaatgcccacccacatttatgctgtttttagtttattactcttgtcaaagttgccatgcagaatgtctgttggtcagttgggcacatctgcacacatttacaatatctgccacctcttttaaccctcaaccccgccccacaaaatgagtgatggtgcttgttgatttgcagattcacagtctggtgagacaagtttgagatctcatattttcagctcatccttganaacctttcttcgatttgactgaccttgatggctccctggaatctcacctacat

SEQ ID NO: 556951 - DNA, 156 bp, Homo sapiens
ccttagcttagtgtcgaaggaattgtcaggttaacagcaacacaaagacatattcaaagacctaataggtcagaagaattaaataccaggccaaaaacaaatctgtatggaaatctagaatcatgtgcatagaagaagaattttcatgtaagatta

SEQ ID NO: 556952 - DNA, 629 bp, Homo sapiens
  misc_feature (33)..(33): n is a, c, g, or t
  misc_feature (81)..(82): n is a, c, g, or t
ggcgctttgcggggtgagtgaccaagttccggncagttcgacctcgaggatccataggtggagacggtactacctcccagnntctgttttccatccccttcaggtccttcctcgggaggctggcgaaggcggtccaccgctgcgcgtgatcctttagttgctctcggtccccttgtgcaccctcactcgtgcccgtgtgtggaaagaccttactcctccctccaccccgatcgaggagctatgatcggctggacgcaatacggtgtagcgaatcatcattggccgacggtgccagaaatctgagaccaccacgtgcctaagaggtaccctgtacttcaccgtcgtcttgtagcttagtgccggaggaagggccattcggacaggtctttcccttgaatggattcttaactcgacaactcctgaggcacgtagagcattgtccccctagaagtaagagatcgtgaagtaactctcgtacagatttgaggatggttcagagtacaacaagccggcatgctagagggcatgcccctgtaagggagaggtataaccggccctctgttgactctggtgctcgcttttgctaaatgagctggtgacgccatgatcatgggctggggtcgtgaata

SEQ ID NO: 556953 - DNA, 234 bp, Homo sapiens
  misc_feature (59)..(61): n is a, c, g, or t
ggagttgtaatacgaggtgacaccctcgagtcacttcctcactcagctgagcgcctccnnngctttgggttcgttctgcagccttcgccccgttcctagcctcagggccggactccagcgcagagcccagcccagcgcagcttgccagaagccacccagccgcccagtcgcccaggcccgcacgtaacccggccagagtttcttagcagccccgagcctcgaccaccgcctttt

SEQ ID NO: 556954 - DNA, 364 bp, Homo sapiens
  misc_feature (204)..(204): n is a, c, g, or t
  misc_feature (206)..(206): n is a, c, g, or t
  misc_feature (272)..(272): n is a, c, g, or t
  misc_feature (317)..(317): n is a, c, g, or t
gaaactggaaaccatcattctcagcaaactattgcaaggacaaaaaaccaaacactgcatgttctcactcataggtgggaattgagcaatgaaaatttttatttattttatttttttattttttgagacagggtcttgctctgtcacccaggctggagtgccgtggcgtgatctcggcctgctgcagccttgacctccctgggntnaagcaatcttcccacataagcctcccaagtagctgggactgcggacatgtgccaccatgcctgggntaattttgtttattttttgtaggaggttggggtctcactatgttngctcaggcttgtctcaaactccgagggtcaagtgatccttccacctt

SEQ ID NO: 556955 - DNA, 207 bp, Homo sapiens
  misc_feature (29)..(29): n is a, c, g, or t
  misc_feature (83)..(83): n is a, c, g, or t
  misc_feature (94)..(94): n is a, c, g, or t
  misc_feature (99)..(99): n is a, c, g, or t
  misc_feature (146)..(146): n is a, c, g, or t
  misc_feature (153)..(153): n is a, c, g, or t
ggaaactaagaaataaatgcctcatcccntactccagaaacgagaacaacggaggcagaggagctgaagactccagtatgcanactgactacanaggangacacgaacggctgacggccggggtgctacgagaacccttgaccgtnactgganattcacgattgacgcccccacggagctctgctgacacgacgccctcgaggtccc

SEQ ID NO: 556956 - DNA, 329 bp, Homo sapiens
tcaatatgtgtcaggaggtctccggcggctttgacccaggtgccgagctcatcttccacaggagaatgaacgtcctctcggcaggcgcttacagaggaacctgtgcttattcattgtgaacaccagccagagcttattcattgtgaacaccagccacagtgtgtagcctccctccggtatcaccctgcgcattaacgctggattcttgctcgctgcgtacttgggccgctgggccccgatactgctcaagctgtggcgcgccttaaagccagcgaatcaccctctaccggccccgaagctctcgggctatgcgccctctccctgctcct

SEQ ID NO: 556957 - DNA, 777 bp, Homo sapiens
tgtgcccacgcctgcctgcttggctcttcctgtgtgtgctgtgcgttgcttcgctgggcttgtgatgttctgctgcggcctgcagtgagtctggatgcctgctgggcctcgtgacctgtggtgtgccccgccgtgactgtgtgactggtggtgctggctgttgctgtgggccccgtgactcctgtcggctgcacatccccgtcccagcgcatgagatgccaccccatgtgaaaagccctggctggactgaggtcatggctgccgctgcccttacaatgcctgtccaccagccctctccttctggtgggccccagttgcagccttcagcccagagcctggcctggagccctggaagtgagtgccctgtgtgctgtgcccccagtgcagctacatgcatgcagcatgcaacagtggagacttggggatggtgacctgtgccatgtgaccagtcctctccgtccatgccctgtcagccccaactgccccccgattgcagcccactttctgtctggggagcccaccctgagaacaaaggaagagcccggcccaggtcattgttccagtgtctgtggaaggagctgcggggaagtgtgcctgagcacggcgtccggcgattcaagaggacacaatccgcctgggttgcacctggtgaggcatggcagcagccttgatcagaagtgatggtgaaggaaggacttctactacacacagagcctgggatgatgggtgtggacaccgcataacggactggctgccagcctgactacagagtttccc

SEQ ID NO: 556958 - DNA, 188 bp, Homo sapiens
ctcaagcccaggaggtcaaggctgcagtaagccgtgactgcaccactgcactccagccaacagagtaagactctgtctcaataaataataaatatcaatagtcacataagatggcagagtagaagctgtagtgtagagatcagtcccttcacttgagcaccactgcgctagaagagtattggatcagc

SEQ ID NO: 556959 - DNA, 354 bp, Homo sapiens
ggggtgggattatgactgaacgccctggtaagaatcaggacatacagaatggagcagccgctattaaaggttagaacgaacaacgattaaagacactaacgagatctgagttcacaccgaagcaatccaggctcggtttctatctacttcaaattccttcctgtccgaaaggacatgagagatagggcctacttcacaaagcgccttcccccgtaaatgatatcatctaaacttagtattatacccacacccatccactgaacagggtttaggaaaccctatatgttccagacacaatgactgaaccaggtcggccgcttaggcccattcgcccttagattcgagcatcgttta

SEQ ID NO: 556960 - DNA, 343 bp, Homo sapiens
  misc_feature (285)..(285): n is a, c, g, or t
  misc_feature (333)..(333): n is a, c, g, or t
ggcatgaggccagttttcccaaggagcttttattggctctgtaagtcaactttgattccttaaagaagcctgtttatatttgaaagcatgccatttcagtcaaagccttggtaaaataaccagtttctccaactgggccctgttacaaaagaaaacagattcttactgtacttatgcaaataattatattgccataaattacaaatacaaataatttccaaattctggagaaatcagatagagagaaagaaatatgcttcaaattttgtttacaggagtacactntacccaattggtgcaaaagtagttgcaatttcagactatgaattttanatcgttataa

SEQ ID NO: 556961 - DNA, 589 bp, Homo sapiens
  misc_feature (494)..(494): n is a, c, g, or t
atcctcctttaagcagattcccccagcccctcccaggccagactttgaggcttcaagggaaaagctgcagaagttgggtgagggcaacagctccatcacccgggaagaattctccaagatgaagacatgagctagaagcggaatacttggccatctttaagaagactgttgcgatgcatgaagtcttcctgcagcgcctggcagcccatcccaccctgcgtcgggaccacaacttctccgtcttcttggaatacagccaggatctgagtgttcgagagaagaacaggaaggaggtcttgggagggctcctgaggagcatcgtcaggtctgcagatgaagtcctcatcaccggcatatcaggtctcaaggaggtagatgacttctttgagcacgagaggaccttcctagtagaataccacacccgaatccgagacacctgccagagggccgaccgtgttatgcactcccacaagtgcctggcagacaactatatncctatctctgctgcactgagcagtctcggaacccaggaagtcaaccaactcaagaggagcttcctgaagctggcagagctctttgaacggctgag

SEQ ID NO: 556962 - DNA, 144 bp, Homo sapiens
gtcgcatggctgagctgcagcagctccgggtgcaggaggcggtcgagtccatggtgaagagtctggaaagagagagcatccgcagatccagggtctcatgttccctgcagcgcacttttgtgaggacagccacgcctccatgag

SEQ ID NO: 556963 - DNA, 390 bp, Homo sapiens
aatgtacctgcagtatacctgtctaccaactaggttggtaccgaatcagcttaaatacgaagttctctctactaagcacctgaaacttaatatgtccagacaccaaaattctggacttcttcacacaccagtgctgtcatctcccataccttcccctccatagagaaggtaaccatcatccttccaggcgctcctgccaagcaggactcggaatcaggcttgattcctcatttttctcatcccactttcatggtcatgctccaacactcccaggctatccagaacctgagtggctcccttcctccatgatgaagccatcatcacttcttgcctggattgttgcagtagcctccaaactgttatactgattcagatctttactttctcaca

SEQ ID NO: 556964 - DNA, 254 bp, Homo sapiens
tagttacaaaaaagggcacaacaatatatatatatatgtaggtcaccaagaaactagggtcccggtaaaatactattagccagatactagtatataaaaggtgaagtctgatatggtatacttttttgggaaataaaacaaaatccaaaaccattttggtaatggtcaaaagtcaaacatgccaggttaacttagctatggccagggtcaccaagtaaagccatacccgactaaatgtgctgaggggtacggag

SEQ ID NO: 556965 - DNA, 209 bp, Homo sapiens
tccctccgcttactatactcttccttattttgctcctagacgggtgtgcactttaagctgtacttaggtagctcgtctggtatcgggggtctatagctttggctctccttgcaaggttatttctagttaattcattatgcagaaagtataggggtcagtcctagctatattattgcttggttataattttacatcttaaccctatgcgg

SEQ ID NO: 556966 - DNA, 516 bp, Homo sapiens
ggtaaatggctaggaaaatatagaggtgtagactgagatcctagtgtcctgcatggtttggctaggccagtgctggtacacgcatactatggttgagctgcggctactccagaacgttgagcttgatgagtaccagtctccatccttgtcaaatgcattataagctctgagcatgccctccatcctaacgaatcagcagatgaaactgtcaaagtcgatgttcatgtttttgtctgcgttccgcatggtaatgatgtcatagagctggctgttgaggtggaatcctgcgtctttgactgcttttcgcatctcgtatctcttgatggcgccggactggtctgtgtcatattttttcgtgagttttctgccaggccttaatcttgttccagaggtggtggaactcctgcaggttgagctttccagagccatctgtaatccatgagcgcaatcatgctacggcaggactccagtgtgaacccgtgtgtcttcaggtccttgtgtttgttcgttccattt

SEQ ID NO: 556967 - DNA, 1302 bp, Homo sapiens
ggcttgaagaggatgcagactcccccggagacctgaccaccctgccccagaatctgcgtggagcagctgaccactgaggccctctcacctccaaagacacccagcctcctatccccgcgtgggtttatcgacagtcagggccgccagggctgactcacccagcgcccatcctttgacatccaatatcccacccgatcaacatttggctgagaggctgactccgccgtggctcgcaatcacagtgagtaccaagcacacgtgacatccgaggtcgcctcctaactcgctttcatgggcatgagacggcgtagcccgaaacgcccaatggccacgaatcatgtcgcacgtcgacctcggtcacctcaagggagacaagcttgcccgtgtggtcgggaacgacccaggacacgagcgctctatgcccttgcctacgatccctaggcgcagctcgcatgtccgggctatctggtcaggcagaagctcacctaaggttccaaggggtccattgtttgctccggctgacactcgcacatgagtcggacagagagaacagggcctcgccagaagcccgggctgagcccaactttgcgagggtacggagcatgaccaacaggtcgtccccttccccagcatccctctccctggccctcacaacgtatactaggctagacgatgaatacgatggccgaaaaacttgtacacaagacgcctgttgcttcagccaaagaggaatagcgcgggggcaaccattgggagtctttgtcgtcgctcttggtggcagcttcgcctatccctcgttttgcctcttcaggattgcctaggccacccttgcactttgaacatccgctcgcctcgacttggcgttgccgggggccctcatgaggaatgttgtcccccggggtcctttgtctacctgggtgacccctgggtgcccgtcgtagttctctaccccatccctagggtttagctgggtcctaccaccaagttgctaggcgttgggtgagcgccacgtccaccaatcggcgggcaacgaatcttcctggccttgcaggaacaccatcatatgcttatattggcgcagactgttgggggatattcaaagtccaaggtcggtctagagcaagtcacaacagagggaggtccacagtgtgcgccaaactggagggcacatggctataccaggaccacaggttcgccccgaccttccacaagaggccgcgtataagcctctatatactggaaggcgacacactaaaagaccactcattgcctggggcccatgcgtgattaaacacacaagag

SEQ ID NO: 556968 - DNA, 205 bp, Homo sapiens
gaaaagactcgcgggcgcgtttcgggtgctggcggctgcagtcggagttcatatctaagcagctggaaggaaccatggccaagtgtgagcgtaccttcattgcgatcaaaccagatggggtccagcggggtcttgagagagataatattaagctattaactgaggctgaccagaggggaggaccccccctttaccaccccatgca

SEQ ID NO: 556969 - DNA, 192 bp, Homo sapiens
caaatgttctcagtcagtgcacccttcactgtcggcagttacttcatacgtggtaaagttctccagtatgggtatcattgatcttaattctctcctttttcaagcgaaaagttgcagacctgactctgaagaggagcttctcttcagtcatatcttaattttccatttagcctacagctgcatgcacgtagc

SEQ ID NO: 556970 - DNA, 920 bp, Homo sapiens
cttcggagcgggagtgttcgttgtgccagcgagtaacaaagagaattcagctatggatgatgtcgagaacggcgaggcaagatctctggattatgaatgtgttcccgagtgccgacaccgttgcaaagaggggaggtctaaggcagcaagactgggcgcaagatctccatggtctctaggcgcggaagacaggtcaggccccgtggataactcttacacagagcgcgcaagtaatgaacggaaggcatcatctggggagaggatacactgatggagtatgcggagaatcgccaagaagtgacatccctggaacaaaaaatgagtcttggtcggcattacgaagaaggaagaccgggcggacttaatagctgatgtcaaaaaagctactaatgagtaataataggccactgccttgatttattacaagagcagaaatgtctcatgacttttctatgtgtaccatcctttaatagatctcatacagcggaattcagatcatgaatgactgagagaatatacgtgggcagtcctgatgtaaaactaagatggcttgtggtctaaactgaatatgtgcagtcccggaaattttcatagtaactcctacttcagtgaaaatggtatcactggtttagccctttttaaagatttgattcaggattccgttaagtggatgatcaagttttcacacacagtttggtgagtgcccatcttaatacactttgggagtggcatatattgagaatggctaccggtatcgcgaaatttttgcccacgggggcactgttctccgtgtttaacaccacatccggtgtgggcgagacctgcctcaaggcgggggcaacaagggcgggcgaatgcgcacgacccaacatccgggaagatccactcgcgagggggaaaacaccaatccccgaacctct

SEQ ID NO: 556971 - DNA, 263 bp, Homo sapiens
tctagagaatcccctttccagagctgtaggagaagcttttatgtgactcggagaagaagcaggtacagtacaccttctgcagagcaaccaaccactgtgaggcctcctaacaggctggcagtctctgctgagcatgtgcttgtcatacttccacataaagatgctttgactacctgaccagaatctgaaagaacctgtcctgcaggtgagcaggtttattgtgcacctggcacacttgctatgcacagaacatgagacttgca

SEQ ID NO: 556972 - DNA, 352 bp, Homo sapiens
ccaggctgagtaaggtttacatatccaaatgaggagaaacaggtttgcttcttctcttattgtctaaaggtgtctgaggactttggcaagaatgtcatggaaatccttcagatttttgttttgtgcagagggatctgctgggtggtgttggtttcatccgccttttctggtttttcgttgtgtgactggtcatttctttttgggaagatgggtctttgaaactactttcctgtatttgaagtggtcttttcatgcttttttgtctgaagtttttcaaatcgccattaaattatgttttctgaattacagataaaaatgcatgttaggtcctaggaattaaaccctgattggg

SEQ ID NO: 556973 - DNA, 1064 bp, Homo sapiens
gaacccaggaggtggagcttgcagtgagccgagatcgcaccactgtactccagcctgggcaacaaagcaagactccgtctccaaaaaaaaaaaaaaaattgggcttgggcattggtgttggcattgttgccgtgttagttcccagccacttcgggaggctgaggcagaagaatttgctttgaacccaggagttcggaggtttgcagttgggccaagattcattgccacttgcacctccagttctgtggacgacagagttgagacttcgtgtctcaaaaaacaaaaaaaattctcttttttaacaatgtgagtgtgtttaattaacacttttttaaacccttgggaacattttgaaggagattgagggtctctaagaagtgttattaggggttatgtgttttcaggaaacagggcaacagggggtggctcccaggaacgccatttttgtgtctcgtgtgcaaaaccgaagaagggtgtgagtgttctttcaacacccccgggtggggggacatctcgttcaaagacacatacatttgaggccagtgtgtgcacctgtgtctcgggacaccagcgccttgtgggtaacgctctcaaccccctgtgttttacttccctatagcccactttttggcggagaggcggcaaggggtcaacagagaggggagtctccaccttttgagagcgccccgagggagattgtctcgtgaagagacccacaggcctttagtggaggacacatgttggcgggaaaatattcgcgcccgcttctttacagaaaaaatattttcaccaaagattttttccccggggaagtgtggcggggaggcgcggttccctgtgtttggtgtccccccgggatactcctgtggggggggccacacggggggggggggagcggggcgcttcctcgtgagagccccccgcgggagggggggggctgacagcggggtccaccacggtcgtggagcaccctgtgggtgtcgcaccccatttagtatggggtggtacttccccaccggccctttagttgtgtggaccccgcatgtgttggagacaacccctcg

SEQ ID NO: 556974 - DNA, 185 bp, Homo sapiens
cgctttctacgtcactgtcctgatagtattcctctactattttaaaatctgagtaaaacgaattcttcaaaatgaattcctaggctgggcatggtggctcatgcccgtaatcccagcactttgggaggccaaggtgagaggatcacttgaggccaggagtttgagaccagcctgcgaacctatga

SEQ ID NO: 556975 - DNA, 201 bp, Homo sapiens
ccatctgatgtccggcgtcctctctacaagaacattgtcctctctggtggttcaaccatgttcagggactttggacgtcgtttgcaaagagatttgaagagaactgtagatgccaggctgaagttaagcgaggagctgagtggtggtagattgaagcccaagcctattgatgtacaagttattacacaccatatgcagcgg

SEQ ID NO: 556976 - DNA, 126 bp, Homo sapiens
gcggccgcctactactactactgctcgaattcaagcttctaacgatgtacggggacatggttttctatgttacttccattgtaacattagtaaagtgactttcaataaaagatttatgttattttg

SEQ ID NO: 556977 - DNA, 1378 bp, Homo sapiens
  misc_feature (400)..(400): n is a, c, g, or t
gctgacataccatatcactcagatagcatggtcctggtgaaggtccaagtcgatggagcattggagcagtatggaagctgcctggtcagcaacggagcctgtgttgccaacttgcgtagcgcttacaaggtcggtactactttgttagcgcagtaccaactgacacctcttctcattagagccgtcaaagttgacaagtggctagttagcagtgttgtccaagaatattgatgcgcatccgctagtgggagcccagattctcattggacagactcgtgtctgaggtcgtagcaggacacagcggcaagtgcctttggtctactcagacagtgtgacagagatcccgcaaatctcacctcactcagttcacagaggtcaggcgaacagtctccttctcganaacatcgaagttgtcgtgcaagatggcgtatggcctgcgttcgtacgtaaccgtcgcgttgcgcatgctccccccatcttggggccggtcgttgcggatccccatccgtagtaaggcacgcagaatgggcctcgcgtggcttctcactatctgcgcatgggcgttgggggcatgcgccagcccaggggggtccatccgattcgtgcttgcacaccacatcttagcgtagaaatcgtccccctacagattgctatccgctcttagtcgggttattggcttgcaaaagcttagtgcagccagatggtttattcgcccataggattagagcccggtcacatacggcatctgattcaagagcaagaagatcgctcgttccccttgaattatctaagcacaaaggtgcctataaagagaaacccacctggggggccatatggggttcgaggtcacttattggacggacatcgtttattgaggctcagtcccgtggttgaagacctggtcctttcaagttggagttccagcaaaggttcgccatttggctccaattcgatttaggctccacgttccaatggataagggtaccttgtcgttgattcggagcgcgcttgccccgtgtgtgacatacctttgctcgcgctttttgagttggcccacgttgtgggaccttctttccaacggataggcagtgcgaataccgcatgtggccttcctatagaggggggacgacgatacccgaaaaagcgttgtaggattggggccataggggcgcaaatcccccgatttaacggtaggatactagttggaagcgccgacacactcgagaagatgtggcccatcaccggagatagcccccccaaatagtcgccaaagcgagtattagcaacgtaataggtatcgctccgaaacatagtgcgggtgattatagcactaatacagcgctgccaccacacttatgttggcgcgacccaccatgag

SEQ ID NO: 556978 - DNA, 202 bp, Homo sapiens
ggtcctcgatagggtcaagcatagtgaggtacatcccagttgggtcttatctatgtgtgttcagatatttttaagctactttcgtcagtctattacgtgtcaactggagattttgtacaactcaggtgatttctagctttattggggagggggtgatctaaaacaccctttacgccggcttctattgacttggcttatcgag

SEQ ID NO: 556979 - DNA, 924 bp, Homo sapiens
agacagagagtgaactagtctcgagtttattgtattgttttttattcggatcttatctatttattgaagaaaccaatccgggggtaaagaaaaaagggaatgcggtttggggacagaggtgctgggggtgcgagaaaagccccagcccctgagaggggcggaggcgggagaggaagaggaagggatacactaggaacaaactcatagcatccggacaacgtacctaactgtgaatagacagacactaggaaatagctataacatacaaagtacctagggaccaggcacaagagtacgacgagtatacatcaggagaaaacgaccaaaacaatacacgaacagtagcagtgacacaacttagacgcgacggaagaagccacggggaacagccgagacaacaactcaggcagacgaccgtgccagaccgacgcgaaaaaaccatgaagaaaccagacaacaccgaagccccagaagatggcgcaaaccgacaaatacccataccatccaactttagcacaagagaagagaacgcctatagaggaccaacaactcaaagatagagaggtaaaacaatacatccccagcagtgcgaacacccacacatagacggcgaaaacaaaaataaagacgacaaactaaaagagaaaaaaaatccgagaatacgagaattgcgaagaggagccacaccagaagacccaccagaacggagacttacgacggacactgccaaccaagagagaaaaagagaacaagaacacgaaggccacaatccacggacaccacctcatcacacaacgggcgagcagacaaaacgacaactaacacccccatagacagacgacaagaaatccaccaacagcacagaaaatcaaaaccacacccaaacacaaagaaacatcaccgatacaaccagcacatcaccgc

SEQ ID NO: 556980 - DNA, 167 bp, Homo sapiens
atagataagccaccttatgtgattccggaggccttttaatctttgactcctcactttcatgcttgtgcctgggaatgggctccccaagcccagtcccccttttccctctgtggagggaaggtgtgtttgctggtaggatcaaaccaccactgactcttgcggggggt

SEQ ID NO: 556981 - DNA, 707 bp, Homo sapiens
ggtacacaatcaattggagtggtcaggctactgaaacattaaaatgtgaatccccaaattttcttttgggttggtcagggaaaagaaaaatatctttataaagaactcttgggacaatcaggagacggaatctcagggtgggttcaagtcagagctagttccccaacagaaagatcattgtgaacccagtttttatcccttctctttccttccctttccctaaatcaaatcacatattaatgtgcgcctaatttcacttaacatagacttgaataaattttaagggaaagcccctataatgaatccagaaatcactacaagcagcattacgcctgccgtcgggacatatcttgtgagaccataaaacctgtgatatcatcctgtgtcatatccgacctgtacccccggaccatcacagtgtaactgccatatatgtaatatacacaaatcaattagcatgtgtaatggccaaattgcattcccccatgcttttctgtctccaaaccaacgtggacacaccaaatcaattctaaatccccaaaagctgcctaaatttaggagtctgaccctccaatctcactgtgtggtgcatgggccggtgaagtggtggcagatgcatgtgcctgaattgtgtgaggcctgggaagggactctttcttggagatactgtaaataccagtcaccatttaattaaggctgcaataacc

SEQ ID NO: 556982 - DNA, 143 bp, Homo sapiens
gagtgcaccgtattattcaacacagcaaaactctttcagtgtctgttaacaaaaagtctctataagatagaggacaatacagtatcctgcagctattaaccccaagagctagtttagtaaatagaccttatgggcccatctat

SEQ ID NO: 556983 - DNA, 291 bp, Homo sapiens
aggatccgtactttggacgcataaatgggggacggagacgtggctacgtagagagtgagacgcgagattcctaaaaaagatgcacagagcgtccctcagagaggccaagaaagatggtgcgagggtagggaaggagagggagagagagagagagagagagagagaagcagagggactgggttgcactggctgcggatggtggcggcgccgtctcactcccttcctaatgtctatcgatcaataacgagggaagacaggaggacagggagctgatgggcgtccaaaagtcag

SEQ ID NO: 556984 - DNA, 426 bp, Homo sapiens
  misc_feature (48)..(48): n is a, c, g, or t
  misc_feature (76)..(76): n is a, c, g, or t
  misc_feature (100)..(100): n is a, c, g, or t
  misc_feature (187)..(187): n is a, c, g, or t
  misc_feature (206)..(206): n is a, c, g, or t
  misc_feature (279)..(279): n is a, c, g, or t
  misc_feature (320)..(320): n is a, c, g, or t
tctgtcaaaaggtggagatgcagatccagcctgcctctccttattacntaatcattcactagacatatattgactnacatatatatatatagcttgactnctatttttttcttggttaggaaatttaagcccggagaggtgaaagtagccatgaatgtcagaaatacaatctcggccgggcatgggngcacgcctgtaatcctggncactttggaagctgagggaggagcgcttgagccaaggagttctagaccaacctcaaccacatggtagccccgntctacaattaaaaaagaaaaatcagcctgcatgatggtganacctgtggcccagctctttgagctagacaggaggattcttaacccgggagtctgagaggctgcagtgagccgtgataacaccactggattccagcctgggtgacag

SEQ ID NO: 556985 - DNA, 154 bp, Homo sapiens
gccagctacttgaatgcctgacgcggccagtgtagaagcggccttgcgtcgcgaaaggggtgcgaagcgcccccaggatctcagcttcgccgcgtacattgcaggggccgctttgcggccctatcgcgacgcaaggccgctcctacactgagcg

SEQ ID NO: 556986 - DNA, 346 bp, Homo sapiens
  misc_feature (37)..(37): n is a, c, g, or t
  misc_feature (66)..(66): n is a, c, g, or t
  misc_feature (107)..(107): n is a, c, g, or t
  misc_feature (125)..(125): n is a, c, g, or t
  misc_feature (316)..(316): n is a, c, g, or t
gtttaagtatggaaaatcttttatccaggggaaatangccatatttgtggccctagccttcctganttgtggacgaagattgcccttgttgatgatttcccacaagntcccaatgactattaaanaaaattacagactgatggagggactgggttttcaagtcgtaaaatttagtaactaaaacctctttcaaattgaaagtcttctttagtgctgacaactcttcaaagtacatctacttggtatttgggtatttagtcacatactacatggtatttcatttattattcttattcctagaatcaccaaaaaaaanaaaatcaaacactaaaagataggtggaata

SEQ ID NO: 556987 - DNA, 149 bp, Homo sapiens
agtatgagtgtgaggcgtatataccatagccgcctagtttatgagtactgcggcaagtactatttacccatcgatgggggcttcgacatgtggctttagaggagtcattagtggagtccgtaaagaggtatcttcactattaatgcttt

SEQ ID NO: 556988 - DNA, 498 bp, Homo sapiens
aaatacaatacgccgcagtgcccctatcgccctatactatcatagcctaatacacaaacttaattatagatataacaccgctcacagtagaagggaggcgaagggatcctgcgacatacaccatgtatgacgtaccagagcactaagctatctggaccctcctatacgagccaacgtacgtagactagaacaaccctaccgggtaagtgtggagatcaatcataataaataggccaaggttcatagatggcaggagtaatacagaggtgtacttgtgtagtgataagggtaggagaggtaaaaggagccacttatataagtaaatgttgatagtaaaatgatggctagggtgacttcatatagagatagtaagggctactgcttcgcaatgcgccgaatcagggcgtcataagagtatgatgctcaccctgatcagaggaatatgagtaaacggctaggctaagaggtggctagaataaataggtgtcctaagtcgag

SEQ ID NO: 556989 - DNA, 255 bp, Homo sapiens
  misc_feature (44)..(44): n is a, c, g, or t
  misc_feature (185)..(185): n is a, c, g, or t
  misc_feature (230)..(230): n is a, c, g, or t
gttatttaataaattattggcccaaataagtgaccttatttttngtgattttttaatacaagattttgaaatgtttatctagtcaaatatgcctctccctatttttaaaaaatggctcctaggttttaaaaaattttattagagaaggtctttccaattctaaacccccaattctaaatttcctncttttattgcatttaaatccatttgggattatttgcatatatggngcaaagtgaaataggagtctaactt

SEQ ID NO: 556990 - DNA, 861 bp, Homo sapiens
agcggtgatggcgggcgctactcgggaggctgaggcgggagaatggggtgaacccgggaggcggactgcggtggtgccatcgcggtcatacggttccacctcccgggttagtgatcctcccgcctcagccctcctaagctagctgggactacaggtgtgtcgccacgcctggctgggtttctcaaattgtttggtagagtcgaggtctccctatgttgtccaggctgtttgtagttttcacatgagttgtagactttaaggatcagtctgagaattcccttatagtcacacttacacgctttgaacgtcatttctgacgactagtttatgggcctgtccttggggagttcaacgctccgggacatgactagtcagggaacataactgtcagagccaaagaacagtaaccctgctatgaacaaaactacgaagcgatgggtatacagaggctcctgggcactctcggcattttgacggagtaaacccgacttcacttctctcattgatctgtcctgtattcacctcgctgagcctgtacaataaggtatttcccggactatctgttccacagaatcatcactcgcagtcgacctctacacaattgtgagacagctatcccaaaggcatgaggctcatcagtcgcttgtacagcttcaggctcccagttcgtgattaacatgacgcagagatttttcccccttatgggtatttgagcacgttcgcacgttcgattaccaatgtgcgacagaagaccctgacaatcgacacggggagctacatctcttgtgcttgcgctcggtgtgaatatgctaactagacgctagtactacagtgtgttgttgctcgagtagagacacgaat

SEQ ID NO: 556991 - DNA, 982 bp, Homo sapiens
cgctcgagcccgggttgggagtgggctcctctcgccatagtggcgtgcgtggggccggggagagtgcggggtggtgagaccggctctgcccctgcccggtggaaagcgcctccgaggtggaaatggtgaaagtggggggacggggacgaacaagaacaagaaaataaataaataacagacacgggtgaaaggggggaccaaaatttatcaaaaagcgatacagaggcgcttgccgctgtccgctcgcggggaatggcttggggagcggacgtgggacatgatgagggtgaagggacggaagaagtgccggctttcctcggttccggcccgtcagcgtggaccgagtttccttaagacttcggcccacttccttttgtaaagcgtacggcggagactttggtctttcaccctttccgttgttccttcccctgcctgcctttcccgggtccaaacggaagatgtacagtgaggaatggtgctggcggaaaagggagacgggctggggaagtcgttggcactaggattggaaggagggaggacgttttctcgtggctaagaaaagccgaagaatattaaggtcgcaggcggcagggatcttgcattgttttcacccttcttatcccgtgtgttttaaaaggctctcaagtatttgaccaagttaaacaaattctggtattaaaaccgttaagattggcaaaattcgccggcttgctgttggaaacggcttgccttttccggccatgggttgtggggatatccagcaggaagggggtttttctcgtgagaggaaagttgacgtttttagacggatttgaggaactttggaaagcgcactttggggcaaagaggaattggattaccaagggccgagaggtgaaggttattgttgagaacaggtgctccggaagggcttttagagagaccgtttctataaaaattcttcttgaaaagcgctaggtgttgcgttggcgccttcgggaag

SEQ ID NO: 556992 - DNA, 155 bp, Homo sapiens
tcatgaaggaggcagactgctcccaagacatgggcgtagagaagcaccttgtaacctctatcccctctacactagcaggcccagtgggtagtagacttggtcccttatgccatttccacaggcgtcagggccaacgcagtcgtacgcaacccgga

SEQ ID NO: 556993 - DNA, 281 bp, Homo sapiens
ctgtttcccccctaaaaatctaagtatttctgggccttcaatttggaggagggcataagttgtaagtacgaagtgttattttaatgtactattcagctgtctcaaacaaatgcaaatcacttgtgttgtcatattaatagttcatagtgttgatcactcattaataatttgactctaacggcttttattaagaaaacagcagaaacgattaaatcttgaattaagctctcggcgcgggatatggccgactgcagatctgaggattttaagggggaacacgg

SEQ ID NO: 556994 - DNA, 626 bp, Homo sapiens
  misc_feature (59)..(59): n is a, c, g, or t
  misc_feature (142)..(142): n is a, c, g, or t
aagggtccactttatgtcacatgtgcgcacctgttctgtaaccttcactcagttagatnttaaggagagtgactatctcctgtcaaggtcagtgtgaagtatcgagcagttcaccatcagatgcacctggttatacattaantagccgcatttcataggatagttagcgacgtttatacatgcgcaagtatgtgcttaagtatattattaagccggttcacatgatcgcatggtgactgttgatatgctaacttggaaaatcaatgatgtcatcatcagtgtctgggtatatagattgtccggtcagatatggcctatgtaagtcatggcttatagtctaggatctagcagcttggaggaggcatgcaatctcaggttggcatgagtgcactcctgtgccccagagagccctgttatgtatgtaagcattcatagcagactcgatgcgtggaagacacaagccacttgtggagctggaccatagtagggtaccatagagacagtgcgcagtggtcagatataggcatccgcttctcagtcatgaagatctggatctggtggttgaccctgacaatcctagcactttgatgagacaaggtggacggagagctttagtctgggagttc

SEQ ID NO: 556995 - DNA, 966 bp, Homo sapiens
ttaacaggcccagacgcgattggagcccagtcgcctattgtccgcgcgcaagtccgtatccatccggaccccccgatgtaggtccaccatggagccgcggtgccccgttatagtaacacttggcgacccttggagaattttgcccccccacggggccgaatttggcaccaccattcgggggcccccaacacacaaccaagggcggcacacacgacagagcagaacatgcccgcatcccccggtgggacggggagcagagcacacttatcttcctcggggcgatgtttccaccgtccttcacatgcaggccaggttctgcgttgccgccgcaattatgtacaccggcggcattctttgtagccaacacctctccctgtatgtcagagttctgccacacagccggtagattaaatgttcgcgggtccccgccaattttggttgggcccactgcccactacacgatggggggaccccgacggccccccttaatttttcgggctggggcacccaaaaccttagagtcttgcgggcacgatcaatctcccgcaggaggtccgccctggtcgctggagtgggtcctcgtcggtgtgactcccggccgtgcttggttgaaagcccctctttcccctgcggaagcattggcccgaacgaacagacggtgcttggcggtctccccaaggagaagcgcggagatgtctcccccgagggtagttttacgccagccccacctgggtccccccactgagggagagtccccacggcagatgtttctacccgcgggaaatatgtcgccggagccccccgagatagaacgcaccccgggggctctacacaccaaggggatacacacaacaaacgagtgagacgtgagtaatgaagcaccactatgggcgccccaagcatgaagcccccggggccctcccatttttaaacccaaaaagtagccccgttttccccaacaaaaaa

SEQ ID NO: 556996 - DNA, 781 bp, Homo sapiens
  misc_feature (30)..(30): n is a, c, g, or t
  misc_feature (54)..(55): n is a, c, g, or t
  misc_feature (99)..(99): n is a, c, g, or t
aaggcattggacccggccccctcaagcatnagttaacagttctgcatggtctcnnctatgagtgagctaaggccctcacgatagatgagacattcaganatgtcatgcgtcatgtgcaaaaccctagtatcagacgtcgtcttcaaagccagagtcatgtctggatccaaagtgacatatcagttgctgcatcaagcagatagtgagaagagctcagccattaatgacgtaatgtctgtgcaagcgtgtgtctacacataatgttgagccgtatatgcgctcggagatggtgaagggagtctcacagtactgtgacgcttgtcagtagggtaaaatagagtctactagactacggtgagctcacgcagtagcacctcctgatgcgagtaatcgtgatgtgtttaggagtggcactttctaggggatttagcgggctcatgcctgttgcgggccagtgcccccctagtcgggtgggtaggggctaggatgcagtgtgtaaaaggctcagaaagatcccgcgaagatatattcttatgaggtaataaatagtactatcctgtatccaaggcctttttgcacaggtggtgtgtcgtcacctaggtatgtgctctctcgtgttacatcgccccatcattggtatctcccagtgtgttggttagccggcatagtatgaggagcgttatcgagtgccactggcatcacatggccagtccggagagtcattaggaggcctcagagggcccctggtagcggtcatggggtgggcttacccagatgatag

SEQ ID NO: 556997 - DNA, 156 bp, Homo sapiens
  misc_feature (44)..(44): n is a, c, g, or t
attttggtccgggatcctcctatatagggtgtaccaaggctttncttttgggttagtatttgtcctaatatatactttttctttttttcactttcattttatttttttattttatttttgtgttttgagacagtcttgccctgttgcccaggctgg

SEQ ID NO: 556998 - DNA, 101 bp, Homo sapiens
aaactgctgggtatcttaacaccatcacctactgagttcagaatgggcatctgaccccccaagccccatctctccctcacagcgtccgtagcggcctgggt

SEQ ID NO: 556999 - DNA, 133 bp, Homo sapiens
tcggggctcattcaggtactttactggagggtacatgagaaggtgcggtccctaggcccctcccctcttcaaggggtctacagggcaacggtgaggaggggagattcaggggggggggggacggagggtggca

SEQ ID NO: 557000 - DNA, 135 bp, Homo sapiens
acgtgccttttattcaactggtctcaagtcagctgtacagtagcctggctgcctccacccactcccaggtagaccaaatagccttcatacatctcgaagttgggggacacaaaagggggcagggggggcacgaag

SEQ ID NO: 557001 - DNA, 152 bp, Homo sapiens
atctagaggactgtatgttcgccaacaagcagtactcaggcaggaagactattacggggacactacagtcatggtggacaagtcctcagaaggcatgaaccagcaatattaccctgatggtcataatgattacggttatcagcaaccgtcgt

SEQ ID NO: 557002 - DNA, 335 bp, Homo sapiens
atgcgtgaatggccggcattcacaaagaaggtggcccgtgatcatcgtgcatttctgtgtgatccgaggaggcggaacaatgttcacggattccctgctggccaacgtgcatcggctgaaggagtaccgctccaaactcatcctcttccccaggaagccctcgttccctacaagggagacagttctgctgaagaactgaaactggtcaccccgctgaccggaccggtcatgcccgtccggaacgtctattacaagaagaaagctcgagtcatcactgaggaagagaagaatttcaaagccttcgctagtctccgtatggcctttcaacgcctccg

SEQ ID NO: 557003 - DNA, 765 bp, Homo sapiens
  misc_feature (379)..(380): n is a, c, g, or t
  misc_feature (461)..(462): n is a, c, g, or t
  misc_feature (464)..(464): n is a, c, g, or t
  misc_feature (614)..(614): n is a, c, g, or t
aggctggtgtaaatcggccgaggcagcttccatcgctgtgtgcggtcaacaagtgcgggcctgctcagcgcggggtgggcgcggagacctgcgaggcgacctgggagcggctgggttcccggctgcgcgcccttcggccaggcctgggagcctgcgccagtctggagcccccgtgcccagctgtggtcctgcctccctctcggctgtccaccttgccctggagtacttgccagctggtgcattgacctgaccacaccatgtggtgctgcctgcctgcctgtgctgctctgcagtgcctgctggatagaagaatgaaaaccctggctgcctgctctgaccctggagctgagtgatgtttgaccctggagctgatggatgnnttgaccctgatgtgatgtgaatgctgacctgtgatgttgacagagtgctgaacccatgatgttgatgtgatgtgcgaccanngnctgaaagataattggagccagtgaggtgacccgggacgaggagtcgacccggacgaggaggtaccaggaggaaatggcggcagctgggctcacctgtgactgtcacccacagcaatgagaagcacgaccttcatgttacctcccagcagngcagcagtgaaccagttgtccaagacctggcccaggttgttgaagaggtcataggggttccacagtcttttcagaaactcatatttactgggaaaatctctgacgggaaatggaaacaccgttgtcagcacttgaatacaagatggttgcg

SEQ ID NO: 557004 - DNA, 892 bp, Homo sapiens
gggcggcggggcggggggtcgaaagcggagtgaaagagggaggcaggagccggaaaagcggaaccggagtcgcagcggggaacccctgtgcggtgcggagggggcggggccccgattctgacccgcgcgggggttggcccatggcgggagatcagcgacctggacggcagatcgagcaagctgggtcgctgcgaagctcaatcaaggagaagcgaagtcaagggccctgggccgctaagggccagaagaagatctgtgctagacggagagcaacggtgcaagagggttgcactcgccagtccaacaggtgttggggcagcaccattccattgggacatttctatgacctcaaaagagcttgtcagagtttcggtatccgtgatcgcattcacaattgatcgggggcaaccattgagaagtctggcagattaagcaggttttatggtttctacagattgatttgctggacaaagtaggttcggtgcaattgtgttgcgctaactgaaagtgagatttttgataccttaagccgtgtagcaattatcggatggaaaatcttctggcgtgcaggtggcttttcccttcatcagacgtggatagattggaaatcggccgaagcaagagtgctcatgatggccatgttgtgaccttctctggttgcccaggaagaaccatgttggggttagcccgagacaggtaccatttggaatgggtgtggcagttaagcagcatgattgatgttgcgtccccactgtttgacgtacatggatcagaaaggcatgtgggacacactgcgtgaggccatggggagtcaatattgggccaaggccacggtaaggcacagtaacaaaaggcaatgctctctctatccaaaatacaagaaagaaaaaga

SEQ ID NO: 557005 - DNA, 547 bp, Homo sapiens
  misc_feature (547)..(547): n is a, c, g, or t
agtggccattacggccgggggccggggcgcggtggctcacgcctgtaatcccagctctcagggaggctaagaggcgggaggatagcttgagcccaggagttcgagacctgcctgggcaatatagcgagaccccgttctccagaaaaaaataaaaaaaaaaaaaaaaaaaaaaaaaaaaactttttggggcgcggccttgggcccctggaaaaagtttttaaacaccaactcgtggtgtgggcgcgcgcggggggccccagatggtgtaacgggtgacaccggggccaaaacgcggggtccccaaagggaagacccggggcccagcgaccaaggggctgtgggattctcccaccaatgtaaaaagagcgccgcggggggtgtgaacacaccgggggcgcgtcttgtggaacaccacagtctccaaaagaggggggactctccgggagggacatcataacgggggcgactcttatcacaagcgggaggagtctcacgagcgcggcgcccgcaaaatttcaaattttaggcccccggcttcgggggggtn

SEQ ID NO: 557006 - DNA, 242 bp, Homo sapiens
tgactctagagtatccccagtcgatcatcaaagtacggacacatcgtgatcagtggttggggagacggggagtggtaagaccactcagctgacgcagtacctgcatgaagatggttacacgtgactatggtgatgatatgggtgtacccacgccccggccgtgtagcatgccactatcagtggccaacgagagtcagtgaagcagatggggggaaactcttggcgagtgaggtgggcgtatg

SEQ ID NO: 557007 - DNA, 840 bp, Homo sapiens
gcaatgtctggagacatttttgtttgtcacaacaacggggatgcaactggcatttagtaagtagaagtcaagaatgccactagacatcctgccatccacagtacagcaacaaagaatggtccaaccaaaattgtcaatactgtcgatcttggaataaagaatcatttcaagtagaaggaagaatattcacaaaagcaaggcttatgtcctttgggaaattctgtgtggtctagtttgcctgaggtatagattatgtgaaagagcataagataagtgaaggctggaaggatagtttatgaatggatgcggacagatgttgatgtcagattaaagaattgtattttcttatttgttggcttcccaataccaactaataaaatatttcactggatgtaatgcaaattaaaagaaaaaattttattattcagtgttatttcaaatattcaatagatttggttctttttaaaaatttctttccatctcagtgtaaggaattaaaagggcctttggaaacatatacaataaatctttagaagaatattcctattatctgcagtttccttcaaacttacttacacagaataagagatcacttccttagataaggggctgggatttcttctaactttaagacctttccttgactttcctccattaaatgtttcactcatctttcaagggcatttccatggattaatttttagttacgcattaagtagtacggtaatatctaatatgggggtaactaattgtaatgggtcaaatttcgaaaggcggaagataaagtatagagggtgattatttttattgtcaattaactggttaaaaggttaaggaaaa

SEQ ID NO: 557008 - DNA, 367 bp, Homo sapiens
tcagcctcctgagtagctgggattacaggtgtgcacccagctaatttttgtatttttagtagagacggggtttcaccatgttgcccaggccagtcttgaactcctgagctcaaatgatccacctgcctcagcctcccaaagtgctgggattacaggtgtgagccaccgcacctggcctcctctagtctttagtggctctccactcctgactaaattaagttcaggctgtcatcagtgtggctcagcctaccttccagcttttctgcttctgctttgctttatttatttacttattttgagacagggtcttgctcagagacggtcccccaggctggagtgcacaggccaatcatagctcactgcatcc

SEQ ID NO: 557009 - DNA, 615 bp, Homo sapiens
gctttttttccttttcttttttaggattctaaatcacagcctaagcttactgaaacctccacctcttggggaactaattggctctcctggagggataggtaattgtacctgactacacaagctgtcccgaagctcccttggaaagctccagtaagcttttagtgttagcagccatcaaggatttcacaggtcaggcatcggatcgatacagctaaaagcagcagggactgtaatgtctacagcaggtttcaaaaaacgcttgaagggccaagttgttcctttttatgcagaagcttaagacagcttaaattgatgcttggctaaaaaccaattattccaaaagctcgtgactgtgcccttacaggcctttattggtgaaaccgataagaaaaaaaacctggtaactggccaacggctgaaaattccaattttcccccttttaatggctcgtttcagttaggggaggcaaagaaaacaatagttttcgggcggatgtggtcctcaaggacttaagaaaaaaaaatacctggaaaaaccaagaggggggaacaggggtccttaccttaaaccttggcgggaaaaaacctcaaattaaggcattttaaccccctcacg

SEQ ID NO: 557010 - DNA, 331 bp, Homo sapiens
aaagagcttgagaggctgaggtgggaggattgcttgagctccaggaggtagaggttacagtgagccgtgattgcattactgcactccagcctgggcgatagagtgagactctggctcaaaaaaaaaaaaaaaaaaaaaaaaaaaaacaaaaaatgggggagaaaaacgggaggaaaaaaagtggaaataagatgttaccttttcacatcacaatatatattgtttaatagtcacaaagtggtcctggaactgttcctgtaataagcaagggaaatcactttggggaatatgggtaatacacagaagtgtaaaacacactccagccccaatc

SEQ ID NO: 557011 - DNA, 232 bp, Homo sapiens
aacacgccgtaaagtcatgtggggccagttcagccagttctgcaacagggcagcccagctcacattttctcagcacaccacggtccaccacatcaacagctgcccagtgtcccaggcaggcacattccatggcatgctcgttacgtgcatgcgtgtcaggcgttcaggcaatgcaagcattttcattcagcattctcggcactcggcaacacacagccaacacagcacactt

SEQ ID NO: 557012 - DNA, 245 bp, Homo sapiens
cccgctcgggtactgtgactactagtttcagaatgttagttagatgatgcttgtgtgaactactcgttgcttctagtagcccttataattaaatcccccagcttgtgtttgcattatcagcttagagtgttaacatgtggtagaatgaggacttatacatcgtataaatgcgcatagcattttatctacttatgagaacaagtgcagtcagaagaaaaccaactggactctttattccacacttt

SEQ ID NO: 557013 - DNA, 795 bp, Homo sapiens
aaatggcgatactcttcggttctaacacatatatgttgggaatattaaatgtgaatctataccatacatgcatgtattaagatgcgacacttgagaaaactatacatgaacgcatggtaaccgcagcatatatagacatggatgctgacctgacgcaacaaataggcatacgattcctactacaaggacgccatctcattgctattggcatcggccaatccgattgagagaaacgattaaccattgtgacactagatcataattggtctcggtgcctttatggctctggctattatagctaaactacatcgacatgagtatccaatgagttcctaatccatataaagatcatcagtcctacatctgactccgtaatgatacagggtacataactctccctgagtggatagtcgttctcaatatatgcccgaggataatattaagcatgataatatatattccaagggtcactagatggtagagcagttcacacgttattccacaccgagacagaggcacgcgactacttggcacaactgtctagccgacggccctcgatgggtaccagagcaggacttctccacgcaatccaagtctcgccgaggagcacagataagcagaaggcaaggcgcagacacaacacagctaacacgagaggactcgggatcaagacaaggggatgggcaccagtcggaacaagaaggcgcccgaaaaccggccctcagtgaaaagacaagctgaggcacaagaggctggaagccaataacgggaacacacagacaaaaaacgcaagag

SEQ ID NO: 557014 - DNA, 987 bp, Homo sapiens
atgatataccgaacagcagaactactaattatatatcatccttctacataggtcccaacgattagtaaagcaactacgtattaatatgatccttagctgatgccttagaactcttaaaccaaacgagcctcctaaatacctcagcttaattggaattcaattaaaccctttttaaaattcaactgggcccggcacattgttgcgcatcttactcaatgcggatactcctactataataatgagaaccaacccttctacacttcctctatacctaatgctccactatacaaatcctcctgtaatttataatacattcctaatgccacatgatatgtacattcaatagtttaaatactcttcttctgaatacacgagcatgttatctccacacctttgagattattccaatcatgcacgagtggaggccatagcaaggccagaaacgccctgacacgtcaggctactttacgttccctaattactaccatccccttagttacggattcaccttccaccttactacagtcggatctattctttacatttcacaacatcattaggcatcactagaaacaattctaagtatctacaactctgcacatggaccgaagaattgatcaatactcctgatgcaacctaccttaatatgagtagcttacagaaatagcttttgtacgttagacaatagctcctagtacggactacacttaatgattcaactatgagactatgtgaaggcccatcgatgtgttcatagtagttgccgaagtaatcttaaactagggggtatgtatcataagcttaattatataatccttgagaaatgactgggtaccttcgtgttagtcctagaggatatttaaagccatgcggagagaaagataacaagtctggagagatataagacaggagagagtacagcaattcaaacatagagaggcgaaagaatagaagggagtcaaaataggaaaaaaggcgaaaagtaag

SEQ ID NO: 557015 - DNA, 433 bp, Homo sapiens
  misc_feature (13)..(13): n is a, c, g, or t
  misc_feature (35)..(35): n is a, c, g, or t
agtggggcaaagncgcaagctagggccgggggaantcgggatgatcttgaaacttgtccagcttcctgcttggcttttaaaagttatccccaggccagatagatgcctggtgcacgcctgtaatccccagtgctttggggaagccaaggccgcaggattacttgagccccaggagtttgagaccagcctgggcaacgtggcgagacccccatctctacaaagattaaaaaaaaatttagccaggtatggtggcgtgcacctgtggtactagcatcaaaaaaatgcaaaaatttgctgggcgtggtggcatgtgcatgtagtcccaactactcgggaggctgaggtggggggattgcgtgaagcccgggaggtcgaggctgcagtaagccatgattgcaccaccggcactccagctgatagagatcctgtctca

SEQ ID NO: 557016 - DNA, 143 bp, Homo sapiens
ataaagcctcacgtataaagccgcgcgaccagggccggaacggggggacgaaagcggagcaggcccaggggcgccgcccgaggggctgggcaaccttgctggttaacacctcccgcccaccccttagcgccctatacgggccg

SEQ ID NO: 557017 - DNA, 853 bp, Homo sapiens
  misc_feature (470)..(470): n is a, c, g, or t
  misc_feature (613)..(613): n is a, c, g, or t
tctgcaattcatgttgatgtgacagtgtacagtaaacaaatcatcttggcacggaccaacaagaacactggatagcatgtccatgaattctacttggcattcgagtatgatttatccacaaatagctaagagtaatgtggttacgagatacatgtataactcggtaattatcacaaaatagacaattgacatgaattgtgctgtggtcattcaatagaacttattatgacatattattagtaagttgaccttactaattatcgtatatatcgaagaactattcgtaaactatgtataaattcagtgtttagataggtgaagtcacgaagtatttctaaggattctatatcagtgcggaatgaggtcagtcaatgtctcttttgagaacactaatcccattgaattagcaccgttatatacgatctagagcattttaggttgagttaatgggctaccaccttcttcaaacnaatataccaaatacattcacttttcgtatctagaacggtgataagcgacataattctatctcatagaatgatacttctttacaaacaatgtcataagtttccaactcgacagactgcacttactatactaagggatcacttgntaacccattatcgaaaattggccattcatgatatttgaccttgatatatactggatagagactttaaaatgatacgttactcacatatacaaaaaaggttctacactcatcatatcaataatgcgtaatacagctaatgtgattctgtactacacagtaacggacttacgggttgtcgatttatcaccactattgcacaatcgttgcactttatggactgcaagtttcaaagttaccaaa

SEQ ID NO: 557018 - DNA, 143 bp, Homo sapiens
gatatatcatggattcgaagatgaatatagtggcatccatcatcaggatcactgctatgcccttatccagaatcttcactgcccctttgaacacctgctgataattataacaggcagccaaagtggcaatggctatcaaccag

SEQ ID NO: 557019 - DNA, 864 bp, Homo sapiens
  misc_feature (45)..(45): n is a, c, g, or t
  misc_feature (77)..(77): n is a, c, g, or t
  misc_feature (97)..(97): n is a, c, g, or t
  misc_feature (105)..(105): n is a, c, g, or t
  misc_feature (109)..(111): n is a, c, g, or t
  misc_feature (136)..(136): n is a, c, g, or t
  misc_feature (138)..(138): n is a, c, g, or t
  misc_feature (140)..(140): n is a, c, g, or t
  misc_feature (147)..(147): n is a, c, g, or t
  misc_feature (150)..(150): n is a, c, g, or t
  misc_feature (154)..(154): n is a, c, g, or t
  misc_feature (161)..(161): n is a, c, g, or t
  misc_feature (164)..(165): n is a, c, g, or t
  misc_feature (178)..(180): n is a, c, g, or t
  misc_feature (190)..(190): n is a, c, g, or t
  misc_feature (219)..(220): n is a, c, g, or t
  misc_feature (224)..(224): n is a, c, g, or t
  misc_feature (230)..(230): n is a, c, g, or t
  misc_feature (244)..(245): n is a, c, g, or t
  misc_feature (271)..(271): n is a, c, g, or t
  misc_feature (299)..(299): n is a, c, g, or t
  misc_feature (339)..(341): n is a, c, g, or t
  misc_feature (343)..(343): n is a, c, g, or t
  misc_feature (345)..(345): n is a, c, g, or t
  misc_feature (348)..(348): n is a, c, g, or t
  misc_feature (350)..(351): n is a, c, g, or t
  misc_feature (359)..(359): n is a, c, g, or t
  misc_feature (363)..(364): n is a, c, g, or t
  misc_feature (367)..(367): n is a, c, g, or t
  misc_feature (385)..(385): n is a, c, g, or t
  misc_feature (395)..(396): n is a, c, g, or t
  misc_feature (404)..(404): n is a, c, g, or t
  misc_feature (413)..(413): n is a, c, g, or t
  misc_feature (418)..(418): n is a, c, g, or t
  misc_feature (420)..(420): n is a, c, g, or t
  misc_feature (432)..(432): n is a, c, g, or t
  misc_feature (446)..(446): n is a, c, g, or t
  misc_feature (460)..(460): n is a, c, g, or t
  misc_feature (462)..(462): n is a, c, g, or t
  misc_feature (472)..(472): n is a, c, g, or t
  misc_feature (478)..(478): n is a, c, g, or t
  misc_feature (486)..(486): n is a, c, g, or t
  misc_feature (500)..(500): n is a, c, g, or t
  misc_feature (530)..(530): n is a, c, g, or t
  misc_feature (542)..(542): n is a, c, g, or t
  misc_feature (549)..(549): n is a, c, g, or t
  misc_feature (626)..(626): n is a, c, g, or t
  misc_feature (841)..(841): n is a, c, g, or t
ttttttatatctaaaaatatatcttaataatctttcactcaaaanataaatttattaattatatttcattttctttncttttttttccacctttttnctaacttntttnnnacactcctaaaaggtcatatttccntncnatcaaanagncagncccgcanccnngccatgggcactnnngatggccgcngttaataattcaaagcggaagaggccccnncctnggcccnggcagccccgctcnncatggctcttttgcttttcccctcanatcctggttcatttactttttgagcatntaaaaacctctcccatgacagctagaactccacccccacnnntncnccnannggctctcngccnnctnttcccatcatttccatcncctccttctnnatttctcntttttagtntcctntnttcctgcctttntccacttcacattnagcacacgctatananccgcactgcnttttcnagctcatngcacgttgccacanctcttctatcccgactccacggtggctgcnttacggctcacnttcactnttaggacacttgggtttctatagacagtgcttgggcaaccctttgcctacacaaaatattctaataataaacaagantttccatcaactagcggtgatatgttaatacgtctgccgcactcagaggcctgacagagagcagacacgggacagttacagccgccgccgaatcaggtggtagaacccatgggtgcagggacacagggttgggcgggcccagccgcaataggtactcagttctgtgaggaggggagggacatgtttaaccacgaaagggccacactgcaggacanatacagagggcctttgctgcaga

SEQ ID NO: 557020 - DNA, 86 bp, Homo sapiens
  misc_feature (49)..(49): n is a, c, g, or t
gatcttccagagaagggaacatctgtcacagacaatgactgtatctgtntagatatttcttatttaataaagacgatttgtcagtt

SEQ ID NO: 557021 - DNA, 320 bp, Homo sapiens
  misc_feature (118)..(119): n is a, c, g, or t
  misc_feature (126)..(126): n is a, c, g, or t
ccagtttggtccaaaaaaccgggtggggccgggccgggatttccggggtttttttgccccccggggtccaaacccccgggagggggtttgtgggcaaacccccccgggcccctttttnnctgggcngggggttaaagggtaacccccccccctttcttttaacccagggggttttcaatccctcccggcccttttttggggggcccccttagggtggtagccccttaaaggggccgggactttttttttggggggggggggtttttaaatggggggttgcccccggtccccccccaattaaaacctttttcttttttcca

SEQ ID NO: 557022 - DNA, 343 bp, Homo sapiens
aaaacggggtttccctcccccctggggggggggggggcctttttttccccccccccccggctttggggggtggggcttgggggtcccaaacttttgggggttttttaaaaaaattttttggggggttttttttttttttttttatcccccgcttttttggccttccccctttggggggtttttggggtacctttggggggtgggccccccccccccgggggttcccccccagggtttaccccccccgggtgggggccctttttcccccgggcggggggttcggggggttttccctttccccgttttcccctggtttttttaaaaaaaggggggtttggtttta

SEQ ID NO: 557023 - DNA, 300 bp, Homo sapiens
ggggggggggggggccccaaaaggggccctggtttcccccctttttggcccccgggtttttttcccccccccctttagccccggggccccggggggttttccccctttgggtttttcccccccccccgggcccattttagcccggggggggggggggggggggggggccccttccccccccggggggcggggggtttttcctccccccttttggggggttttttttttttttttaaaaaggggttttccccccgggttttttttttttttttccccaaaagggggcccggggcccgggga

SEQ ID NO: 557024 - DNA, 270 bp, Homo sapiens
gggaagctcggacactctcgccgagctttccgtgcacctcgcgatgtctgcagtatcctccgcttcctctcctaggcgacgagacccatgtgcgctagaagttccaccgtgtctttatctctctacaggatccgatgcctgggtagatcgtttggactctcgcgcggaatccacggttgttcgatgcgttcgatctcttcatctcccaaacggtctctctccaggagctgctcgtgcccgagctggtgcttcgcacgtggtgatctactc

SEQ ID NO: 557025 - DNA, 1120 bp, Homo sapiens
  misc_feature (29)..(29): n is a, c, g, or t
  misc_feature (59)..(59): n is a, c, g, or t
  misc_feature (62)..(62): n is a, c, g, or t
  misc_feature (66)..(66): n is a, c, g, or t
  misc_feature (78)..(78): n is a, c, g, or t
  misc_feature (134)..(134): n is a, c, g, or t
  misc_feature (148)..(148): n is a, c, g, or t
  misc_feature (151)..(152): n is a, c, g, or t
  misc_feature (193)..(193): n is a, c, g, or t
  misc_feature (195)..(197): n is a, c, g, or t
  misc_feature (207)..(208): n is a, c, g, or t
  misc_feature (213)..(213): n is a, c, g, or t
  misc_feature (215)..(216): n is a, c, g, or t
  misc_feature (225)..(225): n is a, c, g, or t
  misc_feature (227)..(227): n is a, c, g, or t
  misc_feature (247)..(247): n is a, c, g, or t
  misc_feature (256)..(256): n is a, c, g, or t
taaaaaagtaagcctttatttcctggttnggcaaataaaacgggctaagtgggtggctnttngggngattagtcaagnagaccaaatcccatatcctcgtccgactcctccgactcttcctgtggttcaacctnagcgggggctgcancanncaacaggagcagctggtgggtggcagcagccacgggggcangnnnccacaaaggnngagtngnntcagccaananggcctgaccttttcagcaangtggggaangtggtaatccggctccaggagacaaggccaggacctcgttggatcacccgtgtgactgattagaactggggtacgtgatgcaacagctggggatagccaatcttgcagaaccgacccgtggcaacctttgcggacaccctccaggaagcgaaaatgcaaagttacctcgtgggatcatcaagcacttcagggtggcaacactgctgccatggtcgaacacctgctggcatgaccagcccaaaggacaacagggggacgcatcgttcgagcagtgtcagccacgtggctcgactggctcccacttggcctccagacttgatcagctgcccatcaaccaggatccacacggtgccctggagatcccagcggtgataccctaaagcctggaaaaacggaggctcacccgggctcgagaacaagtgtgcaggcctggccagatagatccccatggggcaatggcccacgacgcacacacgctggcacttatggccaccacaatgtcccgattccggaggccccctgccacaccaaaagcccactatcccccgagatatgagcacagcttaccagaaacgggtcggtccaccagggcccccggaagtgcgtaccccaaagggtttcgccctaaaacccagccctcccgagagacaaaggcactccgcctctcggtgagaccccactgtggcccccacgaaccgggagaccccaccgcggaccacgcaccacaccaacacgcgccccccgacaccagcaacagcgatcgcccgcaacaatccaccaggaaaacccctcgcgcagaaagaagccaccccacggacacgcagaataccgaccaccgcgcaccacacgcacgcacacacacaa

SEQ ID NO: 557026 - DNA, 412 bp, Homo sapiens
  misc_feature (20)..(20): n is a, c, g, or t
  misc_feature (53)..(53): n is a, c, g, or t
  misc_feature (108)..(108): n is a, c, g, or t
gggagagctagataggggcntaaatcaatcgctgctacttgataacttgaagnccatcttctgttctgacttccatagatcaacttatatattgtctaagaaattgtncattgtataatttgaaacgacatgcagtgaaaagtaagaacaaaactatttgttttatctgtgtgtgcatgtgtgtatagtgttaaaagttgtaatgtcaacaggtcatggtggcacgcacctctactcccacctactcaggaggctaaggcaggaagactgctgcgcccaggagtttgaggccacagtgagctacaattgtgacactgtactctagcctggacaagagatctcatctctaaaaattaaagaaaaaaaaaaaagttgtaatgtcttcatatttaaaattttcttagaaatttcc

SEQ ID NO: 557027 - DNA, 384 bp, Homo sapiens
cggcggcctcctcaccagccaaggaagaagaaatcaggacaaagacgcataacagagggaagaccatgggaagacacagtagatggccaagaagagacccctcagaagaaatcaatcttggtggcgcgtggtgcttcacgcctgtaataccagcactgtgggaggttgaggtgggcagatcgcctgagcctaggagttcgagaccagcctgggcaacatggtgaaattccatctctacaaaaaaattagccgggtgtggtgttgagtatctgtagtcccagctacttgggaggctggggtgggaggactgcttgagtccagcaggttgaggctgcagtgagctgagattgagctactgcactccagcctgggcatagagtaatc

SEQ ID NO: 557028 - DNA, 172 bp, Homo sapiens
tccccctactggtggggtgtgtgtggacactgcaacaacctgcctttgtcagcactccaatactattttatctgttaatctcaccaggctcgggctgcaaactcgacggtgagctccgtgccaagtgtgtaggcaatgtatggcgccagtaccaggctacaggctttctttg

SEQ ID NO: 557029 - DNA, 1423 bp, Homo sapiens
  misc_feature (111)..(111): n is a, c, g, or t
  misc_feature (181)..(181): n is a, c, g, or t
atctgtaggacgtgctcaagagggaatactagaggattatcgtatataaattcagagatgatactgttcgaaggatttgattggagagaacttggtagacaaatgcatggntgacgcaatgagtcgcatgagaacttgcggaaagacatgctagcaaggaatagtgcatggaggtatcggngtaggaaatggtattaggggagtagagaggcattgtaggagtaggataaccttgggataagagataatatcctatgttaggattcaactctatggatttacaaatctatttattgtatatcgaatcctgtcgatacttgcattgggatctctgtaattagttaggtcgtccctatcacttagttatagagtttgtaaaccgttgtcatagaattgacacacttgttgatacagacacgatacacttttagaacacaaatgggttccacgagctatgaggactatatctggctcatcgacataggggggtgctctattgccgagcaccaataacatgtgctctagggggtgcaatccatctattatttttgcgggccacggttctactataggtatcctagaaatgggttacacaccaagaaatgtacgtagtatctaatctagaaagagttttgggcaagtaatttggaggaggatatttgcacaagggagatggcgaaacaaaaaaaacgacatggtggggacggcatattaaatatctcaccttagtgggttcttttagaccatattttaacgttggggaacttattggcaacagttattatactaaaggttggtacacgaacgggaccatttacaacgcgaatctataaggagtggtccaacagaccacccgcgcaacaattattggtggttattcccaaaggcaacacccttcaaatctgcagggggaaaaaacacttctccccataatttttcacaataaaggcacacctctttccccctacagttggtaagattaaagccaacactttggtcctctttagcagcggggggaacatattcaccccattggggaaagtgtggccttagaattccgtgattagacacaatgcccggcgaataggcattaggagatgggagtgtggtaaaaacccccatataaacgcgcttggtggagcggacaggggttaaagccccctagggatcttccgcgtgacccaccgcgaatataagaccaaaacacggttggtgaggtatccacgctttcctgggcccatataacgacacaagtgtgggagcaggacggaactacttctcggcagaatatggttgcccaccactgttgtcctcggcgagagggtatcatcacaaagcagtttattcgcgcgctttacacccctcaagttttggggtgtcgtccccccacattttgtggcataaccacaacagttccacttgg

SEQ ID NO: 557030 - DNA, 436 bp, Homo sapiens
  misc_feature (17)..(17): n is a, c, g, or t
  misc_feature (126)..(126): n is a, c, g, or t
  misc_feature (129)..(129): n is a, c, g, or t
  misc_feature (182)..(182): n is a, c, g, or t
  misc_feature (195)..(195): n is a, c, g, or t
  misc_feature (199)..(200): n is a, c, g, or t
  misc_feature (257)..(257): n is a, c, g, or t
  misc_feature (284)..(284): n is a, c, g, or t
  misc_feature (326)..(326): n is a, c, g, or t
  misc_feature (331)..(331): n is a, c, g, or t
  misc_feature (335)..(335): n is a, c, g, or t
  misc_feature (373)..(373): n is a, c, g, or t
  misc_feature (391)..(391): n is a, c, g, or t
  misc_feature (425)..(425): n is a, c, g, or t
gtatgtttcgaaggggntttggttctttttgcttctgttttcttaaacatgttttcccctcccccttgggccttttggaagctggtcagctagcaggttttttgggatgtcgggagacctaaatgnccntatcgggggcaatactagctaaggtaaagctagaaacctcccctgtccctttnctgagatttttgngganncttttcatattgccttaatgtagcagtaatgggtttatgcctttgtttctttgcccngcccttttgtccaatattaaaactctncttttttatggcccatattagcatataagcctttattcccanagggntttnttttttcccttgtaaaaaaataatgtttccccgtaaanaactctgttatatcctanagggctctgttttttatattcgggataataaagnctttaaagcca

SEQ ID NO: 557031 - DNA, 130 bp, Homo sapiens
actgccaccggagaagggagggttcgatccttggcctcgctcagtgggttaaagatccggctctgccgtgagctgtggtggaagtcgcagacgcggctcggatccacactgccttctccggtggcgtggt

SEQ ID NO: 557032 - DNA, 282 bp, Homo sapiens
acacatctgtactcccttctcacatcctcctcccaggcaacccaggtaaatcaggctgggcaggtgaggttgaggggactgagcttcaggcaggggccataataataatgatgatggcagaagtgtgaggctgtaggacacacgggtcagtgctggagcagccctgcagggggaggggcaagggagggctctggcacttgggaccctggcgctgtcactgttccccacacttggacttctccatgtgcacggtcatggtgcggaagcagagatgccttccct

SEQ ID NO: 557033 - DNA, 350 bp, Homo sapiens
ctgtatttcagactgtgcaacacgagcgaaactccatatcaaaaaaaaaaaaaaaagtgtaatctttaaattgtgcatctatatcctatgacttcaaattttatttatcactctccttaaaggctgaagaaaatgattaatttactatagctccaaagacaacacagtcccactgtcataacatttagtatgaagtgccactctcctgtttgaattaagaacaggccgtatcaaactggcccggaatctgattgggttcctgggctcaaaataaccgtgggtttgtgaatacacacttagacacacaatttctctgatgtgtgtatctatcttacacagcgctttaccgg

SEQ ID NO: 557034 - DNA, 221 bp, Homo sapiens
  misc_feature (109)..(109): n is a, c, g, or t
gggttagaaatgagatggaaggaagtggaaggcagagggcatggcggagttgtgagaggctacagcgtggacgcgagcggggcgggacgggtgtgggaggtggtctcanctcttgggaaaactgcttgggaccggtcgtcgcgcctgaacggtggttctgtaccctgctccgaggtgtgcttagcgattggcctggaaatcccggcggcgccaggccattc

SEQ ID NO: 557035 - DNA, 267 bp, Homo sapiens
gtctccaaaatgggatccatgatggttacagatgaatgaccactcactgctttatattaaccatgagatagcagagaatacgatggcacttatactgatgggcagatgaccagatgaacatcatcatcccaagaatatggaaccaacgtgctggcatcaatagattgttcccatgtgatgtaggcattcctgccatccatagggcacattggcttcagcacacaggtaggccaaacaaggacatactagcccagtccaaaccagtac

SEQ ID NO: 557036 - DNA, 362 bp, Homo sapiens
acgaggaggacaggggcggggggcggcatgattgtaacctggattgactccgagaacccagatggttcacatattctgaccagctcgcctgcatggtggattcccttgtgccactgcacatcatgctcgagtgacactatcgtctgagccgccgtccagcctgttgacactgtctactattaaatgaatcccatatatggactatgctaccgtgactgatatagcattaatcactacgctcgtctgtaccatggactatgtcagctgcatggcatggtcgtctgatcaccatcgcattgcagcctttactcactatgctacttactgaggtctactcttgcagtacacattagtgcttcagg

SEQ ID NO: 557037 - DNA, 437 bp, Homo sapiens
cgagagagtgggagaactcgcggaaggtccccgttcccacagcagagtctcatgaccccacagacttcagagaagcttcttttccccggcaagcagaagatcttgcaaggctgccctctttctgacccacggagctgtgggatagcacatgggagacaccccagtggtgagggcacctatggcagtagtggacatagacgcagaagcgatggaagcgacgtctctctgcccccttctctcctctgttcctgtaatgagcacatactagttggtgattcttcttatatctgtaaagttccaagtgaatatactcctgagtcacgtttcatatggtgatgcactcgtaacatggctaatctaagttggaatctctcccctaatatgttcttcccagtactactatgtataaataaccgactctgacaaaataataaaac

SEQ ID NO: 557038 - DNA, 410 bp, Homo sapiens
gaccgattgatgcccaacgttggctgacatatttagtctgtcaggccaggagattttgtcgcctgcttctggagcacattaagaggatgctagaaaaatcaagcttgtccgcttctgcatgcccagcttgctagatgcaccgaatttaagagaatcggggacttcaagttaactacgtagatgtgtagttccaaatgcctctagcctcgacatgaatcccacctttgcccccttcctgttagggctgtttaaaagaggtggctgcatgtcactattacccccctccccgaatgagaaaaggatcaggtttccggaaactggatcagcttctcctcagttaaagaggaaacgggaagtgggcagctggccttctgaccaggcacccgtttgaaccggcggtgacggcgtga

SEQ ID NO: 557039 - DNA, 644 bp, Homo sapiens
aaaaatgaaaataaaattagccgagcgtgatgcctcagcctctctagaagctagaggattgcttgagtccaggagttcaagattacagtgagctatggtcacaccactgcactccagcctgggtgatggagtgagactgtctcaataaaaagacaaaaaggctggccaggggcagtggttcatgcctgtaaacccagcactttgggaggcaaaggcaggaggattgcttaagcccaggaatttgagatcagcctggacaacatggtcaaggaagcttttcctgatccactaactaaggacaatcaaacccttcatgatctagaatctggagactgtgtcttctgggaatagtatcagagaaagactgcccttactgcccacatgtagcaaaactttgagacgttgaattatgggtccataatctcacaactcagaggggcacctctagactcttggaactgtatatctattggagactttaaggtaaagctgaacagagagacgtttttctccagaagcagacagcaccatagtcatggacagctttcccaagatcacagatcaagacttctctgccgtcatgagactcataacctcttaattttttcttgcttatgcttctgtgaacaaaaaaaagaaaaaag

SEQ ID NO: 557040 - DNA, 317 bp, Homo sapiens
tacggagtaggtgtcatttcatcatgcccatttcatggattaagaatggaggcacagggtgtttaagtaccttgcccaaggtcacagttggtgagagcggagccaggattcagccccaggccgtctggctccaagtccacgtgcttaaccaccatgccacattgcctctcctcatcccacagaagcaacaatctgtccttttaggggcagccgcaggagaaggggtcccagcccttccctggaggagtacgggggagcagctggacctcaggtgacccatcctcagcacaaagcctgtcttcagtgccctctgtctg

SEQ ID NO: 557041 - DNA, 661 bp, Homo sapiens
gatcagctcgtccatatggtggacgagtatggtagcttggtgttttggaaagtgctaacaagcccataatctctaaatggactgtggtgtaatgacggaaatataaacagcataaagtattatagaaataacactatctaaatgggatagtcaaagcttttaagacagatgtcagcaattctgtaacctgggcaatcattacatacaagtatactttatatgctggccagactattaagataattcagtcttagtgtagccattcttcatgtatctaatgtacattaacacatgacgggggaatatccaagatatctagaagctagacccaaaacagtcttaagctactctgagacaaataccacaaacagaagtgcccagaatttctagtgatgtctcggcctaatgaaagacctatacagttaattgaacggtctctaagcccttctcagaaggctgattttacccagattaaatccaaatccaatatggtgtgactctttatatcagcccagaatttagagtaatggattggctttggtcagtaacagagttagcagggtgagtcagcagcctctgaacccctcaggtaggaagactgtcgaaggtacttaaaaaagcctttattactagaagactgaatgagattaacttaaaaaaa

SEQ ID NO: 557042 - DNA, 408 bp, Homo sapiens
  misc_feature (302)..(302): n is a, c, g, or t
  misc_feature (305)..(305): n is a, c, g, or t
acatacccatcatcccctggctaattatatttattttttgtagagacagcgtctcactaatgttgcccaggtcagtctcaaactcccagcctcaagtgattctcctgccttggcatcccaaagcactagcattacgagcatgagtctccatgctcagccctatttagatgtctttatcttggtttatcaatgctgtctcctttgcctcctagtactcgttcttacgtctctttatgctggaacaaattcttcctcccatgagggctcgcagaacaccaaatgctgagaactgtttctccatnctntctcgctttggactttgaagactgagtcctcattaattgtactcctatagctctagatatctgccttttaaattgttaattacttgaaatttaaagaggtttc

SEQ ID NO: 557043 - DNA, 105 bp, Homo sapiens
gttacagcagtttgcagataatgatgtgtcaagattcaaggcagttaaggctcgttttgcaaaccagtatatccaggacaaactctacaaatgagatgtggaagg

SEQ ID NO: 557044 - DNA, 286 bp, Homo sapiens
cgtgaacgcagcctgctgagtagctgggactacaggcacacactgccacgcccagtttattttttgcattttagtagagacggggtttcaccgtgttgcccaggctgttctaaaactcctgaactcaggtaatctgcctgcctcggcctccccaagtgctaggattacaggtgtgagccaccacgcccggcctttttttttttgtgctttttggagagggggtttcactctctttccccaggttgaagtgcatcggcggggcctaagttaactgaaacctgtgcct

SEQ ID NO: 557045 - DNA, 337 bp, Homo sapiens
catgtacattttagaataggtttttttaattcatgaaaaatgagattgctattttgataggagtggtggtgaatctatagattgctttgggaagtatggccatttttatgatattgcttcatccaatccatgagcaggagtgtttttccatttgttgtgttatctgtgatttctttcagcaatgttttgtagttatcctcctagagatctttcaactccttggttagatgtattcctaggtactgtgtgtgtgtgtatatgtgtgtgtgtgtgtgtgtgtgtgttttgtttcagagacagggtctcactatgttgcccaggctggcgtcaaactcct

SEQ ID NO: 557046 - DNA, 176 bp, Homo sapiens
  misc_feature (161)..(161): n is a, c, g, or t
gtggctgtagcacacacgtcatgaaccagccaggcataggccactgcgagatgtgatgctcccagactatgggctgctctgctgtatgactgggccagccagtccttctgaagccagaagcgtgctgagtgtgttcctgtaactgccccaaagtgggcagncctggaggaacaagg

SEQ ID NO: 557047 - DNA, 538 bp, Homo sapiens
  misc_feature (456)..(456): n is a, c, g, or t
  misc_feature (467)..(467): n is a, c, g, or t
agaattaaatgatggtcactccattcctgtcctgggctttggcacctatgcaactgaagagcatctcaagaaaaagtctatggagtccaccaaaatagctatagatgttgggttctgccatattgattgttctcacttgtaccagaatgaagaagagataggccaggccattctaagcaagattgaagatggcactgtgaaaagggaagatatattctatacttcgaagctttggtcaacttcccatcgtccagagttggtcagacccagcttggaaaattccctgaggaaacttaatttggactatgtagacctctatctcattcatttcccagtgtctctgaagccagggaatgagcttttgcctaaagatgagcatggaaacttaatatttgacacagtggatctctgtgacacatgggaggccatggagaagtgtaaggatgcagggctggncaagtccatcnggggtgtctaactttaaccgtagacaactggagatgatcctgaacaagccagggctcaagtacaagcctgt

SEQ ID NO: 557048 - DNA, 325 bp, Homo sapiens
  misc_feature (8)..(8): n is a, c, g, or t
  misc_feature (10)..(12): n is a, c, g, or t
  misc_feature (31)..(31): n is a, c, g, or t
  misc_feature (240)..(240): n is a, c, g, or t
  misc_feature (259)..(259): n is a, c, g, or t
agctacangnnntggggattgtggatgtgtnttgacacctgggtccctgtcccccagtgatgacaaagagcaaaggcacctgctggcccacgctggacacacatgtgagaaagacatgcatctgtgaagtgctcagctgctgtggtgtggggctgtttgttacacagcccagccaagcccagcctgactgatacactccctcaagcatgaatagggctctgctctccaatgaggggagtngggcccagggctgtttctnaacgatgtccagaacaccttactcctaggtgccccagaagcaatgacaaggaaacaccacaggagg

SEQ ID NO: 557049 - DNA, 160 bp, Homo sapiens
  misc_feature (68)..(68): n is a, c, g, or t
ccggccacctcagacaacggcaaagacggcctggcctacttctgcccctgctcaagaatgagctgctnggtgccggcatcgagaaggtgcaggacccgcagactgaggaccgcagcttgcagccctcccacgccctgagaaagaaggggtctgtttcacg

SEQ ID NO: 557050 - DNA, 598 bp, Homo sapiens
ggggttaatgctcatcccgcgggtctcctcctgtgcggtcctgcagtactttgtccccgggtacgagggatcttctgcagaagatagcgctggaagctagagtgaggcctgagtacggccttggctacgtgatggctagagcaagttaagtgaaagcacagccctggatgcccaggctacagaagatcagatggagcttcgtggtcataagaggtggagggaagcaatgaatgcctggttgttcccagtagcccggatctgggtatctgagggctcccgcgagcgcttccgaggcttcgcggtagcgccggaggctgcgggcccccgcgatggcgcgtgagtcgggtcctgagatgctctgccgacagtggttgcatgcctgacgatgcccatgcatggctgccagttcctggaggctgcgtggtgctgggggctagttcctggcgcatcctgccggggattctgctagagctgggtgctgggatcgggatccagatggcggggcaggaaggtgcgggtgctagagggatgtttgtggatgagggcagctgggttagccggggaagcgtgttgcaggtgttgaccagggcaacaaccg

SEQ ID NO: 557051 - DNA, 697 bp, Homo sapiens
aggccccagacttaataccatgtcttcaaacaacgatgtggacaactgaagcagcaagagtgccctgcaatgtagatagtttatctcccttggtggacctatcagtgccacgtcgccagtttctatggcataggctgacaaaggtacgatgtgcaaaaccttggaaatccacagagcacacatatagggtctcagccttgacccgggaatgcctaatcacgcaagctgatcgcagtgcacagacacgtattctagtaccttcatcgatcgatccatacactggagactgggactccttcacactacttggacctgttatcgtgggtcttaccaaacacattcttggaaacagcgtgccttggcttaccttcgacagattaccctaagcccatactttctcagtgcatgggacgcaacgtggttggcttactgccaattccacacacgcacacacccgtgggtaggagccattccgactacagcatgtggccccgaccacttgaagctccaactactttaaagccttaactatagagcagagagcagagcttaacacgtggttagccccatgcaacacagcatcaataagctaaatcgacgaggcacaacaggtgataccatgatgagttagacgccacatacccacaccacccttagccaccagaacccggaacggcgctgggcgcacgcaatattt

SEQ ID NO: 557052 - DNA, 161 bp, Homo sapiens
gctcatagaggatctcaggattcgtagatccggttgggcgactcggagcagaaccacactccgagcagtacatgctatgacttcaccagtcaaagcgaactacatatactcaatttgatccaattaactttgaccaaatggaaacaatgtttacccctagg

SEQ ID NO: 557053 - DNA, 435 bp, Homo sapiens
tttcccccgacagtagaggactccccctcctgttgtcccaacacgattgctgtgactcaaactctccctaatgctgcttagtataaccgtctatgcatatgctaatgttagcttgcaaagaatatggacatttgctgtggatcacaatggattgcgggttatttattcaactgaagtccagcactggcaacatggtgattattatactcaatgacaccacacttcaggtgctaaacacttggtataccatgcagtataaaccatctgcttctaacgcctccatggtatgtgcggttctgtatgccacccgtactatgaacaccagaaacagacagagatttgttactattatgacacaaacacagggaaagagggcaaactagacattgtaatgcataagatgcaggaaaaagtgcagcacattaactataaccc

SEQ ID NO: 557054 - DNA, 155 bp, Homo sapiens
  misc_feature (155)..(155): n is a, c, g, or t
cggatccttcgtatatgtatcaaaacactgtactctaagctattgaataaaatatatcaatttaaaacttataataaaatatataggtcatatactttattatttcatgagtaaggcaaataatgttatgtggatatcatgttacatattacggn

SEQ ID NO: 557055 - DNA, 474 bp, Homo sapiens
ccacgcgtcgccccttgaagaggggaggggcctacgtggagccgcagcttgtcatgtaccatcaataaagtaccctgtgctcaaccaaaaaaaaaaaaaaaaaaaaaaaaaaaaaaaaaagacaaaaaaaaaaaaaaaaaaaaaaaaacaaaaaaaaaaaacaaaaaataaaaaaaaaaaagaaagaagaataaacatagacacacatacgaagagaaatagaggcggaggaggaggggccgcactattatggtctcaaccgggaacacgacctaatcccaaactccacgcaccatttttaggatgacaaagtagacacagatctcgatgtgcagtgtttataaaaaaacagacaggcacacaaggagaccagaacgatcattaacaccatgtaggctaggccgcagccacgacatactaccgcagacggacaccgacagtcagatagcgacacacaccatcacatccaagagt

SEQ ID NO: 557056 - DNA, 231 bp, Homo sapiens
  misc_feature (231)..(231): n is a, c, g, or t
gtgaagatcctggtgtcgccatgggccgccgccccgcccgttgttaccggtattgttagaacaaggcgtacccaaagtctcgcttctgccgaggtgttccttatgccaagattcgcatttttgaccctgggcggaaaaaggcaaaagtggataagtttccgctctgtgtgccacatagtgtcagatgagtatagagcagctgtgctctcaagcgctctgaggctgtcccgn

SEQ ID NO: 557057 - DNA, 1072 bp, Homo sapiens
  misc_feature (190)..(191): n is a, c, g, or t
  misc_feature (194)..(194): n is a, c, g, or t
  misc_feature (1037)..(1037): n is a, c, g, or t
  misc_feature (1039)..(1039): n is a, c, g, or t
  misc_feature (1049)..(1049): n is a, c, g, or t
agcggagtggctccagcaaccacgcggctggggtgcgccgggaagggagctggatgttttagcctcggggcgcacgctgcgggcccttcgtgttccggacgctaaacaccgagagcaccccgtctccggggcctccggagaacgctgtcccatgaacgtgcggggagcggcccccggcgtccgcgcgtcnncgngtccctggcaattcccgacttcccaacggcttcccgctggcagccccgaagccgcaccatgttccgcctctggttgctgctggccgggctctgcggcctcctggcgtcaagacccggttttcaaaattcacttctacagatcgtaattccagagaaaatccaaacaaatacaaatgacagttcagaaatagaatatgaacaaatatcctatattattccaatagatgagaaactgtacactgtgcaccttaaacaaagatattttttagcagataattttatgatctatttgtacaatcaaggatctatgaatacttattcttcagatattcagactcaatgctactatcaaggaaatattgaaggatatccagattccatggtcacactcagcacgtgctctggactaagaggaatactgcaatttgaaaatgtttcttatggaattgagcctctggaatctgcagttgaatttcagcatgttctttacaaattaaagaatgaagacaatgatattgcaatttttattgacagaagcctgaaagaacaaccaatggatgacaacatttttataagtgaaaaatcagaaccagctgttccagatttatttcctctttatctagaaatgcatattgtggtggacaaaactttgtatgattactggggctctgatagcatgatagtaacaaataaagtcatcgaaattgttggccttgcaaattcaatgttcacccaatttaaagttactattgtgctgtcatcattggagttatggtcagatgaaaataagattctacagtggtgaaggcagatgaatttttgcacaaattttagaatgggaanancttattttanctaaagggctgagattgggatat

SEQ ID NO: 557058 - DNA, 949 bp, Homo sapiens
  misc_feature (190)..(191): n is a, c, g, or t
  misc_feature (194)..(194): n is a, c, g, or t
  misc_feature (914)..(914): n is a, c, g, or t
  misc_feature (916)..(916): n is a, c, g, or t
  misc_feature (926)..(926): n is a, c, g, or t
agcggagtggctccagcaaccacgcggctggggtgcgccgggaagggagctggatgttttagcctcggggcgcacgctgcgggcccttcgtgttccggacgctaaacaccgagagcaccccgtctccggggcctccggagaacgctgtcccatgaacgtgcggggagcggcccccggcgtccgcgcgtcnncgngtccctggcaattcccgacttcccaacggcttcccgctggcagccccgaagccgcaccatgttccgcctctggttgctgctggccgggctctgcggcctcctggcgtcaagacccggttttcaaaattcacttctacagatcgtaattccagagaaaatccaaacaaatacaaatgacagttcagaaatagaatatgaacaaatatcctatattattccaatagatgagaaactgtacactgtgcaccttaaacaaagatattttttagcagataattttatgatctatttgtacaatcaaggatctatgaatacttattcttcagatattcagactcaatgctactatcaaggaaatattgaaggatatccagattccatggtcacactcagcacgtgctctggactaagaagcctgaaagaacaaccaatggatgacaacatttttataagtgaaaaatcagaaccagctgttccagatttatttcctctttatctagaaatgcatattgtggtggacaaaactttgtatgattactggggctctgatagcatgatagtaacaaataaagtcatcgaaattgttggccttgcaaattcaatgttcacccaatttaaagttactattgtgctgtcatcattggagttatggtcagatgaaaataagattctacagtggtgaaggcagatgaatttttgcacaaattttagaatgggaanancttattttanctaaagggctgagattgggatat

SEQ ID NO: 557059 - DNA, 1051 bp, Homo sapiens
cttcccacaacactttctcggccctatccggaatgccccgacgttactcggactaccccgactgcatacaccacatgaaacatcctactcatcctgtacggctcattcactttctctaacagcagtaactatcaactacattttcactgactcttgcacaacgcccttcgcccttcgacacgcgcaaacagctccctacatacgctacaagcaacccctcccatacacacccttgcgcagctgacctactcctgcgcactgccccccacacaccttcaccaccaccactctcgcacagcaacccccgctcctacactacaacactctagcaccaacacacacagcgacagcgaactcgacaccacccacacaagcctggctcctcaaccgccccaacccacccactgggcccctcccactgcacccttcccccgcaacaccacacccaccaccacaccccaccaccaccacaacccacacaacccccccccgcccccccccccccaccccccacaccaccccccccatccccaccacacccaccctatgaccctccccctccccaccacacacccaccccccctctactgcccccacaccacccccccccaacgcaaccccccccccccccccaccccaccccccctacacatccccacactacatcctacccatcctctccccccccccacaccccaccccttccacccaacccaccactctacaaccacacaactccctaacaacaccaccaccacacacctctccacccccaccgcccccaccccacccaccccccattccaactctcccccccacaccctatccacccccccccccccccccccccccccccccccccccccccccccccccccccggccacacccgcccccccgccgccactctccaccccctcctctacgccccacccccccccccaacacacccccaccccccccaaaccccccacccctccccccctccccccaccccaccccccccccaccccacacccccaccccccccacacaccccaccccaccccccc

SEQ ID NO: 557060 - DNA, 187 bp, Homo sapiens
tgttccatctatcggctactacaggtgctcacccatgactagcgagccatggagagttcgccagaaggagcactatggagctgtttttgacttccatctatgcaaaatctttttgcagcctccttagacataatcttactgtcccccactgagtataatcgctccgtatccgcagatcacagaatcg

SEQ ID NO: 557061 - DNA, 487 bp, Homo sapiens
ctttctctgggtgaggcttggcaagagatctctctgctcaagcacagcagaatcatgccccttttccatgattgggaacttggtaccggttaagtatccctatccctgaaatctgaaacaccttgtggttcccaagcattttggataaggcaaattcaaactttcagtctcttttctgggggaaaaaaataataaacctagcctagccaggcgtggtggctcatgcttgtaatcccagcacttcaggaggctgagatgggtggatcacctgaggtcaggagttcaagaccagcctggccaacatgtggaaacctcgcctcaactaaaaatagaaaaaaattagttgggcatggtggtgggcacctgtaatcccagctacttcaggaggctgaggcaggagaattacttgaacccaggaggcggaggttgcagtgagccgagcttgtgccattgcactccagcctgggcgacaagagcaaaactcttc

SEQ ID NO: 557062 - DNA, 199 bp, Homo sapiens
  misc_feature (13)..(13): n is a, c, g, or t
  misc_feature (18)..(18): n is a, c, g, or t
  misc_feature (46)..(47): n is a, c, g, or t
gtacaggtgttgnccccntttcgtcattaaggtttgactatattanncgtgaggcaccaatgcgcccgagcattatggcacgtaccaccgctgcaatacccacaccatatgcgcctgtcatcttacggcattcgccatcgtgttcgacaacagatttgggggagacaataaaaagaaatgtaaggaatctgtggaaaaa

SEQ ID NO: 557063 - DNA, 1295 bp, Homo sapiens
  misc_feature (312)..(312): n is a, c, g, or t
ttggtatatttgttgttgtttgatacatccgcctgttcacatcagccttcctgtcgaccccgcccagggcacctgggcacagatgtgccaggcaggcgcatgccattatacccttgcggggcgtcccacttgggccaatctctcctgcgttgtaccctttctgggcccgccggtgttcccaaaagagattgaatgttaccaggcacctataccacttgctaaggtcctcttctacgagcgggttggcccctcggggttattctatatcaacgggggatggggctaaattggccaactagccgcagctcgacncacaaacactccgttcaaagtatggtgttccgcaagtgtcctataacctagggttgggaaacgtatgctgcatgtgattttgctgaccgcgatgtgcattctgcttctctagggggcattggatttccgtcgatagttccgtccccgtggaacctagcatcgcttgaagcgcgcgtgtcttgtctagacttgtctgggcggggtctctgacccctatgtaggttgccttcgagagaagtgcattaagtggcactgttagtgcccatgctggcaccacgggcccatgaaaactctcttgcgattatccagtgaaatgtattcatacctcatgtccactattaagctgtaacagtacgtaataattacacacttgtgccaagggcgggaattgagacagacatctgtagcatggtattttcatcgatctgaggccagcaccatgaatatcctgacaaaggagaattggttagaggcttaccttaatgggcagcacagggcacactgttgagtcacactcagtatgacacagaggtgtaaccctctaggaccagcggtgcaatcatcaatggacaagtatgccgagaaccaacattagctgtcatgcttgctgcaccttacataggtaagagcggaaatactctccttagtcactaggacatgaaagccggtttcaagaacacacatatggagaacacataagaaggctgaggcacagatgaagctcacggccgtgtaatcccagcacgtttgggacggccgaggcacggcagattcacactgaaagtcagacatttgggaccggccataggaccaggatggtgaaactctgtctctagctaaagatacagaaattggctgggcgtagtggtgcgtgcctgtggtcccagctatttgggtggcctgaggcaggagaatcgctttgaacccagggtggtggacggtggtcagtgagctcgagcattagcaccattacactcagcctg

SEQ ID NO: 557064 - DNA, 1239 bp, Homo sapiens
  misc_feature (112)..(112): n is a, c, g, or t
  misc_feature (311)..(311): n is a, c, g, or t
  misc_feature (314)..(314): n is a, c, g, or t
  misc_feature (318)..(319): n is a, c, g, or t
  misc_feature (322)..(323): n is a, c, g, or t
ctgaattcgagctcgtgaccccacaagacctcccctgttgtaagcgtgtgttgtggtgctttattggacaacctcccgtggcggtctttttactctaaaggtcttttttttnttagttaaacaatcattttattgcttgagtacacagacaaatttatgcgaccagggcagaggctgtagatgattcatatttccaattgggagggaggactcgcttggtcttataatatcgagccaaacgggtgaatccggctctctattagaatcagacggaatttagcatccttatcctttctgttcctctcaagaantgntttnnaannagcaagcggcttttcttaattaaagtgggtagagaatcttcgaggaagaactcagggagcaagtcccttagaacttaagaaattcttaaaattttatgtggcctggtcacaaaagcgtactgtgtgtgcaacaccagtgtgtgaatctctcgaggattacaccgatcgtggtgaaggagttaagggcccttctgggccagttgggtaaatcgtggctccttcagcgttcgctcagagtttcaacttcaaccaagtgtggggacgcgtgggttcgaaaaacaaaaaacaaaaaaaaaaaaaaaaaaaagaaaaaaaaaaaaacaaagacaaaaaaaacaaacaaaaaaagaaggcggggcgcgaccccaaaagaactcacctcccgggggaggccacccaacttcaagagcacaccagcgtgttgtagcacaaacgcagagctcaccccaatgggcgccacgtataaataaaaacaccgccaacacgcgacacgcagaaaaaaacacacaccccgcgaacggcaagaacaacacgcaacagagagaagaccattagagagaaacaccccaacaaccagggaggggggagacaaatcgtgcgacacaacaccccacgaaaaaaatccaagctcctgatgagaggagacacctacacacactgcagcagggggttgcatagatgggtgcacaacaacagcaagcgactatcatgcagagggcgagagaaaagagattttcaccagcgagggagtatagttgagccaatatccgcggagggatgaccgtcagacgatcgacaccaagcccagcacacaacagagcgatgcgacaggaacgaaaaacacaggggcacgtagcggccacagaacgacgaagacgcagatgaagcggcacgacagcaaacacacaaggctcac

SEQ ID NO: 557065 - DNA, 162 bp, Homo sapiens
tattattaatatcagtgatttgaagaagccttcgcgtcgacgcgaaaagtcctaatagtagaaggaaccctccataaagcctggagtgactatatggatgcccccacaccgctaaccgtcatctgagagaacgcaacttacggcggtgatctctcgtacgat

SEQ ID NO: 557066 - DNA, 294 bp, Homo sapiens
acaggtgagtgcatggtgtgatctcatctcgctgcagcccccgcgtcctggattcaagcgattatcctgcctccgcctcgagagtagctgggattacaggcatgtgccaccatgcctggctaattttgtatttttagtagagacaggatttctccatgttggtcaggctggtctcgaactcctgacttcaggtgatccgcctgcctcggcctcccaaagtgctgggatgaaaggcatgagccactgcgcccggcccccatgcatatttttatagttgacatcataatgtttata

SEQ ID NO: 557067 - DNA, 951 bp, Homo sapiens
  misc_feature (7)..(7): n is a, c, g, or t
tcacccncccagatgtcggtatagacaagattagagagggctcccgctggctgtgtttctcctcattgacgggtggtccacaggaattggggatcctttctctatggcgccccccaatatggcccggtcaccctacacagttttgggctggcactgtggcatgtaatgttccgcttccaggagtacagggagttttccctggtaatcccgcaagtttgctttccttggcacgtttacgggccccctgcgaagtgtcggcgtcctttgcgaccgctggtaacaagtccgtccaggggccactctgagattcatggcccctcattgcgcggagaatacaaaacagtgggaatctctgggatccgcaattaataaccatcttttctcgggcacaaaggccctttccaagcatctcttccgcggtcctcttctcctgcccgctttgagcgggacgcaacgttgatgtcgttggcctctgtaacatcacccgggcctaccctacgtgcctcaacccaaggcaacctcgacacgggggtgtttttcacacccggagagccatggaaagcaacgtagtttccacagactctccccagagcctcttccttggtggggaagccctcctgtactccccgagaataagcatcgtgtgaataggcgatgtggtgcaccagttaacccaaaagagagggagatatgatagacgaccggcgtatcagggcctcatttattcccgtgcagtgcccccccttgggagaaaactatgttctcaatgtgccacggagaaatgatgtcaacttttaaaataacgggcacacgggcccgcagcaacattgttgagatccgcagaagcacccaagcaaactatgggaggacgacgacagttctatatatttaaacactgtggggcccctctttttcaaaacaacccttaaattctgggggaaaatcataaca

SEQ ID NO: 557068 - DNA, 190 bp, Homo sapiens
tcggtgagagggaaaggaggcaggatggcaaaacaggtgctacttgtctgcctgtcgtgccttgttgctgataggctagtgataagtgtaaaggtagggatttgctggataaaattctccactcccttctccccagccaaaaattccaaactttcctcctagaagcagagaagccccagacagaatagct

SEQ ID NO: 557069 - DNA, 1524 bp, Homo sapiens
gtacctcgagtcgtcgatgactgccatggcccagtggtaggagatgaagtaaatggtgctctcggacgcgcctgatggtctgagtacatcccagcttgctggacggattgtcatcaactacgaggttcctccggacaatgggtcaaactctttcgctgacagcgcgcgttggagccagttgatgtgcatcgcggtcgtggctcgacagtggctatctagcgcatagctccattgtgtggtgtcgcgccttgaatgagaagtctcccgtgacgcttgtcgtggaatcattgcatcgcgtgctatccattggagtcgcagctcctctcgacctctcagccctgagcactccattcaatggatgcgcctcgagggtgtgtgcgcggtgctgcgattgtgcgatttgctgggggtacgtgtggttgcacgagcattgaaggtgattggggttgggaactgagtgactgggagcacgctcggggtacttgtcaagaggctttcgccttgtggatgggctgtaccgactttgtgtatggcctaactgggtggtgtcctcttgagtccccctggtgggttttgacctaggaatacaccagcaccccaagtcgacggcctacgattaatagtatgacagcattcaaacatgacccacatgggcatggcgcgccttcctagccctttgaaagattcaccagttcaacatggacgggtggcgccaatgcggacgaagttgggaaaccgtgtcgtgtagggggtgcattgggggcccgttgcaaaacacacacccttcttttccgagggccttccaggctggtttatgggaccgggaccggggatggtgtatgcattggccaaagcggggggcttgtgaaagcgcttgggagttggcaccaatggcgaattcaaattgaaaccttacactgggtacacccgggcgccgaaccttattcttttttggacggaatcgaaatatagccgttccccaaggccctggaggaacaccattggttgccagtgcccaggtggttgaattggcagctagccaaaatgcaaggtgcatgaaaggtgacactggtaagtgggccaaattctgaccccggattttcccaagagcaagggtggacaaggaatggggaggctggggtaagtgaaggcacgacgtggagaggtgcgcccaagggtggtgccccaaagacccatgagaagccagtaccgagagaacttggagcgagaaaaacgcatctctataaaaggacgtgacagatacagcagccgcaacaaaacttgtttggcggcaaagtgtacccaagaagagatgggaggcacgaaaaggacgacgttccagagcccacagcggagaccagaagaggcagggagaagagccatcgaaggtagcaagaagacaacactacgcacgggccaggatgatcaccagaaggaggacgatcaaaagcgaagagggagaacacagacgaagaggagccacgcacagctggcaaacaacaagcgacgagacaaacagaacca

SEQ ID NO: 557070 - DNA, 335 bp, Homo sapiens
agcacttttagagccaaaaaaactcaggcacaaagaagttaaataacttgccgggtgcggtggctcacccctgtaatcccagcactttgggaggccaaagcaggcggatcacctgaggtcaggagtttgagaccagccgggccaacatggtgcaactcgtctttactaaaaatacaaaaacaaaaattagccaggggtggtggtatgcacctgcagtcccagcaacatgggaggctgaacaggagaatcgcttgaacccgcgacagggaggttgtgatgagccagggtcatgccactgcactccagcctgggagacagagcaagactccatctca

SEQ ID NO: 557071 - DNA, 708 bp, Homo sapiens
tttgtgggcaaaggggggggtttaataaactttgggtagtgagcatggcccccaggcatcgggggggtctcgggtcccggtgacgcaagcggtaaaaccgggttcgcaatttagcgccgaggccgccgggggagaaagcccggagagcctggagggcgggggccacgggagccactttccggggggctggggggcgggaaaacccaaaattctccagagggagaccaacgcctaaccgggggcctatcacacggcaccggaggaaggggaatctggggtcagccctccctccaaagggagacagcaggggaccctcttttgggcataggcgctcggaggggaaggtatcttccgcccatattcaagatgggtgtgccgcaggtggcatttgggagacaccggtgtgggagtcctcggggtttgttggacgcgagggcccctggggagggggcgcggagtttcccctggcccaagtgttccgatcccaccaggactgggcagaactcgggtccagcgggagcttggccgcatcttgcgttgctgtgcccgcgctcttcgggcgaggagagtcccttcgtaagggggtccaaaactcgtcgactcatcctcgggagctcggggccatagcgctgtgctgcccagaggtgggggggcgcgagcgcgatcggtcccgagggggtggggttcctccccatcctttggtggacc

SEQ ID NO: 557072 - DNA, 978 bp, Homo sapiens
  misc_feature (688)..(688): n is a, c, g, or t
ctagttcctcctgtcttctgaccgccgcctcccgccgatcatgactgccgcaaggttcctagcacttgtcgaggatgtgcgtcagtcgagggcaaaccaaaatcaggcgcgcaacatgtttggagcatgtgcttagattcatgtgagaagtacatcgatgtaccaccaacatgcccaccttacacatggagaacagcatgaagcatgcatgcattggacaacggcgatcctccagatgtaacgtgacgaatcgaagagacccacctgtgcgggcaagatttctgtgacgccacgcgaccgccgtctctgtgtgatcgtggcagctcctgccaaccaatgtccactgcgcagatgtcggcgtaccgcgggcaccgttcgtgccacagaatcctttcgcggatccggaacctccattacgtctcatctgggctcaagagtggtgctgcattgctatcgcaactggggccctaggggcaacatatccacgagaacaccgcgactcgacgactaggcttggacgacagcctgcctgtccttggtttgctagcaagaaacattggaggagctgtagtagcctcgccggaccttgcacatgatagagtgttattcaccaagcatcacctctaattgctccgtagtggatagtagagtgacctgtggtctggaagatttgattaccccgatctantctaatacagtcatttgaatccgaggaaggaagtacccattgacaggtgaatcaatgaaaagccgtacatattgtggtggcctttccaccgcacaatgtagtcgcaatcatcgcgtcgttggcaagcccataggactggctctacctctcacgacgtgctagcaagctgcgtcacataatgagagcggactgagccccttacatggtttgaataaacggtcactcatgtagtaatattgaacatactgaacccctacgatgcggaccaactgccaccttagttggtggct

SEQ ID NO: 557073 - DNA, 841 bp, Homo sapiens
  misc_feature (237)..(237): n is a, c, g, or t
  misc_feature (579)..(579): n is a, c, g, or t
  misc_feature (585)..(585): n is a, c, g, or t
  misc_feature (617)..(617): n is a, c, g, or t
  misc_feature (776)..(776): n is a, c, g, or t
  misc_feature (782)..(782): n is a, c, g, or t
  misc_feature (841)..(841): n is a, c, g, or t
ggagcactgcctggctccacgtgcctcctggtctcagtatggcgctgtcctgggttcttacagtcctgagcctcctacctctgctggaagcccagatcccattgtgtgccaacctagtaccggtgcccatcaccaacgccaccctggaccagatcactggctaagtggttttatatcgcatcggcctttcgaaacgaggagtacaataaggtcggttcaggagatccaagcaaaccnttcttttacttcacccccgaacaagacagaggacacgatctttctcagagagtaccaggaacccgatcaggaccagtgcatctataacagccacctaacctgaatgtccagcgggcacaaatgggaccatctccagatacgtgggaggccaagagcatttcgctcacttgctgatcctcagggacaccaagacctacatgcttgcttttgacgtgaacgatgagaagaactgggggctgtctgtctatgctgacaagccaggagacgacccaaggagcaactgggagagttctacgaagctctcgactgcttgcgcattcccaagtcagatgtcctgtacanccgatnggaaacaggataagtgtgagccactggagaangcagcacgagaaggcagaggaaacaggaggaggggggaatcctagcaggacacagccttggattcaggacacgagcacttgggggccatcctgccctgcaacccgacatgtgtacctcagctttttgccctcacttgcatcagtaaagcttcctgggtnggacancttaacacaaaaaaaaacaccgaaaaacacaaagcaatctcacacaaacaacacaaaan

SEQ ID NO: 557074 - DNA, 353 bp, Homo sapiens
ctctgacgatcccttactcagtgatcctcaggaacggggaggttaggatagtggttaagagatcaaggctctgccgggcgtggtggctcatgcctgtaatcccagcacttcgggaggccaaggcgggtggatcacctgaggtcaggagttttgagaccagcctggccaacatggcgaaaccctgtctctactgaaaaaaaacacaaaaattagccgggtgcggtgcaggcgcttgtaatcccagctacttgggaggttgaggcaggagaatcgcttgaacccaggaagcagaggtagcagtgagctgagatcacgccactgcactccagcctgggaggcaaagactccatctc

SEQ ID NO: 557075 - DNA, 917 bp, Homo sapiens
  misc_feature (234)..(234): n is a, c, g, or t
  misc_feature (379)..(379): n is a, c, g, or t
  misc_feature (655)..(655): n is a, c, g, or t
  misc_feature (661)..(661): n is a, c, g, or t
  misc_feature (693)..(693): n is a, c, g, or t
  misc_feature (852)..(852): n is a, c, g, or t
  misc_feature (858)..(858): n is a, c, g, or t
  misc_feature (917)..(917): n is a, c, g, or t
ggagcactgcctggctccacgtgcctcctggtctcagtatggcgctgtcctgggttcttacagtcctgagcctcctacctctgctggaagcccagatcccattgtgtgccaacctagtaccggtgcccatcaccaacgccaccctggaccagatcactggctaagtggttttatatcgcatcggcctttcgaaacgaggagtacacatcaccttcggcttcacgtgcaggatcncaatgcatatccttacttcttacatttaccctccgcgaatcaagtacagagtgactacgtaatcttatctctacgagtaggtcaccagaacctcgtcccagaatccatgtgctctctcataatcctcctagtgtaccttgcatantgtccaagtcggcgtatgcaattgggtaccagtcatcccatgcatacagcagggcatggccagatgatacattgtctgctcacgctcgcatgttcgcttcagcggactaccgatagacgccttgatgttctggtttccgtaccttggcacggaatgagaagaactgggggctgtctgtctatgctgacaagccaggagacgacccaaggagcaactgggagagttctacgaagctctcgactgcttgcgcattcccaagtcagatgtcctgtacanccgatnggaaacaggataagtgtgagccactggagaangcagcacgagaaggcagaggaaacaggaggaggggggaatcctagcaggacacagccttggattcaggacacgagcacttgggggccatcctgccctgcaacccgacatgtgtacctcagctttttgccctcacttgcatcagtaaagcttcctgggtnggacancttaacacaaaaaaaaacaccgaaaaacacaaagcaatctcacacaaacaacacaaaan

SEQ ID NO: 557076 - DNA, 107 bp, Homo sapiens
ggcattttccttccacaggataatctgcaaagatctcaggatgtgctttccaaaagtatagaccgcagaaagatctctcgtctctaggactggcgaggctaagggat

SEQ ID NO: 557077 - DNA, 437 bp, Homo sapiens
agaggtccacggtcggtgatggtgtgtggtggtgatgctgtggacatatgtcgacatatatcatccatagtctcccagagcccgtcggtgatcagagcctgagacctgtgcttatgagtagcatcattcccctgaatatcagtctgggctcagagtgtgacaagcttccagcatccattcgattatctactgtggcaagattcagtgttaaaaccaggtctttcctgtccgctgcttgtccatttctttctgacgtgcctgggaggtcccccaggcaaatgcctgcttgactctctaactttctattccgaagatctgtaccacaactgcttttgggaggattatgaccatgatcatcgtcttcatcttcctctttgagggcttcaatatctgcaatgtcttctgactgtacctcactgccagggctcccagctgag

SEQ ID NO: 557078 - DNA, 589 bp, Homo sapiens
caataattagctgttatcagtattcgggtcgtgggcaagttgtacagattggcatgatcccccgggtttagactcgccaattcaggattagacgctttggcctaaccttgtggtcctcatgtgcctgtgcagcacatcaagacctgcataatcttggggtagcccatgccaggaactatagtgtaagaaaatgcggtctggtgcactatctctacgaattgatgcacttcggtcagcaatggtaaacatggagtcatgatggatgtacagacctggggacactacttttgaattaggcgttcgagattaccttagtcgtgtagtacgacgatagagctaggcagtatggttggttccatgaggcagattttattgcttggtatggagaatggtgtctagatgtaggttggcgtgaaaggcaaaggactaggtggtgatgttccgtttgaatatgtgagatacaactgtaccatctgaagtagaattgacatatgctgcatccgtctcatgacatataagggtccgtaaacgagtactggtcattctgatctaccccgcagatgagcctgtgccgggacctgcgtgcagg

SEQ ID NO: 557079 - DNA, 410 bp, Homo sapiens
ttagggcatgagtcaccagcgagcctcagttttccctactgggatgcttccgaaaggccagtgctgtgcagtgggcgagacacttcagggagcggggggctccaaggacagagcttttaaagcagcagcagaagcctgggatgtggaagatctctgtctactctcctattcctgatgggagcagtcgggcaaagcacaccgctcttgactctgctctacaggccattcacataacagcaaattgctgggtttccttcatgtccctattaggaaagcaaaacataccacaaagtataccctttctcactaaccccctgcagtggaccttaaaatgacctgaaggactgaaaaggtcatagaaaaaacatggtgcttctaggtaatttctgattccttgaagtcagtcagtc

SEQ ID NO: 557080 - DNA, 289 bp, Homo sapiens
ggggggggggggggaggggggcctggtttcccttttccccgcccccaaggtggttaagggttttgttttttccccccaaagggggggggggaacccccccggttttggggaaggcccctgggaaaaaaggttggttttttttttttggggggatttttccttttccccgggggggctttttccctttttgccccggttccctttccccccggggggggggggttttttgccttccccccccctttggggccggggtgtttttttttggtaactggaaatttttggttta

SEQ ID NO: 557081 - DNA, 413 bp, Homo sapiens
ttctttgtaagctgagtatgtatgtcacctcaggacctctgtgacaattgtgttaactgtacaaattgattgttgcacatgtatttgtccactatgaactcgaggcatcttgaaaaagaacagaatcgcatagttcttcaggcaccaatgataggcacccatagggtctaactgcttgcagggttggcaaaaacggagccacatatgtcttgttgcacagagcctataaacggttgcgcaagtaggggatatattctttcattctttgcctagcagggaatatcaacaattaatatcctgagaaagtatcgcattggtgggggaggtctacaaatggttgctctcagagtgtctgtgttatgcatttgagctacgctctcacatacgctctgatcgcatacagtaccgtctct

SEQ ID NO: 557082 - DNA, 1300 bp, Homo sapiens
ccgccgggagaaccagtgtcatcggtcggttcccgtgaaaacaaaaacaatcggccgctgccgtcgctagtgcacccgaacgtcgcgagcggggcctggtgtgactgctgtgggccgagttgcagctgatgctgaactgtggatgcatgctgtgctgactctgccatgtggtgtgcatagtggctgcctatgggtgcatggctgtgtgcttcctgtgctttgctgctgtggtgctttccccctgtgtctgcctgctgtgctaggtgctgccctgcctgcactctgtgcctgctctccatgccttccctgctgcctgccctgcgtttgggtgaaccgatgtgatgcatgtgactgcttgtgccttctggctgtgtggccctggtgcctgaagctggcttgctgtgacaaccttgtggtgctgcccgatggatgctctgatgtctgcctagcctgcccttcctggtgcattggactcatgttgctgttgactggttgtgagcgctgatgctggagcgacaggttgcttgcagcaattgttcctcgtgtggctactggggcacgcttgtgctgagctgctgtgccatgtgagtgagcctcagtctgacatacaaccggtgctggatctcagagcagcgaggagtccttgccagaagccactgtgccaaacgattgcttgaacttactcacggggaccagcctttcaacgtttgatttattggacacatgttgcttcgtacacacacgaacttacaacgcgataccttgtttcaacaacattggggcctcccagacccagcgaaaagaccattccacaagcagttgtaattctcaggcgttgggcacaaacagcgcattagaatacagggatttcactgtagaacgcaggattttgggaaaaactccttccccttttggcaaattggatcttccccaatcaggaaggattgcaattttatccacgttgtacgtgaaacaggcctggcctcaagaactggggcccaagaaacctggtcctggatctctgtgtcatttgtgaccggttcaggaggcaatcttttccccaacgcaagggtccgtgcctgaaaacggtaaagctattatcccaaaagtgggaacacgtctggggcgcccccaatctacagaattgttccctttcagggagatccagaaaccttagtggtgtgatacatcaattaacgggaagtgtatgatagcgtttagcatccagcacgtcacatgtttcgtcacccattctcgaagcgactaatcaaagagggtgcaaagacatgagcaaagggaa

SEQ ID NO: 557083 - DNA, 172 bp, Homo sapiens
gtaatactgttgggactcaatgatcaacatggaatgaacgagacgtgaaagtgaaagtgagcaaagtatggattctgaggagcctggacagccggggaggctcccctcagatggatgacatcaacagtgttccagacatgacagttttacggaacacatacagctggggcaa

SEQ ID NO: 557084 - DNA, 210 bp, Homo sapiens
aaagaagccattatgtgaacaagacacatgcacacacatagttatagtaacacaatttgcaattgcaaaaatatgaaaccaacataaatgcccatcaaccaacaagtgggaaaagtcctatatatatacaccatggaatactactgagccataaaacaaaatgaattatggcctttgagcacttggatgggctaagggccattctcttag

SEQ ID NO: 557085 - DNA, 352 bp, Homo sapiens
gattcatggattcatatattgttattatttaaaattgatccatgatgaaagtattaaactaacatataattcgacaaatatgaagatggagagatggacttcaaccatgtgatgattcaagatatacgatcaacataaaatgaaacactagctcccaacatggtgaaaccctgtctctattaaaaatacaaaaaattaaattgacgtggtggtgcacgcctgtaatcccagctactcgggaggctgaggcaggagaatcacttgaactcgggaggtggaggttgccgtgagccaagattgcgccattgcactccagcctgggcaacaagagcaaaactctgtctaaaaaaaa

SEQ ID NO: 557086 - DNA, 964 bp, Homo sapiens
  misc_feature (186)..(186): n is a, c, g, or t
  misc_feature (467)..(467): n is a, c, g, or t
  misc_feature (832)..(832): n is a, c, g, or t
ttactaataaccgctcccgactccatcagcgactaggtacaatatgtctcatcttatgttcacccggtcttatggggcctatattcgctcgctccctaatctctccccctataagattgtgctcctcccgatctgattttcccacataagtgcggccaaatcacaacctgggttcctctgtttaanagacgccctcccgtttttttaccccccccgttaacacctgtctttccaccccaaaaaaaggtgtcccactctccctcgccagtactttcctggaattcaattataaaaacagctaaggttgttacaccacggtctatatgccccagatcttcaaaaattctggtatcaggttatatatttttacaaactaaaaggggattcaattccaaaacccaaatggtaattatcccttcctctggatcattccaaactccccctcttatgacttattcccgcccttncccccccattgatcattaactcactcattaccccccggataataaaaccaccacagagggtccaccctcgcccttaacaaattttgagcaaaataccacgtttggctattacaaatatccagaaatctcgttgcctccctgataataattgaaattctttcctcaaattattatctctgtccaattggacaccaccccacaacaaagatattgtggtgaacctaattttgtctgaaaaacaatatttactggtctctattcggtacccttctccgcgcttctttaacactcccgcctgaaaccatcactgtgtttctgctgaagcctcccccgtgagcaagctagcaattgagtctatctcccancattcttgagtaacatgatgcaataacaacaccccattcagaacaaattgagataaattcatccccccaccccctatgttcgcaaaaaatggtctactccaaataaaacccaacgggcgacccaacataaca

SEQ ID NO: 557087 - DNA, 383 bp, Homo sapiens
  misc_feature (149)..(149): n is a, c, g, or t
  misc_feature (189)..(189): n is a, c, g, or t
  misc_feature (214)..(214): n is a, c, g, or t
  misc_feature (267)..(267): n is a, c, g, or t
  misc_feature (289)..(289): n is a, c, g, or t
  misc_feature (311)..(311): n is a, c, g, or t
  misc_feature (317)..(317): n is a, c, g, or t
  misc_feature (349)..(349): n is a, c, g, or t
cgaagtatttcgcacatcgttggcaatgctgaaggtggtcagcgagccacgggtcatcagcatctgtttgccaatgtgcaccacctcgttcaacttggtcgggttagagtcgagatcgaccatattgcccgcctctttcgccgcctggntgccggagttcatcgccaccgcgacatctgcctgcgccangccggagcatcgttggtgccgtcgncggtcatcgctaccaaacgaccttccgcctgatactgacggatcaatgccagnttggcctccggtgtcgcttcgncgagaaaatcatcgacacccgnttacgnagcaatcgaggcggcagtcagacggttatcgncggtaatcatcaccgttttaatggccattttgcg

SEQ ID NO: 557088 - DNA, 229 bp, Homo sapiens
ccagtaactcaggatgaacaccctcatgcttcaccacacagctacctggaaattgaacaacctgcacctgacagattcctgggcaaataatgaaattcaggcagatatcaagaagtactatgaaaccaatgagaacaaagagacaatgtaccagaatctctgggacacagagattctgctaaagcagtggtaagagggaaatttatgcccactaaatgctattgaaact

SEQ ID NO: 557089 - DNA, 252 bp, Homo sapiens
gaagacactcatattacagtctgtgttatgtatgtataccatttattcaatgctactgtgtatataatggaaaacttaagtccagtttgaaacatctagtctttctaggtgtttaaaagtgtacaacggcctgtcgcagtggcgcatgctgataatcccagcactttgggaggccgaggcaggcggatcacgaggtcaagagatcaggaccatcttggccaacatggtgaaacccatctctactaaaaatac

SEQ ID NO: 557090 - DNA, 120 bp, Homo sapiens
caaatcgagtcggtaccgctgtgcggacatcctcaagtgctgggattacaagcttgagccactgcgcccagccttttatttatatttggagagaatgggagctctcaactctgattgccc

SEQ ID NO: 557091 - DNA, 620 bp, Homo sapiens
  misc_feature (95)..(95): n is a, c, g, or t
  misc_feature (119)..(119): n is a, c, g, or t
  misc_feature (301)..(301): n is a, c, g, or t
  misc_feature (307)..(307): n is a, c, g, or t
  misc_feature (494)..(494): n is a, c, g, or t
ttagatgatcttaacgtagctaacattattgtgcacatctgaaattaattaaccagtaaatgccagtctgaaacaattgggagcctcaatatacnaagatctataaaaatatcattacnaaaatggtattaacatttctcccacttgagcctccctgaacagctcatttagctcaaacatttagaccagatgtgctaagagcatctgctgctgaaggtgagtgccaccaaggcagcactgtccttctctgactgcctgctctattcaacaccaaaagatgagggggttgggctgtctttcnaaaccnacatatttttagttagtttcagacattggcaaataactgctatgtctgtactcttaggctttccagactagtttacatactattttacatcttttcttatcttgcaaaatagagctcacataagatatgaaaacaatttttcttaaaacaaattagagtgctaagaatatctccaatgtaatcaatntaacttatgcaaagtttaacataatacatcttttaaaaagataagagagagacaataacttcaacaaatgagccctaatttgcatttgggaaacttataacaaacattacccaacacatttcaact

SEQ ID NO: 557092 - DNA, 233 bp, Homo sapiens
  misc_feature (147)..(147): n is a, c, g, or t
  misc_feature (182)..(182): n is a, c, g, or t
  misc_feature (227)..(227): n is a, c, g, or t
catagaggatttcgctgatccgcttaagtcgctgctttcggaggcgtctcccactcctcattggcgtgatcggagtgaagttctggtaggagagctcaggggacctgcggcccacatgtgccactctatgtccgcatgaacacagtntttggcctgcctggccacttgacctgccagcaggntggggctcctacctcgggtccccgacaggcccagtcgactcccgnctcttg

SEQ ID NO: 557093 - DNA, 105 bp, Homo sapiens
tcctccatatgcctcaataacctccatacgccccacagttatcctccgatatgccccagtttcctccataggccccggtttcctccatacacccacagttacctc

SEQ ID NO: 557094 - DNA, 748 bp, Homo sapiens
ggtgcgcgcaccctctcccctcgtccactcgatgcgcgccgttccttcttctgccgctgcctggatgactgcttgtagtgctcgttagagtgcgagacctggtacctctttgtgaagcggcagcgtgaggatactccggcgctcgccatggccgacgaaaagccccaggaaggagtcacgactgagaacaaacgatcatataattagaaccgtggcaggtccgcccaggatggtactagtggtgcgactaaaagattgaagaggccatacaccacttgaagtaaactaatgacaagcctatggtgcaacgacagggatcgtcacatgctggacatcagattcctgactttgatcgggcaaccaatcaatgaaacagagcacaccttgcagagttcgaaatggccggatgaagatacaacttgaggtgcttccaaccagcatcacgggaggtgtctactgaaaagagggaacctgccattctttagcgtccagaaaatcatgcttccttataagggacctacgtattacgttgctcaatttagaacactgcaattgtggttccacacacatccgtgactactaccggataggtctcactctattcattgcatagtcccgccttcccattcctttatctgtagatagagtaacggctatatgtgcccgaagccctatgcctttgtttttggtttcctcaaaagcgtcacgtctcatgtcgatgcaagctccagtcggaaggcgcactggc

SEQ ID NO: 557095 - DNA, 345 bp, Homo sapiens
  misc_feature (15)..(15): n is a, c, g, or t
  misc_feature (28)..(28): n is a, c, g, or t
  misc_feature (42)..(42): n is a, c, g, or t
  misc_feature (254)..(254): n is a, c, g, or t
  misc_feature (271)..(271): n is a, c, g, or t
  misc_feature (310)..(310): n is a, c, g, or t
  misc_feature (318)..(318): n is a, c, g, or t
ctttcttacctttcnttcctttctttcnttctttctttcttnctttctttctttctttcttgacaagggtcttactctgtctggagtgcagtggcatgatcacggctcactgcagccttgacctcacttgaagtcaggagttcaagaacaccctggccaacatggtgaaagcctgtctctactaaaaatacaaaaattagctgggcatggtggtgggcgcctgtagtccaagctacttgggaggctgaggcggnagaattgcttaaacccnggaggcagaagttgcagagagccaaaattgggccactgnactccagntggggcaatagagagagactccatctc

SEQ ID NO: 557096 - DNA, 156 bp, Homo sapiens
tctgttctgcaggatatgggggctgttttcagtctatagactttcatgaggcacgattctctacgcactcagtgactgctctgggacctttaccctgatgcacagggcgtcctgtagctacaacatagtgaaaggtgccacgctgcataaatgcca

SEQ ID NO: 557097 - DNA, 355 bp, Homo sapiens
  misc_feature (5)..(5): n is a, c, g, or t
ttcancagcgacacccattcctccccctttggcggtgggggtggcattgccctcaacgacccttttgtcaagctcatttcctggtttgccaacgaatttggctccaccaacagggtggtggccctcttggcccccttggcctccaaggagttagacccctggccccccccccccagcaagagcccaaaaggaaaaaagagtccctccttgttggggggtccctgcccccctcagtccccccccccattgattttcccctcctcccggttgccatgtagccccctttaaaagggggggggcttagggacccccccctttttttggcccctcaataaagtcccctgtgttcccccca

SEQ ID NO: 557098 - DNA, 263 bp, Homo sapiens
ccccggtaggcgagggccgggcggcaggaggcagcgaggctaccgggtggggctgtcgaagacacgaaccgtgtgcgccatccatgccaggcgcgtgaccatcatgcccaaggacatccagtgggtcagccgcatccgcggggagagggcctaaggtatatttttaggtggtcgatcaaaggatcttttcagagccacggccgttttcatcaagagcagctgtacccgctctccatctgatgtgcgtctgccttgcgcagcag

SEQ ID NO: 557099 - DNA, 923 bp, Homo sapiens
gcgcacttgtttggcgggtctcccagttatatggagaatttttctcccgggcgcccagacacgagtgttgctaactgtgtgtcgctccaactcttgccggaggatgttaccacacttatcggggacaaaataccggtgcttccaggcgattgcgagaccctggcctgctgggtcaagagacgcagaatttgtgttccgatcccccccttgtcacgaggccgtcatatcccacttgttgtcgtgcaccagtcccccccagcaagtgctgttggtcgacacattagtgtcacacatccctcacctctgcggaataattgtgcgtcgtgacaactggtatactccccccctccctctggtgcggcttgtatccccgtcatattctctaatggtagtacccccgcggagtctaaccttgcccccctggtgtgaacaccgctaagtcccccccctttcttttttctaacaaaaataagataataaaataagacaacagctccttttctctctacaaaaaggaatgaaatgacaccaccatcctcatcgctcgtccaagatacacataaggtgtcaatctctatcaacagcactttgtctactacaacccgccgccccagcgttttttgtgcacaagggcgcctaaaactgggctcggagtcccgcatgtcccgagtggtctcacaagctgtgttttcccaagctgctccccggttattcctacgcaccgtgtttatatcaggagcgccccgaaacacatcgggggctcccggtgctccttggcgtaatatcccccggcgggattctcccccgccctctggggcaccacacgggcgttccgcgctggcaccctgtgtgtcccggagggcttgaagacgccaccccgcccccctgggaacccccattccccgaaaaaaacccaaaaaaca

SEQ ID NO: 557100 - DNA, 488 bp, Homo sapiens
ggtctgtttcccatgagccagtacctgtggggtctcgtgcggccaggtttctgccctatccgtccaagacacaggatgaagctcatgcctcactcggggtctccttctctctccctgcagtgcacccactctggacgggcccggtctccgtgccagggggcacccggcagtctcctatcaacatccagtggagggacagcgtctatgacccctggctgaagccactcagggtctcctatgacgtggcatcctgcctgtacatctggaacactggctacctcttccaggtggaatttgacgatgccaccaaggcatcaggtgagtgccagctggggctcgaggactttctcctctccgctccctgttctgggagcagggtcaggggcttcgcggagaaggcggaggagagctagaaggtgctgctttccttgtgctgctggcgcgccactgcacttcagcctgggagacagagcgagactccgtctcaa

SEQ ID NO: 557101 - DNA, 291 bp, Homo sapiens
  misc_feature (236)..(236): n is a, c, g, or t
cttatggcaccaggcaggacaactggcgaggctataagtacctcgtgagggcggaaatattgccgcgtcctgagtcctctgggcagatgcagagccgcgtaagctcatagaagcaaagccaggggaacagtgggagctctggcctcgcggtgcggacgttagtattggattcctggggaacagcgacctctgcaggagcctctcatccacacagagtcaggacactaagggacggnttcttgagacaaagcacccctttcctcaccttactcccattccacccgttgggaa

SEQ ID NO: 557102 - DNA, 1181 bp, Homo sapiens
ggtccgccgcatcttcttttgcgtcgccaggccgagccacatcagctcagacaccatggggacggtgaaggtcggagtcgacggatttggtctgtattagagtgcgccttggtcgaccagggcgtgcttttaatctctgcgtaaagatggatattgtcgccatcaaatgaccccttcattgatcctcaactatcatgcgctttacatgttaccaatatgattccacaccatggacacaattccaataggcacctgtacaatggctgaagaacggagaagcttgtcatcaatggaaatcccatcaccatcttccaggaagcgagatccctccaaacatcaagtggggcagatgctggcgctgacgtacgtcgaaggcagtaccactggcgtcttcaccacacatggagaacggcttgggagctcatttagcatacgggggagccaaaagggtcatcatctctgccaccctctgactgatgacacccatgtacgatcatgaggtgtgaaacatgcagaaggtatgagaaacagacatcaaggattcatccagcaatgccgtcgtgagacaaacatagatgacgtatagagaccctggacacggtcatccatgactagcttttgggcatcgtagcaaaggactcatgacacagtacatgacatcatgcctaccagaagactgtggatggcccatccagagaaaactgtgcgagtgatagagacagagaggagatatccaagcaacaattatttcctgacctctacatgggcgctgcacacagctagaaacacaagggtcaatccctaaagcatgaacgagggacagttcactgagcataggcattccagtgatcccccactagcacaaagatgcccacgagaggaacactgaacctgcatagcactacaaaaaaacccgttaccacaattattaaatgtcatcttcaccacttcatatgataaagtacaacagcaatacaaaagagacacactaaaagagacacacatgacacaacatcctacctcactgaagtatctacatagaacactaaacgaaaaaaccgaaccagccaaccaatattaaacaacataaccgtacatcaccatacaccactaatgtcataactctcatacctcatacaaaaatagattacatacaaccgttcaatcacataaacaacaaa

SEQ ID NO: 557103 - DNA, 117 bp, Homo sapiens
cggagagacgtgttgcaatgtgtgccgtgaggctcggtcgggggatcacgtcgcacgggctgtcctgcgaggtgtgctaagatttaacggcccacaagcgctgttgctgtgcgtgca

SEQ ID NO: 557104 - DNA, 380 bp, Homo sapiens
  misc_feature (1)..(1): n is a, c, g, or t
  misc_feature (339)..(339): n is a, c, g, or t
  misc_feature (342)..(342): n is a, c, g, or t
  misc_feature (349)..(349): n is a, c, g, or t
nctaacaccttataatccccagcactttggaagcccaaggcagggtagatcacttgaaccccaagagatcgggattgcccctgggcaacatagtgtgcccctgtctcttaacaacaacaaaaaagacactggggactacaaaagggaggagggaagaagtgaggacaagggttgaaaaactatctattgggcagtatgttcactatttgggtgacaggttcaactgaagtccaaatctcagcatcatggaatgtatccatgtaacaaacctgcatatgtgccccttgagttgaaaattaaaaataaatagtttttttctttttttaagagatgaggtcntgntatgctnccaggctggactgagtgctattcacaagcac

SEQ ID NO: 557105 - DNA, 543 bp, Homo sapiens
ggcaggcggcccctcaaaaaaggagatgtcaaaggccccgtgaaaaaaagcttcgggggacagggctcctaatgggtttgtccagtaaataatgggtaataatccggccaattggtgggtcaacgaaaaaagtccaactctaagatgaagagatttattttgacccaaatgtgagtgcccgtggccccttacaaagcccccaggaggtccttaaaacatgtgcccaaggtggtccaggcccacttggttttaacccttttaaaggggcctgagccctcaatcaaatccctttaagaaaacccttggtttggtccaaaaacggggggcccctcaaaggcaaaaggggagggggcttccaggctatagggaaatttaaccatttttgggttaaaaatgggttaagtttgtttaaaaacctggggtccccaaaaagggaatgttcaagttaaaataaaaaattgtgttccccgacccccccgggtccgactgcttgttttccccgttcagtaacgaaatccagccagattgggaaaattgcctttt

SEQ ID NO: 557106 - DNA, 296 bp, Homo sapiens
aaatgggtatgctaaattaaagaaatgattagtaataaatgagatttgctattaagaaattccctttgggtttgagccaccctttttcatccaatgtagaaacctttatggtcagaccagaaccccgtttgaccctaaattaccagtagtgttaaagaattcagggcgggatattatcccaaaaggcctagcccgctgctccccttaatgttccctcccaagtggtttttgtgttgctattgttttttttagcctttcaatgactgtgtcttattcccttaaatcaattggctcta

SEQ ID NO: 557107 - DNA, 319 bp, Homo sapiens
ctccctgcatcctgggctgtcaatgacatcttctccatgtccaccgaccataccctggcatatgacactgacagcttcctggaagcctctgcaggacccctgcgttgttgcaggtgtctaaccgcctgcctgcgaaacccagcgctcttcaagatatgatgtgatggaacacacacacacgcatacactcacacactcacagatgcagacacacaacatcttgagtacagccggggagagaatccaagcctaacattaaataaatctttcaccctgcttcttacccaggggtctgtgttgcagataacctcaaatgtat

SEQ ID NO: 557108 - DNA, 648 bp, Homo sapiens
  misc_feature (48)..(48): n is a, c, g, or t
  misc_feature (62)..(62): n is a, c, g, or t
  misc_feature (101)..(101): n is a, c, g, or t
  misc_feature (107)..(107): n is a, c, g, or t
  misc_feature (134)..(134): n is a, c, g, or t
cggcgattcctatgtctgggagtaattcgatacaaaatgatcttttgnatcctgaatccatnaattacacttttttttttcaaattcacaaaattcacagnggtgcngacggtgtaataaccactatggggaancatcccgtaaacctgcctgttgccatgccaatggagtgactgaactggtgacatctgtttgagcatgcttggtgtggctggtagcaacccaccgttgtgcataacttggtacatgcaggggtgcaagcagagggttttctcagcattatggggggcagggtaaacatggggcattttttggttgttcctttgtttgcatggggtgtggggcatcatagtactcagcttatgccctaaaataacatgtataaaaaacccctgaagtattgtgtgggtgtgtacgtgtgagtgtgtgttggtatacgtctggcaattaaagcttggtcttcgggaacttagtgaattcttttctctttttcctccagaagtatttgttacacgatttgtaactaagagctctacttagtttgtttaccatgaacatgtagcagcaaaccttatgcatctaattcctaccaggttaaagaccggcttttagacttgccaggttaagcaacagccaagttctcagtaa

SEQ ID NO: 557109 - DNA, 109 bp, Homo sapiens
cactacgtaatcgtgagtggagcccagcgaaggaggagcgcgtgggacatggcggacaactgagcaggtgctgaccacacgagcatgagaagaagcagaagctggagac

SEQ ID NO: 557110 - DNA, 598 bp, Homo sapiens
  misc_feature (277)..(277): n is a, c, g, or t
aggcgggcaaagtggcccaggccaatggtgggggggctggtgtttttctggttgggggggaaaagaaaaacctttattcgctgccgggtttgtggggtgtggcatggggcaaataaaaaatggtgcccctttccgttttggggggttggccaagtacacccggttctttagattttaagagggggtgggcagcaaggttaattttccgggcaggaattttaaaaaccccttggccaagtaagttgtgggggggcaagccctttggtcccttgttggntaaaaaaacccctccctttgggttggttagggggggttggggcccccgaccaacatttgggggggtccttgttagttggggccccccccccggggggttgggcccgtttctttaaaatttttaaaaaagccagggtcccgggggccctgttgggggttttagttttgcattggggtaattggcccaagtcattgtttttttcccccccctttcccccaggggtttaaggttttgggggcctggggttttttcggggggggccccggggtaattccccgggggttttgggtttaaaaaaaaaagccccggggccccctggga

SEQ ID NO: 557111 - DNA, 387 bp, Homo sapiens
cgctgtgcgggatgtgtcccgcgccccaaaactattgccccaaatgatgcttggggtccacacacacgtgatatgtggtcgccccgggctctttgtgtacgaccacaatattttagaagaggggaaacctatatgtggcccacacttcttctacaatcgtgtggtctggtttctaaaatccaaaaagaggctaacacacacaattggttacacacacctctgattattcacgcacgtataccacactttaatttagaagactgcattaatgagaatattataatattgagggtttaacacaccaccgtaggctcctcatcttctgttgcaaaattaagaatttgctccttaccctttcccactccccccccctaacactcccccaca

SEQ ID NO: 557112 - DNA, 211 bp, Homo sapiens
  misc_feature (5)..(5): n is a, c, g, or t
  misc_feature (17)..(17): n is a, c, g, or t
  misc_feature (103)..(103): n is a, c, g, or t
tggtnaacatatatcgngttttcttctccgattgattgccaatagtactgctcctcgactcttaggataacccttcggagtgccgctccgcatgaagtccagngtttgttttggatgattatgaactcctgtttttcggtttatcgctttagcatatttttttgcagattcagatggagagtacttctgaattttactatcagaaaatcca

SEQ ID NO: 557113 - DNA, 1468 bp, Homo sapiens
  misc_feature (201)..(201): n is a, c, g, or t
gactgataaatagaagatcaagagtagatccgactttagaagcctactttgtgaccaaggtagctccaatttattgcttttgcacagctttacgtacatcttacccagcagccattgtagcatattcttcttttctaccactcgtcattgcttctaacacatcagcactgcattcatcacacgggtgccagcagcacaccntctcctattctcgtcttgcacaagcacatgttatcaccatcattgggtcatccacgcaatcacactttgcacgttgcaccacttttccattactccagtcgtcaatcactcatcagacagcatgcttcctcatcacagctgggtgcagacacacaggtccatcatggcctctgtccacatcagacattacacgtgtgctcacactctccatcacagccactccatatcatctgtccacattttccaccatcacttccaattctctcctcgtccgtactggcttccacaacatctacacttctccactgcgctcggctctgtcatcggctcctttctactcacattccatctaacaccttcctttaaagttggacggcgcccaccaactccactttgtctcccgcttttctactcaatggcgccgaaccacaaccatgtattcccaaaattctatgtatcatgtcccaatggtacatgctacctacagatgactcgtaagccgaaaggtaaaacgacgcctttgcatacttgactgcgcacgtttacagctatcctgttgctaggcgaactaaacgtagagcagtaccacttatgttatgactatcaccgtttggacgttctacgtgcggggacaccattttgttgccaccacttcaccgctcgtatcaacacagtttatattgtcggcgccattgtttctcagtggaagttaatacatgatagggcccgaccacccaaaggtcgactcaagtctgcaagataaagccacgtcttgactggtgggatcaacgcaacggtcgtttcaacacaacccgaacgggtttctactcaatttgaaaggtcacctcattaaaggtatgtgagaggggagtcacccctttgtggtgccaccacgtttggtaaacattgtttcgggtaccacagtttggtagacagtcgcgaaacgttggtactcgcattttcaccagccgattttacgaaaccaccacacacaagcagtatctataaactaccaccccgtgtttggattcttaccagtttgtgccacgtaggttccccccacactttttccacaacaacacaagtatgaaactgtgttttatgctgaaatagattactcagcccacccagtctggggactaacagcccaccttttgtgggacacaaccaccgtatctgctatatccatgtggctacagctttgtacgtggtcacagatagccgcacatttaaccccacgcgttgcggtcttgatggaacaagccat

SEQ ID NO: 557114 - DNA, 290 bp, Homo sapiens
  misc_feature (2)..(2): n is a, c, g, or t
  misc_feature (80)..(80): n is a, c, g, or t
  misc_feature (99)..(99): n is a, c, g, or t
  misc_feature (113)..(113): n is a, c, g, or t
  misc_feature (149)..(149): n is a, c, g, or t
  misc_feature (176)..(176): n is a, c, g, or t
  misc_feature (183)..(183): n is a, c, g, or t
  misc_feature (185)..(185): n is a, c, g, or t
  misc_feature (188)..(189): n is a, c, g, or t
  misc_feature (192)..(192): n is a, c, g, or t
  misc_feature (214)..(214): n is a, c, g, or t
  misc_feature (221)..(221): n is a, c, g, or t
  misc_feature (224)..(224): n is a, c, g, or t
  misc_feature (227)..(228): n is a, c, g, or t
  misc_feature (235)..(235): n is a, c, g, or t
  misc_feature (261)..(261): n is a, c, g, or t
  misc_feature (279)..(279): n is a, c, g, or t
  misc_feature (286)..(286): n is a, c, g, or t
gngtgccccctgataagcccagccagttcattccagtcaaaagggtatcagtgtgaagcagcaagaaatctgcaggtggnggggagagaagcctggccncagctacccaacgngccctcctccctgactcccacaaggatgcagtaggncaggaagccctaagggatggggagtgngtgagtnanacnngcnatggtggggggactagggagtntcctggntgntcnntgtatcnaagcacagagctgaggaggtaggggnccctgccctgggggtggnggaggtnagag

SEQ ID NO: 557115 - DNA, 1159 bp, Homo sapiens
gtgtcgggccccgacgggcggcggcggctgaggtggaggcggagggagtgcggcggcggcggcggcgggaagatggcggctcccgtcctgctaagagtgtcggtgccgctggctgggagcgggtggcccggtatgcagtgtgcgctgccggaatcctgctctccatctacgcactaccacgtgcgagcggagagaatggagctgtggaccccggaagcacctggaggcaccatcatggacgaaaccattgagtggccccatggtggatggaaagtgctccagcacagcccttagccctcgcagaattgagaggatccgaggcattatgggtcctattataggggattccaattaatatacatggcaacaggggcatggatggttcatttcaacacgcaaggcaccaaaaacccacaggatagggattcacttactctccggggaacccacttagtcccacttaacattacactccaacatcaataccataacaagatatacattaacatatgggcatttgaccacgcacagcgactgatggacagagactatctggactccattcatagacaggttaactcccaatcatgaacgagaacgatgagaggattccccctgataaacacatggaccttaacatttcactggtaaccttataggtggcttgaaagggagatatcgtggcgacattcactccttggcacatcggatcaacacgataaccagttgcatgcaaacctatcccgttttacgttacacttccacatttaatccaaaaagctcacaaagacggacccttagggcttataaaccttatggaaaaccggaacgggagaccccatagaggggaaaaacaagagaggtcaccacccacacaccggacacgagagaaacgagcacaagaagtgaacagtgaataaaaaatcactagggcacccacacagatagcccgacgtggggaccaccacacccaagaaacaaacagcaaaccacaacaccccacacacgaccgacaaaaacaccactaggaggagcagccaccacaaaacagaggggggcgagatacaaaaaacccagattgtcggcaacacagggaccccacacggtgaaagcacacggaacacgattccacaaaaagcccccattaaaaaacccaagg

SEQ ID NO: 557116 - DNA, 385 bp, Homo sapiens
gcgtatcgctactgagcagctgtatgtggttttcttgctctagtggaacacgtatgtaaggaacagggatgcagagacaccctcactcactatagcctgtggatcacaagcattctgaattatcggtaaaagcacattagccagaaatcgtaacaggtcttttaaaactattgatgaggccaggcatggtggctcacgcctgtaatcttagcaccagcactttggagtgccgaggcgggtggatcacgaggtcaggcgttcgagactagcctggaaaacatagtgaacactcgtctctactaaaaatacaaaaaattagacgggcatggtggcagccacctgtaatcccagctactcgggaggctgagtcaggagaatcacctga

SEQ ID NO: 557117 - DNA, 222 bp, Homo sapiens
ggtcgaccgacagcgtcaaagccaagggcagcctagtaggtgcccgccgatatccaggccttctcgttgaacgccctggatgtcgaagcgacgaaggcgttgatccgcgaaaccgaatcgcagatcgtcatcaacgtcggttcgtccttcctgaacatgtcggtgctgcgtgcctgcatcgataccggcgtggcctatctggacaccgccattcagtcgacg

SEQ ID NO: 557118 - DNA, 1173 bp, Homo sapiens
agcggggggcgcaggcggcgggagtgcgagctgggcccgtgtttcggccgccgccataggccgcgagagacctagagaaagcagcatgagcagacgagcagcgatacaaggatccatacatgcagatcagaccaagcagggcggcgacagcggcaaaagcaagaacgcagcgaggaccagatgcagtagacgcagcaaaggggcaatttatgtgggaaccaaaagacatatgcacagacagctgagaagcgataaagggaaggcgcttgaaaatgaaggggggagtaggggcgagcgagatcaattttcgctaatctaggaacgaagttcaacgagccaacggagcagagccaaggcgaaatggcgagctagcgaatgcaacgaagacgaccgatcagctggatcgatgagctcgggaaaactgcagtcgagaaggacaaaaagctcgcgtggttctttgcatttgcccagagctgtctcagaattgcgctgggcaacagagtaaagcgatcctagacgcaatatttttacaacgtactttaagaaggaatcattgcgacatgatgaaaaagccaaagcaggactgatggcgcagccttggcaaaggtaggatgcgatgtgcgaactgatgttaaaaattcgtggggggaaggcatgtgaaggagtagaagtaagacacgagaaaagcctaagctagctccattgagcccgtaactacagtcccgctcaagaagcttgactttcttaatcgaatgggttagatcggactcaggagcggattttagcgagacgttgcgggagcaagtcaaccgaagctaaattatctcttgagctttcttatgctgaggattgagctgcccttctactccttccttccaagtccttttattttaaaagacaagtccgagaattccagaagtatccaaggcttctaaacccccgagttgtctctttcccagaggggaaatggctaggctttgacggagattaacggtttattggggattcaatgcctgctgaaaccggtgtgaacgcctaattatcatccgaattttaaaaacaagcttcctttaattccaagaagggagagccccgtggggtattttcatgagttcgatactccctgaaattttcagccattggctttatgtatgtctttcggatgtgtattat

SEQ ID NO: 557119 - DNA, 165 bp, Homo sapiens
cactggcagtgaagcgaaaacgggactccaggacgccacgctcggactgtgtcataaactcaggcgtctgggcagagcgatccacggccttcttgttggctaccaactatactgtccgtatacttgagctgacacttgaggtcatggtgaccctctcccctggat

SEQ ID NO: 557120 - DNA, 422 bp, Homo sapiens
ggaggctgaggcaggagaattgcttgaacccaggaagtggagggtgcagtgagctgagatcatgccattgcactccagcctgggtgacaagaatgaaactccgtcccccccccacccccacccccactaccccccaaaaaaaccagaaagctagagtaactttccactagttggaattgaacttcataaaatataaacattttataaaccctacaattcaggtaatttgatttaattatgactaatctataggaatatacaatacaaatttgtcagtcatccacaattaagaacaactatttatgaagaaaaattttactatgtttagaatgagattttattcatattcttgaaaggtagctttgttcccaataaatatttctcctactatttctgtatattttaggggatgttttcaattc

SEQ ID NO: 557121 - DNA, 515 bp, Homo sapiens
acattttcaactcaactattatctgaaaacatacgtgtgaggctatggaaacaaagcactccatatagagaaagtactgttagccaaagtatcattctaaatcttgctagactatgcttttactaagagattttgttttaagtaagtttttgttcctgttaaatctgcaaattcttgcaaaactctgtcaaggaagcaacacatcaaataccctaactatatacaaatgcaagactaccagccttttggtggggaagggcatggaggaacaagatgtattctaaaacccaactgtgcatccctcactttctcaagaaaccttgccacccacagcctatctcatgtactattgaaatgcagaaaaaccactacttgggagactaccatggtgcacagcaagtgcacagtaactgttccgtcaatttttaactcataaaaagctatagttcaaaatattgatctcatgtacacaaactcaactactattaaacagagacatagcacataaaaaaaaa

SEQ ID NO: 557122 - DNA, 188 bp, Homo sapiens
tgtatgtgtaagagaagatggttaagtctacggaggctccaggatgaagagtagtaccctgctaagggagggtagactgtacaagcatgtacctgcaccggtctccactcatagccagcatgcgcagcaggcagtaggcagcagcagggaggtaagcagtcagcacagcttatgttgtttatagcggg

SEQ ID NO: 557123 - DNA, 716 bp, Homo sapiens
agcggaagatggcggtggaagatggcagaccagtttgactctgatatttcctctgctcaactacttatgccctcttgctaccagaagatagttaacagaactgaacctaatccaaagctttcctgagaggaattcctcaagaaatcttagcgggactttgaagggagaatccaaatatattcagagaagttatctggatcatctggatgaacatgtcctagataatctagcactgcaaagagatagtcctgcactgttgcccaggctggagtgcaatggcaagatctcagctcactgaaacctccacctcccgggttcacgcgattctcctgcctcagcctcccgagtagctgggattacaggcacacaccaccacaactgggtaatttttcagtgtactttagtagagacggggtttcagtatgttggccagactggtctggaactcctgacttcgtgatccacctgcttcgttctcccaaagtactgggcttacaggcgtgagccaccacgcccggccaagcttcttaacctgagacctaggttacctcttctgcaaaatggttatcacactaataccatccctctaggctgtaacttggttactcattcatatcatgaattgcacttaactctttctgataactagcaacaaaggacctactgcaacgagcatacacatttaaaaataccaagcctcaacaaattccgacaca

SEQ ID NO: 557124 - DNA, 265 bp, Homo sapiens
gggggggccctgggggcccccctgaagcatttttcccccactttttttcttttgcttcctcccctgttgggggtagggagggggttggggggcccctaaaagggggggcctttttttccccccccccttcctttttggaaaaattttccctggctggggggggggccttgggggtttgggctgggcatccttggtcactccctcagccccgccggcggtgcctttgactttaaaaaaaaagccccccccgggctgtgtgtggcca

SEQ ID NO: 557125 - DNA, 409 bp, Homo sapiens
cagagaacttttgtcgaggtacctgaggttagaggcttactatgcaaagatcatgatgaagcgatgccacagacttggtacccaggataattggcctaagatgccatgccccgagagctgagcgtgtaggcctatgctggactgagttgaagctgacacgtggctggccgtgaggtatattacagatgctgattgtaccatgtccatactgagtgctcctagtaaggagcggacttcatcttgaacagcgggatgcagtgactcacataggcctgatctcacgacagtgccttgacttggcaggacggattcaaggaaggctcatgaccagtatgcagacgatctggaacttaatcatgacgatccattctggcacgagtccgctttgtgcacatgctgtcagcagcgg

SEQ ID NO: 557126 - DNA, 172 bp, Homo sapiens
ttatcactacacatgctaacttgcgtgggaaaacgtctcccctgcaaagattaaattaaagaatcagtcctttggaatactgtgctttaaagtagaattactggtggaaactgtgacgtaaaaaggacagacactgcatttaaatggtagttaaaatggaaactacagagag

SEQ ID NO: 557127 - DNA, 177 bp, Homo sapiens
ctggacactagcggatcccctgtattggtggtgctgccagctttataatggtggcccacctagccatttatgtttctaggcccgcaagaagtacaaaggggagtatcctatcatgtacagcaccgaccctgaaaacgggcacatcttcaactgcattcagcgagcaccaccaataca

SEQ ID NO: 557128 - DNA, 1324 bp, Homo sapiens
  misc_feature (486)..(486): n is a, c, g, or t
  misc_feature (1193)..(1193): n is a, c, g, or t
tgggtgaaaaagccagctgactttattggctctgggggcagggggctcaggagctctgtgggggggcgggtccgtttccttctttcaccatctcacaggccttctgtggcttgcgcaggatggtggcgcttggccctgtgcggatgtggcttgccatgtgcgcaggttcggggcggatacttgtgtcctgtgcggactcagtggtgttctagatgctgccttggagcttggcgcagagcatttctgtgtagatggttgtctccggcaccattaggagaggtgtgggcagggctctccggctttggccggagatcctccggctttaattagaccaccacgagacaaccttttgccgtgtcgggcttcgcccgggcttccacgcgcccaacaggtctttgcgggtgagaatccagctcctgtcttgtacgcggagaaaagagaatttggcgggcgccttctcaaagcgttttattgggcgccctccangtcgcttgataggcgctcgtgctatatattctcctctctttgtggatctcaggagaaacacctggggaggaaggcaaggtctccccgacaaaccagacccattcccattgtgtggcagagaatttgcccgcaaagaacatgttggcggagcggggctctccccttctctgacagggcgggcagaaccccgcagggaatctcaccgggggttgaaacacaggggaaaaaagccccccatgtgcgggagaaaccctttcttcgacatttctcgaaaaaaactttctgtgtttctctcaacccatcttcgtgggtgtttgtggggagaacgacgttttggggacgaaccaagacctgtgaacgcggcagaaaagtcaactgccccaaaagggggtgttgtgttgtgggcggacacgcccagtctccttccaaccagtgggggggccaaaagcaagccccccccgtttgtggtttgtctttttctctccacaaagaggtcttaaaggaaattccccccgcgtgtggtctccaagaggaatcccctttttgttggggccaattcctcgggcggaagacaacactgtgcacacaccaagttatcttggtctgtgtccccccaactgttgtcgcaccgatgttcttccgggaagggtgtgcccccaagatggcggcctcgacacagacaaccttttcttttgggcaacaacagnggggtccctcaaacagggtttcgcggggaaatctttatcggaaaggtttttacccgccacacacaacccaacacaccttctctctccacagaattcactgtgggggaacacactttttggggcgttaacgg

SEQ ID NO: 557129 - DNA, 214 bp, Homo sapiens
ttagaatcgagctcggtacctgaacattcgtgtccccaacattagagctaaaacagattgcaattcccggacgtctaaaccaaaccactttcaccgcttacacgagccgggggtatactacgagtcaatgctctgtaaatctgtgtgagcaaaccacacgtttcatgcccaatcgtcctatgaattaattcccctgggacacgagatgttcagt

SEQ ID NO: 557130 - DNA, 795 bp, Homo sapiens
gtcgtgaaaactacccctataaatctaaatgcgaaaggaaaagactcatatcaacattgtcgtctttggtcacgtagattcgggcaagtccatcactactggtcatctgatctataaatgcggtggcatcgacaacagaaccattgacaacgtttgacaaggaggctgctgagatgggaaagggctccttcaagtgatgcctgggtcttggtataagagcctgaaatgctagagcgttgaagcgtggtatcactcatctgatactctcctatgatggagaattgtgagaccagacaagtactatgtgactatcattgatgccccaggacacagcagacttcatcagaaacattgaattacatgggacctctcaggctgactgctgctggtcctgaattgtatgctgcctgggtgtaggatgacatttgaacgctggtatctcctaagaatgggtcagacccgaccagcaatgccctatctgggcttacagcactgggatgctgaatacacatctaaattgtcggatgttatataactagtgggattcctcttgagcacatcgcgtaccaagactcatgaatagagaactatgcaaggacaattttggtttagtggaatgtcaggtactttatgaattaacgatacatttggtcgtacataaccccgtgcgactagtatcaattaggtgccaattgctggttgggaagtggttgacaaactatgcttggaagccaaagatgctaataattgacctggtgttcgaggggcactggacagggcgcccttctgatggca

SEQ ID NO: 557131 - DNA, 534 bp, Homo sapiens
agcggggggggctgtccgggcccacggagaggacggcggcgggcgggggttgctgcagtggcccgcaccttgtcttccgcgccggcagggctgtgccccgtcgagacctgctcgggctgtggctccgtcctccggcctccagggtggctgggcggggggtgcgcggacgccccggcgtgactgccctcccttcaccagcgtgccaggaggcggtgtccctgtgacgccgcgcggccgcgctgtagtggccgtctgaggcccgcgtctgttcgaaggctgtccgacttcacggttccccgcgggctcggcccgggggcgtgagtgtcgccagcgggccgacgggggggccgcgcggtaggccctgtagcaaggccagggcactggtggggccggcaggaagagcgaacccgaggcatcgtggtgccatggcggggccgcccccacgggcatgggcctgcacaagctgtgggacgtaggacgctgacggtgggccgcgcacgtgctcacaggcccacggggcgtcgacggaggact

SEQ ID NO: 557132 - DNA, 872 bp, Homo sapiens
ttacaacgagggcggtaacaagcgcacatttcagaaaggtgggtgtaagaaccgccgttattggaggtgacggtggtgcgccccctcgatttttgagaggccctctctgcgtgcagagatgaggaggctctgcccggtgtgtagctttccttcgtgttagcccccaggtgttggaggggccttccctcaaccgggacccattgctgtccccccgcgcaaaggccctcgacagggacgtttaagtgttgtcacacccgaggaggagatttgtgactaaaagaagggcacttagttgagcgccactgtggacgcgtcgccgataagcttggagtgcaccaccttggtaagaacatgatgacgcgccgtgttaatgcagcccctccggcgggcgtattataaaacaacaaggggggtgcaacacagaggacactttatggttgaaacgtcatcgcacgctgatacacaatgtacagtccgcggtttctttgtgcaactattacgcgaacatctactggctgccaagacaacagacaatgttcttgataagaggccctcattcgagtgtcacccacgcggggtatggttaaacaacggttccgtttcaaatggactcggcgcctttctgtctcatcctcccgaacaagttttgttgtaaaaagtcctggtgtggttccaccctcccaaaggatttaaagacgtgtctgtaaaccaagcagcttctactatcgcggcatgtttcaaaaatccatgggagggctatgaatcagatgtattcatgaacagctgagatggagcatggtctttctgaaaaaacatttgtgaagatagctgtttgaatgtttcaggaaaaaaataatttcaaccacatgtca

SEQ ID NO: 557133 - DNA, 731 bp, Homo sapiens
aatacgaggctatgaggctcctgaaggtcaagagcgggtcaggatcacagaatgaggccagagacaatgtctcctaccaccagtgttctatcttgagttatgtcacactttaaccatgcctctaactgcaaatccttctgtctataacatgggtgtgtcactcacacttcctcagacgtattgtctggacgaattgactaaatatctaacagcatgcaaatatctcttagataaaatgacatcatgacgcatatctaatactatctttactggacacagaagtcatgtccctcctgtcgaatgtgccaaggtccactattataacaccgatagtacgccctacatgtaccaccttgaaattcgtcctctctcatgctggactacgtttcctacacaatcatacaagactgtatagacttacttactttcacttagacaacatcatcgaactgagcatttactatgctagttgacttctaaattttaaaacctacaaggtgcaaattgtgttgtaaaaatcatggacttactgtcttgcaagtaatttctaaaatacaaagttggatttgttttcaaagttaaataactgatattttccctctgctagatttgcgattatctgtagttaggtgatttttgaacgagttcaaagaacttcccatccaaccattgaactttaccaggctaccacgcacatttagaagattctcacacagagaccacacttcgga

SEQ ID NO: 557134 - DNA, 491 bp, Homo sapiens
tttagcagacctgttgatgtttttccccctaatcaattaaatcacaaatttatatagaccaactacttttatatatttcagaggcaataactttaaattaaaaaggctgaaaactcacaattcttggtaagtgcagaatagggattcttgacaaattaggtaactttttatgaaacagcagccaattccataagggagaaaatcatcccaaacacatttcaatcccttaaatcattggctagtgaatttatacagtgctcaaattttctaggaaaaaaaaacttgaaagttcatagtcattcttcaaatttgacaattcaagaaaaaaagtttgatacctactttcaaactctatatattccactgttttattattattgaatgagtaagtatgcctgtcatcaaagtgaaaacatcaatattgaaagtaaattccaatgaaattgttatgtttctccaacatctacctacatacatgtattgagaatgat

SEQ ID NO: 557135 - DNA, 111 bp, Homo sapiens
tttcgtaaactatcagcaaataaccttaatattatgtcttttagattatagctatcttaatggagatgaagctgtatctctttgtggttttgatttccatttccttgatga

SEQ ID NO: 557136 - DNA, 925 bp, Homo sapiens
gaggcatgaggcagccagggcaggggctactgctgaggggtgcaggcggaggctggtaggaaaccgcgaaatgatgtttttatctcgttttgaaagatagagattaatagaactactgtaaacaaattatcacgtccaattaggtcacataaagcattatgctttagcagtaaagtttgaaaacagtacatctataagagcgttgagattctctacagagaaaatcatgaagactttagaagagtcacgctatgaggaaggtaaattggataatgggtttctagataacatgagaggaggttgaggatgaagctttcttcagtggagtggatcaaaatgtatttgataagagagacatgaggagaatggactatccgagctccgaattgaaatacccacatcagaagggcaacagctattttagtattacccatgaatgggtgtcttagccctggctgtaacaggttcagttctacaagggttagtagggctgatatagaccatgacttggatatggcgatcttgttaaacatagagataaatatcgaggggtgattagcagacccttgaaatgccatgacgcagggtagaatggggtcatttttaaagcctagatgagcgcgtttgactaaacgccgacgatgatggacagattaatggagagtggtaacgatgagacgcccttgtgagacagattccacggttgacagtgcatcaccgactggagaagcggggcaggggaacgaagaatagagcaagatagggacagtgctgctgaacctgcttagaaacacaaggattcatttggacctgcgagtgggacgcgaggcactccaacggcggggcaaacagcggggcatggtccctgtagacctgggacgaacattcagaacaggcgatgtcaatgaccctgacggggaaaaaa

SEQ ID NO: 557137 - DNA, 88 bp, Homo sapiens
cggcacgaggctgaacgcaaatcagccactttaattaagctaagcccttactagaccaatgggacttaaacccacaaacacttagtta

SEQ ID NO: 557138 - DNA, 194 bp, Homo sapiens
  misc_feature (4)..(4): n is a, c, g, or t
ctantgtgctgtgggtctcctgtgatcccaagtatactctgcagatctttctgggaccagccaaggagtccctcagagcaggtacttgtgggactgtggcctatggggtgcaagccctagaggagacccaggtctacggagagagggactggaccagcaagtataggccaggagcaggggtgggtggagagcgg

SEQ ID NO: 557139 - DNA, 122 bp, Homo sapiens
  misc_feature (26)..(26): n is a, c, g, or t
taggtagaggcgcttccgtagctctntgcggtcatacttgacggtgaccttcccttggcgcctcactgggccctcatctgttccgccgtccgggccctctccgtgcgccgcgggggggctct

SEQ ID NO: 557140 - DNA, 119 bp, Homo sapiens
ccacttcagcctatcaagccataaaaagacatcgaggagctaagaacggtggtgtgggcctctagacccagctacttgggaggctaaggtgggaggattacctgagtctgctgagattg

SEQ ID NO: 557141 - DNA, 572 bp, Homo sapiens
catggctcaggattatcagtagcgagagatgtacatggacggatgggtataactggtatcaggatctccctcgtccagggaaggatacccgggtgtaaaaacttcccccttgccaggtactcaaagcaattgatttatacgtgggcaactcaaatccctgtgtgaagaaatctcagagctggaagattattgtgtgtcggtcggggtggctctgtcttgagtcatctcgtgagaaccttgtgcttgtggaaggtagaaattcgtcagcccccatttgaatgagagggctggaggatcaaatcaatggagagagggatttctattttgtaccaatactatggagaacaaaactgtttctttgaaatggaccttcatttattgggaggggaaagcagttagttcaataatggctgcctggtgccttccagcatttgaaaagacagaagaaagattgggagcaaggcaaggttccagtgttatctaaacaactcactaagcccagctacgggttggctgcggagcacttcctgctaccgggcctgcatcccccaatgtcccctacatgcatcagt

SEQ ID NO: 557142 - DNA, 392 bp, Homo sapiens
  misc_feature (89)..(89): n is a, c, g, or t
  misc_feature (211)..(211): n is a, c, g, or t
tgtgtctgtgcactaggctataggttgtgtggggttattagaccagcgactacagggaagagggaggggacagtgggggatctgttganaggccaggaaaaacaaggggagctggggctaaggaaccaaaggaggtgggaagagtggggctagaaccaaaagtggggtcctttcttgaaggcagggtggtcccttggctccccttcatcancctcctcttgcgcttgagtttcttcctcttggtcttcgtccccaggaccccgatgaacaggctgcttggaaatggggcaggtcttccgggtctgagtgagccaggggtccacgcagcggttgtggtaggcatgagcacaggggagtacccgcagcttgtgcccatcctcatattcatccag

SEQ ID NO: 557143 - DNA, 570 bp, Homo sapiens
  misc_feature (479)..(479): n is a, c, g, or t
  misc_feature (527)..(527): n is a, c, g, or t
  misc_feature (532)..(532): n is a, c, g, or t
  misc_feature (547)..(547): n is a, c, g, or t
  misc_feature (557)..(557): n is a, c, g, or t
cttccccgggggggtggttttcaaacaacccccctcttttaaaccccggggggggggggtgggggggtccccctttttgggggggcgccccccccaaaaatggttttttttttgtggggggggcccccaccctatggggttaaaaaaaagaggcccccccccgggttgttggggttttcttcccccggaaaaggggggccccctccgggggggttttttaaaaaacttccggggggccccccgttgggggggggaaaatttgggaaggggggggccccaaaaaaccccttggggccccttttctcacaaaaaaaccccaaatttttgggggggggtgggggggccccacttcttttttgtatataaaacctccccacggggggggaaaaaattttttgggagagggccccctccccccccccttggatattgggaagggggggggaaaatttttaaccccctcggcgcaaaaaaggccnctcctccccttttaggcccccctttagattaggcccaacacctttagnaaccnaggtttttgtacctnaacggccgcngcagtaggagcga

SEQ ID NO: 557144 - DNA, 607 bp, Homo sapiens
  misc_feature (499)..(499): n is a, c, g, or t
gtttccaccatgcactgctattttttaggagttgataatcttaagacttacattcctagttacatttgcgcttttctcaggttatgtctcgtgaagatttggggggagggctcttttaaaacttctgcctcagttgtgtaacagactctttaatatatcaatctgcactaacatctctgtgatatatgcacatattgtactggtaaccatgtctcctaaactactcgcgcgcatttgattgggcttcttgtttagggtcccttttttaatgcattagattgcataatgtgttctatatttctgctggactggacagaatgatctgtgtccccaagtgcgacaggctctggataaccttcgttctctgcactttttattgatgatttgtgactcaactggatacaggtgctcaataatcaagcttgcatgtgtgtcaggacgcattacaagctggtagccgatactgactgtgcatttgcaccatccttgactaaccttnctctatttgcctaaggggcctatggcgtggcactagcattcactgtcatattttgcagcgctcaagatgagggacgtccactattgatgtgctcgttcgcttctctgc

SEQ ID NO: 557145 - DNA, 369 bp, Homo sapiens
  misc_feature (217)..(217): n is a, c, g, or t
cagatcggtcagtttccttgccacccatgttgtaagctccatatcggtcatgtcaaccgtttcaatctggttaggctccagtcctagcaagtaagtgccgccctgttgaggtcatggcacactcttgtgtcctgacacgttggggttccaagcctgccttcctaatttttaacttttcccttaagggtatgactccggtgcatgttgtaaataagcnacttggctttgtttctgggggctttcaaagggccaatattcgggacacgttccgcagtggcaaataaattcatcaggtgcccatcccagaatgaaacaagacagcaaacaaaaaaaaacgaatcagtcaaaataaactcgagactagttctc

SEQ ID NO: 557146 - DNA, 1673 bp, Homo sapiens
aggcatggttctcaaggcacacagcctttgccaatcttgcgcagcattggtagcacccagccactcaccaacagcatcgccatcagcatccaacatcaggcacacacacaacaatgtcgcatttttcattccagctctgcatgagttcatgtatcgtatccatatgctgcatcagtccattcaacacacagctggtcacaatgtgctccacatgtcacatcatatttcggctgacgcatggtcttcagcacagtctgtcgtgcattctattgagcaccatccgtctgcatcacaacacattgccacacagtccaacacatcacacaccaggttgtcacttgggtatcggcatggctccaatcagccacattgcatcgccacaggcagcagcacacaacacaggtcagtatcacgtagtgttatccacctcagaccacaaagggtcacatgcagtagcacaggcacacagcacatccagtccagccagcacacagccgaccaaggcacatggctcggcagctcacaaagcatcgtcagtgcgccacatcctcaaaggttcaaccccacaccacacagtcacgcaacaagcacaacacacaagggcacctgcatagccatatactcaagggggctatcgcacacgctttcccgaaacacacgtgggcacccagggcaaattcgtacgcattcgacattcctatggtagcggggctctcccaatacttacccacctttttagctccccactatccgaccaattggcgaaacccaatttggcaatttgcaaggcaaggccacaagccatggccgcgacgttgttgaacccccgcagaaagaccatatctcgacgcgacgcacaattccccacttcaagctgggtgagcacacgcaatctgtcattacattggcaattaacacacacaccttatcgtcccacagggacacctctaggggacaccacattcacaacccacattcacgcggtgccactttcactacacagcacagtagggtccgctatcaggcgccgacacagcacaccccactcacaagagtcgggacagacaagagaaaccaggccacaggacccgaacgggggaccatggtcggatctaccacacggacaactactacggaagacacacctacgcgaccagcgtacacacagtgtacaacagcacaacaattaccaaggcagcgttacgacaacagataacgcacaacacacagacataaactaaacacgagaaaccacaggagaccgcatgagaacagaagcgaacatcacatcagccaaccaacacatgaacacaacacagaagcacatgacaacccaggtacagacaagagagacgcgaggagccaagcgatgcacaaacagagagagctaaataccaccacaagagacaacgcgagcaagcaagaaaagcaaacagacgtacacgcgcagagaaacacaagatcacacaccggtagagacaggcaacagagacaaccgcggacacagcaacacgacaaagatcaatagatgcacaaaacaagcagaagagtatccacagagaaaccacaccaccagcagcacccacaaccagcacacaaaccagcaaacgcacgagaagagacaaaaccagccggagagcacgaccacggacagaaatcgtacaatacacaaa

SEQ ID NO: 557147 - DNA, 326 bp, Homo sapiens
cctgggaaaaaatatttgattatgggtttggatggggccccctatgcccttgagggacccccccagtacctgttggacttgaaaagttggattgaggaaatgccctttgaacccctgtgccggagccccccccagggggcagcctgtgcccagttcaacgacttcctccaggagtatggcactcaggggggccaggtgttagggctcccctcccccctcccctgggaggaacctgaacctgggaaccattaagctggaagccctgctgtgtccccttttattaacccagcctggggcccgggcatattaaaggcttttggccccca

SEQ ID NO: 557148 - DNA, 314 bp, Homo sapiens
  misc_feature (49)..(49): n is a, c, g, or t
ctaattggttcttcgatgacgcttcacttggcttctcgcctggctcctnctccaaacctgagcatgtgcccagggctctgccttcccgaaggcaggtgacctcgtccagcccacggccttcctcgccgtgcacctgtgatggctggcacacctccaggctgctggacacacacccctacctgcctgctcatggacacacaatgggcatttccaaccctgtgttgtccctttcctcaaccttctcctccagtgaacagtgccactgtggactgcacccaaacagcgggagcatccgtcatcgaagaaccaattag

SEQ ID NO: 557149 - DNA, 324 bp, Homo sapiens
tgtcagagcctgccagagggtggtggtgggtggtgggggccgtcatccaccccacccagtggcattccagactttaaatatgacggggagtggcctgttcagcaacctccagcagtacgaccttccgtaccccgaggccatttttgaactcccattcttatttcacaacccctagcccttttttattttagccaaagagcttgtccctgtaaactacaagcccaacgttactcactactttctccggctgcttcatgacatggggctgctttctgggctctacacgcataacatcgatgggctttgaaagagtgttaggcattc

SEQ ID NO: 557150 - DNA, 905 bp, Homo sapiens
cctgttcaggaacgctgctttcgaaagaacctaaccctcctattgatgaagtgatcagcacaccaggagtagtggtcaggttggtggagtacctcaaacgaaaagagaatggtacagctgcatgttagaatcagcttgggtactgacgaaatattgcttctaggacattctcgttcagacccgaatgtgattcgaggcaggagctgtgcccatcttcatagagttgctcagttcagagtttgaagatgtccaggaacaggcagtctgggctcttggcaacatcgctggcagatcagtaccttgtgctgggactatgtcttagactgcaagtatccttcctccctctttttgcaggttattttcaaagcaaataccccggctgaccagtgatcccggagagtgcagtatgggctctgtctaactctctgtagagggaaaagtgcacctccagaattgaaagggtttctccatgtctgaatgtgctgtcctggttgctgtttgtcagttgagactgatgtactggctgatgctgattgggccctcctcatattctatcagatggacccagatgattagattcctaggcggccctccactgcgggggtctgtaggggacttgtggacaccgctgatgccttaatgattatgagtggctcagtcctgcttgcgagctgtgggaacctgtcccagggaggatcattagcacggtgaatctgaatgccaagtcgcgatattgcattgctgagacccaaggactttcgcagagcggtgagatctactatcaccggactgcgaaaccaagtgtatcacattcgccatgattaatggtcgcaaaaaggggccacacgtggggacacaaaggacagtccggaaaaatggataaacaacagttggaaaccactccc

SEQ ID NO: 557151 - DNA, 1390 bp, Homo sapiens
cgacaggtgtcgtagaaaacatacccctgaagaagaccaaaatgggaaaggaaaagactcatatcaaacattgtctgtcattggacacgtagaattcgggggcaaagctccaaccgagccttactgggtcactagttcgtcgcatctcataatatgacggctaggaaatccgaacaaacatagaagccattgaagaagatttggagaaggaggtctggtgagatgggaaagggctcctgcaagtatgcctgggtctcgggatgaacgtgaaagctgagcgtggaacgttggtgagtcacgcattagatcatgctaccgttgtggcaaatttcgagaccagcaagtgactaatggtggactgatcgattcgatgcccccatggaccaccatgaggactttatcaagagaacatgattacggggaatgtcttcagggctgagctagtgactgtgctgattggtgtgcatgactaggtagtctggtgaatttgaagctaggtgatctaccaaggaatgaggcgatacccgagaagcatgccacttcttggggttagacacatgggtgtgaaagacacctaatctgtcgggtggttaccaactaatggtattccacgtgagtcgcgaccctagcagcccagacatgagatatggagcgagaagtagctaagggaatgtcagcacgttgacttcttaacgaaactgttcgggctgacagatggcctgacgacaaggtgagcactttggtagaccacatcctctaggtccggacactgggtggaaccaaacatggtgggagcgcaatgtagctaaagatggcctctggttcccaacgggatgggaaccgttcaccggtgacagatgggcaccgaccaaagggggcaaagcaacaagcaaagccacgcaggggcacccgcggcaactgggatcaccaacccgaccaaaagtgggccgcaacgtggaacaccgcacttgggacacttggatgcgtgccacaagactggcccgaccacaactcgggggggataagggaaccgggcacaagagtgggccaatgatgacaacgaggggttgttccatacaacgcgcgatcggcggatccacacgatgatcacagccaagcatatacaacggacactaacacgtgggcatagcacaacagaacgcatgagcgtaaaactatcgcgggacacgttggcatcctgatcgaacaacgtagtcaccgaccagatctgatcacactggctgacacaccaagccgccagcgatggtatgatgggaaacatacagaacgcaagaggaacccaatcgtaatcagggcagaagcacgctctctctcgtcttcctctccacttgctctcttctcgtcctctcaagtacaggagagagggaac

SEQ ID NO: 557152 - DNA, 207 bp, Homo sapiens
  misc_feature (64)..(64): n is a, c, g, or t
tagttggtatgaaatcaaatagagtaatatgatgtaatacttatttttaatttgttttatttcntattgcctgtagcttcttcttggttttgttaattgttaaagtaagcatgtctttttacatttatgtaaatgtaaaatactttatgatcaatattaggagtttctgttttaattctgaaataaaattttcttccaaattattgt

SEQ ID NO: 557153 - DNA, 150 bp, Homo sapiens
  misc_feature (41)..(41): n is a, c, g, or t
  misc_feature (89)..(89): n is a, c, g, or t
ggaggatcctgcgtcttcaactgcggttcttacacaacctntctcttccagcttttgtgatctttcatatgggaggtggagggtttggntggcctcaatgctccgatgggttattggttttggggaaaaaggagagaaacccactgtctg

SEQ ID NO: 557154 - DNA, 280 bp, Homo sapiens
atcgtgttacctggtgtacatgctcctggtctatgagatactagctggtccataaagtcagtggtgtaaagtggactctgaaaaattctggcagtcggagctgtgagtcgacttaagggaaaatattaccgaaatagtggaacagtggcatgtgctccggtaagcaccatgctcactagaatggctaatgttcgggaagcagtgctgggcaggatagggttctgcaggaggcagtgagaaagcctggggctttttcctcttctccaatgtctaataagga

SEQ ID NO: 557155 - DNA, 594 bp, Homo sapiens
gagaaaagtgccccattggtgggcgtgtgcaaaagagggcgggggtattagataagtggggcagccaaaaggcccgtatgtggaaagccgggtaggcccaacatggggtaagagtctctcctttagttaaggccccctatacctctgttggtagccacaaaacccttggtgaccccacttaaaccggtaaagaccttgtagcaaaattgtaattcaggggtaagcacatctttcccgtctagggcccaccttggggggtgttcgctctatatgcccgcctggggttatatggttaataacttatcaagttgcagtcatagactgtgtgaagttatttggtaatctacggaaccctgtgtggttgtgaacagcaacagcaaagatttttcttgtactttaatgttcgggcgctgtaatgccttgtgcaattatcatgggtgttgtacgatcacgcataagtggacccccataataatgaggctcctcacaagtcacggggcgtttcattcattgaggacccaccctttttttactcagtcccctattgatctgggtttttccagcttgaggccccaaaagcccaacccaacatca

SEQ ID NO: 557156 - DNA, 147 bp, Homo sapiens
gaaacgtacctttgccggcgaccggatagcacctggcattctgctgaagtgatccagtctcgagtgaacgaccaggagggccgagaggaattctatgtacactacgtgggctttaaccggcggctggacgagtggtaaaaaagaacc

SEQ ID NO: 557157 - DNA, 194 bp, Homo sapiens
aaactattcgtgtgctgatagcgacactggagtggcggagaaattttcaaagaaaaatgagcgaatgggaggggtgcaaaagagtagagtatgacaacagcatggagaaaacccggtacgctcaaaaagaaaatggaaaaaataaatcccatcacccacagcaaatgacagctgctaaagagaacaccaatccc

SEQ ID NO: 557158 - DNA, 150 bp, Homo sapiens
gtcaaatggtgaatatgctcaacaatggctattcactcaactgtgtggtggggtccaaggcatgccaagagaatcgtaaatcaaaaattgctttccttgacttcagcctgcaaaaacaaaaatgaggcttggtgtcaggtggtcatacag

SEQ ID NO: 557159 - DNA, 1824 bp, Homo sapiens
tggcgccgggagcgcggatggctcacgcctctgtaatcccagctctcaggcacgcgctaagcaggcgggaggatagcttgagcccaggagttcgagacctgcctgggcaatatagcgagaccccgttctccagaacaacggaaccaaccctctcccaaccacccaccgagcgaacacagaccaccccaaccaccacacggtgtggcggaccgccaacgccctctccgaacacacgcctgtagaagaccacgccactggcagcccgagcgccccacggggccgcgttacacctgcgctctccccccgggcccatagaacactcctcgcgccccaaccaacacagcgacagcagagcagcatccccccccatatgaaaaaaaacgcgccagaggggaagaacagacccgcgcttccgtcccacaccagccacgaagcaggaggcagtcatacggcgacgcatccacacggtgggccctcgcccaccccccggcggagcccccagccgcgagcgcgaaggcgaaaaatgcgccccccactgctattgtgttatttactctcccttcttactttctctttatattacacaatcacacaaaacaacaaacaaccatagactacatctttatctacatcatccttcctccttcaccataccccaccatacataacaacacaataccaagaacaaaatatatttctttccttctcctctctacctcttcctctcctcctccctcactcacgctagcacaacagcgaaagtcgattgtatttatcttcactctctcccctttcccttcccacctctcctccccccccgctcagccccataactacgagaaagcgcacaaaccgaccaacaccctcttcctcctttccccctctccttcttttcgcccctgccaacgcaccacgaacggcagcaaattcggaccctcatcgtgtcttctccccgctccgctcctcacagccttccacttccacgcaaccacgaccactcagatatgaaacctcctgctctaattactctctcaattactatttactctcctctctatcctccgtcccgccccttcctgtacacaatacaagcagaacaaacagactagtatctcccttcactcacttccccttttctcgtctattccttctcctactgcctgcgcgcctcgtcactgcgctatacacgagtagaggaatctgatgataacgccagcttccatcagctgctttctctcttctcctagcgccccacccgctcgaatgacgcgcgtcccctgagcaatacagctgcccctgcccccttctctgtcccctccagctctccatcacatccgctctgccatccaagcgcccatacatacacatcaaacatcacccatctcatacgcctccacttaccctctcactaactcactagtaacacacactgacacaagatctcctcgtgcgtcaccactccgccgcctctcctactccccacgacaagccagcaacaaacactctgtcttcctcttactatctcactcctcactccaatgtcccctgagccacttgccatgctactcacattgagtcagacacacagtcaagaaattaaatactatactattctttcttgctcttcctcgcccttctcgatcttccattaccctgcatacacatcgacgaaccatcatcattatggcactctctcagttgctacacgccatcatccctgactccctactatccaccacctacgccaaccaccctactcgtactgtctttcgcacctcattcttctctcctcgcatctcctcatatgcctctatatctaaacac

SEQ ID NO: 557160 - DNA, 243 bp, Homo sapiens
gggtttttcccccccccggggggggggggctttgtttttaatttggtttcccctttttgggggggggcccttcccccctagggtgttttgcgcccccttttgggggggtttttttttttttttgccccccttttggggggttcccccccccctttttccccccccccccccaaagaataaaaaggggaaaaaaaaaaaattaatatcaataaaataattaaaaataataaatgttgaataaaa

SEQ ID NO: 557161 - DNA, 120 bp, Homo sapiens
tgtacaaaacatcactctacatcaccagtattagagacgcctgcccagtgacacatgtttaacggccgcggtaccctaaccgtgcaaaggtagcataattacttgttccttaattaggga

SEQ ID NO: 557162 - DNA, 380 bp, Homo sapiens
tcgagacagaatttcgctcttgttgcccaggctggagtgcaatggcatgatctcggctcaccacaacctccgcctctcgggttcaagtgattctcctgcctaagcctcccaagtagctgggactacaggcatgtgccaccatgcctggctaattctgtatttttagtagacatggggtttctccatgttcgttaggctggtcttgaactcccaacctcaggtgatctgcctgcctcagcctcccaaagtgctgggattacaggcgtgagccaccgtgcccaacaggtatatcgaatttaagatttcaatttgtgtagcacaatttatttaaaagtcgaccagttcgttaaattagtagtagtaggaaaaccgggaatttc

SEQ ID NO: 557163 - DNA, 1481 bp, Homo sapiens
cccgttgtggtgagacgtggttgtgtttctcccctctttgggttagtgatattttcaatagggaggtggcccactgtgtgggtgatgttatgtgcaataccccccgcgtagagtcttttctctacggagatcacctctcgcccgctttattcttggtgtggccccagcccattttgtgtgcttgttaagggtttcctcatacgcctgctggtgttgtggtaaataattccattgtgccccaccggggagtggttctctcctggtgtcggtgtcgtggggtgcatccagtgtcatacgaccagccgtctttgggggggggttgcccaccagggccttggggcccactatttctcccccctgtgggcccccccggggtggtgtgtgagcccaccgcgtggctctccttttgtcgcccctcgtgtgtgattgttgtccgcggggggtaacaccgcgagcacacgttgtgggagagttggcttgttgccccagcaggcccacgtcgtcctgttaatattgctccacgggggggtttctatcgtgcccgggggaagatttatattttttgtctcgggggggcttctcaacaccctccccttctttggtaaaacttgttcgtggggccccccaaatgcccacacggggggccaccgctgttttataggcgccaccgccccccctccagtcgttgtgttgaccacaggggcccccctttggtggtgggcccacccctggggtggcactataccctctcggttcactaaggtcacaatagggtccctcggagtaccgcaacggcgttgtgttgtctctcggttcacaacgctcgctcccccccggagtttttcgcccacccggagacccacagggagacactattgtcccactacagtgggtcccttctcacaggggccacactttggccaacccccgggcgccccccttttggcccccatcgtttgttctctggggtacacgtgttttgtgtgaaaagagtgttgtgtggaaaaaggaagaacctccttcgagagtgagaagagacacacccacagcgtgttaatattgtgataaatatataggctctctcgttgaagagagccacccacatcgtccctcttggccctctgtccttcttgtggaacttgagacccgcgagaaccggctcacatagttggcgctgaagaaatgggagacccacattctctcctctgtgccgccacactgggcttttccgcgcgctgccacccgtgtgctcggtgcgcgtttccccttcaccgccacgaccacgcgaaaaggtggtttggcgccacacttctgagtccacactggaaacctctctggattcacaccgcgcgctgaatttccctcttttcccttacatcccattaaaactacacataccagactggacacaccctgtatcaaaccggctgaatatccccttttcccgttacctcccattaaagcgtaccatccagacctgg

SEQ ID NO: 557164 - DNA, 80 bp, Homo sapiens
aagaagtatggctttttatgcatccttcatcgagggcattgaagttgcatggactgataaaagttgatgcaaaaaaaaaa

SEQ ID NO: 557165 - DNA, 340 bp, Homo sapiens
atcccctgtcgagatgtgacatctctacggctgctgtgtctgcgctggcgcttacctagctgccttctctccacccaccacgccttggattggtctggcagaagctctgtggacgctgatgcgagcctgggctgggtccccctaagggaccatccattgctgataacacagggaacatctcttaaagaatgctgggaactgtctaagccccgcagtcattgctcggcctcctgaaagatgcttccaagtcaggcggatgttaacttcgtgaacgctaagctgctggtgaaagaggctggcctcactgtcagcacctcccacagccctgctgcaccagggg

SEQ ID NO: 557166 - DNA, 286 bp, Homo sapiens
  misc_feature (262)..(262): n is a, c, g, or t
gaattccccccccccccccccccccccctatccagttggtgggggccatgaggtggaaagtagtttttcacggaggggaggggaaaagggggaaccccccaaagccatcgtgtgacctgtggaatgtgtgaatcccccgaaattgttcccagctgtggtttaatccgggggggattggaagggagaaccagtccctgggttgggagtgagggtgatttttaaaccccataggccaaattcgataaaagttagtaatgatttntttttcctggagaccggtttataa

SEQ ID NO: 557167 - DNA, 803 bp, Homo sapiens
  misc_feature (11)..(11): n is a, c, g, or t
  misc_feature (18)..(19): n is a, c, g, or t
  misc_feature (70)..(70): n is a, c, g, or t
  misc_feature (72)..(72): n is a, c, g, or t
  misc_feature (431)..(431): n is a, c, g, or t
  misc_feature (433)..(433): n is a, c, g, or t
  misc_feature (522)..(522): n is a, c, g, or t
  misc_feature (555)..(555): n is a, c, g, or t
  misc_feature (558)..(558): n is a, c, g, or t
taaataaattnttaattnngtaataaaaaagaaagaaattaagatattaaattttataatagatgtgaantnaggagaaagggtaaatatttataggaaagtgagctttggcaaagtaacaaaaaacataaagtggggaacggacaccgtattgaaccaatgatgctgggataattggcaagccacatgtaggagaatgaaactagatcctcatctctcaccttatacaaaagtcaactcaagatagatgaaagacttaaatctaagacctgaaaccataaaaattctagaagagaatatcagaaaaacccttgtagacattgacttaggcaaagacttcatgaccaaaaacccaaaagcaaatgcaacaaaaacaaagattaaatagtgggacttaattaaactaaaaagcttcttgaaacaaaaataantngaagaataaattggccaacccacagaattgtgaaataattttcacaatctttacttccaccaaagaactattattctccaatttacaanggactcatacaaatctggggaaaaaaaaaaaanatnaaaaaaaaaaattttggcccccctggccccaacaatttttttatttttaaagttttttttttccccccccatttaaacttattttttcaactttcccctatagagaggggattaaaattacattggcgcgggtttaaaaaaaggagttgggaaaccacacccgtgcccccctatatagcttgggcacaaacccttttttcagggggggaaaagaaaagaaccgcccccccccctttctcaattta

SEQ ID NO: 557168 - DNA, 213 bp, Homo sapiens
  misc_feature (4)..(4): n is a, c, g, or t
cgancttctgctctgaggggcagtggctttgacgagactgggctggctccactccatgaggtatttccacacctccgtgttcctggcccgtgccgggtggagccctgtttcatctcagtgggctacgtggacggcacccagttcgtgaggttcgacagcgacgccggggagtccgaggacggagccccgggcgccgtggatagagcagaaggt

SEQ ID NO: 557169 - DNA, 812 bp, Homo sapiens
  misc_feature (14)..(14): n is a, c, g, or t
  misc_feature (19)..(19): n is a, c, g, or t
  misc_feature (24)..(24): n is a, c, g, or t
  misc_feature (26)..(26): n is a, c, g, or t
ggaaataaatttgngcctnattgngnatcagccgctgcattggccgaggatggcatccttgtgccattcacgtcccatgaggaccatgacttcttccagcatgtggaaatgcacctgcggtctgaacatccccctctctgtgggcgggaccacctcagctttcgctcctactacttccctgtgaagaatgtgattgatggagacctctgtgagcagttcaattccatggaacccaacaaacaaaagaacgtctctgaagaactggaccgaaccccacccgaagtgtccaagaaactcgaggatatccggacccgctacgccttctgagccctcctttcccggtggggcttgccagagactgtgtgttttgtttcccccaccaccatcactgccacctggcttctgccatgtggcaggagggtgactggataattaagactgcattatgaaagtcaacagctctttcccctcagctcttctcctggaatgactggcttcccctcaaattggcactgagatttgctacacttctccccacctggtacatgatacatgaccccaggttccagtgtagaacctgagtcccccattccccaaagccatccctgcattgatatgtcttgactctcctgtctacttttgcacacacccttaatttttaattggttttcttgtaaatacagttttgtacaatgttatctctgtgggaggaaggaggcaggctgtggtgggactgggtagggtatagtatcactcctgagttccactgctctagaatctaaccagaaatagaaacctagtttttaaggtga

SEQ ID NO: 557170 - DNA, 181 bp, Homo sapiens
gcatactgtacaaaggctaataaactagttgagaagcagaacccagctgacggactgcacactttgggggctcaacatgcaatgtggtcttggctgtggcaaccagttgccaaaaacagatggaggaagtgaaaccaataaacagcgaagcaaacggcacacagaggacgggtgcgaacgc

SEQ ID NO: 557171 - DNA, 872 bp, Homo sapiens
ggcacaaataatgaagctctagctcagtatgttcatgtatcaatattgtagtatttaaaatgtcctcatgtctccgattctcttgctttgtcctctcacttctttagcagatgtctcaagaaaatattgaggaagcagagtatatctgtaggctcttctgacccctagttttcttctggatcattttgctctgtgtgcatgtgtatgtgtgtatgtgtgtaataactacacatagaagaactgccttggaaggtttctgaagagaactcttagtgtttcatttggctttgtaattctaatgagttcttatctaaccaactcccttcttttctttttcagatgagtttgatgcctacatcattgtgtctttcgtgaatgccaccctagtgttgtccattggagaaactgtagaagaagtgactgactctgggttcctggggaccaccccgaccttgtcctgctccttattaggagatgatgccttggtgcaggtctatccagatggcattcggcacatacgagcagacaagagagtcaatgagtggaatgactggcttcccctcaaattggcactgagatttgctacacttctccccacctggtacatgatacatgaccccaggttccagtgtagaacctgagtcccccattccccaaagccatccctgcattgatatgtcttgactctcctgtctacttttgcacacacccttaatttttaattggttttcttgtaaatacagttttgtacaatgttatctctgtgggaggaaggaggcaggctgtggtgggactgggtagggtatagtatcactcctgagttccactgctctagaatctaaccagaaatagaaacctagtttttaaggtga

SEQ ID NO: 557172 - DNA, 3804 bp, Homo sapiens
  misc_feature (106)..(106): n is a, c, g, or t
  misc_feature (113)..(113): n is a, c, g, or t
  misc_feature (115)..(116): n is a, c, g, or t
gcgtcgcatcgttcctggccagttcttagctgtgtgatcccaaagggcgagccgttatgattagtgccattgagaaacagaaattggtgtatatttagaacagagntgctgcngnncgacttaccatttcatctcccctggaagcccacaaagcaaacactttagtgtatcatgtagttggagtagatgtcggatttgaaaatccaatgtttgcttgtctggaaatggattatgaggaagcagacaatgatccaacaggggaagcagcagctaatacccagcagacacttactttctatgagctagaccttggtttaaatcatgtggtccgaaaatacagtgaacctttggaggaacacggcaacttccttattacagttccaggagggtcagatggtccaagtggagtactgatctgctctgaaaactatattacttacaagaacttggtgaccagccagatatccgctgtccaattcccaggaggcggaatgacctggatgaccctgaaagaggaatgatttttgtctgctctgcaacccataaaaccaaatcgatgttcttctttttggctcaaactgagcagggagatatctttaagatcactttggagacagatgaagatatggttactgagatccggctcaaatattttgatactgtacccgttgctgctgccatgtgtgtgcttaaaacagggttcctttttgtagcatcagaatttggaaaccattacttatatcaaattgcacatcttggagatgatgatgaagaacctgagttttcatcagccatgcctctggaagaaggagacacattcttttttcagccaagaccacttaaaaaccttgtgctggttgatgagttggacagcctctctcccattctgttttgccagatagctgatctggccaatgaagatactccacagttgtatgtggcctgtggtaggggaccccgatcatctctgagagtcctaagacatggacttgaggtgtcagaaatggctgtttctgagctacctggtaaccccaacgctgtctggacagtgcgtcgacacattgaagatgagtttgatgcctacatcattgtgtctttcgtgaatgccaccctagtgttgtccattggagaaactgtagaagaagtgactgactctgggttcctggggaccaccccgaccttgtcctgctccttattaggagatgatgccttggtgcaggtctatccagatggcattcggcacatacgagcagacaagagagtcaatgagtggaagacccctggaaagaaaacaattgtgaagtgtgcagtgaaccagcgacaagtggtgattgccctgacaggaggagagctggtctatttcgagatggatccttcaggacagctgaatgagtacacagaacggaaggagatgtcagcagatgtggtgtgcatgagtctggccaatgtaccccctggagagcagcggtctcgcttcctggctgtggggcttgtggacaacactgtcagaatcatctccctggatccctcagactgtttgcaacctctaagcatgcaggctctcccagcccagcctgagtccttgtgtatcgtggaaatgggtgggactgagaagcaggatgagctgggtgagaggggctcgattggcttcctatacctgaatattgggctacagaacggtgtgctgctgaggactgtcttggaccctgtcactggggatttgtctgatactcgcactcggtacctggggtcccgtcctgtgaagctcttccgagtccgaatgcaaggccaggaggcagtattggccatgtcaagccgctcatggttgagctattcttaccaatctcgcttccatctcaccccactgtcttacgagacactggaatttgcatcgggttttgcctcggaacagtgtcccgagggcattgtggccatctccaccaacaccctacggattttggcattagagaagctcggtgctgtcttcaatcaagtagccttcccactgcagtacacacccaggaaatttgtcatccaccctgagagtaacaaccttattatcattgaaacggaccacaatgcctacactgaggccacgaaagctcagagaaagcagcagatggcagaggaaatggtggaagcagcaggggaggatgagcgggagctggccgcagagatggcagcagcattcctcaatgaaaacctccctgaatccatctttggagctcccaaggctggcaatgggcagtgggcctctgtgatccgagtgatgaatcccattcaagggaacacactggaccttgtccagctggaacagaatgaggcagcttttagtgtggctgtgtgcaggttttccaacactggtgaagactggtatgtgctggtgggtgtggccaaggacctgatactaaacccccgatctgtggcagggggcttcgtctatacttacaagcttgtgaacaatggggaaaaactggagtttttgcacaagactcctgtggaagaggtccctgctgctattgccccattccaggggagggtgttgattggtgtggggaagctgttgcgtgtctatgacctgggaaagaagaagttactccgaaaatgtgagaataagcatattgccaattatatctctgggatccagactatcggacatagggtaattgtatctgatgtccaagaaagtttcatctgggttcgctacaagcgtaatgaaaaccagcttatcatctttgctgatgatacctacccccgatgggtcactacagccagcctcctggactatgacactgtggctggggcagacaagtttggcaacatatgtgtggtgaggctcccacctaacaccaatgatgaagtagatgaggatcctacaggaaacaaagccctgtgggaccgtggcttgctcaatggggcctcccagaaggcagaggtgatcatgaactaccatgtcggggagacggtgctgtccttgcagaagaccacgctgatccctggaggctcagaatcacttgtctataccaccttgtctggaggaattggcatccttgtgccattcacgtcccatgaggaccatgacttcttccagcatgtggaaatgcacctgcggtctgaacatccccctctctgtgggcgggaccacctcagctttcgctcctactacttccctgtgaagaatgtgattgatggagacctctgtgagcagttcaattccatggaacccaacaaacaaaagaacgtctctgaagaactggaccgaaccccacccgaagtgtccaagaaactcgaggatatccggacccgctacgccttctgagccctcctttcccggtggggcttgccagagactgtgtgttttgtttcccccaccaccatcactgccacctggcttctgccatgtggcaggagggtgactggataattaagactgcattatgaaagtcaacagctctttcccctcagctcttctcctggaatgactggcttcccctcaaattggcactgagatttgctacacttctccccacctggtacatgatacatgaccccaggttccagtgtagaacctgagtcccccattccccaaagccatccctgcattgatatgtcttgactctcctgtctacttttgcacacacccttaatttttaattggttttcttgtaaatacagttttgtacaatgttatctctgtgggaggaaggaggcaggctgtggtgggactgggtagggtatagtatcactcctgagttccactgctctagaatctaaccagaaatagaaacctagtttttaaggtga

SEQ ID NO: 557173 - DNA, 3644 bp, Homo sapiens
gttggagttggtggtggcttaagttttgaagggaggtagcatccgtggatatccacaccatccttctcgctgcagggaagcagacaatgatccaacaggggaagcagcagctaatacccagcagacacttactttctatgagctagaccttggtttaaatcatgtggtccgaaaatacagtgaacctttggaggaacacggcaacttccttattacagttccaggagggtcagatggtccaagtggagtactgatctgctctgaaaactatattacttacaagaacttggtgaccagccagatatccgctgtccaattcccaggaggcggaatgacctggatgaccctgaaagaggaatgatttttgtctgctctgcaacccataaaaccaaatcgatgttcttctttttggctcaaactgagcagggagatatctttaagatcactttggagacagatgaagatatggttactgagatccggctcaaatattttgatactgtacccgttgctgctgccatgtgtgtgcttaaaacagggttcctttttgtagcatcagaatttggaaaccattacttatatcaaattgcacatcttggagatgatgatgaagaacctgagttttcatcagccatgcctctggaagaaggagacacattcttttttcagccaagaccacttaaaaaccttgtgctggttgatgagttggacagcctctctcccattctgttttgccagatagctgatctggccaatgaagatactccacagttgtatgtggcctgtggtaggggaccccgatcatctctgagagtcctaagacatggacttgaggtgtcagaaatggctgtttctgagctacctggtaaccccaacgctgtctggacagtgcgtcgacacattgaagatgagtttgatgcctacatcattgtgtctttcgtgaatgccaccctagtgttgtccattggagaaactgtagaagaagtgactgactctgggttcctggggaccaccccgaccttgtcctgctccttattaggagatgatgccttggtgcaggtctatccagatggcattcggcacatacgagcagacaagagagtcaatgagtggaagacccctggaaagaaaacaattgtgaagtgtgcagtgaaccagcgacaagtggtgattgccctgacaggaggagagctggtctatttcgagatggatccttcaggacagctgaatgagtacacagaacggaaggagatgtcagcagatgtggtgtgcatgagtctggccaatgtaccccctggagagcagcggtctcgcttcctggctgtggggcttgtggacaacactgtcagaatcatctccctggatccctcagactgtttgcaacctctaagcatgcaggctctcccagcccagcctgagtccttgtgtatcgtggaaatgggtgggactgagaagcaggatgagctgggtgagaggggctcgattggcttcctatacctgaatattgggctacagaacggtgtgctgctgaggactgtcttggaccctgtcactggggatttgtctgatactcgcactcggtacctggggtcccgtcctgtgaagctcttccgagtccgaatgcaaggccaggaggcagtattggccatgtcaagccgctcatggttgagctattcttaccaatctcgcttccatctcaccccactgtcttacgagacactggaatttgcatcgggttttgcctcggaacagtgtcccgagggcattgtggccatctccaccaacaccctacggattttggcattagagaagctcggtgctgtcttcaatcaagtagccttcccactgcagtacacacccaggaaatttgtcatccaccctgagagtaacaaccttattatcattgaaacggaccacaatgcctacactgaggccacgaaagctcagagaaagcagcagatggcagaggaaatggtggaagcagcaggggaggatgagcgggagctggccgcagagatggcagcagcattcctcaatgaaaacctccctgaatccatctttggagctcccaaggctggcaatgggcagtgggcctctgtgatccgagtgatgaatcccattcaagggaacacactggaccttgtccagctggaacagaatgaggcagcttttagtgtggctgtgtgcaggttttccaacactggtgaagactggtatgtgctggtgggtgtggccaaggacctgatactaaacccccgatctgtggcagggggcttcgtctatacttacaagcttgtgaacaatggggaaaaactggagtttttgcacaagactcctgtggaagaggtccctgctgctattgccccattccaggggagggtgttgattggtgtggggaagctgttgcgtgtctatgacctgggaaagaagaagttactccgaaaatgtgagaataagcatattgccaattatatctctgggatccagactatcggacatagggtaattgtatctgatgtccaagaaagtttcatctgggttcgctacaagcgtaatgaaaaccagcttatcatctttgctgatgatacctacccccgatgggtcactacagccagcctcctggactatgacactgtggctggggcagacaagtttggcaacatatgtgtggtgaggctcccacctaacaccaatgatgaagtagatgaggatcctacaggaaacaaagccctgtgggaccgtggcttgctcaatggggcctcccagaaggcagaggtgatcatgaactaccatgtcggggagacggtgctgtccttgcagaagaccacgctgatccctggaggctcagaatcacttgtctataccaccttgtctggaggaattggcatccttgtgccattcacgtcccatgaggaccatgacttcttccagcatgtggaaatgcacctgcggtctgaacatccccctctctgtgggcgggaccacctcagctttcgctcctactacttccctgtgaagaatgtgattgatggagacctctgtgagcagttcaattccatggaacccaacaaacaaaagaacgtctctgaagaactggaccgaaccccacccgaagtgtccaagaaactcgaggatatccggacccgctacgccttctgagccctcctttcccggtggggcttgccagagactgtgtgttttgtttcccccaccaccatcactgccacctggcttctgccatgtggcaggagggtgactggataattaagactgcattatgaaagtcaacagctctttcccctcagctcttctcctggaatgactggcttcccctcaaattggcactgagatttgctacacttctccccacctggtacatgatacatgaccccaggttccagtgtagaacctgagtcccccattccccaaagccatccctgcattgatatgtcttgactctcctgtctacttttgcacacacccttaatttttaattggttttcttgtaaatacagttttgtacaatgttatctctgtgggaggaaggaggcaggctgtggtgggactgggtagggtatagtatcactcctgagttccactgctctagaatctaaccagaaatagaaacctagtttttaaggtga

SEQ ID NO: 557174 - DNA, 3144 bp, Homo sapiens
  misc_feature (14)..(14): n is a, c, g, or t
  misc_feature (22)..(22): n is a, c, g, or t
ctacgtcgaggccnggtgttantcggccgaggaaacagggttcctttttgtagcatcagaatttggaaaccattacttatatcaaattgcacatcttggagatgatgatgaagaacctgagttttcatcagccatgcctctggaagaaggagacacattcttttttcagccaagaccacttaaaaaccttgtgctggttgatgagttggacagcctctctcccattctgttttgccagatagctgatctggccaatgaagatactccacagttgtatgtggcctgtggtaggggaccccgatcatctctgagagtcctaagacatggacttgaggtgtcagaaatggctgtttctgagctacctggtaaccccaacgctgtctggacagtgcgtcgacacattgaagatgagtttgatgcctacatcattgtgtctttcgtgaatgccaccctagtgttgtccattggagaaactgtagaagaagtgactgactctgggttcctggggaccaccccgaccttgtcctgctccttattaggagatgatgccttggtgcaggtctatccagatggcattcggcacatacgagcagacaagagagtcaatgagtggaagacccctggaaagaaaacaattgtgaagtgtgcagtgaaccagcgacaagtggtgattgccctgacaggaggagagctggtctatttcgagatggatccttcaggacagctgaatgagtacacagaacggaaggagatgtcagcagatgtggtgtgcatgagtctggccaatgtaccccctggagagcagcggtctcgcttcctggctgtggggcttgtggacaacactgtcagaatcatctccctggatccctcagactgtttgcaacctctaagcatgcaggctctcccagcccagcctgagtccttgtgtatcgtggaaatgggtgggactgagaagcaggatgagctgggtgagaggggctcgattggcttcctatacctgaatattgggctacagaacggtgtgctgctgaggactgtcttggaccctgtcactggggatttgtctgatactcgcactcggtacctggggtcccgtcctgtgaagctcttccgagtccgaatgcaaggccaggaggcagtattggccatgtcaagccgctcatggttgagctattcttaccaatctcgcttccatctcaccccactgtcttacgagacactggaatttgcatcgggttttgcctcggaacagtgtcccgagggcattgtggccatctccaccaacaccctacggattttggcattagagaagctcggtgctgtcttcaatcaagtagccttcccactgcagtacacacccaggaaatttgtcatccaccctgagagtaacaaccttattatcattgaaacggaccacaatgcctacactgaggccacgaaagctcagagaaagcagcagatggcagaggaaatggtggaagcagcaggggaggatgagcgggagctggccgcagagatggcagcagcattcctcaatgaaaacctccctgaatccatctttggagctcccaaggctggcaatgggcagtgggcctctgtgatccgagtgatgaatcccattcaagggaacacactggaccttgtccagctggaacagaatgaggcagcttttagtgtggctgtgtgcaggttttccaacactggtgaagactggtatgtgctggtgggtgtggccaaggacctgatactaaacccccgatctgtggcagggggcttcgtctatacttacaagcttgtgaacaatggggaaaaactggagtttttgcacaagactcctgtggaagaggtccctgctgctattgccccattccaggggagggtgttgattggtgtggggaagctgttgcgtgtctatgacctgggaaagaagaagttactccgaaaatgtgagaataagcatattgccaattatatctctgggatccagactatcggacatagggtaattgtatctgatgtccaagaaagtttcatctgggttcgctacaagcgtaatgaaaaccagcttatcatctttgctgatgatacctacccccgatgggtcactacagccagcctcctggactatgacactgtggctggggcagacaagtttggcaacatatgtgtggtgaggctcccacctaacaccaatgatgaagtagatgaggatcctacaggaaacaaagccctgtgggaccgtggcttgctcaatggggcctcccagaaggcagaggtgatcatgaactaccatgtcggggagacggtgctgtccttgcagaagaccacgctgatccctggaggctcagaatcacttgtctataccaccttgtctggaggaattggcatccttgtgccattcacgtcccatgaggaccatgacttcttccagcatgtggaaatgcacctgcggtctgaacatccccctctctgtgggcgggaccacctcagctttcgctcctactacttccctgtgaagaatgtgattgatggagacctctgtgagcagttcaattccatggaacccaacaaacaaaagaacgtctctgaagaactggaccgaaccccacccgaagtgtccaagaaactcgaggatatccggacccgctacgccttctgagccctcctttcccggtggggcttgccagagactgtgtgttttgtttcccccaccaccatcactgccacctggcttctgccatgtggcaggagggtgactggataattaagactgcattatgaaagtcaacagctctttcccctcagctcttctcctggaatgactggcttcccctcaaattggcactgagatttgctacacttctccccacctggtacatgatacatgaccccaggttccagtgtagaacctgagtcccccattccccaaagccatccctgcattgatatgtcttgactctcctgtctacttttgcacacacccttaatttttaattggttttcttgtaaatacagttttgtacaatgttatctctgtgggaggaaggaggcaggctgtggtgggactgggtagggtatagtatcactcctgagttccactgctctagaatctaaccagaaatagaaacctagtttttaaggtga

SEQ ID NO: 557175 - DNA, 3833 bp, Homo sapiens
  misc_feature (106)..(106): n is a, c, g, or t
  misc_feature (113)..(113): n is a, c, g, or t
  misc_feature (115)..(116): n is a, c, g, or t
gcgtcgcatcgttcctggccagttcttagctgtgtgatcccaaagggcgagccgttatgattagtgccattgagaaacagaaattggtgtatatttagaacagagntgctgcngnncgacttaccatttcatctcccctggaagcccacaaagcaaacactttagtgtatcatgtagttggagtagatgtcggatttgaaaatccaatgtttgcttgtctggaaatggattatgaggaagcagacaatgatccaacaggggaagcagcagctaatacccagcagacacttactttctatgagctagaccttggtttaaatcatgtggtccgaaaatacagtgaacctttggaggaacacggcaacttccttattacagttccaggagggtcagatggtccaagtggagtactgatctgctctgaaaactatattacttacaagaacttggtgaccagccagatatccgctgtccaattcccaggaggcggaatgacctggatgaccctgaaagaggaatgatttttgtctgctctgcaacccataaaaccaaatcgatgttcttctttttggctcaaactgagcagggagatatctttaagatcactttggagacagatgaagatatggttactgagatccggctcaaatattttgatactgtacccgttgctgctgccatgtgtgtgcttaaaacagggttcctttttgtagcatcagaatttggaaaccattacttatatcaaattgcacatcttggagatgatgatgaagaacctgagttttcatcagccatgcctctggaagaaggagacacattcttttttcagccaagaccacttaaaaaccttgtgctggttgatgagttggacagcctctctcccattctgttttgccagatagctgatctggccaatgaagatactccacagttgtatgtggcctgtggtaggggaccccgatcatctctgagagtcctaagacatggacttgaggtgtcagaaatggctgtttctgagctacctggtaaccccaacgctgtctggacagtgcgtcgacacattgaaggtggctggtgaaggtgctgatcaccacagatgagtttgatgcctacatcattgtgtctttcgtgaatgccaccctagtgttgtccattggagaaactgtagaagaagtgactgactctgggttcctggggaccaccccgaccttgtcctgctccttattaggagatgatgccttggtgcaggtctatccagatggcattcggcacatacgagcagacaagagagtcaatgagtggaagacccctggaaagaaaacaattgtgaagtgtgcagtgaaccagcgacaagtggtgattgccctgacaggaggagagctggtctatttcgagatggatccttcaggacagctgaatgagtacacagaacggaaggagatgtcagcagatgtggtgtgcatgagtctggccaatgtaccccctggagagcagcggtctcgcttcctggctgtggggcttgtggacaacactgtcagaatcatctccctggatccctcagactgtttgcaacctctaagcatgcaggctctcccagcccagcctgagtccttgtgtatcgtggaaatgggtgggactgagaagcaggatgagctgggtgagaggggctcgattggcttcctatacctgaatattgggctacagaacggtgtgctgctgaggactgtcttggaccctgtcactggggatttgtctgatactcgcactcggtacctggggtcccgtcctgtgaagctcttccgagtccgaatgcaaggccaggaggcagtattggccatgtcaagccgctcatggttgagctattcttaccaatctcgcttccatctcaccccactgtcttacgagacactggaatttgcatcgggttttgcctcggaacagtgtcccgagggcattgtggccatctccaccaacaccctacggattttggcattagagaagctcggtgctgtcttcaatcaagtagccttcccactgcagtacacacccaggaaatttgtcatccaccctgagagtaacaaccttattatcattgaaacggaccacaatgcctacactgaggccacgaaagctcagagaaagcagcagatggcagaggaaatggtggaagcagcaggggaggatgagcgggagctggccgcagagatggcagcagcattcctcaatgaaaacctccctgaatccatctttggagctcccaaggctggcaatgggcagtgggcctctgtgatccgagtgatgaatcccattcaagggaacacactggaccttgtccagctggaacagaatgaggcagcttttagtgtggctgtgtgcaggttttccaacactggtgaagactggtatgtgctggtgggtgtggccaaggacctgatactaaacccccgatctgtggcagggggcttcgtctatacttacaagcttgtgaacaatggggaaaaactggagtttttgcacaagactcctgtggaagaggtccctgctgctattgccccattccaggggagggtgttgattggtgtggggaagctgttgcgtgtctatgacctgggaaagaagaagttactccgaaaatgtgagaataagcatattgccaattatatctctgggatccagactatcggacatagggtaattgtatctgatgtccaagaaagtttcatctgggttcgctacaagcgtaatgaaaaccagcttatcatctttgctgatgatacctacccccgatgggtcactacagccagcctcctggactatgacactgtggctggggcagacaagtttggcaacatatgtgtggtgaggctcccacctaacaccaatgatgaagtagatgaggatcctacaggaaacaaagccctgtgggaccgtggcttgctcaatggggcctcccagaaggcagaggtgatcatgaactaccatgtcggggagacggtgctgtccttgcagaagaccacgctgatccctggaggctcagaatcacttgtctataccaccttgtctggaggaattggcatccttgtgccattcacgtcccatgaggaccatgacttcttccagcatgtggaaatgcacctgcggtctgaacatccccctctctgtgggcgggaccacctcagctttcgctcctactacttccctgtgaagaatgtgattgatggagacctctgtgagcagttcaattccatggaacccaacaaacaaaagaacgtctctgaagaactggaccgaaccccacccgaagtgtccaagaaactcgaggatatccggacccgctacgccttctgagccctcctttcccggtggggcttgccagagactgtgtgttttgtttcccccaccaccatcactgccacctggcttctgccatgtggcaggagggtgactggataattaagactgcattatgaaagtcaacagctctttcccctcagctcttctcctggaatgactggcttcccctcaaattggcactgagatttgctacacttctccccacctggtacatgatacatgaccccaggttccagtgtagaacctgagtcccccattccccaaagccatccctgcattgatatgtcttgactctcctgtctacttttgcacacacccttaatttttaattggttttcttgtaaatacagttttgtacaatgttatctctgtgggaggaaggaggcaggctgtggtgggactgggtagggtatagtatcactcctgagttccactgctctagaatctaaccagaaatagaaacctagtttttaaggtga

SEQ ID NO: 557176 - DNA, 3076 bp, Homo sapiens
ggcacaaataatgaagctctagctcagtatgttcatgtatcaatattgtagtatttaaaatgtcctcatgtctccgattctcttgctttgtcctctcacttctttagcagatgtctcaagaaaatattgaggaagcagagtatatctgtaggctcttctgacccctagttttcttctggatcattttgctctgtgtgcatgtgtatgtgtgtatgtgtgtaataactacacatagaagaactgccttggaaggtttctgaagagaactcttagtgtttcatttggctttgtaattctaatgagttcttatctaaccaactcccttcttttctttttcagatgagtttgatgcctacatcattgtgtctttcgtgaatgccaccctagtgttgtccattggagaaactgtagaagaagtgactgactctgggttcctggggaccaccccgaccttgtcctgctccttattaggagatgatgccttggtgcaggtctatccagatggcattcggcacatacgagcagacaagagagtcaatgagtggaagacccctggaaagaaaacaattgtgaagtgtgcagtgaaccagcgacaagtggtgattgccctgacaggaggagagctggtctatttcgagatggatccttcaggacagctgaatgagtacacagaacggaaggagatgtcagcagatgtggtgtgcatgagtctggccaatgtaccccctggagagcagcggtctcgcttcctggctgtggggcttgtggacaacactgtcagaatcatctccctggatccctcagactgtttgcaacctctaagcatgcaggctctcccagcccagcctgagtccttgtgtatcgtggaaatgggtgggactgagaagcaggatgagctgggtgagaggggctcgattggcttcctatacctgaatattgggctacagaacggtgtgctgctgaggactgtcttggaccctgtcactggggatttgtctgatactcgcactcggtacctggggtcccgtcctgtgaagctcttccgagtccgaatgcaaggccaggaggcagtattggccatgtcaagccgctcatggttgagctattcttaccaatctcgcttccatctcaccccactgtcttacgagacactggaatttgcatcgggttttgcctcggaacagtgtcccgagggcattgtggccatctccaccaacaccctacggattttggcattagagaagctcggtgctgtcttcaatcaagtagccttcccactgcagtacacacccaggaaatttgtcatccaccctgagagtaacaaccttattatcattgaaacggaccacaatgcctacactgaggccacgaaagctcagagaaagcagcagatggcagaggaaatggtggaagcagcaggggaggatgagcgggagctggccgcagagatggcagcagcattcctcaatgaaaacctccctgaatccatctttggagctcccaaggctggcaatgggcagtgggcctctgtgatccgagtgatgaatcccattcaagggaacacactggaccttgtccagctggaacagaatgaggcagcttttagtgtggctgtgtgcaggttttccaacactggtgaagactggtatgtgctggtgggtgtggccaaggacctgatactaaacccccgatctgtggcagggggcttcgtctatacttacaagcttgtgaacaatggggaaaaactggagtttttgcacaagactcctgtggaagaggtccctgctgctattgccccattccaggggagggtgttgattggtgtggggaagctgttgcgtgtctatgacctgggaaagaagaagttactccgaaaatgtgagaataagcatattgccaattatatctctgggatccagactatcggacatagggtaattgtatctgatgtccaagaaagtttcatctgggttcgctacaagcgtaatgaaaaccagcttatcatctttgctgatgatacctacccccgatgggtcactacagccagcctcctggactatgacactgtggctggggcagacaagtttggcaacatatgtgtggtgaggctcccacctaacaccaatgatgaagtagatgaggatcctacaggaaacaaagccctgtgggaccgtggcttgctcaatggggcctcccagaaggcagaggtgatcatgaactaccatgtcggggagacggtgctgtccttgcagaagaccacgctgatccctggaggctcagaatcacttgtctataccaccttgtctggaggaattggcatccttgtgccattcacgtcccatgaggaccatgacttcttccagcatgtggaaatgcacctgcggtctgaacatccccctctctgtgggcgggaccacctcagctttcgctcctactacttccctgtgaagaatgtgattgatggagacctctgtgagcagttcaattccatggaacccaacaaacaaaagaacgtctctgaagaactggaccgaaccccacccgaagtgtccaagaaactcgaggatatccggacccgctacgccttctgagccctcctttcccggtggggcttgccagagactgtgtgttttgtttcccccaccaccatcactgccacctggcttctgccatgtggcaggagggtgactggataattaagactgcattatgaaagtcaacagctctttcccctcagctcttctcctggaatgactggcttcccctcaaattggcactgagatttgctacacttctccccacctggtacatgatacatgaccccaggttccagtgtagaacctgagtcccccattccccaaagccatccctgcattgatatgtcttgactctcctgtctacttttgcacacacccttaatttttaattggttttcttgtaaatacagttttgtacaatgttatctctgtgggaggaaggaggcaggctgtggtgggactgggtagggtatagtatcactcctgagttccactgctctagaatctaaccagaaatagaaacctagtttttaaggtga

SEQ ID NO: 557177 - DNA, 2285 bp, Homo sapiens
cagctctgtggactgttttcattttacacacgtgtgagcaggcttagagagatagaataggtgagctagataatattgctcgtagcccatgcttttcacatatgctaagccatagtggctctctcaagccctctttttcttaagataggctgttatatttctagaatatcttaggatactctgcagactgaaatttggggatagggcttttggtcagcttataccatatttgtattctttcccaaaccatattgagctgggttttttttttcccctcaggtattggccatgtcaagccgctcatggttgagctattcttaccaatctcgcttccatctcaccccactgtcttacgagacactggaatttgcatcgggttttgcctcggaacagtgtcccgagggcattgtggccatctccaccaacaccctacggattttggcattagagaagctcggtgctgtcttcaatcaagtagccttcccactgcagtacacacccaggaaatttgtcatccaccctgagagtaacaaccttattatcattgaaacggaccacaatgcctacactgaggccacgaaagctcagagaaagcagcagatggcagaggaaatggtggaagcagcaggggaggatgagcgggagctggccgcagagatggcagcagcattcctcaatgaaaacctccctgaatccatctttggagctcccaaggctggcaatgggcagtgggcctctgtgatccgagtgatgaatcccattcaagggaacacactggaccttgtccagctggaacagaatgaggcagcttttagtgtggctgtgtgcaggttttccaacactggtgaagactggtatgtgctggtgggtgtggccaaggacctgatactaaacccccgatctgtggcagggggcttcgtctatacttacaagcttgtgaacaatggggaaaaactggagtttttgcacaagactcctgtggaagaggtccctgctgctattgccccattccaggggagggtgttgattggtgtggggaagctgttgcgtgtctatgacctgggaaagaagaagttactccgaaaatgtgagaataagcatattgccaattatatctctgggatccagactatcggacatagggtaattgtatctgatgtccaagaaagtttcatctgggttcgctacaagcgtaatgaaaaccagcttatcatctttgctgatgatacctacccccgatgggtcactacagccagcctcctggactatgacactgtggctggggcagacaagtttggcaacatatgtgtggtgaggctcccacctaacaccaatgatgaagtagatgaggatcctacaggaaacaaagccctgtgggaccgtggcttgctcaatggggcctcccagaaggcagaggtgatcatgaactaccatgtcggggagacggtgctgtccttgcagaagaccacgctgatccctggaggctcagaatcacttgtctataccaccttgtctggaggaattggcatccttgtgccattcacgtcccatgaggaccatgacttcttccagcatgtggaaatgcacctgcggtctgaacatccccctctctgtgggcgggaccacctcagctttcgctcctactacttccctgtgaagaatgtgattgatggagacctctgtgagcagttcaattccatggaacccaacaaacaaaagaacgtctctgaagaactggaccgaaccccacccgaagtgtccaagaaactcgaggatatccggacccgctacgccttctgagccctcctttcccggtggggcttgccagagactgtgtgttttgtttcccccaccaccatcactgccacctggcttctgccatgtggcaggagggtgactggataattaagactgcattatgaaagtcaacagctctttcccctcagctcttctcctggaatgactggcttcccctcaaattggcactgagatttgctacacttctccccacctggtacatgatacatgaccccaggttccagtgtagaacctgagtcccccattccccaaagccatccctgcattgatatgtcttgactctcctgtctacttttgcacacacccttaatttttaattggttttcttgtaaatacagttttgtacaatgttatctctgtgggaggaaggaggcaggctgtggtgggactgggtagggtatagtatcactcctgagttccactgctctagaatctaaccagaaatagaaacctagtttttaaggtga

SEQ ID NO: 557178 - DNA, 2058 bp, Homo sapiens
tggggtgagatggaagcgagatcggtaagaatagctcaaccatgagcggcttgactatggccgatactgcctcctggtcctggcattcggactcgcgaagagcttccatctcaccccactgtcttacgagacactggaatttgcatcgggttttgcctcggaacagtgtcccgagggcattgtggccatctccaccaacaccctacggattttggcattagagaagctcggtgctgtcttcaatcaagtagccttcccactgcagtacacacccaggaaatttgtcatccaccctgagagtaacaaccttattatcattgaaacggaccacaatgcctacactgaggccacgaaagctcagagaaagcagcagatggcagaggaaatggtggaagcagcaggggaggatgagcgggagctggccgcagagatggcagcagcattcctcaatgaaaacctccctgaatccatctttggagctcccaaggctggcaatgggcagtgggcctctgtgatccgagtgatgaatcccattcaagggaacacactggaccttgtccagctggaacagaatgaggcagcttttagtgtggctgtgtgcaggttttccaacactggtgaagactggtatgtgctggtgggtgtggccaaggacctgatactaaacccccgatctgtggcagggggcttcgtctatacttacaagcttgtgaacaatggggaaaaactggagtttttgcacaagactcctgtggaagaggtccctgctgctattgccccattccaggggagggtgttgattggtgtggggaagctgttgcgtgtctatgacctgggaaagaagaagttactccgaaaatgtgagaataagcatattgccaattatatctctgggatccagactatcggacatagggtaattgtatctgatgtccaagaaagtttcatctgggttcgctacaagcgtaatgaaaaccagcttatcatctttgctgatgatacctacccccgatgggtcactacagccagcctcctggactatgacactgtggctggggcagacaagtttggcaacatatgtgtggtgaggctcccacctaacaccaatgatgaagtagatgaggatcctacaggaaacaaagccctgtgggaccgtggcttgctcaatggggcctcccagaaggcagaggtgatcatgaactaccatgtcggggagacggtgctgtccttgcagaagaccacgctgatccctggaggctcagaatcacttgtctataccaccttgtctggaggaattggcatccttgtgccattcacgtcccatgaggaccatgacttcttccagcatgtggaaatgcacctgcggtctgaacatccccctctctgtgggcgggaccacctcagctttcgctcctactacttccctgtgaagaatgtgattgatggagacctctgtgagcagttcaattccatggaacccaacaaacaaaagaacgtctctgaagaactggaccgaaccccacccgaagtgtccaagaaactcgaggatatccggacccgctacgccttctgagccctcctttcccggtggggcttgccagagactgtgtgttttgtttcccccaccaccatcactgccacctggcttctgccatgtggcaggagggtgactggataattaagactgcattatgaaagtcaacagctctttcccctcagctcttctcctggaatgactggcttcccctcaaattggcactgagatttgctacacttctccccacctggtacatgatacatgaccccaggttccagtgtagaacctgagtcccccattccccaaagccatccctgcattgatatgtcttgactctcctgtctacttttgcacacacccttaatttttaattggttttcttgtaaatacagttttgtacaatgttatctctgtgggaggaaggaggcaggctgtggtgggactgggtagggtatagtatcactcctgagttccactgctctagaatctaaccagaaatagaaacctagtttttaaggtga

SEQ ID NO: 557179 - DNA, 3977 bp, Homo sapiens
  misc_feature (106)..(106): n is a, c, g, or t
  misc_feature (113)..(113): n is a, c, g, or t
  misc_feature (115)..(116): n is a, c, g, or t
gcgtcgcatcgttcctggccagttcttagctgtgtgatcccaaagggcgagccgttatgattagtgccattgagaaacagaaattggtgtatatttagaacagagntgctgcngnncgacttaccatttcatctcccctggaagcccacaaagcaaacactttagtgtatcatgtagttggagtagatgtcggatttgaaaatccaatgtttgcttgtctggaaatggattatgaggaagcagacaatgatccaacaggggaagcagcagctaatacccagcagacacttactttctatgagctagaccttggtttaaatcatgtggtccgaaaatacagtgaacctttggaggaacacggcaacttccttattacagttccaggagggtcagatggtccaagtggagtactgatctgctctgaaaactatattacttacaagaacttggtgaccagccagatatccgctgtccaattcccaggaggcggaatgacctggatgaccctgaaagaggaatgatttttgtctgctctgcaacccataaaaccaaatcgatgttcttctttttggctcaaactgagcagggagatatctttaagatcactttggagacagatgaagatatggttactgagatccggctcaaatattttgatactgtacccgttgctgctgccatgtgtgtgcttaaaacagggttcctttttgtagcatcagaatttggaaaccattacttatatcaaattgcacatcttggagatgatgatgaagaacctgagttttcatcagccatgcctctggaagaaggagacacattcttttttcagccaagaccacttaaaaaccttgtgctggttgatgagttggacagcctctctcccattctgttttgccagatagctgatctggccaatgaagatactccacagttgtatgtggcctgtggtaggggaccccgatcatctctgagagtcctaagacatggacttgaggtgtcagaaatggctgtttctgagctacctggtaaccccaacgctgtctggacagtgcgtcgacacattgaagatgagtttgatgcctacatcattgtgtctttcgtgaatgccaccctagtgttgtccattggagaaactgtagaagaagtgactgactctgggttcctggggaccaccccgaccttgtcctgctccttattaggagatgatgccttggtgcaggtctatccagatggcattcggcacatacgagcagacaagagagtcaatgagtggaagacccctggaaagaaaacaattgtgaagtgtgcagtgaaccagcgacaagtggtgattgccctgacaggaggagagctggtctatttcgagatggatccttcaggacagctgaatgagtacacagaacggaaggagatgtcagcagatgtggtgtgcatgagtctggccaatgtaccccctggagagcagcggtctcgcttcctggctgtggggcttgtggacaacactgtcagaatcatctccctggatccctcagactgtttgcaacctctaagcatgcaggctctcccagcccagcctgagtccttgtgtatcgtggaaatgggtgggactgagaagcaggatgagctgggtgagaggggctcgattggcttcctatacctgaatattgggctacagaacggtgtgctgctgaggactgtcttggaccctgtcactggggatttgtctgatactcgcactcggtacctggggtcccgtcctgtgaagctcttccgagtccgaatgcaaggccaggaggcagtattggccatgtcaagccgctcatggttgagctattcttaccaatctcgcttccatctcaccccactgtcttacgagacactggaatttgcatcgggttttgcctcggaacagtgtcccgagggcattgtggccatctccaccaacaccctacggattttggcattagagaagctcggtgctgtcttcaatcaagtagccttcccactgcagtacacacccaggaaatttgtcatccaccctgagagtaacaaccttattatcattgaaacggaccacaatgcctacactgaggccacgaaagctcagagaaagcagcagatggcagaggaaatggtggaagcagcaggggaggatgagcgggagctggccgcagagatggcagcagcattcctcaatgaaaacctccctgaatccatctttggagctcccaaggctggcaatgggcagtgggcctctgtgatccgagtgatgaatcccattcaagggaacacactggaccttgtccagctggaacagaatgaggcagcttttagtgtggctgtgtgcaggttttccaacactggtgaagactggtatgtgctggtgggtgtggccaaggacctgatactaaacccccgatctgtggcagggggcttcgtctatacttacaagcttgtgaacaatggggaaaaactggagtttttgcacaagactcctgtggaagaggtccctgctgctattgccccattccaggggagggtgttgattggtgtggggaagctgttgcgtgtctatgacctgggaaagaagaagttactccgaaaatgtgagaataagcatattgccaattatatctctgggatccagactatcggacatagggtaattgtatctgatgtccaagaaagtttcatctgggttcgctacaagcgtaatgaaaaccagcttatcatctttgctgatgatacctacccccgatgggtcactacagccagcctcctggactatgacactgtggctggggcagacaagtttggcaacatatgtgtggtgaggctcccacctaacaccaatgatgaagtagatgaggatcctacaggaaacaaagccctgtgggaccgtggcttgctcaatggggcctcccagaaggcagaggtgatcatgaactaccatgtcggggagacggtgctgtccttgcagaagaccacgctgatccctggaggctcagaatcacttgtctataccaccttgtctggaggaattggcatccttgtgccattcacgtcccatgaggaccatgacttcttccagcatgtggaaatgcacctgcggtctgaacatccccctctctgtgggcgggaccacctcagctttcgctcctactacttccctgtgaagaatgtgattgatggagacctctgtgagcagttcaattccatggaacccaacaaacaaaagaacgtctctgaagaactggaccgaaccccacccgaagtgtccaagaaactcgaggatatccggacccgctacgccttctgagccctcctttcccggtggggcttgccagagactgtgtgttttgtttcccccaccaccatcactgccacctggcttctgccatgtggcaggagggtgactggataattaagactgcattatgaaagtcaacagctctttcccctcagctcttctcctggaatgactggcttcccctcaaattggcactgagatttgctacacttctccccacctggtacatgatacatgaccccaggttccagtgtagaacctgagtcccccattccccaaagccatccctgcattgatatgtcttgactctcctgtctacttttgcacacacccttaatttttaattggttttcttgtaaatacagttttgtacaatgttatctctgtgggaggaaggaggcaggctgtggtgggactgggtagggtatagtatcactcctgagttccactgctctagaatctaaccagaaatagaaacctagtttttaaggtgaaacacacacctcaccactaccacttcccccgccaccaacacacaaaaaagggggggggggcaaaaaatatcctcggggggcccattttcggcaccccttttttgaaagggggcccaaagggggggataaaagaggcgggggcgcgaaaacgcgccgggggaaacgcgcttggc

SEQ ID NO: 557180 - DNA, 723 bp, Homo sapiens
aaaaattttttttttttgaagaggggggggggtttaaatttaaagtctccccaaaaacccatccaaaaaaaacccggccccaaggggggggtgaaccaaaggggggtttggggccaacaaaccaaaccgggttccaagggccagggtccccctccaaagccaaaaacttcccctccctcccctaaaaaagccttttcctcaaaagggtaccaggttttttgccaggctcaaaattctccattttggggggttggcccaaacaatgaaaaagggggccccctgggaaaacggaaggtcaaaaaaactggttaaaaggcccaacaaacccacaggaaaagacccccccccctttttaaaaaaagggaccttcctatttttcaaaaagggtggcggggttttgggcattcccccacccggatttttttaaagggagagttgcccactcccccccaaaaaaggcccaaccgggggccggggaataaaaggggcccttgaaatttaaaatgggtttttttttccgaaaaaccccccgaaaaatattggggagaaaaaggggtttctaagggggaaaaaggggcaaaaaaccccaaaaatgtggggaaattttttcaccggaaaaaagggcacccccctccttttggtgggggtgtcccccccaaaccggtgtgttaagggggttccccaacctaaaaaaacccccccctgggtttttaaggcaaaaat

SEQ ID NO: 557181 - DNA, 447 bp, Homo sapiens
ctcgagctgtgtaccaagagtggtgtacttttgtccacattggtggcagtaaagccccagctattgctcatcctcagcagcttgtgcccaagtgtgtggtttggcttctcagccaccgtcagtgctgtacgatagagttgcttccagccaaggatgtggtgcctgactccagcgtggcagggggctagtggctcgattagccagaatgaggatccacaagagcttgcaggggttggcgccattcctgccggcacaggaccctgtgcttgccctcccacacccatgcaccagcactgttctggacggggcctttggccagcaggagccagcgtgaggggctgggtgcgctgcacggtggtggtggcagcccatggtgcggccccacggcctcagggacccatctccacctgcaccacggcatatcgttacccagatcatcccgttctc

SEQ ID NO: 557182 - DNA, 148 bp, Homo sapiens
  misc_feature (1)..(1): n is a, c, g, or t
ntcatggcgctcctggatggtagcctcacaggatggaccgactctgtgtccttgaatcattgcatggaagataattggaagttgccaggaacaccagccttggacagttatgcgaacaagaaataaacttctggcctcgttggcctca

SEQ ID NO: 557183 - DNA, 729 bp, Homo sapiens
tggtcttggtacaaaatttaataaagggtctttaaagagcacctatccaaatctccaaaatacatgtcggccaaggaaacccggtatatgctggggggacgtggctgtggggcatgtggcagggcggctctctgtgcttccccacccttctcgtgatctcgtgaaatgtgggggtgtgggtgggcagatatctcctcattcttgtggggttctccacaatgtgcctcaccgtgtgtgctcgaggcagggtgctctctatggcgggccaaactcttaccacaggtgtggggtctcccaggggggacacagacgtagtgatctcttcacaccctgttgattgtgcccacagagacaaacacccctgtgtgtctgtgagcacacaacacgtgtgtgtgcggacaaacagagacaagtgtgttcaccagagataagaaaagtttacaaggagggggagtacacacggcgagaggtgtgggggaatctacaatctcagaggggcaacattttccacaccaaaaactttctaccgaggggggaatttattaaaagggccccctctgctgtggctgctccactcgggagaaagggtgttcccccccagaaataacacccaaaaaaaatctctctcgtgacaaagccccttttgtgtgtggcgccccacaaaatcttctctaccaaagttgagttaggacaccgcgggaagagcacaaaaacacaaatatgcgtggg

SEQ ID NO: 557184 - DNA, 407 bp, Homo sapiens
aaatcccactttctagactggcctgtgaaatgctgttttattgttgatgtggcagcagaagctaaccaaatgctgttacataccagatctttcttttttttttgctttcgagacggagtctcgctctgtcaccaggtggagtgcaggggcgcgaggcgtgatcccggctcactgcaacctccacctcccgggttcgggcggttctcctgtgcctcagcctcccgggtgtggcgtgggactacgggcacgcgccgacctacgccttagctagattagggtgtgttggggggcagacggtgtgctcaaccacgtgtcggccggggattgcccccgaacccttggcctcgtgattagacagtgtttcggaccccaatgttgtgggattacaccgtgttggaagtgcttcc

SEQ ID NO: 557185 - DNA, 441 bp, Homo sapiens
caggtggatcacgaggtcaggagatcaagacaagcctagccaacatagtgaaaccccgtctctactaaaaatgcaaaaaattagcctggcatggtggcaggcacctataatcccagctactcgggaggccaggaggcggaggttgcagtgagccgagatcgcaacattgcactccagcccgggcaacagtgcgagactctgtctcaaaaaatatagatatagatatagatagatagatagattcttaccatgcaatctagcagttttgctcctgaatatttatccaactgaattgaaaacttatgtccacataaaaacctgcatgcaggccaggcatggtggctcacgcttataatcccagcagtttgggaggctgaggcaggacgatcgcttgacgccaggagttcagaacagctgggcaaatatgagacccatcttaca

SEQ ID NO: 557186 - DNA, 115 bp, Homo sapiens
taatctgtaactgctgaaaatgaaacatgacggctgaaatttatccctccgtagaagtactgggataaagagtaacctgtcatagagtctctcaaatgttgcaacttgaacggtg

SEQ ID NO: 557187 - DNA, 460 bp, Homo sapiens
  misc_feature (393)..(393): n is a, c, g, or t
  misc_feature (419)..(419): n is a, c, g, or t
  misc_feature (446)..(446): n is a, c, g, or t
ttctaccctgttctacatcaaatgcctgattcctaaaaggcacctccttaggtatgactttgaattttttttcttttaaagacaaggtctcactatgttgcccagactggtctctaactcctgggctcaagggatcctcccgcctcagcctctcaagtagctggggatcagaggcacatcactgcacctgccttgcgttttttaacgtttccaacagtttctatttctcccaccgagtaagctctgctctgcaagaagttttagactttgttattgcaaagccaaatacagtgcctgggcacagttaggtgctcaatgtctaatcaacttagtgacttcctatcccttaacaagaagaatttaacttggccaaatttcttctaaggtttttcntaaaattgctgggaattcttaaggtnacttacatatttaccattaaatttaantcccaaagttcaac

SEQ ID NO: 557188 - DNA, 352 bp, Homo sapiens
acaaatacatttgaactcgattacaatttaacctgcatattggggctcttttctcaaaggtcatatgttgtgtattaaagaaaacttctatcagggaaccttgtgctacaggcaggccagaatttgtgatgttctcagtgggccttcaagttcattttgttacccttcagatacttgagtatcttcccctgttataaacagtatactagccaaaacaaaatggcatttggcaaagaaaacccaaattcaccgtgcatgggaatccagtgaagaaatgtttaatctagttagtggggtgggcttcggttgtcatggaaactcagctctgtgatcctgtgttgttactaggccg

SEQ ID NO: 557189 - DNA, 207 bp, Homo sapiens
cgagtcgagaccagctctggacacatagatgaccctgtctctacaaaaaaaatgaaacaattagctctgtatggtggcacatgcctgtgattccagctactttggaggctgaggtgggaggattgcttgaacccaggaagtcaaggctgtagtgagccatggtcataccactgcactccagtctgggtaacactcgagacctgagca

SEQ ID NO: 557190 - DNA, 363 bp, Homo sapiens
agcggcgggtgcggcggatcccagggcagccttcggacggaggcgctgcctggtgcgtcgcggcgtggtcctacggcggctgtccgtggcggtaggagttggctgcgggatgtgctcagccggtgagctgctgcggggcggcgacggcggagaacgcgacgaggacggtgacgcgctggcggagcgtgaggcggcagggaccgagtgggatcccggagcgagcccgcggcggagcggacagcggtcgaaggagagcgagcaggatgttgaagactcacagaaccacactggtgagccgagtggagatgactacttgacaaggatgtatttttggagaacgaatagtggccaggtatagttttt

SEQ ID NO: 557191 - DNA, 102 bp, Homo sapiens
tctttaacctccttaaattccccgggccggcccccccaacaaaggattttcccgcccaaaattttaattgttttaaggttaaaaaacccttgttttggccca

SEQ ID NO: 557192 - DNA, 166 bp, Homo sapiens
cccaccttatgccgtgggattctcttcagtgcactgaaaacccacatggagtgaaggctgtcaccagtgggcagctgctgtgccatacgccctagtggttcaccctgtgaccctcgaacacagcgacgcgggacagggtgcagtgcagatgacactggtgaacgat

SEQ ID NO: 557193 - DNA, 334 bp, Homo sapiens
  misc_feature (233)..(233): n is a, c, g, or t
aagccccccaattcccctagagggcagggggggagaggaaccccacatccaagggggttcaccccccatggggacagaaccctgaacagcagcccattgagtccccagatctttcccactgaaacaatcctaccccaaatgagaagaaatcagaaaagtaactctggtaatacgacaaaacaagattctttaatagcatccccaggagatcacactagctctccagcaatggntccaaaccaagaataaatctctgaattgccagaaaaagaattcaaaaggttgattatttaagctactcaaggagataccagaggaaggtgaaaaccgactt

SEQ ID NO: 557194 - DNA, 363 bp, Homo sapiens
tccagtcaggtcgttgtataatcacggccagtgaattgtgatctgactcactagaggctgaactgggtactgggccctccctcaagctgtttcatctgttacattggtggtgtgctctgcactttacatgagtgaccagcattatctatgtagcaaaagtacgcacaggtgccgaggtaggctcagccagtgtcgtcatcaggggtgggcattcgggctaaggcttaacttgccgtcagtctcatcagattcgtcagcttctgggcccccaagctgggtccgcgaatcgtaggtgtctggcatggtgctctcgttggtctgcgtggcgcgcttgggcacgggggcctcctcggtcagtgtgcc

SEQ ID NO: 557195 - DNA, 487 bp, Homo sapiens
agtggggaagcctcgacagccctgagttcagcagcccaggtagcttcgcgagtctctctctcatgcaatggcttcagccgagcaacagctcacaggtgctgcaagagaaacagcagcagctttgtgaagcttcagcaaccagaaagcaaagctggcaagccaaagttcacatcagacaacagctgcagcagctgccagcacgcatcagcagtaggtccctgttccacaagctctgtgccattccaacccagattggcttgcgcccctggattcttgcattcaatccatctgagtgttcatatgccacaccactcccaataaacaaactaccctcatctgtttatggagcttccagtcaggttcacgtcgcagctcccaattgaaagcaggttatcccggtctgtgacttcaagtgcccgaacctgtgcacaagcttttctcacccaaggggctcaagttccactttggattccctcacccaagggca

SEQ ID NO: 557196 - DNA, 114 bp, Homo sapiens
tggcagcacaggttggacagcacagaggaggtggacagcaagaggaggagcagaagctagaagcgcacagtgactgggttcgagatgtggcctgggccccctcctctgtgctgt

SEQ ID NO: 557197 - DNA, 1498 bp, Homo sapiens
gagtttgttttttgttttttttaaaaccctttaaaaactttatggtaagtttcaacatctaaattggcatcaattggatacatcgtggctcatttggcagaacattaacagttgtgcacattgtgcaagagtcaacttgtgcattcgggtctttacatgcctcagtgggggttccacccctgtgccttcccttcttcccgtgaccgtgcattccgtgtccctccaacagtcgtgcgcctgtgcctctcctgtgtgtccgccacagggtgtgtgaagagacccaaagccctgtgagagaagaacctgtgcgtgtgccacgggtggctgtggctgtggctgtgcagacgcctaggaggggccatggcacgttacgccctgtgcgcaacgagggcgagggggcagaggactagagagagacactcgattatctctcctctcttatctctgtgggctgtgtgatgccccgtgtgccgagagcgcgagaccccaccagaaagtgtgcaccttaagtttcaaagccccaagttgtggctctccgaaggagaacgccctgtggcagtgtgtgtgtttctatacactcacatgtcaccacatttttccaacacccggagagagccccaatatgtgtgggatattaaacctttcccggagacatacctctgtgaggccaaaaaaatttaaaccgcgcagaggttttcccacgtgggagagaaaagtcttcccgaggaaaacccttttgaaacacccaagtgtggccatgttggggtatatttacaacccatgtttactttgtggggtatataccacttaacgaatttgtctagcgcgccagccaaaggggttactgttggcacgcaggctcccctcctgtgggccactttgggcacaaccaagttctttgtggtggagaacgtcgaatatcgaggatctccccgcggttggtactttccttaccctcatacaagtcttcccccccagacgaacggcattttccggaaacaatccaacaaggttttttcgccaggcatggacactacaactccaggttaactctttaaaacaaaagagtttcctcattgacaacgcaacggggatctcattggaaccaatgtggtcccttcttggggcgcacacgcgatacacaattattaaccctgtactttccgcccctatatcaaacgagacgtccatgtggacgcacttgtaacccgtggtatacccacgcataacagacacggtggctttaacaagcaaaattttcccccaaatatgcgcaaaggttcgccaaatctaaacatgtgcctggcgctgaaaaaacttcttctgcactttttaagtgtgcacactttttaaacgacacgttttcaaaacagcaagattgttgaacctccccaacctatatgggggacaaagggccccaatataaaacatttgtgattgtcacacactgtcgtacaggtaatgttgtcagacataaatactcaccaccaacataaag

SEQ ID NO: 557198 - DNA, 345 bp, Homo sapiens
  misc_feature (47)..(47): n is a, c, g, or t
  misc_feature (71)..(71): n is a, c, g, or t
  misc_feature (99)..(99): n is a, c, g, or t
  misc_feature (140)..(140): n is a, c, g, or t
  misc_feature (217)..(217): n is a, c, g, or t
  misc_feature (244)..(244): n is a, c, g, or t
  misc_feature (267)..(267): n is a, c, g, or t
  misc_feature (270)..(270): n is a, c, g, or t
  misc_feature (341)..(341): n is a, c, g, or t
gaaagccccctcccatcctttttctggcctttatcctataaagtganagccacttcccttacattctaccnaaggaagagtaaatgccagactggccgnagtggctcatgcctataatcccagcactttgggaggccganacaggtggatcgcctgaggtcaaaagttcgacaccagcctggccaacatggtgaaaccctgtctctactaaaaatanaaaaattagctgggcgtgctggcgggnacctgtaatcccagctactcagnagnctgaggcaggagaattgcttgaacctgggaggcagaggttgctgtgagccatgatcacgccactgcactcnaacc

SEQ ID NO: 557199 - DNA, 654 bp, Homo sapiens
ttaaaactgcctggattagaggggggagccttcggcattggaatattggttggagagggaattaagttgcagttggcctgtgagattgggagaatgggctggttgcaggggttaaggcctataatcccagcactttggaaagccaggggggttggatggctggagtccaggggttcaaaaccagcctaaccaccatgccaaaaccctgactgtccaaaaattagctggccatgggggacatgtagccttagaggttcaggaggttgaggctgtaagtgagccaggatggggtcactgcactcaatcctgggcaccagagcaggaccctgtctaacaaaaaaaaaaaaaaaaaaaaaaaaaaaccttgtcggccgcttgggccaagccgattttagactcgagcaggctaatgcatgcggccgaatttcgggctaattggcccaattggccttatagggagccggattacaattaatggcccgcggtttaacaccgtcgggacgtgaaaaaccttgcggtaaccaaactaattggcttggaagaaaatccccttttggcagagtgcggaattacggagaaggccggaccggatcgcctttccaccggtggccaacctggatggccaatggtttgtaggccgtatttggttccggg

SEQ ID NO: 557200 - DNA, 814 bp, Homo sapiens
agagtgcctagtgtgggagaccaaatagggatcaccaggctaatggggggcgtcagcaggtttctctccctcctatctggccggtgctttttggtttgtgagacggagtctcactctgtgcccagggtggagtgcagggttgatcttgggctcactgcatgttccagctctgggcatcaagggattctccatgcgtcagcctcttgagtagctgggattacaggctgcccgaccacgcacagcctgcttaattttggtattttagtagagatggggtcccagcagtgttggccaggcgtgttctcaaactccgtgagctcgaagtgatccgcccaccttggctcccaaagcgtgggattataggctgtgagccatgtgccgggtccaccttggccgtgttgggtttttcttgccttgggctcagcaattcaagattctagatgttatcgggtggaagcagtagcccaagcccagtttaggggaaggtagcacgagggcagagccactgggcactttgtttcctgtggcccctccgaaggctcactgtggcaaaaatgaccccgagagcttggctctgggcagatcttgttggtgtgcagcgtgtatggcgaacctcagattggactcgggcagtgggtctgtggaggctcttcgtggtcaaggtacaagtgctggcacgtgggggccagagtgccccttttacgcccggggtctgcctagagaggcgggaggcaggttcttggcccgtgtccggttggggcccgacttggtggctggcccagggggtgggtgggacccccgcagtgggagtccc

SEQ ID NO: 557201 - DNA, 180 bp, Homo sapiens
  misc_feature (172)..(172): n is a, c, g, or t
tatacacggatgtatgtccatcgactgagataaggagaaaactgccttacgggtggaggtgagacatgctggtgcaatactgcctttaatgcaccgagatgtttatgtatgtgcactctcaaagcactagcacccttttctaacccttgtgtactggcacacatgacattangttcacat

SEQ ID NO: 557202 - DNA, 170 bp, Homo sapiens
tatactgcaattatagacacgattcagaaaaaagctgctcatcgaacaccccatcccatgcgagacacatacaccctgatttctctgcttcccttcatgaatagaatcgctggaataattcgtcggtgtctcttgacgataactcttctcctcccattctctctcaaatt

SEQ ID NO: 557203 - DNA, 254 bp, Homo sapiens
cgctcacaacaggcacaggaaagatatcatttctatgctttaaaaaaccctctatggagcattttcaaatattaattttattggggggggaaaaggcccacaacaataatggcaagatctttctcaatagcttcagttggcggtgggatgcctaccttaactatggttttacaatatagatatctatatatatatttaaaatagtttgcgaggtattttcttctaccttttttaaaaataaatttccagaagtg

SEQ ID NO: 557204 - DNA, 328 bp, Homo sapiens
cccgggctcaagcaatcctcttctcccaagcaactgggactataagcgcataccaccatgcctggctaatttttggggggtatttttggtagaaacgggtttcaccatgttgcctaggctgaccttgaactcgtgagctcaagtgatctgcccgtattggcctctcaaagtgctggggttacaggtgtgagccactgcacccatcctgaaaatgtcttcatattacctttatttttacaaaatacaggtttaattttgaaataaatttagatttacagaaaagttgcaaagataacagaattctcataagtccttcatcattttctct

SEQ ID NO: 557205 - DNA, 109 bp, Homo sapiens
gcgagggcgagtggaacagaggtcggacatgtgctaagctgctggccttttcacgtttcggaccctgagaatatgtccaccgcattacaaatgggattctctggcatct

SEQ ID NO: 557206 - DNA, 376 bp, Homo sapiens
ggtctgaagggctccctgagaactaggacaagagactacaaggagtatgtcctgaggaggggtgggatggtgtgttttctctcaccgtcccttttagtgaggggtccttcattggtccatcgttcaaggccatcacagtgggggcttgcagcaggcaggtgcaggaacttgaaaagacgcgacgccaaggaaggagggacaggactcgagctgtaggggctgtgatccgtcgattagtgggaagttatggggagacgagttccaccgttgcggatgcggtaggggggtacggcggttcccgatgccgcttggtgccgttggggccaagccaaagggaccgaatcgaaggaggattggtcccgagtgggcgaacgca

SEQ ID NO: 557207 - DNA, 117 bp, Homo sapiens
ctgtagggctaaaaccaggatagtttaggcggcgcaagtggtcaaagggagtgtctccctccgatgccctgctaaactactgatagctatcttccagattactacccttacaccaaa

SEQ ID NO: 557208 - DNA, 556 bp, Homo sapiens
gccgccatggtggctcatgcctgtaatcccagcacttgggaagctgaggcggggaggatcacttgagcccaggagtttgagaccagactggcaacaacagtgaggaactctacctctacaaaaaagaagtacaagaaaaaaagttgttaataaaaaaagagaactcaaaaaaacaaaaaaatgggtgtggggcgggaccgggacccacaaaaaaaggattttttaaaaacaatggcttgggggaagaggggacacccccagggaatgaatgaacagaaccaggtggcacacagacggtgtcacaaaagaagaaaccgggcacacaaaacagaagcggtgagctctcaacacaaataaaaaaagccggcgcggcgcaccacgtacgtagtgtggtagaaaacacacacgaagagagggaagtccacggaagaacagcacagggcgtcatcaaacacaaagggggagcaccaaggagactgcatccaacataaaaatactgagccccgacatcgagggtgaaacgatgcgacgagcacgagcgacgtactcagcagaa

SEQ ID NO: 557209 - DNA, 327 bp, Homo sapiens
cttcagactgggtctcactctgtctcccaggctggagtacagtggtaccatctcagctcactgcaacctgcctcccaggttcaagtgattctcctgcctcagcctccctggtagctgagattacaagcacgtgccaccatgcctggctattttttgtatttttagtagagacgaggtttcaccctgttggccaggctgatcttgaactcttggcctcaagggatctgtccacctcggcctcccaaagtactgagattataggcatgagccaccgcactcggcctatccttgattcttattgcttttgtccccttctgtcgtcttctc

SEQ ID NO: 557210 - DNA, 1712 bp, Homo sapiens
ttctctatgtgtctagtaacgaataagtgatgacataaagcaagctagcgctaacgtacgtcgtacggattgcgactagttactttgaagtgtcgagcgatctagttctatacttgtagtgtgaggtctactgtttcgctgtcttgttggctcgagctcgtgagtgtgtactgatgctggtgtgcgcgctgcgttggttcgcgactcttgttatctggtgttgtgcgtgtcccgctgggtttcttccactcgttgtgtggtggctgttggttctccagctcagttttggtactcccctggtgtttgtgtctgacgctctcctgttttttactgtagtggttattgttcgggcgtgggtgtgggctgggctgtcttggcgtgtggctatatatttgggggccatcggttgggtgactactgtgtttgtcttttcctctctccgtttgtggctattttcgtgtgtgggtgttgttgtcacactggtgatctggtggtgggggttcatccatcaggcagcgcttggttgtatccctatgttgtggtgctcgcacatcattgtggtctgtgtgtggtctcaggggtgcttttatgtcgtgagggtgttgttagttgttcgctgtttctctccccctttattgtgggggtggcggagggtaggttccaagctgtgaccataatggaggtgtcatgttagttgtgggtggtcacaaatagaattgttagtatattgatagcgaggcgaatttatatgcgggagtgagcaccataaaggaggtggtgactattattgtgagcaggtgcgataaatgattgtcctcccgtggcttctctcgtcatgcacaattgtgggtgggaggtacctggtttgtttgatagaagtgggcaccttcgctttcttcaccagggggtgtggtgggtcttgtggcgggctcgctgtagagcggctgtcgcgtctgtgcctctgcagggtgcgtctttttcctcgctgctcgcctcgagttagaagtggtctcttttcttttgatgaggtctcttctgttgggaacccttgctgtcgctgtctgtgtgtgtctcccacgccgtgcggtttttgcgcgggtttttgctggggtggtatatattttttggtttttttttgtttccacaccgctctctccaactttgtttctcacacacactcccacctctctcccgccccccttgtttttttgtttttgttttgttataaaactgggtgatatttatatatgcctttgaattttctgacactcttcacagcacactccacaccccctgggtgttctacatgtgttgtgtctgtggatgcgcaacacttctttgttgttggcgctgtctgtgcaccctgtgtttctgcatgtcttttgaagcttccccctcgcccaactctggggggcaccttggtgtttggaagaaagccacacacgggcctttgagattttcatctgcgtcttcctttcctggagcaccacgaggagggcacgacagaaagaggggtggtgttcttcccactcccccagacacactgtaggaagaaaacggggcttcttttcattttcaccccttccctctttttcccctgccccccgagactgggccacattttgggtgggccaatgggtcccccaaatggctcaccctgagaatgtaagaactaccacacccaaatttttagtaaattaaattttgtgtcc

SEQ ID NO: 557211 - DNA, 1053 bp, Homo sapiens
  misc_feature (37)..(37): n is a, c, g, or t
cgaggtggctccactgtcagaccctagctttgaaggncaatctcatcttcgtcgtcttcctctctgggtccttcattccggtgaaccagtatacatcaaatgtcgacgcaaatacccctcccaggactccactctgttgttttctaacagggggggacgtaagtgtggccctctggttctggaaaggcttggcaaaattgccttgcagaagctccttgagctccaactctgaactccctttcagcagccggcacaggcataacaggcccagcccacaggtaccactggcactgaggcagtgacccctacatgtagggctacccccagtcacaggggctgtgctggactgcaacaaggctccctgcagccagaccaagtatgaaaaatgccttgtatgtttttgttgcttgagtgcccccaaaacacaccaaagcagctgtgccctcttggcatggtaggttcttgcaatgcaccactgtgaggagcctgcgtgaacatcaacctgataggggcaccagtggaaaagcctcttcaaccagttacagccactagggaacacctgtgttgaccccttttattggcccttcaaagctgttttacatgctgactccaatcctttacctagtacttccaattgacgccattctcgctttcagaccctttttgaactctgtgtggtgacccctgtcctcccagccaagggcgcgcttcctaccttgtccccgtgccaagatgacaggtattacccactggccacgggggccccgcttcaaacgtctcccggagtcaaccccgtgtatatgcatcggcaacatacctgtttattttctctgtcattactaatccctccaacactccaaacaaacacccagccccacacccggcagcaccaccaccgggaggacaccaccacccaccacccccacacgcaaacgcgccacccccacaacccacaccacgccgaacgaaacaaacgccgccccagcgccccagaaccaacaaacgcgcccagagcggagaagcacacgaccaccccgccgtgaccaccccgcc

SEQ ID NO: 557212 - DNA, 234 bp, Homo sapiens
  misc_feature (24)..(24): n is a, c, g, or t
  misc_feature (70)..(70): n is a, c, g, or t
  misc_feature (76)..(77): n is a, c, g, or t
  misc_feature (81)..(81): n is a, c, g, or t
  misc_feature (90)..(90): n is a, c, g, or t
  misc_feature (96)..(96): n is a, c, g, or t
  misc_feature (104)..(104): n is a, c, g, or t
  misc_feature (108)..(109): n is a, c, g, or t
  misc_feature (111)..(111): n is a, c, g, or t
  misc_feature (115)..(117): n is a, c, g, or t
  misc_feature (121)..(121): n is a, c, g, or t
  misc_feature (148)..(148): n is a, c, g, or t
  misc_feature (158)..(158): n is a, c, g, or t
  misc_feature (163)..(163): n is a, c, g, or t
  misc_feature (168)..(168): n is a, c, g, or t
  misc_feature (179)..(179): n is a, c, g, or t
  misc_feature (182)..(182): n is a, c, g, or t
  misc_feature (184)..(184): n is a, c, g, or t
  misc_feature (186)..(187): n is a, c, g, or t
  misc_feature (193)..(193): n is a, c, g, or t
  misc_feature (204)..(204): n is a, c, g, or t
  misc_feature (226)..(226): n is a, c, g, or t
atcagaccacaactattaaatgtntaaaaaaaaaaaaaaataaatgtaaaaaaagcacctttaaaaaganttaaanntaanattcccctnattcanaatcaacntctnnanaaannnggtngacgcgaacctcctcataatcattctnaagggcagcnatgtnctcangggcctctganaantnannttcgtncatcccctccncagcgtaccagtgaacgggggngcgtttgg

SEQ ID NO: 557213 - DNA, 113 bp, Homo sapiens
tccacccaccctgtatttactcattctctaacttgactcagctgcaggtaaagtcggaaacctctcctgcaaactgaccttcggcttctccagtcggggtgggtggagagcgg

SEQ ID NO: 557214 - DNA, 247 bp, Homo sapiens
  misc_feature (145)..(145): n is a, c, g, or t
ctgtgcgcgtcgctctacgacggactcccggacacttgaccacgacgggacgcgtgacttaccggacgctctggctgtacacgtacggcgacgggggcccacggaccgtgggaccccactggggttggacctggtctgcttcccnttcccacaccctctctaccctcctgtctgcacggactaacactgtgccactgactgacacggacctcacacccggggactgacgtgacgggggtgtgctgtt

SEQ ID NO: 557215 - DNA, 646 bp, Homo sapiens
ctgggctcttgccctgtgaaatctattctattgcttaccccatcttttcctcgcattttttcaccagctttccctcaatctccaggagccaatgcgagactttggctccgatgaagcgacggcgccgaggactctgcgggtgcagcggaggaggatcgacagcagtggtgatggagagcaccccgttcaaggggactgaacctgagtacacactacgatagtgcaggaatctgcacggaattcttaggggggcctgtagccctgggagtagttggaccgattgtatgggcaccctgccacagtgtctcggctctgtcttcatgggacgctccctatccgttggcttattcgacacttggcgtgagtgcggagtcgctcgttgtctggagctcagcacttgtgccagcaggcttgctgatcaactactagtgtggtcaacaggaaggaattccagccatacgtgctcaaggcagtgaaaagtacatgggctcgctggagcgggccgtccgggtatccttggcgactaccactagcttgctccccagggcagggctcgccagggccctctgtccgtcgaaccccaatttttgccggcccagtaaccctccggcgatttggcccttgctgggggtgggggggggggaaa

SEQ ID NO: 557216 - DNA, 391 bp, Homo sapiens
  misc_feature (130)..(130): n is a, c, g, or t
  misc_feature (255)..(255): n is a, c, g, or t
  misc_feature (272)..(272): n is a, c, g, or t
  misc_feature (330)..(330): n is a, c, g, or t
  misc_feature (357)..(357): n is a, c, g, or t
tcagaacctctcatttcctttccatcgtggaaatctatcctcaaggaaataacttctcagtgttccatctgctattctactactcctcagggattattcaggccccctcccttccctacacatcaggctnggaggatttgccccacccaggactggcaaattacctttactcaacatgtcccgagtcaggaaactaaaatacctcttagtctaaatagacactttcactgaataaagtaaaggcctttcctacangggtctgagaagggccnccacaagtcatttcttcccttctgtcagacacaattcctcaagttttagccttccccnagctctatacaggtctggataacaggnccaagccctttaattaagttcaaaattcaggcca

SEQ ID NO: 557217 - DNA, 573 bp, Homo sapiens
  misc_feature (22)..(22): n is a, c, g, or t
atccccaccttctatcagtccnattcctctcttctgctgctcactgtaccatttgtattgacaaaggcttatccctccgtggaagctggttaaaggtgcatatttttagaagtttcagagacagggactcatatccagcactctcagaaagcaacagggcaaaagtcttcaggctgacctttcagttgttcccataatacacgtgtttctccccctacataaggtcctccgttaagtcaaagaaccaagcagatttaaaaggaaataaataagtcatagaggcaaagagttgagcagatagaagaggaataggagaactggggaaaagacttagcctgccacatacgctgatgtgcagaccctgtcaccaatattaaaccagaggcactaagagaaatcaaatatttacagtccagcctaatgccttaactctttactccccataaaacccttatgtggtcaggtgctgcactcacgcctgtaatcccagctctttgggaggcctaggcaggagaatcacttgagaccaggagttgaggagcagcctggacaacatagcaagaccccatctct

SEQ ID NO: 557218 - DNA, 247 bp, Homo sapiens
tgtaaaagaaatattacatactattataccaaacgcaacgaaacaaagacaaaacacgttgataggctacttactgccgaccttactgaggtgcaccggcgcgatcttggctcactgcaacctccacttccccagctcgagtgattctcctgcctcagccgctggagtagctgggactactaggcgcgggcaaccacactcggagaatttttcgatgttttgtagagatgaaatttcgtcgtgttgt

SEQ ID NO: 557219 - DNA, 182 bp, Homo sapiens
aggaccttacagaggagggacagggcaggcgggccatgaagaaagccctcgttgaccagcactgtctgcgtctgctcttctgtgcccaggtggctgccagcccactgcctcctctgtgctgtccggacagcacagggagggactgagatgcaggatttcttcacgcctccccctcctctgtg

SEQ ID NO: 557220 - DNA, 860 bp, Homo sapiens
  misc_feature (53)..(53): n is a, c, g, or t
  misc_feature (78)..(78): n is a, c, g, or t
  misc_feature (109)..(109): n is a, c, g, or t
  misc_feature (144)..(144): n is a, c, g, or t
  misc_feature (151)..(151): n is a, c, g, or t
  misc_feature (159)..(159): n is a, c, g, or t
  misc_feature (161)..(161): n is a, c, g, or t
  misc_feature (171)..(173): n is a, c, g, or t
  misc_feature (183)..(183): n is a, c, g, or t
  misc_feature (190)..(190): n is a, c, g, or t
  misc_feature (199)..(200): n is a, c, g, or t
  misc_feature (202)..(203): n is a, c, g, or t
  misc_feature (215)..(215): n is a, c, g, or t
  misc_feature (242)..(244): n is a, c, g, or t
  misc_feature (258)..(258): n is a, c, g, or t
  misc_feature (260)..(260): n is a, c, g, or t
  misc_feature (262)..(262): n is a, c, g, or t
  misc_feature (266)..(266): n is a, c, g, or t
  misc_feature (268)..(268): n is a, c, g, or t
  misc_feature (279)..(280): n is a, c, g, or t
  misc_feature (285)..(285): n is a, c, g, or t
  misc_feature (298)..(298): n is a, c, g, or t
  misc_feature (301)..(302): n is a, c, g, or t
  misc_feature (308)..(308): n is a, c, g, or t
  misc_feature (318)..(318): n is a, c, g, or t
  misc_feature (343)..(343): n is a, c, g, or t
  misc_feature (351)..(354): n is a, c, g, or t
  misc_feature (356)..(356): n is a, c, g, or t
  misc_feature (370)..(370): n is a, c, g, or t
  misc_feature (375)..(375): n is a, c, g, or t
  misc_feature (386)..(389): n is a, c, g, or t
  misc_feature (391)..(392): n is a, c, g, or t
  misc_feature (423)..(423): n is a, c, g, or t
  misc_feature (440)..(440): n is a, c, g, or t
  misc_feature (442)..(442): n is a, c, g, or t
  misc_feature (452)..(452): n is a, c, g, or t
  misc_feature (460)..(461): n is a, c, g, or t
  misc_feature (466)..(466): n is a, c, g, or t
  misc_feature (476)..(476): n is a, c, g, or t
  misc_feature (501)..(501): n is a, c, g, or t
  misc_feature (513)..(513): n is a, c, g, or t
  misc_feature (516)..(518): n is a, c, g, or t
  misc_feature (529)..(530): n is a, c, g, or t
  misc_feature (555)..(555): n is a, c, g, or t
  misc_feature (557)..(557): n is a, c, g, or t
  misc_feature (566)..(566): n is a, c, g, or t
  misc_feature (572)..(572): n is a, c, g, or t
  misc_feature (584)..(584): n is a, c, g, or t
  misc_feature (621)..(621): n is a, c, g, or t
  misc_feature (631)..(632): n is a, c, g, or t
  misc_feature (635)..(635): n is a, c, g, or t
  misc_feature (638)..(639): n is a, c, g, or t
  misc_feature (650)..(650): n is a, c, g, or t
  misc_feature (660)..(660): n is a, c, g, or t
  misc_feature (685)..(685): n is a, c, g, or t
  misc_feature (734)..(734): n is a, c, g, or t
  misc_feature (737)..(737): n is a, c, g, or t
  misc_feature (773)..(773): n is a, c, g, or t
  misc_feature (778)..(778): n is a, c, g, or t
  misc_feature (833)..(833): n is a, c, g, or t
aataaagaaccaaaaaattatctgtgaaatgtaaaaaaaaaagcaggccctgnggctcctgactcctctctcagaaanggaggcgggaacagacttactgatccaagcnccacctgcctcccatgcaaaggccaaccccaagancccaggnagcgacanancaacccctcnnnaaccctcaanaaaatgntcataaaannanngagaaaaaaagnttgcaccctaaaatgttgaatgaaaannnttttttttttcttngntntttngnggttttcaagnnttganatttttttttggnagnnatattnttccttaganatattttttatttttttaggttttnggggagtnnnntnggggaaaatgaggnacagngaggtggagtnnnntnngtcaggccactctgcgaggaagtgcaggggntggcccgatcttgaaantnattgggggtnggtttttnnttttngttttgtaangagggtttattccaaagagggccanacttgaagagcntgnnnaggtaggaggnnccccaaagtgggttttgaaaattcnangtgtagctngggggnctagtggaaganccttggaaaaaagagcccagttttagttttggaggtntttcaaaaannagntgnnagctaggttgntggtaagttntctgggaggcaatcttcggcaccgngagcctctgtccattagtgtcagccccgagggggccacggacggaggcngcncaatgtccactgtgatattggtgaagagtggttgcngaganacctccaagacctggtaccgcactgacccaatggcgttccgcttcatggtcaggntcgtgttttgaatcttggtaaacctct

SEQ ID NO: 557221 - DNA, 1039 bp, Homo sapiens
cgggtaggatggcgctggcgctccagtcccccgcggttggctgctgcagtcggttgctgttactactgcggctcctgcttccgcctcggcgcctcctcggcctcacggcagcatgcatcctcgaccgggccgtggtccccgccccgcgccggcccggccccgctcatggatgtcctgtgatcatctcgtcgcctggtggtgctcatctttggcaccctggtacccagtgctattcttcctacaaggccgtgaagacaaaaaacgtgaaggaatatgtgaaatggatgatgtactggatcgtcttatgccttcttcaccactgacgagacgctcacggatatagtgctctcctggttccccttctagctttgaactgaagcatcgccttcgtgatatggctgctgtccccattacaccaaggggctccaggcgtgctctaccgcaagttcgtagcatccaacgactgtccaacaaggcagaatggagatcggacagagtacatcacgcagtgcccgagacaagagctatgcagacccatgatgagggtgggcaagatggggcctgaaccttgccgccaatgcaaacagacacaagctagacgccaagggccagggagggtgctgtcagaagaatgctccgcaaactttcagcgatgcaaggaacctgagccctaatcacggggacgaggaacgacagtggacactgacagcagggccataccgtgtacgcgatccggaacgagatccaagacagcatatctagagacacccaatcaggaaaggtaactttaggaggaaatgcaccgctgcacacagagagaaacacaaagggacacaggaggcaataaaccacggggaagaacaacacacacaggggaaaagaagggactacatagaaggggatagaacaatagggaagaaacaaaacaatcgcaaaataaaggggacacacaacacagcagaaaaaggcacgacaaaaggcaaaagaaacatggaaaccaaaagaacaaaaaaagacaaggaacaagacgaacagaaca

SEQ ID NO: 557222 - DNA, 457 bp, Homo sapiens
cataatgatattctgttaatatatttacatattaatatgtatataatacattatatgcatatatacctaaaatataatacacacgtataatgtgtgtgtatatatatgatataatatacatgagaggagaaaaagctagagttgaatccatatctgcatatttgtagagatgcacatgataaggtgttaaatttaaaaaagtagtaatgtgtaagtatgattctattttgtcaaagcagacacatacaaacaaacttctatagttgtggtctccataaatgcttgtaatattgaattagctatgaaaaaaggtgtgaaggaataaatgccagggtgttaatgtgtgttaactcaaaggggattgaggtgaggatgaaatgatgattaactttttctttgcacatcattgtaccattttacttcttcaataagcctgtattgctttgtaatttgagaa

SEQ ID NO: 557223 - DNA, 582 bp, Homo sapiens
ctttcccccaaaaaaaaaaaatttattggggcgggggggtctttttcaaaaaaaaaaaaaaatttatgtttaaacccccttttttaaaaaccataaaaagggaaacctttttcaaaacactgattagaaaaaaaaatatggttgcctttaaaaaaaatggaatttttgaacctaagatggaaccagatcccccccttttgggggaaacaaaaaggtttcttttttctcttttaaaaaaccccccaaaggggttttaaaaatgggggaaggcctttttttttttatagggcggggaaatttttaaacatttgggggccgccccctaaaaaccccccaaaaatattgtggtatttccgggccccaaaacaaaggggccctctctcaaaaaaaaaaaaaaaacccccccaaaaattgggggtggggaaaataataggaaaggcttttcttccgggagaaaattgggccgcccaaccaaaaaggaagagaatctcttatttttttggcgcgccttttttatacaaaaaaccgcccttataatttccaacagagaaaccccgtatatacttctcccgggggtattcc

SEQ ID NO: 557224 - DNA, 1063 bp, Homo sapiens
  misc_feature (6)..(6): n is a, c, g, or t
  misc_feature (115)..(115): n is a, c, g, or t
  misc_feature (123)..(123): n is a, c, g, or t
  misc_feature (142)..(142): n is a, c, g, or t
  misc_feature (144)..(144): n is a, c, g, or t
  misc_feature (149)..(150): n is a, c, g, or t
  misc_feature (177)..(178): n is a, c, g, or t
  misc_feature (182)..(182): n is a, c, g, or t
  misc_feature (195)..(195): n is a, c, g, or t
  misc_feature (199)..(199): n is a, c, g, or t
  misc_feature (214)..(214): n is a, c, g, or t
  misc_feature (225)..(225): n is a, c, g, or t
  misc_feature (228)..(228): n is a, c, g, or t
  misc_feature (240)..(240): n is a, c, g, or t
  misc_feature (294)..(295): n is a, c, g, or t
  misc_feature (313)..(313): n is a, c, g, or t
  misc_feature (326)..(326): n is a, c, g, or t
  misc_feature (328)..(328): n is a, c, g, or t
  misc_feature (338)..(338): n is a, c, g, or t
  misc_feature (352)..(352): n is a, c, g, or t
  misc_feature (377)..(377): n is a, c, g, or t
  misc_feature (383)..(383): n is a, c, g, or t
  misc_feature (392)..(392): n is a, c, g, or t
  misc_feature (400)..(400): n is a, c, g, or t
  misc_feature (418)..(418): n is a, c, g, or t
  misc_feature (424)..(424): n is a, c, g, or t
  misc_feature (442)..(442): n is a, c, g, or t
  misc_feature (455)..(455): n is a, c, g, or t
  misc_feature (461)..(462): n is a, c, g, or t
  misc_feature (476)..(476): n is a, c, g, or t
  misc_feature (482)..(482): n is a, c, g, or t
  misc_feature (490)..(490): n is a, c, g, or t
  misc_feature (494)..(494): n is a, c, g, or t
  misc_feature (521)..(521): n is a, c, g, or t
  misc_feature (543)..(543): n is a, c, g, or t
  misc_feature (598)..(598): n is a, c, g, or t
  misc_feature (602)..(602): n is a, c, g, or t
  misc_feature (664)..(664): n is a, c, g, or t
  misc_feature (877)..(878): n is a, c, g, or t
  misc_feature (893)..(893): n is a, c, g, or t
  misc_feature (896)..(896): n is a, c, g, or t
  misc_feature (911)..(911): n is a, c, g, or t
  misc_feature (913)..(913): n is a, c, g, or t
  misc_feature (919)..(919): n is a, c, g, or t
  misc_feature (930)..(930): n is a, c, g, or t
  misc_feature (936)..(936): n is a, c, g, or t
  misc_feature (938)..(938): n is a, c, g, or t
  misc_feature (948)..(948): n is a, c, g, or t
  misc_feature (964)..(964): n is a, c, g, or t
  misc_feature (966)..(967): n is a, c, g, or t
  misc_feature (977)..(977): n is a, c, g, or t
  misc_feature (984)..(984): n is a, c, g, or t
  misc_feature (990)..(992): n is a, c, g, or t
  misc_feature (1000)..(1000): n is a, c, g, or t
  misc_feature (1002)..(1002): n is a, c, g, or t
  misc_feature (1005)..(1005): n is a, c, g, or t
  misc_feature (1009)..(1009): n is a, c, g, or t
gctgangccatagagaccaagacccctcccttggctgcgcctccaactcaactgcactcctatcaagggcttggggctccctgctgcatccctgcctcctccctgaaaactccangaatgctnctgaatgcaagaacccagntntcccnncacgccgggagggcaaccagcctcccnncgantcctgcgggcccntctngaggctttggggccntcagctgcaanccnggtctgtcaaantcagcccctaggaaagaacaggccttggtctcccctagtcctggccagaaggtnntctcgcttttcctctacnggcctataagaancnggtacttcanttctaaaatctganttgtgttcttttcgtcttcaaaaantctaantaaggccantgtgccantgtgcacccttgaatacnattganccaaagctttcccacagncctccctggcccncctagnngctttcttggtcantgcctntcaaagcnccantcctgctgaaccaaaggctttgtcatncctttctcttcctgtaatctgngcaaacccactccaactttctggtgtcacaggcgggaatgttagttagtaggtanactnagatcccatttctgtcctgctcccaggaagattcttaggtcctcttcaatccagcagccccncccagaggtgtgatcagcaggatgctgaggaaccatgttgcctttcctgtcaatcacagccaccttcctgttatctcctaaatggatctggcttttcctggaggctgccatggttggaagatggtatcagagggcctgcctgggcagtctgtctccgggccagggtcagggaccctctgcctctggcagccttaacctgtcctctgctaggannagggtgatttcaagncanggaagcaactgggancntgaaanctgtccctccncagccngntccccctcgntgtgccctggtccccntnntgccatgtgnatgctgntgtgannnctgtttgnanatnatcnaaatgtttttatattaaaaatgtttggtctgataattaaaagcacttcgtttag

SEQ ID NO: 557225 - DNA, 566 bp, Homo sapiens
  misc_feature (222)..(222): n is a, c, g, or t
  misc_feature (376)..(376): n is a, c, g, or t
agttcaaataaggtccggttcacagattctgggggttaggacatggacagctctttggggatcaccattcaagtctttgcaattgtgtctggttccctccagaggctctaggggagggtccttcctgcctctcccagttcctgggggcttcagacatttctgggcttctggccgcatcactgcaatctctgcctccatctctacgtggccttctcttctgtntctgtgtctcctcttctgtctctcagaaggacacctgtcattgcatttagggtccaccctaactccatatgacctcatctctacatacttaagtaatcatatctacaaagacactatttccaaataatgtcccactgcagcttgtggacaatanatgtgaacagatctttcaactacatgcagctcctccggaggctctggggagggtccttcctgcttctcccagctctgcgggctccaagtgtccctgggcttgtggccgcatgactccagtctctgcctccgtctccacatggccttctcctctgtgtccgtgtctcctcttctgtctcaaaaaaaaaaaa

SEQ ID NO: 557226 - DNA, 494 bp, Homo sapiens
  misc_feature (167)..(167): n is a, c, g, or t
  misc_feature (178)..(178): n is a, c, g, or t
  misc_feature (194)..(194): n is a, c, g, or t
  misc_feature (219)..(219): n is a, c, g, or t
  misc_feature (222)..(222): n is a, c, g, or t
  misc_feature (230)..(230): n is a, c, g, or t
  misc_feature (250)..(250): n is a, c, g, or t
  misc_feature (258)..(258): n is a, c, g, or t
  misc_feature (261)..(261): n is a, c, g, or t
  misc_feature (263)..(263): n is a, c, g, or t
  misc_feature (265)..(265): n is a, c, g, or t
  misc_feature (294)..(294): n is a, c, g, or t
  misc_feature (301)..(301): n is a, c, g, or t
tgtttctttatgagtcagttttggtagatttgtccattttatcttggttatccaatttgttgttgtacaattgtatatggtattctcttataaatctttttatttctataaagttggtagtaatgaggcctgtttcatttctgttgctagtaatgtgagtcctcccntttaatcctgncccggcctggccaaangttggccaatttggtggacctgggngangaactttnaggtttcatggacttcctgnattttccnatncncnatttcagtttttccccactataatccttnataattncttttggcaagctttgaggtattggtttttttctagtgggcatatggcataaggcatagttaggcctagttcctaatttgatttgagatctttcttcttttttaattgcatgtgtttggcagctataaataatcattctggccgggcacagtgggctcgcgcctgtaatcccagtggctttgggaggccgaga

SEQ ID NO: 557227 - DNA, 103 bp, Homo sapiens
  misc_feature (32)..(32): n is a, c, g, or t
  misc_feature (84)..(84): n is a, c, g, or t
atacgggcgcatgcaggggaggaattcatctncagacgaccagcccccgcaggggcggatacacactcgaatcacacgaagatncgagagcgactagaattca

SEQ ID NO: 557228 - DNA, 133 bp, Homo sapiens
tagctcggtaccccagtgttatttacaatggcaaaaccacttaaatgacaatagccaaaatgggtttgttttttgttttttgagacaaggtcttgctttgtcacccaggctggagtacagtggtgcgttctta

SEQ ID NO: 557229 - DNA, 407 bp, Homo sapiens
attagctgggcgtggtggtgcacatctgtaatctcagctactcggtaggctgaggcaggagaatgccttgcccttggtagccagaggttgcagtgagcccatcttgctccactgcagtccagcctggactagagtggaactccatctccaaagaaaaaagtatctctctcatcgacaggggttttcctatatatctcagggtattctaatagcctaattgccatattcttcttaagaatatgtgattttaacacttaattcagtgttccgtttctttagcctcattatttttatttacttttggtaaggattatgtcttttcattgatttaagtgatcgtttagataggctccttttagttacacaaattcagccagacttatcagaaaatgagtaaggaagagtga

SEQ ID NO: 557230 - DNA, 1203 bp, Homo sapiens
  misc_feature (609)..(609): n is a, c, g, or t
  misc_feature (647)..(647): n is a, c, g, or t
gccacgtcgttcggcggacgcggtgggtcgacccacgccgtccgtgcagcatgtttgatacgaaccagttatctctcgaagtatagaaagtgtacgaggatggtcttcatatgcgcacgtgagtaggcatactcttttcgccagcacgagaggcagtacacgtagatacagtgttgtacgaggttgctggtgtcttcgcaatgggacgtgtgcacagagacattcagtcagagtgtctgagttacgcgtgcaggctcgagtggggttctgtcgtaagagtgatcgtgctcacctccaagcgatctgccaatcttcgaactctggcacgtatgcaggagggatagttaaagagctcacccctactgtgaatgggaggtgtgcagtctacactatcaacacaatgatccacaagattacttacccaaaatgcaatctatacatgacggcaaggccactctgtccagtacatctcatttccacttgcctcgacggttcattttccttaataatttccctacctgagacatgcgcctagaagatgagaacatgacagatgaagcctcgggatgtttgtgagatggcatgagttacaggccaattcgagcgacnagaattgttatcaccgagtttacaaggcagagagtganctggtgtccagtggccgatggcggttggggtgggctcaagggcgctgatcacatctcctagacgatcttctggggcaggccggagggtagggcaaggatcacctgggaggggccacgggagattctggaggaaccagtcccatttgcccgaaaccaataagttgaaaacaccctggtcctgcgtacctagaaaaactaaagcgagaagctgcacagggggggggaccggtggccaaggaagaaatcgccctcgggaaggggggggcccccaaaagcgttttaacggcggtaacgccccaagagtgaaacctcgggcggaccaacattcggtgtgcccccattaagaaagccagagaggaacagcagttcaaacaaaacgtcctaagggagcgaccggggagccggagcgagagtcacaccacaacgaggacccgaaaacaagtggcaaagcatcttgtgcgcgctacggggcgagcactcttcgggcgaccagagagaccctgaaattcactggggggggggcagcaccacacatcgcgcacaaactccagccgga

SEQ ID NO: 557231 - DNA, 109 bp, Homo sapiens
ccagtgctctctcgccacctctgggtgctttactgtctctggcttgttccatcactggacatcacttagcgaattgtcgtgtttttggtccttgataaagcctagaaga

SEQ ID NO: 557232 - DNA, 603 bp, Homo sapiens
  misc_feature (22)..(22): n is a, c, g, or t
  misc_feature (24)..(24): n is a, c, g, or t
tggctgggactacaggcgtagncncccgcgcccggcaaaatcctgatttttagtacaagtcctttcatgttatagaacattacatttgtcctttgcagctggtatctttagtttaaagaccagtgaaattcttaaccatgttcccattttaaaacaaagcgaacataaaaatgactaattcttagaactgaagttctaggttttgctttaatagcttttaagtattgccacttataaccccattattaacaccacagtctgcatcaaaagcttacttaaaacatttagttttcatgagagtttccaaaaataatttcataacaatcatttgttctaagagccatttcttaactcatcatgaactgtaatagattatgaagataagtttcaaaatttacataccagattttttaaaatgaagttaaaagcatggacatattgagggtcttatgcatgggcatactgaagggtttggagagacagaatgtgcatgaggtttgagaaggggagcatcacttccctatgtggaaataggacggagcagcgttcattgtgttgggccttgagccctcatcctttcatctaggctggaaccaagctgat

SEQ ID NO: 557233 - DNA, 1309 bp, Homo sapiens
  misc_feature (292)..(292): n is a, c, g, or t
  misc_feature (586)..(586): n is a, c, g, or t
tgttcattgagctgcagcgggaggaatcggacaagcttagtgaggcagtacaagcgcaggaaggccgcgaaggctgggccactcccctgaaaagcgctttgacgaaccgaggttggttgtgtgtgcttccggtggcctgcgggaggtggtgtgtgtgctttccacgtcgctatgcaacaaccgaggtacccccgtgcgaggcataccgttggcggcattccattaaccgaggtggtgcaggcatgccggtcgtgacggcagtgcatacttacctgagcgtagtgtttcaacncgcatgcgcgtacggtgtgttgtgctactagcctagagaccgctggtgggtaacaacaagccgtggatacacgaacaatctccaactagacagtaggtcagcgtacaaatcgcggtggctcccctagcgaatcgagccgaccaaccatcagtcagccatcacgccagcatgagtcctaccgagcccagtcgagccaccgaccattcaccgcagctaagcaggccctgcttctggaactccctcccatggggtccgaggtgttatcaataaagatactagaaactatccctaggnctcaatgcgccaaataccatggaacccccaccgtcatggagcttacagcccatccacagccggagttacaatgcccgagcctagcctacagccgagggtaggttacagccagggctatcacagtctccatggtctcgaacttccaagcaaccatcgtgccttacttgcttaaatggtgaggcgtagcgcgcgggtttacggagccctggggcctgacgtcataaccttgatgccgacgctcaagacacgctgcaagaagggaccattccccggttaaccacgctcttcactgcctctcgagtgcaaattcccactaaccatgacagtgggaggccatatccggtatgtacacacaaatgtttgccacaaggtatgatgagggccccacctgaagctaatgggacagctacgggagggaatagatttcggggcactcaagccccgagtgaggagttaaacagcaaaggccaactgtagtggccccaccgcgacgaagacacggtaggaagaagacgagtgctggcgctaataggcgcaggggaagaaagagacgcaagcagggccgagagacgcagcaggaacagaacgagggggcagaggcgaacgacccccgaaagacggacagcccaagcaaagccatagcgcataagggcggccataacgagggaagcagagagacggcaggccatagcagaggaaagaggaagcgacgcgacaccaaca

SEQ ID NO: 557234 - DNA, 647 bp, Homo sapiens
  misc_feature (1)..(1): n is a, c, g, or t
  misc_feature (72)..(73): n is a, c, g, or t
  misc_feature (77)..(77): n is a, c, g, or t
  misc_feature (87)..(87): n is a, c, g, or t
  misc_feature (91)..(91): n is a, c, g, or t
  misc_feature (95)..(95): n is a, c, g, or t
  misc_feature (101)..(101): n is a, c, g, or t
  misc_feature (126)..(128): n is a, c, g, or t
  misc_feature (132)..(132): n is a, c, g, or t
  misc_feature (134)..(134): n is a, c, g, or t
  misc_feature (137)..(137): n is a, c, g, or t
  misc_feature (147)..(147): n is a, c, g, or t
  misc_feature (156)..(157): n is a, c, g, or t
  misc_feature (163)..(163): n is a, c, g, or t
  misc_feature (179)..(179): n is a, c, g, or t
  misc_feature (184)..(184): n is a, c, g, or t
  misc_feature (195)..(195): n is a, c, g, or t
  misc_feature (210)..(210): n is a, c, g, or t
  misc_feature (273)..(273): n is a, c, g, or t
  misc_feature (275)..(275): n is a, c, g, or t
  misc_feature (358)..(358): n is a, c, g, or t
  misc_feature (449)..(449): n is a, c, g, or t
  misc_feature (501)..(501): n is a, c, g, or t
ngcccagcttaatgctgtattattcccaatgaaaagaactagactgctgattgtactgtaggataaggtggnngggngtgaagctgnggtntatncttgangcgtgtgagagtggtatggtaaggnnnaggngngtnttttctttcntagccatanncactanacaacttaattttccnttccngaaaatcagcngtcatcaagacagcncttggtaaaacatttaagatttgtgataataagcaagtgctgcagtggcacgccgtgtggttntncactttgaaaccccccattactgttaccctgttatatgatttagctacacagcaagtggactctgaggtgacgttcttttggnccaacatcgtcttcttggaccttagtggggtggggtatgctctagagaagcagcagcccatgcactgaagtttggggcaccgcggctgggngaggaatgggttttcctgtggcgtgcatgctgggccatcctgcacatcaggngcggaatggagaacatgcagaaacaccgacaatgtgaccagagagatagctgcatattttctgtagttatccatggcgctcctttctctgggctttttgcaggatgtgttcagggcggttgactgtcgatccgaagagggatttta

SEQ ID NO: 557235 - DNA, 146 bp, Homo sapiens
cagagaaaagttcattcagtttgattccccatgccctcgacaacgcagctttctcgattatgagcgtggaaggacacatggctgtggtgcatgtgtgcgacccctgtatgtcccatgccacttggctgaggctatggactgggtac

SEQ ID NO: 557236 - DNA, 256 bp, Homo sapiens
  misc_feature (129)..(129): n is a, c, g, or t
atagatatgagttagggaaggttgaggaggataggagaagggtttagatattcctttcagtgagtgtcttgtagtctttatttcttctatagaaagtatctttagagtactttctttggcttcttactntgccccctttcggggagtgcacaacacaatagttgcagatcaacaatcatcacttgccttttgtagaaaagaaaaacaaaaaaagtaaataaaaattttaaacagtaaaataaaagtttaactgcta

SEQ ID NO: 557237 - DNA, 177 bp, Homo sapiens
aagatcccactactccactccaacctgggtgacagagtgagatcccatttcaaaaaaaaaataaatggccatatagacccagttactcagcaaggatggcttgagcctcgggaagatcaagggctggcagtaaggctactgatttgagccatttgcactccgggccggggtaccgga

SEQ ID NO: 557238 - DNA, 291 bp, Homo sapiens
cttaaatggccgaatgttgcgagaaagacccggtccccatgctctttgtccaccagttgcccatggttgtctcggtgtccccttcaccttacctttctagtgcgctcagatctttttgtacgtttgagaattagacctattctagagctatcaggcttaaaagctgcactgatcctcagctgttacttttagaacacaacccctgggtcaggtgatgtctctgcttgctctatcagccttttgccagcctcagaataggcgaggtaccctttaattcctgtgcccttttcg

SEQ ID NO: 557239 - DNA, 298 bp, Homo sapiens
tttcccatttgccccctttttttttttgaaattcccggaaaggaggttattttagagaacttttaggtcgggttcctttggaaccccttgaattcgggggggtaatattttcagaggtttccccaataagggggttgaggcaaacatctttcggcggctaaaaggtttaaaaacaaaggtttccccttgatttttttaaaaaattgggggctttttttttttatggggtttttaggttttgatgaaaaaataaatgttgccttaatcggcatagtaaactgatgtttaaatttcccta

SEQ ID NO: 557240 - DNA, 609 bp, Homo sapiens
gagacccaacaactgtaagtaatatggtatgggatcctggaatagaaaaaggaaactaggtaaaaactaggaaaaatgaaaaacgtatggactttagttgacatactttatcaacattggtttgttcattgtaaccaatgtactattctattttaaggtgctaataataggggaaactggatgcagagaatacaggaactccttgaactatctttgcaactgctctgtaaatctaaaactgttataagataggaagtctatctttaaaaactaaagggagctgaggccaggcgcaatggttcacgcctgtaatcccagcaatttggggggctgaggcaggtggatcacctgaggtcaggagttcgagaccagcctggccaacctggtgaaaccccatttctactaaaaatacaaaaattagctgggcgtggtggcaggtgcctgtaattccagctacttgggaggctgaggcatgagcatcacttgaacccaggaggcggaggttgcagtgagctgagattgtgccattgcactccagcctggatgacagagcgagagaccagcctgggcaacaaagcaagactttcccatcttaattaatcagtaagt

SEQ ID NO: 557241 - DNA, 551 bp, Homo sapiens
  misc_feature (1)..(1): n is a, c, g, or t
  misc_feature (6)..(6): n is a, c, g, or t
  misc_feature (13)..(13): n is a, c, g, or t
  misc_feature (23)..(24): n is a, c, g, or t
  misc_feature (32)..(32): n is a, c, g, or t
  misc_feature (39)..(39): n is a, c, g, or t
  misc_feature (61)..(61): n is a, c, g, or t
  misc_feature (64)..(64): n is a, c, g, or t
  misc_feature (72)..(72): n is a, c, g, or t
  misc_feature (85)..(85): n is a, c, g, or t
  misc_feature (107)..(108): n is a, c, g, or t
  misc_feature (116)..(116): n is a, c, g, or t
  misc_feature (118)..(118): n is a, c, g, or t
  misc_feature (144)..(144): n is a, c, g, or t
  misc_feature (152)..(152): n is a, c, g, or t
  misc_feature (154)..(154): n is a, c, g, or t
  misc_feature (156)..(156): n is a, c, g, or t
  misc_feature (162)..(162): n is a, c, g, or t
  misc_feature (168)..(168): n is a, c, g, or t
  misc_feature (170)..(170): n is a, c, g, or t
  misc_feature (174)..(174): n is a, c, g, or t
  misc_feature (182)..(183): n is a, c, g, or t
  misc_feature (185)..(186): n is a, c, g, or t
  misc_feature (196)..(196): n is a, c, g, or t
  misc_feature (199)..(199): n is a, c, g, or t
  misc_feature (202)..(203): n is a, c, g, or t
  misc_feature (206)..(206): n is a, c, g, or t
  misc_feature (224)..(224): n is a, c, g, or t
  misc_feature (250)..(250): n is a, c, g, or t
  misc_feature (256)..(256): n is a, c, g, or t
  misc_feature (262)..(262): n is a, c, g, or t
  misc_feature (264)..(264): n is a, c, g, or t
  misc_feature (266)..(266): n is a, c, g, or t
  misc_feature (283)..(283): n is a, c, g, or t
  misc_feature (302)..(302): n is a, c, g, or t
  misc_feature (320)..(320): n is a, c, g, or t
  misc_feature (330)..(330): n is a, c, g, or t
  misc_feature (337)..(337): n is a, c, g, or t
  misc_feature (341)..(343): n is a, c, g, or t
  misc_feature (353)..(353): n is a, c, g, or t
  misc_feature (369)..(369): n is a, c, g, or t
  misc_feature (371)..(372): n is a, c, g, or t
  misc_feature (387)..(387): n is a, c, g, or t
  misc_feature (426)..(426): n is a, c, g, or t
  misc_feature (433)..(433): n is a, c, g, or t
  misc_feature (440)..(440): n is a, c, g, or t
  misc_feature (442)..(442): n is a, c, g, or t
  misc_feature (449)..(449): n is a, c, g, or t
  misc_feature (458)..(458): n is a, c, g, or t
  misc_feature (474)..(474): n is a, c, g, or t
  misc_feature (482)..(482): n is a, c, g, or t
  misc_feature (522)..(522): n is a, c, g, or t
naacanagggtantttatttatnntacatganaaggtgnggctccctaggcccctcccctnttnaaggggtntaaatggcaactntgaggaggggaaattcattttnntgggggantnattttggcagggactccccagcagtnagggtttntntnttcctntttttntntttntggggttnntnntccaggggtnttnttnnttngaggccatttgggccatnaggtccaccaccctttttttttaacnaaattntttttnananaaggaaatgagctttanaaagtggtcgttaagaganaattccaaccccaacttnaaaagttgangatttgntttnnntttttaattnaaaggaaaccaccttntnntcattttaacccaanattccctttagggggccctccgatgctttttttaccacnttttttnttttatnanatttggnaagtttttntaaacggcaggtcagntccaccanttaaacttttgaattggggacacggaaggccatgccagtnagcttcccgttcagctcagggatgacctt

SEQ ID NO: 557242 - DNA, 288 bp, Homo sapiens
gaagccccagcagatgccaccgccggaagagcccttatgacccctgggccgcgctgtgccttagtgttaaattgcagcttttccggagtcacgtgcagccccttttggttgaggagactcctttggagaagggtgagaaggtggaggttatgctttggggggacaggccagaatgaagtcttgggtcaggagcccagctggttgggcccagctgcctatgtaaggccttttagtttgttttgggaccccccccccacgaaccaaatccaaataaagtgaccttcccca

SEQ ID NO: 557243 - DNA, 310 bp, Homo sapiens
tgttgagctcctactatgtgctttgcactttagaaataaaaagatcagctgggattgcaggcatgagccaccacaccaggctagactccatctcttgagggggagtggcatgattctgaaaaagcacctgggagcagaaaggttgctgtggctgtttttggaaaacacagtctgctacacgggtctccagttagccatgtgtagcagactggagacccgtggaagactagataggctctgagataggtgtactgcttcatggttaggctacaaagcctgtgtcttcatccactcaagctgcttttgttgg

SEQ ID NO: 557244 - DNA, 201 bp, Homo sapiens
aaactcgactgctgcgctcttgtcagactgcgggacttcgaactgctgcggcgaaatcgcgtagtaatctccgtaatccgcatacccgtcgctggcgggtatggacacgaaatatctctctgaatcaagttcagtgccgatcgcgtaccgaccttcgtctgagaagagcaggtctctgaatctcacgtcggtctccggtta

SEQ ID NO: 557245 - DNA, 192 bp, Homo sapiens
aagtgctggggttacagtgagccactgcacacagcctaatgactttaaaatcacaggcaaggagaagggcacagatgacttgagttttatttcatgatgtcacagcatgtttggagcaaagtggaacactctgcattgggttcacatcggtccacagtcaataatggcctaacaagatagcaaacgcggccg

SEQ ID NO: 557246 - DNA, 122 bp, Homo sapiens
gggggatgctggggccatcggctctcagatggcaactcccagggcccagtctcgatgcctctgtaaatatttttcgtaggcagcgtggctccaccggccaagcagtggtaacaacgcagagt

SEQ ID NO: 557247 - DNA, 155 bp, Homo sapiens
tgcaaggattgtctgcacacctcagcctgcccaggagcctgtgttaggacggggtcggggagaaatcatggctctcgaagctcataaaattcaacgtgagtgaagcatgtacaaggactgcccgaagcacacgtggacggtcataaacggagcgg

SEQ ID NO: 557248 - DNA, 357 bp, Homo sapiens
ggaccttggttgcggcgacattgcccaactttccaaaaaaatcggggtcttcggtaaatacgggaccccctttggggccctccccccgaaaatgggggagaaaatttaaatccccccccccccccaataccctttttttttttttggcaaaacccaaatgaagagacgggctttggggattttgccccttggttcccccctaaaaacagggggtggggggcccggacgtaaaaaacccccccccctttcccggtaaagcccccccccacaagactggaggggttgaaaaacccgttgaccccccccttctttttgggaaacccccggcccttaaaaaaagggtttattttttttaca

SEQ ID NO: 557249 - DNA, 561 bp, Homo sapiens
  misc_feature (16)..(16): n is a, c, g, or t
  misc_feature (27)..(27): n is a, c, g, or t
  misc_feature (34)..(34): n is a, c, g, or t
  misc_feature (44)..(44): n is a, c, g, or t
  misc_feature (48)..(48): n is a, c, g, or t
  misc_feature (51)..(51): n is a, c, g, or t
  misc_feature (80)..(81): n is a, c, g, or t
  misc_feature (84)..(84): n is a, c, g, or t
  misc_feature (92)..(92): n is a, c, g, or t
  misc_feature (103)..(103): n is a, c, g, or t
  misc_feature (154)..(154): n is a, c, g, or t
  misc_feature (168)..(168): n is a, c, g, or t
  misc_feature (175)..(175): n is a, c, g, or t
  misc_feature (200)..(200): n is a, c, g, or t
  misc_feature (231)..(231): n is a, c, g, or t
  misc_feature (265)..(265): n is a, c, g, or t
atagttatctatctancactcatatcnatcaatnatgaatcaancatntanctatggatctacatctatacatatcaatnngcnagcaatcngttatctattnattacatctatcatctgtgaatcagttatctaacaatcacatatacgtgtncatcaatctatcanttatttntctatgcatcaattatttatccgtncaatagtttgcaaatgtgaatgattcaggtntcataattgggaagatgcgtctggcatctggtgngtagatcccagggacactgctcaacaccctacagtacacaggatggccccaccacagaggatcatctgggctgaaatgtcagcagtgctaaggctgagaaacctgccctcaagcaactgtgtgacaagagcagccttcaacaaacacacagagctcaggagtactttccaaagaatgtctgcaagaggctttcggggagagaaaagaccccaggcagatgttcctagcaagaagctggtgtcgtggaaaggggcagtggtctcatcatggttagtgaccagctgtggatgaagagc

SEQ ID NO: 557250 - DNA, 945 bp, Homo sapiens
ggtcttaagtattggtgataggtattgcccgcgtacatgggctgaggaagtgttcaacgcagaagaaatggtagagtgttcttcaggcttaaagggtatgtccttgtaactctggaacctgataatgttggtgttgtcgctgttctggaaatgagtaacactatattaatggaaggagatagtagtgagagaggacaggagccactccggtggacgttccagctaggtgaggagctagtggcgtctgtccgtcagtttgcaatgcgcacttgggtcaactgcattagtatgagagggatagatgggttaccgaatgtggattcgcaagaacgtcgtggggcgagttgggtctgaattgcacctcgcggtgtcaattccgtcgaagtttgcaagtgcgtggaactcaaatgcagactgggcacttaagggcctgatgggaataagccttctggatggcaaatttggggtacgggtggatcaaggggctaggagagctgaattcatttcgtgatgcacgcagaagaggagctgggaggagatagtcgtcaaacttggcttattggagcacgagaagtcaaattaactctaggaagaatggttgtcggaatgcaattgaggaatcctgtattggagcgaaggaaggcaacgattggtagatgatagtggggagtgctaagggattaattggggttgcacaatgtgaagtagtacacaatagattagggacaagcccttggagtggcaaagggaggactgttaccacaactgatgggtaatgggccgaataggaaaggtttacccatggcacaagggttgcgttggtaccgcacagttgaccgtgcggcgtcgcagatgatggctggggatgcccaacttgtcagagtaacccgggggggttccctttaactttgcgggacttggagagcacggttgggcaggaacgta

SEQ ID NO: 557251 - DNA, 108 bp, Homo sapiens
  misc_feature (8)..(8): n is a, c, g, or t
gttacgtnggaggctacttctgtctcctgccgtccaggtatgagcttcaggaagacaggcattcctgccaggtgagtgagcaggaagcggtacacggaggcatcaggc

SEQ ID NO: 557252 - DNA, 453 bp, Homo sapiens
  misc_feature (47)..(47): n is a, c, g, or t
  misc_feature (67)..(67): n is a, c, g, or t
  misc_feature (86)..(86): n is a, c, g, or t
  misc_feature (185)..(185): n is a, c, g, or t
  misc_feature (194)..(194): n is a, c, g, or t
  misc_feature (257)..(257): n is a, c, g, or t
  misc_feature (353)..(353): n is a, c, g, or t
aaaggaaacccgtaacctcctacccagaaaaaattacccccaggtgntgtggccttatgtctaatgnccctagcccactctgcctnactgcaaacctccggcctccccaggtttgattgaatcccctgcttcagccctcccagagtagctgggattacaggcaccagtcaccacgcccggctaantttttgtanttttagtagagacggtttcaccatgttggtcaggttgctctcgaactcctgatctcaggtganccacgcgcctcggcctcccaaagtgctgggattaacagcgtgagccaccacgcctggccgaattttcataaatgatttgaaagaaaatgagctcantctttctttttttttcagacggagtcttgctctgtcgccatcctggaatgcagccgagatcgcacctttgctctccagcctgggcaacacagtgagattc

SEQ ID NO: 557253 - DNA, 398 bp, Homo sapiens
  misc_feature (52)..(52): n is a, c, g, or t
  misc_feature (243)..(243): n is a, c, g, or t
  misc_feature (262)..(262): n is a, c, g, or t
  misc_feature (285)..(285): n is a, c, g, or t
  misc_feature (296)..(296): n is a, c, g, or t
acctggcttagtcctactccatctctctccaggttatgcaaaagcttctgantgagtaccattcttcccatctttcctcccttcaatgctaactccacctggcagccagtcagcagctcacacagatcagatatggttctgctgaaacccttcagtggttcttcattacctccagaataaagtcctaccttctcagtgcgggccatcccagaacctctacaactggacacaggccatctcttnagtcatgcttcacacctgnctcccctgaatctctaggtcacnattttcttttnatactacttttcatttctcccaaacacgtcaatgggttcacactgctccttggtctgagaatcccctaccaattttccaggagtgaacatgcccagacggca

SEQ ID NO: 557254 - DNA, 576 bp, Homo sapiens
ggtgttatcgatgccaccactttgtgttttaaagacagtaggaataactatgcatctccgggatagtccgttatgctgcatgatatcgaaccccacaggttcaggatacacaaataatgtcctccggtatgtgtaagaatctgtcctaagtaagtggcagaaaagactattctattaacatgattttaaaaaataaaaatgaaacttgggttggctatgtgattgaaatgtcttggcgatagtaaactagttggttgggttgggtatgctattcttttatgaaacgagcatttggggcataaataacctttcagagtcaggtaaatgattgcgggggtatatgacatgctaatatgtagccttggatttcctgagtccttgtggtgttatgaagtgttgtcattcattcttggaacactacttagaatagcgcacggtccgctcaagggtcatcacagcacttaataatttcggaaagagataagcaggacagaagaccttatcggtatatcaaatgtgagttcatgtgtgatctactacaccagccaaagtgctggccctatcaatcctatctcc

SEQ ID NO: 557255 - DNA, 876 bp, Homo sapiens
gtgcgctgcgttggggtataggtggctcttgagagcgcattgcggctcttatgtctcctcttctacctcttgagttttcatatgagggttcccgttagtgttctctagtgagtccgaagaacccagcagcgtccattcgtgccgaacaagtcccagccatgggcacatcttgggacctggttgggctgttgtgtcggtttcgcggtgttctatgcgttgctctttagagaattgattgtactggcctttggggctctataagctgtgttggtggattgtataattgggatcgccctggctcgaattcgttgtcgtgcttcgtaagatctcttggctcaaagtgtccctggggtccttacagagagagataagaggagcccgctgccgtccactgtctgcatggtgttaattttgccttcccgtctacgttctgaggggtcagagggagccggtcacaagagtggtggcacacgagtcggcagcagcccttgagggcgctagacgggtgcatgagggacggaagacatctcagctccgtcgcctcatgagaaagtcccaacgcctgagagtgggagaacctgcccgctttccaaatccgctgaggaaaccatcacagttctgaggagatggaggcacaaagctcaccagtgtctgtggggtgccatgtgcagcgcctcaaaccacttcacccttaggtgcacctcagccatcatctctggtggacacaaagctctcacatcgataggatcccatgaggatggtcacccttcacctgggagaaaagtgacccagttaaggagctggaggggggtctttgtcccccactaacccgctgtcctgagatactgagtgccttgtgggagcgtgggaggggga

SEQ ID NO: 557256 - DNA, 259 bp, Homo sapiens
cctttctctacaaaaataaaaataaaaaattagctggatctggtgatgtgtgcctataatcccagctacttgggaggctgagatgggaagacagcttaagcccagaaggtcgaggctgcagtgagttatgatcatgccacttcactctaggctaggcaacagagccagaccctgtcttaaaaaattaaaatcaagcaatctgctgttcttcagtaggcttctctcacttaaaaacaaatcaccccagccaggctgcagg

SEQ ID NO: 557257 - DNA, 534 bp, Homo sapiens
atgaagtgattgaaaatgttgtgaaaatgttgcgatcgcgaagatggatcccttgtgtacatcggtagtggggacgggctgcattgtcatagcggctgcgagaaatgggtcacagcagttggttatgaattaaacccatggctagtttggtattccagataccgtgcttggggagaaggtgtgcatggatctgccaaattttatatttcagatttgtggaaggttactttttcgcagtactcgaacgttgttatttgcggtgtgcctcagatgatgctgcagtttggagaagaaacttgaacgtgaacttgaggatgatgcacgagttaattgcttgccggttccctttcccacattggactccagaccatgtcacgggggaggggatagacacagtgtgggcatatgatgcaagcacttttagaggccgtgaaaagaggccctgtacatcgatgcatttccagctgcccattcaagcataaactttactggggagcgttatctgaatattgagtcttcctgatctgtagagac

SEQ ID NO: 557258 - DNA, 752 bp, Homo sapiens
  misc_feature (369)..(369): n is a, c, g, or t
  misc_feature (383)..(383): n is a, c, g, or t
  misc_feature (456)..(456): n is a, c, g, or t
ccgatggaactggttaagttctcctgagccccagatcgccctttggttgacagtccttcgtttagtgtgagctggtttttctcctaggaagttgttgtttaaggattctaattctagttcagagacacattctaaagggttttctttattgctttttctcccaaaattaatcttgattcggcttgtctgcgcatttgtgtgaggaattgaactgttgttttcataggtaaatgagagactgagttttctcaactccaaagagaaaggcatttgctcctcccagccaaaacgtgctcctgggtgactgggggccttgtgggagtgtctgggggggggttgacatcctgtgacatgcagcagccctatggngaaatccccaacanacattaattttaaaaatggcttgtccaggaatgcatataaggactgatcacccatcattttgagccctctcanaggtaatagacctctggagagagaaactgagacatgtaacagggtggaaacaactcagtggtgacacatggtggggtcctgccacaagcaggacacattgatccaccacacaaaaaccctaggccacaggtcagttcctacttctaagaaaaaaaagggggaaacaatgatctatgatgacgagaaacaaggcaatgacctcttttgggactctgtgggtttatggtgcgctacttgccgaacctatgtaaatgggaatataatgatcttgggcacattacctttaggatctggcg

SEQ ID NO: 557259 - DNA, 122 bp, Homo sapiens
tttaatttcttcaccattttccggagggaggcccatcagaagacgaaggagttgaaagaccagtagacgctcctctactcttggagacatcacgggcctataataaatgggttaatttatgt

SEQ ID NO: 557260 - DNA, 224 bp, Homo sapiens
tcccccccccttccccggcccgggtccccccccccgggggttttttttggggggggacacccggttcccctctcgggggggggggtgtctgccccccctgccctttttctgttgtggcgggcgcccccccccctcttcttccctcggggccaagtggccccggggcccccccccccgggttttttagaggaaaaaattccccccccttggggggcggggcccca

SEQ ID NO: 557261 - DNA, 1084 bp, Homo sapiens
ccgcccaagcgcctgcatgcgcgctgccctgcgcctcgccggtgctccagctgctgctcctgctggggccgtggcgtggatggctgcgggctgttgcggagtcgccgctgcccgtcgtggtccttgccatctctggccctgcaatgccgaacactcgctgcccctactacctgtggcagctctggagctggctggattacccccggtgccagggatggcccctctggtgtgccacgtgacctactaatgtggaacaacaacgactagaagtatgcttgcaggagctggctggccggtctgctgggcgatcgatctaatggctgcgtgttggtctaggcatgagctctgaggagctgaagcccaagggttctacgccgagattgaagcacgaggtacccaatgccatcgtggacgcaaaggaaaggtcaccacggtttctagagtggagctcgaagctaggcacaggcgcctcagctttttgccagagaagctgggcgttggccgagacctatatcactgttcgtgcaagaccacgcagacgaaacgattcgtggacccaacggaatcaagcactcgtgcgcggcttctccagtggtggccagtggtcgcttccatgtgtggatggtccccaaattgcatggtgactccacagaacctagctatctccaagcaatcgtgtgtgcggatcacccacactcctatgggcctacatagccgatctgcacccaagtgcagaagagtacgtattcaactcatgccaaatgaaagccgtcactatgtgcccgttggagcctgctgtttcctgatggtcaccccaagtggatcacaacatctctaaacacgattgattaccatttggccgatttagccccatttgacggagtgttaccttggacgaacggcgtgagacgcaagaaaaccccaaggccgttgagaggaagtagccggatagagcacgtggacgccaaacaatatcaccccaaaaagcgtaaaccgaacgatgcgggaccaccatatattgctgaacgcggcaagcaaattccaatcacggacgacttccgggcacgtcaattggcgctatgtc

SEQ ID NO: 557262 - DNA, 340 bp, Homo sapiens
gatcaaggtgaaaaggagaaccccatgcggggaacttcgcaattcgcaaaactctgtctcaacatctttttctttgttagagttggaggaaaggacttacggcgaggcaggccaagggtctttggagccagccttaaaaggggccagaacccccttgtgtttttccaaagggctaggatacacctttacaggactcccttttgggcatcccgcgggaaatataaaaggatttcgctctctcactcccacaagattttgaggggccccaaagacagagagaaatctttagagaaggggtctataagggtgcggggagtatgagtttaggaaaacacaactt

SEQ ID NO: 557263 - DNA, 167 bp, Homo sapiens
  misc_feature (13)..(13): n is a, c, g, or t
  misc_feature (17)..(17): n is a, c, g, or t
  misc_feature (30)..(30): n is a, c, g, or t
  misc_feature (33)..(33): n is a, c, g, or t
  misc_feature (38)..(38): n is a, c, g, or t
  misc_feature (52)..(52): n is a, c, g, or t
  misc_feature (71)..(71): n is a, c, g, or t
  misc_feature (112)..(112): n is a, c, g, or t
  misc_feature (123)..(124): n is a, c, g, or t
  misc_feature (147)..(147): n is a, c, g, or t
tgcggatcctggnagtncaaagcacattcnatnctgcncaactggaacattnttcagggacaagacccggnattacatgcggcgtctgatccatttcataccttagagggantagggctttgnntcacggtttcaagaaacaaccanatttgaacaggctagggatc

SEQ ID NO: 557264 - DNA, 135 bp, Homo sapiens
acgtcgaactgtctggcctgcaccctctcaactgaagttgagccaaattcccttctctcacaccctaaagccgccatcactaggagaatgcgcatctcggcttggtcagagcattactaaccagccaatgtggga

SEQ ID NO: 557265 - DNA, 464 bp, Homo sapiens
tacccaggaggaggagaaaggagccacagtatgtagcaagtgtcctaaagtgcaaaagcttaaggatccatgaaggcgaggagccagaggagtcctggaattcccttggagggaaaaaagactaccagaacacaccactactggaaacccaagatgaagaccatccacctcggctataagggtgctctaacaaaagtggaagatatgttattgaagagattccaggagagtacacccaggatgatttagctgaagatgatgtcattgaactagatagttggaaacagatatttatatggattggcaaagatgctaatgaagttgagaaaaaaagaatctctgaaatctgccaaaatgtaccctatgagacaagaacccttctggaagagacaagaggacaccaattgtcatccaaaaaaagggccatgagccacccacattcacaggctggtcctgggctggga

SEQ ID NO: 557266 - DNA, 406 bp, Homo sapiens
attcgcggccgcgtcgaccttatgatgacctgtaagtgttcaagtgaaaggaagagtaacacgtctctcactttcaatcaaaagctagcaaggattaagcttagtgaggaaggcatgttgaaagccaacacaggctgaaaactcggcttcttgcaccaaacagttagccaagttgtgaatgcaaggaaaaagttcttgagggaaattaaaagtgttactccagtgaacacatgaatgataagaaagcagaacagctttattgctgatagggagaaagaatgagtgttctggatggaagaccaacacagccataacattcccgtaagccaaagcctgatccagagcaaggccccaagtttctttcatggaattgaaggtcgacgcggccgggaattttattgtagta

SEQ ID NO: 557267 - DNA, 925 bp, Homo sapiens
ccacctggggtaccatcacccgatgaggcaaccagccagaacgcctgaacgcaggcacatactttcctatgcgacaccctagataggctcccattccctcactactcatctgcggctgatttacactcactaaaacctcctatgagtgtcactaaatcattcattactatcgtcactcatcagtgcccatgagcctatcgaagtctcctgagccactaacaagttaatatgatttagcttacacaatagcgttttatagtaaagatacctcttaacggactccacttatgactccctaaagcccagtggtcgaagcccccatcgctgggtcaatagtacttgccgcagtactcttaaaactaggcggctagggtataatgacgccgtcacagctcattctcgagcccctgacaaaacaataggctaccccttccttgtacttatcccgtatgaggcataattataacaagctccatctgcctacgacaaacagacctaaaatcgctcattgcatactcttcaatcagcaaatagggcctcgtagtaacagccattctcatccaaaaccccctgaagcttcaccggcgcagtcattctcataatttcgcgcaggacttacatcctcattaactattcctggctagcaaactcaaaggacgaacgcacccagaggtcgcataataatcctctctcaaggggatttaaagtctggtcccagcttataagttttggtgacttcaaagaaagccctgctaaactctggctttaccccaatattacctattgggaaactcttggtgtgcccaggtctgaaaaaaaccctattagggacaattatacaggtgattctttatttaccacacagggctcacactaaataactagaaaaccggttttcctctttcaccgtcgggttacaaaacaa

SEQ ID NO: 557268 - DNA, 317 bp, Homo sapiens
ttgaggttaggagctgaggcagcgtgtctaaatggtgaaactctatctctactaagaatacagaaaattagacaggagtggtggcagtcggctgtaatcccagatacttgggaggctgaggctggagagttgcttgaatccaggaggcggaggttgcggtgagccgagatcgtgccactgcactacagcctgggcaacgagagcaaaaatccatctacaaaataaaaataaataaaacactagagtggcttaactgtgcgagcctgaatgcaaaacgcagatcaacgactctacccggactcgctataggggtaccg

SEQ ID NO: 557269 - DNA, 856 bp, Homo sapiens
taagcatcaaggtagtagtactcggggccgaacaggggtcaacgtttaatctacagttatcaccaacttgtttgtcttttgtcggaatcaaaatggtatcaaacggcttatggtgaagagaattatagcagacctgaagggggcgaaaaaccagatagggtgggggggatggatgccggtgacgtgctagcacttgtgtggacatcccagtctgcattatgctgtttaacataaagtgccgacttttggtaccagcaaatacctgcccattccaaccctgggttgggagcagacctctacggtcctcggtagactgggtgctatggaggacaagggagtttttctttcttaagaggtcttgcagggaaggatacaatacaacaaggcctaaggtattggactgtttagctggtgtctggtgtgtataggaaaagctaaaacaagttattggctttccggggtttgtgacgacacagatgggaaattctgtagcccttgtggttaccctgttgattataaaggctagctcaaaagagttggacggcatgagtcaagtgagttgtgcacatttgaaggctgggtgagcctctgtgggtggtggtccccttgggtctgggtcttggacttgcccggtggtgggcttgaagatgcctctctggtctgattgttcacaccgggcctttcaacagggcccaggaaagttgttccggagcccatggccgtcttgtggggccaggtcggtgggtgccccggaacacgtgtctcactctcaaggaaatacgcggcggacacacgccgcacggacgacagggtggtggtggccccctcagggtgggcaggagtaacagaagggcta

SEQ ID NO: 557270 - DNA, 481 bp, Homo sapiens
catctgtaacgaccctcctgtgagctataccgggcgtcgatcacacgccatcgcacacgctccacacctgtggcacactcctgtgagcttacaggccttcgatcacacgccatcgcacacgcttcacacctgtggcgccctcctgtgagacttaccggacttcgatcacacgtcatcgcacacagaccccacacctgtgacgccctcctgtgagacttaccggccttcgatcacacgccatcgcacacgctccacaactgatggcaaactcctgtgaagacttacaggcctatcgatcacacgccatcgcacacgccccacacctgtggcgccctcctgtgagcttaccggccttcgatcacacgtcatcgaactcgccccacacctgtgaagcccacctgtgagcttaccggccttcgatcacacgtcatcgcacacgcgccacacctgtgacgccctcctgtgagcttaccggcctaca

SEQ ID NO: 557271 - DNA, 197 bp, Homo sapiens
agtgtagcctgccttgtatctggtagatccacattacacacatcggcatctaacagcatgcttcacaatcacgaagtagggagtgggacacgctgtaatggagggctgtgtagccgttgccgtctgccaagttgatgacatagcggaggacatctggggaaatggcctcaaatttagctatgtagtcccccactatg

SEQ ID NO: 557272 - DNA, 255 bp, Homo sapiens
gcgcctgtagtcccggctactcgggaggctgaggcaggagaatggcgtgaacctgggaagcggagtcgcagtgagccgagatcacgccactgcactccagcctgggcaacagtgagactctgcataaagagcatacccatgtgtgtacctatctatctatctatctatctatctatctatctatctatctatctgtatatagatatattaggatgtaatggtggcatacccctgttctgtggtggattagggttt

SEQ ID NO: 557273 - DNA, 166 bp, Homo sapiens
attacatgtataaagcgacaccgacaaatactcccacatccgcttcccactggtccagcatattattacttactgttcagttcagctgcttcaggaagagaaaatacagaacggatgggaaatggtctaagatgactggagcctaacggtttgtctaaatgcaatc

SEQ ID NO: 557274 - DNA, 395 bp, Homo sapiens
  misc_feature (51)..(51): n is a, c, g, or t
  misc_feature (135)..(135): n is a, c, g, or t
atcacttccactctcatcctgtggcgttgagtttagtcaagtggttacacntcactgaaagagaggctgggaaccgtagtctagctaggagctctagaagaagagaacatgatttgatattgttagcagtctctnccacactgttattaaaatatcacgaaagctaacttgtattaaacactactcactagcaacctgttctaaaaactttacatgtcgtcttcaacaactctttgaggtacatactagtttaatctctgttttacaagcgaggaaactgaggcatagagaaatcaaggagttgtccaaggcacagtgctggtaagatgaagcctgggtttgaactcaggcagcctaactccagagcaggtgtttgtaaccactactccatgcta

SEQ ID NO: 557275 - DNA, 329 bp, Homo sapiens
atatgatgaacactgtacagttatgaaaacactaacacaacttaaagccaaatatctatgtaataccaaggaaaattctgatatggaagtggttgaggtagaaagcaaagaataaggcacctgctatgaatttagcacaaccataaaacagaattagttaaccaagacacttgtttcaaaaagggaaacaagtacagagactgattaactgggtgagaaaggcaagtgacaatttagttaaaaacctgctggcccaaggtcagttgattcattccttattccagaatagttaagttcctgaaagtccttaaccactctgctcccttact

SEQ ID NO: 557276 - DNA, 194 bp, Homo sapiens
ggggccaggaggaaagttgttactactacgataggggtgttggagaattactattatggacaagcccagcccaaggaaatcctcagtgaatctgcgtgactcataattgtgctgctcaatctatggtttctactgtgaaaatggaaacccactcacccgtcacagaagccacatgcttgatggagatgacctaa

SEQ ID NO: 557277 - DNA, 292 bp, Homo sapiens
agtgttagttcggccttgaactcctggactccagctatcctcctatcttggcagccaacgtaccgagattataggttgagccactatgcccaggctttatgtttaaaacaatccttccataaagtatttttccttgaaccctctagattagcattctttaattgttaattttatttattattattttttgagactgagtctcgctctttcgcccaggctggagtgcagtggcacgatctcggctcactgcaatctccgcctcccaggttcaagtgattctcctgccttagct

SEQ ID NO: 557278 - DNA, 1368 bp, Homo sapiens
  misc_feature (173)..(173): n is a, c, g, or t
  misc_feature (268)..(268): n is a, c, g, or t
tatcatactatctggagagatgcacaatacactccacgaagagagtctacgcctacgatattggtgctcccatactttgaggttagagcctgccctgataaaaactattgtctagcatcaaaactcacctaggtgtccatcgaacaacatagggtatatagacgcctccgatnacactaacatgcagatgtcatagccaattccatacgatattagtgactcaactggcgagaaggcgaaatgggcagttgcacttacactacgcctntcatgatggtagcgcataatacgcctaccgtgtaccgagacaagatactgctcgtcatgctcccgggcaccaaaaaatcgaaaaacaccaatcatagggcaaaaggttaccattactctcacatttccacacatacttccgaattcagtccaagtcaagttcattgagacatggggtactcacatcatcgatagactgaggagaagactaggctctccctttagcgaacgtttgcgtggaaagtgctctcaacgcagagtatgaccactcgataggagtcaatctctctccgttctttgtacggagtactccggtgctccctagcctttcctttttccgtactaccaagtaggaacgacacagaaagcattaaaacacgcggccagtgctggccagaacgcgatgattcactcgccatacttgagctacgtgccctcatacaagcgttaaacccaacgtgtgatatgttctcctctccataacgacgtaccagctaagcgtgcatggcgagatttgcctttaaagtacttcattcccaataaagccaaaggcactacgcaagtgagggggcgggggcaatgtttaatccaccacagataaggaccccaacaaaggtaagaccgaccaagagagaagtcccttttgagggccaatgggacctccccagtcattaccataaaccctcctcaatttaatacacgcgtagtggcaccattcatagttaagcctacggaaatcgttaaccgggctatactagatccgcgtttagagcccatctcatatcgcgcattttcgtctcacacagcgcgtccacgtcggcggaattctttcaggtgagtggtacatttgcctttgaagagggcgttaaacttcaactccaggcggacattgtccgcttgaccctttaatcgttactcaaacaagtaataacattaggcttcacaaagcctaggccgacaggaaacccctttaccttaaattaaatcgtccagcttacccgtggggagtaggcgacaacggcataaacacagttgcacgttaatcatagcccatatgaaattgcaccaacctcgcgacaccgtctccggttgttgccccta

SEQ ID NO: 557279 - DNA, 962 bp, Homo sapiens
  misc_feature (427)..(427): n is a, c, g, or t
  misc_feature (643)..(643): n is a, c, g, or t
gcttgccaagggcagtggttgtgtgatcgccagtcttagcggaagaagatgttctcgtccgtggcgcacctggcgcgggcgaaccccattcgaacatcgccagatctgcagctggtgcacgagtggctctcgagggacctccgccacgtcatgctccccaggggcccacgggcgcagccccggctgctcctcgggacctggacagcctgccgccgtgtgacgagtacagttgtgatgtttggctccgcgaagtattgtgcgctgtgtggcttgggtggggtcttaagttgtggcctgaacacatcatcggctgtggattcccctggtagtttacgtggaaattgcctgtatgcagtgtggagccccctaagaagtacaaggggcatatagaagcggattctcagtgacgcttgaagaggatggtgtncgggggtctggcgtaaagcgatgggcgtccgacgtgttccgtatgggcgtactccagtgcagggactctgcaacgttgtggctctctagtggcaagtcttttaaagctcttggtaatcagcaagtatgctctggaggaggcagaaatactaatactctgggcgcagatcacctaatattaagggatggcgtactgaccatggtgctgaatgctttntgctgagcttttggccctggctcctatgtgaagctgcgtagaggttcggagtatgcaaagcccagacgaggtcatgccgagaacctttggagggatgctagtcccaaaagggtgtaccggacgcaaggcctaaacagcagttctacaaagggggttgctcctctctgaatgacacacgagaaccatacagccatgatgaagtccggcctggctccggcaacggtactggtgcaacgcctgtacaaacgtctgggggtcctaagccccgcgatgcacctgtaaagtcagaggaactgggtgcaactttgcaacaggtacc

SEQ ID NO: 557280 - DNA, 324 bp, Homo sapiens
cacgagggaagcccttaattcactgcaccctgaagatcatgatggcctaagcttccttgcaacagaaaaccacttaagtgttaacaatcttccattgaatttggaaggtcttgtctataaacagaaaattgcaggaatccagcacatactgctcaaaatgatatgagattaacttccgcagtaatgtcatgtacctgttaccgtagatcaccctacccaggtcagtgttacatcccccaggggtaccgacaagaaggttgtgcggaggttacccaaatgggatgggggcaactcgaataagaggccgctgcctgcctgaaatct

SEQ ID NO: 557281 - DNA, 682 bp, Homo sapiens
  misc_feature (677)..(677): n is a, c, g, or t
tagcgggacagcgaggtcggcagcggcacagtggaggtcggcagcggcgagagaggtccggcagacggcgacatgcgaggtcggcgagcggctagcgaggtctggcgagcggagcgcgctgtgctcttgccggcggactctgaatcatggcagaccacggccacgagtggacgaccgtcgggctcgcgcgcgtaaagcggctgctcagagatggaagactatgattacacatgctggaattcgagaccaggtgaggtagcgtggatgtgagccccacgttcgacaccatgggcctgcgggaggacctgcatgctggggcatctatgctttacgagttgttgaatgaaccatttagcaattccaagcaaagtagcaatcaatgtcagagtcatcaacaggggagatgattgtcactcggcaacagatcgtcagatccgggcacacggaaataatcgggccacccttcagatatcatctagtccgtccagatgttctggataattcagggattcgtagatatacttcaaggcttggatcttgagctcccatcaagagagttaggctggtgcagattccagaaggggctgattagctcatcgagtgactaccgtgaactgttcagatgccaatgaccatgcatttgtatggcaccaatgttgtgccaggacatcacggangctgg

SEQ ID NO: 557282 - DNA, 1331 bp, Homo sapiens
ggtcctgacccgcgagcacagagcctcgcctttgcctgatccgccgccctgtccacacccgcctgccagctcaccatgtgatgatgatatcgcctgcgctctgtcgtcgacaacgtgctcctgtgcatgtgcaaggcctggcttctgctggtgctgacgatgccccccgtggcccgtcttcccctccatacgtgggtgcagcacccagtgcaccatgggccgtgattgtgtgcggcataggtgatcacgcaaggatttcctaatgctggcgctgacagatggccccaagagcacacgagcatggccatcctacgacccctgcaacgtaccccaatcagcacgcactggcaatcgatacacccaaactggggaaccgaccactggcagcaacaatcgtggccaccagcaaccgtatcgtaacacatgcagccgtgccgcatgctgggacatccacgcaggcaggcaacgccacgagtgcattgctagaccccgaaggaccaccacgctggacacccccaaaagggccaaacccagcgcagcacacgcatagcaccccaagaagtacactagtaccccggacggacacctagtcaaactagcacgcgcaaggcacaatagctaaccgctaatgccatcactccacaacgaggacatggttgcctaagttccacattggtaagccgacccattactgggcaccggttaaacccgaaccttgggccactaccgctcgaatggcgcacgttcccggaggttgacaaccaatgggtcgctacgaaccacaaaacgacccttggcatggccccccccaattacattaacgcgcgaacgtgacggacgttacttctggccgcacgtttcccgcgcacaccgaaattgagtcccgcaacgatacacccttggacagacatacataggggagaacacatagggggcacttcggcgcaccatgagaggacaccccccagtcgcaacgcatcgggacaacatgaatacccccatacccaagctggggcaagaccaggcaaactagccccggatcgaaacgcgcccgtgcaatggccggcgtccgtgtgcgtgctgtcaataccacgggaccccttcgatcaacagcccaaagacacgccgacaacgacggatggagaaccccggagcagcagcgacccggcgggcgggatcaacaagcacaaagtccccagtggcatcgagccccgcgcgggatctgtgaccaccccacatagtttgctagagacagctgctggccaagccgaggacaataagcagtcgcactctagagacctggagtccactgcaataccagaagcgaacgg

SEQ ID NO: 557283 - DNA, 1403 bp, Homo sapiens
gaggtgcgcgccccgccacccgcgcgcgtagagcgaacgggtgagaacatcgccagcgacggggacaaccacccgggttatatactgcgccgcaccacacgaggggcgcgcgcgacgagtagtcggcgcaccaagctccagaaaaggggcgcccgatctacaaaaagcccctctgcacacggaggtttcgcccacgcaaaagacacacacgggggggtcccccaattgagttccccgcggggcacacccggggtaattccccggggacaaaagagggcaccggtttccccagaaatgctccccgcagaagagatctatatgagtcgtcgcccccccccccccgggggggaaggacctctccacaaggacgacggttacacagagaataatatagagccgcgcgcgaactcaacacggggcatgcggctacgaaagaaccctcttcctccccggggggagaccctctccaagagaaggaagtaacgcacaagggccaaaaagccctcctaaaaaagcctctgggcgggctcccgaagaggcgccccccgaaactgccccgcggggatgacctcccccagaggggggccgctaaaatggagggcgtctccaccccccccacggcaaataacggcaaaaaagtgtttccctcggagcggagcctgtagagggaacaaaacgagaaaacacggttaccacttcccgcagaaaaaagaggtcccgcccgggaacgtccacagcaaatataaggccgctcccgccaacatgtgtaccaccacgccccacgggggggataacaaaaaagagggccctccgattaacagagagagtctccaaaattgcccccctcttctcgccacacaaaattgataggaccccaaaggacacgctcccacggggagccacactgggagattgtacaaaagtgcccctccccacacggtttggagaaaaataaaaggaggattgagagaaagatccacgaattccctccacatgggagaaaaagggaaaccccccagaagtcccacaagggttccaacgggaaaatgggcccacgggaacactgggagaagagaatgtaaagaaacttggagtccatgaattccaagcccctggggaccagatggaaagacccaaagccggatagagttgagttataataaaacttacattcccatatctgtgttccggatatttaaagtgtttgagaaacttgctcaatagaatctcccttaagttgttttccgctttcacattgtttttggaattgttttaatgtttgtcccttttttttcttaaatgtggagtttcacttgaggttgaattttttgaataaatctgccaatctggagtaaatcttgtactggctaaagattttaataaactcgacatgagaaaaacca

SEQ ID NO: 557284 - DNA, 977 bp, Homo sapiens
gagctctgtctagaccttttggttcggcgcgcggtgcgcagccagctcaagtgaacgtggtctgagcgtagctaatcctagcgacgtactcctggagtgcagttgacttcagtggctctgggattactccaaacaaacttacaaggcagtcgcgcgcggtggggcatcggaggcgatacctagaaactgaattggccgagcatggaggtctcatgacagtgcagttactcgaattctagtcgagccataggaggtcgcgaacgcggacgctcgacaagtcggacattaatcgtcgccagcatggctgcgaccttccaaggcggccataccgattggaggcaacctggaggcttatcgccggtagcaccatgtacgcttggaagtctagcacctatgggccgaaccatggaaggccccgtgtgaggccctatccgcactacgtttgctggagaacaggcacaacgatgccgctcacgaggagacacttaacccatggtcaactgggcccctcatagttgagtcggccacccttgacttaggggacccaacttgagttgagttgctctattaattatacgcatggcagcttttttgccttagtgggggaacgtggcgtagcccttcggcaattgccatggaattaacccatatttcctaggaggcacgcgatggataggcccaaagtgtcaagatagcaaggaacattggctagtataggaattttcggcaacaaggaaggggggccactggaatcttgttttggcacgttttccccaaatattggaaaacctcccaagcgggccttttcattgtgtgagggacaccgtacgcacgaggcacgtagggccagtagcgtctgggagccgaatacaccataagcgctgaggcttaaactcaacctttgggggaccagcgggcaagccaacaggattggtcgggagcgtaccccgaattttggaacagtggggacacaccca

SEQ ID NO: 557285 - DNA, 368 bp, Homo sapiens
cacgcccatgtcacaagctgctcatggtgtgacaccaaggagcaggcgcatcctgaaccatgtgctgcagcatgcggagccctgggactgcacagagcgtgctggaggccattagcacctactgcgagcagaaggagtgggccatgaactgtgggcgacaagacaggcaagatcgtggacgccgtgattcaggagcaccagccctccgtgctgctggacgctgggggcctactgtggctactcagctgtgcgcatggcccgcctgctgtcaccatgggcgatgctcatcaccatcgagatcaaacccgactgtgccgccatcacccagcggatggtggctttcgctggcatgaaggacaaggtcaccc

SEQ ID NO: 557286 - DNA, 279 bp, Homo sapiens
tggggccttttggtatccttttaaaaatagaaaaaaccggctaaggggtgggggttttcccaaatttcacaactttagggattttttttcttgttggaattaaaggggttgggtcagtgtgttctcttttagaaaaaaaaatattcaattagtccgccaccaactatctccctttatgcaataagggtgctttcttctcttattttctattgaggggtatgaaaattctcgtgcaatctaccccttttataccatatgcgaaaaaacaaaacaacaaga

SEQ ID NO: 557287 - DNA, 225 bp, Homo sapiens
atctcgcggctctccgaattcttgttggtcattgctcctgtgccgtgttgcaggaggacctgtctttccagctgtccctgaagtgccagcggagagcaccaggcagcccagaaacccaggcgtggagattgatcctgcgagagaaagggggttcatcactggcggatgacctacaagcgattcttgtacaacaaagttaccaagatgttgaacgggctcccatga

SEQ ID NO: 557288 - DNA, 255 bp, Homo sapiens
gaccccacatgtaccctatacaagtgcaaaacacacccgatcctgccatataaagaacatccacacacatttaggttgactaaatcatcatagaagaatctaggaaaaaacaaggaaggaaaaagaaatcatatctcaactcaccattcagaaacagcatatagggccaggcatgggggctcgcacctgtggtctcaaagtgctgggattacaggtgtgagctaccacacctggccaatttactaccatttttaa

SEQ ID NO: 557289 - DNA, 845 bp, Homo sapiens
ctgaagcatggaaggggtgttgaacaagtgggaccaagtatctcacaggctggcagcctcgacgattggttggagataatgcggaatctttatcctactatgattcacaggactgatgtggcaaagggagcagcaggaacgcgtacgatcgatggcagtttgtgaaattaagggttcactaacagcagacaaatacttaagaattggacttaatcatgcctggagagcacgcactttctacatgaaggcagtgaatgcacctgaaacgacagaggtggctggtcgctctggggagctccaaagcatgtttagactgatacacaggactataaaagcaacacacgaaataagtgaaaccagtgaatcgctgaaaaccaaaatgtctgaacttcggcctctactgtgacctcttaatgcagcaagttcatacaatacaggaatttgtcaccatgattgagaatcattcatcttcctagtgcagagaacatgaatgaacggcctcttatctgctataagtgccaccgtgtaaacacatttcatcacacacgctcggaggacactgtgtgacacaataggccaatggccagtttacacgctggaattgtttccatgacccatccggatccttatcttatccatgtgtcacctacttcctgtacacatggatcacgcgtcctgtccgcaccctggtcttgccgctcagataaggacgtagcccttccaaacagaaccggatctaacttagcgattcccaacagagccgaaaacaaccacgaaccaatttgcacgcccttccttagtcgacacatacctgcacgctcacaatctctgccatatcgactcac

SEQ ID NO: 557290 - DNA, 754 bp, Homo sapiens
agcgggtttagtggccagagtcgactcttccgacggaggtggcaggacaggcttggaacagctgccggagtgtgacggagcggcggccccgtcccggtgcgctggaggtcgaagaccttccaggataactggcccgtcagtagtcctgacccatggctcgtggacattcctgagccgcaagtctccctcacattcagtgcagtgattgagtgcggaagtgaatgtgacagggcagaagcatggagcaattgtctgctccatagccaatgatcggccaagggcgcgcaggggctggacgccatgagctacattacgcgatcagcgtgacctggaaagagaccgcctgagatgttgcatacgttgttgtcggaggaagcctgctggaaccatgtgcccatactgtgtacgacgacgctggactgagcagttggaagcatttgacctgcataacctttccgagctgtctcaacaggctgtgtgggcattatgcgggcaacatgacgtgctggagctgaacttagactggaagtcgccggagaaatctgtgcctcacgactaactagaagcgggctcaacaagaaactagagcgttcagacacgcctctcatagttggtcgacctgtggccttgcctagagtgaataggcgctagtccaagtggcctcgcaaggctttgacttacagtcaatcgggcgggacatccaagcggccagggacctcaggtgcccattgcccgaaaccctgcaggaatggtg

SEQ ID NO: 557291 - DNA, 120 bp, Homo sapiens
tgacttagcttaaaaaaagtaccgagagaactacgtttcttctttagttatctactaggagcacaaacggctggctgagattctggccagctgcttgcccactggtctgcgaggaacccc

SEQ ID NO: 557292 - DNA, 392 bp, Homo sapiens
acctgttaccacggtttaaagtatatctgctactttgacagccctccttccaaaaggtagagcccagttcctctcccctgaacgcgggctgtgcctccggacctgcctttagtgagtaggatatggtgggagtgatgctctgagactccccaggtgaggtcagaaaaggatggcttctgcctggtgcactctcttgtcattcactttgggggagcagctgccctgttgcagggcctgtaagcagcctgtgaggctcaccctgtggggaactgaagcctccccagccttgagagggggctaccgtcgacctacctctcgactgcaacctcacagcagaccccaaacaggctcagctgagcagcgccaaacccctgagccaaagaccttgagga

SEQ ID NO: 557293 - DNA, 175 bp, Homo sapiens
aagccaaaggggtcagctgctcactcagggtcgaaggccatggcaggcatttggatataatcatacacaccatgggaagccacaggggagttctgagcaatgaaatgacatgaccatgatctgaataaccttctgtgtatgtgtgtgtgctgaaaatataaatacatttacaatc

SEQ ID NO: 557294 - DNA, 679 bp, Homo sapiens
  misc_feature (678)..(678): n is a, c, g, or t
cctatgggaactgtagactcagatcctaataacgagctgatgcagctataatgctaggtggttcctaagcacacgggacacccgacacgaactgcctagaatggatgggatcattccaagcactggtactagccccctagtgctgaatccccctatgcccttgccttgcccttccaacaaaccctaggcccttgagaagctggtactgctacttgcgctcacagctgccttggccccacccactgggagatgtagcaaattgagtgagagtcctggagtctgagcctcaagctcaaatccaggccaagtgatcttgggcaagttaatctctgggaactttgggtgtcttatcctcaaaaaaggccatggaagggctgtagaagtgattaactggcaacgcaggatgaaggagatccggcgtttctccctcacaaccttgcggctcgagagggggcccagtacccaattcgacctatagtgagacgaatgacactgcactggccgacgatttacaacgtactgactgggagaaccctggctataccccacttaatcgccatgcagcacatcccgcctttcggcagatggcgtgatagcgaacaggccctgacatgacgcccttaccaacagttgtgcactcagtatggcgaattgcataatcgtacgccgttatcttgnt

SEQ ID NO: 557295 - DNA, 176 bp, Homo sapiens
  misc_feature (2)..(2): n is a, c, g, or t
gnccaacgcaactctttttcactaaaaacacaaaacataagccaggcacggctgtaatctcagctacttgggcggctgatgcaggagaattgcctgaacccgggaggcagaggttgcagtgagctgagatcactgcactgcactccaggctgggcaacagagcgggatcctgtctc

SEQ ID NO: 557296 - DNA, 122 bp, Homo sapiens
tgagactgatggtgatgatggaaagtgtcagtgatggtggtgatggtggtgatgatggaacctgtggctggtgcagaataggcacgagaatatttattaatgggaacagtattcgaggtgta

SEQ ID NO: 557297 - DNA, 922 bp, Homo sapiens
  misc_feature (3)..(3): n is a, c, g, or t
  misc_feature (915)..(915): n is a, c, g, or t
ggntggccagcttttattcccttttttggccccgcccacatcctgctgactggtccattttacagaccactgattggtccattttacagaacgctgattggtcaattttacagagtgctgatttacagagtgctgattggtgcatttacaatcctttagctagacactgagcattgattggtgcatttacaatcctttagctagacacaaaagttctccaagtccccacccaacccagaagctcagctggcttcacctctcaataatgctcaccaacttgttaaccataacaaacccactgcatgttactaataagtaacactgtcacaaaaagttattttacaaaacaaaaccagttggggagaaggatggcactgttttccacctttgctggattcccctatctgctctgcacagccttggtggaagtgagtggagattcagcctcccccaggtacgcggctggacgaaggagtatttgagcagcctttctgatcatcgtggtcttcctatttgaactacatgaacccaggctgggggtggtgagctagctacctggcggagtggacactcatgaaccagccttctgcgcctggctgcactgaagcccacgggcccacctctcactgtcaatggatcttcacccacctggcaatggttcaacatcagaacttggccgtgtgggaaaagctggctcaccaatagaagagatctgggcactgtcggcatgtcttcaggcagtatcacaaaactgcgctgctaacgccatctcacgtgaaaaacctctgaacacccatgtctcaaagttaagggaagctatgaaggtcttggtggtggtggcaagtgtccagaattctgctattcacttgaaaatgtaaatttcgccagcaacaaatagtgtcatatgttttcttnaagtggc

SEQ ID NO: 557298 - DNA, 978 bp, Homo sapiens
caatgggaggctgggcctggtggagttcaatcatcctgtggatccgcatccggaattacctgtccatcttccggaagtttgacctggacgagtcgggcagacatgagtgcctacgagatgcggatggcgcattgagtcggcaggcttcaaaggctcaagcgaagaatgctgtacagacgctcactcatcatccgcatactcggatcccgatctggcggtcgacttagacaaatttccgtttgctgcctggatgcggttagagaccagtgtgcccgatttttcaaaaacctctggacacagatctggatggagttgtgaccttgtgacttgtttaatgtggtggcagctgaccatgtttgcatgaggcagggactcggtcccccttgccgtggtcctcctccctcctcgtctgacaagtctctgcctcctaccacatcataccatggccacctccagcttgcatgtgctcttccttggagcagagaagggcagcgctcgtcctccgtgtcccctctcctcggcatttcaccatcgttcatctgtctccgggcagaactgtgtggcccctgactgtgccagccatgggctcgggcatggactccctgggcccccatccattgccaagtcaggagggctgctttgcgcttgtcccgtgcctcgggacgagtcccgggtttgcctcagcatcctgatgtggcccatctcctcattttgcaggaggcaaccactcaagagcagcggcttgggcttgctgtggatagaaaatattagcattaagtcgagccagcctgaagcaaggggtggggcggccccaggtcgggaaggcccgggctggaaacctgggttcagaaccagaaaaggcccttttggtctgggcggcgccaggtgccccggggggggggccccgcacaaaaaagggagagaccaccgcacagcgtgggagcaactggggcgcccccacaccccagagaaaaaccc

SEQ ID NO: 557299 - DNA, 424 bp, Homo sapiens
acattggatcatataacaataaaaatggtagatcattacgtcaatgtgaaatacagtccagggataaagaaaatactacattttctcatttatttgttggagctagaattgttgaccccacgaagtattgtagagtggaatgattgatttcagagactgggaagcggtgtatgagtggattgggggattaagatagaggctggttaattgtggtacaaacttactattagattgatggaattaatcctaacctttgatagaagagtatgagtgttagtagctatcaacagtgtactgtactttttaaatagctagaagagaggtacaccctctcttcagggtgatggataccctatacaccctgtattgattattgtacattctatgcttgttacataatttcagatgtatctcaaaaatatgt

SEQ ID NO: 557300 - DNA, 1591 bp, Homo sapiens
gtaagcacggctagccgtgctctcagagcgtgtgacgtgaagattaggagcccatcgctcctgtcaggaccatctagtgacagcgctgtaggcggtattactgactctgaaccgatctacagtctgatagcggctctttaacaatacttcgtgcatcatagcacaccgagcatatgcaggccaagattagctagacacgacaaggtctaatggctagaggatactcgcgccctttctgtatcgttctatgaagagcgagctagcaacgtggtgcctatcagtgccagtatgcgtccactacatattcgatggacctggccgtggtgtcaatgtcttgaatcgtggcgacatgtgtgtgcgcgcgcacgagaattagttggagtgcacttcggggcgtggatacgagcaaagaaacgatacaaataggtgcacgatgacacgctgaatcccatggaatcgcatagcagcctggaggaaacatctgcatgagcgttgagactattagcaactcttccttgtagcgaagagtacgctatggaggacctgtggcagtagcgccctagtcctccctagagaaggccttatgttgactatgtgtgtccagggctcaatcctctgaaagagaagtttctttgaccccaccattctgagcgtaagtgcgactgggtcgcctattgggggcccaaggggaactacatctttaagccaaatggccgtgtcatactcgcataccaggcataggacaaaccgtcagtaattgccccaaaggggacggcacaccagattgacgaaccttagacacccatctctgttacccatccgcgaagaaacgcgttaaattccttcaatggtagtaggatacctattgcttacactatagggaaagcctatagagtgttggcgtaatgcggctgtagacatatacccccggatcgcgatgggcaatcgtggtcgtgatactcgtctaaaggagaaatccccccaacttactttatagtgaggcagttatataaattccggaaaggggcaataaaacaacgtagaataaattcgtaaggggacccattgggattggcgctcctatgtaggtttggtagcgcccttagatccaacattgacatttcgtacatggcaactcaattttcccacagagaaagaaccatcaattgtgcaacagcataatcgcttggacaggacacccacaataggcagcagggaactgaacaccttccacctagtagtaagatacatggtggctaccctcgggcgcagctgagtcccgtagctaccagccacggtaacccgggagggtgtcacgcgcaatcaaacacactcggcattctcaaggagccaagaccaatacacatcgctccatcatagagaatatggaagtcacccgtcaagggtgtggcaacatgcaacacgtgcaacaccatggggagaacacccgaagaggcaaaagtaacccacactatggacacacgtggaacaccagaacgagacccacgcggcaagagccgaccacagggcgcgcacagaaagtacccgagatccggcacggcccccacaacggcaacaggcacatggcaat

SEQ ID NO: 557301 - DNA, 162 bp, Homo sapiens
accccggccccctccagggggcagtttttttaaagagtggccgggagcattttccccctgctggggaggcaaagaccctgcaatggccccctcttttaaagggcagctggacaggggtaggttttttcaataaagtttttgtattaaaggaggggctttgga

SEQ ID NO: 557302 - DNA, 357 bp, Homo sapiens
ggcccaccttaacggcacaccaggccgtctgctggaccatatgcagaataccccaggatattatgtataaaaaaactgcagtgtctggtaatatgatgaagctgatcgtatctatgagaatgtggggtattgaagaggaattaaagcaaattattaaacttttgccaacacgtaggacagactatgactcttttctgccacccaaactcgaaaagttagaagacctggcaaggatttctctgaacacacggagccattgtatgtatggcgtatgatgatgcattaagcgaaatccacagtggaatggtctttaacaggggatatgtaggatagtcccttctgaaaagaagattcctc

SEQ ID NO: 557303 - DNA, 338 bp, Homo sapiens
  misc_feature (279)..(279): n is a, c, g, or t
  misc_feature (303)..(303): n is a, c, g, or t
  misc_feature (316)..(316): n is a, c, g, or t
tcaataccctgtttctaaataaataaataaatagctaagtatgatggcatgtgccgtagtcccagctactcaggaggctgaggtgggaggatcgcctcagcccagaagattgaggctgcaatgagccaagattgtgccactgcactccagcctgggcaacagtgtaagactgtgtctaacaacaaccaaaaaaaatccttcttgtagggagatagcctaaaatatatatatatatattatattacactgtgtgcttacaacagttttctcggtgagggncacaggttaactctttgctactgnaagtatgggcctnttgggctttgttgttacttggt

SEQ ID NO: 557304 - DNA, 521 bp, Homo sapiens
ttcacaagtaaatgcaaatattaagttatctgtaagactgagctactgaatgtaattcagttactttggcaccataaaaggtgttgagggcaaaatttcctaaatggctatgatccaaacttttaaaacatcacataataatgtatttggagttgtttagattatttttagcaggaagttgcaagtccaagtttgtcctttcacttcaaggcaacatctttctagccacaaaattaatctcctctgtttgtgtacttgggcatgcacacacagggcagcaatctcaaaaagttcacagcaaatgcagaactgactgtgtacatgcacaggtgtgtgtttacacgtgcacatgagggtatggggtgggcgtgttttctaatggagtttgcaaacagattcggattaaccaaggctgaccatagttccatctggaaactatattttctaacatgagccacattctgaaaaacagattcagatgtctggaactggttcagaacagttgtaagaaacattcacta

SEQ ID NO: 557305 - DNA, 361 bp, Homo sapiens
  misc_feature (162)..(162): n is a, c, g, or t
  misc_feature (231)..(231): n is a, c, g, or t
gagacagagttttgctcgttgcccaggctggagtgcaatggcgtgatctcagctcaccacaacctccacctccggggttcaagccattctcctgcctccgactcccgagtagctgagattacaggcatgtgccaccacgcccagctaaggctttgtattttnagcagagatggggtttcaccatgttggcccggctggtctcaaactcctgacatcacatgatccccccgnctcagcctccccaagtgctgggattaccggtgtgagccactgccctgggctctccagtacatttttagggggacgatcaatgaggattctcttctctgagttactgcatgtgttacagtttataatcctt

SEQ ID NO: 557306 - DNA, 87 bp, Homo sapiens
cggcaccattgtgtggtggcaggcctgtggctgtggctgagggttctgcgtgtctgtccaccccacttaaagtgcagttccctccgg

SEQ ID NO: 557307 - DNA, 563 bp, Homo sapiens
  misc_feature (52)..(52): n is a, c, g, or t
  misc_feature (56)..(57): n is a, c, g, or t
  misc_feature (62)..(62): n is a, c, g, or t
  misc_feature (65)..(65): n is a, c, g, or t
  misc_feature (99)..(100): n is a, c, g, or t
  misc_feature (104)..(104): n is a, c, g, or t
  misc_feature (108)..(108): n is a, c, g, or t
  misc_feature (111)..(111): n is a, c, g, or t
  misc_feature (114)..(114): n is a, c, g, or t
  misc_feature (118)..(118): n is a, c, g, or t
  misc_feature (122)..(122): n is a, c, g, or t
  misc_feature (151)..(151): n is a, c, g, or t
  misc_feature (169)..(169): n is a, c, g, or t
  misc_feature (171)..(171): n is a, c, g, or t
  misc_feature (181)..(181): n is a, c, g, or t
  misc_feature (217)..(217): n is a, c, g, or t
  misc_feature (224)..(224): n is a, c, g, or t
  misc_feature (228)..(228): n is a, c, g, or t
  misc_feature (230)..(230): n is a, c, g, or t
  misc_feature (261)..(261): n is a, c, g, or t
  misc_feature (301)..(301): n is a, c, g, or t
  misc_feature (307)..(307): n is a, c, g, or t
  misc_feature (315)..(315): n is a, c, g, or t
  misc_feature (345)..(345): n is a, c, g, or t
  misc_feature (412)..(412): n is a, c, g, or t
  misc_feature (426)..(426): n is a, c, g, or t
gccgcgcggtgaggttgtcatagtacatctcggagccatgccgtccaagggnccgnntgcantcngtgcaggtcttcggacgcaagaagacagcgacanntgtngcgncantgnaaangcgncaatggtctcatcaaggtgaacgggcggnccctggagatgattgatncngcgcacgctnacagtacaagctgctggagccagttctgcttctcgngcaggancgantntgctggtgtagacatccgtgtccgtgtaaangggtggtggtcacgtggcccagatttatgctatccgtcantccatntccaaagncctggtggctattaccagaaatatgtggantgaggcttccaagaaggagatcaaagacatcctcatccagtatgaccggaccctgctggtagctgancctcgtcgctgcgnagtccaaaaagtttggaggccctggtgcccgcgctcgctaccagaaatcctaccgataagcccatcgtgactcaaaactcacttgtataataaacagtttttgagggattttaaagtttcaaacaaccaaaaaaaag

SEQ ID NO: 557308 - DNA, 136 bp, Homo sapiens
ggcacgagatttatttttaactagccaagtagttcttcaaatagttcttttaccaatttaccctctctccaacagacacatataagtagtgctcatccatgcactactaataatacatggcttattccaaaggttt

SEQ ID NO: 557309 - DNA, 382 bp, Homo sapiens
atagagtttcactctgttgcccatgctggagtgtagtggcgtgatctcagctcacggcaacctccacctcccaggttcaagcgattctcctgcctaagcctccggagtagctgggactacatgcgaacaccactacgcctggctaatttttgtatttttagtacagatggtattttgtcatgttggccaggctgctctggaactcctggcctcaagtgatctgccacctcagccgcccaaaatgctgggattacagatgaagagatacacttctaagtaatctatatgtcaagtaagacaaaatgaaattagaaaatatttttaagtcaatgatattaaaccatactacacatcaaaacttgtgggatgcacttaaagcagc

SEQ ID NO: 557310 - DNA, 308 bp, Homo sapiens
ccgtacggacgcactgttaatggcagaacgctctaccacacctgaccggcgcttgagctccaggcgccgcacgaactcctccagcaccaggccatacaggtcgtcctgcaagtaggcatcttcgatcccagcatccaggttggggttgtcgttgacctcgatcaccacaaccctgtcgcccgactgtttgaggtccacgccataaagcccatcgccgatcaggttggcggttttcaccgccagctccaccaccgccttgggtgcctcatggactgccagggtgcggcattcgccagcgtccgtagcgg

SEQ ID NO: 557311 - DNA, 171 bp, Homo sapiens
gtttcaatatttatttccagagtccggagcagcagacacgacctcttagtagggacttacttgggccgcgtcggggaggggcaggccggtatgggacacccaacactttttcccatttcttcaagaggaactcacgttttcacaactaattttaacaaacgccattaagag

SEQ ID NO: 557312 - DNA, 291 bp, Homo sapiens
gcgtcatgtcatctatatagtaaacaatgtaggttgcagccttctctgcatgtctgattatccccacaatagtcacctagacaagaagaaaaataagtttggttttcttagaaaccaaagcaacatgaatctatttttaaatgaagtaagttttatttcattcttcatatgattgagtgactcttccacaaattattttacatacctgtgaaatctcaacattcccaattttgaacacttcatcaaccagagtagcagaaagcagctgagatatggtacagggtacaatgt

SEQ ID NO: 557313 - DNA, 138 bp, Homo sapiens
ggtgactctagcaggatcttataaaggcgagccgggtagtaccccaagtagacagggtcttaacccccagttaaatctgtctcttcatacttctagatctagaaaggctaggaaacaactgtacccccctcccccaac

SEQ ID NO: 557314 - DNA, 839 bp, Homo sapiens
attgtgcttctgctggctgctagtggtgtgggacgctacaggtattcgtgggtctttgttactggtcgctcatgactatctggtccagttggtaccgtgccccttcgtggttacccccccagttggttgtacctcttatattgcgcgttgttgccgactgatgtcgcgggcgtggatgtcttggctaggaccgcccggaatcttggttgaaacgattacattgtacattgcgtgtcgagaaattcccgtgttctccctattttgctggcgcctcgtgttcacatattatgtcgcgcctggccatgcccgtgctgggaagcctcatcttggtgtagccgatatgtcgtcctttttgtcctgagggattattgttcctctcaataatgctgctttgttacgttgacatcgcagccgcgcgttatcccaatatgtcgcctatgccaaataattgtgtttccccctatggacaccgggggcgcaaccctttgtggtcaaataccacaaaaaaatggcgcgtgctagcggaagaaaacgctgaacctcactgcacgttgtaatgcttgtgtgcgcggagattttgctacgcaggccagggctctcgcaggcaaacagcgtgcgggagaccgacgtctgccctccgcgtcgtattttggcggcatgaccgccgcggtattgttggtgtcacagagagccgccgcagcactggtctacggtgttcgaccaaccgttgcttgcggcgacagccgggcagaaccccgcgcctgtgaatcgatatagcgtgggagtctttcagcccgtaccaatgggcccaccccctttccggggcccctccccaaata

SEQ ID NO: 557315 - DNA, 542 bp, Homo sapiens
tgggacatacctaattgaatgctgtgtgtcgctaaattcagtggcgatggggttgatatcctgagcgtaaacaatccgctttaccttgcactggccttactgatgacacgccgtactgtacctacatcagtgccaacgatccgaaaatttacagttccatccacatgtggttgaaaacgaatggacgctgccggaatattctgtttgggagggcctcaggttttacgcctcttgccaccaagaagtaggagaaagtcaggctattgactcgcatcgtaaaatatatacgcgtccgagaaaactaaaggagaaatatatatgggtgccgcattcaaagtacgccgatagcgttgaagaatgaaaagtcgacagccttatttattccctattccagccaggtcaccaaaattgttgtccaagctgttaaacggggactaacatcgcaaccattcggatgcaggttgcggtgcacgaaagcgcagacgtacaagaatataacctcgtggcacgatcagcttaattgggttatgagaaacatcgca

SEQ ID NO: 557316 - DNA, 483 bp, Homo sapiens
  misc_feature (22)..(22): n is a, c, g, or t
  misc_feature (32)..(32): n is a, c, g, or t
  misc_feature (49)..(49): n is a, c, g, or t
  misc_feature (86)..(86): n is a, c, g, or t
  misc_feature (121)..(121): n is a, c, g, or t
  misc_feature (128)..(128): n is a, c, g, or t
  misc_feature (142)..(142): n is a, c, g, or t
  misc_feature (204)..(204): n is a, c, g, or t
  misc_feature (216)..(216): n is a, c, g, or t
  misc_feature (221)..(221): n is a, c, g, or t
  misc_feature (261)..(261): n is a, c, g, or t
  misc_feature (413)..(413): n is a, c, g, or t
  misc_feature (438)..(438): n is a, c, g, or t
  misc_feature (465)..(465): n is a, c, g, or t
tttggcaggcccgtaaaaaaancccgcaaaanaaaagcaaattcccaancccggcaaaaaaacccctatctgcctaactgcagctntttagaggagttcccccccgaaggggccgaggaangggggancccctgggaaaaanacctcagtctgacccaacccatgcctgcagcataacccagtgtgcatactgtaaagaaacancgcattggaaanacaantgcccctagttaaaagagaaacaaaatggctctgagccanaggtttcaggcaaggatgaaggggccttgtttaatctagcagaagggttactggactgagggggaccggctcaggtgcccccaatgagcccatggtcaagatgacagtcaggagcaaggacattgagtttcctgtcaatacttatcctgaanattcaagtagtaaccaccccaagtnacccccttcctacctccaagaataaangaatctcaaccctgaaaa

SEQ ID NO: 557317 - DNA, 450 bp, Homo sapiens
  misc_feature (34)..(34): n is a, c, g, or t
  misc_feature (60)..(60): n is a, c, g, or t
aaccccataactcagctcccctgcacacagcagntgcctcagtaagtgtaccgaatcagnaacttatctttgtgaacatgagtgcccggcacacagtaggtgacccaatatgtgccttgaataaatggatagaagcatccttatttatctcaatattccccagagcctgggctgggcacagtggctcatgcctgtaaccctagcactttgggtggccaaggcgggcagatcacttgaggtcaggagttcgagaccagtctggccaacatggtgaaaccccgtctctactaaaaatacaaaaactagccagatgtgatggcacgcacctatagtcccagctacttgggaggccgagaaacaagaattgctggacgctgggaggcgcaggctgcagtgagccgtcacaccactgcactccagcctgggtgacagagacagactctactctta

SEQ ID NO: 557318 - DNA, 1818 bp, Homo sapiens
  misc_feature (455)..(455): n is a, c, g, or t
  misc_feature (769)..(769): n is a, c, g, or t
  misc_feature (1818)..(1818): n is a, c, g, or t
cactgcgtgtcttggaagagatgaccccgtaaatagccaatgagggatgtgagtacattcatgttcgatacactatagttctgatgcaactaaggcactactctagaattatctgtgtgtcaagctctcagccaacgtaacttagtaccagtacatagtaatcctccatatgattgctgagtcggtctattctgaacagagaagtaatccaattgaataagagagtcctgatgagatggacgtgctggctgtatgatgggcaaagaggctcacttcgaatgttcatcgccgtggtgttctttgagagtagagagctgtacaagacttgtacgtcggtagcaacagatgcgatactccactcgactatagaatactcttccattagtgtggaacaatttagaaggacacagtgcaagctaactaatagtcgagctcatcaattgggatcgctcccnctaggagaaacagcgaagaagatcttgattaatcaatacacaacacttgattatacatcgtggatcacatcttcatagtgcttgatcataagtagcttgctaacttggaatttagttatagctagcattgggttggtattctgtggacgcttttttgaggttggctagggataattctttcctatagtggcactttgtgtggctaaggaatctctcagaaagacggcattttgtccccctttcactagggcttttaagtaatcacccattagaggcgtttgattgagggatcacacccctagacttttgatccnggggtgttgagcctctaaaatattgtggactttcccaggcgatagaatagtctcatcccctaagcaagtttcgaaagaaaagggagggctttcattgggaaggttggcacaacattcggttgtctacacgcgagacaaccgtaccccagccgacctttttaaccacattttcaacggccaaacaatttgtgcgttaacgaaatggccgccgggaagcgaccacgcttcaagccattttctctgtggacccaacacttattctgtgggccgttcgcgacacatttgcgctggaacccactcttttgggctttggcgcaggccccagagttggctctaagcgaatgggcccctgaggggattcacaagcgggcgcgtggggcaacagatccaacaccgcggcgtaaagaggtatcggcacactaggggccccgtgtggtcaacccccccgctttggtctttgagagactcgctggcaacatgctgcatctcttgaaccaccaccaaaaatgttgtcccaagatggatcagacgaccgctgtgtctgtctaggtccccatcacactgatcggttgttacaccaacggcaatgctgtcgcgtgtcatgggggcatcatgatcatctagtgtgagcacccacgggagagttgacaacagagaacgagcctatcaaactaacagcgaggaggaggcgtctgcgtcatcgttgcatacagtctagcacacttcatattaccacgcgcggagacgcacagccgtgaagcagacgccaacctcatgctaacggaggaagctcatcctccggcgcagacggcgcgactcgcttcagaatcaacaatcactccgacgtcggcgctcctcctgtgcacgcgctgcacagcttctgatcacacgacatgagagcctcgtgcgcatctatagacaatcgttcaggcggcaggcagactagtcgatgcgactagcagtatggtgagtatagatagctgcagcctacgccatcaggctctagcgagtagctcatgagaataaacatgaaactgacatgtaggcan

SEQ ID NO: 557319 - DNA, 502 bp, Homo sapiens
gagaagagagagaactagtctcgagtttttttaatttctctttttcaggttgaggggaaatgctggcacaaactttgtcaaatggggtatggaaacttgtcatatacgtctaatgctgagggtgagtggtaggcagaacttttttccaataggacggtgtatagacgtgggccgatacccggaatcgggggtattcgctgtccgaattcatacaaaacccgggcgcgttacaaacttagggccttggtcgcacaaacctaatgtccgtgtaagcagttcacgggagagaattgcgactcacatatagtttaggtcccctccagagacacaacttttgctacttggctacaacggcgttgtttacatatatctaccctaccatgcactgcgggagatcttctccggccatacatcaaacacactacggcccagacagtgagtccatgacgcaacatttatccaatgagattaaacaccctaggacaccaatcaagggcacacc

SEQ ID NO: 557320 - DNA, 286 bp, Homo sapiens
  misc_feature (266)..(266): n is a, c, g, or t
gagacagggtcttactctaccacccaggcctgagtgcagtggtgcgatcacagctcattgcagccttgaccccccagactcaagccactcttccacctcagcctcccaagtagctggtaccacaggcacatgccgccaaacttggctaatttttgtattttttgtagagacagagttttgccaaattttcaggctggtctggaatttctggggctcaagtaatcctgccttggcctcccaacatgctgataccacaggacataagncacagtacccgggccagttt

SEQ ID NO: 557321 - DNA, 107 bp, Homo sapiens
catagaggataatatagcagtctaccagtatagcctaacataaccattcttaatttaactatttatattatcctaactactaccgcatacctacttgggtaactgtg

SEQ ID NO: 557322 - DNA, 113 bp, Homo sapiens
agtatactcagcgtcagtgaccagtgataacctaagtcgacatgacatgcgtgcgcctggatcaatgagatctctgcagttgaatctgacaaagatcgaacagttgtgctcag

SEQ ID NO: 557323 - DNA, 1287 bp, Homo sapiens
acgtctctaaggtcgcccgggtccaccgccgcaccgatgcctcggggaagccagcgagcggggctctcccggccagccagacgcccagtcgcgcctcgggcaactgaagatctaggagtcgccagagagttgcgccccagccgttagcccgatgtactttgaaactttatgactatgttctgatcaagtaaactttctggatacacggaagtagccctatggttctgctgtgaaaacaagatagtgggagttggagcctcccccgtgcgtttggtctgtcgttgggaacttgtacgcctactgttttagcacctcccggctacttattttatgtatctgcaagtatttactggtactgttcctattcgaacttcagatattgtttggatggaaagcatacttgtgattcctctcgtttgtattactatgccgattgtaagacccaagcagaacttcacggcggtagatttttggtgtcgctaactatggaatcggttgtccatggagtgatttctataaaggaggagctgtaatctctgctgatatctgattgggtggcccttgaccaaccataaaccgtttattctgataactctttttggtaatatggcgtttcatttaccagaaatcgcgtggctaaaaattttcccattcggactcgtgaacctttgtgtgtgggggaacgtgcgattaacccttgaacgcgggtttgtcccgaattgattgccgaaattcctttcaaattgaaaacccctgaaataagttgacatttacaatggaatttaataccttaatgttttactaatttccaaacttgggaatatttcttggttgaacattttaactgaattgaacgggtcttgtttaattcttcgaaattggacctgtgttgtttgagatgaaaaacttgtggtgtcaattttgataaataaggtaacctgaattttatttttactaaaaacattggggaatgttgaataatattattcggaccgaccattaatgtgattttgaatattgatacgtctatacaacgtgaaggacaaatggttgaaatcattcgctttgaaactattcgctcgaaaagtctttggatcggagtggtggcgaaaacttctggtttgtgcggcaaccttaatctttactggttggtgtgaaagacacgtgtttttattttatattctctctcttatacacatgtgtttttttagttggaacgattttttttttggtggtgtattgtttggttgataatgagtgtggcggtgcaatagtgttgtgtggtgg

SEQ ID NO: 557324 - DNA, 313 bp, Homo sapiens
ttccctttacccgccctcaaacccaggggccctttaaacagttttcggggggtaaagtccacgtgacagtccccccaccccccccaaaaaactgggggcctgggggcaaatgttgggcccttttcccaactgggggtttccctaaaagcaagggatttctctctttgggccctcgtgatccatgttgaacaaaacatgtaggttttttttccccccaatgtaaaacccttatattctgtccgttggaaagcctttcccttttttaaaaccctgaatgttcccccccccccaataaacatatttttttttttta

SEQ ID NO: 557325 - DNA, 212 bp, Homo sapiens
atagtccaaatggaatggacggcaatcccggcaatgccagaagatgaagttaaatccgaacagcaggtatttgatgcacttgtgtgcctcctttgacctggcatggtgatgggctaactatagccgtgggcctgaacgttgtgctgggacgtgggtgggctgcgctgctggcatggtgacgttgcagcaccagtgctgtagtggtgatccga

SEQ ID NO: 557326 - DNA, 155 bp, Homo sapiens
  misc_feature (154)..(154): n is a, c, g, or t
ggtaatggggtttcccccccccccccctcccgggcaggggtggagctggacaaaaaccagtgcctttaagtcatttgggtcaaaaccctttggggtccggaagcgtggggggggggtcctcctggccaaaaaaccactacccgggttttccccna

SEQ ID NO: 557327 - DNA, 318 bp, Homo sapiens
ataaatgcggaaagactgttcttttccttccggattaagttcttcaccaccttttgtagatttgggcatagctgccaaagctatgcacccagctggccttagaaaaccacaatgtttacagccctgtcttagggccgctgattctcttatcttccaccaccttacttgcttgctgcgttatcttctcacagggctggaatgcaaatttcagaggcttcttttgaagattccccaagtcaagcaggcaagatgcctagatcttctgttatctttgacatgtaacatcctttttagaggctcagaacacctccttggctg

SEQ ID NO: 557328 - DNA, 159 bp, Homo sapiens
gaggagctgcagaatctcataatggggtcaaccaagccagcaaggaggcaaccagctgctgaatggcaaccatcaaagcggatcttccagccatcaaggaggggcacaaccacgccgttagcctctggggcctcggtcaacacgcctttcatcaacctt

SEQ ID NO: 557329 - DNA, 204 bp, Homo sapiens
ctagggcaggatacggcccataatgctggacgaggtcagtgcacgggaaccgaggcctacactggccgactgcaagtacctgggctggctagaagagcaactgcaggcacgagcagagacgctggtgtggctctgcaccaatgaaaccaggagcacccacaccctggacctctaccaggcagctctcggaggccctaggccaga

SEQ ID NO: 557330 - DNA, 302 bp, Homo sapiens
ttctagaaccatatccggtttggcagcgcgggcccagtatgctagagttcaacaatgctcactagctcgtttcctcagagaggatcctgggtcatgactagatgcgttggattctcactcaatttaacaaatgcctcgtgagcgcgataacctgtagcgctactcgaatctacaatcacacgtactggtagtctctcgagcgtacaatttacctgcgactctagtctaaactacgcgtaggttccacaagctggagctgcgtagtactcaagaagttaactccctcggttgcttgtataccg

SEQ ID NO: 557331 - DNA, 660 bp, Homo sapiens
  misc_feature (110)..(110): n is a, c, g, or t
  misc_feature (142)..(142): n is a, c, g, or t
  misc_feature (199)..(199): n is a, c, g, or t
taagaaaaataggctaagtaagcccgggtgatcggccgaggcctcccacctggtgtaagcagcctttcgctcatactctaccacctatgaagagaggaatatcaccgganccaggtgaaggtgcccgtggggcaggaggtgnaggggatgaacatcctgggcttggtagtgttgccatcgtctttggtgtggcgctgcngagaagctaggggcctagaaggggagctagctatatccgcttcttcaactcctttcaatgaggccaccatggattctggtctcctggatcatgtggtacgccccgtgtgggcatcatgttccttggtggctggcaatcgagtccgtgagagactgagaggactcgtgggctttacctcttgtgtcccgcacgttgagccaatgtacactctcatgatgcatgccttgccttgggtcacagtcgcagtccagtgtgagctccctggatactgacaccgctcactcatacgtatccatctttccacccgacaagaaaacccccccatacgcggcgttcccatggtggggagacaattcggatgaactggcccggacttgggttccaacatatgaccataattgggagaaccgtccatttcacaggtttcccggactaacgatcttgacccgaacatgactgat

SEQ ID NO: 557332 - DNA, 804 bp, Homo sapiens
  misc_feature (569)..(569): n is a, c, g, or t
ccctgcaccaacatggtgaaaccctgtctctattaaaaatacaacattagccaggcgtggtgacacatgcctgtagtcccagctacttgggaggctgagtgagtagaatgcttgaacccgggaggcggaggttgcagtgagccgagatcacactcatgcaccccgagcctgggcaacaagagcagaaaactccagtcgtaagaaaagacagaccagaataagcagaggtgaggcaaactgagagtcgtgaagcgcttaatgtttcgtccccttattaatgcggggactttagcgagtacgtggtcaggcatactctgtattaccggacaagattcaaggagcagactatgggatagcagcgttggcttgagggctgtttaccctttagaagccaactgagcacaaaatacgcaggggcgagttctcgagggacgggtccgcttagaggggtttactgctattaacccagttgttcacaggtccttaagatgtccctaggggagaaagcaatttaagaaagccaagggcatcaagtaagaaagatagtgcttgcacattccacaagaggngtcccaagcacgacgtgggtacttcgcggaggcccggggaaggagaaacacataatcgggggagcattccgaagtggcgtaggcagagccaagaagttcacccaggtttaggaacaaagtccccaggggttcagaaaacgcgaccttcccaaaattccggggaattccagggcgttaaggccaacgtgatcgtcggcccctcttaaagccatttggtttgattgtttaagtccct

SEQ ID NO: 557333 - DNA, 198 bp, Homo sapiens
ccaccagaggcaacagagtgaaccaaaaattttgctgggcatagtggcgcatgcctgtggtcccagctactcgggaggctgaggcatgagaatcatttgaacgcaagaggcagaggttgcactgagccgatatcctgccactgaaccccaccctaggcaacagagtgaaacaaaaaatttggctgggcatagtggcgc

SEQ ID NO: 557334 - DNA, 177 bp, Homo sapiens
agcagcatagatattaccgcaaggggaaagatgaaaattataccaagcataatatagcaaggactaacccctataccttctgcataatgaattaactagaaataactttgcaaggagagccaaagctaagacccccgtaaacctgaggatgtacgtaagaacagctataagagtcac

SEQ ID NO: 557335 - DNA, 820 bp, Homo sapiens
gcagttcagtggcattaaatacattcacgttactgtgcaattatcaccaccatctgtttgcagaaatttttcatctcctccatttgaaactctgtatacattaaacatgaactctcccttctccccttcctccagccctggcagccaccgttctacatttttatctttctgacagagattttactactctaggtacctcacataagtgaaatcaaccagtatttatccttttgtgaccagcttatttcattagcttaatgtcctcaaggttcattcatgttgtagcatatgtcaacatgactttccttttaaggttgaataatattccattgtatgtatatgtcacaattttgtttctccatttatccatcacttgacatttgggttgcttttacctatcggctgtcttgaatcatgtgctatagctgtacaagtatctatttgagttcctgctatcaattctttaagtatatgcccagaagtggaattgctggatcatatggtaattccgtgtctggttttcttcgaggaagtgccatgtggtttttccacaacagtctgtaccatgtgtaatattccccccagaaatgtaccgagggctctgatttccttcacatcttgctaaccacttaggtatttttttgtgataagaattagccatccttatggtgcacttttacaagtactgttaaccttcatttcatcactttcacacttcttggcaacgaggaccactaataggtggccccagggggtcatagacaccgggtcaaacagagctctgtgttacctcccaaatttcgtttatgggtggcaccag

SEQ ID NO: 557336 - DNA, 339 bp, Homo sapiens
  misc_feature (9)..(9): n is a, c, g, or t
  misc_feature (208)..(208): n is a, c, g, or t
  misc_feature (281)..(281): n is a, c, g, or t
agacgggtngatcacctgaggtcaggctttcaagaccagcctggccaacatggtgaaaccctgtctctactaaaaatacaaaaattaccttgacgtggcatcctgtctgtaatcccagctacttgggaggctgaagcagaatcgcttgaacctgggaggcagaggttgcagtgagccgagatcacgccacggcactccagcctgggtnccagagcgagacatcatctcaaacaaacaaacaaacaaaaaagttgtcacagtataaataccaatcttaggangattctgacaattattttggaaaatgataggggaaatatcttgggtttgctcttcttt

SEQ ID NO: 557337 - DNA, 215 bp, Homo sapiens
gaaactggtgaatatcctctttgggcctacccgctcgatgtggcgggccgccgggccgttgggatcacgcagcagcgcactgatgatgttggtgtccagcagataaccgctcacaggacgtcctccggcttgagcggcgcgtcggcgatgtccggaaattggtcttccggcccaagcggttcgtcttgtcgccattggaccaacaattccacggt

SEQ ID NO: 557338 - DNA, 380 bp, Homo sapiens
atgagataaagtgtgcaaatcacttagcagtgcctggcatatgaaaggtccacagctaaacgcagttattgtcatttttacggctgttggtgtttaccagttcataggctgagcattgtttatcatttactttctgtaagaattttatcattgcacaaaaaacatgactaccatcaagatacaagcctggtttttgaagaaaaggaattactgtaggggttggaaagggtcagtgtgcccagatgaaaaactgtcctcctttagaagaggctaacacggtctgaagcagctacagaacagcgtacgttatctgtcaatccaaaccagcatgatgaaaattattcacccccattaattaaaaaatctcacataaaaaaaaa

SEQ ID NO: 557339 - DNA, 914 bp, Homo sapiens
  misc_feature (73)..(75): n is a, c, g, or t
  misc_feature (293)..(293): n is a, c, g, or t
  misc_feature (357)..(357): n is a, c, g, or t
  misc_feature (412)..(412): n is a, c, g, or t
  misc_feature (445)..(445): n is a, c, g, or t
  misc_feature (451)..(451): n is a, c, g, or t
  misc_feature (525)..(525): n is a, c, g, or t
catgaaaacttgtctaatttcttactctattgtacgtttacagtcgcagcactaaaaatggatgacatcaaannnttttaacaaatgatgtacaaactaaggactatttatgataatgtttgctactcttgtcagacaatggctataaactgaattaggcagtcttaaaaaaaaaaaaaaacgggaaaagaaaaaaaagaacgtggcaaatttggtgtaaaatggcgcaaaaagggacagtttaattttggtgacagattatggcttacctcaggtttctttagtggtggctngaatggcccttctttccatataacacttatcttcttcttaattcgggcaatgggaatatctttnaagttttaaaaaacactgggaataattatatctatctttttggcgcgttatattnaggggttttggtggataaaatcaagtttgggtnggtggnctggctggaattaaatatttatgagtgggggcattttcaggtatagtggaacaagacaccatattaagtacagnggataaagcatctatattctgtaaaaaaaacaaaaatttggcctatgcttgtttttaaacgaaaaaaaatggggtgtatcgggcttgtttgggacctgggtaaggggctaggggtcggaccatatagtgggaagttggttgtattcgggggggaacttattattcttcaaaagggtaaaggccttgacagttgtggtagtccaaaacaatggttttgaaaacttctaagggttggcctttgtttacacaggacttgtggttcccacggcttagtatattttataatccagcgagattaggtaccaaattatcggtggttggaccttggccccttaagggcctgggtcaataaaaggatgcgggaataaaaaagaattggcgaggagtac

SEQ ID NO: 557340 - DNA, 370 bp, Homo sapiens
gcgcttagagtgaggcagcgggcagggctattgggaggccggcgcgggcggcgcgttctggtggcgcgaggtactggctgggcgggacgccagtggtctctctctgtagcctttcctggtagtcaatttgttgtcccgaggattcatctttttcttccgcatgctattctgttttttttgctgtatacattggtcttgcctgagctcttccccaaagcttggaggaacgggggaggccgggaatgtcctgtctgcagacctgggactctgccatgtgcttttgctgtggaatggagacgcgaccctggatagtggtctatgactctcgagggacaggccacgcgtgtgggagaacatctccttccggggc

SEQ ID NO: 557341 - DNA, 128 bp, Homo sapiens
gtgcccagccgggaaccacaggtttttggatggtctctgaatgtcatgtaactcttttatttttatcaaaaaaaatttttttgacacaatatcttgctgtgttgcccagaacggggagtgcacgtggc

SEQ ID NO: 557342 - DNA, 847 bp, Homo sapiens
  misc_feature (6)..(6): n is a, c, g, or t
  misc_feature (93)..(93): n is a, c, g, or t
  misc_feature (131)..(131): n is a, c, g, or t
  misc_feature (139)..(139): n is a, c, g, or t
  misc_feature (143)..(143): n is a, c, g, or t
  misc_feature (153)..(153): n is a, c, g, or t
  misc_feature (184)..(184): n is a, c, g, or t
  misc_feature (188)..(189): n is a, c, g, or t
  misc_feature (195)..(195): n is a, c, g, or t
  misc_feature (213)..(213): n is a, c, g, or t
  misc_feature (244)..(244): n is a, c, g, or t
  misc_feature (250)..(250): n is a, c, g, or t
  misc_feature (269)..(269): n is a, c, g, or t
  misc_feature (272)..(272): n is a, c, g, or t
  misc_feature (275)..(275): n is a, c, g, or t
  misc_feature (278)..(280): n is a, c, g, or t
  misc_feature (282)..(283): n is a, c, g, or t
  misc_feature (289)..(289): n is a, c, g, or t
  misc_feature (299)..(299): n is a, c, g, or t
  misc_feature (304)..(305): n is a, c, g, or t
  misc_feature (309)..(309): n is a, c, g, or t
  misc_feature (313)..(313): n is a, c, g, or t
  misc_feature (318)..(318): n is a, c, g, or t
  misc_feature (321)..(321): n is a, c, g, or t
  misc_feature (326)..(326): n is a, c, g, or t
  misc_feature (329)..(329): n is a, c, g, or t
  misc_feature (344)..(345): n is a, c, g, or t
  misc_feature (347)..(347): n is a, c, g, or t
  misc_feature (358)..(358): n is a, c, g, or t
  misc_feature (363)..(363): n is a, c, g, or t
  misc_feature (368)..(368): n is a, c, g, or t
  misc_feature (372)..(373): n is a, c, g, or t
  misc_feature (380)..(380): n is a, c, g, or t
  misc_feature (435)..(435): n is a, c, g, or t
  misc_feature (488)..(488): n is a, c, g, or t
  misc_feature (602)..(602): n is a, c, g, or t
  misc_feature (631)..(631): n is a, c, g, or t
  misc_feature (808)..(808): n is a, c, g, or t
aaatanaaaaccatggtgagttattaaaacccattttctaataataacaaataactaaaaattcccaaagtggaatatcatccaatgtgaganaacatcatagcacggtccatatgtacacggcacacagngctctgcntgcnctcatctgtnaattgctcattacatgtcactgataaaaaanatcnnccaggnaacttctactcttcagtnctcctcttcctgaagcattgtcacatatttnaaaggnactttagggatatgaaganaanggnttnnngnnggtttnggcgaagggntctgnntgtnttgntttgnttnattangcnttacatcttgagaannantttttttactnatttncagcnaagnnagcaganaactctaggtttttgccaatttattttttcctagtcactcattggaacacaagtncaacaacaacagctcaggaaccaaatcatgtttttatattggtaagttcattntaaaatgccactcaattttaagaagccactaaaaggacactttctgcagcaaaaaaagggctaagttcaagtttttgttgtttgacaaagacacaataatataacccatatgtnacagatcacaacagccttaagtgaaacgnattagatttagggaaaaacgactatgcgactgcttgtttctcctgtctccttgccaaacaataaggagagcctctggtctgttttatctattttatgtctttttgttttgaaacctccctttgtattctgaaagctgatcaaactatttgtgttcaaaatgtgtcaaggcacttctnaagcctcagtggcatcccaggtcagccaagctcctctgt

SEQ ID NO: 557343 - DNA, 394 bp, Homo sapiens
  misc_feature (16)..(16): n is a, c, g, or t
  misc_feature (29)..(29): n is a, c, g, or t
  misc_feature (138)..(138): n is a, c, g, or t
  misc_feature (151)..(151): n is a, c, g, or t
  misc_feature (174)..(174): n is a, c, g, or t
  misc_feature (176)..(176): n is a, c, g, or t
  misc_feature (198)..(198): n is a, c, g, or t
  misc_feature (206)..(206): n is a, c, g, or t
  misc_feature (246)..(246): n is a, c, g, or t
  misc_feature (290)..(290): n is a, c, g, or t
  misc_feature (293)..(293): n is a, c, g, or t
  misc_feature (303)..(303): n is a, c, g, or t
  misc_feature (305)..(305): n is a, c, g, or t
  misc_feature (330)..(330): n is a, c, g, or t
  misc_feature (333)..(333): n is a, c, g, or t
  misc_feature (338)..(338): n is a, c, g, or t
  misc_feature (343)..(343): n is a, c, g, or t
  misc_feature (359)..(359): n is a, c, g, or t
  misc_feature (374)..(374): n is a, c, g, or t
  misc_feature (379)..(380): n is a, c, g, or t
  misc_feature (389)..(389): n is a, c, g, or t
cagatacggaagaccncttatgctcagcnccaacaggtcccccaaatccggaagaagatgatggaaatcatgacccgagaggtgcagacaaatgacttgaaagaagtggtcaataaattgattccagacagcattggnaagggcatagaangggcttgccaatctatttatccncnccatgatgtctccgttagaaangtaaaagngctgaagaagcccaagtttgaattgggaaagctcatggancttcatggtgaaggcagtagttctggaaaagccactggggacgnggnaggtgctaangntgaacgagctgatggatatgaaccnccngtccnagaanctgtttaaagttcagncttcaaatagtggcnaattnnaggtgctanttgtg

SEQ ID NO: 557344 - DNA, 257 bp, Homo sapiens
tactaacatgatcatatccaccagcccccaacctttttggccctcaagggctggtttcgtggaagacaatttttccatgggcatggttgggggtagtttcatcaggcattagattctcataaggagcataaaacctagatccctggcatgcgcagttcacaatacacttgactcttctatgatactagtgccaccactgatctgacagaaggcagagctcaagcagtaatgctgtcttgcccgccactcacctcctg

SEQ ID NO: 557345 - DNA, 225 bp, Homo sapiens
gttgacatgatcagcccggaggaagaggagcgcgccgagtaaggccgagcggaacaagctgctgcggcaagtgtaggaactggaggaaggaactgactgacttcctgcaggcggagactgataaactggaagatgagaaatcagggctgcagcgagagatcgaggagctgcagaagcagaaggagcgcctggagctggtgctggaagcccacttgacaacggcct

SEQ ID NO: 557346 - DNA, 438 bp, Homo sapiens
  misc_feature (257)..(257): n is a, c, g, or t
atccccggtaagacgcggtctttactaccaccatctgcataaactgcacccagaaccttggaaataaccccccaccccccagtctccacgtcctctcctcacgaataaatgtttgtttgtacagagttggggtcatgctgatataaagtttgtggggttttttttggttggtttgtttgttttggtctttttagggccgcacccgcggcatatggaggttcccaggctaggggtccaatcagagctgtagccactgntcgtacaccacagccacagcaacacaggatccgagccgcgtctgtgacctacaccacaggtcatggcaacgctggatccttaacccactgaccgaggccagggatcaaatctgcatcctcatggatcctagtcacgttcattaacctctgagccccaacaggaactcagaccgctcttacg

SEQ ID NO: 557347 - DNA, 682 bp, Homo sapiens
gcgtatgtatgaggtcgtactcggtttattagtacgtggcatgtgtgaaactgatacatgagatgacgctggctgtagactctggatgtctcccagtctgctaaagccctaagtgccatcaccatgtgacttccagcatcgccccggtgtggcaagacctggtgagcggtgggctgtggcctcctcctccagagagcaacctgtgacctgcatgtggagctgcctccgtgcagctggccctggagaccatctgacatcaacaaggacccgtacttcatgaagaaccacctgggctcctatgaatgcaaactctgcctgacacttcacaacaatgagggtgagctacctggcacatacgcagggtgaagaagcaccagaccaacctgtgccctgtgctgatgtcatgcctaatgtgatgtgccaatggatgtgccccttgcccatgccctgctagcctgatgaatgtgtcaatggtgtgagtgtgaagaagtttgtgaatgatctggccgcccgggctacaaagtgaccaagcagagagactcggagatgggccagcagagcctcctcttccagatttgactaccctgagatcgccgagggcatcatgccacgtcaccgcttcatgtctgcgtacgagcagaggatcgagcctccggaccggcgctggcagtacctgctcatg

SEQ ID NO: 557348 - DNA, 490 bp, Homo sapiens
tttacaatttgagaagtatcagaaaatcataaggctgactctagatattacccaagtggtcagagaactgctttctagagccaatatgcaggaactgacgtgataaattatatcttcttttctatttaggcttgcggaggggaccacgaattgttcacaatttcaagtccatttgttttccttattagtaaaaaagccctctaatttttaactagggatgtgaatttccactagtgactacattctaggattctgctactgtctgaatgttttagtctctccaaaattcatttgttgaaaccatccccgatctgaggataattaggaggtgcggcctttggaaggtgatttggtctcatgatggtagaatcctcatgaatgggattcgttctcttataaaagaggtcccagaaagctgccttgtctctttctaacatgtgagggcccaacaaggagatgccttctatgagccaggaaataagccctcaat

SEQ ID NO: 557349 - DNA, 187 bp, Homo sapiens
  misc_feature (19)..(19): n is a, c, g, or t
  misc_feature (174)..(174): n is a, c, g, or t
cccattttgaacaaggttnccattgactcaagtttaaacccaaaaagtgtgactgaaccatttttacagagtctagcccaccaatgctgatgtgaccggttgtgtatgcgagtgccagaaaatgtgtattctggccggcctgaagctttactggcccaaggatgtgtgagagtncagagatatattt

SEQ ID NO: 557350 - DNA, 134 bp, Homo sapiens
ggtccggataagctaagtatacgtttaaagtaagtctcatgttatctgcccctctgcccacctccaatttgatatatagttgggtcagcttgtcctcccctcccctatctccccaatttctgtgcccatttcaa

SEQ ID NO: 557351 - DNA, 754 bp, Homo sapiens
cactagatcagaccttctgacgcacagacagtaatttgttcttatttgtatacatacaacaatgtggcgagttccttccatttcttgtcgacacacgatagatctctacaaactctatcgacacgatgtaggaaactacataacgcttcattggtggtgtgtcgatttcacgatgtgctaatcaacattattaattttctttccttcaacgggattctaaaaatagaaggttgtgcttgatagcagctgttttttctacattagaagtgggatacctcgcaaggaactacattccagatttaaagaaaagcttggataccattagtgcgaataacagcacattgatcatacttgtactgcatgctatgtcattgagagtataaggacacaccctttacaagacagtgaatggcaagcactatcttatagcttatgatatgctctgagacaatatcgaaggtaacgatcgcacttaggatgctacttgatgtgagcaatatctacacctgttgtagacttcatacggttcatagtttacagagaagttattgatgagtgtggaaactcatactactgttatacgaaattgacagccttcacatatagaaccaagcaacaccatgctcatggctgttgatggaagcggccagtcttgtaccatgggaggagttccaccagcctgcctttgatggagactcctttagaccctgaggaagcgtatcactcttttattgtctactcttgcacatctccg

SEQ ID NO: 557352 - DNA, 250 bp, Homo sapiens
tcaccgcggggatgggatagcgcaaactgccctgcaagggaaacctctattgtacatacctgaaccacaaggatggcatatcttgttcatggaatggtgaattaagtgtgacaggaatgttttgtagacacagtacttagcttgtttggaattttgcctgctaatcctattggcggattcatgattatctagatgtgcatcatccatcactgtccttttcacttagttcgcagtacgtatagtgaaccca

SEQ ID NO: 557353 - DNA, 1277 bp, Homo sapiens
atttttgaaccagcttgtttggccctggtcattcacgggcagcattatgtgaccatcactaaaagctaagtggtatatctgtgtagtttccgtctggaactgctttcccattcccgggaacccatagccgggacagccagggatcccagaacacagagcccaaagttatattaaaccccgactcataaccgtccagcaggcatctctatttaatactgcagcttagttcctgctgggctaaggcattccagaggtaaccagggccctctgggcacaccccatcaaaagccagctacttcgaggcgtgacgtactcctatgtaaactactagtgagtcgaacgtcttgatatattccactctatcttatgatgatactcactgtgtgatcccaacacacctagcaatctcatggactgctaatgtgcccatgcaccagattcctggacatgccaagagcccatgggcatcagcgtgccacaaacatgaacctcatcttcaatacacctacccataaggggaaaccccctctcggcacacgcggacagacggatcgcgcgtgcctgaacgcggacagagatgaccaccaaaaagccaagacaacactctcggaatgctgattaccagaccagaagagaatgaactggccagcaatgcttaccaggcacaacccaggcacggcgcacaaccaaattagcactcaaacaaccccactgcactgctcaaccagcactcacccttgacaacgtcagcctacgtagccccctttcaacacaatcatccccatgcccctgagaacggcaacttggataccaaacatgccccaaattccaaacggaatcaacctatcgacagagacaacaacaagtgaaactatcgaaacaatgaacttcctcgccaatctaggaagtgattaatctaggactttgtgaaatgtcttcacaacacatggagaatcactatagaagaattgataacatatatgcgcccatgtatatacaccactcacaaaacattcaacatcaattacaaacacacaaagtctctccatcagatcacacatatcaaaacataacaaacaacacagacatctaatcaacaaatctaaccatatcaccaacatacacccacacacacaaacaacatccaacctcacaaatccaataaacaaaaaaccatcacaaccacccccccagctccacctaccaaatactacaccaaacttaatcaacaccccttacccatttaattctccttaaaccacctaccactcaaacca

SEQ ID NO: 557354 - DNA, 164 bp, Homo sapiens
gatatggcacctccgtcagtctttgccgaggttccgcaggcccagcctgtccctggccttcaaggttaattgcgacttcagggaggatccggaccccgaaggcaaccttgggagtgggagcaatcgaacggatgatgccatccctggggttttgccagtagtga

SEQ ID NO: 557355 - DNA, 345 bp, Homo sapiens
tgccatcttcctgaccttgtaaaattgagagaataacgccacggcagtactgcgctgacgccctgtcattcgtaggcacgtttgcggatggctgatggtgtggcagattcacaagtgtcagtgagattcgaagaccatgtctgcgtcgatcatgcgtgaaactcttggtctctatctaataaaatacagaaattatgcctgggtcattggatggcagccatgccctgctaatccccaggtatactcagtgatcgctgcaggcctggagcacatcgccttgatagcctgcggaatggtggagcattcgcgcgctgtacgacttgacgtatttgctgccactttcgt

SEQ ID NO: 557356 - DNA, 466 bp, Homo sapiens
ccagctggctggcttcctggacttcacatatcaagagttccggatccagctttttgtcttcgaagacaagatgaataacctcgtgtggaccagcggtactctcagccctggatggttgaatttcagtcagcctcagaggttgccttctacattgatcaggacatgatccagatcgcggacaccaaggtcgctaggtgtaatggcgatgtcgttcatccgtcagatccacaaatttgaggagcttaatcgaaccctgaagaagatgggacagagaccttgatgatattcacacacattcaggaacctgttttgatgtattataggcaggaagtgtttttgctaccgtgaaacctttacctagatcggccatcagcctgtcaactcagttaacaagttaaggaccgaagtgtttcaagtggatctcagtaaaggatctttggagctaaaaaaaaaaggtccgggaggg

SEQ ID NO: 557357 - DNA, 277 bp, Homo sapiens
cccaggcagacctactcatgacagtgacatcactatctgcaaagtgtcaacacatggaaaatgctgaatatgtcttgattaaagtcaagcagcacagatttctccctgtctccgctaaaaaatacggaaattagctgggcatggtggtacgtgcctgtagtcttagctactcgggaggccgaggcatgagaatcgtttgaacccaggaggcggaggtcgcggtgggccaagattgccccactgcactccagcctgggtgacagacaagactccattt

SEQ ID NO: 557358 - DNA, 107 bp, Homo sapiens
ctggagcctggttactctccacttactttctctctctctctctttctttcttttccgcggagtctctctctgtcgcccaggctggagtgccgtggtgtgctcttggt

SEQ ID NO: 557359 - DNA, 531 bp, Homo sapiens
ttatcaatctttatctgtcacgcgtgaaatgtgtgattttatattggattgcgtgacttctcgaccttgtcccatatccgagtttgcaggggaatcatttcaaacacttttcctgatactaagccgttcacataatagttatattgtcttgttattaacttgtcctcatgtccgtcattgctttctcctgaggatggttttgctgcaatttttgatggaatgttgaagtcagggcatacacctagacgaagtcagacaaagtatgtcttatgtatacagattcaatttaaacaaatgcattattgggcccaccctggccgtctttattcaccctgcttgttgatgtacctatctgtgcttcataacatgtttggatgttcctatccattaccaacaaatgtatgcactgaaaatatcattttgatccagttatatgtagggtgactattttaataactgtaaagcattacttattaaactgcattagttcttttaatcttaattattattatttggtagtgtaaagaagta

SEQ ID NO: 557360 - DNA, 339 bp, Homo sapiens
agtcccttcaggccaacgtgcagcgggttaagggggcccgctccaaatttttcctttttcccaggaagccctcggccccccaaaagggggacagttttttttaaaaatttaaactggcccccccgctggccgggccggttttgcccgtccgggacgttttttaaaaggggaaagcccgggtcttcccttaggaagagaagaattttaaagcctttgcttgtttccgtttgggccgggcccccgcccggttttttggcattcgggcaaaaaaagcccagggagcccccgacccgggtttttaaaaaaaaaaattaagccctcctgggggcttgggttcca

SEQ ID NO: 557361 - DNA, 513 bp, Homo sapiens
tcccctccaatcttgtcagtttttctggtcaaaaacctgaacttgactctctcacacctgcatcatgagccacctttgccctagcttcagagtataaccagaatctcagcccttctctccacctccactgctaccatgtttgtccaagccaccatcacctgtcacctgtcacctggggtactgtggtaaccacccgcagaactccctgtgtctctaaccttgcctctctgcagccatttctcagtaccacagcagaatgctccttcaaaattttgggtcaggccatggtactccaatgtccaaaccctaccttggctctccatttcacttgagtaaaagtcgcatctttctattggccttgaaggccctgtgtggtctggcccctccgttcctctctgactctgtcatcttcaccctcctaccttccaccctctgtgccagcctcactggcttgctcatgttccttgagcacgctatacactgttccctgctgtttcttagccagctccctct

SEQ ID NO: 557362 - DNA, 120 bp, Homo sapiens
gttggcatgagtgtgaagttacaagcctgagaaagagaagggtaagaattggattgcatcttctgtgtgtgagacgtgtggactgtgccaacctctgagtgtgcttagcaccttgtattg

SEQ ID NO: 557363 - DNA, 484 bp, Homo sapiens
accatatctcaattctccattttgtggtatgttgtagggaccctccccttcctttccctttcctttttccaggtggttggctcttacatagtcaagtctgataattcttaaattctattctgtaaccagttaggattttatgttcggttattgattgattccgctgcttaactcactgtgtttatatttccttttgggatcagctttttgtttttacggaagttcctagttgcctttttttttaccttgtactggtcgctttccacacactcacagtgattctcaaatcctccatttaatctactctgctgaatccactcctttcctctctgtatatcctgctttcagcctcccgctctagcctgtttttgatgacctttctgcctatatcctgttgttacactgggactcacctggttctgaatcctgggctttccttttcttaattcactcaatcatttaattttagtcctgtcctcttccc

SEQ ID NO: 557364 - DNA, 532 bp, Homo sapiens
ggccaagctgagtggtccatatctcctgtgcgaactttacccaggtaagcgtgtacaaatatggatatagtaacacctgcatcatgagccacctttgccctagcttcagagtataaccagaatctcagcccttctctccacctccactgctaccatgtttgtccaagccaccatcacctgtcacctgtcacctggggtactgtggtaaccacccgcagaactccctgtgtctctaaccttgcctctctgcagccatttctcagtaccacagcagaatgctccttcaaaattttgggtcaggccatggtactccaatgtccaaaccctaccttggctctccatttcacttgagtaaaagtcgcatctttctattggccttgaaggccctgtgtggtctggcccctccgttcctctctgactctgtcatcttcaccctcctaccttccaccctctgtgccagcctcactggcttgctcatgttccttgagcacgctatacactgttccctgctgtttcttagccagctccctct

SEQ ID NO: 557365 - DNA, 147 bp, Homo sapiens
ccaatctgcttgacacactccggtgacagactgcggcacgagtgatggtgatggcccactgcggtggagttgggcagcagatttcctggtcatgctgaagtctccagtctccgcaaggagagtcatgaccattccgtaccagcccat

SEQ ID NO: 557366 - DNA, 870 bp, Homo sapiens
agcgggtttgggcgtgcggtctttgtctctcgtctggcgctggcacaggaacttgtggatccgtctcctcttctcgcctcctccactttgaggagcccctgggttactactgttcagcagctccctgttgccctgatgatctgtaggtccttggggacgcacaggtttcagatgacaggacataccatggaatgcatgcggaaagtggcatcatatgctggagtaatacggattcatcgaagacccatggctgtgccctacatatgtttcctcctcctgacatcagttcactcagtcaactcaatgccatgtagagcagtgggacggctcttgtgattcccttaattcattcgttgggggcacgtcttaactccaaagtaatcgcaaacaggccacggcacgtgtccttgttgcaaagcgatgcaactcgcagcagcacccgtggctccactcatactttattgacgcagtgcgtaaagcgaagcaggtgtgagacgtgtttgcaaggagtcgacgcgcaagtgcaggcgagggcagttcacaagaccgtgcgaccttgcatcaccatttttgttctgatcgtcgaagcacgaattctcggagggactacgttgttggcgagcgtgtactggacagcgtgaaccttgagacaatgagtgtgggcctttcgatgtgacatcacgtttgacgaatctattcctgggcgaggcatggaattcagatgctccagaactctggggctggtgtctttgagcgtcagtacgttgccgtactttgtatccaagtccatttgttcactaaccgttgggaagcgtgccagattctaaatggcttccgagatcatctactctgattcgcgtcgggagactg

SEQ ID NO: 557367 - DNA, 151 bp, Homo sapiens
ggcacggcacgtgagaggtggagtggctcgggtgcagctggacttgcatgcccactcccaactgggaaagggctggccaccaggaaaacacaagacctggaaagtggaacagaacagaggtggagtggcttgtcccacggactccctgctg

SEQ ID NO: 557368 - DNA, 890 bp, Homo sapiens
atactgacgccaaaatacgtgctgaaaatggaacatgtgtccacgtccctcgtgtggtcctaggtggctgcagcgctccggcactattgcctggcgaagcagaagcctgactgtctgctggccatgatggctctgtcttccttcctgcagatggtgaccatccatctgtccttgggctgggttgttgtacgtggcctggcctgacgttgtgaatgtgtcatgcaaacgagattgtctcaatcaatggcccacgactcgaaagttgatccgttgaagtgacctgaagatattgaggcttgcctaggttgtttgcaagaggaatcatgcctgtggatgctggcttgagtcaatgtgaaccactgttgccgatgtccgctggtgttgtgtttgccttgtgtggcactgtttgccgaccccctgacgcgctccagtccatcgtgtgtgattgcttttgcgatgtgtttgtcaatgttgattgcctgtgctcgtctccgtgggccctcgttttgttcttgaattgcctgcccttggcgattgtggcattttgccgttgggaatttgcatgggttgtttgctccactacgctgtgagtcttccggtcttccttggtgtgggtggttcggcctttgctgagctccctgtgggaacttacctttgaattgtgggaccccttcagttagccttgggtattctcgaatcaatcccaaaagtccacaggacggattggaatgggaccccgggtgacaggctcccgtggaacgcttatttggtccgcctgggaacgagggcctggtctggaacaccggtgaaaggcttttgccttgattggtcccgagtgcgaccacatggtgggggcgtctaacgttcaaaacaactgtgatgctcccagg

SEQ ID NO: 557369 - DNA, 89 bp, Homo sapiens
cacgctgacctcttccacgactatgaaccttagtgcattggtggagttttatgattgactaattttattaaatggattgtttttttttt

SEQ ID NO: 557370 - DNA, 331 bp, Homo sapiens
tgcgcggtgactctagcaggatcccgcaacacttcgtccactccgatatccaccaacagtcaatgtctaggtgactcggcgtgtgcatgcacacgccgaatcaccataccatatcgggtagcaacaacctagggtcagttttgcaggtggtaaagccatttaccaagatagttgtaggtaaagaagggcagatttattagtagaacttgtgaaaatatgttgcagtgggcagctcagcagataaggggctacctgcaaagaggcaagggctggaggaaagttttatagggtcctgctgaagggtgctacgtctggggtttcggcgtgtgca

SEQ ID NO: 557371 - DNA, 80 bp, Homo sapiens
caagcctcctgctccgggggcagaccagactctgactctcctctggggctgctgccattaaaacgctactactaagactc

SEQ ID NO: 557372 - DNA, 618 bp, Homo sapiens
agcggaggcgctcggtactgtcgacccgattgcttcccgccgagggctggtggtgggatgctggatgtgggtcgtggcggggccgagtccgggccgtgggccgtgtgggggaccgggtcggctggcctggtgccgtgcggactggcggcgatggtgctgctaccagtgtatgcgccgagggacgaatggcgagcgtgccagatgcgctctaacgatgatctgacaaggaacctgcggggaaggaccggagatgaaaggcaggcgctgggagggtgagagttgcatgcttgttgggtgcttggggagtcagggaaaggagcaccgatcgtgcatgctggatcgaaggatcatccacgtaggatggcgtactccgaggacggaagtgtccaggctgctaccgtggcggtctgtctacaggatacatccatccatggtagcatcatggtccattgtcaaagcccatgggtcgacctgccagattcgactttggccgactcacctccagaggcggagcgacatccatgggcagctattggcgctgtgctgcaccgaccgaggagcaaggcgtgctcgctgatgaccgtgtccggggtcatccagaggctctgggctgaccat

SEQ ID NO: 557373 - DNA, 477 bp, Homo sapiens
ctagatggtgattccatccctccctccatcaggtgtgtctgtgtattcacgcctcgccgggccgctctgctcagatggtgattccatccctcggaagaagtcttcccacgccttttcatgactccgttgttccgctcaccttgagaggaagggctctagtcctgagcctctccctacccctggggtgttatgtgatgcagacgcagggcggtggggaccgggatgactaggccaacgtgggacagaggaacaggcggaacgtgtccctgaggtttcgtgttgggggacagctcgctctggattaagcaaggcaagaggcccctaggtctcagcgcagggacaggggtttttcagggaaattttgaagacagcctccccgagacagaagaggcaggggaagataggggcttttgagaagtgtcaagccaagaactggatcattctgaaactccttgggggccagctgtgaggggtacc

SEQ ID NO: 557374 - DNA, 999 bp, Homo sapiens
cacgctaggtgcgggccgcgtgtgaatcggccgaggggcaggtgtcctctgggacaagcttccagaggaaggatcaggcagcaatattgctgttctgtagcctctgctggtgatacccaggcaaacagggtctgcagtggacctccagcaaactccaacagacctgcagctgagggacgtgaccattagaaggaaaactagtagacagaaaggaatagcttcaacatcaacaaaaaggacatccacaccaaaaccccattgtaggttaccaacatcaaagaccaaaggtagataaaaccacaaagatggggagaaaccagagcagaaaagctgaaaattctaaaaatcagagcacctcatctcctccaaaggatcgcagctccttgccagcaacggaacaaagctggacagagaatgactttgacgagttgacagaagtaggcttcagaaggtcggcaataacaaacttctccgagctaaaggagcatgttctaacccgtcgcaaagaagctaaaaaccttgaaaaaaggttagatgaatggcttactagaataaacagtgtagagaagaccttaaatgacctgatggagctgaaaaccatggcacaagaacttcgtgatgcacgcacaagcttcaatagctgattcaatcaagtggacaaaaggatatcagtaattgaagatcaaatgatgaaataaaatctgtgattgcgtcctactttaatgacaagactggacaacagcacttaccagagtgcccacctattctttccaaggccatcacaggacgacaggaagttagcggtgtgacacttttagaactggttaaggtcacttcttctggtatgggcctaggaacatcattacgggaggcaaagccctaaggatggatacgggggcgccaacggctcgcgtaagagactccccacataatggcacagctgaaaacccggggatcacctgagacagggcgtggcctcagacaaggggactcacggta

SEQ ID NO: 557375 - DNA, 365 bp, Homo sapiens
gaattcccccccccccccccccccccttttttggagagagagtttggctcttgttgcccagactggattgaaatagggtaatcttgaccaactgaaaccttcacctccgagtgattctcctgcctcagcctcctgagtagctgggattaaaggaacctgaaccactcccagttaatttttgggtttttcagtagaaagggggtttcaccatgttggccaggctggtttggaactcctgtcctcaagtgttctgcctgccttggcttcccaaagtgctgggattacatgaatgagccaccatgccccggcctgccttacttttttaatgaggtttgtgggttttaacttgtaaaacttgtttaagt

SEQ ID NO: 557376 - DNA, 589 bp, Homo sapiens
gatccaattgagctggaccccgcgccctagcctatgagggtacacttgaattctcctttttcgttcccaagacatgtgcaggtcatcatctggccattttcttcctgacggggccacttctcttcaatcttggagttcacaccattggcatggcaccatctaaatgaatcacatctgaaatgaccacttcccaagcctaagctctggcccgacactttaaagcctggtttgaaccttcgttcccactcatttacaacgggataatgggaaactgagtatgggtcaaagcacgaatcattcgtacgttggttcaagccttcgttgacagacttagccaccgtaacaaacctctctccgaaccttatgcctctgctggtctttcagtgcctccactatgatgatgtaggtggcacctctggtgaggcctgtcagagtggcactggtagaagatccaggaaccctgaactgcaagggtgcttcatcagtgccaacaggatgacatgaaatgatgtactcagaagtgttctgcaatggtgcccatgagatggttgtctgagagagagcttcttgtcctgtagaggcatttgga

SEQ ID NO: 557377 - DNA, 297 bp, Homo sapiens
aggatcccttaacaggcgagcccgggtacatggtgaaacgccatctctactaaacaaacaaaaattagccgggcatggtggtgcacacactgtaatcccaggtactcaggaggctgaggcaggagaatcacttgaacccgggagacggaggttgcagtgagtcgagatcataccactgcactacagcctgggcgacagagcaagattccatctcaaaaaaaatgataatcctcctctaatgtccgctgcccagaaggaaataagcaaagaaatctccaaaggatcacaaacgccccc

SEQ ID NO: 557378 - DNA, 834 bp, Homo sapiens
  misc_feature (22)..(22): n is a, c, g, or t
  misc_feature (63)..(63): n is a, c, g, or t
  misc_feature (80)..(80): n is a, c, g, or t
  misc_feature (83)..(83): n is a, c, g, or t
  misc_feature (111)..(111): n is a, c, g, or t
  misc_feature (115)..(115): n is a, c, g, or t
  misc_feature (121)..(121): n is a, c, g, or t
  misc_feature (129)..(129): n is a, c, g, or t
  misc_feature (141)..(141): n is a, c, g, or t
  misc_feature (144)..(144): n is a, c, g, or t
cttccgtcggctgaattgcggncgtatgcgcggctctgtggagtgcacctggggttgggggcnctgtgcccccagtcccntgntcctttggactctacttctgtttgcagncccntttggnctgctggngagagaagaccngcnaggtgtctctaggaggtcatcccctaattggctgggccccctgctagaacctgcttcatatacggcgcagtgcgtcacctaagttccacactgcactattgtgtcggagcagccttggggcctctggcagtggctaatggtgggcaccagtgatccaccacacagcaacccttaagcgtcaacctggaagcctcctgctaatccccttgagcccgatgagggagccatgcatggtagctcctctaaggggacatgcacttcaagatttttcttcatgcctcgtctgttgtgtgtaaccgatggcttcgccattagcagctcttgacaagctacctaaccgttgtccggcattacggtgcgagccataagcgcttttgcgggcaacgaccgatcatctcatctcgatacgtcgcgttgggtgccgattgtcctctctgggagacaagcagtcacgtgacttcattgtggagtcactgcacactcgcttgaggtgccatggattgtcaagtgacaccctgcatgacacgacccgtacctatggacctgtttgccaagtggcaagccttggccattcgagggtccagtgccattttcgcaggtcgcagcctgatacaggccaatcccctctgcctacctgcacacaggagacacctgtcagctatgaggtggccctggttggagcctctccca

SEQ ID NO: 557379 - DNA, 679 bp, Homo sapiens
gggggatccaggcatgagccacgaccggacgagatatctttgcctcctcaatatctatgtgctcctccctcaacccttgggggcttcagtgtaggtggtcagattccccaccatttatgcctatgatgacaagagtggaaactggtaataactggatggtgtcactaaactacgaaatactttcagatgcgtgccagggtccctgaagagggaagacacgcggacacaggcttgcacccagacacagaaccatgcatctcctcgagcatggtcgtcctgcatcctggcacccgtgaaatgcctctacagcctgggagggggcctgcgtctggatcccctgtgagcctacagagccctagatggtgacctggaaagcttcatcctgttccacaagtcctgagtataacaagaacacctcgaagcttcgatgggacaagactctatgaaacgcgacaaaggatgggacggttccttctgagcagaaccagggtgcaaactttcctgggagacaagaatacgaactgcactactgagtatccacccggtgcacctcaattagaccgttggtcaaccttgggggctgaggcatggagtccaaggactgcagaaaatggttgggacggaattgcacctttcaatgtcatctggacaggcttacccacctcgatatccagtacca

SEQ ID NO: 557380 - DNA, 662 bp, Homo sapiens
catacggaacgtgtaagtccattaaacctctttctttgtaaatgcccagtctgggtatgtctttatcagcagcatgaaaatggactaatacagtaaatggtaccaggagtggggcgttgctgaaaagatacccgaaaatgtggaagctactttggaactgggtaacaggcagaggttggaacagtttggagggctcagaagaagacaggaaaatgtgggaaatttagaacttcctagagacttgttgaatggctttgactaaaatgctgatagtgatatgaacaataaggtccaggctgatgtgttctcaaatggagatgaggaacttgttgagaactgaagtaaaggtgactctgttatgttaaagagactggcggcattttgccctgccttagagatttgtgaaactttgaacttgagagagatgatttagggtatctggtggaagaaatttctaagcagcaaagcattcaacaggtgacttgggtgctgttaaaggcattcagtttcacaagggaacactataacaaaatttgaggggtgccttaaagttcggaaatttgcagctgcaatgccatagaagagaaatcccattttctgaggtgactgggtgctgctaacgcctcagttcccacggacactggtgccaattggggggctca

SEQ ID NO: 557381 - DNA, 232 bp, Homo sapiens
tgctgaggtcgactagagttcctctgaaggagagagactttgcttatgttaaagatggtaacagatctgatcaagacttggactctcttggaggaccttagtcaaactcctagtctccacctgagacctggagagaagttgaagcacaactcccttaaggtctccaaaccagacggtgacgcctgcgggaccatctggggcacctgcttccacccgtctctctgcccaccat

SEQ ID NO: 557382 - DNA, 343 bp, Homo sapiens
caggtagtatgaactatactgtcccaggctacaggaatctctggtaattcatgactgtgcttgcgcagagacgggttgcaccagagaaggtggaatcccaaatgttgatggtgcggccaaagtgctgtggtctgagtggacaggtgcctcattagcctactattgccatccccctatatcttggactcctcctccatatttcaatagagagtatggtggtagacatgaccaagcggcttcaatctggaagcacacgggcaaacagaacaatgcacagcagcatcagcagccatcacagggccctcatttggcccatagctatccttttccagtcttccggtct

SEQ ID NO: 557383 - DNA, 195 bp, Homo sapiens
tgacagcagcaagacaccagtctcgatggatcacgctcgtgtgctactcaccaccagctgagctttcttgttctccaccaagggtggtgacggtgttaactcctgctcgaaggacagtgtgtctcttcgttggcacgtccccctttgccagcatgccttcttctcggccccggtgccaacagatctctgacttct

SEQ ID NO: 557384 - DNA, 104 bp, Homo sapiens
gtatacaaatactatgcagcgcatacacatacatgcacgacacacaactcacacatgtacatgcacaccaatacatgcacacatacaacacagtacacatacgt

SEQ ID NO: 557385 - DNA, 162 bp, Homo sapiens
tgtcggccggttcgacggactggggctctccctactgctgctcccagcctggctgtgcatgttggcactttctgctcctcctgcctgctcccctccccatcgacgagaatggacaaggagaggagagaagagagctgagtgtgtgcactgctgtgcgttggg

SEQ ID NO: 557386 - DNA, 152 bp, Homo sapiens
  misc_feature (68)..(68): n is a, c, g, or t
aatattgcgggatttgatccctttatgaaccttgtgatagatgaatgtgttggagatggcgatagtgnacacagaacaatattggaatggtggtaatacgaggcaaatagtatcatcatttagaagccttggaatagatgctgtagttgcta

SEQ ID NO: 557387 - DNA, 207 bp, Homo sapiens
cttaattataaataggctcacaaatataaaatagaagtgattattcttttctttcatatgtaatagatgtactgtggtaaaaaggcccactccagcaagtgtaagtccaggcgtattctggaacacagtccatccaagtagcgcgatcgccatcggatgtagtcttgctggatctattctcttttttcttttctttatttttttttt

SEQ ID NO: 557388 - DNA, 193 bp, Homo sapiens
cccgtgtataacatcttaatataactctatattatccataactactaccgcatcctactactcaacattaaactccagacaccacagacccatactactatctcgcacccgcaaaaaagctaacatgacataacacccttaattccatccaccctcactctcccataggaggacctgacacccgactacacag

SEQ ID NO: 557389 - DNA, 686 bp, Homo sapiens
gaaaccccgtctctactaaaaatacaaaattagcaggtgtggtggcacacgcctgcaatcccagctacttgggaggctgaggcaggagaatcgcttgaacacaggaggcggaggttgcagtgagccaagatcgcgccactgcactgtagcctgggcaacaagagtgaaactctgtctcaaaacaaaacaaaacaaaaaacacccctctaaaccacagttttcatacctgtaaaatgagaactacttcatacagttataaggattaaatgaaactgaagggacatcttcaggtacttaacacagtgactgccacagaggttgtgttccgtgatgtgtattaagtgtatctctagaattttatttattcattcgaaaaatatcagatgctttggaaattataatattagtgaaacaaatctctaatctcaaggagctcataacttaaaaggaagaatcaagtacaaagtaactaaaatgtgagatcattggtgatgcatatcatctgaagtgtgaaaagaaagtgttcagaagttcagacctgagagcccactgggtaggcagtgagcaggggaggacacatgaacagggtattgtttggtgcgggtctccagggacccataatattccaataatggtaaaggaaggagcatgagaagaaaagagtccaggaaaaccactgtgtaagg

SEQ ID NO: 557390 - DNA, 121 bp, Homo sapiens
  misc_feature (104)..(105): n is a, c, g, or t
taatgcaaatgtatatgcatatatgtggtgtctgagaaacttcaactagttttttgtctcccaaattatattttctgtgtcagccagtgaggtggctgggaaanncagggagagagttctg

SEQ ID NO: 557391 - DNA, 199 bp, Homo sapiens
atccccccggctatttacaactatctcgccatttacaactatctcaatataagctttgcctttaagcagcttagcaataggtgagatcagtcaaggtacatatgcaagttacaaaacagcatatgtgttagatgtacttttctcaagatctaacgactggcttaaccgcatggacacactcggttgcgtcacttcttgt

SEQ ID NO: 557392 - DNA, 336 bp, Homo sapiens
gcgaggtgatctagaggatcccagcggggaacaatcacttggacaatcacttggaacaatcacttggaacaatcacttggaacaatcactgggaacaatcactgggaacaatcactgggaacaatcacttggaacaatcactgggaacaatcactgggaacaatcactgggaacaatcacttggaacaatcacttggaacaatcacttggaacaatcacttggaacaatcactgggaacaatcactgggaacaatcactgggaacaatcactgggaacaatcactgggaacaatcactgggaacaatcacttcccgctaagtgatggttccccgcg

SEQ ID NO: 557393 - DNA, 301 bp, Homo sapiens
gtgagctgctgtctggagccctgagccggagccctgagcccgaatgaggagtcggtcccggcctcgcgcgctgcccgggatctccgggccctgggtcctggttcggtgatgctccccgggagcaagaggtaggatgattgagccagggatgtgtgtctagtggtttactcgctggtggtgacgtgctgctccatttgatggtaaccctggatcgtggtaaatgcgtatcaaagctcgagtcagggagatggaggaagaagctgagtaagctaaaggagcatacagaacgaggtagagaatg

SEQ ID NO: 557394 - DNA, 161 bp, Homo sapiens
ggggggggggggggccccccccccccccgtttgggggggcttcctggtggggccctgcccggtttccccccccgggtttgggggggccccttgggggggggggccccttagcccgggccccccccgccctccctttttggttttcccttttttttttccca

SEQ ID NO: 557395 - DNA, 567 bp, Homo sapiens
  misc_feature (54)..(54): n is a, c, g, or t
  misc_feature (59)..(59): n is a, c, g, or t
  misc_feature (61)..(61): n is a, c, g, or t
  misc_feature (64)..(64): n is a, c, g, or t
  misc_feature (70)..(70): n is a, c, g, or t
  misc_feature (74)..(74): n is a, c, g, or t
  misc_feature (76)..(76): n is a, c, g, or t
  misc_feature (78)..(79): n is a, c, g, or t
  misc_feature (409)..(409): n is a, c, g, or t
ccttccccttgggcggtgccctaagaatttatgcccttcagaaataagcaaaangcggncncanccttanccancncnnagaaacatccaagcaataaagtggaagactaaccaagatttggacattggaatgtttctgttattctttaagaacagctacaaaaagaaaatgtcaacaaatttttccagcaagctgagaacctgggaattcctgcacggaagacaagagagtagcctctccagtttcagcaaccgctaggtttttattttttttcctggtttttactgtttgggaaatatatattgaaacaagtaatattaataccgcatggggagaaccccaaccaaagaaatctgaaatatatagtaaatgcttttttttccgtttttgttcattttggatgctggngctaaacctccaagtgtcatgatttaaaaaaaaaaaaaatttatgtccttcttatttatttctaggatgaggggaggataacatttttgctttcttatgtgactctctttgaaaatgtgcagtaagaaattcctcaaaaataaaatttttacccttca

SEQ ID NO: 557396 - DNA, 415 bp, Homo sapiens
tgaaaacctatgcataatacataaaaaactcgaatgcagataataattggtcattgatgagtcgagtgacagtagcgaatacgaaagggaatgaacagtgatgagacatcaagagggacagagaagctatggacagggaagagactgagaaacttctagagtaaacagagtaccaggaaaggttctgtgtctcacgtgggcgagatctgggcatgcttacaagatgtcgggtaggagactatatacagtgctcagagtccaggaaaaagagggaacaatcacttctttattgcctgctgtcacctgaacacacagtggtgaacaagacaaagtcctgctctcatatagcttaccttctactaaagacacaccaaaagaccagagacatcaagcaaggaaatcagacaagcgaggt

SEQ ID NO: 557397 - DNA, 601 bp, Homo sapiens
  misc_feature (54)..(54): n is a, c, g, or t
  misc_feature (59)..(59): n is a, c, g, or t
  misc_feature (61)..(61): n is a, c, g, or t
  misc_feature (64)..(64): n is a, c, g, or t
  misc_feature (70)..(70): n is a, c, g, or t
  misc_feature (74)..(74): n is a, c, g, or t
  misc_feature (76)..(76): n is a, c, g, or t
  misc_feature (78)..(79): n is a, c, g, or t
  misc_feature (409)..(409): n is a, c, g, or t
  misc_feature (568)..(568): n is a, c, g, or t
ccttccccttgggcggtgccctaagaatttatgcccttcagaaataagcaaaangcggncncanccttanccancncnnagaaacatccaagcaataaagtggaagactaaccaagatttggacattggaatgtttctgttattctttaagaacagctacaaaaagaaaatgtcaacaaatttttccagcaagctgagaacctgggaattcctgcacggaagacaagagagtagcctctccagtttcagcaaccgctaggtttttattttttttcctggtttttactgtttgggaaatatatattgaaacaagtaatattaataccgcatggggagaaccccaaccaaagaaatctgaaatatatagtaaatgcttttttttccgtttttgttcattttggatgctggngctaaacctccaagtgtcatgatttaaaaaaaaaaaaaatttatgtccttcttatttatttctaggatgaggggaggataacatttttgctttcttatgtgactctctttgaaaatgtgcagtaagaaattcctcaaaaataaaatttttacccttcanaggaaaaaaaagaataaaattccccaacttaaa

SEQ ID NO: 557398 - DNA, 435 bp, Homo sapiens
atcctactgtgtgagacggggcctcactgggcgctctctcacggctcgatctggtggaacgactgtgtgtgtgtgcgtgtgtgtgtgtgtgtgtgtgtgtgtgtcagagacagagcaagcccgagagagccagagcgagccacgagacgaagcgacgggaaagggtatctctctatcacccaggctggagatgcagaggcatgcatcacgactcagtgcagcctcaaactcgtgcgctcagacaagcctcccacctcggtctccaaagtgataggacttccctgtgcttgcccatgagcccaagacagaatgatattcttacaccagagtatctatgtcacacccccaagcagtgacaaacagaacaaaccggacagtcaatgtcaacgttacacactatacactaatctcccctttctctactcatatacggct

SEQ ID NO: 557399 - DNA, 820 bp, Homo sapiens
ggtagttctcacttctgtcatctatcgatgggtcaatacacctgatgaagacatggaggactgggacccatgaacatcctttggtatcagacccgaagcgcaccattgcatcaggattatggggtcttaaaggctgatgaaggcatctcgttcaggggccttctttatcacttgatgatagaagggatattcgttcgtgcgagtatctactgtaatatgacctcccttgttggccgcgtctgtggatgacgacgtttgagactagttcgaggccttcctatgtttcacatgactaaacatgggtgaagtgtgcccagcgtggcgtaggaaaccttggcatgcctgataacccagtctaacggcgcttgtatggttccagataacgcagacatagagcatacttatttgttccaaagtgcagtagagtgagcgctggagcttgattataagttggtccacggactgtcggctgggcatgccgactgaggaaacgaagagatcctacttgcttgtcatttttttgttggatccatgtgagctcaaagataccatccacatcacttcctgattcgttgcccgcatatttcgtcgtttggatcctctgcaaggggtcgatgggcccttttccgtgagcatgtgcggggctgtgaggacgacctaggctcttttacttcgcttctgtgttcagggatatagggcctgagtcttggcggttttgtagtgcgcaggcggttacttggtctggtgtgtggctcgctactttaagggaccacggctagagccgattcatgtcttcttagtcgggtcagggtcctttgca

SEQ ID NO: 557400 - DNA, 591 bp, Homo sapiens
  misc_feature (221)..(221): n is a, c, g, or t
  misc_feature (268)..(268): n is a, c, g, or t
  misc_feature (427)..(427): n is a, c, g, or t
  misc_feature (470)..(470): n is a, c, g, or t
  misc_feature (536)..(536): n is a, c, g, or t
acaagctttagtggcatcaattggtaaaataaagctttggagaaaatttatttatcattggattaatatgtaaaggttgtagagataggtgtgtgagtcattcagatgctagcctttctcgcttttctccactgtttaaaaatataacctttctttagtattttgtaagcttatggaagacagtatctagtatttttaatgaaataaggccctcatctttnacagccagcagtagataaatctggtgaagggcggctgggtttcttanagtggacttccctccccactttgcccgtggccttttcaggcactggaagaaggtcatgtcagtcaacttggtccatgttgctatgatgctctgctccttgtttgctcctatctctactcagaacttcccaaaaaccaagattatattttattcatttcngcatccccagcacagtgcatagaaccaacgcattcgtaccccntgactaaccattcacccaatacatcagtgaatggggttccacgcgtccgccattgttcccctgtgngacctgatggttttaaaactaaataccgtcccccacttcacaccaaaacacacaa

SEQ ID NO: 557401 - DNA, 1031 bp, Homo sapiens
  misc_feature (1026)..(1026): n is a, c, g, or t
attccgatcaggctgcaagccataaccactctccggctgtttatgcctgcacttgaactcatggtcgcttatgggaggatatctccaagctattggacattttgtggagtacagtgggagataccctatcatcgtcatcttcctccaggccttctagtgtcagcttcaccctaaatctagatttttttaattttttcttggttattgacacaggaggtttttcagaataatgcaaacgtaatcttatttcagtctgacatgtcagccatccagaatccagagtttcaacaccattgtggattccaaattgtccatcgtcaataataatttcgctttctagaatttaaggaaaatagaaaatttagttaaaactcttgatgcatacccagtgaacaactgagaaattacccaccttaaagatcgtttataatattaaatctacagcttaaaagcagcccaaggtgaataagcatatttattgtagccctcaataaagaattccctttaaaggaggctagcaaacagtaatggttcttacatactcgttgattggccattatgttaaaaagaagaaaaagaaaactcttcagaaagggctctagaggcactgggaataacttctacactaaccaatgtaccaggactccagggtgctgggccaacgataactcccttcttggaatttcaaacccaaacgtcttggcaccaattaaaatggctaattcctaatgtagtgcaaaatctgaacttggctcaaaagggaattcccccccatatcccaactattcactactggccaggtaaaaagctttaccgaccaggggggacttacctggtatttacagacctgggagggactaacccaagaataacgctaccacaacccttctctaaaaaaatttcacccaaggggaaaaagccggagaaacccacccctttaggtaaaaaacaaccaatcttccgggcaaatttctttcccggttacttaaacggtaatcggaaaccttggacacgggaggggcaagntccct

SEQ ID NO: 557402 - DNA, 100 bp, Homo sapiens
tcaagcatagggacttccgcacaacctctgtgttaggattgacaataatagtggggccatttccattttagtcttttctaagagtcaaccacaggcattt

SEQ ID NO: 557403 - DNA, 81 bp, Homo sapiens
agaaatagaacgaaaatataaagtaaaaagataaaaaagaaaagataaaaataatgtaaaagtaaaaaaagtaaaaaagca

SEQ ID NO: 557404 - DNA, 129 bp, Homo sapiens
agtctctgcaggatccccatacttcgattcgcggagaatggggactatacaaataatagacattaatatatgtagcttctaaatgttctatcaactacccagctggaatcagtgacataggcatgagct

SEQ ID NO: 557405 - DNA, 270 bp, Homo sapiens
tcacactagactatccacgctcatccctccttgagattccttatttattaacaggaagtctgatttttttttttggccgtctttgaggctatattttggggggctgagggggagagattagattattttgacatgggatcccttccataacaggcactttgaaggcaagacatatgttttgaagaagcacacccagcctttgaaatcatagctctccaggggcttttaaagaaagctggtcctcagcactaacaaaatcactacaatagc

SEQ ID NO: 557406 - DNA, 732 bp, Homo sapiens
  misc_feature (23)..(23): n is a, c, g, or t
  misc_feature (139)..(139): n is a, c, g, or t
gaacaaaacagagtatgatacancaatgtagatgaattccagaaacatggtatgcagaagagccaggacacaagagtatacataagttatgtgaaggcgaaactattctatcgtgataaaaatcagaatgctggtgttnatgggagatagaaattaactggaagggggcacaaaggaactttctatgtctctgttatggtggtaaatatatacatttttatatatacatatttatacataggtgtataacctctatcaaaatcaaaactcattctgtgtgcccttttgagaatctccagagaaattgcgcctgtactatatcaatacctatcctcacttcataaaaaattgcactgtcgagcctaatcaactctcacctgaagtgcttcatctattttcctaatggctagcctggtccctgtcctaattaaccttcaaagctgttttaaaactttgctcttctggctatgctctgattccaagagatgtggtagacacgtacattgtcaagattctggcactcctcggagaacgttcaacggttcacacgacacgacactatctaatataaggaagcgccagatacaagcttgtgcacagctcgaaccgcctacgggcaacgttgtccacctgagacgtgcttcacttatcactctcatggtgaactgcatcacctcgctctctcacatcactcatttattgtcttagaagccgcacgggagaacaggagga

SEQ ID NO: 557407 - DNA, 735 bp, Homo sapiens
tggaggaccagtcagaccagcgcgtcatcatcaagctgaacataccatgtgggaaacatttccctggtggacccagatcttgagtgggacatgtcagtagaaggagaactcaccagagaagtttgccctgaagctgtgctcggagctgggcttggcgctggtggacgtttgtcaccaccatacgcatacagcatctcggggacatgctgtagctcggcactcagaagaccttactgccattactagcgagagacgcctctggtcccactagtggcagtttgccatccgtgcaacacgggcgatgcggaccagtggctgcccacttgctggagactcatgacagacagctgagatggagaagaagatccagcagagccaaggactaggaacacgtaggcgtgatgaggcgtctaagcctaacactggccccaggccatggctaaccagccctatcgagcaaaacggcgtcccacggagcatctcaagaagattgggccgcatttcctccatcttctggcaaggacagaggcgaggggacagcccagcgccagtcctgatggatcgggtgaggtgtggagtgggggcttccaggtggcccttacccggcacacattcacatttgttgagccaccagtcctgccccccaccccaccctccatacccctccccagtctctggggtcaggaagaaacctttttaggttgtgttttgttaactgtatatgagccccaggca

SEQ ID NO: 557408 - DNA, 694 bp, Homo sapiens
gctgacgcgggtgtggaggcggcggcgcgtatgggtgccctatggggcctcgtgcacgattctgtcgtgggtcagcaagagggccccgctgaccaggtggctgcagatgtggaaatctggcaactatacaggttacgagttgtggaagggccttgggtcctctctagagaatccagaaccccgaactcgggcacgtaggaatccagctttgtctacaggtgctactccacttgtcgcaccttgctccatggagaaaggatggtactggcgtgtcactaactaggactgtcgttccttggattgctgggcccagtggtagacctgcttcgtgttctatgagaaccggcgtggaaggaccatcgtcttgtgactcgccatctgtcctgcggggcttgaccggccttagcctgtgtgtggcctgccccagggctggctgttaactgtggcttataaagccatcttccagggaagctgcatgttacagtccctgccacgggtggaccgacacttgcagttctacaatatcatcaccgaattctatgcggaacccgggaagaagagctagaacgagcttaggagcctgacttcagccttaagggtcatccaggtgatggatggcgacgcaggctgccccgtatcttctggaggcctaccgcctcgaccagacctgattaccgcgcactatatccggaac

SEQ ID NO: 557409 - DNA, 306 bp, Homo sapiens
gaggtgatctagaggatccccgccgtaccagttgcggagacttgctttcattcagccacatgagcattagtgaggttgggcactgatgttgggcgattaggtctggcttgcagtcgacgttccataggtgtttgatagggttgaggtcagagctctgtgcaggccagtcaagttcttccacaccgatctcaacaaaccatttatgtatggacctcgctttgtgcacaggggcattgtcacgctggaacaggaaaaggccttcccgcaactggtacggcggggagatcctctagatcacccagcaca

SEQ ID NO: 557410 - DNA, 390 bp, Homo sapiens
cttcccaggcctgacctggcagggtcttcctctggatggagaagctgttgacagtctcatttctcaaaatatgcgagatatgctctaagaaacggataggccaggcgcggtcgtcacgcctgtaatcccagcactttgggaagccaaggtgggcagatcacttgaggtcaggagtttgagaccagcctgaccaacacggtgaaaccccatctctactaaaaatacaaaaatcagccaggcgtagtggcccacacctgtaatcccagctactcaggagtctctgagacacgagaatcgcttgaacccgggaggcggaggttgcagtgagctgaggtcatgccactgcactttagcctgggtgacagagcaagactccatctcaaaataaat

SEQ ID NO: 557411 - DNA, 168 bp, Homo sapiens
  misc_feature (41)..(41): n is a, c, g, or t
  misc_feature (52)..(52): n is a, c, g, or t
  misc_feature (113)..(113): n is a, c, g, or t
  misc_feature (146)..(146): n is a, c, g, or t
gagcggaggttcagtaagccgagatcacgccactacactcngcttacactgncatgatgaggaggaggaggatgatggtggtgattatgatagaaatggtgatggtgatgatnacaatggtgatagtagggatggtcttgctctgngcaacaataatgatcataacac

SEQ ID NO: 557412 - DNA, 140 bp, Homo sapiens
gaagttgaggcagagatggagacacctcagccccacctctctggaacaggaaagatgattggggagggaccacaggtcaccgttttaagagggtcttggtgcgccttgggggtggggtggcttcttctcttccttccttc

SEQ ID NO: 557413 - DNA, 850 bp, Homo sapiens
cgggaaatttaagtgtgctgccaccaatactgcccccctgtcgagttttactagcatggtgaccccatcccctgtgccgatgtttcaccccggagatattggtcacacacagctgccccttggtgccccaaaccactcctgtgcctcaagtggggtacaccctgtcgctttcaatgtagctggcgttggtgtccccgcccccccacatcatgtcttgtggcgcaccatcctattaatggaagggggaacgtactcagtggcagtggccgccactaacaatatcattgttggcgccacaacactgtgggtagctagtggtgagctcctactccgatggcggccccccacaaatttgcgaggccgaaccagggtgtacctatgttgccgccccagccagtggatggtgatgaggcccacacctcgtttcacaccatgttgggtgctgcaaacaaaggtggggccacacgcaaactcgttctctctttggcgagcagggatgacaacaaggggagagtgatcatgatcgttggcaccccactggacaaaattggccgcgtctccttatgtcctataaataactctggcgccacacgtctatgacgccgataggcaacacaccactcggcagtctcctcttctctggggagacaactagatagtcgcctccttgtccctcgtactcttgaaatattaccctgtgttcgcatgcagcaccccatcgactgtcttttcatatcagaaacgcatcccgcgcaaaatgcccactgtagtcccacatgtactcccttgaccagaaaactagtttatacttcacatataataaagcacatcccccccaacccacataaca

SEQ ID NO: 557414 - DNA, 167 bp, Homo sapiens
  misc_feature (2)..(2): n is a, c, g, or t
  misc_feature (19)..(19): n is a, c, g, or t
  misc_feature (25)..(25): n is a, c, g, or t
  misc_feature (72)..(72): n is a, c, g, or t
  misc_feature (84)..(84): n is a, c, g, or t
  misc_feature (90)..(91): n is a, c, g, or t
  misc_feature (102)..(102): n is a, c, g, or t
  misc_feature (114)..(114): n is a, c, g, or t
  misc_feature (126)..(126): n is a, c, g, or t
  misc_feature (129)..(129): n is a, c, g, or t
  misc_feature (138)..(138): n is a, c, g, or t
  misc_feature (141)..(141): n is a, c, g, or t
  misc_feature (147)..(147): n is a, c, g, or t
  misc_feature (155)..(155): n is a, c, g, or t
  misc_feature (158)..(158): n is a, c, g, or t
  misc_feature (166)..(166): n is a, c, g, or t
cnttgggttccacactcgngagcantcagcttctcgttacaggaaatgttagagggatcaccagtctgactnataactctagcngctaanntagggactaantttcaaagcatncaccaaagcagntgncactgggcngcngctttnttccagtntcnggcccttna

SEQ ID NO: 557415 - DNA, 600 bp, Homo sapiens
cagcaatccctacactgatcactgtctctaacgtcgactaatttacatatttaaaagtttctttggtattgccgctgtgtttttaaataacttgtctatctgtcttgacttcttagctatggattttgagaactgacttcccgccccggttgaggattcagctttcttactgtgccttcctcatgcacatgtgcctccctcccctcatcctctgggtgttttctatcaccttgtaaagaaatcagtagtctgtgtgtacatttttatgactatgtaaatattattcatggatgacctatctggtgtactatgattgcatttcctttggttttctctgtagttaataatcatctcttttttccatgggcttacttctctatattcctattaccaatttgtggccagaattataaatctcctttcagtacattccaacacactgtgtattctgtgggttgggaacctcctgcaccttctgttcttaatttcaagttggtcctggttaatcattgaaactgctgcacactgtcatcctatggcctccatttactgtcatctggtaggtttcatttgtcattttcctgtgttgggcgataacat

SEQ ID NO: 557416 - DNA, 153 bp, Homo sapiens
  misc_feature (119)..(119): n is a, c, g, or t
  misc_feature (135)..(135): n is a, c, g, or t
tactgcccaagatattctaacaaggaagcacttgtcccatataaggactttaaaaaagcatctttggagctggaagtggtggctccaaagctgggtgtaatcccagctactctgcaggngggcaggcaggagacnatcccttgaacccaggag

SEQ ID NO: 557417 - DNA, 561 bp, Homo sapiens
gaagaaacaaaatttaaagccaaaggaaatgcatcttatagcagagagctggctacctgccaaaccaaacaatccctgagactgcggcagggctgggaagcaagctgagctgccacgctgctaacttgtcaaacatacataccggctttgcttaacaacaatgcgacacgtgcctgctagaagcctaaggaaccaacatcagaagacagatgagctataaatacttagaaagagtacaatccctcgatcaaccaaccaccccaaactttcttcatcctgttcttgaagaagtgcttctttactgggagcgtgacacattcagacctaaggagtcactgagaaatgcagcaaataaagcatagagagcacatttgaataaaaggaccagagaaccaggaaggaacatcaagacatgagatctacagaatcaaagagaaagccctcacattatatcatgagattccaatggcagaaggccactgcagtgcaaagaactaggttctgaaattagtctgcatattttaataaacttatttgcttaattaacacaaaaaaaaaaaa

SEQ ID NO: 557418 - DNA, 98 bp, Homo sapiens
cctagtacggcgcagatgctggacttcggcttagggcggttcagaaagtggctcttctgagcagaaatggctaataaacttagtagctgatctggaac

SEQ ID NO: 557419 - DNA, 414 bp, Homo sapiens
taaatatcacgggcttaagagtttggagtcacaggatgggtgtccgccaagagcctagggacagaacgttgtcagcccctgtgcccggaccctgtggactgtgagaagagcagagtcccacccccaggccttcttagacccaccccgggttttcccagcatccttcctgcaggaccggacccctggctgaaagtacagaaaccctagagtctgcagcccatgtggctgggccgccatgtttccagaatcctctggtctaaggatccagacctcttacggagcccaacagctcaagggacagttagcatgttcatgtgtactgggaggagcaggagccaacagaggtcatgaagatccacaggggctccggttccgaggcccttgggttttatcacccaatgtttcccacccacg

SEQ ID NO: 557420 - DNA, 286 bp, Homo sapiens
tgcgtagggcggtcagtagtagctgcggacatacgtggcctcgtgtgcattggggggcaccacatagtagtagtcttggtacgggctgtagacgcgcacccagatccgcctctcaactttacagaggctccacgagcggatcacacacctgaccttggagcaaacccggcggctcatgggagggacggtggctccagctggggccggggtggagtttgcctccagcagtactgtgtgccatgctagggcatcatccttggtctccgcacagaggtgcaggcggccg

SEQ ID NO: 557421 - DNA, 149 bp, Homo sapiens
cacgaggattattttttttttatggcttcttgctcttggaatgagattctctgttgaatacaaatcctgcacttgcttaagagctcttgcagagttggcattagagcatgggtttaactgtttgggagtgcgtactgacaggagcaaag

SEQ ID NO: 557422 - DNA, 119 bp, Homo sapiens
aggatcccggcgaccgggatcacaaaaaaaaagtatcctatgttacgagctgaaagaagacgactgaggagacgggagactaagggcagtgtgagatgttaagattcaaattttgttat

SEQ ID NO: 557423 - DNA, 899 bp, Homo sapiens
  misc_feature (1)..(1): n is a, c, g, or t
  misc_feature (62)..(62): n is a, c, g, or t
  misc_feature (72)..(72): n is a, c, g, or t
  misc_feature (100)..(100): n is a, c, g, or t
  misc_feature (125)..(125): n is a, c, g, or t
  misc_feature (161)..(161): n is a, c, g, or t
  misc_feature (180)..(180): n is a, c, g, or t
  misc_feature (236)..(236): n is a, c, g, or t
  misc_feature (256)..(256): n is a, c, g, or t
  misc_feature (515)..(515): n is a, c, g, or t
  misc_feature (542)..(542): n is a, c, g, or t
  misc_feature (604)..(604): n is a, c, g, or t
  misc_feature (647)..(647): n is a, c, g, or t
  misc_feature (652)..(652): n is a, c, g, or t
  misc_feature (690)..(690): n is a, c, g, or t
  misc_feature (759)..(759): n is a, c, g, or t
  misc_feature (767)..(767): n is a, c, g, or t
  misc_feature (776)..(776): n is a, c, g, or t
  misc_feature (815)..(815): n is a, c, g, or t
  misc_feature (833)..(833): n is a, c, g, or t
  misc_feature (891)..(891): n is a, c, g, or t
ncccctctttcctttttttttgtctgtttttatttttcctggggtgggttcctcccggctgnttgctttccntcctgggggccccctgggggctcgggcntctgcctcccccctcgtggcgtgcnggggggggccggggtgccccctttcccggtcccggngtgtttcccttccccgggngggggcgggggggggctggggggggcccctgttcgggcggtggggggggcggggcngctcgggggtcctggggggngggggcggctggggggggccggcccgtgggccgtgggggggggtgtgcccgccccgccgcccggtggtggcgggggccccttgggtgttgtgtggtgggtcccggcgccgcgtgtgtgtggcgctcctgccgccggccctggggtgggctgggcggcgggcggcggcggtgctgccggggtgcggtgctgggggtgggggggctctgggctctcccggtggcctcccctgcccccgcgcgcccgtttgcccggctcccntcccggttggggcagagatggcaaagnaaagacagcagatggtgggggcaccgagttctgttccccgtccccgccaggctggctggggngtggctggggggggggggaggtgccaccctggtcctgtggagnccccnccatgtctgccccccgtcagggggcgagacagacagcntttcggggaccctttcgggccacccctacttcttctcccccaaaccacagcctctctgcccaaatgggntggcaaancagcgcccnaaggcccctggcatgtggggggtctgcccgagctggggnagagcagcgtgtgcccangaaggggtgcagctgggttttggcgaatacagtggggggcggggtggtggggaggggntccgaagc

SEQ ID NO: 557424 - DNA, 83 bp, Homo sapiens
tgatgagcttgtacctcatgcattgcccttacccagccatgttggactccagacagctgtggcatgtataaactgtctggagt

SEQ ID NO: 557425 - DNA, 673 bp, Homo sapiens
aactgtgacgtgagcctaatgtcataacaattcactatagcacgcgtagagcgctctgctacctgccacgctaggtcctggacatccggagcacgctactcatagatcagtacctcttatgcatactgatcagcatttgcggcagcatcatgagaattcaaatcagcgccttataagctaatatcgtactctgtatacggggtcaaccgttgaatagttccgtatatgtgactaaccatcatactcttatccttaacggtgacgaaagtgctacagtgtacagacacacaaactgcagttaaaccaccgatcacagcattcatgtattagttcacattggcacgagcaagcactatcgtcatgacatggacttcttaagatgccaaatgctccagcgtgacgacgcgcattacattctgaggcgtgcaactgcttatacagatacgcagtcttcatcaatactacgaacggagtggatgcgcactgggccaagcatttgaaatggcggccgctactgactgagaattactgtggcacaactgttgcgaccttaccagtctgaccctaactagtgcattgtagatcacttctggaggcctagcgttacaccacaatctttagcgaggatcattatagttatgcccttcagaaccaagcctccgctggcccacgt

SEQ ID NO: 557426 - DNA, 547 bp, Homo sapiens
ccgtaaatgatagatatgactcttcaatggccatacaaatccttagagtcattggtacataaggtgacccctcacaaaagagaatcataatatcccagacacagtcttacgaaggggtacgggatttcatacttctgtaagagcccgtttctctcagtggagtgaatggaaaaaaatcaattaatattttaccaacttctgaaaaagtttaatggacacttcgaattatcttaagcagtacaatcggggatgaatgaatgggcctcagtagtactgtacaatagaagacttctggctactttaactgctcaaaaggggagacctggtgccctaatgggtagaaaggtgtggcgggccgagcgcatggctcacgcctataatcccagcacttggggaggctgagagaggtggatcacctgaggtcaagagtctgagaccagccgggacaacatggcaaaacccggtctctactaaaaacaaaaaaatagccaggaggggtcgtaagcgtctgtaatcccagctactcggctgaggcaggaggtgaacc

SEQ ID NO: 557427 - DNA, 386 bp, Homo sapiens
aaaattcaggataactctcctgaggggtgagccaagccctgccatgtagtgcacgcaggacatcaccaaacacagataccaggaattgatccattccctgtggtcacttattctaagggcccaaaccttcaaaggtcaaggtggtgtatatggatgactccacagagagggagcagccacgcctcacttcttgccttaagaagagagaagatatgacactgaagggagtgtgttcacaccctccacgcgggagacgccctctgtccgatcctaccagagacggaaagctgctggctgcaacctttgctgctggcactgctgtcttgctgcctcacggtggtgtctttctacaggtggcgccctacaggggcacctggccagcctcc

SEQ ID NO: 557428 - DNA, 381 bp, Homo sapiens
  misc_feature (149)..(149): n is a, c, g, or t
tcccaaaaacatttaccctttttggaatgccattgtaaaaaagcgtgtgaggataaagggctgatgcaggacccggtgtgggggacaggggcagaggaatggagaaaggtgggatgtaaggtgggaatcacagggtcaaggggcaagangcctccgggcctctgggggcgcatgggcagagagattgggaaagataggatgtcactgtggagatacagtggtcacgggcaagagcctccgggcctcaatagatgggcctccctggattcttatacgttgggagcctgggacagaccaacattgggggattgatagacagacgcaagaatggggcgctatgagaagatatcgccacaaaaatacaggggggcccaacattgt

SEQ ID NO: 557429 - DNA, 217 bp, Homo sapiens
ctatacaggatccccggtggtcaggttcgccgatcagaaagcactcaatgtcgtattataatcgtctctcaatgaagtaatctctactctcgatgatagcttttagattacttctagtcgatgcctgagctctgagcgaaggctgagctctggggtatcgagctcaaattcgttgtcgtggtcgtagctgtaacctgttctacgatccctggcggtt

SEQ ID NO: 557430 - DNA, 1209 bp, Homo sapiens
gcagtagctcccgattgctggctggcaccctgatggacagccctggcggacgacaggacgcgatggcagcgaccgatatagctcgccaggtgggtgaaggtatgccgaactgtccccctgtgctaggacatgtggggttacgacagctatgcctgaccagctggtgaatacgtcctgtcagaccagtggcttctgcttcaatatcctgtgacgtgggagagacaggtttgggcaaagtccaccactcatggacaccctgtaacaacaccaaattcgcaggggagccagacacaccacaaacagcacgggatgtacagcatccagatctaatacctatgacctccaagagagcaaagtgaggctaacgctcacgatcgttagacacagtatggcatatcggaggaccagatcacccaagcaggacagctacaagcctatacgtggaattcatcgatgcacaattcgaggacctacctgcaggaagagctaacgatccgaagagtgctacacacctaccatgagtcccgaatccatgatctgcttgtattccatggccccacgggtcattccctgaagtctctggactcgtgcacatgaagacgcaggaccagcacaggagaccaacatccccaacatcgcaacagaagatcgccacaacggaccagtgaactaccaaagtcccacaccacactccacacagacactagaccgaccaacagacgcatccaagactcaaacaagacccccacccacagcaagactcgacggaccaacacacacaggacaccgagagaccgaccaccccgcccaaacgcacgacacggccagacaagcacacaccgaagacagacaccacacacacacacgccgacgccgacccccgagcgacacactgtccccagcatggcaccgcccacgaccaccacgcgaagccctgcacaacccgtaagagcaaagcaaagatagcaggaacaacagccgacacgcagagcgcgaaacaccataagcgagcacaaagtcgagcgctgaacaaacaaaagcaacacaaccggaatcgaggaacagaacacacaaagcagaactacgagacacaagtagcgcacacaacacaggaacgcagcaacgaaaacgcgagtcacaaggcaaccggcaggcacgcgaagacgaccagacgaggagagcagagaacacaagagcacgacattccaa

SEQ ID NO: 557431 - DNA, 901 bp, Homo sapiens
tgaagacagaaaaagcgcacgctatggtgtttctcacggttaaaaggtttcacctcccgtggtcacgaaccccaagttgccgatatgtgtcccctgattttctttgaagtccatgtcgcccgtcttaaactcccgtgttccctgagtttagcccaactgtttagtgtcgtggaccaagaaggggtttaaaacaacggcacttgctttcgcgtgtagtgatatagaccctgggcgttagcacccggggccatctctgttgttttcaaaccccgaagtgtggctagaacaccaagatccagacacccacgagggttgggccattctctcgccgatcacccttgagaccagtgcggagaatcatgccagccggggtaccctaaggaagagtgcaaggttgtgatgggcacccccgtgattttaaaaggtgttttttctttttacaatgtaaatgagaatggggttgaagcggcaccaagatttctgcgtgacccgcagttctgtggattaccagaggcccaccacggccagttggtagaatctcgtgtgaagggcttttctgggatacgcttagatagtttgacatagccccgtctctgtatgtactctgcatagaccaaggccacacccactcctgcggtgcttttaatgaagggtttcccggactgcgtttctgctcctgaggctctgttttacagtatgggtgatccctctgcttgtattttgtattaaaaaaactaagcgaaaaaggagccctcttcttgttgagcatgttggccttgccccccttatattttttctctttttgggacaaataagccagttatatcttttttcttatctttttttcttttgaacctttttttttttttttttaaaatgctttattaaagggccttttata

SEQ ID NO: 557432 - DNA, 940 bp, Homo sapiens
  misc_feature (10)..(10): n is a, c, g, or t
  misc_feature (69)..(69): n is a, c, g, or t
  misc_feature (82)..(82): n is a, c, g, or t
  misc_feature (135)..(135): n is a, c, g, or t
  misc_feature (155)..(155): n is a, c, g, or t
  misc_feature (299)..(299): n is a, c, g, or t
  misc_feature (328)..(328): n is a, c, g, or t
  misc_feature (370)..(370): n is a, c, g, or t
  misc_feature (414)..(414): n is a, c, g, or t
  misc_feature (549)..(549): n is a, c, g, or t
  misc_feature (568)..(568): n is a, c, g, or t
  misc_feature (571)..(573): n is a, c, g, or t
  misc_feature (579)..(580): n is a, c, g, or t
  misc_feature (585)..(585): n is a, c, g, or t
  misc_feature (587)..(588): n is a, c, g, or t
  misc_feature (593)..(593): n is a, c, g, or t
  misc_feature (602)..(602): n is a, c, g, or t
  misc_feature (604)..(604): n is a, c, g, or t
  misc_feature (624)..(624): n is a, c, g, or t
  misc_feature (630)..(631): n is a, c, g, or t
  misc_feature (635)..(635): n is a, c, g, or t
  misc_feature (637)..(637): n is a, c, g, or t
  misc_feature (641)..(641): n is a, c, g, or t
  misc_feature (645)..(645): n is a, c, g, or t
  misc_feature (662)..(663): n is a, c, g, or t
  misc_feature (672)..(672): n is a, c, g, or t
  misc_feature (929)..(929): n is a, c, g, or t
ggtgaaatgngaaaccagactctgtgcagtagtattaatgggtgggccaggggctgtgaataacatcancctcagtacaacngcaattccagggcccctctaccacaaagatggcttaagcaaaggcagccaganggaagtatgatatccaacangaaggaagtaggcaggggtcactaaagtagctggtggcccagcagatggaaacagaagtatggccccgagggaaggaggcaggtccagggctacagtgctttcaggtactggtgtttctataggggcatttgccacccacatcnttggaaactcccctggcctattgtgacanggcagggctgcctggatcttgaaggtagagaagaagctagangggaggagctgagcctgtgacgtgcatttgtaccaggtccagangggaaatgatgaggctgcaggctatgatggggccactgtgcactaaatgcttggtaccatcctatgaggggacaaggtgcagacccacattcccataggcacttaaacagaagtgaaaagaaaaaaattccattngttcttttttttttcaggngannngcgggnncccgngnnggacngagaggaanangagtaggacagtgggcagangacaanngccngngccnggcncacgggagaagtctggnngggccaggnatgtgggtgtttggtgcctccatctggatagtgccagcaggtacaccaccctgccttatacctgaatggccagctaaataaccatagagcttaaggtctggctcaggtcaggattccctggctccttgccaacaaagcaaaaccagagattcagaaaactcagggcctaggagaaaacagacctgcctttacaaaccccagagctggtcaacctcaggcttcctctcaggaaaaaaatttttttttttgagatgggncttgctctgtg

SEQ ID NO: 557433 - DNA, 1797 bp, Homo sapiens
  misc_feature (1447)..(1447): n is a, c, g, or t
gggtagaacgccccacagccccgcgtcgagacagagagaaagaaaatgatcgaggtggtccttacggatacagtgcggggtgggatgctcataccaaccgcgacgcagtgatgagaggaccatgcgcgctgtgtcccatgtagaataggagacgcagcggggagacactgcagcatgttgcgtactatgcacagcacgggaggtggtatgaggttcactacgagaacggcgagcacaaataaacgtgtgtgggcgtgacagagcgaggtcgagtcgtggggtacaacacacctaactaagatgcgtgtgggggagcaaattcacgcagcggtcactaccgagtacaaggggtgggaagcccaacaacagaaatcactagtgcagtgcggcatggacgagaggggtgggagcagagccagcgaaggggacgaaggcagggggtgacggactggtcgcagtcccgtccatctgttggtggagagggaggggggggacaaggcaccccacgttctactccacacccaaacatatagattaggggtgggtgctggcgatacgactcacagcagggggggtgctgctctaaagtgtatgatgcactactgaagcagagtggggtaggtgtcagacacgcagggtgagtaagatgacaaccattgagggtagggttaatgcgcacgcccaaacgttgggtatgtatgatcgtcagcatgtcgggctctggtcaccaagaagcggggtggtggtcggcgcgcgagcctacactcatgtttgtgtatcgcagagtgggtgtgagggtgcgcgcaaaaggtagcgctgggtctgaaacacacacgctctgccccctcgccgcggtcgtggcgtctcggagtgtgggtcagcactgcagaccacacgcgcgaggggggccacacacgccgcgggctcgggtgcggtggcatgcccctacacagggcgggggctgacgcggcggaggcatcacactctccgacgcacggggtgggtctctctctgcgctgggtgtggggttcgagggacacacacaacacacacaccacacagcacgcgctgggggctgcacacgaagagacacacgcggcgtgcggggagggacaacaagcggagagtggtgtggcgtcgtctcatcacacacgcgcgcgcgcgggatgcgatgtgcgctgtgcgtcgcgcgcgacgggcgcgcactgcacagggggccgcgcactgctgtagatatacacagtggacacggcgagtgtcggctctctgtcgacagcccgagagggcggaccacagcacacacgcgagtgagtgtgtccgtgctccacacacacacacgcctgcgcgcgcggtgtgagacagcggctcgcacgcgcgcgcgcgcgcgcgggcggtgcagagctcagcgcgcagcgcacagcactgcgctgtgcggggggcgcggagngcaacgccacgctaggcgtgtgtactcatgcgcacacacacagcacacacaccacaccgacgcgcgcgcgcggcgcgcgcgcgcgccagtgtgcgcactggtctctccaccacacacaacacgcaagcccccgcacgcgcgcgggagccacaccaccgcgcggggcgctagcgccagggggagtgtcactggagtgggcgggcccaccaccaacacacactcacaccgctcgtcacgtcgcccacaccacaggcgagacaagcgctgggggggggggggggcgcgcacccccccaccgggggggcccccacctgtgtgtgggggaaggtgtgtgtgtgtgtccccccaca

SEQ ID NO: 557434 - DNA, 94 bp, Homo sapiens
tgaaagactttttttaacccccctttttttccctacttcccccactgccagcgggggcccatttaaaaaaataggttaaaggttggtccttcca

SEQ ID NO: 557435 - DNA, 381 bp, Homo sapiens
  misc_feature (129)..(129): n is a, c, g, or t
  misc_feature (203)..(203): n is a, c, g, or t
  misc_feature (281)..(281): n is a, c, g, or t
  misc_feature (340)..(340): n is a, c, g, or t
  misc_feature (370)..(370): n is a, c, g, or t
ttccacaagcctctttgtgactgtagaactattgtagaaaaaaaaagttcttttctatattataaaagaaattatccaacacagtaatattggtacctgtcattttttcacttctgtttaactcactgntagtgactttgatgccttttaaaataagagctttttcatttcattccatctttaaaattttttatctttggtgnagaatattactattttaagaaagataaattctctttaaagagactctagccggtgtgaatagagcttcagatcctctnaaagcccatgtccaaaggaagccccgctatcctgctggtatatagcttttcctggttgnacctctttggctttggtcatggggacttgnagctggggggg

SEQ ID NO: 557436 - DNA, 263 bp, Homo sapiens
ctcagcgtctggagatcggaaatcagaactgaagaaagttcagacaggagctatcacagacatgcgggggccttgcgttgactgccagtatgaaacttatgcttcaaccaattctcatctaacagggttctttccttactgccaattacaatgtctttattgcattcaagtagactcttttcaaacaggataaccatatccatataaatagatcgtctgatcatatactgaatcaaggggatgctttaaataatatatataac

SEQ ID NO: 557437 - DNA, 595 bp, Homo sapiens
tagtatcctcaggctgttgccattctgctcctgctgtcaattttcaagcttcaccagtatcatgtgaataaattggtaaagattagagagtcctgaatcataagctcttatgaggattctcaattttccagtacgtttttgagtattttctcttggattagttaagtctttatgatggctctaagctcagctttagaccatggagtaaaagtggttacagcaggcaggctggttgactagagagtctcactttgtaaggcatttgtccaacttcccctttttcattagcctcaaggagaaaaggtaactgagcaaaagggttactgtactcaaagcatcgaggcaaagaagagacagagaaggagcaatccaggttcatgtgctgcatgagcctttcatttgcgttttgtaaagaatcttttaggcaattttagatttgtataatcctttagatgcctctgcataccgatttaaaatgcatcccgttgtttttgtggcgttttcgatcctttcttttctaatgtgtcccataaataaacagttttatttaaagtttcctcatcgtggccattttaattctaagttgttcctagta

SEQ ID NO: 557438 - DNA, 550 bp, Homo sapiens
tagtatcctcaggctgttgccattctgctcctgctgtcaattttcaagcttcaccagtatcatgtgaataaattggtaaagattagagagtcctgaatcataagctcttatgaggattctcaattttccagtacgtttttgagtattttctcttggattagttaagtctttatgatggctctaagctcagctttagaccatggagtaaaagtggttacagcaggcaggctggttgactagagagtctcactttgtaaggcatttgtccaacttcccctttttcattagcctcaaggagaaaaggtaactgagcaaaagggttactgtactcaaagcatcgaggcaaagaagagacagagaaggagcaatccaggttcatgtgctgcatgagcctttcatttgcgttttgtaaagaatcttttaggcaattttagatttgtataatcctttagatgcctctgcataccgatttaaaatgcatcccgttgtttttgtggcgttttcgatcctttcttttctaatgtgtcccataaataaacagttttattta

SEQ ID NO: 557439 - DNA, 513 bp, Homo sapiens
  misc_feature (6)..(7): n is a, c, g, or t
  misc_feature (47)..(47): n is a, c, g, or t
  misc_feature (56)..(56): n is a, c, g, or t
  misc_feature (75)..(75): n is a, c, g, or t
  misc_feature (93)..(93): n is a, c, g, or t
  misc_feature (100)..(101): n is a, c, g, or t
  misc_feature (166)..(166): n is a, c, g, or t
  misc_feature (205)..(205): n is a, c, g, or t
  misc_feature (311)..(311): n is a, c, g, or t
gccggnnaaaacaaacagcatattagttttacaaggcggccccaccnactacaganagactagatgttaacaaangagccgcgcccccaaccnaaccaannacacacaaaaaaaaagggacacgcacaagaccgcaacagaaaccaaacaagaaagcaacataccnacaaaaggcaggggaaagcagacagccgacaccaaacgngactcacttaagaatcaccgtggaattctataacttagacatacaaacttgtctttcaaatgtacaacactataaatctcttgactttatctttttcaaacactangtaagacaagattatcttatgcacgttatacatgacagtttttacacgcttagacacttataccactcaattccataccaaacattttattactttaaaaagcattttttaaatccttttttttaaaacttatttattttcatttcaaaaaactttccaaaaaacaaaaatttaattgctcattataattttttccaaaaaa

SEQ ID NO: 557440 - DNA, 100 bp, Homo sapiens
gacgtggggagcagagcagcaggagatagaaccttccagaaagtgggcagctagtggtggtgcctatctgggagaagcagcagaagatacacatggccat

SEQ ID NO: 557441 - DNA, 196 bp, Homo sapiens
gatcaagccggtacctgtatgggatgaggattggctggcttcaaggaatatgagggtggtttgatcttctctccagatcactcaaactttctctatgtcagcaatgaacctgtttcactttcttatttgtgtgttcaccagagcactttacatttccttcaagaactttttttttgtggaggtgggaggagaggaa

SEQ ID NO: 557442 - DNA, 138 bp, Homo sapiens
atgggatccccgggccatcaaacccttcatcgaagcaatataagaaggccccccaaatactccgttaatggctgtagtggtctacttgtagggtttcgatgaagggttgatgacaggctttgatgaagggtttgatga

SEQ ID NO: 557443 - DNA, 751 bp, Homo sapiens
gcttgcgctgtgagctgaggcggtgtaggtgcggtaataacatgtctatccccgcatgccgtgcatcgtgacccgccgcccggataggccggccgctgcgggccgagttttccttgcatggaagtgggagatactggggcacggcatggcgcatgaagcacttagcagagtatcacgaagttcacatatcaaaatatcatctgcccgcatgcgcctgtttaggcctgttcacatataatatatgaacgtggctatgccttcatggttgtgatattattgggcttgcaccagattcacagagaggatgaatctgggattagacaggtcagcaggaaaatataaaaggctttgattgatgcagagaagtgtagagatatggcattccttctgaactagaatgtatgtaggtgagggttggtactcaagggaggagctttatctttatatagtgcccttacctatcaaaaggagaaactggacgaggtgtcacatgcgactcagtatgctggtttccactttcgggtcattccttatccacatgggtcctgatcgagtggtgctaattagacgatatttctattctgcagtgccacaggggaatttgtgaccctttggttcccctgatgtattggtctctctgacggtggaacaatacgtaaaaaccattggtggaatccaggccaaatgtgaacctttataaaacctatgacaggtgtgagtgcacaggttcgtgtcgaccaggacaatgatg

SEQ ID NO: 557444 - DNA, 393 bp, Homo sapiens
caccggaccatgctgtgcccacagaaatgtggacgtctgcaccctccctgccgcgcctgttacgggagcccgtacgctgcacctgctctgcgcatggcaccggcttctcctgccccagaagtgtgggcagggcacccgccccagatgcggatggtcacaggcgacatactgaccgacatcaccggtcacaatgtctatgagtacatgctgttcatctccgaccgcttgcgaatgaaccggtatgggtccattacctttggaaacgccatgaagtacacttaagcctcatttggcaccaaggccccacccatggtgcggaagatcgcggtgcgcagggctgcccaggttttctacaacaacaagggctatcacagcatgcccacctacctcaac

SEQ ID NO: 557445 - DNA, 221 bp, Homo sapiens
  misc_feature (1)..(1): n is a, c, g, or t
  misc_feature (89)..(89): n is a, c, g, or t
  misc_feature (119)..(119): n is a, c, g, or t
  misc_feature (150)..(150): n is a, c, g, or t
ngggaaaacgattatccagagaagagacctggccagaacctgggtccctgagtcctagccatgcttcccatgtgccttacttgctgaanacccccggactgcagtgtgaacgtgctgtnaatagtgacacgctgggcttcccacaaggcncacctgaggtcttttaagctgtcttatgcagcctatttcttgttttttgggcctttttttttggagatggg

SEQ ID NO: 557446 - DNA, 451 bp, Homo sapiens
cagcttagagccgtaatgagctgcctttgcacaaaggcagcaaaagtggtttccctacagagttatcttctcaattatttatacttgcaacactttcacataatggcagttttaaaatcaaacaaacaaagcaaactgtacaataaaggaaggaggcaagaaggtgcagggaccttttcctttcttttttgaacaccagaagggatggcaagccacataaagtcaatgaatttggttcctggaaaagtctcaggggccttgcaatgaggcgacatcaaagcatttggagattgccaccttggtgagagattaaacatgctctgcatacctgctttgcttttaatctgtcatatctaaatatatgaaggaatgcaaactttatttcttctgtttgtaagtttgtctttgaaaattcctaatcagaagacttgctactcaccccccacatctg

SEQ ID NO: 557447 - DNA, 765 bp, Homo sapiens
  misc_feature (35)..(35): n is a, c, g, or t
  misc_feature (163)..(163): n is a, c, g, or t
  misc_feature (745)..(745): n is a, c, g, or t
accgagaagcgagaagccgagcaaaaagaccgganggggcgaccagagggaagattaggccggccgcagaccagggaagagtaaaactgccctaggaaccctgccagcccgcaaagtggacccccagaaaaggcaaacgaacaaggaaaacagaggcctcgcncaaaaaacggcgacaaaggtgtttggtgcatttacacgggagggtgggggaaaaccccggaggccacaaaaaaaggacgggggagaaagcccccccccaggaaagggaagggagccgcacacaaaccagaagggcacaacacggggggggggaggggaaacaaggggggcaggacccgtaaaaacaggggggcgaatcaacccggggaggagcgcgggggagtgaaaaaaaggagcccccaaaaaaaaaaaaaaaaaaaaagggggggccgcgtgaaacaccagaccaaagcaaagaagggaggggacggcgcggccacccctctccgagagaggagcgggaaaaagaaaaaaaaagggggggagaagatctcaaaggaaaatgggggggtccccccaccacacaggtgggggaccggggggccggggtcaaggggggtaaaagaggtcaccggagcccaaaaccccaggggtaaagaaaaccggtaacgggagaaaaggggggggaaaacagggggccccacacaggggcacaaaaaaagaaaaatgtgggagaagaaggggataatggggcgccaggatnacccgggggggacacctcct

SEQ ID NO: 557448 - DNA, 258 bp, Homo sapiens
cccggatgtacaagtgccgcgctgtgaaagcagctcgacgtgtagaaccagtttctcatcgtatggagcaagctctttgtgctctggccagcttgatacgtatccacccagttcggggacctttcagcttcccggacttattgaggaaggctgtcagagctctcaccaactcctgctggttcacgttttcttacagtatctccctgcattgtgcgccctccgcgctagtctgtcagggaaaagggatgagatcgggtt

SEQ ID NO: 557449 - DNA, 858 bp, Homo sapiens
  misc_feature (778)..(778): n is a, c, g, or t
  misc_feature (811)..(811): n is a, c, g, or t
  misc_feature (842)..(842): n is a, c, g, or t
gcaaacagtgcaacggggccgcgatccgatgtgccccgccgccccacctgagtgattcccctaggcctaagatccggtgaaatggagacacagagcgccgatctttcagatgcccacagtaaatcatttcagaggagtaatttcagaaggaaaatgggtccaacttgaaaaacacggaccatggatcctacgtgggaaaactagaacttggggatcagtgaaacgtacaaccaggaagagcagctccggatggtgtcgcggtcatccccgtgctgcagagaacacttcactatgagtgtatcttctggtgaaaccagttccgaccccccatggggggctactgcatagagttccccgcaggtctcatagatgatggtgaaacccccgaagcagctgctctccgggagcttgaagaagaaactggctaccaaggggacattgccgaatgttctcccgcggtctgtatggacccaggcttgtccaactgtactatacacatcgtgaccgtcacccttacggagatgatgccgaaacgccaggccgaagcccaagcccggggatggagagtttgtggaagtcatttctttaccccagaatgacctgctgcagagacttgatgctctggtagctgaagaacatctccccgtggacgcccgggtctattcctacgctctagcactgaaacatgccaatgccaagccctttgaagtgcccttcttggaattttaagccccaatatgaccctggccctttttgtaaacgagaccccccggccttnttcactaagactttgtattccacttagtttaangtagatttgcccttagctttttcgtaaaatnaaagccccgaaccaga

SEQ ID NO: 557450 - DNA, 821 bp, Homo sapiens
  misc_feature (377)..(377): n is a, c, g, or t
  misc_feature (381)..(381): n is a, c, g, or t
  misc_feature (385)..(385): n is a, c, g, or t
  misc_feature (407)..(407): n is a, c, g, or t
  misc_feature (421)..(421): n is a, c, g, or t
  misc_feature (504)..(504): n is a, c, g, or t
  misc_feature (571)..(571): n is a, c, g, or t
  misc_feature (599)..(599): n is a, c, g, or t
  misc_feature (654)..(654): n is a, c, g, or t
  misc_feature (698)..(698): n is a, c, g, or t
  misc_feature (711)..(711): n is a, c, g, or t
  misc_feature (720)..(720): n is a, c, g, or t
  misc_feature (722)..(722): n is a, c, g, or t
  misc_feature (728)..(728): n is a, c, g, or t
  misc_feature (731)..(732): n is a, c, g, or t
  misc_feature (735)..(736): n is a, c, g, or t
  misc_feature (744)..(744): n is a, c, g, or t
  misc_feature (748)..(748): n is a, c, g, or t
  misc_feature (758)..(758): n is a, c, g, or t
  misc_feature (763)..(763): n is a, c, g, or t
  misc_feature (768)..(768): n is a, c, g, or t
  misc_feature (770)..(770): n is a, c, g, or t
ggtgctctctctctctgggtcgtttgggtcggcttcggtcgctaccgctcccgctctgccacccccgccaaccgccgctcgggcctccgtcgctgccgcgtcgctttctcgctccttggatcgcacatcctcccagatgcagcgccgggacgaccccgccgcgcgcatgagccggtcttcgggccgtagcggctccatggacccctccggtgcccacccctcggtgcgtcagacgcctgtctcggcagcctgcctgctgcctcacctgtgtccctggggagtgctggagtggggatccctgctggggtgctgccctgggcctcgccctgccacgcagcctgccaccgctgctgcctgccctcggccacgtggtcccngacngcgnacagtgggctgggccagcgccngaccccgctgctgnccccctcggccacagcctcggtcaagatggagccagagaacaagtacctgcccgaactcatggccgagaaggactcgctcganccgtccttcactcacgccatgcagctgctgacggcagaaattgagaagattcagaaaggagactcanaaaaggatgatgaggagaattacttggntttattttctcataagaacatgaaactgaaagagcgagtgctgatacctgtcaangcagtatcccaagttcatttttgtggggaagattcttggacccnagggaatacatcnaagactgcngnagagantgnncannatcttgtntggnacggccatgnagaanccagngnaagtgccaaggggacccatttcccttgatgtcctttctgcttgccttagtt

SEQ ID NO: 557451 - DNA, 527 bp, Homo sapiens
ttagtggaccagattctagtgctcagaagaatcagttggttagagagtcatggagagtggtttcagtttacctacagccaatcctgaacttcctgaagatgtcccttgatgtgcagctggcattccttcgacttctcaccagccgagctacacaagaacatcacataatcacagcaaaaatagccttgcatacatggatcagggccagtggaaatgttaagaaccccctgaagctgatggggtccaaatgaaggtgaattcaaggctgaaggaaatagcaaatacacctacacagttctggaggatggttgcacgaaacacactgggtaatgcagcaaaacagtctttgaataccgaacccgcaaggctgtgagactacctattgaagatattgcaccctatgacattggtggtcctgatcaagaatttggtgtggacgttgcgcctggttgctttttatacaccaaactctatctgaaatcccaaaaaaaaataattttactccatatgtgttcctcttcaactaa

SEQ ID NO: 557452 - DNA, 352 bp, Homo sapiens
gtgcagtgcagattgcagcagatcataatgctccaggaaagatttcctcaagaagataaagtgataaactggccgggcatggtggctcatgcctgtaatcccagcactttgggaggtggaggcgggtggatcacctgaggtcaggagttccagaccagcctggccaacgtggtgaaaccctgtctctactaaaaatacaaaaattagctgggcatggtggcacacgcctgtagtcccaggtactcaggaggctgaggcaggagaatcacttggacccgggaggcggaggttgcagtgagccgagaccatgccactgcactccagcctgggcaacagagtgagactctgtctc

SEQ ID NO: 557453 - DNA, 708 bp, Homo sapiens
ggggtttgttatggttttttttttgtaaagtgtgaataaaaggtatgtttactcatttttcctgaacactgtgttggtaatgtgcatcatgacaatttccagtgaaggtgagctggagctggttggactaatgagactgaggaagcagcttttcctacgatctgcattatgtaatcacaggtccagagagctttatggaagcgggagaggaggagcacttactcatgtgtattgtaatggaggatgtcatcttttcatagatgctggaactagagtgcactgtgttagatgctaaaggtttgagctttacacaaaatgtcttcatctgtattgttatggtctacaatatatttgaattggcggcagcatattaagatgtaatggcctgttatgtcttgaaaatacttgtttgcctcttccaggcatactgcattctgtggatcagttgtgaacagctttcttccaccttatttgtggacagtgataaacttggaactcaagagttgtacgatttcacaagtgttaaccttttcaaagaggaagaactattgggggtctgaggctaatggaacaagtcaacaccaaaatagaatatgatgctttgtgttaacgaaaggtttcatggtttaagatattttccgggtcctaaaataattttccataatctaataatcccttaaatggcataaaaataagttatggttttcc

SEQ ID NO: 557454 - DNA, 923 bp, Homo sapiens
actgctagctaggtgggtgtggtgccgctgcgcgtgcttttgcagttcgctcgtgtgaagtgttttgtggagtggcgacggggcgggtctactggggacgcccctgggtacccccggttttaaccctcaggcgtttcccccttcgagcgcttcccgttttgtggaactccgcaatttgtaggccactaagaagttctccgctccggcccgcatatgcccgtttcccctttctcgggcttcttctcaattcccggaactggcgccacaacccccacgcccccacaatggggtcccacgcaacaccccgcccctttagggggctttaaaccccccaggaggcctcgtgtcaccctcttcctccgctatcaggtgttccgccccctactaggccctgcccaaaggctgcctctgctttttcgggtcgcccccgcgctttctgccagggttctctgtgcgccccctgggcaacacaggtctctagtcctcgcccggtgttcctccttggcgccccgctaggtctcctctcggggcgaagggtgctctcccaggcgcccacgccccgtacaccaggcgctatgccctatgggagcccgatggtcccgctactcagggtggtgcccctcggcggatacagaggccgaggatctttctcagcgtccctctgtacacacaccacaaggaggcgcctctgtctactcagaacgatgggcgccggtgttactaggcaccggttgccacatattactaaccctgcgagcgcacgcagcacaattgcagctaggcacccccgctgccacgcggcttcttacgtcacatctccatcgccggcctagccatggctcccccggggggtcccatccctctaggggccgccgccccccccccaaattccccccaaaaaaacaacaaccacaaacaaaaca

SEQ ID NO: 557455 - DNA, 271 bp, Homo sapiens
tccttacactagtcaagtgaagcagttggagtggagaaggaacaaaaaaatctgtaactggttgtgatcaattagttgtaaagaccgttgcactttgaccagccttttcctttgaaagaaataattttaacatacccagtaaggagaacgggggccgggcgcagtggttcatgcctgtaatcccagctgcttgggaggctgagacaggagaatcacttgaacccagggggtagagattgcagtgagccaagatcgtgccattgcactccag

SEQ ID NO: 557456 - DNA, 373 bp, Homo sapiens
gtggtgatggttacaaacactaaattgcacgcatagaaatagttatggtggctgggagtggtgcgctcatgcctgtaatcccagcactttgagaagccaaggcgggtggatcacctgagttcgggagtacgagaccagcctgatcaacatggagaaaccccttctctactaaaaataccatacttcgctgggcgtgttggcacatgcctggtatccagctacttcggaggctgaggcaggagaattgcttgaacccaggaggcggagggtgagccgagattgtgccattgcactccagcctgggctactggcactaccccttccctctcatgccgagaccctgtggctgaatctccctgtgtctccgagtgtg

SEQ ID NO: 557457 - DNA, 837 bp, Homo sapiens
  misc_feature (83)..(83): n is a, c, g, or t
  misc_feature (134)..(134): n is a, c, g, or t
  misc_feature (351)..(351): n is a, c, g, or t
ggggcatctgggtgctacagccacccccagagcaagagaatgtgcagtatgctggccttgactttgaagcaatcctgctgcancctggcagccctccagataagacccaagtgcccatggtggtcatgcccacngggggacccgattcatcctttgtcactgaacgtggatgctgttcccagcacatgtctttgcaagatgggactttgtcggtactactagtgaatctatacgtggcgtaccacgggctttgggcaggacaaggatcgctctccactcccaggtcgaatgtgggcgcaccgaggatggtgaacggatgtccaggtattgcagtggaacaggtgcgtccangaggaacactttgatgcaagccatgtggtcccttatgggtggttcccatggctggcattcatttgccgtgaccacgttgatcggtcatgtaggccgagagacctagcgagggcctgcgtggctccggaagcccgtgatcaagcatacgcctccatgattgggctccatgtgagcatacctgactggtgcgtggtggaggcatgggtttcgtttgcagcagtgactgccctgtcagacctcagcgtgtgggctgagatgctggagaacatcgccgcatcagatacatgcctcaggtgaagacaccactgtaactgatgtcgggccaggacggaccgtggtgtgcccttcaaagcagggcatggagtattaccgtgccctcaagaaccggaatgtgcctgttcggctcctgctctatccagaagctacccacgcattatcagaggtggaaggtggagtcagacagcttcatgaatgctgtgctctgga

SEQ ID NO: 557458 - DNA, 322 bp, Homo sapiens
  misc_feature (33)..(33): n is a, c, g, or t
  misc_feature (274)..(274): n is a, c, g, or t
gttgcttgacttacaatagggttatgttccagnagacccattgtaaattgaaaataccgtaagttgaaaatacatttaatacgcctaacctactgaacatcccagcttagcctagcctatcttaaatgtgttctgaacacttaacgttggcctttagctgggcaaaatcatctaatacaaaacctattttataatgaagtgtttaatatctcaaataagagtattgtaccacatatcgttatcccagggataatatcagagtacaaaatttgangtacagtttttaactgaatgtgtattgcttgtgccccattataaagtt

SEQ ID NO: 557459 - DNA, 1097 bp, Homo sapiens
  misc_feature (226)..(226): n is a, c, g, or t
ggcgacaacatgcttgcggacctcggcttaatcggaaccataggcgaggatgacgaggtgccggtgcgacggcccgagtctgatctccggggacgaggaagatggaggggcccattgtgctgggcatacgacaaaaagcttctgcgggaatggaaccgcatgtgctgatttcacccctgcattctcgtttctcactgcatgacaggaggcgtgcacgtacgatggncagctgggccctgcgctgatgtcatgagccaactcaatgaatgaacgcacgggcacgccaactacagttacactgacgcacagacttgagaacacgcttcgacaagcagacacaggcacccacccgagtgataacaggcaagcctgaggctctggcgacagttggcatcacacggcacgaagagaaagcacgcgcggcaccacgctcctcgcgacctcagcgcatactgcggacgcacacgttctacatggagaactgtactgaagcgacacggccttccacaagagagtgaccgcccatcgcagacggtgacttacctcactccagcgtgactgcagagacactcgctcgaccagaccgccagaatacttactcgacaccctacgctgcgctcagtcaaacggacagaccgagtgatgccctgcgagccgctaccctggatggcctgggcccgcatagcatgccactcgtcgctctccctgccgcaccggcgctcatcgatcccccggcgcaagtgacccactttctctgctcccatttgtccgctcccgtgccttcgtacccgctccttgaggggccactcgacgaactccgcccctcgggcttgcgaattgccaggacaaggcccttgccggtgccccctggttgcgtgtcctcctctgcgcgcgccccagcccccgtgcgtgtccctccttgtcttccccaccaacctgcccgaccccgcgcctactgaccctgtaccctaccgtctggcgcaccgccgcctgggttgcggctccctgggccctgcccctcacacacacctacctcgacccaccgtgctgcccactcccaccccgcgcttgcccggcctgtgccgatgccgcagccc

SEQ ID NO: 557460 - DNA, 1293 bp, Homo sapiens
agcgggttcctctcggaccggagacggcaaatggcggacttcgacagctacgaggatcgggcctactgcagcttcggcggaggctagagggtccatgcgtgcagttgctggtggctcattgggttccctgtatccagaaggagtagcgccactagtagcccgcgcgcatacacagtgatatcgtacggacacatgctacctttcagatacggcttcatgggcagacgataagatgcttatcgtgtgaaggactctcatgcgattcaacggagttgtacggctaagtcaacgagacaaaggacaacttgattgagatttacgaggacttctggctactagtagaattcggattgaacgctggggtgtccctgataacggaagtgccttgagtatacagacttgggtagcactggatcaggagcgaatccgtgttccactttgtacggtcgtttgtggaccactatcgcatgaatacggccgggcaaagcagccacatgcatacaaaggagcttgcgcctggtggcggaattttctaggaatagacatgggttcgcgaactcgaggtaatttgaaccacgacgttggcctctacgaggtgggaattcggaccttctcctttacagtgtcggagccagaggggggaaggggtcagggtcccgggcggccccaggggacgagatccccgaggggcttgagacaccggatggggcgcaccctctcccgatgggggttggccacagctccagagctaaagccacgaaatgaagttgggagacgccgtaacccgacggtcggccgaagtgaggataaccccgaaacacacagtgggcaggtagtcggcagaggcaagaagagtcccgcagagtcacagggacacatggagcgtgaaagagagggaaaggccgactagggaagggaacgccaactagagaacgttcccacggtcggtttgaaaacatcgctactggagacccaatggtgcgcggctggggagtgtcgcgctcacctacaataagttggcacaacggttaaggaccccagaagattcgcgccaagatctttccttggcataaatttcgtatacatgagggaggcgaggtttggccacaaggggttcgattaagcaatcgaaagagtgacagcggttctgcgcctacacagagacattgtggaagggacgatcgggaaaagttggatgagctctttggcgcggtgtattggcgcgcgagaggggcaagctgggggggcagtatgcgaggtgaggttttatgtagcggcggagtgagacacacc

SEQ ID NO: 557461 - DNA, 1444 bp, Homo sapiens
  misc_feature (383)..(383): n is a, c, g, or t
  misc_feature (497)..(497): n is a, c, g, or t
atctcgcgtgctggcggctgcgtccgagagttcaatacctaaggcagctggaaccgaaccatggtcaactggtgagcgtacccttcaattgccgaatcaacaaccaagatggaggtccacgcagaggtgtctatgtgtgcgacgagattcatcaagacgttattgagcacgagaaggattccgccctatgtatagtgctcattgaagagttcaattggcaaagactataccagaaatgaattcctctcttcaaggaatagcaacgtaccgattgggaacccttgacaggggaaccggtgccaatatcttttaggcgcagtggctcgtgccgatggaaaagtgatcgaattggcaactttcacgagggctctggggttagatantgtcccagtaggagtcttcgagcggatgcgtgcgcatgggaattccgttgcggttggagacgcacttggcgccccgagagtctactcgcctactgcgaagtgaaatgacgccanagctctcgttagcacaatcactgtctcaataccgctcttgggtggactcaagtccctgtagtgaagtaccttttccttggtctataaacaaacgtatagggcaatgagaaaccaatttagatgagccatttcggcgcaagttggatatacttagtacgcggatgcaagttagcgaggcaagaaaagagacgattccgggcgtatagctaagagtatatcaacactctagaagagaaactagggttaggatttaacagagagaagcctaggtgtctaccaggaaaccgtggggaattcctagtggacagtagaccaggggagcgagcaagacccaacaatttggcgtatattcatcaattccaattttcccccctcctttccccaatggggccacaggaaccacggacttgttaggaaaatcctagttaatattaccagggaaacttcaattcataacttctgggcagcggagaaggctcttttggaggctggttgaagtttcttcccctggtgacaagtggtttaacccatatccccgaaccattctgagtgtaaaatggtttcgttacccaggaaaaaaaagaaacaaacaggagggagggcggccaaaagaaaaggcacgcaaaaagaggggcccccaagattgatacacggataccccggattttctttgtgccacaaaggtggccccccaataagagggacgacgatcataaataacagcaaagggacgcgtggaccggccgatgtatcacaagcagtcgcgacgtggggacacagcgttagctcatgacgactcattgtgaagagagccccctatctggcgcagcggcacaatcgtgacagaaaaccactcagcaaaaataatcgaggcaagaaaaatatacagcgcgacgtgtacaaagcacattcatacgaccaggtcaggtataacaacgcaggacaca

SEQ ID NO: 557462 - DNA, 406 bp, Homo sapiens
ccatgtttaccaggctgatctcgaagtcctgacctcaagtgatcctcctgcctcagcctccctgagggctgtgattacatggcgtgagccaccgcgcccagttgagtattatctttacactctaaaccatacggtgttccaccaaagtctcttaactgtatactttagaatagtcagattctgaaatggccggtatataatttactgcataaaatgcatgttgggctgtgagtcaaaaactgcggttgaggttcaggtgcgggttagggacgttgttctctgtatagatcgaggtccatttcggggcttatggataatcacaactggacgtggcacatctatgccgatcgttacccaacagacctgttcctgctagaaggtgggtatggggtcccagggaaggagg

SEQ ID NO: 557463 - DNA, 740 bp, Homo sapiens
atctcggcgcgccaccctagagtttctgtggaccccatgtgcccctctcctctcaaacctctgaaccaagcagtgtggcctggttctctacaggctaacaagtctccaacttctattgagctgcttggcctgtttctttgtcccctgataacaacccagctcttcagtgactacttggcttggtctctcatactcctctcttctccagatctcctgtggttatattgccttttgtcctacaactccactagctccacttcccctgtaattgctcagcttggtccccagagctgtaggtcttctctgtgttctaccactcccacctgtcccagagactgctctgtcacctaacctcatagagctgctctgggaccctaactctgatacttactacaccctctgtaaatgctcagcatgtctctcactcacatctgctcagggttatcctggttcttgagctctcatgttttctttgaccttccccagactttgtgtagctcctcagtcattcctggcatctctctttgccccagatctcctgtaggtgcttgactttgctccatagcaccactcgtccttgttctctgtaagctactgccctgtctctcctgatacagacttgcccaagttatcctatagctgctcagggtaacactcccttcccataaagcccagctattctgtagctgttttccctcatgtcctataccctcacctgcccagtccttccataggtcctg

SEQ ID NO: 557464 - DNA, 400 bp, Homo sapiens
  misc_feature (400)..(400): n is a, c, g, or t
agcaccggcccgaccttagctctcaccatcgctcttatactatgaaccccgctgagaatacccaaccgactggtcaagctgagcctaggactgctatatattctagccacctctagactagacgcgtactcaatcctctgagcagggtgagcatcaaactcagactacgccctgatcggggcactgcgagcagtggcccaaacaatcacatatgaagacaccctagccatcattctactatcaacattactaataagtgcgtcctttctctgcaccgttatgacaacacaggaacacctctgattactcctgccatcatgacccttgaccataccatggtctatctgcacactagcagagaccaaccgcccacttcgatcttgccgtaggatagaccgcn

SEQ ID NO: 557465 - DNA, 932 bp, Homo sapiens
caagaaaacaaacgagagagcaggagtaggacaccatagcccgggaaaaggcacctaaggcaactagcaacacatttgtgcccagcactcgaaaccccggggcccacacacactgggtgtaaccaccggccgctattctttccaagcgggtgatcccgcgtcaaaaccacttcctcacgggcgaactgcgcactcgggaagtacgagacctcgcgcaagtcacgtagggccaccaatgtagcgtgcagcgtcgcccagcccgtcgtgtccgctgaactcccggcggcatccacgcttttgccgcgcgacacacacgtctcccatggtcccaatggggacgcccccccaaggggggcaccacagagtagagccaactctccggggacaccaaaacaaaatggtgccccgaagctttatcccacccccggggcaagaccccacaatgttgcaccccgcgcgaggataacaggtcaccccggcacccccggtgcggcagaaatacgggcacacgaacacacaccaagatccagttgctctgtgctcgcgaaatactagggaaccctgaacccactagtgacgattttccacgggccctcttccaacccggagtgcgtgatgcccgaggaatgaagacgcacgaacttggaagatggggaaatcgcacaaagcagtaaaaatactaggagggaaaaccaacaggggacaccacccccagatgtacctaggagcaggagagcgcacccaaacattatgacgtgggagacccacaacctgggagaacccactttcaacagttttcggcgcccacgaaccgcacgccgggggaaagtcctgccacccgcctccgccacccccgcaagggagagatgtcccggtagtggccccagaacagttccttacaaaaattcttcagggggagcgcaaaaaaaaca

SEQ ID NO: 557466 - DNA, 325 bp, Homo sapiens
caagtagatgagcggtgggcccccatggcggccccgtcgtcgacacggtcatcgggcatcaactcgacccggacctgataggtgacggtgtctgggtgactatcccttccccaccagtaggccgggaagttcgcttgcactggtacggccccagtaaccgcgttgaaatgctcaagtacatagaaacccctggcgatgtacgtatcaaaacacccgcccactatgtgctggaagacctcaagcgcctcgtaaaagtctattggcaagtcagcttgaacgggactgcgcaccgctattccaaagtcgtcacactgcggaattgcgc

SEQ ID NO: 557467 - DNA, 216 bp, Homo sapiens
ttgccagactgggtcgtaaactcttaatctccagctatccttcctcagcctccaaatctgccatccagcaatccttccacctcagcctcggggagggccgggatcacaagccacagaacctagatctctaaataatcttccatagaaatagtaaccataccctctcctatctcaaggcaagaaacagacatgagcctgtcaagaaaagaactagag

SEQ ID NO: 557468 - DNA, 275 bp, Homo sapiens
gaatttaaatccaccttcatcaaactgggaggtggaaaagttgagctgtgacctgaagatccatggctttggaaccagagctggaactgatgaggaaacgaatgtagcaatctctgtaatagtactctacagaaagccaaagaaagcggatccactatgaggcatgacaagtctgacgagctagaagatctccagatatctaagacatttcacagttgataatgatgcatactagtgcatatgtgtgaagcgtgaactagagggatacgcggtac

SEQ ID NO: 557469 - DNA, 549 bp, Homo sapiens
  misc_feature (509)..(509): n is a, c, g, or t
  misc_feature (513)..(513): n is a, c, g, or t
atgttaggaactatttcatacttaggtggctggttccttgagatcaaggactatgtatttttctccctttattactactcatgatgcctgggagaatgctttcttatgtagtgattgaaattcttgtatcattacaaactgtgtttttggtaagtttgcatccctaagaaactcttttcagtaacgatttccacagtccttcatatgatcttgaaatatgatgcctacatctttgtttacctgcccagatattgatcagtatggtaactctgctccagtggttgcttgtgtgtttcaatcacgcatgattcttattggccacattggggcaggaggcggcacattagagggaagaaaaggagcacccaaaggctgatcagaagaagccaaaccagcctagttggtggggaagttagtaaaggtggcaacaagttatatatgggcatataaaaaaaaaagacaataagcccttgagatactgtgtaagcctaaatgatgcacattatggngcangatggaaggaaaaatacaagtgggcagattatcaag

SEQ ID NO: 557470 - DNA, 193 bp, Homo sapiens
  misc_feature (25)..(25): n is a, c, g, or t
gctggtcgatctagaggaccccatngagcgatgaacgtggcactctctcagatggttctttcccacagagcatgctggggtgtagggcaggctcactttctgctctcttctcccattctgaaagggacaccctctcttatgaaaaaagcatttatgtagatattcaggcatttaataaggcccaaattctttc

SEQ ID NO: 557471 - DNA, 144 bp, Homo sapiens
cagttctctggagcgagaatgagcctgtctgttgaaaatcatgcagtactttttccacttcagtcagatcatgaagattccaattagccttatgagttctcacggaaagtaccctgatttgcaagcccctggcctgactttgtg

SEQ ID NO: 557472 - DNA, 808 bp, Homo sapiens
cgccgcctccgccctctgccgccgcagccgcagccatgggcgcgtacaagttcgtgtcggagctatggaggaggaagcagtccgacgtgatgaggttcgtgcagcgcgtgcgttgctgggagtacaggcagcagcccgccatcgtccgcatcaccaggcccacccgccccgacagggcacgccgtctcggcttcaaggccaaacagggttatgtgatctaccgtatccgtgtgagacgtggtggcaggaagcgcccagtgcccaagggtattgtttatggcaagcccaagcaccagggtattacccaactcaagttccagaggaacaagaggtctgttgctgaggaaagagctgggcgcaggcttggtggtcttcgtgtcctcaactcctactgggtgaatgaggacttcacctacaagtactttgaggtcatccttgttgatgttgctcacagcgctgtccgcaacgatccaaggatcaactggctctgcaagcctgtgcacaagcaccgtgagctgcgtggtctcacctctgcaggaaagaaattccgtggtctgcgtggcaagggtcaccgccaccacaagaacaggccctcaaggagagccacctggaagaggaaccagaccgtctccctccgccgctaccgttaagcttacgtggtgttatgtcctgtggaacctgtcctatgctggagtcttttccaccgtcaaattttgctacctttctgtggctgaacgtccaggcatgcctgttgaactatttgctatgtgcctgtgttatgtgaaatttgaatgatttaagtagtccc

SEQ ID NO: 557473 - DNA, 649 bp, Homo sapiens
acgcagcaatgccagcctgcgcataagccgacgccgcatacacagccgcatacagcagcatcatgcctgccgccaccgccgcaggactactatccaagcccgtacgtatgctcagggacccggccccgctacccggagtaggcagcgcaccaccagcctaccagctacggtccccgcccgccactaccaccaacctacgggggcccctgccagggtaccgggccaggcccgactaccgaccccgccgcctagcagtcacctacggcccctacccggggtcgccgcacacccaccccgccaagcagcggggtaccctaaccacacctacctacaggccggaggcccgccgcctaccgcccgcaggcagtacccagggcccggtgtaccagcgcgcctaagcagcggcccagcgtaccgggtaggtaccacaaaggcgcgcaaaactagcctaggccgcggccgaacgccaggtaggccgcgcccgacggcccaaagctaaagcctaggcggaccaccccaagcctaccgcatacgcagcgcgagcggcgaaagccccgccaggagggcccgcccagcaccacccgcccctaaccaccaccaccaccccccacggcgcccccgccccggcgccaccgcgcggaccgcaccg

SEQ ID NO: 557474 - DNA, 585 bp, Homo sapiens
ttacctggtatccccaccccaggcactatcatagcacattgcagccccaaactcctggactcaagtaatcctcctctctcagcttcctgagtagctgggacaacaggcttgcatcactgcacctagctaagccttgcattttttataattgcattgattcaccagaggctagagataaaacagcagctaacaagtaaggaccaactctcatggaacttatttagattttagtggacagagacaagtaaacaagaaaatatcacacagttgtaacaactgtgtaaatataacttaaatggggtaatgacggaaaggaagtgagtagatacttagactgggtgatcaggaaaactctgatatccttggggcttagagtatgccaaggagaggaaagagctagtggtcaaaggccttagggcagaaatgagcgtgaagttcaaggaaataagagaaggttcatgtgcctggagcatagtgttaaagggggaccatgataccgaatgagatttgagaggcagacagtgatcctatcatgtcgggctttaaaagcacccgggtgagttgtttggatcttatttccctttt

SEQ ID NO: 557475 - DNA, 1411 bp, Homo sapiens
  misc_feature (602)..(602): n is a, c, g, or t
gtgcacgtggccgcgactggactggcgacccagattcgggactcacttcatggtcctgggtggtgtggagctgccctgtatacgtgctgttcccctacttcagggtccataatggtagtatggtgccgagggcgaatccgaccacaaaggagacctacgtggggccatgtagtggtactcgcatggttgatttgagatgaattaacacgtgggtccatatctctttatggcacgtggagctcttgtgggagtctacaggccgaacggtggagccgttgaccgctgtgatcatccctccgaatgactttcctcggaggaagagttcagagcagctagtgtaggaagataccttgagagctcagtgcgactcaagagtaggcctactgaatagcgtgactagggtgtgaagttcaagggcaccttggattcaaccaccgagagacgtttcttgcacggagctagagctttgcggcgtgccttgctcgattggagtgacgcttggtggtgttttcccgcgttgcattctcttatgagacgtgggatttgtgctaccgtgggtgagccttgggtgtcaggggccccgcgaaagaaacgacactcgncctgctctacctagttctctgtgagcgaaggaacctcgggcgatgatggcaagggacccacatgtaaaggaatagggtgccggggaagttggtcaactatggtaccttaaagtcacgggaaaatcgtagttgctagttcgaatcatttacccgggcacgtaaattcacgtaaaattgtggcacccgggtagattctcctgctaagagagcccgagcaaagggctacggacgaaaaggaattttccacttctaatccgggtaccaaaatttcggttacatttccgggcgaaaacgcagaggaattggtttgggccttccaagtctttcgaggaaccaattccttttcctgggggaaaatggcccccctaaggggtaagaggccaattggttgccgacggggagaacgaacgtgggtgcggggtgcttccccctcttcctggttggcctttggagaagggctataagggtggggcaatggggagcgcctttttcaagagcgggggctaaggaaatgcatttgggggtgacccctggaagcaaactatgggcgaatgcgaacgagacagtgcgtggcggagagggaacagtccctggaacaccgggggcaaggtaccgtgtggccgacaacgaagccttcgtaccggcgcgaaagaagagtggaacggcccgcattgtggcgcgctggttggcgccctacagctcaacacgtagaagagccgcaacgaatgccaagtgcgtggccgtggacaagtcggtgagtgctgaggagagtgacaatcgaggtggttaccctgtgagctgagcgtcaa

SEQ ID NO: 557476 - DNA, 92 bp, Homo sapiens
gacgacgtataacattttgtatcattcaagtcacacctataaaaaggaaatgttcaaagatctccccatcctgcccttctgtcgtcttctcg

SEQ ID NO: 557477 - DNA, 233 bp, Homo sapiens
acagtctcagggactggtgtcaccatgtacgcatcgcgtgtgatggttcacgcctgtatcccgacactttcggaagcctaggcgggcagatcacgctggaggccaggagtttgagaccagcctggctaatatggacaaccccgtctctactaaaaatacgacaattagctgggcgtggtggcttacacctgtaatcccagctacttgggaggctgcggtgggagaatcgcttg

SEQ ID NO: 557478 - DNA, 170 bp, Homo sapiens
agctggtccaaaaaatcaaaatagctaggtgtggtggcacatgcctgtagcctcagcttctcgggtgggtgaagtgggaggatcaactgagcctgggaggttgaggctacagtgagctgcaaccatgccactgcacttctagcctgggcaacagagtgagaccttgcctc

SEQ ID NO: 557479 - DNA, 193 bp, Homo sapiens
gtatgataaccagggagggtcggtcatacaactgcctcttggataaccagagaacagaagttagagtcagactaactagcatgtggggagttcagtgcttttgctgctttgaagcctatctgtcaattcttcttaaaatacacacatacatatactgccttgggtcctttcgcggcctgattaatgtggctct

SEQ ID NO: 557480 - DNA, 1650 bp, Homo sapiens
  misc_feature (542)..(542): n is a, c, g, or t
  misc_feature (1201)..(1201): n is a, c, g, or t
  misc_feature (1203)..(1203): n is a, c, g, or t
  misc_feature (1477)..(1477): n is a, c, g, or t
  misc_feature (1479)..(1479): n is a, c, g, or t
ctgcggcgtaattacggcacgcagggcatgtctctgagctacatatcaagcagtgtcctgcatacactcatattacatcttcacttccactatataatcatattcaatcacagacatataatcatcatacacaacactcattgcgaatgattcatcatttagtaccttcaatatcacactgcatatcacccatactatcctatatctcatatcactcctcacatcacttctacgagccacatagcaccatatgctcacaataacaatcccaatcaatagatatcacgcacacactgagccaagtcaatcaatcccgatgagaaatacagtacatgacaaccaaatgcatcacaaagctcgcacaatacacaaagatcacacaaccagatgctaactcaaagtcaacaatttctttcacagcacttgtgtgtgcaatccaacaagaaccgactgatagtgagccacaagatgaaatcttggtaaacattaattaaacatagcaccgcacatgacacactagacatagctaatcgtcaacactnattgtaaagacacagcatcactccacagactctgcccataaaatcaagatgacagcaatatcaactatgcgacatagtgtcacaatcaacagttctaaagccacgtccagtactacccactactaatattctatcttagtagagtagtcaacgatgtgacaaactagtacaggacgtcgactagtaagtcttcacatgactatcggactttagacacatcgcttcagacgtttccactactaacaagcatttctccatttcagcctacttccatctctcgacacactaacttgcgttagtgcacaacagactcaggagacgcaacaataacgttctgatacctcagtatgataaccagtatattaaatgtaacgatgacttctaacatagaaattgatgcatgctactacacacgtagatgactcgaagccagagtacatccacatagactagaaattacatacagacatgatatatatacacacaagtgagtagtgcatatgcaagactagcatgataaagatgaaatacaaatagtagcaaacgtatagccatcccaagatggtgtagctctgcaaccattctacatgcataacatcaatatgtcatgcagaagttgtccgacttcaggggagctctcagcaacagcagtgacagancngcaacagagtaactatgtgagaactagatgcatgacagatcgcatgtcatattaatctcatggacagctagtctatacatatgttcatgactatactttgagacatactatatactacaccatgttgtacagtagtcactgcataatatagtacgtcaggacagttaatgatacatgtctgtgtgattcggttagatactaatctacaagagtgtaacattagcacatgcaccgctgcatacacaatctacaacacttggctactactgctagnantactaccttagcgctatgaagacatacgaccatgtagtctgacattggtcacctattgtacgatatgatgatcactggtctgattagaatgttgcatatatacgtatatgacttaatgatacaatacgtactattagctgtgacatactggtattaccttgtataatattc

SEQ ID NO: 557481 - DNA, 842 bp, Homo sapiens
cgcttttgccggacgtgccggtcgcttggtccgcgcaccaggactgtgccttgatcctcccccgtgtgtgagcgcccgggcggatcggatatttgagcgctttctctggggggaagggggcttttccccccttcctaggggggcccgattctcaagaaccctggggagatctgaggagacgcctttgggcttgcagcgcccaggtgccgtgttccccagccatctccccgactcgcgatgtgtctccccccctccgtcgccgggtttcaatagtcatgcctctcttgcgcccgggtgcaacgggtatgtggccacccgggcgccccctctggagagtctcctcccgaaaaggccctcctcttgtggctcggccgccttctgacccttcctgggcttccaaggaaggcttctgtgagtctttctggtgggccgccgccaccttctcccggcccctcctgcgtggccctagaggacttaggatctcctcttgatccaccaatcggggttctttccccccaccccggaattctgtctgctttaacctgggataccaccggagcccttcctggcctggatggtggtctccccagcgttcccccgcgcacagcttgcgtccaccccctgagttggtgcagcatacccctagacttggtgctgcagttgggggaccccctccggagttagatagcgcgcccgggctggggttggcccccggagggtcaggggaccctattttttattccctctttttctcattccccccacattcctcccccccttccattatttttttgtaaagattgaagccctactttttggatgaatatttttgaagctggtta

SEQ ID NO: 557482 - DNA, 442 bp, Homo sapiens
  misc_feature (422)..(422): n is a, c, g, or t
gaattcggtacgagttatcataaaaaggattacaggtatgagccaccacacccagcctgtttgcaaattcattccttcccgagcctttcagcagtggttctcaatttgaatgtgcataggaatatcttagtactgttaaaaatgtagatttcaggccacacttccactaatttgatagggctggtatgggtcctgggaatctacattttaaaaaatatttttaaaataataacttatccgagtcacatggcaccaaagtgtgttagcagccaaaagtatctgttcgggtctgcagcagccccaattcttgcctcctcaggaggacagaaggagagaccgagacaagttttaggagcagggagtgaaagtttatttaaaaagccttaggagcagggaagggaaagggaggaaaaatacacttngggaggaggggcccagcagg

SEQ ID NO: 557483 - DNA, 883 bp, Homo sapiens
gactcggattcgttgcctgagcaatggctgccatccggaagaaactggtgatggttggtgatggagcctgtggataagacgatgcttgtcttcatagtcttcagcgagtaccagttcccagaggtgtatgtgcccacgagtgttctgagaactatgtggcagatatcgaggtgggatggaaagcagcgtagagttggctttgtgggacacagctgggcagcgaagcattatgatcgcctgagggcctctcctatccagataccgatgtgtatactgatgtgtgttgccatcgacaggcctgatagtttagagaaacatcccagagaaagtggacccagaagtcacgcatttctgtccctgaggtgtccatcatcctggtttgggaataggaaggatcttcggactgatgagcacacaaggggggagctggccatgatgaagcgggaggccggtgacacctgaagaaggcggagtatatggcaaacgaggattgtgcgcttttgggtacatggcgtgttcagcaacgaccaaagatggagtgagacaggtgtttgacacgtgggtaccgaagagctggtctggagagtacgactgttgggactgaacaaatctgggatgtcttggttgttgtggaacactctttggtggcatgtaacagagttagttggggtgaaaattgaagtggcgggtcaattgattgtgagtggtagtggatacgggctttagggggatggaataatgagtaaaatagactcagagtatttgcggaggggttgggaaggatttatgttaggatgtcaccggtggcgaagggcttggaaggggtagagctatttggccgtaagagggcagagattaaagagttgaaagagggcttgagggc

SEQ ID NO: 557484 - DNA, 787 bp, Homo sapiens
gagacagaagtgtgagctgcctcggggcaggcacatgggggaaatggggctgaggtgggtctgaagacagatggtccttgtgactacgtaagccagtatctgctgcatcataggagcatcgtacagtgcggtggacgccggcatggtacgtgaggacggtgtcccagatgccaatgctggtgtccattagtgggtcatgtgcactataaactacgagatcacggtctttcatgtcccattacatcatggccgagtatattgcactactttgaaatcgtacaatgaccaagatgcgaccaggatcagaggttccttggggaagacccacctacgaagttggaatgagaccatcagatgtgataagggaaactcttctagatgtcaacataaccaagcttataaaggactaaaaattcatgagtagaacagggaaaatcatcctgactcatgtggtgtgtctttatttttaattttcaaagaggctcttgtatagcagttttgtctattttaacattgtagtcattgtgtacttgtgatatcagtatttcttaagctttggtgactgtttcaatattacccccgtgaaagcttttcttaatgtaacttggagtaccattttaattggcttctatttttaaaaaatcaaaatcattagtcggggcttacctgttcttgtattgtatggcatatacattcttgctgggatatatttctactcctggaccaaaggttgtaagaacaaataagatttcggggagggaatggggaggggcacaaatttattggg

SEQ ID NO: 557485 - DNA, 357 bp, Homo sapiens
atcataactatttatatggctgaatttaggtctttattttgatatgtgttttctatttgtttcatcttatttgttcttctgttcctcctttacaggcttattaaataaaaaaattttagcatatcatttttattcctctatttatagttttaagctatatttatttgtgtgagtatgttttacttgctctagggagcacaatgtgcatactaaccacaacctacttcatattaatactgttaatgcttcatgttaatacaaaataaagttgcgccagcttatctacctccttgaccccttcaccttgtgatattattgtcatacccaaatctgctttacttcctgtgcatttatagt

SEQ ID NO: 557486 - DNA, 228 bp, Homo sapiens
ggtattgtgccatcgtgagtcatgagatcctccctggatgtggaccatgacttgaagcgctgctagttagtgtgaccgagaaggtgctggctgctgtcatactagaggctctgagtgaccaccacatctacctggaaggaaccttgttggaagcataatagtcgtcaccccaggccatgttgccctcagaagttttctcatgaggagatagccattgggccagccgtg

SEQ ID NO: 557487 - DNA, 248 bp, Homo sapiens
agattgtctacatggttgggagcgtgttatgacacagtgaacaactatgctatggacatgctccaatgactattgtcgactcagttggtgttaccctggtgaatctaagccttccattatgtctgccagagacttggagatcagtcacattatcactgtagcccaaagagagaggctattaccacttaatgcggttataaaccaatttattgcaccagcgttgattgcgagtcgtgcatgcaccgaat

SEQ ID NO: 557488 - DNA, 410 bp, Homo sapiens
acccccagatgagaaccactgctctaggtgtttaagaaatacaaataagtatttttattttttcagaaatactttctgaaaattactggtatcaaaataccataccggccgggtgcggtggctcatgcctgtaaccccagcacttcagagaggccggggcgggcggatcacttgaggtcgggagttcaggaccagcttggccagcatggtgaaaccccatctctactaaaaatgcaaaaattatccaggcatggtggcgggtgcctgtaatcccagctacttgggaggctgaggcaggagaattgcttgaacctgggaggccgaagctgcagtgagctgagatcacgcaactgcattccagcctgggcaatgagagggagagtttgtctcaaaacaaaacaaaacaaaac

SEQ ID NO: 557489 - DNA, 158 bp, Homo sapiens
caaaaaattaaccgggggtggtggggggggcctgtagtcccacctccttgggaggcttaggcaggaaaatagcattaacctgggaggtggaggtttcagttaacttagatcctgcccctgccctccagcctgggtgacaaagcaaaattgtgccccca

SEQ ID NO: 557490 - DNA, 874 bp, Homo sapiens
ggagagagaactagtctcgagttttttgggtttttttttatttctgaagcccgggaaaaaacatggcaacagaaataaaaaaaaaaaaagtcgtaaactctacaagcaccgtggatatgtgaggttgggctgcaacaaaaatgtcatctgcattgtgcagatggaaaagagcagaagctgcctgttgcctgtggaactgtcccaagaacactagcactgtaaaacgggccctgctcttgcagaagcacggttgcacccacaagtctccatgtcaagaccaagggcctcctggaaacaccaatctctgacaaaagggagtcatctggggagcccgaaaatcctactcctgggccgggcacagtgggctcacgcaccaacatgggaagaaaccccgttctctactaaagaataccaaaaaataattagccaggctgtgcgtgtgcgcccacctgtaatcccagttactcggaaggctgaggcaggaaaatcaccttgaacccagggaggcagagttggcagtgaatggcaaattgcgccgctgaactccagcctgggcaacagagtgaaactgctctcacaagaaaaacacatattcgcacgggcatggttcccgaagcacactttgtggcaccaaaggtgcaacgagaaaattccccatttctgagtgtcctaagtggggtacctccgaatctaaccacgggacttgggtacagtcacgtgtacagcggggagcacacgtcacactagggaaccgtgtccagtgtacccccggggtgacagcgaagctgcggaatttactacctaggcccaatttcactggttaatccctaattcacaatgtccagaataagcaaatctccatataaggagctta

SEQ ID NO: 557491 - DNA, 336 bp, Homo sapiens
cttttctataaccaaatagacaggaatggaagattctcctcggggcctgaaagcttgcgggatgaataactcctcctcctcaggcccagtcccaaggtacaaacttgcaccagcagcaagatagcagaggcagtaagagagctggctggaagacacgtaccccctgaagatcaagagggaggtcgccctggtactacatagcagtcacgttaggctgggacaattcctgtttacagaggactataaaacccctgccccatcctcacttgggctgatgccattttaggcctcagcctgtctgcatgcaggcgctcattaaaacagcatgttgctcca

SEQ ID NO: 557492 - DNA, 285 bp, Homo sapiens
acacaggcccaggacgcacagatcactcccgtccggccgggagctgacacgggcccaggacgcacagatcactccggtccggccgggagctgacacgggcccaggacgcacagatcactcccgtccggccgggagctgacacggtcccaggacggacagatcactctggtccagcccaaacccagtggcatggacgggacttgctcagaacctgttagtggctcagacaggacgtaaagtgagggttccccagtgctccccaccgcacagaggctggcccctcct

SEQ ID NO: 557493 - DNA, 908 bp, Homo sapiens
  misc_feature (105)..(105): n is a, c, g, or t
  misc_feature (112)..(112): n is a, c, g, or t
  misc_feature (114)..(115): n is a, c, g, or t
  misc_feature (137)..(138): n is a, c, g, or t
  misc_feature (181)..(181): n is a, c, g, or t
  misc_feature (214)..(214): n is a, c, g, or t
  misc_feature (226)..(226): n is a, c, g, or t
gagggccggaagccgcgctcaccggcgacatcgcgtctataagctggtggaggacacgaagcatcggcccaaagaaaacctggagctcatcctgacgcagtggtngagaatntnngagtccggggtgacctggtctnnagtaagaaatctttaggccggatcgactccttctcagggactngctgtatatgcatccctgaaacagaagctgttnagaggagaaatnctgagacagaaggacaatcagagaagatccagaccaaggcaggtgaggcgacagtgaaatctctaaaaagctgcccgcctggaggtagggatgaaggacacaattgttcgaactgggagctgaaccctgaaatagtgtgcccgccattctgatacgaatcttggctggtgagtggtatgcaccagcatacgttaaagttaccagcagagactatcacacggtggggcgaacatatcggtgtgcaggtgaccggtacaactgggcttgaactgtgagcagtggcctatgtctgtcgtgaactttgagacagccaagagccgaagagatgatacgctcggttaaggcccaagaaaggctgcccaagggtcatgggccccaagccagcccgccagatcagaaagcctcgctcgccttccaagggcagcacaacgcagactcgcgagcagcgggaggcgagaagcgcgaagggactggatcacaacccaggtcgaacagagagcatgaaggaaatcggaagactacgacggcgcggaaactgggacccccacgggcctaactggcaacgggaggggcggcacaggacggggcaggacacacgaacaagcagaccgtggccaacgggaggaagcgggcaaggacgagccacaaacgagtgccaaaaaaacagcggcataccgcgaag

SEQ ID NO: 557494 - DNA, 426 bp, Homo sapiens
aatacttccagtcaactgatctttggacaagcaaacaaaaacataaagtggggaaaggacacccttttcaaaaaatggtgctgggataattggctagccacatgtaggagaatgaaactggatccttatctctcatcttatacaaaaatcaactcaagatggattaagggcttaaacctaaaacctgaaactataaaaattctaaaagaaacattggaaaaacccttctagacaatggcttaggcaaggatttcatgaccaagaacccgaaagcaaatgtaataaaaacaaaggtaaatagctgggacctaattaaactaaagagcttttgcatggcaaaaggaacagtcagcagagtaaacagacaacccacagaatgggagaaaatcttcacaatctatacatctgacaaaggactaatatcca

SEQ ID NO: 557495 - DNA, 859 bp, Homo sapiens
  misc_feature (41)..(41): n is a, c, g, or t
aattgtgacttgctgcagaaacactatgtgtcaactccagngatctcgggtctcgagacatgcagagatgcgtcggaataagtgtagtgcaagaacaaggttaggaagaactgatacacaagtatcatggaggagacatctgtgcagtttcagatgtgtgccaagtgtgtaataaagtgatgatgacgagcgtcgtaggaaaatccatggtgagaaagatgaccataggaacccggacaggagtagtgaaattgcctaagatagtgtggtgaatttgtcacattaggccactgatcctacttcatatacctgcaggcgtcagatgatatggcaaagccctgtgtaccaggctcttcaaaaccaaattatcagcatggtgaaatacgcatatttacatgatgataatagtcgatcggtatatggtcggcatgtggacccaatacacaggcgggaattgcataatccgggggttgccccaggttagatagttgacacgttgcttgaatgcattatgagcctagaaagcttcgcgaggttcaggtaatatacctattaatcaatggggctgtgttgacactagggtcatatcaccaatttgtccccgggcactgtataggttctgatcgagtatcaggataaacgggaccggaaaggaggccttagaataaaacccgcggcaacgggctcaacacaccgagggacggtctgggatgccgggccggctgataccaccggcgagaccccagtggacaagaccatagtgacaactctagcgaacaatcaattactgttgctcactatattactcttccagcaacgacacacgcaaccaactagaagacaagaaggcaaaggaagg

SEQ ID NO: 557496 - DNA, 445 bp, Homo sapiens
acattttgtggactgaatacgaccccgactatagaggattcctaccggaagcaggtggtcattgctggtgagacgtgcctgttggacatcctggttaccgccggccagtgaggagtactgtgccaatgccggagcagtacatgcgtaccgcggcaggtcttccctgtgcttgtgtattgccatctaacatagaaccaagtcttcatgacggacattccagacaagtaccaggggcatcactgattggtcaacgggccttgcgaaagtgaacttctggggattggacgggtaggtccccggttcgatgggcggtggttggcgggggaagccacagggtgcgttggaaccgttgagccttgggggcggcgccgtggtggggcggcttcctttggggcgtggtccttcggagggcatgcctcgggccccgagttgccatagtggccat
